United States Patent Application Publication US 2012/0017338 A1 - sequence listing, part 16

SEQ ID NO: 66811 - protein, 241 aa, Zea mays
  Coding DNA Sequence Number=SeqID_25032
MECNGQTSKVILILQLIMDECDRMVELIKSRVRDSTPETHEYGKQEEIPSRNAGIAHDFTGTCRSLSRDRNFTESVPFSSMRMRPGHSSPGFPLQASPQLCTAAVREAKKWLEEKRQGLGVKPEDNGSCTLNTDIFSSRDDSDKGSPVDLAKSYMRSLPPWQSPFLGHQKFDTSPSKYSISSTKVTTKEDYLSSFWTKLEESRIARIGSSGDSAVASKLWNYGSHSRLFENDTFHILIGHR

SEQ ID NO: 66812 - protein, 222 aa, Zea mays
  Coding DNA Sequence Number=SeqID_25033
  Gene Ontology: Mol. function=transcription factor activity; Cellular component=nucleus; Biological process=regulation of transcription, DNA-dependent
  Pfam annotation: Domain name=AP2; Domain location=75-118; Score= -10.5; E_value=0.0085; Accession=PF00847.10; Description=AP2 domain
EQSGHRHAEAAEVQGSEAEALGLLGLRDPPPTPELLRELAIAAAVGYTPWWCQQFEAGLNALLCYLLRCLWAGDGAGRRGSGWARTRRRRTRRGAYDEAARLMSGPSARTNFPLSLSGGGGTLSPTLRAKLEKCCTALAQEPQHGADVSRAGGGRDDDSSSRGAPRPDAGAVKVDPDADGEDQYIEEMIRELTYYGPVEIQHHPSASSGAAAAAACSSSAIS

SEQ ID NO: 66813 - protein, 94 aa, Zea mays
  Coding DNA Sequence Number=SeqID_25034
MDVLQSLCGGCAAPPSPSISLDGQKHGRAQEERDPGGQNMCDDPSFAFLKKQLHGATLMVPTLIIYIRQQGGLSSFDVSNALREVSLALDHVMF

SEQ ID NO: 66814 - protein, 82 aa, Zea mays
  Coding DNA Sequence Number=SeqID_25035
MEIISQWLEGNHSHGRTPIHTSILSGKNMSKNFYKDIMYLQTRIREGEAQKIRRLTQRRSCEAGKLRHVRRKGNRLENEKAI

SEQ ID NO: 66815 - protein, 104 aa, Zea mays
  Coding DNA Sequence Number=SeqID_25036
  Gene Ontology: Mol. function=transferase activity, transferring hexosyl groups; Cellular component=membrane; Biological process =carbohydrate metabolic process
  Homolog annotation: Hit_ID=O22678; Match level="QueryCoverage=90%, HitCoverage=15%, E-value=1e-49, Identity=94%"; Hit description=UDP -glucose:sterol glucosyltransferase
MIWLGIRDMINEFRKKKLKLRPVTYLSGSQGSGNDIPHGYIWSPHLVPKPKDWGPKIDVVGFCFLDLASNYVPPEPLVEWLEAGDKPIYVGFGSLFCTSNFLMK

SEQ ID NO: 66816 - protein, 142 aa, Zea mays
  Coding DNA Sequence Number=SeqID_25037
MGKSNKRKREPTPPSEDFGDSKYSEEEFSSESEGSPAPVSPPVSSDDSDDSQGLAAEVWTYIQVVERSRLKGSDESEYSSDEEDSYEEGGGGDGGDNDDDDDGGEGDDGDDDGDGGSKGGNGGSSRGSNGGGSSKGSNKASG

SEQ ID NO: 66817 - protein, 256 aa, Zea mays
  Coding DNA Sequence Number=SeqID_25038
MGPHEECARELQHCCSQQSALYALKITSQNHRITQCSQITYSQLSSHQCTLHSGTVHTTQSSESSIVQKNPKPEPEMCNLTLLCPGITRREGFETQCEFLWVRAGQKNPNVQFNCFYIGELEQFEREVNAAAFSDKSKSRENAILKFRQFIRAIADQISQVEESLESLRLGSSRTQKHLYSSEHDGDGLASFLSGPSSKDDHAYHSTGTDEIVELKLDNVTLVNGYHSTQEHTTYEHRNSDKDLEGQLISRWSGRT

SEQ ID NO: 66818 - protein, 314 aa, Zea mays
  Coding DNA Sequence Number=SeqID_25039
MANAGLRAYREVLRLVRRLPAETQPYYAKYARQNFVNYRDLAADDDLGALLRRAYTHSTWVLSKYSIDAGKVAVRLKDLTDGHAVISQYKTSGPLMSALSPSSGCCDRSAETRLKPAVDRDSFSSFPLFPLRPCLAHILGHKYCLDGPFVPLCMRRGRLALRLTPEAVVFRGRMIPTTTAGSSAFDSGVHDFVVKSCAVLLPPLATPSSSLAPSLFSGIPAAARPSLATRRRRGPTSILRRLASVGARVPSPGNLGSLHGDRQQSGSSLSSELVDVESACTGHGAAGARWPPLWLGVVKGDYRTTVDLAGCGRD

SEQ ID NO: 66819 - protein, 94 aa, Zea mays
  Coding DNA Sequence Number=SeqID_25040
MAPPWRRRGAQPRPGCLRAAVAPPRLRRENDLVEEPEELAGEAPVQQSVAMRLMVLGIGSGNGCPHCNHCSGEDEAVEGDFEEFQDYDVTEPPK

SEQ ID NO: 66820 - protein, 209 aa, Zea mays
  Coding DNA Sequence Number=SeqID_25041
MAESRPSGRTAPGPTAGGGLHRTPGGRAGLVQDEGTRAPDRAGRGRAASQRHGRAQGHAMAGTYAAPSMTRSGTERKRDGEKGAGRAHLEERRRHGQVQGSSSPAAGRWGKREASGERFARGRVKNASSWEREDEQGATCLRLTGRVLAKRNGEREGTFGSVLHIGDCRLTLDCLSALMPHLARCIDYLFLARLKGKCAFAPFLSILVI

SEQ ID NO: 66821 - protein, 136 aa, Zea mays
  Coding DNA Sequence Number=SeqID_25042
  Homolog annotation: Hit_ID=Q67V89; Match level="QueryCoverage=96%, HitCoverage=19%, E-value=2e-33, Identity=43%"; Hit description=Zinc finger protein-like
MCKQMQGELKLETDTCNMIDEASPIMVQGTETPNHDSGLIASVDFVTLSCSKNDYEVPLTSSSVPVASMEECDMEQINESILVLEEAISDFQELKSRAEHFDSAKKYPSVPKEGMPMALKADHRRPQALSWELFID

SEQ ID NO: 66822 - protein, 106 aa, Zea mays
  Coding DNA Sequence Number=SeqID_25043
MGVPKGCLGGGLSDSSKEWSGDDGEGNGSIGDDDGGDDDSKGDDGKGDDDGSSDDGDDRATAAGVTTSRATLAAATARAMMAVATAPGATAAVAARATTVVARPVA

SEQ ID NO: 66823 - protein, 81 aa, Zea mays
  Coding DNA Sequence Number=SeqID_25044
  Gene Ontology: Mol. function=pepsin A activity; Cellular component =anchored to membrane; Biological process=proteolysis
  Homolog annotation: Hit_ID=Q5Z8N8; Match level="QueryCoverage=63%, HitCoverage=16%, E-value=2e-10, Identity=55%"; Hit description =Aspartic proteinase nepenthesin II-like
  Subcellular localization annotation: CTP_CleavageSite=52; ConfidenceScore=5.32e-01
MGKKVAVPSALAASGLVASDRFFMCFGRNGVGRLNFGDAGGRYQAETPFIARSSRGPNLFPVTRAVLIFADEASGVPFFKK

SEQ ID NO: 66824 - protein, 99 aa, Zea mays
  Coding DNA Sequence Number=SeqID_25045
MKRDASDLDSMKPLDGDHVGAWWTRHRVPGLSGGSRKESEPSRTILGGRPECSIGDFAYSCSIARRQWRCQRFIYNYSKSTVWNTVDYSGQEKLFGKTD

SEQ ID NO: 66825 - protein, 72 aa, Zea mays
  Coding DNA Sequence Number=SeqID_25046
MRLSQNTLSTKLPAKVSMSVFMALWVRFSTLNYRRWKIYWHVTKKNEKIIENVFNTTSQNYRIVTTYAFFKL

SEQ ID NO: 66826 - protein, 64 aa, Zea mays
  Coding DNA Sequence Number=SeqID_25047
  Subcellular localization annotation: CTP_CleavageSite=54; ConfidenceScore=5.40e-01
MARPRTVPRVAVCVSPARPLARVRHGLRSPDSAFVRPRRSSSIAILVLRRELVRPSAVVAGLFN

SEQ ID NO: 66827 - protein, 571 aa, Zea mays
  Coding DNA Sequence Number=SeqID_25048
  Gene Ontology: Mol. function=RNA-directed DNA polymerase activity; Cellular component=mitochondrion; Biological process=RNA-dependent DNA replication
  Homolog annotation: Hit_ID=Q8S463; Match level="QueryCoverage=100%, HitCoverage=29%, E-value=0.0, Identity=83%"; Hit description =Putative prpol
  Pfam annotation: Domain name=RnaseH; Domain location=200-328; Score =14.4; E_value=2.6e-06; Accession=PF00075.14; Description=RNase H
MGCLAALSRFISRLGERGLPLYRLLRKAECFTWTPEAEEALGNLKALLTKAPILVPPAAGEALLVYVAATTQVVSAAIVVERQEEGHALPVQRPVYFVSEVLSETKIRYPQVQKLLYAVILTRRKLRHYFESHPVTVVSSFPLGEIIQCREASGRIAKWAVEIMGETISFAPRKAIKSQVLADFVAEWVDTQLLTAPIQPELWTMFFDGSLMKTGAGAGLLFISPLRKHLRYVLRLHFPASNNVAEYEALVNGLRIAIELGVRRLDARGDSQLVIDQVMKNSHCRDPKMEAYCDEVRRLEDKFYGLELNHIARRYNETADELAKIASRRTTVPPDVFSRDLHQPSVKINDTPEPGVPSAQSEVPSAQPEAPSARPEAPSVQSEVPLASEGEALRIEEKRSGATPDRNWQTSYLQYLHQGELPLDRAEARRVARRAKSFVLLGDEKELYHRSPSSILQRCITVTEGQELLREIHSGACGHHAAPRAFVGNAFQQGFYWPTGGWLTPLELSAPCEGCQFYAKQTHLPAQALQTIPITWPFAVWGLDLVDPLQKGARGLYAPAGSHRQFSKWIE

SEQ ID NO: 66828 - protein, 247 aa, Zea mays
  Coding DNA Sequence Number=SeqID_25049
  Gene Ontology: Mol. function=binding
  Homolog annotation: Hit_ID=Q2R3K8; Match level="QueryCoverage=99%, HitCoverage=51%, E-value=2e-70, Identity=60%"; Hit description =Armadillo/beta-catenin-like repeat family protein, expressed
  Pfam annotation: Domain name=Arm; Domain location=116-156; Score=9.1; E_value=0.89; Accession=PF00514.13; Description=Armadillobeta-catenin- like repeat
  Pfam annotation: Domain name=Arm; Domain location=71-112; Score=7.4; E_value=1.5; Accession=PF00514.13; Description=Armadillobeta-catenin- like repeat
  Pfam module annotation: Pfam domain module=Arm::Arm; Domain location =116-156::71-112
LVSLGTPRAQELALACLQSLTTGDGGDEAQRLRVEAFQEGALGCVSDFLDGRRGDEPGLAPALGLLRNMASFRYIAEIAASGGLAAHAAAALGSDRSATRAEAALALAELCGNAGKAGLRQEAVVADAVPRLVWMLEAKPAGERDAAARALAAVLDASSGCRKAFRKDERGVVNAVQLLDPSAPGVETRFPVSVLLAVAQSRRCRKQMVAAGACGFLQGLVASEVVGAKRLAERLGKGKMLGVFPRT

SEQ ID NO: 66829 - protein, 53 aa, Zea mays
  Coding DNA Sequence Number=SeqID_25050
MLGHFLYLLYKGDPRHIWQQEPRLRGHPPPPLLATARGTVVEIVTATGYSPPS

SEQ ID NO: 66830 - protein, 130 aa, Zea mays
  Coding DNA Sequence Number=SeqID_25051
MGKSKKGGSSSHHSGDKRKREPTPPSKDFGDSEYSEEEFSSESEGSPVHASPPASSEVWTYIWAVEHSGLEGSDESEVSSDEDNSSYSSEEGSGGDDDGEGDGDDRGDGDGDGDGGKGSSGKASGKASLA

SEQ ID NO: 66831 - protein, 221 aa, Zea mays
  Coding DNA Sequence Number=SeqID_25052
  Homolog annotation: Hit_ID=Q5JMH8; Match level="QueryCoverage=49%, HitCoverage=10%, E-value=2e-12, Identity=32%"; Hit description=DNA binding protein-like
MVQRDIEIAVTLYNGQEISDVLGVITQVSALKSVRTQTQESSNVIKEIIIKDINDVTMRLTLWAQQAKAFKLDDVYNPLEQKPIGILFVGCLAKNFQGAYLNGGTTCRWYFNPDIKEAAPYYQSRACRPQDGGYYCSYCKSEAYTLRSQVLDVTQGTNADKGIPTDKGKEIEPHLQSPPKRWLGLYLASWFTAVDLIGGYHQILLQPEDSHKTTFHTHSGH

SEQ ID NO: 66832 - protein, 83 aa, Zea mays
  Coding DNA Sequence Number=SeqID_25053
MANLTDMEQCLSDKFEVVLKLLEDTSLKNISVKMWRLDKVSNKLVGIERKQKDHGKCVEYLQAKVDLSMKSLAQVQQEQLRLS

SEQ ID NO: 66833 - protein, 316 aa, Zea mays
  Coding DNA Sequence Number=SeqID_25054
MARWINVELAHDFSSSSSSIVFSWGSCRCPQFELNSTETRVIARWTSPFAAEPHLAVAGNLRALIAAYPVFPFFPPRDPASPPGPPRSARPSAPAATSVPPVVAQLAREQPRGPFARLAQRRPLPLDCRRGRPSSRHFPPPSLLGPALPPARPTQPSGAARRARSRLAQSPYVPWLPGQLASSPTVRALRVYGRKTTHDFFHSMPLSLPCARSQRIGLARLARGRATARPQRRPGAVRPAQRAARACGPDSARLAASFAVALLSSPRSRVYVALVVAEVSFVYPGLLSVYFMRKSPNPVPNRIVAATRFVVVLVSR

SEQ ID NO: 66834 - protein, 110 aa, Zea mays
  Coding DNA Sequence Number=SeqID_25055
MQTIVNMKTCANSARQRRGGSQVWTAKETERVKFFKTHHDRDGSGPARPPILERVADRWWYLVWASGVDERRAGRDRRWGQRAGKEGQAKAMKESGGGAQALDGERGETD

SEQ ID NO: 66835 - protein, 122 aa, Zea mays
  Coding DNA Sequence Number=SeqID_25056
  Gene Ontology: Mol. function=peptidase activity
  Homolog annotation: Hit_ID=Q2R478; Match level="QueryCoverage=66%, HitCoverage=67%, E-value=1e-08, Identity=33%"; Hit description =Protease inhibitor/seed storage/LTP family protein
  Pfam annotation: Domain name=Tryp_alpha_amyl; Domain location=45-107; Score=8.1; E_value=0.013; Accession=PF00234.12; Description=Protease inhibitorseed storageLTP f
MYSLGYAGIKSSTRKGYTHVVCLSLEALGNKENCDKDKDFIKRQCEKCIGVGRKFPTTQLCCNAIKRADMACVCRSITLEEQLTISVVKVVDVAKECGNPVPPGNKCGTWTVPPQLLGWVHP

SEQ ID NO: 66836 - protein, 131 aa, Zea mays
  Coding DNA Sequence Number=SeqID_25057
  Gene Ontology: Mol. function=peptidase activity
  Homolog annotation: Hit_ID=Q9FM83; Match level="QueryCoverage=78%, HitCoverage=91%, E-value=2e-09, Identity=33%"; Hit description =Arabidopsis thaliana genomic DNA, chromosome 5, P1 clone:MCD7
  Pfam annotation: Domain name=Tryp_alpha_amyl; Domain location=47-116; Score=7.3; E_value=0.016; Accession=PF00234.12; Description=Protease inhibitorseed storageLTP f
MYSLGYAGIKSSTRKGYTHVVCLSLEVFTMLSTHQALGNKENCDKDKDFIKRQCERCIGVGRKFPTTKLCCNAIKRADMACVCRSITLEEQLTISVMKVVDVAKECGNPVPPGNKCGTWTVPPQLLARVHP

SEQ ID NO: 66837 - protein, 166 aa, Zea mays
  Coding DNA Sequence Number=SeqID_25058
AAPQLARGAGASTIGDGAVGFFVPAIAGGGVYEASLPCTPTGGAPYTTQGVPAAGGPDGGDPDGDDDDGGRSSHNTKLFEDIVAGHTWVVGKLPSWCVDRRITSGVQREVADGLNLKYYPCRSTGSTGRLVLRSQSYGLSARSTVIRSMVLPPHWDSAPVPLTAKR

SEQ ID NO: 66838 - protein, 130 aa, Zea mays
  Coding DNA Sequence Number=SeqID_25059
MATEEEWDQDNCPLLKMSKLRSLELHGLIGARHTVELDGTVQWPAVAEFNDLRFVRSNLVQLSLTNTNDAPEDIQHELRNAGFVRSYQQLQPVYRLSYRQGRALATKPEQQGEAGSNKMEQQHQGEEAEA

SEQ ID NO: 66839 - protein, 48 aa, Zea mays
  Coding DNA Sequence Number=SeqID_25060
MSSSSSRGRELLSAVHGDEDEQHDDELLIEEELHIEADQHIVEVQQAT

SEQ ID NO: 66840 - protein, 79 aa, Zea mays
  Coding DNA Sequence Number=SeqID_25061
MGKPIPSLLMLLLCRAINNFCQVFTFPLVTQCSSMDQADDSNRVFILASWGRQILDGRLWYWILGYLLSSSVLWNEEMS

SEQ ID NO: 66841 - protein, 95 aa, Zea mays
  Coding DNA Sequence Number=SeqID_25062
MYEGISSGGCGDSDGVDPSALRGKRKEDAQWMALEVRLVLWVCTSETRESQWAPPSAAQAHPTVIGRITRAEADTGDPPAGARVRAQGHIRATWV

SEQ ID NO: 66842 - protein, 103 aa, Zea mays
  Coding DNA Sequence Number=SeqID_25063
MAHARAYKAPRDLDHTPPHALDLIRAQNHQRLPVHASMSPVKLTACACGPGDTGHPRRQAVHRCDRQDLPEPTQSLVGPLSPPTATSLTESTSSCQSKELLRR

SEQ ID NO: 66843 - protein, 106 aa, Zea mays
  Coding DNA Sequence Number=SeqID_25064
MGKNNKRKHEPTPPSEEFGDSEYSEEELSSEFEGSPAPIPLRESSDGGGLDEDSDGGEDEDDDDDDGDDDDGGDGDGDGGNGGGGSGGKGSTRGGSSTGSIGKASG

SEQ ID NO: 66844 - protein, 51 aa, Zea mays
  Coding DNA Sequence Number=SeqID_25065
MKGLLLGVCFVAEDPKEREYLRQILSGAAPKSIVKGINVILHRLRPVPINR

SEQ ID NO: 66845 - protein, 76 aa, Zea mays
  Coding DNA Sequence Number=SeqID_25066
MGALGLWHRTVRKTKQGERTVASLTGGEDGPTGGRGCAAVAGRHNGAFDWCGGNPKETGHRHDGLACLVTVSGLLQ

SEQ ID NO: 66846 - protein, 557 aa, Zea mays
  Coding DNA Sequence Number=SeqID_25067
  Gene Ontology: Mol. function=triacylglycerol lipase activity; Biological process=lipid metabolic process
  Homolog annotation: Hit_ID=Q6K2K7; Match level="QueryCoverage=85%, HitCoverage=47%, E-value=0.0, Identity=70%"; Hit description=Lipase class 3-like
MLAAHTAGRCGWDGKTIEEVGGRVQGLNLVAGGKRSLKEEATQHVGGGVNHALGTTILRGACNCGLRMSCPHKLAPCSSPCIFLGIYDSCMCANAPIFTGIEQLPQFSHLQELIGLTATDSVELGDIVDPPVIRTATSILPLGWTGLPGGKNAEPLKVDIIGHDLQMCTLFQAQINGNWYSTVIETLPSATSYSPNGELQPTLQKMRILVGQPLKQPPNYISGDFMIPVMAGADSTPDFGFESFFEDKDCCKGLSGFLIYGTSDFVTGAGKTSLLKAMLGQVKERNSTVLECIHVDLHGKGISNGLCYIDSTTVNLQELPLEVGRFKEELLLGLHDISRKTDLVIAVHNLAHRIPQYQRSNTSQPQPALSLLLDEAKALSIPWILAITNKFSVSAHEQNRLISSAMEAYQVSPEMTKVVNSSPFLMPSARNSLQQIRSATGKLKKDPANRSGYLPVNFGLSSFQRKDIVMHVEGVSSLRQLVHQVVLNNEETAFEELARERLLKELASEKAASLQVKQKPRKRDGSVTAAAVGASLGAGLGIVMAVIMGAASALRKP

SEQ ID NO: 66847 - protein, 225 aa, Zea mays
  Coding DNA Sequence Number=SeqID_25068
MVNSLNSEISSLESCWPPRCHKSKRLSQYFSPLANKLVKFDPRGLSIAKGKGSVITSRISVTTIEEVEGVSRTCFDGAGIFFSTQLASEDFRFLRPEDFGPNLETSTSLKTFRFLAATVGHLFLNVVNQEQDNTIVKGRGPSSSEALSPLGYNDLQTKVMKDMPSSFIMIKEETIVEGVADAEAKQTVAEVDSENKDEDDDIILCSNKPNHIEFGRSTVKAEDLV

SEQ ID NO: 66848 - protein, 98 aa, Zea mays
  Coding DNA Sequence Number=SeqID_25069
  Homolog annotation: Hit_ID=Q6K2K7; Match level="QueryCoverage=32%, HitCoverage=3%, E-value=8e-10, Identity=96%"; Hit description=Lipase class 3-like
MGGPLWASRVESWVRDQAARLQPWAAALPQAPRWPWPPPRPAWPWPGDRRRQRERMFREEYERRSRQLRELCRAVRVDTVAELQELLCAMVLAECVYK

SEQ ID NO: 66849 - protein, 392 aa, Zea mays
  Coding DNA Sequence Number=SeqID_25070
  Gene Ontology: Mol. function=triacylglycerol lipase activity; Biological process=lipid metabolic process
  Homolog annotation: Hit_ID=Q6K2K7; Match level="QueryCoverage=97%, HitCoverage=36%, E-value=1e-163, Identity=76%"; Hit description =Lipase class 3-like
  Pfam annotation: Domain name=Lipase_3; Domain location=48-225; Score =32.5; E_value=1.4e-06; Accession=PF01764.16; Description=Lipase (class 3)
RPVSEMMRYINKFKSDFGGNVVSLERVQPSLDHVPHRYLLAEAGDTLFATFIGTKQYKDIIADVNIFQGTLFHEDTAHDLAPDVDPEQNDTQKGEESHGKSYRETSKKLRKPKPAVHRGFLARANGIPALDLYNLAQKRNRKLVLCGHSLGGAVAALATLAILRVIATTSSEEDNRLHVKCITSSQPPVGNAALRDYVHKRGWQDYFKSYCIPEDLVPRILSPAYFHHYNAQTPEASFTNKTDVKSEEVMEASGERPRGNNREHLVLGVGPVQKSFWRLSKLVPLEGVRKSLSAIQKQTNVFGKAPSQLDSYLQSKVDESEEPPQSLEIQESSQGIALTPLSDKDGGNTEDNNRTEKINASEAGGSKRWSRVPSLPSYVPFGEKEGKGPSLE

SEQ ID NO: 66850 - protein, 96 aa, Zea mays
  Coding DNA Sequence Number=SeqID_25071
  Subcellular localization annotation: CTP_CleavageSite=40; ConfidenceScore=5.03e-01
MGGYELVRSDDAAGAAGADLESGSGASKVSGAPPPSPAPSASPAARQQRLASLDVFRGITVLIPQNSKFNILLHQTQISDVKRNQALLPLTLSALN

SEQ ID NO: 66851 - protein, 149 aa, Zea mays
  Coding DNA Sequence Number=SeqID_25072
  Gene Ontology: Mol. function=peptidyl-prolyl cis-trans isomerase activity; Cellular component=cell; Biological process=protein folding
  Homolog annotation: Hit_ID=P21569; Match level="QueryCoverage=99%, HitCoverage=100%, E-value=8e-71, Identity=79%"; Hit description =Peptidyl-prolyl cis-trans isomerase
  Pfam annotation: Domain name=Pro_isomerase; Domain location=5-148; Score=329.4; E_value=6.1e-96; Accession=PF00160.11; Description =Cyclophilin type peptidyl-prolyl cis-tr
MANPRVFFDMTVGGAPAGRIVMELYANEVPKTAENFRALCTGEKGVGKSGKPLHYKGSTFHRVIPEFMCQGGDFTRGNGTGGESIYGEKFPDEKFFFICTVATPWLDGKHVVFGQVVEGMDVVKAIEKVGTRNGSTSKVVKVADCGQLS

SEQ ID NO: 66852 - protein, 109 aa, Zea mays
  Coding DNA Sequence Number=SeqID_25073
  Subcellular localization annotation: CTP_CleavageSite=82; ConfidenceScore=5.33e-01
MGVTKGRLGSGWQLQASINSLLAQLFSSLILRSSATFFSLYPLLHQTMGKGKRGRGSPRRAGDKRKHDLSPPSEDFGDSEYSVEEVSSESEGSLALASPPMSSDDSDDS

SEQ ID NO: 66853 - protein, 81 aa, Zea mays
  Coding DNA Sequence Number=SeqID_25074
MGKPVPSLLMILLSRVTALVPTITGMGDHVLGHVRGKVCGQVHSAPHLNPYSNFRLGDDASPWTIVNIPSSFRYKMDTINS

SEQ ID NO: 66854 - protein, 138 aa, Zea mays
  Coding DNA Sequence Number=SeqID_25075
  Homolog annotation: Hit_ID=Q8H1G3; Match level="QueryCoverage=41%, HitCoverage=12%, E-value=1e-17, Identity=72%"; Hit description=Metal tolerance protein C4
MRMSPDCVPTAGEAHTEGGGAASAARPQFPSIPLLPGPQSPYKQAIRELFQHIRQLALKKRLPISLNILWRMFREAAMSKDDTELLRVMANYGEDVVEALGYEVDRLESEIQKLVPGIKHVDIEAHNPEGLALRAEVL

SEQ ID NO: 66855 - protein, 71 aa, Zea mays
  Coding DNA Sequence Number=SeqID_25076
MTLAPPTSVSDWVTDSGASYHTTPDVERDFISPQSPPIPLIPNKPLVFFDKEIVEEGYRITSSNYQTAIIR

SEQ ID NO: 66856 - protein, 410 aa, Zea mays
  Coding DNA Sequence Number=SeqID_25077
  Gene Ontology: Mol. function=nucleic acid binding; Cellular component= chromatin; Biological process=DNA integration
  Homolog annotation: Hit_ID=Q8W0X5; Match level="QueryCoverage=70%, HitCoverage=92%, E-value=1e-155, Identity=91%"; Hit description =Putative pol protein
  Pfam annotation: Domain name=RVT_2; Domain location=51-261; Score =359.0; E_value=7.6e-105; Accession=PF07727.4; Description=Reverse transcriptase (RNA-dependent
MGGGPIQEGVKQLQSANEVGTLGASSEAKCCGTKVGVPQQPGRARGGDEDKGSTWAKGYAQVAGLDFEETFAPVARLESIRILLAYAAHHSFRLFQMDVKSAFLNGPIKEEVYVEQPPGFEDERYPDHVCKLSKALYGLKQAPRAWYECLRDFLIANAFKVGKADPTLFTKTCDGDLFVCQIYVDDIIFGSTNQKSCEEFSRVMTQKFEMSMMGELNYFLGFQVKQLKDGTFISQTKYTQDLLKRFGMKDAKPAKTPMGTDGHTDLNKGDSDYAGCKVDRKSTSGTCQFLGRSLVSWNSKKQTSVALSTAEAEYVAAGQCCAQLLWMRQTLRDFGYNLSKVPLLCDNESAIRMAENPVEHSRTKHIDIRHHFLRDHQQKGDIEVFHSRRRIEREKVDLDHERLPLHSDER

SEQ ID NO: 66857 - protein, 525 aa, Zea mays
  Coding DNA Sequence Number=SeqID_25078
  Gene Ontology: Mol. function=oxidoreductase activity; Cellular component=integral to membrane; Biological process=electron transport
  Homolog annotation: Hit_ID=Q9ATU6; Match level="QueryCoverage=95%, HitCoverage=97%, E-value=1e-178, Identity=65%"; Hit description =Putative cytochrome P450
  Pfam annotation: Domain name=p450; Domain location=45-518; Score =224.9; E_value=1.8e-64; Accession=PF00067.12; Description=Cytochrome P450
  Subcellular localization annotation: CTP_CleavageSite=72; ConfidenceScore=5.24e-01
MELVGGFASNTSTTPLLCCCIAFFVSLIFLFHRRGKSTKSKSALPPGPPALVFLAKFLALRRSIFDLTPLLRDLHARHGPVISVHLFTTLVFVADRRLAHRVLVRDGATFADRPPLSEPDPLFSAGDINTASYGPYWRLVRRNLAADALHRARVGLFAPARRWACEALVTSLLTRSQERGSSFEEAEPVTVRPFLRRAMFELLVYMCFGARLSQGTVDEIEALERHVLASFTAFPVFAFFPPLTKRIFRKRWEAHVAVRRRLDELFAPLIHAARRHGEDGRPPCYAESLLALRVPGEGGRPLTDAEIVSLCSEFLNAGTDTTVTLVEWIMAELANNPGVQAKVYEEVTRVKPDALDDSAGNLQSLPYLKAVVLEGLRLHPPAHFLIPHGVRSDGDAAEIGGYTVPEGAEVNFLVAEIGRDEAVWTAAREFRPERFLDGGEGCDVDITGSREIKMMPFGAGRRMCPGYALGMHHAEYFVGSLVRELEWLPAAEGEAVNMEETVDFTTVMKHPFRARIVPRNKSLLT

SEQ ID NO: 66858 - protein, 136 aa, Zea mays
  Coding DNA Sequence Number=SeqID_25079
MGKKRKREPTPPSEDFGDSEYSEEEFSSESEGSPASVPPPALSDDSDDSQGIAAEVWTYIRVVERSGLAGSDESEYSSDEEDSSEEDGGGGGEGDDDDDGGDDGDDGSRGGNGGSRGGSGRGGNGGSSRGSNKASG

SEQ ID NO: 66859 - protein, 140 aa, Zea mays
  Coding DNA Sequence Number=SeqID_25080
MGKNNKRKREPTPPSEEFGDSEYSEEEFSSESEGSPAPIPLRESSDDSDDSQGLAAEVWTYIRAVERSGLEGSDESEFSSDEEDSDGGEDEDDDDDGGDGDGDGGNGGGGSGGKGGTKGGSSVGSTGGGGGKGSGGRASG

SEQ ID NO: 66860 - protein, 47 aa, Zea mays
  Coding DNA Sequence Number=SeqID_25081
MEDKQLQQEDSSERPKRLRRLNTHVTGPDRIQQIPFSLFLDLLPFLG

SEQ ID NO: 66861 - protein, 76 aa, Zea mays
  Coding DNA Sequence Number=SeqID_25082
  Subcellular localization annotation: CTP_CleavageSite=31; ConfidenceScore=5.01e-01
MGMLPSLAPTTGGDAVGRPASGTPSHVKRVVAEAAFHGSSIALGRMVSHFDEVDVVVIVEGFATGRHGEEMDVIKD

SEQ ID NO: 66862 - protein, 220 aa, Zea mays
  Coding DNA Sequence Number=SeqID_25083
  Gene Ontology: Mol. function=kinase activity; Cellular component =spliceosome; Biological process=mRNA processing
  Homolog annotation: Hit_ID=Q6QP54; Match level="QueryCoverage=86%, HitCoverage=37%, E-value=6e-16, Identity=54%"; Hit description =Putative kinase
MAPPVDVVSPCPGLGEVEAPPRSRSSLSSKVEVESEPPGRTRRRPSADARAESEPWGRAKRSSSSFGAEPKSEPWGRAKRSSSSSGDEPESEPWGQAKRSSSSSWAEPESEPWGRAKRSSSSSGAEPESEPWGRAKRSSLSSGAEPESEPWGWAKRSSSSSGAEPESEPWVGRSGPHSVEWHSSRSGAGGAVLLSDRSVERRSDYGHFGSVDWRACVRIK

SEQ ID NO: 66863 - protein, 68 aa, Zea mays
  Coding DNA Sequence Number=SeqID_25084
MEAKSHHQPNQGGTCKNYATAQAHYKLSTPTENEEEIEVEEARTTPPPPEEPQAGNWFYFDICGTEPD

SEQ ID NO: 66864 - protein, 237 aa, Zea mays
  Coding DNA Sequence Number=SeqID_25085
MGWSGLATVAECSGGLAGGAELAGAKDRVKTVGAGVERSVARPRVVFKGAALASAPLFSLPLSSLSLLRASASYVRLPPDRAYSLCFSLAALSLAAVLPPRLFHSSSLPSFAPISLLPCRASLSHPFPCSPPRTSYRPRLTKHRPRLALKLAQPAEVLLTAPASVLLHCAELLPRHGRALSLQLARLLLLPLRFARGSRVLAKLSARRPCSPAMPLLQLAVPLVQIPCFPAAPSSLR

SEQ ID NO: 66865 - protein, 96 aa, Zea mays
  Coding DNA Sequence Number=SeqID_25086
MCGPVAHAYTTRGPVDPAYAACSYVDPSRAMCGPVDPVCTPCGPDDLGLVNKRDPFHRPRHRLPPPRERPSLGAHGSGPLDERDPIRQSSRRLSQL

SEQ ID NO: 66866 - protein, 164 aa, Zea mays
  Coding DNA Sequence Number=SeqID_25087
MAGMVGDWRGCPEIGEVEGGIGGEMAGAAVVGGNGATGRWRGRAGCLTLDKDIFAKCPGSDTRQRHLCRVSFAKHSAKTVFRVFKKTSPSVPRVALGKEFFAECRSWTLGKVYFYFFPYQTFCDSNCKSLETCKTVHAQLKTMVGNTSYDRFREHTGIFEHHVH

SEQ ID NO: 66867 - protein, 135 aa, Zea mays
  Coding DNA Sequence Number=SeqID_25088
MIQRVEGKRLRSAREGKGLSVGNLHTIVVTNAFMHRRLLENTLTCNHLFVSHTVQILIHITIPHSRDFRDVRLDLDVYDPLTVRTCSQPPKYPIAAWKVNIPTDHISKYRYRLYELHQPAPTSLAPSAGVLSDVK

SEQ ID NO: 66868 - protein, 152 aa, Zea mays
  Coding DNA Sequence Number=SeqID_25089
MTDELGRVSSRRLGKKRSRVARHRVRGLVRSPGSGCSGVGSCRDGTGHAGLAAWRLGVGASVAGGPDTRRAAGQGHAQGGRGPGVRRLDQGRAGESVGRLGFLATRQLGGKAGRGRRERREMGLGGSHAQEREGGVKVSVAAVGEELEGGGD

SEQ ID NO: 66869 - protein, 83 aa, Zea mays
  Coding DNA Sequence Number=SeqID_25090
MGLENLLERCSLRRPRLGPNVPSGMEGPNEQGAGVVGELGGQQRLPDLDDGSSVTWSLEKGGYNRVRGIHCPSYGSTRHILAK

SEQ ID NO: 66870 - protein, 78 aa, Zea mays
  Coding DNA Sequence Number=SeqID_25091
MAGMVGDWRGCPEIGEVEGGIGGEMAGAAVVGGNGATGRWRGRAGCLTLDKDIFAKCPGSDTRQRHLCRVPTLDARQK

SEQ ID NO: 66871 - protein, 192 aa, Zea mays
  Coding DNA Sequence Number=SeqID_25092
MASENETSLQRKEPRRTPTQRFVWISGQAVPGQANWEVVELRSEESGLLDLWRRSELKSQELACLQARAGWERRLNNVPVPSNAPGRNLFSALFRKPSWKPTNPTPGRSYLCEWVVMAIGVGVGSVGYKKRCRFIRHHPLPTLYKKRCSVGSLYLEGTWTVISTRLPYHWTESSKPTTCRNIHLNKCLTFAR

SEQ ID NO: 66872 - protein, 150 aa, Zea mays
  Coding DNA Sequence Number=SeqID_25093
APPRTTTKVYRSTTLRPPMPLNYTEIGATRCYKLDEPVGTGLIENDGEEAPFHDAPMICGGVLTPMRNRYRTADTAAATTTDYPPCALRFIMDRKKLRVGAGWGRREMPDEELATDTAEDDLDHLVPPGSEGHGRGRGKDAVLAAPLGSG

SEQ ID NO: 66873 - protein, 139 aa, Zea mays
  Coding DNA Sequence Number=SeqID_25094
  Pfam annotation: Domain name=VQ; Domain location=19-49; Score=36.7; E_ value=8.1e-08; Accession=PF05678.4; Description=VQ motif
MAMEVQGTRRPQDAGVKVKFIETQFISSDAASFKAVVQRLTGKSPAASSQTTQPPAHPQPQSLRPCRPTFIGAGQQQTTGWTDLQAAGGYLATMPAPKQEHLAAAPRLEDMNELCDFADLFYTTAASNRPDGGASVFPY

SEQ ID NO: 66874 - protein, 231 aa, Zea mays
  Coding DNA Sequence Number=SeqID_25095
MEVDRAAPKHGGRGTQQCFKADSRDSDLACWRRGGLRRYGASSASPWRAESSVRRPGSCTATGVSRDSDTAQRGRGTEGRWTRRRAPGRLVLLLGQSCRRADNETRRGGRRASVAGECSRRPELGPSERRPPGKHGQALVRSGDAKNHRPSADRGGQKEQGRWLNLDELEERWRSDHGRCRELGGCYGLGESDVRLIPRHPIEKRRLEIEARERDAWELDIADLGIFVTQQ

SEQ ID NO: 66875 - protein, 162 aa, Zea mays
  Coding DNA Sequence Number=SeqID_25096
MARHELTSLRLRLHGENAGERGSVEPEGLGANRRMSHTAGEEAELIKATDMARGRWQLQNERRTTVSGGRAPWACAQNEREGEGARLRAQLSGGWWVSVDGVQKRLGRVGVWLKNARPWVRPRWRAQVIRGDGSKRWGPRNREGAGERTSLYTDELGPRISE

SEQ ID NO: 66876 - protein, 90 aa, Zea mays
  Coding DNA Sequence Number=SeqID_25097
MGRGKGWPRHADWKRKRPPSPPSEDFRDSEYSEEVSSEYDRSPALASLVASSEDSDDSMGLSIAARAYCDNGDDGRYDDDDKVGGILLLA

SEQ ID NO: 66877 - protein, 368 aa, Zea mays
  Coding DNA Sequence Number=SeqID_25098
  Gene Ontology: Mol. function=DNA binding; Cellular component =cytoplasm; Biological process=DNA integration
  Homolog annotation: Hit_ID=Q8S474; Match level="QueryCoverage=99%, HitCoverage=45%, E-value=1e-155, Identity=77%"; Hit description =Putative pol protein
  Pfam annotation: Domain name=RVT_2; Domain location=276-363; Score= -60.3; E_value=1.3e-11; Accession=PF07727.4; Description=Reverse transcriptase (RNA-dependent
MARTMLDEYKTLDRFWAKAINTACYSINRLYLHRILKKTSYELLTGKKPNVSNFRVFGSKCFILVKRGRKSKFAPKAVEGFLLGYDSNTRAYRVFNKSTGLVEVSCDIVFDETNGSQVEQVDLDELDDEEAPCVALRNMYIGDVYPKESEEPTQAQDQPSSSNQSSPPTQNEDQAQDNGEEDQENEPPQEKDNDQGGDDNDQDKEDDQEEQGQRPPHPRVQAIQIDHPVNSILGDIHKGVTTRSRVAHFCEHYSFVSSIEPYRVEDALRDSDWVLAMQEKLNNFTRNEVWHLVPRPNQNVVGTKWVFRNKQDEHGVVTRNKARLVAKGYSQVEGLDFGETYAPVARLESIRILLAYATYMALSSIKWT

SEQ ID NO: 66878 - protein, 162 aa, Zea mays
  Coding DNA Sequence Number=SeqID_25099
  Subcellular localization annotation: CTP_CleavageSite=31; ConfidenceScore=5.58e-01
MGSLYRSTDNLHTGDVQRSKAFSSGRARTVRLQGRTVRWLFLVPNNTKNGVLNLAFTVGGIPKPQTNTNLTWTPRIALFVEPSPFTYVSVYKNRFENVSSYKRRDLPSFLATIPVSPSIGAAPKSAPPISALHSPSSSPSRRAHSIFTSTLRLLLKSGKGAP

SEQ ID NO: 66879 - protein, 82 aa, Zea mays
  Coding DNA Sequence Number=SeqID_25100
MSVSPPSCEFLSERTVPCFVSLGGSDLSWLVFDLSRICLISTQLGLAYKLDVPETNSEHIDALLIGYRSGDMPGKPRSQVVC

SEQ ID NO: 66880 - protein, 97 aa, Zea mays
  Coding DNA Sequence Number=SeqID_25101
  Subcellular localization annotation: CTP_CleavageSite=36; ConfidenceScore=5.14e-01
MPLIKTYNIDSDIYGLKGHSIFKSGLQGTVTRRRIRPVQVTDPKEIKRNTSLKSRFGMCSISGQHTNTYSRIMSTSTGNIANMNLSMKIMNIILGSA

SEQ ID NO: 66881 - protein, 78 aa, Zea mays
  Coding DNA Sequence Number=SeqID_25102
MEPGTGACVVPWSLGLALADCARAVPAWCLCGCCLLAYWEPGRRRMPSAALGARVSTCLGLGGPEEDALGRLGGWDRE

SEQ ID NO: 66882 - protein, 168 aa, Zea mays
  Coding DNA Sequence Number=SeqID_25103
  Gene Ontology: Mol. function=protein binding; Cellular component =nucleus; Biological process=regulation of transcription, DNA -dependent
  Homolog annotation: Hit_ID=Q8VZY7; Match level="QueryCoverage=66%, HitCoverage=24%, E-value=1e-62, Identity=100%"; Hit description =Polycomb group protein FIE1
MPPQPNRANMVFGEWTKSYEVPTPKKSVKNAVLLWEPKPDKRRPGEGSVDVLQKYPVPKCSLWFMKFSCDFYSNQMAIGNNKGEIYVWEVQSSPPVLIDRLCNQECKSPIRQTAVSFDGSTILGAADDGAIWRWDEVDPAASSSKPDQAAAPAAGVGAGAGADADADA

SEQ ID NO: 66883 - protein, 36 aa, Zea mays
  Coding DNA Sequence Number=SeqID_25104
MDQPMGADRRGDQDMAATGLSFTERSSPQPERSQGD

SEQ ID NO: 66884 - protein, 150 aa, Zea mays
  Coding DNA Sequence Number=SeqID_25105
MSHIPGVSHVSGAVRTVVGDLGRLSRVGDMDRGVRHDKGAASVGRATSVAMVLGPPNTGAILRGRKLVEVFAPSSLLEQFSLRSARGSPCDVFEQDDIVDYDSMSSSFWIKLIRPSCDRGHVLIGKPSGVPSGGPWGVSVLPPEVGLGTE

SEQ ID NO: 66885 - protein, 84 aa, Zea mays
  Coding DNA Sequence Number=SeqID_25106
MKVSEFMRLTQGTQSMTEYLHALNNLSRPMIPGARFRPPPKKKNQQQGFMGQKAFKVALPCAKAGPGSSTSGTAQVKGPCYNCG

SEQ ID NO: 66886 - protein, 264 aa, Zea mays
  Coding DNA Sequence Number=SeqID_25107
  Gene Ontology: Mol. function=structural constituent of ribosome; Cellular component=intracellular; Biological process=translation
  Homolog annotation: Hit_ID=Q84L29; Match level="QueryCoverage=85%, HitCoverage=87%, E-value=1e-126, Identity=100%"; Hit description =Mitochondrial ribosomal protein L5
  Pfam annotation: Domain name=Ribosomal_L5; Domain location=97-150; Score=3.1; E_value=0.012; Accession=PF00281.9; Description=Ribosomal protein L5
MAARNILRGAACGHRFLVPVPSGALAGSGSRSIGAVAQGLRHYAADEAVGNLELHAPKAKRRSYIPTKNGTAMMLPLHIHYEDVLRQDLLLKQNHANIMQVPGLFEVKLAPKAGSDLKIPIGKMAMEVLSGQRFKEAKIDPFAKARKSSRTNPFIGADKDGSTVFAQPTVLRGHAMYNFLVRMLTVMSMLNSRADIRENTVKFFMETEFCEFSPELEDHFEIFEHIRVAAQLNLQLAVDVKNDFGNLVLRALGVRNVAAFCFVD

SEQ ID NO: 66887 - protein, 80 aa, Zea mays
  Coding DNA Sequence Number=SeqID_25108
  Subcellular localization annotation: CTP_CleavageSite=62; ConfidenceScore=5.07e-01
MAPPLPLPLLRWLLLAAAVAATVAQPQPQPLASRTDLAALYSLRASLGLRARDWPLRPFPSRAGRAWTARRAERIQADSS

SEQ ID NO: 66888 - protein, 353 aa, Zea mays
  Coding DNA Sequence Number=SeqID_25109
  Gene Ontology: Mol. function=transferase activity; Biological process= flavonoid biosynthetic process
  Homolog annotation: Hit_ID=Q7XXN4; Match level="QueryCoverage=98%, HitCoverage=87%, E-value=1e-124, Identity=66%"; Hit description =Putative anthranilate N-benzoyltransferase
  Pfam annotation: Domain name=Transferase; Domain location=1-352; Score=-29.9; E_value=1.7e-09; Accession=PF02458.6; Description =Transferase family
METPSSAATPRRWALTGSSPARSARGPDGAPGVLLNDHGARLVEASVDARLADIAPTKPPPAVLRLHPDLDIVEVVQVQLTRFACGSLAVGFTANPAVADGHATSDFLVAWDRAARGLPVGPSPPVHFPPRHDPPRAGFEHRGVEYYRPAPSLAHGHVHGDTTQHSIVVHKAHFTKDFVAGLRARASEGRGRPFSRFETILAHVWRTMTRARGLGSNPLQISTIRISVDGRPRLAAAPAGYFGNLVLWAFPRATVGSLLGRPLKHAAQAIHDAVARVDGAYDFQSFVDFAGSGTVEKEGLETTAPAQGGRAYFPTEGMLLLVPSYIGDGSIDAIVPVFEHNLDAFKQCCYSME

SEQ ID NO: 66889 - protein, 392 aa, Zea mays
  Coding DNA Sequence Number=SeqID_25110
  Gene Ontology: Mol. function=transferase activity; Cellular component= nucleus; Biological process=flavonoid biosynthetic process
  Homolog annotation: Hit_ID=Q7XXN5; Match level="QueryCoverage=99%, HitCoverage=100%, E-value=1e-160, Identity=67%"; Hit description =Putative anthranilate N-benzoyltransferase
  Pfam annotation: Domain name=Transferase; Domain location=1-391; Score=137.6; E_value=3.3e-38; Accession=PF02458.6; Description =Transferase family
MEEKVLSSKLVKPSYPAGAPRPDTTEHVPSSVFDKATYHMQMAIIYAFSPPVPSPDAIERGLAAVLGAYRLFAGQVRPGPDGAPGVLLNDHGARLVEASVDARLADIAPTKPSPAVLRLHPDLDGSDIEEPVVQVQLTRFACGSLAVGFTANHAVADGHATSDFLVAWGRAARGLPVGPSPPAHFTKDFVAGLRARASEGRGRPFSRFETILAHVWRTMTRARGLGSNPLQTSTIRISVDGRPRLAAAPADYFGNLVLWAFPRATVGSLLGRPLKHAAQVIHDAVARVDGAYFQSFVDFAGSGAVEKEGLETTALLKDVLCPDLEVDSWLTFPFYELDLGAGNPSYFMPSYFPTEGMLFLVPSYLGDGSVDAFVPMFEQNLEAFKQCCYSME

SEQ ID NO: 66890 - protein, 402 aa, Zea mays
  Coding DNA Sequence Number=SeqID_25111
  Gene Ontology: Mol. function=RNA-directed DNA polymerase activity; Cellular component=mitochondrion; Biological process=RNA-dependent DNA replication
  Homolog annotation: Hit_ID=UPI00004C1731; Match level="QueryCoverage =99%, HitCoverage=29%, E-value=0.0, Identity=86%"; Hit description =UPI00004C1731 related cluster
  Pfam annotation: Domain name=RnaseH; Domain location=1-124; Score= -12.9; E_value=0.00092; Accession=PF00075.14; Description=RNase H
  Pfam annotation: Domain name=rve; Domain location=166-325; Score =118.8; E_value=1.5e-32; Accession=PF00665.16; Description=Integrase core domain
  Pfam module annotation: Pfam domain module=RnaseH::rve; Domain location=1-124::166-325
MFFDGSLMKTGAGAGLLFISPLIKHLRYVLRLHFPASNNVVEYKALVNGLRIAIELGVRRLDARGDSQLVIDQVMKNSHYRDPKMEAYCDEVRRLEDKFYGLELNHIARRYNETADELAKNSLEANNGFYWPTAVADATRIVRTCEGCQFYARQTHLPAQALQTIPITWPFAVWGLDLVGPLQKAPVGYTHLLVAIDKFSKWIEVRPLNSIRSEQAVAFFTNIIHHFGVPNSIITDNGTQFTDRKFLDFCEDHHIRVDWAAVAHPMTNGQVERANGMILQGLKPRIYNDLNKFSKRWMKELPSVVWSLRTTPSRATGFTPFFLVYGAEAILPTDLEYGSPRTRAYANQSNQANREDSLDQLEEARDKALLHSARYQQSLRRYHARGVRSRDLQVGDLVLRLR

SEQ ID NO: 66891 - protein, 242 aa, Zea mays
  Coding DNA Sequence Number=SeqID_25112
  Gene Ontology: Mol. function=protein dimerization activity; Cellular component=nucleus; Biological process=regulation of transcription, DNA-dependent
  Homolog annotation: Hit_ID=Q5QNI5; Match level="QueryCoverage=97%, HitCoverage=96%, E-value=4e-53, Identity=47%"; Hit description=BZIP transcription factor RF2b-like
  Pfam annotation: Domain name=bZIP_1; Domain location=109-173; Score =31.8; E_value=2.4e-06; Accession=PF00170.11; Description=bZIP transcription factor
  Pfam annotation: Domain name=bZIP_2; Domain location=109-163; Score =37.1; E_value=6.2e-08; Accession=PF07716.5; Description=Basic region leucine zipper
  Pfam module annotation: Pfam domain module=bZIP_1::bZIP_2; Domain location=109-173::109-163
  Subcellular localization annotation: CTP_CleavageSite=51; ConfidenceScore=5.27e-01
MAQLPPKIPTVAPAWPEFGGGHQQQRSPSVGTFLAAAPMQPSWVDEFLDFSAAKRGAHRRSPQTQAAPAPVASSSSPSDHNSINDEKTDRGDAEEAQSKCHGAAATATAVDPKRVKRILANRQSAQRSRVRKLQYISELERSVTSLQTEVSALSPRVAFLDHQRSLLTLGNSHLRQRIAALAQDKIFKDAHQEALRKEIERLRQIYHQQSLKSGREPDAAPSVRDDKDMIGSEGTAAPGPPS

SEQ ID NO: 66892 - protein, 161 aa, Zea mays
  Coding DNA Sequence Number=SeqID_25113
MRRGCGPVLCWCRWGLRLWLAPSRSRFYWLVWSPSPQITSSQFVSVEILAGRSRAGGLVRILDEFCTTRLAGAWRAAVVQCSAVHAAARFSVGQGTASNNGSRFAAAFSYRTPRATALAVSPVSSPHQLQMVDGPTETTRIHGERCGPTSNCASRERVFSS

SEQ ID NO: 66893 - protein, 499 aa, Zea mays
  Coding DNA Sequence Number=SeqID_25114
  Gene Ontology: Mol. function=monooxygenase activity; Cellular component=integral to membrane; Biological process=electron transport
  Homolog annotation: Hit_ID=Q9LDQ4; Match level="QueryCoverage=93%, HitCoverage=94%, E-value=0.0, Identity=84%"; Hit description=Sterol C-22 desaturase-like
  Pfam annotation: Domain name=p450; Domain location=48-489; Score =10.1; E_value=2e-11; Accession=PF00067.12; Description=Cytochrome P450
MAAQSLSVPVPMPSSLDLRAAAPFLVAAVALYFLMEQVSYHRKKGPLPGPALVVPFLGSVAHMIRDPTGFWDAQAARAKRSGAGLAADFLVGRFVVFIRDSELSHRVFANVRPDAFHLIGHPFGKKLFGDHNLIYMFGEDHKDLRRRIAPNFTPRALSTYAALQQRVILAHLRRWLDRSGGGGGGAFPIRVPCRDMNLETSQTVFVGPYLAGEARRRFERDYNLFNVGLMALPIDLPCFAFRRAREGVARLVRTLGECARQSKARMRAGGEPECLVDFWMQDTLREMDEAAAAGRPPPAHTDDEEIGGFMFDFLFAAQDASTSSLCWAVSALDSHPEVLARVRAEVSAAWSPDSGEPMTAETIQGMRYTQAVAREVVRHRPPATLVPHIAGEAFQLTEWYTGFPDAEAFDPERFFSEARREDVAYRRNFLAFGAGPHQCVGQRYALNHLVLFMALFVSVVDFRRERTPGCDDPVYMPTIVPKDGCSVYLKQRCAKLPSF

SEQ ID NO: 66894 - protein, 59 aa, Zea mays
  Coding DNA Sequence Number=SeqID_25115
MTNKQASYLSHNCKAVKDVVDEDYTCIHVPFLQHMTVIGEAYSRNPPKGFANEVVWTDI

SEQ ID NO: 66895 - protein, 379 aa, Zea mays
  Coding DNA Sequence Number=SeqID_25116
  Homolog annotation: Hit_ID=Q5XWK4; Match level="QueryCoverage=40%, HitCoverage=36%, E-value=4e-15, Identity=32%"; Hit description =Expressed protein-like
  Pfam annotation: Domain name=DUF616; Domain location=96-379; Score =144.3; E_value=3.3e-40; Accession=PF04765.4; Description=Protein of unknown function (DUF616)
MGWPVRVRSPSVLQSKLLCLSLLYLLTTLPLALYVSFTDSGRRRRCLQPVPSPPKPLFQYPAGYGEHRHALPTSRALCSNPVAFADYKTALEEIHGLCRDTSASPALRYQSGRRATFAGNLSTQERRSFFNHTDDQVAVPCGFFREFPVPEPAQMIRNGFCCRARCRSQRTSLMSAFSVDGFQTDWPWRSAGGVVVASAIMNDHDKVRQPRGLGAETLRAACFFLFIDDATRAALARQGVLPARGGGGHTTVGAWRVVTVGRRRAGGGGLPYEDPAMNGVVAKHLLHRLFPGARFSVWVDGKVQLTVDPVLLVHALLVRERADVAVSRHPFNRHTMEGGHRDGAVAQVPRRGRRQGADGDILRQRPAPMVPQQASLSVG

SEQ ID NO: 66896 - protein, 123 aa, Zea mays
  Coding DNA Sequence Number=SeqID_25117
  Homolog annotation: Hit_ID=Q2R9D1; Match level="QueryCoverage=66%, HitCoverage=12%, E-value=9e-09, Identity=40%"; Hit description =Expressed protein
  Pfam annotation: Domain name=DUF616; Domain location=1-82; Score= -173.4; E_value=0.035; Accession=PF04765.4; Description=Protein of unknown function (DUF616)
MAILHAAVYPMLPADVPDTAVIIRRHGVASDLFSCLLFNELEAFSPRDQLAFAYVRDQMSPKLSINMFEVEVFEQIAVEYRHNLKPGRGKRQQGGTRMASSRDIAGSSCEEYLHQMWGESAAE

SEQ ID NO: 66897 - protein, 620 aa, Zea mays
  Coding DNA Sequence Number=SeqID_25118
  Gene Ontology: Mol. function=amino acid transporter activity; Cellular component=membrane; Biological process=amino acid transport
  Homolog annotation: Hit_ID=Q9LD96; Match level="QueryCoverage=92%, HitCoverage=93%, E-value=0.0, Identity=79%"; Hit description =Putative amino acid permease
  Pfam annotation: Domain name=AA_permease; Domain location=92-527; Score=12.4; E_value=4.6e-06; Accession=PF00324.11; Description=Amino acid permease
  Pfam annotation: Domain name=Aa_trans; Domain location=86-494; Score=- 149.4; E_value=0.032; Accession=PF01490.8; Description=Transmembrane amino acid transporter protein
  Pfam module annotation: Pfam domain module=AA_permease::Aa_trans; Domain location=92-527::86-494
MEPAENDTSSPPEYGAGKAAATVPARSYWRWRRDDFFPEPSFASWGAYRRALRETPARLRDRLAGRSTDAAELGALRRRSEHEMRRCLTWWDLTWFGFGSVIGAGIFVLTGQEARDHAGPAIVLSYVASGLSAMLSVFCYTEFAVEIPVAGGSFAYLRVELGDAAAFVAAANLILESVIGTAAVARSWTSYLASLVNRPASALRIHAPGLAGGYDELDPIAVLVIAVTATLAMLTAKGTSRVNWVASAVHVLVIAFVIVAGFAHADAANLRPFMPQGVPGVFRAAAIVYFAYGGFDNIATMAEETRNPSRDIPLGLLGSMTAITAIYCVMALVLSMMQPYTAIDRSAAYSVAFASVGMRWAQYVVALGALKGMTTVLLVGALGQARYTTHIARSHIIPPVFALVHPRTGTPVHATALIAVCSACIALFSSLDVLASLLSVSTLFIFMMMATALLVRRYYVRGVTSRTHALRLTALLLLIIASSIGIAACWGTSPERWQGYVVLVPAWAAGTLGIQLLVPAARAPKVWGVPLVPWLPSLSIATNLFLMGSLGKDAFIRFGVCTAVMLVYYVLVGLHATYDVAHGACGWEEEDDGDAAAADEDKKVVAAADVEKADAAGGTR

SEQ ID NO: 66898 - protein, 158 aa, Zea mays
  Coding DNA Sequence Number=SeqID_25119
MSWIYAALRCSVERAIPKPSKVFVYMMLSPLPPSMRTLERRYGSTIASTIRGAFSHEGHGEPEDSAAYTPWLLDSWGCLLPPHCKSKSTEALLESGDTFPMALPLQSAPGGAPRRLTRDDPQIGASEAKLSRGVGEEMEGAELDAAARAKIPSLADAD

SEQ ID NO: 66899 - protein, 78 aa, Zea mays
  Coding DNA Sequence Number=SeqID_25120
  Subcellular localization annotation: CTP_CleavageSite=53; ConfidenceScore=5.08e-01
MKPWKETSRSSWTTTSSRRGLAATPSRLPVKAAFIYVSFPHFDLLRKTLGEISVEYLGSISGKNLKGYVGDLLSNALA

SEQ ID NO: 66900 - protein, 39 aa, Zea mays
  Coding DNA Sequence Number=SeqID_25121
MTKVDACRRWSKKDSPECTFGLKGDKEYKRDAKANAKSA

SEQ ID NO: 66901 - protein, 82 aa, Zea mays
  Coding DNA Sequence Number=SeqID_25122
MTIASSSSVCKDNDDDTSFFDIEVAVSPNESAASDVEEERVLFLQRLQEEKENESGVCHDGVMRHRLAIPPRRTNDGIMEWR

SEQ ID NO: 66902 - protein, 261 aa, Zea mays
  Coding DNA Sequence Number=SeqID_25123
  Gene Ontology: Mol. function=zinc ion binding; Cellular component =intracellular
  Homolog annotation: Hit_ID=Q0VJB4; Match level="QueryCoverage=99%, HitCoverage=100%, E-value=2e-56, Identity=48%"; Hit description =Putative zinc-binding protein
  Pfam annotation: Domain name=PLATZ; Domain location=61-192; Score =257.6; E_value=2.6e-74; Accession=PF04640.4; Description=PLATZ transcription factor
MAIDHESPFKELRLKNRRIMGGGGPDPEPEEEEEEGVTAAYAERWPRWLQPLLSARFFAQCRTHSDSNRSGECNMFCLDCSAAGGTGTGAGALCSLCLAQHGHRDHHTIQIRRSSYHDVIRVSDIQRFMDIAGVQTYVINSARVVFLNERPQQQKPGGGKAASSSSASANLCEVCARSLLDNFRFCSLGCKVVGCSPDAAKARNWLLRAADGDGSTTSSSAPRNADRKLSFTPPTPQPTLPTKRRKGIPHRAPFGSLIVEY

SEQ ID NO: 66903 - protein, 139 aa, Zea mays
  Coding DNA Sequence Number=SeqID_25124
MGKDKKGQGSPRRSGDKRKHELSPPSEDFGDSEYSEEEFSSESEGSPKRFPGDSCRDVDVHLNRRARRLEGSDESEVSSDEENSSDSSEEGSGGDGDDEGDGSGGDGSGGGGDDGNDSGGKGSNGNGNGSKISGKAPLA

SEQ ID NO: 66904 - protein, 133 aa, Zea mays
  Coding DNA Sequence Number=SeqID_25125
  Gene Ontology: Mol. function=oxidoreductase activity, acting on paired donors, with incorporation or reduction of molecular oxygen; Cellular component=chloroplast; Biological process=carotenoid biosynthetic process
  Homolog annotation: Hit_ID=Q8LJ81; Match level="QueryCoverage=56%, HitCoverage=13%, E-value=9e-22, Identity=71%"; Hit description =Putative lycopene epsilon-cyclase
MTRNYAGCISQWLNHEEQETCLAAKDVMSFDLLKKSLMYLLNAMGVRIRKVYDEEWSYISVGWSLPNTDQKNLAFGATTSMIYTGARGGSVQRYICFGVELLLCVTCKCDVHKEFSFNHRVRSGFALQFTVQG

SEQ ID NO: 66905 - protein, 403 aa, Zea mays
  Coding DNA Sequence Number=SeqID_25126
  Gene Ontology: Mol. function=transcription regulator activity; Cellular component=nucleus; Biological process=regulation of transcription
  Homolog annotation: Hit_ID=Q84QW1; Match level="QueryCoverage=68%, HitCoverage=71%, E-value=5e-71, Identity=58%"; Hit description=BHLH transcription factor(GBOF-1)-like
  Pfam annotation: Domain name=HLH; Domain location=303-353; Score =34.6; E_value=3.6e-07; Accession=PF00010.16; Description=Helix-loop -helix DNA-binding domain
MAQPEKGSLLPQPKSLSLSQTKRRLPLPAAAEHRQFRVHHHAFDLQPIAQSRKHPSTPTAPAIKSPPLLPIRHLKEAPFPKSTTTEKQPQEIRSALGSGHSVAATMKEGRPGAGDYIASLLSSSPRLDFGGEEEEDCLDRFCGDPGFAARAARLSSFSGQRFAVTAGLFGLPPPLPAASGGGEFAGSREASSVSDPASAMKDANAKKRKAPAAAAAKGKGREPSAQGSRRVRTPRGAARRREARGRRGSPVKLPKPEQAGSDSSVEDGGAQNQKPPPPVKGKNAKPVEPPRDYVHVRARRGQATDSHSLAERVRRERISQRMKVLQDLVPGCNKVIGKALMLDEIINYVQSLQRQVEFLSMKLATVNPLDLSNLPTLLQKDVSVRFPLVIMSSCDGPVLQTSI

SEQ ID NO: 66906 - protein, 144 aa, Zea mays
  Coding DNA Sequence Number=SeqID_25127
MGGRRERRKEEEEVGRNNCEGGLNGRIGAVTVGCARSPCRSHRRIFSRARRGNSRGEERIELTESAHWMRTNPTSESHLEVISLGVIDFGCAGLEFVHGLRPPACPERPARSEEDRPDRLVPRCSDTASKEAGGAEGPRARGTR

SEQ ID NO: 66907 - protein, 102 aa, Zea mays
  Coding DNA Sequence Number=SeqID_25128
MTDGLGNGTSIRVRGPGSTGVRIVGYIARGLGPKRDGRNQHRDHRRTLRHGRVLLEERSGRPGPHASDTNGRREGEGRSRPQGPTWWRQFSDFSNVSIEIQR

SEQ ID NO: 66908 - protein, 126 aa, Zea mays
  Coding DNA Sequence Number=SeqID_25129
MGSMFTSKKTGNLSEVIKDTGEKEGSDGDVEFNESEDDLLSSQELDVLVKDMGVEVTNSQEEMTSEKEDTGKQEMDTDEKNKKNKGKGAELMEGTRKSTRLEANEDIKITEKAISRAVAKDAFLNK

SEQ ID NO: 66909 - protein, 67 aa, Zea mays
  Coding DNA Sequence Number=SeqID_25130
  Subcellular localization annotation: CTP_CleavageSite=57; ConfidenceScore=5.37e-01
MTSMVLSSLRKQGNVSRTPGRTVSYASTKLKHFSDGHVSTCTGLKGMSRAFLGERGRAKAGEQRQAE

SEQ ID NO: 66910 - protein, 44 aa, Zea mays
  Coding DNA Sequence Number=SeqID_25131
DEVEWNPAESWRMACNGPGRRPAAGGAAVVRMGPCDGALDELCD

SEQ ID NO: 66911 - protein, 213 aa, Zea mays
  Coding DNA Sequence Number=SeqID_25132
  Gene Ontology: Mol. function=carboxyl- and carbamoyltransferase activity; Cellular component=ornithine carbamoyltransferase complex; Biological process=amino acid metabolic process
  Homolog annotation: Hit_ID=Q6QP54; Match level="QueryCoverage=41%, HitCoverage=37%, E-value=4e-17, Identity=59%"; Hit description =Putative kinase
VMMAPPVDVAGLRPRLGDVEAPPKSRSSLSSVADIEFEPLGRARRRPSAEARAESEPWGRAKRSSSSSGAEPKSEPWVGRSGVRRLLGLSPSPSPGSGGADPSPSPGSGGAEFAVFRGLARVRALGRAKRSFLWCLWPGLTTCQSHSVKWHRSWSGAGGAVFLSGWSVERRSDGGHFGSAGWEARVRIKLYADGGYQLRIRSLEGTPNYGPRQ

SEQ ID NO: 66912 - protein, 95 aa, Zea mays
  Coding DNA Sequence Number=SeqID_25133
  Subcellular localization annotation: CTP_CleavageSite=36; ConfidenceScore=5.24e-01
MAGRFLAVAGDPCSTMARLVVSARVGENSTSWFAVSSSTRSNIEIGVIVTKCSWGCWSAMAATAVAHPAVGGSSGGRENRQVVPWAVHPDVGGGD

SEQ ID NO: 66913 - protein, 109 aa, Zea mays
  Coding DNA Sequence Number=SeqID_25134
MPRCPAIRRNYPPTDRGISTSAPVISPTTDPLSSSYGDEALPFSRSRLAHGFYRPGILRKSEAHASPIATTPANWSGNSWNRGVFGAATPDRAASNGFELSETADRAGP

SEQ ID NO: 66914 - protein, 652 aa, Zea mays
  Coding DNA Sequence Number=SeqID_25135
  Gene Ontology: Mol. function=RNA-directed DNA polymerase activity; Cellular component=mitochondrion; Biological process=RNA-dependent DNA replication
  Homolog annotation: Hit_ID=Q8W0Y2; Match level="QueryCoverage=86%, HitCoverage=27%, E-value=0.0, Identity=73%"; Hit description =Putative gag-pol
  Pfam annotation: Domain name=RnaseH; Domain location=237-365; Score =10.3; E_value=6.4e-06; Accession=PF00075.14; Description=RNase H
MLLGFIVSERGIEANPEKIAAITSMGPIKDLKGVQRVTGCLAALSRFISRLGERGLPLYRLLRKAECFTWTPEADEALGNLKALLTNTPILVPPAAGEALLIYVAATTQVVSAAIMVERREEGHTLPVQRPVYFISEVLSETKIRYPQIQKLLYAVILTRRKLRHYFESHPVTVVSSFPLGEIIQCREASGRIAKWAVEIMGEAISFGPRKAIKSQVLADFVAEWVDTQLPIVLIQPELLTMFFDGSLMKTGAGAGLLFISPLVKHLRYVLRLYFLASNNMAEYEALVNGLRIAIELGVRRLDARGDSQLVIDQVMKNSHCHDPKMEAYCDEVRRLEDKFYGLELNHIARRYNETADELAKIASRRTTVPPDVFSRDLHQPSVKTDDTPEPEKASAEPEAPSAQSEVPSARPEAPSAQPEAPSAQTEVPSARPEAPSAQPEAPSVRPEVPSAPDGEALRIEEERSGVTPNRNWQTPYLQYLYRGELPLDRAEARRLARRAKSFVLLGDGKELYHRSPSGILQRCIPIAEGQELLQEIHSGACGHHAAPRALVGNTFRQGFYWPTVMADATRIVRTCEGCKFYARQTHLPAQALQTIPITWPFAVRGLDLVGPLQKAPGGYTHPWEGPFVITKVLKPGTNKLADSQGEVYTNA

SEQ ID NO: 66915 - protein, 246 aa, Zea mays
  Coding DNA Sequence Number=SeqID_25136
  Homolog annotation: Hit_ID=Q6QP51; Match level="QueryCoverage=44%, HitCoverage=56%, E-value=7e-27, Identity=60%"; Hit description =Putative growth-regulating factor 1
MRENPLTGVELTARVHGLEKAQEGVSKPGGPEHAEEKALACGSRSVEAPQCTYAKLGARRGTDELAPHVGERQNGRVWAARGKFPSGPKWVPKPSHFALSLTDLKGKQRRSPRSDCCATHRGETDNSRVLPRAQQEAPPRPTLGLGLGRRSPPRPTPGLGLSLGLGRIASSPDPSLGLRRSLRLARPWARTDRAMGDTSLPYPLASSGYEGTRPASHLARPGNRHFSDGHVIAYPGLKHFSDNHVG

SEQ ID NO: 66916 - protein, 97 aa, Zea mays
  Coding DNA Sequence Number=SeqID_25137
MSGASAKREIRAGDKSASSGENALKGVRPQAQGGILFLHQVSTKGKDRIGEEMAKFSQGQRSLGAPDCPVVHRTVSGVPDWLWRTCCSREFDGGVRL

SEQ ID NO: 66917 - protein, 140 aa, Zea mays
  Coding DNA Sequence Number=SeqID_25138
  Gene Ontology: Mol. function=nucleotide binding
  Homolog annotation: Hit_ID=Q33AG5; Match level="QueryCoverage=43%, HitCoverage=10%, E-value=5e-26, Identity=93%"; Hit description =ATPase, histidine kinase, DNA gyrase B-, and HSP90-like domain containing protein, expressed
MGCRTTVFASSVIKMWRIYNTFLCLVSSPGRQLLLNLMCETFSAWWCWAASSLPKEKTKGFNSLVILVAWTLWKHRNASIAELLDNAVDEISNGATFIKVDKSINLKDNSSMLVFQDDGGGMDPEGVRRCMSLGFSTKKI

SEQ ID NO: 66918 - protein, 64 aa, Zea mays
  Coding DNA Sequence Number=SeqID_25139
MQQGIKSVVEVTPGASLAGVQGKVASQTPPPAEARGKSPAARGPAPGVDTPAPRAGDDAVSPGD

SEQ ID NO: 66919 - protein, 65 aa, Zea mays
  Coding DNA Sequence Number=SeqID_25140
MAWGLAGQAQRQGCGMDDRDRMVRLGWFSLTARDGAARVRGDEFTGDEGCERSRVPRAMGIAWEG

SEQ ID NO: 66920 - protein, 55 aa, Zea mays
  Coding DNA Sequence Number=SeqID_25141
  Gene Ontology: Cellular component=integral to membrane
  Homolog annotation: Hit_ID=Q8LEK2; Match level="QueryCoverage=78%, HitCoverage=23%, E-value=4e-14, Identity=84%"; Hit description=FAM18- like protein At1g09330
AAAWIILGIFSLIRLQADYLLVVGVCLSLSIANIIGFTKCNKGAHSPVLHPMLPC

SEQ ID NO: 66921 - protein, 95 aa, Zea mays
  Coding DNA Sequence Number=SeqID_25142
MESHDLRAERESQLVGGNENDSFGIDSGDGKWYSFRLERVVRIATTAQEKMKPWKETSRSSKITTSSRCGLATTPSRLPVKAACIYVSFPHFDYC

SEQ ID NO: 66922 - protein, 76 aa, Zea mays
  Coding DNA Sequence Number=SeqID_25143
MGEWLWPGLLMVLRLQASCGICRDQALRDSLLQRFALLLSSFLISVVIGLVTLIGSLEMPKDDIWLVTAILSGLIE

SEQ ID NO: 66923 - protein, 62 aa, Zea mays
  Coding DNA Sequence Number=SeqID_25144
  Subcellular localization annotation: CTP_CleavageSite=31; ConfidenceScore=5.06e-01
MTRGPGTPTAHISLMLARYAQVRRRVCRRISATNGAQERWSTAEAKVMRARADGPIALKGEC

SEQ ID NO: 66924 - protein, 282 aa, Zea mays
  Coding DNA Sequence Number=SeqID_25145
  Gene Ontology: Mol. function=hydrolase activity; Cellular component =nucleus; Biological process=metabolic process
  Homolog annotation: Hit_ID=Q6YSZ8; Match level="QueryCoverage=97%, HitCoverage=97%, E-value=4e-76, Identity=52%"; Hit description =Putative pepper esterase
  Pfam annotation: Domain name=Abhydrolase_3; Domain location=85-257; Score=69.3; E_value=1.2e-17; Accession=PF07859.3; Description =alphabeta hydrolase fold
  Subcellular localization annotation: CTP_CleavageSite=43; ConfidenceScore=5.03e-01
MGDVAAGAAALSPPPMTKETNLFMQIVVNPDGTVTRPEVPLVPASAVAAGGVVSRDVPLDASAGTYLRLYLPDLSSAPAAKLPVVLYFHGGGFVILSAATVFYHGHCEAMAAAVPAIVASLDSSGGNMAFFAALRTGGLDLGPATVRGLLLHQPYLGGVDRTPSEARSVDDAMLPLEANDRLWSLALPLGADRDHEFCNPVKAMAPEALAGLPRCLVTGNLGDPLIDRQREFARWLQDRGGAKAEVVVKLDVAGFHASELFVPEIAEVLFAAMREFVYTGDA

SEQ ID NO: 66925 - protein, 107 aa, Zea mays
  Coding DNA Sequence Number=SeqID_25146
MSQVEEDAHHQLAKVQEETNEKFLAHFTVDHHQKIAKHGEIEITSLLPSSQVPNPRNVPARTVMRRVDDTWALLDSFFILVEFNRDSILGIYCDILTPVDGDILAQC

SEQ ID NO: 66926 - protein, 105 aa, Zea mays
  Coding DNA Sequence Number=SeqID_25147
  Homolog annotation: Hit_ID=Q75K43; Match level="QueryCoverage=30%, HitCoverage=8%, E-value=8e-07, Identity=75%"; Hit description =Putative sentrin-specific protease
HRNYKVIYMLYMFQFFLVGVGSDEPGFSCCNISVLNLDCDDNGLALTCGIAGYDYQSVRRWTTFKRLGYGLVESKPILANFQLYVQLLDLIIVEIEVCSIYKELY

SEQ ID NO: 66927 - protein, 124 aa, Zea mays
  Coding DNA Sequence Number=SeqID_25148
MTKASPSTSHRKALKRIMRCGAQERWSTAEVKVMRARADGPVAVKGECWVLNDGSEQPALRMTGFAEFGPQNSAVAVLEGTSGGTWRDHGGCVKAKQLRVKDVAVDRKPRSWSISPPVEWIDSM

SEQ ID NO: 66928 - protein, 399 aa, Zea mays
  Coding DNA Sequence Number=SeqID_25149
  Gene Ontology: Mol. function=steroid hormone receptor activity; Cellular component=nucleus; Biological process=regulation of transcription, DNA-dependent
  Homolog annotation: Hit_ID=Q7XD60; Match level="QueryCoverage=80%, HitCoverage=50%, E-value=3e-88, Identity=78%"; Hit description=HAT family dimerisation domain containing protein
  Pfam annotation: Domain name=zf-BED; Domain location=61-106; Score =31.7; E_value=2.6e-06; Accession=PF02892.5; Description=BED zinc finger
MTSPSLPQSSSSDTGRFSGSQQETLSQPQQEYINDSKPIQIDDDEPQLEDVDFGTKRKLTSVVWKDFKKVKVRDDVKAQCLHCHKQLGGKSINGTKHLHDHLKICTLRRIKLMGQNKTLAQSSLRLNSQEGGKKSVENYTFDPEVARRELASMITLHEYPLYIVDHTSFRRFVSALQPLFKMVTRNTIRFIYVPAPHTAEVICEELYEALVGWNIDERISTLTLDNCTANDKVIPDLINKIGKSKLMLEGSLLHMLCAAHILNLIVKDGLEVIKSSIASIRESVAFWIATPKRVEKFEEIVKHVKVIVNHKLGLDCKTRWNSTYKMLSIALPYKAIFGHARRVEKLFDCAPSEQEWTFAREVLDRLKLFNDITEVFSGTNYVTANVQLLKICEAKEQIR

SEQ ID NO: 66929 - protein, 157 aa, Zea mays
  Coding DNA Sequence Number=SeqID_25150
MGGGGWGWLGLRFVTVVPIQKVTMMIGEGMRRIRRAVERARVWPHVCCHLRTACIIIRDGGGRGIGHDGDQPHIERGAGQDVSGRGRSDGGSGSGSSCANQTSAMVVSDVSYRNTSGTSIHTDAISARFNAQNESACYSIPGKRSPVVQIQAPLFYK

SEQ ID NO: 66930 - protein, 141 aa, Zea mays
  Coding DNA Sequence Number=SeqID_25151
MSAAGAHQRRGCGHAEGPRVTGIAQGGLRGCGEHERGHSTIAEAPEGGDTVAKRLGNDATSLRGTDLSALTPSAHSQLTSLLRESRLPDRPPLHSSALADWWVPSVGAFPSESPAHDPRVAMDSAPTTHAEAAPIPTLAFF

SEQ ID NO: 66931 - protein, 210 aa, Zea mays
  Coding DNA Sequence Number=SeqID_25152
  Homolog annotation: Hit_ID=Q6QP54; Match level="QueryCoverage=42%, HitCoverage=38%, E-value=6e-14, Identity=63%"; Hit description =Putative kinase
  Subcellular localization annotation: CTP_CleavageSite=32; ConfidenceScore=5.10e-01
MFCNVCKTGETFLVRVRLTAAKSGLGRHRKLRLTRPQGSAPISASDNELRFARPPRLGLSLGSGRRRTPLRPTPGLGLSLGSGRRRTPLRPTPGLGLSLGSGRRRTPLRPTPGLGLSLGSGRRRTPPRLTPGLGLGLGSERRRTPPRPTPGLGLGLGSERRRTLPRSTPGLGLDLNLRRQIRPRPRRSLRLARPRARTDHVTGGPSLPYP

SEQ ID NO: 66932 - protein, 95 aa, Zea mays
  Coding DNA Sequence Number=SeqID_25153
  Gene Ontology: Mol. function=transferase activity, transferring glycosyl groups; Cellular component=chloroplast; Biological process =biosynthetic process
  Homolog annotation: Hit_ID=Q6ER83; Match level="QueryCoverage=92%, HitCoverage=11%, E-value=3e-35, Identity=80%"; Hit description =Putative digalactosyldiacylglycerol synthase
MAKHKSDLEGFKLDVYGSGADSQEVQSTARRLDLSLNFFEGRDHAYNSLHGYKVFKNLSISDVLCTTTADALAMGKFVICVEHPSNEFLRSLSGT

SEQ ID NO: 66933 - protein, 103 aa, Zea mays
  Coding DNA Sequence Number=SeqID_25154
METATSHGKAPSRESGGKGREESPPRVKSHQSGDKKKKMKKVVYYETDSSSPSTSGSDAASVTSKRHERKKFSKIPLRYPCGGQISPGSTRRIKDLTKGPWAQ

SEQ ID NO: 66934 - protein, 119 aa, Zea mays
  Coding DNA Sequence Number=SeqID_25155
MAVRLPGGTPVSYFFSLVTNPAQFASLMSDLVPWLDVPGQGWACAWDFGTTGGILMVVCAVGTSACMEHGRPQALASGERGPYGVSYGAAAPDPVHLRGCGQCGKMGERRWYGLERLGL

SEQ ID NO: 66935 - protein, 444 aa, Zea mays
  Coding DNA Sequence Number=SeqID_25156
  Gene Ontology: Mol. function=transferase activity; Biological process= biosynthetic process
  Homolog annotation: Hit_ID=Q69LA5; Match level="QueryCoverage=79%, HitCoverage=85%, E-value=1e-169, Identity=76%"; Hit description =Putative sulfolipid synthase
  Pfam annotation: Domain name=Glycos_transf_1; Domain location=223 -386; Score=57.5; E_value=4.4e-14; Accession=PF00534.10; Description =Glycosyl transferases group 1
  Subcellular localization annotation: CTP_CleavageSite=48; ConfidenceScore=5.75e-01
MAAAVLAPKPPPPLPTRAFPSSSPSRFAPAFISPRHPLRRLLLRPIPCASSPSSVLMPNPDLETEPAHDGDGDGDEAPPESRPRRIALFVEPSPFAYVSGYKNRFQNFIKYLREMGDEVIVVTTHEGVPQEFHGAKLIGSWSSFPCPWYQKVPLSLALSPRIIAEVARFKPDIIHASSPGIMVFGALIIAKLLCVPLVMSYHTHVPIFLFLLIVPYISQTVHMFPANKIRLWNKGVDSESFHPRFRNMEMRSRLTVMDRLPGARIAFIGDGPFRAELEQMFSGMPVVFTGTLQGEELSQAYASGDVFVMPSESETLGFVVLEAMSSGVPVVGARAGGIPDIIPEDQEGRTSFLYTPGDVDDCVGKIKRLLSSEELREAMGRAARKEMEKFDWRAATRKIRNEQYSAAIWFWRKKRAQVLRPLQWVLRLLRRTMPGAADAAAKQS

SEQ ID NO: 66936 - protein, 106 aa, Zea mays
  Coding DNA Sequence Number=SeqID_25157
  Subcellular localization annotation: CTP_CleavageSite=56; ConfidenceScore=5.15e-01
MEDLEDYNCSAYSYSYNYSTTPSKQHQQQPSASSKQQHATSSKQQHAASSGKKQTVARSNRKHVAASVLLYLYQRRQLQHQPNKSENKLSNKHAAQSHKHVYCSYG

SEQ ID NO: 66937 - protein, 230 aa, Zea mays
  Coding DNA Sequence Number=SeqID_25158
MDVLGQPGEGRGEVRSNGQAPVASDRSCVLRAILDCLRAQASRSNRLRARRHSGRSRPIKRSPIAKAGRAGAKRRRRNQDPTSSPREQRGVCVIVFDTQTQSSSEKADEQGRCLCFLEGGGPCLGGAWHPSHPLGPGLCVVRDCAGLVGCSVSSIELATGGRREAGQLVVMGDIRRRPRSRETDAHKLGDLACGVHLLIDPATREIRFYTSKLCRKVLQKLFINLRGDFV

SEQ ID NO: 66938 - protein, 113 aa, Zea mays
  Coding DNA Sequence Number=SeqID_25159
  Gene Ontology: Mol. function=galactosyltransferase activity; Cellular component=membrane; Biological process=protein amino acid glycosylation
  Homolog annotation: Hit_ID=Q2R3F9; Match level="QueryCoverage=87%, HitCoverage=82%, E-value=2e-17, Identity=46%"; Hit description=LGC1, putative
MDTCTSERAGNAAGACSLSDLAVTQTAVPSKANVYAVTVENRCICTQANVKLACDGFSSSVAVDPGVLSVDGKLCTLNGGRPIGMGPEYAVKFSYASPSQFAFKPVSSSIACS

SEQ ID NO: 66939 - protein, 181 aa, Zea mays
  Coding DNA Sequence Number=SeqID_25160
  Subcellular localization annotation: CTP_CleavageSite=59; ConfidenceScore=5.21e-01
MVRTVRVPDSSWDSSNGFKGSFYVVNLSGGDRMQAREHVSNRYGDNGGTSRGRRCNLTTLMSKSGGSITMQAQERVSNRYGDNGGTSKGRRCNHTTLMSKGGGSITIQGGGIYRERAWAQGWPNYSQTLGSVAVSCSCPRGNDGWRLGPKPTVGPGCQREPNQLHLRTIQCTGGRFRSRLL

SEQ ID NO: 66940 - protein, 132 aa, Zea mays
  Coding DNA Sequence Number=SeqID_25161
MPKVAANRVCGHEGIRHIHHATRKDVPDDLRVGACDEWEAAQSKTRPHGGGIERRGEWRQEKVEEVERRGWDGEEKVMGVSKLEVRRVQQNEPTQEGGSEGREVFEGDKVDVLEVVPVEAAVGGVNHAHGRC

SEQ ID NO: 66941 - protein, 46 aa, Zea mays
  Coding DNA Sequence Number=SeqID_25162
MAGERCMGRAGEETAMHPVHHMIDEMPPLDIVWDEDLLDAEGLQGV

SEQ ID NO: 66942 - protein, 123 aa, Zea mays
  Coding DNA Sequence Number=SeqID_25163
MVSTTTAHEPFDESPLAKVIWDEESYHGFDPYGLVHQCKLAVFKAPMMSKSDTHKVFDPLSSQVVWDDELLQIYEPQDSSLKLVALEECMQLANGEEHMTDEKTHHIDELAAKDGSTYARDSP

SEQ ID NO: 66943 - protein, 362 aa, Zea mays
  Coding DNA Sequence Number=SeqID_25164
  Subcellular localization annotation: CTP_CleavageSite=47; ConfidenceScore=5.50e-01
PKPQRAWPTGDLSLARPSRRLSRLRSPPTTCVPGLLRSRAPAPPTARAHQPPQQPHPRRRIKEIGLLSPLLNPKLLSRSTPCSENRIVDLELARSSSAPVEVNPPSPFPFPPPFFFVAVRFLAFVVVRGSPMAASATSAVRGSPMAAGVCSAVRSLPGTACPRHVAPAWRACCLARASSLRVARRARGAAWHGYGLVRTPPSPRDDPRPSMVWPSASARPLPAPAWSLPARGGAPAQPWCAAPCLGPALARRLSALSAAGPRPSPCARPWLARGGARPKLAARCTSYAARCARRGRPRRAQSGCSRLAPDATCSLRAARGPGTRGQLDSLLNQRDQARGNPMRRGMWRCGDENDGFGIDYGN

SEQ ID NO: 66944 - protein, 50 aa, Zea mays
  Coding DNA Sequence Number=SeqID_25165
MSRTFDDYYIEDCGVILAPEVTQRRIDNNDLFVILATIRHKRAHLNVLGT

SEQ ID NO: 66945 - protein, 262 aa, Zea mays
  Coding DNA Sequence Number=SeqID_25166
  Gene Ontology: Mol. function=protein phosphatase type 2C activity; Cellular component=nucleus
  Homolog annotation: Hit_ID=O82470; Match level="QueryCoverage=63%, HitCoverage=44%, E-value=5e-20, Identity=36%"; Hit description =Protein phosphatase-2C
MGAKERGGGAVRAVARGAVGADNGLPERGLSVLRRFALPLPRLPLLHDQVQDRARAHALSVSFFLLAFVGATKISLLVFLPRGGNAAVLAQALDLGLNWEGFGMEDGVFDGHGRCGQLVSKLARDHLPFMILSQRNALLLGSDGDGDRDGPAFSDASPTALSSTDGSRSGRSSLAPAQMLEVWREACANAFETMDRELGVQARVDCDFSGTMSVCATKQGEDLIVANLGDSRAVLATVSETCYLKAVQLTIDQKPNVPRESS

SEQ ID NO: 66946 - protein, 262 aa, Zea mays
  Coding DNA Sequence Number=SeqID_25167
  Gene Ontology: Mol. function=sequence-specific DNA binding; Cellular component=nucleus; Biological process=regulation of transcription
  Homolog annotation: Hit_ID=Q6IER2; Match level="QueryCoverage=88%, HitCoverage=88%, E-value=9e-43, Identity=49%"; Hit description=WRKY transcription factor 19
  Pfam annotation: Domain name=WRKY; Domain location=100-162; Score =109.8; E_value=8.2e-30; Accession=PF03106.6; Description=WRKY DNA -binding domain
MDGGGDKSALASELAQVLAMVRELEARMDQDPLPAAARELCAGLASSVDRSIRIARSCCADLPDGNAAAQSKRRQVDHRKGTPCVRRQLRAASLQDAAALDDGLSWRKYGQKDILGAKYPRAYFRCTHRHSQGCLATKHVQRADGDPLLHDVVYHGAHTCVQAAHPGANQLRQELQLQHGHSAQDKDQGACSPLALATGLLEPMTPYSFASGADFPLFSPTGLDGQLRSSHGAGIGVEFETLFEELFTNATEPFQWDLYAAN

SEQ ID NO: 66947 - protein, 73 aa, Zea mays
  Coding DNA Sequence Number=SeqID_25168
MRGQTDGPTDLAALLADNYVQITIADAVHMTTSRKRNESGRKRNRWRRKSNSLADRWTVTFLAHRSATRMAQP

SEQ ID NO: 66948 - protein, 264 aa, Zea mays
  Coding DNA Sequence Number=SeqID_25169
  Gene Ontology: Mol. function=transcription factor activity; Cellular component=nucleus; Biological process=regulation of transcription, DNA-dependent
  Homolog annotation: Hit_ID=Q9C7W2; Match level="QueryCoverage=23%, HitCoverage=18%, E-value=7e-17, Identity=66%"; Hit description=AP2 -containing DNA-binding protein; 51686-52693
  Subcellular localization annotation: CTP_CleavageSite=68; ConfidenceScore=5.52e-01
MDASLRTLPPAGSSFRGEVRSAVSSLLLSSRGTSALDSSFFSHLPPLGSSVYYRQCELLRNFAASQTQQSAAAACSPSSSSSGLQLQTPVPHDDATAAAAATLLRQICTAACGSGSGASGWTEIRPAAKPGCACGSAPTTPPRRPRTPTTVPPTGSAASTRASTSPASWTGLPGADCPDHLRRLRAAVDAKIQAIRARRQQRNKRESARSGANAKLPTARPIASETSTTPDGVLSVSPASADGGCPLDRMPSFDSELIWEMLSL

SEQ ID NO: 66949 - protein, 139 aa, Zea mays
  Coding DNA Sequence Number=SeqID_25170
  Subcellular localization annotation: CTP_CleavageSite=26; ConfidenceScore=5.05e-01
MARVVHTFYSPIGSARVLRSFPATFRTSQTGEIYALVRGLGTPVMVSSWIGWHRCLARSRGDDKGGSYDLRLTATVRSKITVRPDYYYVFCLHVWCDVNFSFILCLFVLWRVEEPVAEDLGDQQIEVAEQELIEGKLCP

SEQ ID NO: 66950 - protein, 72 aa, Zea mays
  Coding DNA Sequence Number=SeqID_25171
MEEGDTRGHQGKGETKGLRRKNPLNLGKASANYSTISSIESQLFATSQLLTISSIVSIPLSYTAHDFLLYYS

SEQ ID NO: 66951 - protein, 208 aa, Zea mays
  Coding DNA Sequence Number=SeqID_25172
MAMNVVCCRCEGESSSCPHPLNSYSHPLNGGPLGVWEVNHQIARIYRMVNSIPVLFTLACIRSCVTFGLLPSVKPKVLIYIKVHIITHAISHVSYVSSFINTYCDDEGFCFGMGCTLELGPGANVWTETLGVGRPKAAQSLKAAGWAQNWIAKTVFSRNKTVTVKTNEKSVKPFSIPFPNTIYLFSFRNRKIPEVNENGRKNGIRNGT

SEQ ID NO: 66952 - protein, 239 aa, Zea mays
  Coding DNA Sequence Number=SeqID_25173
  Gene Ontology: Mol. function=nucleic acid binding; Cellular component= intracellular; Biological process=ATP synthesis coupled proton transport
  Homolog annotation: Hit_ID=Q10DW2; Match level="QueryCoverage=100%, HitCoverage=62%, E-value=4e-98, Identity=77%"; Hit description =Splicing factor 3A subunit 3, putative, expressed
METFGRYLDLHELYNEFINSKFGTLMEYSAYVGCFSQTDKISHSHKATRKYREYLEHILEYLTSFLYRTEPLQDIDKIFLKLESEFEEQWANEGILGWGNKGTEKESEIDLDYYSTVEELVELGPEKLKQALAARGLKSGGTVQQRADRLFLLKVTPLEQLDRKHFAKVPHTKDGSNTAPNGNAFKEDMKKEIALMEVKMKRLCELLDEGSTKAFVRTKENAEKKLTLTYEEMEAEREE

SEQ ID NO: 66953 - protein, 109 aa, Zea mays
  Coding DNA Sequence Number=SeqID_25174
  Gene Ontology: Mol. function=nucleic acid binding; Cellular component= intracellular; Biological process=ATP synthesis coupled proton transport
  Homolog annotation: Hit_ID=Q1SPF0; Match level="QueryCoverage=87%, HitCoverage=19%, E-value=5e-25, Identity=59%"; Hit description=Zinc finger, U1-type
MASTVLEATRAAHEDLERLERLAVSELQREPANPRDRLFQSHRVRHMLDLVVSTSGKLVEIYEDKDNARKDEINTHLTAPTQSGLFSKYYERLKEVPYLSACLDVTKVK

SEQ ID NO: 66954 - protein, 242 aa, Zea mays
  Coding DNA Sequence Number=SeqID_25175
  Gene Ontology: Mol. function=receptor activity; Cellular component =integral to membrane
  Homolog annotation: Hit_ID=Q8H399; Match level="QueryCoverage=87%, HitCoverage=36%, E-value=4e-32, Identity=66%"; Hit description =Putative membrane protein PTM1
MTPIVASLSLAHLVVALLLMLLALLCVDASVHDYDGERFATDGNAFVLHGGTVVVRVSTAPLRVARSSALRRSRSKDARVGDRSRGGRQPHDHGHSGHLQGRRPRRRRGHRRLRRWRAGALLHMGHGEGGEARGLHRGGAVMYRARNDNTGWPRVLAASFLPGGLDAAFPVEGVVVARTGMYTLLFVHCDASLAGGQVATAGKTIWKNSRCYLPDRMASLVPFYGAKSLALAASWFAQCARF

SEQ ID NO: 66955 - protein, 133 aa, Zea mays
  Coding DNA Sequence Number=SeqID_25176
  Gene Ontology: Mol. function=receptor activity; Cellular component =integral to membrane
  Homolog annotation: Hit_ID=Q8H399; Match level="QueryCoverage=76%, HitCoverage=17%, E-value=1e-16, Identity=61%"; Hit description =Putative membrane protein PTM1
  Subcellular localization annotation: CTP_CleavageSite=32; ConfidenceScore=5.09e-01
MEASSWYFYLVEFNESGSAPAARRSGRPRPARSAARRRTCWCWPGHGVVQPALAGLKSARVAGLGVMFFAAAKALEVSKNADTVSDHSSSPTRRLFLVLPGGPQRGVRLLDLQLAVKDAEQAQGDDQRSFAPN

SEQ ID NO: 66956 - protein, 129 aa, Zea mays
  Coding DNA Sequence Number=SeqID_25177
  Gene Ontology: Mol. function=receptor activity; Cellular component =integral to membrane
  Homolog annotation: Hit_ID=Q8H399; Match level="QueryCoverage=97%, HitCoverage=22%, E-value=1e-27, Identity=50%"; Hit description =Putative membrane protein PTM1
MYWRLNNALIIAVAVSLSWITFEVQFKSTDEYNERWRATWVIPTVCQLILFSLLYAVCLMWAPSQSAARYAYLDDEDEGEDSDMEDKRSLIRPDPLSYVDYWTISVSKDATTIILRTDSFVIGGGGKRV

SEQ ID NO: 66957 - protein, 160 aa, Zea mays
  Coding DNA Sequence Number=SeqID_25178
MARPSNPSGHFTPSFPAPANISQCGPSTAGEPTPQDDHARELGLGASRAATWWTDKMGLGASSAAPWYTGDGVSSSWRSRPRAQPPRVPGDKSFEEFLLASGAASSSVPSRHQVRLPAQDQEALGAGDQAAAVEARERRSRRMAKRKEAAARHHRPEKHA

SEQ ID NO: 66958 - protein, 280 aa, Zea mays
  Coding DNA Sequence Number=SeqID_25179
  Gene Ontology: Mol. function=protein binding; Cellular component =nucleus
  Homolog annotation: Hit_ID=Q69JZ7; Match level="QueryCoverage=99%, HitCoverage=100%, E-value=1e-127, Identity=72%"; Hit description =Putative XAP-5 protein
  Pfam annotation: Domain name=XAP5; Domain location=108-278; Score =275.0; E_value=1.5e-79; Accession=PF04921.5; Description=XAP5 protein
MSGFGDGYVGTAQDAVKIRRLEKQREAERRKIEELKNKSADGQPGLLQFGSSTSEILETAFKKETVGLVSREQYVEKRVNIRTKIEEEEKEKLQKLQQEEEELQMQKRKKRRVKSDPRLSFCDDIENGSDEDDFENQETKKNGPAKLGKDPTVETSFLPDSYWDGTGHRRAIQVRKGDTIGEFLRAVQQQLAPEFREVRTTSVENLLYVKEDLIIPHLFHFDVHEDVRTIADATKEKDESHAGKVVERHWYEKNKHIFPASRWEIYDPTKKWERYTIHGD

SEQ ID NO: 66959 - protein, 131 aa, Zea mays
  Coding DNA Sequence Number=SeqID_25180
MGEQGSVRGALNPSREAGAGKLRRSWGARWPWLGAPGELRQVAASSEEQTRGGRGSRAQLDTGLGDEAATLGRRPSQATKEQLQQQIRLKAYLGLRSCGSRRCVAANPRRYPAIRSESTKRLSLPSSAPAR

SEQ ID NO: 66960 - protein, 101 aa, Zea mays
  Coding DNA Sequence Number=SeqID_25181
MVQCPDGSDRQLSSPSLIAVRIRARYGRDNTGEKGDSYMATSPELGRSFLTGSRCDSARLAALSPYFDLSYCASFLRGRHALTTHLVATDRFRTSATINSH

SEQ ID NO: 66961 - protein, 596 aa, Zea mays
  Coding DNA Sequence Number=SeqID_25182
  Gene Ontology: Mol. function=hydrolase activity, hydrolyzing O -glycosyl compounds; Biological process=carbohydrate metabolic process
  Homolog annotation: Hit_ID=Q5W6F5; Match level="QueryCoverage=96%, HitCoverage=98%, E-value=1e-157, Identity=52%"; Hit description ='putative 1,4-beta-D xylan xylanohydrolase'
  Pfam annotation: Domain name=CBM_4_9; Domain location=19-202; Score= -4.4; E_value=0.0064; Accession=PF02018.8; Description=Carbohydrate binding domain
  Pfam annotation: Domain name=Glyco_hydro_10; Domain location=248-539; Score=190.9; E_value=3e-54; Accession=PF00331.11; Description =Glycosyl hydrolase family 10
  Pfam module annotation: Pfam domain module=CBM_4_9::Glyco_hydro_10; Domain location=19-202::248-539
MALLPKRRAQEETTRYLGTNLIESCGDSEDGLAGWAPSGSCTLSAHADEDASLPSLAAALSAAAGGDDEGDDSDEDEFQQRAPRPSGRYVLAARRASDKDGLCRAVSRAPIRPNVTYRVAGWVGLGAAVDGSHAVHVEVRVDGGGRPVGGGVAVVESGKWGQIKGSFRVDCDEPPRHAKVYVHGPPAGVDLKVTTDLQVCAVNKIPRLRHLRKKADKVRKRDVVLKVSRRTDVDDDDTTASVAGAHIQVVQVQNSVPIGSCITKAGMQNPEYVDFFTKHFDWAVLENELKWYYTEAVRGQVSYADADELIDFCDRHGKPVRGHCIFWAVENSVQPWVRALSADQLRAAVEARLRGLVSRYAGRFPHYEVNNEMLHGAFYQQRLGDDINAHMFRETAQIDPAPALFVNDYNVESANDPNATPEKYVALVTDLQRRGAPVGGIGVQGHVTHPVGDIICDALDKLAVTGLPIWITELDVSAADESVRADDLEIVLREAFAHPAVEGIMLWGFMQGHMWRSHGQLVNADGKYTQAGNMFAGLRREWTSHARGKVDSIGNFKFRGFHGTYQVLLTTPAGEVKKRTFDVHKGDAPLVLDMDF

SEQ ID NO: 66962 - protein, 80 aa, Zea mays
  Coding DNA Sequence Number=SeqID_25183
MDSSDIIAIVLVYCMVCLSKGLSVPIGFKGFCISIEHVYRFTDQIDKHHTHTKFILNMLSIIMHVMVNQLQSDQRKNGLL

SEQ ID NO: 66963 - protein, 72 aa, Zea mays
  Coding DNA Sequence Number=SeqID_25184
MLDPASSHYPTWRAQVLFTLRCFALPDHVLDGLVTSLSPSWAHMGSVVLSWLNDTITVELQDIVHDQADTAR

SEQ ID NO: 66964 - protein, 91 aa, Zea mays
  Coding DNA Sequence Number=SeqID_25185
MAVILQPLDRDHLHVAGPGPECLPSSSAGPPDYASLRRASATPTTPTPPQLLPLGPGMPWSPMVGGWDSASDATAFCHHGNDPPPPPPDWG

SEQ ID NO: 66965 - protein, 60 aa, Zea mays
  Coding DNA Sequence Number=SeqID_25186
  Subcellular localization annotation: CTP_CleavageSite=50; ConfidenceScore=5.04e-01
MVYTTAARISDYHHSILGSAGAPLQLQHHDTSTTTPKRVAPGSSLGQAPNAVAVPGSSSA

SEQ ID NO: 66966 - protein, 146 aa, Zea mays
  Coding DNA Sequence Number=SeqID_25187
  Pfam annotation: Domain name=HEAT; Domain location=10-45; Score=16.7; E_value=0.084; Accession=PF02985.12; Description=HEAT repeat
MASSSAAASAAALEAVQVLVASLADDSPVARDAALAALRDIAPLNPMLILDCCATVSRGGRRRFGNMAGVFLVMASAVRALDHSDAESEFLRKIAKIATAEIVTSKTDELVMKSSYDFLSRSNTPPPRLPNLTCSGRFTLLLSHIP

SEQ ID NO: 66967 - protein, 55 aa, Zea mays
  Coding DNA Sequence Number=SeqID_25188
MVIVSGSRLPHRSGKGDASGIEIKLCLDRGASENLESSSMWIRGDRQITDTTGKI

SEQ ID NO: 66968 - protein, 117 aa, Zea mays
  Coding DNA Sequence Number=SeqID_25189
  Subcellular localization annotation: CTP_CleavageSite=34; ConfidenceScore=5.64e-01
MATSQRTKAAKARWGSAALMQATAAMAMRRSRTCAAAAAAGGRGSGSMSARWWCLLQSRGDGFSTASRAFTADRREESGSGDPRYRCCGPALACIPTIHDKEIIWWWLCWPCLAGAH

SEQ ID NO: 66969 - protein, 123 aa, Zea mays
  Coding DNA Sequence Number=SeqID_25190
  Subcellular localization annotation: CTP_CleavageSite=46; ConfidenceScore=5.19e-01
MPRVNPHPLIPRIDGRCGWRPRSRARPCVNPALVMPASSPRPRIPRVDLASTEPPPTDSSGPFLPVVLLRAPPVCLSSSSVQVCDHIGSAPDPINHQSLGSVLELKEHLVLHLFLAPIWWKHQ

SEQ ID NO: 66970 - protein, 136 aa, Zea mays
  Coding DNA Sequence Number=SeqID_25191
  Homolog annotation: Hit_ID=Q5KQL3; Match level="QueryCoverage=46%, HitCoverage=38%, E-value=3e-24, Identity=85%"; Hit description =Putative ribosomal protein S19
  Pfam annotation: Domain name=Ribosomal_S19e; Domain location=2-99; Score=23.1; E_value=3.3e-11; Accession=PF01090.9; Description =Ribosomal protein S19e
MAHQICAAASPPLCANPPVQIIYLRQGIGVGGFQKIYCGRQNNGSHPPHFCKISGAISHNILLQLQKMYIIDIDPKGGCLITSQGSLRVIATLGYNDDRFALGRSTRCKARNSGIEPYIVAHHLNQRLIEHHQSIV

SEQ ID NO: 66971 - protein, 175 aa, Zea mays
  Coding DNA Sequence Number=SeqID_25192
  Homolog annotation: Hit_ID=Q94HJ3; Match level="QueryCoverage=96%, HitCoverage=26%, E-value=4e-18, Identity=35%"; Hit description =Putative SCARECROW gene regulator
MESPEYCEINSNMTLDYINRLLMEEGTDEKASIYQQLDALQAMEKPFYDIIGQTYPSSPMETMISRDNQVDCPQDNYSKQARRGCFVSDILEPQGVHLVANDWTYECDHFSLQFERGAEEANKLVPNIAKLADLDSNGLSDSNRMIEATIGQKGKHGSKIRSHPHVDLEFLEARN

SEQ ID NO: 66972 - protein, 726 aa, Zea mays
  Coding DNA Sequence Number=SeqID_25193
  Gene Ontology: Mol. function=protein-methionine-S-oxide reductase activity; Cellular component=nucleus; Biological process=regulation of transcription
  Homolog annotation: Hit_ID=Q94HJ3; Match level="QueryCoverage=99%, HitCoverage=99%, E-value=0.0, Identity=62%"; Hit description =Putative SCARECROW gene regulator
  Pfam annotation: Domain name=GRAS; Domain location=328-633; Score =366.6; E_value=3.9e-107; Accession=PF03514.5; Description=GRAS family transcription factor
MPIEPSFDDLYTITAPGQRQDGSSFSSQQQLTLYDHRLCDPQLFHKPTNESNMQFSGVVTIPGMHNVSTNLGQNHLQITTGVSPDYQRIRSNNALHHISQILMEDVDERVGSHEGGAALQDAEKAFYDILQQVYPPSLDWSPLHNSSEAGGPNEGSSNYHKRPRRSSFTNDISSHSMLQSLPAPLSPYGYGRSLLLPYQSLANTGRASRFGSPALQTRREAEDAKWFDKMVINLDDDKLFISILTTAKAKRIVGKSKYAIFQITGHRNNPYIQDLDTREGRSKKHTISCEISRNEKLDTVLLCYGLDCFIETARLRDMAVKEVSKDAPKGQSKANAQQKSQGGTRQLKKEVVDLRTLLIHCAQAVAADDRLLASELIKKIRQHSSRDGEWCQRQAFYFVNGLEARLTGTGSQLFHKMLAKRVSEDVVLKIYNFYLAVCPFHRASYTFANQTIMETSVGQSRVHIVDFGVCYGFQWPSLIQLFGEQGVTPRLRITGIEVPRPGFSPLENIERAGKLLADYANMYKVPFQYQGIYSRYEDIQIEDLNIEEDEVLIINCMYRMKNLGDETVAMDSARDRVLKIMRRMNPKVSIFGILNGSYSSPFFVTRFKELLFHYSSLFDMLNTNVSRDNEARKLLEGGLLGRDILNIIACEGADRTERPETYQQWQARCLKAGFEQLPLDPAIMKSVLWMKKEIYHEDFVADEDNGWLLQGWKGRVLYALSKWKVN

SEQ ID NO: 66973 - protein, 207 aa, Zea mays
  Coding DNA Sequence Number=SeqID_25194
MEPIPDRVVAMVQPTSSCGAAVDPRHRLGTSRLISDLATPDDDEVAGLREGEVLATLQVIAIPLCSDRWSSAPRSRMRRPWQVCWDTEKMDLPQGPTGSESLLDGGNRREAGAGAVAGGQSYPDSTRAVQRSLFTGWKMNLTSGPHIVSGTARREGDVWLVCGPHWQHLEPCTYRAWTWATQGELVSFIPISNSKFKFDSKFKVSKI

SEQ ID NO: 66974 - protein, 192 aa, Zea mays
  Coding DNA Sequence Number=SeqID_25195
MSNAKTARFGPAANWEGYRRQPNYTEAMKEGMDCRPVSGHYADGDGRSWSWHQTYESGAGGGLPKPVVVAIRALRSFVGVGAVAACKVAAEDAVDCLSEGGVSRHQPGRSSKNAVIGGALAGAAVSVADGYYNRSHGGNAGTPQVIKAAVAGGAIGAALELISHRRHVDRLRTDGQTMELTHEPNPLTSGRK

SEQ ID NO: 66975 - protein, 103 aa, Zea mays
  Coding DNA Sequence Number=SeqID_25196
MASLATAQAVLRRLHGDGQRLARNSWCQTDNPTPERPEEVSDHLRRTRREAIAAVDGDGGSLVLCPLPFLSAGYRDFGPYKSYPLNKNLVLEICKKRDIIGLV

SEQ ID NO: 66976 - protein, 133 aa, Zea mays
  Coding DNA Sequence Number=SeqID_25197
MGSRRLLAGFLYAPLGRHSWWEAPQRRPIYWSGLQIVPNCRQLGVAPARGKDCALRRRIASLRREGAVMSGGAAVAGRELGGSARGRWILANGGDVSDLIPVRRIDRNRLEKIVRLALKITNFLGQCDRSPRF

SEQ ID NO: 66977 - protein, 83 aa, Zea mays
  Coding DNA Sequence Number=SeqID_25198
MPPETPKPNATEHERKEKKKFNFFSENWGEVREDPIHARSLLQPLDRDDGELLPMAHMSEGERGATTMDGSFVGDSQRIWEIE

SEQ ID NO: 66978 - protein, 245 aa, Zea mays
  Coding DNA Sequence Number=SeqID_25199
  Pfam annotation: Domain name=Oleosin; Domain location=117-244; Score =89.6; E_value=9.4e-24; Accession=PF01277.8; Description=Oleosin
MDRPPFLFWHSTESDNNQQTIAALSFKAISFAPRCEAGASPPRVARITLILSSSSTLYKVVSIFVLGAAPTALAIATTSARRMHGHQQQPYPYGLRQDPLRRMRGLDVKSALQASPRTSTVATAALVVPLGAALLCASGIALAATVTGLALATPPLVIFSPVLIPFALAAGLIASGLLASGALGVAGVSALTWAVGYVWQRQGEGGGGVTGMVVQPLDQGSKRHGVQGAAAFVGHRRLPRDIDVA

SEQ ID NO: 66979 - protein, 128 aa, Zea mays
  Coding DNA Sequence Number=SeqID_25200
MAGKKDSLAIMPGRRGILCYEPPRLDPTAQNLRRPDPITTAYPRSNDTNATGERVFLDLISPIRIRSRSRGSPNPNREYYERGLTTYRHVGVAGHDETRLRRGRETPTRNFTDHHCSSRLNPPQSRPT

SEQ ID NO: 66980 - protein, 191 aa, Zea mays
  Coding DNA Sequence Number=SeqID_25201
  Homolog annotation: Hit_ID=Q69Y39; Match level="QueryCoverage=75%, HitCoverage=33%, E-value=5e-55, Identity=74%"; Hit description =Putative ZmEBE-1 protein
  Subcellular localization annotation: CTP_CleavageSite=30; ConfidenceScore=5.20e-01
MASCGSFYFVPLLLLMLLLASPATAALVTSSQPGGNATAARPRPGMEQLKRKRIRALLTKLNKPALKTIQSSDGDIIDCVPSHLQPAFDHPKLRGEKILDPPERPKNRNFTFGGSGRSRVGEVVVQAWHATGEACPEGTVPIRRTTEKDLLRASSLRRYGRKPARRGVRRDSTSSGHEYHNLKCSRKQHKF

SEQ ID NO: 66981 - protein, 56 aa, Zea mays
  Coding DNA Sequence Number=SeqID_25202
MACWRPERKKVTGGSVVAFTGAAVLRCLVSELYSTERPTSALQVCYVDQEQNPQEF

SEQ ID NO: 66982 - protein, 186 aa, Zea mays
  Coding DNA Sequence Number=SeqID_25203
  Homolog annotation: Hit_ID=UPI00004C1732; Match level="QueryCoverage =34%, HitCoverage=4%, E-value=3e-19, Identity=66%"; Hit description =UPI00004C1732 related cluster
MAGKKDSLAIMPGRRGILCYEPPRLDPTAQNLRRPDPITIAYPRSNDTNATGERVFLDLISPIRIRSGGRGSPNPNRGYDDLRHVREAALLRISQTFLTKWVLHVPERQATPLGWIDMSVTFGTPAKFRTETLSFEVVGFQRTCHAILGRSCYAKFMVVPNYTYLKLKISNGASKSENNSNSARKG

SEQ ID NO: 66983 - protein, 350 aa, Zea mays
  Coding DNA Sequence Number=SeqID_25204
  Gene Ontology: Mol. function=protein dimerization activity; Cellular component=nucleus; Biological process=regulation of transcription, DNA-dependent
  Homolog annotation: Hit_ID=Q2QRD1; Match level="QueryCoverage=60%, HitCoverage=21%, E-value=2e-51, Identity=50%"; Hit description=HAT family dimerisation domain containing protein
  Pfam annotation: Domain name=hATC; Domain location=254-333; Score =9.7; E_value=0.0031; Accession=PF05699.5; Description=hAT family dimerisation domain
  Pfam annotation: Domain name=zf-BED; Domain location=63-113; Score =40.9; E_value=4.5e-09; Accession=PF02892.5; Description=BED zinc finger
  Pfam module annotation: Pfam domain module=hATC::zf-BED; Domain location=254-333::63-113
MTIEGRRNSWTQGTNVGKDRRACEGHALNNYAPLTLARIKDCPFNGILNDDEQSAKSSHHSTSAVWLDFQKLFKNVNGKKVKYIAKCIHCSKQYSAFSSGGTSHLTRHRDKCPRRHEKTRMSQSHISFNPDGSMRNWESCPMAHNELVQLLARLEVPIYMVESAAFEYYIRTARNPQFVPISRQTTSRDMVKYFNDKKAKLVETLSSSIVNLDYLSVVAHYINLDWQLEKRVLSLVLIDVSHNGQNIVDRVAGVLADYGLTNKLHCLVLTILHLHLCFIILLRLRRVVPPNLSGSSTSSSESTFSLTGRIIDEWRRRLKSYVVEMLTYIKDWEDAKVRMQHLVDDKELEE

SEQ ID NO: 66984 - protein, 48 aa, Zea mays
  Coding DNA Sequence Number=SeqID_25205
MQKPDSDQLDSEHTSPQRRNIIESELGGQEEKVIFLFLKQVRIPLLQG

SEQ ID NO: 66985 - protein, 185 aa, Zea mays
  Coding DNA Sequence Number=SeqID_25206
  Gene Ontology: Mol. function=transferase activity; Biological process= flavonoid biosynthetic process
  Homolog annotation: Hit_ID=Q6ZBI7; Match level="QueryCoverage=67%, HitCoverage=27%, E-value=3e-33, Identity=61%"; Hit description =Putative hydroxyanthranilate hydroxycinnamoyltransferase 2
MANVMDSEAVQVVESSFVVSSEPTPSEGLWLSPLDLILANRGHTPTVYLYSSSSNAVAAADGFFDVARLKEAMAKTLVAFYPLAGRLGVNNDDGRAEITCTGEGALFVVAHADLTVGDIEDDFRSSPELRRLFVPRIEPASIILAIQVSSFCFFQALRVYWTLVHCLDIDNAAYACARVPRLLDA

SEQ ID NO: 66986 - protein, 334 aa, Zea mays
  Coding DNA Sequence Number=SeqID_25207
  Gene Ontology: Mol. function=transferase activity; Cellular component= nucleus; Biological process=flavonoid biosynthetic process
  Homolog annotation: Hit_ID=Q6ZBI7; Match level="QueryCoverage=87%, HitCoverage=64%, E-value=6e-97, Identity=59%"; Hit description =Putative hydroxyanthranilate hydroxycinnamoyltransferase 2
  Pfam annotation: Domain name=Transferase; Domain location=2-333; Score=5.3; E_value=3.3e-11; Accession=PF02458.6; Description =Transferase family
MTSNRTIEAEFVVVDRFLGRGMTRGEKRKRKKQHFNRLLVTFLKFGGVVLGTALHHTASDASSAFHFFQTWSALCKYGDRATVELPCHDRTLLRARSPPTVHPDALSRFYPKLTFSDDPLGSGPLAVEVFAISKDQVASLKRLCGGTSTFCAMSALVWQCTLIARRLPPDSETRLIFPANVRGRMRPPLPNRYFGNALIRLGVTGAVQDIASEALVSVAGRIKDTIDRMDDELVRSAVDYCEMAEMDSRPVKGTLLETELMLISWLGMPMYDTDFGWGKPAVMSRAESIRGGFVYIIDDGPTNGVGSGSGGVRVLMCMEAANMKELERLLYAKL

SEQ ID NO: 66987 - protein, 249 aa, Zea mays
  Coding DNA Sequence Number=SeqID_25208
  Homolog annotation: Hit_ID=Q6QP51; Match level="QueryCoverage=24%, HitCoverage=32%, E-value=4e-12, Identity=64%"; Hit description =Putative growth-regulating factor 1
MATPRTTRPVALTLRRDRRRLWQGKRATLRLRHNDRVKKGPRKGDTLKRTLLREGNRLRASLLIRGSKAGPSEGFNSRLRARGLHTHYWSEVRRPAPRKGSTAASGHSGSAPTTDQGPDLRHHRKLRFARPRARTRAQPWKTVNSAPPDPGLGLGLSPGRRRTPLRPTQGSDSGSAPEDGELRSARPRARTWAQPQKTTNSASPDPRARTQPWPQPTVSASPDPGARTRPRPRKTGSTSTSEEPPHRPT

SEQ ID NO: 66988 - protein, 103 aa, Zea mays
  Coding DNA Sequence Number=SeqID_25209
MPRLTELKEARTRDRVGTRGEFTATDTLDNHRRRQITKNTTTAKNRLGDDDRHAREELDTKTRHTVTSRKFSCVRQIKKERTARAQRARHESSTRAGTTARKE

SEQ ID NO: 66989 - protein, 142 aa, Zea mays
  Coding DNA Sequence Number=SeqID_25210
MDRGKCLAPECPYHGRSKSCPPWERWVVSRNSSLSCYSIILVTGFTSQGDDERLRCSDAGESFKCGETGLRGDAHVGVTRGRGFRRGLGKEWGKGQLRVFVASWARLVAAVARTPKERLRVHRGGGWARPACGALRELGHGC

SEQ ID NO: 66990 - protein, 97 aa, Zea mays
  Coding DNA Sequence Number=SeqID_25211
MTSTKEVITQTAPAIDPKIHFPVLTKEEKENEEEIIEKPIKVVSPAMPKNIKPILSTHVANSVKAELEVVVSPKFDLDPEKASASKTYTIANALKEK

SEQ ID NO: 66991 - protein, 41 aa, Zea mays
  Coding DNA Sequence Number=SeqID_25212
MALGEETVSSGDKDTNDNSTSEELFEVLNVPYAREQDLNVA

SEQ ID NO: 66992 - protein, 38 aa, Zea mays
  Coding DNA Sequence Number=SeqID_25213
RFCFHTAYVEVKVVIHRRILILGDNFFLYYGFFLVFYT

SEQ ID NO: 66993 - protein, 228 aa, Zea mays
  Coding DNA Sequence Number=SeqID_25214
  Gene Ontology: Mol. function=metal ion transporter activity; Cellular component=integral to membrane; Biological process=metal ion transport
  Homolog annotation: Hit_ID=P0A8H3; Match level="QueryCoverage=58%, HitCoverage=52%, E-value=4e-70, Identity=99%"; Hit description=Zinc transporter zupT
  Pfam annotation: Domain name=Zip; Domain location=11-228; Score=20.6; E_value=7e-07; Accession=PF02535.12; Description=ZIP Zinc transporter
MDRRVSAGRRAGLDYGQRGAGVARLGLPARGWAFGAGITRVGARMRAAGRARLCPASCERENGGRRERVGERERSEGPVLGYGMFIFGLLGYFGLDRMLPHAHPQDLMQKSVQPLPKSIKRTAILLTLGISLHNFPEGIATFVTASSNLELGFGIALAVALHNIPEGLAVAGPVYAATGSKRTAILWAGISGLAEILGGVLAWLILGSMIIPGGSGRLSWTEVARIYG

SEQ ID NO: 66994 - protein, 141 aa, Zea mays
  Coding DNA Sequence Number=SeqID_25215
  Gene Ontology: Mol. function=nucleic acid binding; Cellular component= intracellular; Biological process=translation
  Homolog annotation: Hit_ID=Q8H6I0; Match level="QueryCoverage=99%, HitCoverage=8%, E-value=4e-54, Identity=73%"; Hit description =Putative gag-pol polyprotein
MKKVVYYETDSLSPSTFGSESSTTSKCHERKKYIKMPLRYPRISKRAPLLYVPLGKPPYFDGKDYCMWSDKMRHHLTSLHESIWDIVEFGAQAPKVGDKDYDSDEAAQIRHFNSQATSILLASLCREEYNKVQGLKNAKEI

SEQ ID NO: 66995 - protein, 189 aa, Zea mays
  Coding DNA Sequence Number=SeqID_25216
MDKNQNLTYALYIMALILAKTRFEGRCEVAHTSFRPFKNEIAFLHRALTPFPDVEDAAGDDEEADPVADAAQQMPPPPPPPQQGQYWQPGPGYFDPYLHQIQQGLQHHMDSQYQGLMTHIDGRFQAMDTRMTALQTHVDGQYSAITSRLCNIDDQFDGVFSEFSELRTHIHNTVHDPIMNRMNSMQQSF

SEQ ID NO: 66996 - protein, 59 aa, Zea mays
  Coding DNA Sequence Number=SeqID_25217
MTLLDVAECLRTISTLTSVCIGFLVIINNVGKGFGQSLTMSRSLRLLFGTMFMFGILPN

SEQ ID NO: 66997 - protein, 138 aa, Zea mays
  Coding DNA Sequence Number=SeqID_25218
MAHGKRWRCLRLPWGKEPHYFWDREPRGDGTLVYVTAVVCARGDESDWNGWNFEGRGRTPREGADRAAYTILQDIMERFSGELATAMPGVFPRGDPYASIWEQTTGSALGGGTSEHLHSDNATMSAMFVVMKAYRGVE

SEQ ID NO: 66998 - protein, 170 aa, Zea mays
  Coding DNA Sequence Number=SeqID_25219
  Gene Ontology: Mol. function=nucleoside-triphosphatase activity; Cellular component=integral to membrane; Biological process=protein catabolic process
  Homolog annotation: Hit_ID=Q5Z974; Match level="QueryCoverage=51%, HitCoverage=12%, E-value=5e-16, Identity=55%"; Hit description=Cell division protease ftsH homolog, chloroplast precursor
MEIQSQGAEEPRRRQRPELLQADDAPDILSRLLVLAASLALTADVPAPTPTPAPVPELQTEAPALTANPFSSSLLTASKSSASASAFDLPEGMQWRYSEFLSAVKRDKVERMRFSKDGSLLQPVVVDCRRATVVVPNYPDLIDILATNQPALRRLQELIGWLRRASAAPV

SEQ ID NO: 66999 - protein, 78 aa, Zea mays
  Coding DNA Sequence Number=SeqID_25220
MGESDPVGRCRGEYQLRREISPWWRYPVTVAHGRTATGLLAFWWSKEGRSLTLSLILELVNVLELLEIQLDTFFFLFT

SEQ ID NO: 67000 - protein, 88 aa, Zea mays
  Coding DNA Sequence Number=SeqID_25221
MAVMGSTLDKMYLCQVPSFGFLNDKAETGRHLRTSPQHWRPPPVNSLPLFELMASFNNQAEAASAMKLEPFIKSKWSHIPITFSQEDL

SEQ ID NO: 67001 - protein, 176 aa, Zea mays
  Coding DNA Sequence Number=SeqID_25222
  Homolog annotation: Hit_ID=Q6QP51; Match level="QueryCoverage=28%, HitCoverage=23%, E-value=2e-12, Identity=70%"; Hit description =Putative growth-regulating factor 1
  Subcellular localization annotation: CTP_CleavageSite=45; ConfidenceScore=5.63e-01
MQAACNRAKWAHFSDSQHAQPGGPGPRVTRPARRMLCACNCTATCATTAPPRLRNQNRDSRPPSARPSSASLARRRSGRRFAFAIMTTSVKGPGKGDTPKRILPHEGTRLRASLLIKGSKAGPSEGFDSRLRSRGPYTHYWSEVRRPAPRKGSTTASGYSGSAPTTDQGFEGWPPK

SEQ ID NO: 67002 - protein, 87 aa, Zea mays
  Coding DNA Sequence Number=SeqID_25223
  Subcellular localization annotation: CTP_CleavageSite=37; ConfidenceScore=5.49e-01
MQSACNRAKCARPSDFQRTQQGGPGPRVMQPARRLLRASNYAATRTTTTPPLMWNQYHDSRQPCGPGKGIPRKGYFSVKETGPEPPY

SEQ ID NO: 67003 - protein, 101 aa, Zea mays
  Coding DNA Sequence Number=SeqID_25224
MASPALLLPWARAPLPLQERHPVFCMEKKASCPTLIGCSERCTNRNRHRPYKHRLDLFMNRFRKLNCLTQFNIESILGDYKSYVVQLPSFPKSLGSLFLVV

SEQ ID NO: 67004 - protein, 45 aa, Zea mays
  Coding DNA Sequence Number=SeqID_25225
MALSRNVQEQWAYIMLEIDSIYIGKTKATSGGSWGLPLEANRGFL

SEQ ID NO: 67005 - protein, 635 aa, Zea mays
  Coding DNA Sequence Number=SeqID_25226
  Gene Ontology: Mol. function=RNA-directed DNA polymerase activity; Cellular component=mitochondrion; Biological process=RNA-dependent DNA replication
  Homolog annotation: Hit_ID=Q8S463; Match level="QueryCoverage=89%, HitCoverage=30%, E-value=0.0, Identity=87%"; Hit description =Putative prpol
  Pfam annotation: Domain name=RnaseH; Domain location=37-164; Score =6.0; E_value=1.6e-05; Accession=PF00075.14; Description=RNase H
  Pfam annotation: Domain name=rve; Domain location=347-506; Score =122.1; E_value=1.6e-33; Accession=PF00665.16; Description=Integrase core domain
  Pfam module annotation: Pfam domain module=RnaseH::rve; Domain location=37-164::347-506
MGETISFAPRKAIKSQVLADFVAEWVDTQLPTAPIQPELWTMFFDGSLMKTGAGAGLLFISPLGKHLRYVLRLHFPASNNVAEYEALVNGLRIAIELGVRRLDARGDSQLVIDQVMKNSHCREPKMEAYCDEVRRLEDKFYGPELNHVARRYNETADELAKIASGRTMVPPDVFSRDLHQPSVKIDNPPEPEAPSTQSEVPSVQTEVPSAQPEAPSARPEAPLVQLEAPSASEGELPLDRAEARRVARRAKSFVLLGDEKELYHRSPSGILQRCISVAEGQELLREIHSGACGHHAAPRALVGNAFRQGFYWPTAVADATRIVRTCEGCQFYAKQTHLPAQALQTIPITWPFAVWGMDLVDPLQKAPGGYTHLLVAIDKFSKWIEVRPLNSIRSEQAVAFFTNIIHRFGVPNSIITDNGTQFTGRKFLDFCEDHHIRVDWAAVAHPMSNGQVERANGMILQGLKPRIYNDLNKFGKRWMKELPSVVWSLRTTPSRATGFTPFFLVYGAEAVLPTDLEYGSPRTRAYSDQSNQASREDSLDQLEEARDKALLHSARYQQSLRRYHARGVRSRDLQVGDLVLRLRQDPRGRHKLTPPWEGPFVIAKVLKPGTYKLANSQGEVYDNAWNIQQLRRFYP

SEQ ID NO: 67006 - protein, 810 aa, Zea mays
  Coding DNA Sequence Number=SeqID_25227
  Gene Ontology: Mol. function=DNA binding; Cellular component=nucleus; Biological process=regulation of transcription, DNA-dependent
  Homolog annotation: Hit_ID=Q6ZHD2; Match level="QueryCoverage=53%, HitCoverage=96%, E-value=2e-52, Identity=35%"; Hit description =Putative late elongated hypocoty
  Pfam annotation: Domain name=Myb_DNA-binding; Domain location=69-111; Score=41.6; E_value=2.7e-09; Accession=PF00249.21; Description=Myb -like DNA-binding domain
MARIQEIPEFPSPFVKPRTDQRPAVDVDHVGHGNFTGHLKSTLSSGDMDLPGGARAPKARKPYTISKQREKWTEDEHRLFLEALRQHGRAWRRIQGSKTAVQIRSHAQKFFSKVIRESSGGDSNGNGNGVAAPPQIQIPPPRPKRRPTHPYPRKLGSSVGKDDASAIKRLQEPQLQAQSPSLSEQETCSPKSVLTTAEGSGSPASSVYMMEDRCLTPSTAVALSKEATTSDEAACELPGGPVLWLFGKRVVVSNLFDQQPSSNTGSLQLQRVADMELDASAPESPTSCGTGKKLSSHAAEEAKTWHPWLTGTRQFMHCLPQGEQFSVHSACRPLSYGDGSMPYTAWNAQTVTSNKQQDNQPSQAAADCEVTRAQGSWTEPSVTTSSSSVVETAQNSDSVESTKVNNDGDKVAPVPGSRKCASVVPDCLRGFAPCKRTPQSKMLLQSEAPGEADREMTRLCLRSAVTYERQIDTGEAAFHKRDGAIFGRDPSGFSSSFRNLDKDHSAIQELQKIERAKSEIGAPTADVQPGGGAMGGIRRRQAGGGSGRALLIANPNGGGRWKMSARGEGACHDSEAAEAEACGSSDGLLFDHLLFTSIYVQKARDPLPRSAVMARPRSSSSAAARLLLLLVAVAAALQATDTALPVASGFIRKSCRAMQYPSVREHSLAAYRGSPPSWSLRELARAALAVSVDRARASFAYVGRLCGSRSGSGDGSPRRGAKKGSAAAGPMRNCLENLADSVGHLPDAAQEIGGAGMVLCFAGSGRHGPLNGSCYLGRPGTVGPTPCRAREELWARRAAQHGTTRLSVRA

SEQ ID NO: 67007 - protein, 96 aa, Zea mays
  Coding DNA Sequence Number=SeqID_25228
MASKSVQGTPQYSLDSVRGRDGVDRPLWRHQLLIGEGRLPWIASLRGPPSPRRHGCGRRPGDGEVRRGAWVAAPCSGRSRGGGWLCAVDILLDDVD

SEQ ID NO: 67008 - protein, 166 aa, Zea mays
  Coding DNA Sequence Number=SeqID_25229
  Subcellular localization annotation: CTP_CleavageSite=28; ConfidenceScore=5.28e-01
MACGPRRLGGPCPGPPPAAVRPLRGFARASARLQRKGARPRPGHLRHGLGGPQRAWARPQEVTRQRRWWRARTGSRWSVAWQPNDTRAHSHNAQARPRRLARSPVEHGHGCGLMHAARRGAQASPGVQATAVAARERTCEPVCMPAACAAAARRRTARVMSQPDGA

SEQ ID NO: 67009 - protein, 167 aa, Zea mays
  Coding DNA Sequence Number=SeqID_25230
  Subcellular localization annotation: CTP_CleavageSite=77; ConfidenceScore=5.59e-01
MPHAPVSPPLTGGARNRPRKSRARQPNLRWGGYTSSRTPQGGLWGIGRPAGARRSDRRRSAVGAKGSTQTNKKIKVRVQNKGAKETEENPGLAHRTVRCATGLCPVHHRTVSGAQGRTPSNLPPSGFLKSCSAIIHRTVWWVTRLSVHRMRRELDQGNEDATPQKKT

SEQ ID NO: 67010 - protein, 381 aa, Zea mays
  Coding DNA Sequence Number=SeqID_25231
  Homolog annotation: Hit_ID=Q6ATI4; Match level="QueryCoverage=83%, HitCoverage=72%, E-value=1e-118, Identity=66%"; Hit description =Expressed protein
  Subcellular localization annotation: CTP_CleavageSite=21; ConfidenceScore=5.27e-01
PPSHFGFFRNYGPSPLPPFVRTAGLSLDISFLPVPPACGAVLVDSRNGRLLLRELGPGYPRELRLLVCSPLEKAYVRVPPLCIAEHMVACSVLVPGEGDAFRVVVVLFGNDPKHFSVLVYFSISSAWESATGPVHRNLVPRQGPSVVVGDVMYKLQSEEKYIMVVDAVQMTLSAVPLPDARTLLYAGNHWIGRTPDGRLCFFVIREQLTLATWVLQAPGKWVEQQPVDLRTLMHPAFMGDLAHMKLSAKMSDQLRGFKLVSFAAFCEGTCTLFFVMADWVVMLDPRTRRLLRLWRNSDESRPLGDVYPCEMLQWPPVLKNFGGSESDEAGKCCWYLFYCGKIRTIQLEYTDAKESVLQAAQKALETLNYLAQPHVVSIFAE

SEQ ID NO: 67011 - protein, 198 aa, Zea mays
  Coding DNA Sequence Number=SeqID_25232
  Homolog annotation: Hit_ID=Q6ATJ0; Match level="QueryCoverage=18%, HitCoverage=13%, E-value=2e-08, Identity=66%"; Hit description =Putative GTP-binding protein
MGEKGRCLGHIRRIYPSDSHTKCHGGSNQVPGSMGSRNGNMERLDPDKAGPHSGTGIRSGGAGGRRSVLHVHFQNIEGSLCKNVDPTCQRTEGKSTLVSALSEADLYSDDRRKALLSDTVGFISDLPVQAEYTLGPIDMEYSLQGGHISQTSNERGSFWWRDISRMTEGYRGIAMPKAGDGRTFLLWMDVWNNVHLTT

SEQ ID NO: 67012 - protein, 208 aa, Zea mays
  Coding DNA Sequence Number=SeqID_25233
  Gene Ontology: Mol. function=GTP binding; Cellular component =intracellular
  Homolog annotation: Hit_ID=Q6ATI7; Match level="QueryCoverage=78%, HitCoverage=70%, E-value=6e-42, Identity=57%"; Hit description =Expressed protein
  Pfam annotation: Domain name=MMR_HSR1; Domain location=3-86; Score= -19.2; E_value=0.058; Accession=PF01926.13; Description=GTPase of unknown function
SSRSLAREAGGSTRVCVGARDRKEGLVEAFHATLEEVVEADMLVHVLDSSASNLEEHRSTVLQVLQQIGVSQEKINNMIEVWNKIDLVDENVKSDGIDDEVFLTEGEQEDDIFSEDDAPSEQTSFDSVDVDDGADSEYLSEENSEDSNELPSKKSFAEPTEMGAMKELSSKECFGELRVLDTNGHTFPQPASTCHVKTSAVTGTGLQE

SEQ ID NO: 67013 - protein, 49 aa, Zea mays
  Coding DNA Sequence Number=SeqID_25234
MAPLPLFLFLICFLTVLIMLQGLNSLLDEEAVMRKRLRETKEQLVRQRF

SEQ ID NO: 67014 - protein, 131 aa, Zea mays
  Coding DNA Sequence Number=SeqID_25235
MDGVRSLSGGACRSDLRSVECREPWALFNYRKPRPPTDRADQPAPVLHLQTAPAPCEPTLQRDCTAIVPSGGGVPRRDSEIDDRRNALDFDSPGDANRIVPWRKSRVARISVGIACFIVFMMILSVIGLFR

SEQ ID NO: 67015 - protein, 108 aa, Zea mays
  Coding DNA Sequence Number=SeqID_25236
MCTSHAIALRISPETTRHSLPHFNAKSNATGNNGPYSRERQRMEDFLGRVDGDGWMPRRLLLRGAEWSKDEFMVPACIDCKSITSPPRKLQIFHAATLVLSELKAMLP

SEQ ID NO: 67016 - protein, 230 aa, Zea mays
  Coding DNA Sequence Number=SeqID_25237
MTGYELLKRVKESVALRDILVVIISSENGNDGAFCDVVGPSPGLGEAEAPPRSRSSLSSEAEVESEPLGRARRRPSAEARAESEPWGRARRSSSSSGAEPESEPWGRARRRPSPSPSPGSGEAEFVVFRGRARVRALGRAKQSSSSSGAEPESEPWVGRSGVRCLPGPSPSPSPGSGDAEFPMAPEAELGCCQPHSVEWHSSRSGAGGAVLLSGRSVERRSDCGHFGSVD

SEQ ID NO: 67017 - protein, 69 aa, Zea mays
  Coding DNA Sequence Number=SeqID_25238
MRDSTGGRAHIPGSCTSLVTPRDKRSSKWDSLEPNNETTRNDVDQDHVVLCHVRDELQPVLAVANVVKN

SEQ ID NO: 67018 - protein, 166 aa, Zea mays
  Coding DNA Sequence Number=SeqID_25239
MEDHLFTPSRCSQLGYASTVAREHLFDITLVSDYDNDDANPGLMMMIGSYDFRVHGQCTMFLACAKLGERLHILIDTCTIHIVLDIKFSRLANLGEQCVYTTMLVGSGNDIAHPRAYLNISLHINTKMFQLNVLLMDLGVNVDFILCMPWLVVLGNIMWNFVTLEM

SEQ ID NO: 67019 - protein, 141 aa, Zea mays
  Coding DNA Sequence Number=SeqID_25240
MMNVLHITEGKPEDDMTSEQEKNTMRLILYVMANKHEAREPGTKPAFWARSEPGTALKSMSDTLHARFTWTRSDGVRLTEKLETLLEEVDVSTPLEEHTVAPRQEMNYTIHHVMAMLQVALGGGTPPSQRPTNTLNKGKAD

SEQ ID NO: 67020 - protein, 80 aa, Zea mays
  Coding DNA Sequence Number=SeqID_25241
  Subcellular localization annotation: CTP_CleavageSite=45; ConfidenceScore=5.22e-01
MAMTFYSVLSPHPWSSPICGWGGGSSPALLASSVCGPVGDPWTVVAMSWWFQSMCGHSPLLVPYLVSHPVHHQIRLVFSN

SEQ ID NO: 67021 - protein, 62 aa, Zea mays
  Coding DNA Sequence Number=SeqID_25242
MAVDEFSYLSTGGRDETLMAGKKGGKSRKKDKGSNRRHPSTLPSEDFGDSELSDEWSPSPVP

SEQ ID NO: 67022 - protein, 77 aa, Zea mays
  Coding DNA Sequence Number=SeqID_25243
  Subcellular localization annotation: CTP_CleavageSite=56; ConfidenceScore=5.47e-01
MPCAMVAISADSKLPSQMHVLVPAVGSPIPSLMEAGGSSARRRSHIQIRRFFSVARGKSVSQTTNTCRRIRKTKQIQ

SEQ ID NO: 67023 - protein, 157 aa, Zea mays
  Coding DNA Sequence Number=SeqID_25244
MGIALIPSIKEPPKILGPPTDVLVPKTLESHAGAPNGSTGFSRPEWVHANREHRYSTVRPLATDERTRSGRTTCVTRGQSREGTQFKGIDRLLRKFGREVPTTALRFFTEFVDSVIAIALKLRLFASTKAERAEDKRSEDPALAGFYEAMEITNVEK

SEQ ID NO: 67024 - protein, 366 aa, Zea mays
  Coding DNA Sequence Number=SeqID_25245
  Subcellular localization annotation: CTP_CleavageSite=20; ConfidenceScore=5.01e-01
MHLHGMRESKQGRHLGFVTSCAVLLSRIRYVPRVVGGAFLGRTPASRPGRTPSWHRALSAAHHPPTNCPAQAVRPHAAVAWPGPARNGYMSAPVLASNPLSGAGTSARATMIACCCRWRGVARAALGARTALPASHSVRGREAPPPGTGTAAISWLYAAQIVLSSLSALEQAWGAVALWSAVPPVAVSLQSRDVSAWGGRAGVAGAFPFWPHSHGPVLDHRHLSMASSPWIQTSRRQKRLSFFTALRSALGHGPDTAALLVTRPHDRCPGTNDGHAGLPPRLKGPPRVEPPLPPRPCGDDDLRWRWESNEEPQGWGVSSSRRCSLQPAWKVGEGHDLLNESLQMDILGAEATQKVQLQGTIGDGLA

SEQ ID NO: 67025 - protein, 377 aa, Zea mays
  Coding DNA Sequence Number=SeqID_25246
  Gene Ontology: Mol. function=zinc ion binding; Cellular component =integral to membrane; Biological process=ubiquitin cycle
  Homolog annotation: Hit_ID=Q5EAE9; Match level="QueryCoverage=81%, HitCoverage=78%, E-value=6e-55, Identity=41%"; Hit description=RING -H2 finger protein ATL5C precursor
  Pfam annotation: Domain name=Gemini_mov; Domain location=1-72; Score=- 29.1; E_value=0.088; Accession=PF01708.7; Description=Geminivirus putative movement protein
  Pfam annotation: Domain name=PHD; Domain location=119-164; Score= -1.4; E_value=0.079; Accession=PF00628.19; Description=PHD-finger
  Pfam annotation: Domain name=zf-C3HC4; Domain location=120-161; Score= 38.4; E_value=2.4e-08; Accession=PF00097.15; Description=Zinc finger, C3HC4 type (RING finger)
  Pfam module annotation: Pfam domain module=Gemini_mov::PHD::zf-C3HC4; Domain location=1-72::119-164::120-161
MEPARRLLLSDYDGAIESPLPSPPPSSATPFRPGVAVVVGILTSVFSITFLLLLYAKHCKRSAAESSGPYGSAGSGGGFGSSGNGAGGDRRNSGVDRAVVESLPVFRFGALRGQKEGLECAVCLGRFEPTEALRLLPKCRHGFHVECVDTWLDAHSTCPLCRSRVDPEDTKAAAAAAAGKEPAPAPPPAPAPTPAQSGRRISGRHSTGSVRAPGRVGPASRRSADGGVAVGCFDGAKVRKDRVLLVEPAAVVAEPDPVAFDRRFGHRILVSTAGGCKGETAPAAQQRWSDLRPSDLMFVRAEFLVTDAGRHSCSAAVNSGNARSAIGVRSVSELAGVRRLPPIRAGACEGEPRAGGGGARRWPGSSWWAPRGDPGRA

SEQ ID NO: 67026 - protein, 159 aa, Zea mays
  Coding DNA Sequence Number=SeqID_25247
MEKSRGDMLAEEAKLAREGFKAPGHQILTICKSLVVAAVVGGVGIDTVFTCTMCAFSLLAHAILKIKGVVTFVESQSSRSYIINVYVVIWNEAKSQLLLIKVTVTKVEVGCLGDRVCVDLCSIMQPGGDLLVCVYLSPVHCCYTLVLCALDWLCIIWDV

SEQ ID NO: 67027 - protein, 292 aa, Zea mays
  Coding DNA Sequence Number=SeqID_25248
  Gene Ontology: Mol. function=carboxypeptidase activity; Cellular component=membrane; Biological process=auxin mediated signaling pathway
  Homolog annotation: Hit_ID=Q5JNG4; Match level="QueryCoverage=99%, HitCoverage=80%, E-value=1e-113, Identity=67%"; Hit description =Putative MtN21
  Pfam annotation: Domain name=DUF6; Domain location=17-124; Score =21.4; E_value=0.0031; Accession=PF00892.11; Description=Integral membrane protein DUF6
MGGKDCVPPVAMVLVQLGFAVMNIVSKLALDAGMSPYVLIAYRNLIAAAVISPIAYLLERWATLNQVLFVVGLKSTSATVACALTNTLPALTFVMAAALKMEPVRPGTAAGQAKLVGTAVCVGGSMLIPFYKGPVLRVWASPIHWRFAEHASPPAAAAAAGAHTGPAAVLGDVLVIASCVAWAVWFILHTKISQGFSAPYTSTAIMCLMAGVQCAGVSAALDRSLAVWKLGFDIRLYSVLYIGIVGSGAGFTLMSWCIQVRGPLYVSMFSPLLLVIVAVVGWAILGDKIRLG

SEQ ID NO: 67028 - protein, 88 aa, Zea mays
  Coding DNA Sequence Number=SeqID_25249
  Subcellular localization annotation: CTP_CleavageSite=51; ConfidenceScore=5.26e-01
MALIALVLARPITMGRITHGPPLVVRAQEVRLRLATRERRGSHRPPSAFVCAMRGRSRRAKGSVFTFAPTFALRGTSSTKSAGAEDHR

SEQ ID NO: 67029 - protein, 154 aa, Zea mays
  Coding DNA Sequence Number=SeqID_25250
MGKGKRGRGSPHRADDKWKRDPSPPSEDFGDFEYSEEEVSSESKGSLALASPLASSDDSDDSQGIAAEVWTYILSIERAGLEGSDESEVSSDEEDSFGSSEERSGDDSDNEGGGGGGDSDNGDDGGGNDDGCRGGEGDDDGSGGAKASGKAPLV

SEQ ID NO: 67030 - protein, 859 aa, Zea mays
  Coding DNA Sequence Number=SeqID_25251
  Homolog annotation: Hit_ID=Q208N4; Match level="QueryCoverage=25%, HitCoverage=74%, E-value=3e-55, Identity=79%"; Hit description =Putative calcium/calmodulin dependent protein kinase
  Pfam annotation: Domain name=efhand; Domain location=397-425; Score =16.5; E_value=0.097; Accession=PF00036.22; Description=EF hand
  Pfam annotation: Domain name=efhand; Domain location=433-461; Score =3.6; E_value=6; Accession=PF00036.22; Description=EF hand
  Pfam module annotation: Pfam domain module=efhand::efhand; Domain location=397-425::433-461
MTGAVDSSLARAMEAQSQAIEAQSQALATQARLLQQICDLLDAQDSHWGVLERTVSSNVTSIDPDEVLDNHCVGEPIATFASAADATFSSTAGVECGTIHSYAATNTEITDNWGSDFDRGEDLFEPNRLRQHAMLDAVTADALEEFSSLSDTKTTISNRGPNFPKLVIADLVVDHLFTASIEGTPPKCLVKCLNVFSSSDGHHTRDDGPVFDTLGNDDLDGRHHLLGRRKQTAVAGDIDVRPDPAERAASVTLEPGVEAADAEDVEEPHPNVTVLHDVYEDTCGVHLVLELCSCGELFDRIKHLASDLHVPSIPPISTAALSVPEAAELELYGITDDLPEFVKSMTISTVGRHDLSSEELDNLQIHFARIGADGENATLAKFEQVLKAMKLEALGPLAPRVFDLFDNNRDGTVDMRDVLCGLSSLRNFHGDGALQLCSQMYNVDRFGCINKDELASMLRALLEKYLPGEIAEHGKLDQVFDDMLTKGDVAPGVFVQIAVLDDHLVDVLLDAAVPGWNIVQREGISIFHHACSGTHNQKALCSEMFSQVTEEEPRLWELNVETDAYTMDFLNEHWKIYECNFLKSWNLGTLTTLCWKSPWPPPNSLQSLHAGVGLGSIACLWGFRGLNFYGSTLHGLVSAKAYETTIHGASDETNIGIIRVVFRDERIMVCQIVVRMKESVPPSVITMNTIVGGLCRAGRVCDALEFLLEKRIVWPEAKGNTVTYSPLKLRDTQDVQLFQFIDGGAPFDFSKTPEEAARVGQPWPSPIQFERQDIRSPIDMFRSLMNEKAKGDESELDDIHVAVREGTCSRVTRVAATRPEPLPRPCLEAEQHMPDRPSHVTSSTMKRTTLSVAWGQAAT

SEQ ID NO: 67031 - protein, 97 aa, Zea mays
  Coding DNA Sequence Number=SeqID_25252
  Homolog annotation: Hit_ID=Q2QTF1; Match level="QueryCoverage=89%, HitCoverage=64%, E-value=2e-23, Identity=64%"; Hit description =Expressed protein
MAACIVIVASEEEHGDDIALAQEDMECKARDVPGGASALGNKRPAQASGEGEEHEISGPSDKHGGCGKGERDGHVQQAEHNVVHDGCIERDWPGPVM

SEQ ID NO: 67032 - protein, 137 aa, Zea mays
  Coding DNA Sequence Number=SeqID_25253
  Homolog annotation: Hit_ID=Q39620; Match level="QueryCoverage=60%, HitCoverage=17%, E-value=2e-07, Identity=36%"; Hit description=VSP-3 protein precursor
MVDACGVGEACQMGTSDGVVPGTGEGDRAALVYGVMHGADRGNGAARGMIVVDGATRCVGRGIGSACGTCKSDEATLVDGVVHGASENGGTMLIDGATLGAKGSTQTNKKIQVRVQKKGAKETEENPGLAHRTVFGA

SEQ ID NO: 67033 - protein, 159 aa, Zea mays
  Coding DNA Sequence Number=SeqID_25254
  Subcellular localization annotation: CTP_CleavageSite=46; ConfidenceScore=5.34e-01
MGVVSYTCSGGGAAGHAATDGRLVVTAAALSTTVALLLVSSTAGCVAGAGAAAMRQGDAEAEVQMSMQASVAGAFFVSPDGGDENELVRDMYSRLNLVINELNSIGINKIGDANMVKIISPLTQQRYGSIITILHNLEDLSQMTPTIVIRKIAAFEMSQ

SEQ ID NO: 67034 - protein, 167 aa, Zea mays
  Coding DNA Sequence Number=SeqID_25255
  Homolog annotation: Hit_ID=Q6QP51; Match level="QueryCoverage=35%, HitCoverage=46%, E-value=4e-07, Identity=37%"; Hit description =Putative growth-regulating factor 1
  Subcellular localization annotation: CTP_CleavageSite=72; ConfidenceScore=5.20e-01
MKESNHSSVASRATPGGRQSRSDHSHFAPPLTDLTGRQRRLPCSDYCATRQGSSASPDPRARAQPRHRKTISASPDPQGSDSTSTSDDGLRLARPQGSDSTSTSDDGLRLARPQGSGSISTKEDDLRLAQPQGSDSTSTSDDELRLARPQGSGSTSTTDDDLRLTRP

SEQ ID NO: 67035 - protein, 418 aa, Zea mays
  Coding DNA Sequence Number=SeqID_25256
  Gene Ontology: Mol. function=protein serine/threonine kinase activity; Cellular component=integral to membrane; Biological process=protein amino acid phosphorylation
  Homolog annotation: Hit_ID=Q2R8P3; Match level="QueryCoverage=99%, HitCoverage=57%, E-value=1e-145, Identity=61%"; Hit description =Protein kinase domain containing protein, expressed
  Pfam annotation: Domain name=Pkinase; Domain location=131-380; Score =69.7; E_value=9.6e-18; Accession=PF00069.15; Description=Protein kinase domain
  Pfam annotation: Domain name=Pkinase_Tyr; Domain location=131-380; Score=1.0; E_value=1.6e-12; Accession=PF07714.7; Description=Protein tyrosine kinase
  Pfam module annotation: Pfam domain module=Pkinase::Pkinase_Tyr; Domain location=131-380::131-380
MSSCQCGVLPGSANLCDDGRCVCVDCAFELNVARPNASLVPVKGGRGRKTMWIAIAAGTTAFFVFFVALQFALVLRCRRRRRRRRNEQDTSGGAQQSLMPPRVGSSRSRGPGSVVVENFMLDMLHASTDGFSDDSRIGTGSFGSVYRGTLPDGREVAIKRAEDSAKASSSVARHRDRETAFDSELTALARANHKNIVCLLGCCADSGERVLRGAFEYMHVYAVPPIIHRDVKSANILLDDAWTAKIADFGLSSVLDPGAGTPQEPLYTGGTVGYMDPEYYRLQHLTDKSDVYSFGVVLLELVSGCRVVQRYAESVTPKNVVEFAVPHILADDVARVLDPRLPAPTPGEAEALAYVGYLAADCVGPVGCERPSMTEVVVALERALVACGAAAPLSRASTGRRSVLSRSGTDQFDLTDTD

SEQ ID NO: 67036 - protein, 269 aa, Zea mays
  Coding DNA Sequence Number=SeqID_25257
  Gene Ontology: Mol. function=protein serine/threonine kinase activity; Biological process=protein amino acid phosphorylation
  Homolog annotation: Hit_ID=Q2R8P3; Match level="QueryCoverage=97%, HitCoverage=38%, E-value=2e-62, Identity=47%"; Hit description =Protein kinase domain containing protein, expressed
  Subcellular localization annotation: CTP_CleavageSite=28; ConfidenceScore=5.10e-01
MPPPRRLHLDATFLFLPVFLFATWRPVAAAALSTFAMAKADTTTIVCALLPSAASPLLVDLNCTAAGGDHARQVTYPSSHPFAALAGGENFLCASTASCGVLSSGELHCWRWRGLNISRDLRFAAAAVGDGFVCGILKGTPASIRCFGNDTAAAAVAGAPADGSFDVVAACGHRACALSTTGVLACWGHDPPTVAPDDAATGYAALALGEAGVCGLRTNSTIRCFGDGVAVPPAGLARAQFLDVRAYGKAFCGVLMSHGQLLPGLLGRT

SEQ ID NO: 67037 - protein, 105 aa, Zea mays
  Coding DNA Sequence Number=SeqID_25258
  Subcellular localization annotation: CTP_CleavageSite=65; ConfidenceScore=5.17e-01
MAIIVSAILRDAMLGVQTVTGARSPVKGYGRAGGQGRGSGLLMGEVSGAGVRWSARPSRPTLVACAAQRSECAQDSSQHLSGLDLGFLKSFSCHEHHRVKIRVWL

SEQ ID NO: 67038 - protein, 111 aa, Zea mays
  Coding DNA Sequence Number=SeqID_25259
MAVELGPVGKEAPQGWWSADPQRNWTMVVCGGWPTFVGGLPSIGDADPTISVGLSLCYSLVIPLNALGKFSEQRSGMEHDLGRLVAVAGTRRQWWGAELTGFDKVSGRAWH

SEQ ID NO: 67039 - protein, 75 aa, Zea mays
  Coding DNA Sequence Number=SeqID_25260
MENWNALMLSITTDWWSHPYKYGYAPVFALGTGSSSLAVAGVWSCGKRGLEEPPHGSSDPFAPKLSPIVNPRMGL

SEQ ID NO: 67040 - protein, 167 aa, Zea mays
  Coding DNA Sequence Number=SeqID_25261
MAKRIVVIHHIDAADDLDALPKVKRTAKGMLPGDEPIRGSDERFPPPGCSAAPTTVADATTENRYCPEAAPTPTTRAADENYLDGGRTLLHSYLLPLRRWPNSGLVDRAKLAQHYNGSEVRTLIPAGKSAHDSAGAGILGRGRCRSPAMRAEQGESGADRQGPQSND

SEQ ID NO: 67041 - protein, 132 aa, Zea mays
  Coding DNA Sequence Number=SeqID_25262
MRKEESDPSNKSMKNTNKLSLKSLSGCSGFVTWRGFDSFDLCLGVNALALVLNENLGKLGSLEWWWLGGTVQCSVRSDSTAHCSVAITMVNWNMEQPLETTVLPQGVEHDALGQSIRKVGDRLPYLKGASGE

SEQ ID NO: 67042 - protein, 44 aa, Zea mays
  Coding DNA Sequence Number=SeqID_25263
MEDQARLLTASSDTCSACNGHEIHVPQTAQQQLTAARELHFKLP

SEQ ID NO: 67043 - protein, 136 aa, Zea mays
  Coding DNA Sequence Number=SeqID_25264
  Gene Ontology: Mol. function=microtubule motor activity; Cellular component=microtubule associated complex; Biological process =microtubule-based movement
  Homolog annotation: Hit_ID=Q9FKP4; Match level="QueryCoverage=72%, HitCoverage=10%, E-value=7e-23, Identity=44%"; Hit description =Similarity to kinesin heavy chain
MLLHVTLPCIWYDEEDHYHSYTLQKLCNRGASIQLGDAFASLSAKKEPVLYGNSRITQILADSLGSSSKILLIVHANDSRKQLHDKEKEVLDLRQEVIGLKHSLKEANDQCILLFNEVQKAWRVSSSLQADLKVDI

SEQ ID NO: 67044 - protein, 175 aa, Zea mays
  Coding DNA Sequence Number=SeqID_25265
  Gene Ontology: Mol. function=transcription regulator activity; Cellular component=nucleus; Biological process=regulation of transcription
  Homolog annotation: Hit_ID=Q69TG3; Match level="QueryCoverage=90%, HitCoverage=63%, E-value=2e-78, Identity=88%"; Hit description =Putative RNA polymerase transcriptional regulation mediator
  Pfam annotation: Domain name=MED6; Domain location=68-160; Score =121.1; E_value=3.2e-33; Accession=PF04934.5; Description=MED6 mediator sub complex component
MSATPLPPPGPDGAVALLPPPGTDMTGICFRDQLWLDTYPLDRNLVFDYFALSPFYDITCNNESLRSRQIHPLDMSHLTKMTGMEYLLSEVMEPHLFVIRKQKRESPEKSSPMLAYYILDGSIYQAPQLCNVFASRISRAMHHISKAFTIACSKLEKIGNGLIVRCLIPMVLHES

SEQ ID NO: 67045 - protein, 301 aa, Zea mays
  Coding DNA Sequence Number=SeqID_25266
  Gene Ontology: Mol. function=microtubule motor activity; Cellular component=microtubule associated complex; Biological process =microtubule-based movement
  Homolog annotation: Hit_ID=Q69TG2; Match level="QueryCoverage=71%, HitCoverage=91%, E-value=2e-78, Identity=69%"; Hit description =Kinesin motor protein-related-like
MVMVPELRLLMNMCMVSSEVNVLSLDMETWRQHVTGGKLREITEEAKAFSIGNKALAALFVHTPAGELQRQIRAWLAENFEFLSRSPPTTDALGQLLSEYTKRDIAGTLATEEADDPAHVSKLRSALESVDHKRRKMPSLLDIDHPCAQKQIMEARKVVESLQEDPDDPAPQSNALGEGEVSQWNVLQFNTGTTAPFIIKCGANSSGELVIKADLRVQEPKGGEVIRVVPRPTVLADLSFEEIKGVFEQLPEAVSLLALARTADGTRARYSRLYRTLASKVTALKETVAEMERGGVFKDVR

SEQ ID NO: 67046 - protein, 136 aa, Zea mays
  Coding DNA Sequence Number=SeqID_25267
MGPYSNRSRITRNLNEPFDFPAPSALERRGCGPRKLAALKFSQRHSTIIHWTVRNSEHAEVRTTKSGCIGLSGVPPDCPVLQEDKGLQRSTALNPNGWLTWHPPDSEQCHVRCTTKLSGVPIDSKVSQQLGSGWRL

SEQ ID NO: 67047 - protein, 580 aa, Zea mays
  Coding DNA Sequence Number=SeqID_25268
  Gene Ontology: Mol. function=binding; Cellular component=nucleus; Biological process=regulation of transcription
  Homolog annotation: Hit_ID=Q69TH1; Match level="QueryCoverage=79%, HitCoverage=96%, E-value=1e-162, Identity=64%"; Hit description =Pentatricopeptide (PPR) repeat-containing protein-like
  Pfam annotation: Domain name=PPR; Domain location=140-173; Score =14.2; E_value=0.16; Accession=PF01535.11; Description=PPR repeat
  Pfam annotation: Domain name=PPR; Domain location=174-206; Score =21.5; E_value=0.0029; Accession=PF01535.11; Description=PPR repeat
  Pfam annotation: Domain name=PPR; Domain location=207-241; Score =20.5; E_value=0.0059; Accession=PF01535.11; Description=PPR repeat
  Pfam annotation: Domain name=PPR; Domain location=315-349; Score =27.1; E_value=6.2e-05; Accession=PF01535.11; Description=PPR repeat
  Pfam annotation: Domain name=PPR; Domain location=358-392; Score =14.5; E_value=0.14; Accession=PF01535.11; Description=PPR repeat
  Pfam annotation: Domain name=PPR; Domain location=394-427; Score=7.6; E_value=0.95; Accession=PF01535.11; Description=PPR repeat
  Pfam annotation: Domain name=PPR; Domain location=78-112; Score=22.1; E_value=0.002; Accession=PF01535.11; Description=PPR repeat
  Pfam module annotation: Pfam domain module=PPR::PPR::PPR::PPR::PPR::PP R::PPR; Domain location=140-173::174-206::207-241::315-349::358 -392::394-427::78-112
  Subcellular localization annotation: CTP_CleavageSite=36; ConfidenceScore=5.01e-01
MVYKERRSASWSFMPQAGACPWPGCLAACQQMRSCRCFHNPVPLTTALLRAITACTGCREAQALHSLAFKTGLVPDMVISTALLTSYAKRGLVAPAQRLFDEMPRRDVVATNAMLAALGAAGRVTDAGALFGRMSDRTPASWNTMVTCYCRAGDLAAARDVFEASLRAASSSVVSWNAMIDGYCRAGRMDAARELFDRMGSSLPDVVTWNTMMAGHLRRGDPASAISMFHLLMRRQREGEQRLRPTNGTMATAVTACARVGDLALGRQIHHLVQQAGIWMDAVLSNALMDMYFKTGSVGCALDVFRAMPCSPNLFCWNTVISGLGMNGRGEDAVAAFHDMVEGRGRVKNGSSVRPDGVTFVALLSACSHSGLVVEAREFFFQMLPVFGLPPQPEHYGCMVDLLCRVGHVDEAALLVQAMPGRPNAKVLGALLLDAHVLQRWQEDGVRLGEWAARRISELDLHDGAAYSLSNVYASLQRWDRVEEQRRQLRAAVRHAKGPRRKRPGRACSGPAPPAWLRLAVKAGMQTDDRWSVCDSPASQKPNVVTGCPDPLSRNAKRASCLNSCRQSTRTAGVHSLLHA

SEQ ID NO: 67048 - protein, 140 aa, Zea mays
  Coding DNA Sequence Number=SeqID_25269
MVVVRSSPGSFGPELRGGALCLRGCAAATPLCGCAAATPLCACVLVPWLVHTLQLSTAQSFNFDTCRATGRQPVAVRLLTAAACTIDKAHTHVFACSGAAAMAHRISRLQQMVVSSSIYSAKLGFRLNGPHGPSGPKLVS

SEQ ID NO: 67049 - protein, 502 aa, Zea mays
  Coding DNA Sequence Number=SeqID_25270
  Gene Ontology: Mol. function=metal ion binding; Biological process =metal ion transport
  Homolog annotation: Hit_ID=Q5JL93; Match level="QueryCoverage=34%, HitCoverage=47%, E-value=3e-13, Identity=29%"; Hit description =Glycine-rich protein-like
MGASKRFLVGRMVNSRRLWSPKDEQAWVHDRFDEMDLHDFHGDNPKRKQGGVFRGRGGGQGGRTRGISRGNFRGSRTRTYYHDGSKNYSYVPKESHAYRDNTKNAHHSSHINGKNRVPKPSRDHYDGAKSYDIVPNESHIYHGDAKSQKNAPRVVRGRGSKRYQPRLKSTSDVSSVQNTKSQSLEGTSSNANLVKDEAQGPNSRLEQVLPIKQTVASNLNSASPPFYPARSSSQEFAVGQGENTQELSTNLVRGKAFVPSGHVEAAINGMNRPALLPPASSSNGPFPVATNQVNRDYGHPAHPIVQQNPVQPPTRSAPRMPAQMFGATFSNGSKISPAQPTSTILDDDAEISSPSGSNKYDSRLTVKGQPDDQGEERASFLYGGARVLGATSAMGITLGDQNFHGTPALLPVMQFGGQRPVGRGVPSIGMALPGFVSQQQLGINNSEMTWLPILTGASGALGAPYGSPYIAVDGSYYSRPPEQPSSSVSNRGCRRRKNSTPK

SEQ ID NO: 67050 - protein, 80 aa, Zea mays
  Coding DNA Sequence Number=SeqID_25271
  Homolog annotation: Hit_ID=Q9AQT9; Match level="QueryCoverage=43%, HitCoverage=25%, E-value=2e-10, Identity=85%"; Hit description =Putative nuclear protein
  Pfam annotation: Domain name=DUF584; Domain location=1-79; Score =54.5; E_value=3.5e-13; Accession=PF04520.4; Description=Protein of unknown function, DUF584
MEEEFQEARNPMAGRRGRRRRGGACLLVVPPHVLVARRRRLVRGRTAAYSMCAGKGRTLKGRDLRDVRNLVLKMTGFIEE

SEQ ID NO: 67051 - protein, 443 aa, Zea mays
  Coding DNA Sequence Number=SeqID_25272
MEKQKFLGANSTARRRPLSSLSGNKPSPALQSLICKAHPHADPAAQATTAEVDAALDRLLFARTDLVGIVSQIDELISEALKCQNVSKKATREIESFNGFLTDTKASFKQWSSRLKQALETGLVKTEAIPKNTPGTCLNTAAKGNDKLISCSTKLPDTVESGKQLFLLTPLPKTKACSSRCQTSKTQMKTVSSTDQLNNLLRPVSKLTISDNNHPDLEQSVKVKESWTSTTTPHVALANKASLEDKLCSPRTFSVQKSRTLPRSCLKTALSSKQQLFSPIPEGRKEEDIDSNGSIGDDKCSSDKISKDLASRYDIYGLNQSNRQVEDPLQWFLSPLKTMVLIDPSEDNQLPTPARSNMGERLDIADDKPIHTPAVHSKALLGTPWKGLESTNLKGRCAGETTLKKELWTRFEAASTNELHFDKVRFQQTDAKCFLDMLEEEAS

SEQ ID NO: 67052 - protein, 488 aa, Zea mays
  Coding DNA Sequence Number=SeqID_25273
  Homolog annotation: Hit_ID=Q5XWK4; Match level="QueryCoverage=61%, HitCoverage=87%, E-value=1e-51, Identity=36%"; Hit description =Expressed protein-like
  Pfam annotation: Domain name=DUF616; Domain location=139-411; Score =498.2; E_value=9.4e-147; Accession=PF04765.4; Description=Protein of unknown function (DUF616)
MRLVGRRRTGVLLLLAVASAALFCSLFAVVKDDANSTSIVNNYEVPNAIQKSVYPSRTRPLMMSGNQESTSVVNKIDFPNRLHLSFANFTHPCEGFSVPPPLVDKKRTGPRPCPVCYVSVDQAFALMPLQASPSPVLKDLNYVSEDGVTANLSNQGSGFGGHPSLDQRNDSFNINESMTVHCGFVRGKKPGQGTGFDIKDDDLLEMEQCHDLVVASAIFDEETEAYVKNSSSLYNNNKVGLWRLIPKLLLHRLFPNVRFSVWIDAKLELVVDPYLLLERFLWRKNTTFAISRHYKRFDVFEEAEANKAAGKYDNASIDYQIEFYRNEGLTHYSSAKLPITSDVPEGCVIIREHIPITNLFTCVWFNEVDRFTSRDQISFSTVRDKIRARVGWMPEMFMDCERRNFVVQVYHRELLEQMIASGRMPPLAAAVTHANVRVGSRKAPPTKKPSVKRKREKKSSSRRRLPKPIAQGLDANVTQVFFSVAESG

SEQ ID NO: 67053 - protein, 297 aa, Zea mays
  Coding DNA Sequence Number=SeqID_25274
  Gene Ontology: Mol. function=transferase activity, transferring glycosyl groups; Cellular component=chloroplast; Biological process =glucan biosynthetic process
  Homolog annotation: Hit_ID=Q1KVP6; Match level="QueryCoverage=91%, HitCoverage=33%, E-value=1e-129, Identity=84%"; Hit description =Starch synthase IV
  Pfam annotation: Domain name=Glycos_transf_1; Domain location=101 -276; Score=-4.5; E_value=0.0034; Accession=PF00534.10; Description =Glycosyl transferases group 1
DLAYCGLDVDHLDRPDRMRDNSHGRINVVKGAVVYSNIVTTVSPTYAQEGGRGLQDTLKVHSKKFVGILNGIDTDTWNPSTDRFLKVQYSANDLYGKSANKAALRKQLKLASTQASQPLVGCITRLVPQKGVHLIRHAIYKITELGGQFVLLGSSPVQHIQREFEGIADQFQNNNNVRLLLKYDDALAHMIFAASDMFIVPSMFEPCGLTQMVAMRYGSVPVVRRTGGLNDSVFDLDDETIPMEVRNGFTFLKADEQLGYFSFSIRRNLSENSHSSQGSGINSRDIETVPCCLHEVS

SEQ ID NO: 67054 - protein, 97 aa, Zea mays
  Coding DNA Sequence Number=SeqID_25275
MGRGERRGQDRMEELVVRRAANRKRATTPSLQYSLRVQEALVIGGLKECISASPAGGKGSSGGFQRGIDQRGDSKPTNYGTGGQATDDWYLVCRSSA

SEQ ID NO: 67055 - protein, 88 aa, Zea mays
  Coding DNA Sequence Number=SeqID_25276
MVRLAELLVAHARTPTVPARDMAMLAAMQWRLARYRCCGEVSLGRKYAPNKIWTGGGGGPVGSQFGRFFSLYFTFVSLNCIFRTNQAD

SEQ ID NO: 67056 - protein, 217 aa, Zea mays
  Coding DNA Sequence Number=SeqID_25277
MDMASGSGFQQGKQSYVIRPWTWAGQQQANSHSAILQHEANNHWKVSGFQHLSKTENQQTWTWAATGQQPYAHTYRLQYNSTRKQGQALNLDSGDWRPYLQAGCWRRRAGDGGGTEGDDAAVSPVTGSAPLSPAQCSARVPPSWLPGSCSVCLGPGRCSVGSGCAASAHVVGIGKKEAGLGRWASEVGHCTEISIQPGRLIVTKLIGRPDLVPIDRL

SEQ ID NO: 67057 - protein, 347 aa, Zea mays
  Coding DNA Sequence Number=SeqID_25278
  Gene Ontology: Mol. function=DNA binding; Cellular component=nucleus; Biological process=regulation of transcription
  Homolog annotation: Hit_ID=Q8H0I5; Match level="QueryCoverage=92%, HitCoverage=93%, E-value=2e-43, Identity=38%"; Hit description =OsNAC1 protein
  Pfam annotation: Domain name=NAM; Domain location=11-119; Score =151.6; E_value=2.1e-42; Accession=PF02365.6; Description=No apical meristem (NAM) protein
MEQEPHRPMELPPGFRFHPTDEELITHYLARKAADARFAALAVAEADLNKCEPWDLPCKHARAGIATRSCSKRKGATGKDRDVFRGKALVGSKKTLVFYTGRAPRGEKSGWVMHEYRLHAKLHGHGHGHGQGAAVVVVPKAAGTKNEWVLCRVFKKSLVVGGAAAAAAPTAGKRGGTETSSNSKTGDVAAISHLPPLMDVSGSGSGAAAAAAAHVTCFSDALEGQFLDQTTTTPPPEAAAAATDDDGHLGALAAASSSAFQLPGFAHYYYGGGAPHLHQHHGAASLVQLLEGSVPPCNKGGERERERERLSASQDTGLTSDVNPEISSSSGQRFDHDHDHHLCCWGY

SEQ ID NO: 67058 - protein, 211 aa, Zea mays
  Coding DNA Sequence Number=SeqID_25279
  Subcellular localization annotation: CTP_CleavageSite=85; ConfidenceScore=5.74e-01
MDSASPDPRARTQPRLRKTMNSASPDPRARTQPRLRKTTNSASPDPRARTQPRLRKTTNSASPDPRARTQPWLRKTTNSALPEPRAGLSLGLGRRSPPRPTRGSDSTSTSEDRLNLDLGGASASPDPGLGPTTSQGAIITLPLASSGYGEQDRRPIWLAPVKQIMMAPRVLHDDGGSQPLTEARRRQQGLDSPDSCPSTRLQRSSDGHDIT

SEQ ID NO: 67059 - protein, 55 aa, Zea mays
  Coding DNA Sequence Number=SeqID_25280
MDRNLSGFLIGCVGTAVTLLAYQQTAVTSTQCVAAGFVVILFALFVKEESAVYGN

SEQ ID NO: 67060 - protein, 230 aa, Zea mays
  Coding DNA Sequence Number=SeqID_25281
  Gene Ontology: Cellular component=integral to membrane
  Homolog annotation: Hit_ID=Q5ZAF5; Match level="QueryCoverage=77%, HitCoverage=27%, E-value=1e-33, Identity=43%"; Hit description=Amino acid transporter-like
  Pfam annotation: Domain name=Aa_trans; Domain location=5-230; Score= -156.4; E_value=0.055; Accession=PF01490.8; Description=Transmembrane amino acid transporter protein
MPTLFVGAFFSLGLSLSLSLPGVGLLSIPYALSEGGWLSLALLLLVAAVCCYTGLLLQRCMDASPAVRGYPDIGALAFGRGGRLAASAFLYAELYLVAIGFLILEGDNLDKLFPGTSLSLGLRGAALVVSGKQLFVVLVALVILPTTWLRSLGVLAYVSASGVLASAVVVVCVLWTALADGVGFRARGRMLNVSGLPTALGLYTFCYCGHAIFPTLCISMKEKKRFSRFY

SEQ ID NO: 67061 - protein, 139 aa, Zea mays
  Coding DNA Sequence Number=SeqID_25282
  Homolog annotation: Hit_ID=Q6ZGZ0; Match level="QueryCoverage=72%, HitCoverage=26%, E-value=1e-17, Identity=43%"; Hit description =Putative purine permease
  Pfam annotation: Domain name=TPT; Domain location=1-84; Score=14.4; E_ value=7.9e-05; Accession=PF03151.7; Description=Triose-phosphate Transporter family
  Subcellular localization annotation: CTP_CleavageSite=35; ConfidenceScore=5.32e-01
MAAFKNGRARYVLTLMGTAVCWQAAAVGTVRLIVRMSSLFANVTGTVALPLVPVFAVVLFGDRMTGIKAVAMLMAVWGFISYVYQHYLDGRRAASGKAGTECCICAARTAGDTRDGQTGRPARPGPGPVKPGQKPGRAC

SEQ ID NO: 67062 - protein, 248 aa, Zea mays
  Coding DNA Sequence Number=SeqID_25283
MPVIPRPSRHPPPRDAADADPHGARTTPDDERVLAEFLEASLRVPDLSLPRGSASASRRGAGTGRDPFSRPCLGRRGHGAAGDSGGSGVRRVPCDRRSRRSRGARRRGGGVGARVAASEEEKRGLGRWFRRRDLEPREEFFWFRPMSAYEDRVLDAAFLGSTYRAFRQVLTSVCPYVNVAIACASSVQGDAGVEQQAIAAAAESGVFRVTGAVDAREVRDAMEAASGLVSRRRRRRSATWGDGSEGEI

SEQ ID NO: 67063 - protein, 57 aa, Zea mays
  Coding DNA Sequence Number=SeqID_25284
MAPLPQRDLEDPNTPKSPDAFNDYFSTVIDLMRVSIPSHSMHYLLHYMTDSVDLLEF

SEQ ID NO: 67064 - protein, 152 aa, Zea mays
  Coding DNA Sequence Number=SeqID_25285
MESRLSEYAVASLCVSPAEFADLASGEGCSKVVRSELVFKADLTEQISQKRIPASEKFKWGLDEHAFNASGVLNTGGDLSHRRGVTGGAVPRDKSRRPIRRSCIWKGMTGASSIIDEGWSVVKPKFWWRKSYDSHGEFPLKQHSEMKGTSFF

SEQ ID NO: 67065 - protein, 139 aa, Zea mays
  Coding DNA Sequence Number=SeqID_25286
  Subcellular localization annotation: CTP_CleavageSite=71; ConfidenceScore=5.78e-01
MTPRLSPFRQPTPTHSLPSPSCAPSRPPSCSLSLCTHPGSSATACHGLAPVLRSPLSPRRVLCLGEFRLVVSSSRHPSVRPDPSGSPSPRSPEFSPCSQSSATVNPRRTYVSVIAPMLQCFLSRPLYSYKQTHGLSDKS

SEQ ID NO: 67066 - protein, 71 aa, Zea mays
  Coding DNA Sequence Number=SeqID_25287
MGSHDLWAERESRLVGKVCNLCRVLETGISAVLTVKSSLGIPFDWKNFGFSYMMMVNDDEYNFDLWSSNLP

SEQ ID NO: 67067 - protein, 171 aa, Zea mays
  Coding DNA Sequence Number=SeqID_25288
MAGYFPKTPGVYLQIRLSEGVRCIVSRPIVNQGFGLEAPTSELDVNSREGISYTRSYPMVGLGHMKGYAMARSHPSIANPTANPSSSLRTRTEAAPPRACGGVVAGARSPINFECKSKRGEAQNDVDIMADVKGVSYRESHSSKPWPRCMAGNWTHLDGRFPPFWPQTHPR

SEQ ID NO: 67068 - protein, 161 aa, Zea mays
  Coding DNA Sequence Number=SeqID_25289
MGNQEKEAERAGDLEVRAEDRELRHEQGELEGVPRVEKSAREWVRLTGIRAQGTAAHGEEAGEEQRSRRELEMADVGAGAGPSAVRAPAMKGVLGAAVRERIWARKEQGSPSWNAAGRRQREQGRSKGNQGRTMDERSAQGRRRPGRAACRVSSIKGARGR

SEQ ID NO: 67069 - protein, 124 aa, Zea mays
  Coding DNA Sequence Number=SeqID_25290
  Gene Ontology: Mol. function=carboxyl- and carbamoyltransferase activity; Cellular component=ornithine carbamoyltransferase complex; Biological process=amino acid metabolic process
  Homolog annotation: Hit_ID=Q8SA97; Match level="QueryCoverage=74%, HitCoverage=17%, E-value=5e-17, Identity=51%"; Hit description =Ornithine carbamoyltransferase
MGRRETEREGVKRQPERGRWKSRGLRVCPVPRLGDVEAPPRSRSSLSSEAEVESEPLGRVRQRPSVEARAESEPWGRADQSSLSSGAEPKSEPWVGRNGVRRLPGLSPSPSPRSGGAEFAVFRG

SEQ ID NO: 67070 - protein, 69 aa, Zea mays
  Coding DNA Sequence Number=SeqID_25291
MVLSPPQIIWSHGLEFLPRHCRGSVLERRIVVFAAAQCGRHAQSGVGGGRLGHDRWIQRTVQIKADVAG

SEQ ID NO: 67071 - protein, 280 aa, Zea mays
  Coding DNA Sequence Number=SeqID_25292
MDLGYLRWEPKVEVGEMTYRSPHDGHLLLLFVASFLKLSQHVLILFVASFGELSQHLLLLALYEVIELMLVISRKCLHGRLDDVDGGDDPAAPARAAQVAVALHAIPRSHVPSDSELRRLAYKYVVSCNLLPITKFWIPAAAPPGQAPPAQPPQLPNLLPICSASAVIPAKRRLPALSMDRVAALVVALLALFFAAGATAQAPASSPKRTPAPAPPRTAFLPPPPARAPMASPPSPPAMAPVPAPSAGVPATSPVGAGAASAAAASLVAIVAAVAAAVAF

SEQ ID NO: 67072 - protein, 316 aa, Zea mays
  Coding DNA Sequence Number=SeqID_25293
  Gene Ontology: Mol. function=nucleotidyltransferase activity
  Homolog annotation: Hit_ID=Q8LMP3; Match level="QueryCoverage=56%, HitCoverage=27%, E-value=1e-28, Identity=42%"; Hit description =Expressed protein
RLHVDQYMPPVQEGRAPHGGHGKHESRLTNPLQREQRWQGLREDKGYASRKLPNVNAHYTSGKALVKEVHHLTIPAGSSVPVEITENQASGLEGGRIGKVVLEDGIDEEGVVEASKFEVSYEKSKIRFAGHDEQDDGGDREDAIIEQMAQNLLIDGNGDAKGVVLEKPILRSKAALQGSRPPLPLLQAAASSPVQPHPSPVLSRSASSPVLSRSASSSLLHRPSGAASPASAAAACAAVRPPPAPPLRLRLSRTPAVRSPACPAFPLLKGRRIGGEVLSSCFASVPVATDYILQRLPEYRNLSPLFYCPLGVCSHW

SEQ ID NO: 67073 - protein, 194 aa, Zea mays
  Coding DNA Sequence Number=SeqID_25294
MAATTDRTRGLGARQLADLGRASSAPVARGMGTGLSVPSAQLLDRDAQGRRFAGEWEGAAAAALGADALLGEKTDRGGGTRASGLAQPSLGHGERAARRRAVERGKGGRAHLSEAQRGAAHASSATRTATAAALRAGRGSDGSDGEAESEVEARRGGGGRETVQESRAFRFWRRRGRKKLRRAVWGRCTVESAP

SEQ ID NO: 67074 - protein, 146 aa, Zea mays
  Coding DNA Sequence Number=SeqID_25295
MEEPRPADKPLCARACPPVVGLLRPCAPAWPSRCPARPACPRRGCGCPRRVAGVTGYLRSARPAYRFGQLCMVGVPAARQRALGAACLWPACPRLVRASPAQSTRHSDSLAVASRRARSTSSCLATRSPGRPPSLQAQSNLVYNFN

SEQ ID NO: 67075 - protein, 150 aa, Zea mays
  Coding DNA Sequence Number=SeqID_25296
  Subcellular localization annotation: CTP_CleavageSite=57; ConfidenceScore=5.06e-01
MPSPPAQIFEEAATPPPFLAPHWRRAHHGTGCTPSPRSRPRCWATSGPPELELARVEAEMRYAFPPDLRAVLAAGLPLGPGFPDRRSRTGLRSAFDLPIAAMSLQIARGALWPRCWGAHHADPDRALRLARIGGAESLLRTGFFCFLYGR

SEQ ID NO: 67076 - protein, 123 aa, Zea mays
  Coding DNA Sequence Number=SeqID_25297
  Homolog annotation: Hit_ID=Q8LMP3; Match level="QueryCoverage=52%, HitCoverage=10%, E-value=6e-08, Identity=51%"; Hit description =Expressed protein
  Subcellular localization annotation: CTP_CleavageSite=41; ConfidenceScore=5.25e-01
MADSSGRSGGRPTSASPSTATHTSPASFDGGLLLRLLQNPPSAHPREEILAPSPVAPGAHHFFSDPAVAAVGPLFAASAQTQGGDFGWSSTSTTHMFVIRLAECLLVTESSFTGNSSKINESS

SEQ ID NO: 67077 - protein, 301 aa, Zea mays
  Coding DNA Sequence Number=SeqID_25298
  Gene Ontology: Mol. function=ATPase activity, coupled to transmembrane movement of ions, phosphorylative mechanism; Cellular component=integral to membrane; Biological process=phospholipid transport
  Homolog annotation: Hit_ID=Q2R575; Match level="QueryCoverage=57%, HitCoverage=16%, E-value=6e-90, Identity=96%"; Hit description =Phospholipid-translocating P-type ATPase, flippase family protein, expressed
MARLVGSASQKRAEPRRFFKLVRWLVKLLKSCDYRTLAIGDGGNDVRMIQQADIGVGISGREGLQAARAADYSIGKFRFLKRLILVHGRYSYNRTAFLSQYSFYKSLLICFIQILFSFLSGIAGTSLFNSVSLMAYNVFYTSIPVLTTVLDKDLSEKTVMQNPEILLYCQAGRLLNPSTFAGWFGRSLYHVSFLFCIAFLLMVCKWLCYGWLGHYSTRGATVPLVLFRAAVPRATSEGREKGAAAALSLVEVRRLCTAQDVVAGLEIELVDRVRRLIGTHLWAVCTRGGLGRIEDDGARCS

SEQ ID NO: 67078 - protein, 148 aa, Zea mays
  Coding DNA Sequence Number=SeqID_25299
MAGQAGLLLGGWVDACACPFLGGNDSEAPRIGGALAHGWRRVFCRWADVASVVGARGPGPSAAGQGLRRRITVNDLLDLTMHAIRGSSRRQANSPTPEAASRTRTRHAVAAGIGLRTCLYVKDKRFHYKVSDWLAVVSVVSSGEKSKH

SEQ ID NO: 67079 - protein, 250 aa, Zea mays
  Coding DNA Sequence Number=SeqID_25300
  Gene Ontology: Mol. function=triacylglycerol lipase activity; Biological process=lipid metabolic process
  Homolog annotation: Hit_ID=Q8H2X9; Match level="QueryCoverage=90%, HitCoverage=95%, E-value=2e-77, Identity=63%"; Hit description =Lipase (Class 3) family-like protein
MAQQASLPCSTATTWRELTNTSWRDDDYRRMVMAYLIEAVYLLELERQERRDAAAVAQQWWKPFHFRLAHELVDDRDGSVFGAVFERDHQGGRPGPGPSPSGAPSAVIAFRGTLLRAPTIRRDVEDELRLLARNSLRGSARLARAAQALRATIDRFGSENVCVCGHSLGAGFARQAAAFAAATLESHLFNAPYLSLPMGVRSVVRTADCLLKALRSGVATVGKWHGKALRNVAYASCVLGYTRLESTRKL

SEQ ID NO: 67080 - protein, 116 aa, Zea mays
  Coding DNA Sequence Number=SeqID_25301
  Subcellular localization annotation: CTP_CleavageSite=54; ConfidenceScore=5.87e-01
MAAPSASAPLLRSHPHHGSLFPSSPRHRPAAASLSGFPPLRPASARRLPYTAVRSSSTASPSAPVEDAPAAAAPTGDAEEERVVLPTNESSERLLRIRHTVLPLPFSPYVTVLELA

SEQ ID NO: 67081 - protein, 189 aa, Zea mays
  Coding DNA Sequence Number=SeqID_25302
  Gene Ontology: Mol. function=threonine-tRNA ligase activity; Cellular component=soluble fraction; Biological process=tRNA aminoacylation for protein translation
  Homolog annotation: Hit_ID=Q6ER90; Match level="QueryCoverage=93%, HitCoverage=26%, E-value=2e-95, Identity=94%"; Hit description =Putative threonyl-tRNA synthetase
  Pfam annotation: Domain name=tRNA_SAD; Domain location=87-139; Score =94.9; E_value=2.4e-25; Accession=PF07973.4; Description=Threonyl and Alanyl tRNA synthetase s
MAVQKLFPNSKVTIGPWIENGFYYDFDMEPLTDKDLKKIKKEMDRIIRQNLPLVREEVSREEAQKRIEALNEPYKLEILESIKEEPITIYHIGEEWWDLCAGPHVESTGKIDRKAVELESVAGAYWRGDEKNQMLQRIYGTAWENEDQLKAYIHFKEEAKRRDHRRLGQELDLFSIQVRLTSWFLRKHA

SEQ ID NO: 67082 - protein, 170 aa, Zea mays
  Coding DNA Sequence Number=SeqID_25303
  Homolog annotation: Hit_ID=O80504; Match level="QueryCoverage=38%, HitCoverage=51%, E-value=5e-07, Identity=37%"; Hit description =Expressed protein
  Subcellular localization annotation: CTP_CleavageSite=46; ConfidenceScore=5.09e-01
MASAYPPETASSNGPTPSRPSALLRFLEHRSRGGFHQAEAPYQCALAARVVAWAVDFSFSFLPSRHRVRGPRTMRSLAPPTYLHQGTLVIRIGCTKELASLRRTNKLSIPRVKYTFVEFPTTSGVQLGGICWEMVIFSDINAYEVDLDTDEKHCFCRELDLLAVVEGILP

SEQ ID NO: 67083 - protein, 433 aa, Zea mays
  Coding DNA Sequence Number=SeqID_25304
  Gene Ontology: Mol. function=threonine-tRNA ligase activity; Cellular component=soluble fraction; Biological process=tRNA aminoacylation for protein translation
  Homolog annotation: Hit_ID=Q6ER90; Match level="QueryCoverage=87%, HitCoverage=56%, E-value=0.0, Identity=93%"; Hit description =Putative threonyl-tRNA synthetase
  Pfam annotation: Domain name=HGTP_anticodon; Domain location=337-426; Score=82.9; E_value=9.9e-22; Accession=PF03129.10; Description =Anticodon binding domain
  Pfam annotation: Domain name=tRNA-synt_2b; Domain location=68-234; Score=192.3; E_value=1.1e-54; Accession=PF00587.15; Description=tRNA synthetase class II core domain (G, H, P, S and T)
  Pfam module annotation: Pfam domain module=HGTP_anticodon::tRNA-synt _2b; Domain location=337-426::68-234
  Subcellular localization annotation: CTP_CleavageSite=50; ConfidenceScore=5.21e-01
MHAASTVGTTLTYCTNPSRGASTRRLPQQQQSCVDRHPLRLGTRNRTTPYCDDAGGGLVFWHPKGAIIRHILEDSWKQIHLQHGYDLLYTPHVAKADLWKISGHIDFYKDNMYNQMDVEDEMYQLRPMNCPYHILVYKRKLHSYRDFPIRVAELGTVYRYELSGSLHGLFRVRGFTQDDAHIFCLEDQIKDEIRGVLDLTEQILGQFGFRYYEINLSTRPEKSVGTDDIWEKATIALKNALDDKGWEYKVDEGGGAFYGPKIDLKIEDALGRKWQCSTVQVDFNLPERFDITYVDSNSEKKRPIMIHRAILGSLERFFGVLIEHYAGDFPLWLAPTQTRILPVTDNELQYCNEVASELKSRGLRVEVCHGERLPKLIRNAETQKVPLMAVVGPKEVQARTLTIRSRHNGEIGTMPVDEFITRLQLAVANKSSL

SEQ ID NO: 67084 - protein, 334 aa, Zea mays
  Coding DNA Sequence Number=SeqID_25305
  Gene Ontology: Mol. function=oxidoreductase activity; Cellular component=vacuole; Biological process=response to oxidative stress
  Homolog annotation: Hit_ID=Q43220; Match level="QueryCoverage=90%, HitCoverage=92%, E-value=4e-90, Identity=59%"; Hit description =Peroxidase
  Pfam annotation: Domain name=peroxidase; Domain location=50-298; Score=432.5; E_value=5.7e-127; Accession=PF00141.13; Description =Peroxidase
  Subcellular localization annotation: CTP_CleavageSite=51; ConfidenceScore=5.23e-01
MAAACISHRFRHSKLPVLVLALATVVAAARAQLSPPTFYASSCPAALVTINAAVRAAVLLDRRMGASLLRLHFHDCFVQASHSPQQPGCDASVLLDDTGNFTGEKSAGPNAGSLRGFGVIDTVKALLEALCPRTVSCADILAVAARDSVVALGGPSWTVQLGRRDSTTASLSTANTDLPSPASSLSTLLAAFARKGLSSTDMVALSGAHTVGQAQCQNYQARIYNDANINAAFAASLRAGCPASGGGGANAPLDASTPNAFDNAYYGDLVAQQGLLHSDQELFNGGSTDALVRSYAASSARFSSDFAAAMVRMGAIGVLTGSSGQVRRNCRKVN

SEQ ID NO: 67085 - protein, 699 aa, Zea mays
  Coding DNA Sequence Number=SeqID_25306
  Gene Ontology: Mol. function=small protein activating enzyme activity; Cellular component=nucleus; Biological process=protein modification process
  Homolog annotation: Hit_ID=Q8LKN2; Match level="QueryCoverage=97%, HitCoverage=99%, E-value=1e-165, Identity=63%"; Hit description=SUMO activating enzyme 2
  Pfam annotation: Domain name=ThiF; Domain location=12-128; Score =98.8; E_value=1.6e-26; Accession=PF00899.11; Description=ThiF family
  Pfam annotation: Domain name=UBACT; Domain location=392-462; Score =123.5; E_value=6.1e-34; Accession=PF02134.11; Description=Repeat in ubiquitin-activating (UBA) protein
  Pfam module annotation: Pfam domain module=ThiF::UBACT; Domain location=12-128::392-462
MAAVASSEEAVKAAKVLMVGAGGIGCELLKTLALSGFSDIHISHVGQSKAKVARDAVLKFRPNINITPYHANVKDSHFNVDFFKQFNVVLNGLDNLDARRHVNRLCLAAEVPLVESGTTGFLGQYMHIAAASPIVVSLYTCTTQSMIFFGTDKKGLRQNADIHDRLGIAPIEEENLSNIVCKLCSQNLKLETFSNFAMLVEYVQVTVHVKGKTECYECQPKPVPKSYPVCTITSTPSKFVHCIVWAKDLLFAKLFGDKNQDNDLNVHSKDDTSSKTDVFERSVDEDLGQYAQRIYDHVFGYNIEVALDNKETWKNRRKPNPIYIRDALPEDAVQQNGRSLDHIHEEHDPSAMVSLGLRNSQETWSLADNSRVFLEALKLFFEKREKEIGSLIFDKDDQLAVEFVTAAANIRASSFGIPLHSLFEAKGVAGNIVHAVATTNAIIAGLIVIEAIKVLKGDHQDYRMTYCLEHPSRKMLLMPVEPFEPSKSCYVCSETPLVLEVNTKTTKLREVIEKVIKSKLGMNLPLIMVGATLVFEDGEDLEEDEIANYALNLEKVLAELPAPVLNGTTLTVEDFHQELKCSINIKHRDEFDEEKEPDGMVLAGWSGPVDKQITSNGENRSVPSSSNTEDVDGTAEDISVKPGMKRKLNEILEAKENLDALENPSDVDSSGTQVVEDDDNDDLVMFDEDPRQDKKMRLQ

SEQ ID NO: 67086 - protein, 552 aa, Zea mays
  Coding DNA Sequence Number=SeqID_25307
  Gene Ontology: Mol. function=nuclease activity; Cellular component =intracellular; Biological process=DNA repair
  Homolog annotation: Hit_ID=Q8H2Y0; Match level="QueryCoverage=99%, HitCoverage=99%, E-value=1e-151, Identity=49%"; Hit description =Putative probable transcription repressor HOTR
MPAPVAPVTSRLKREDCPRTKHDSLFSPWKVLVGPSDWRDHAAGKEGVQRYRIRNLPDNFPGLYELGVACAADEGVRSRRRDARGVVVVYLGQADSVRARLQQYGRSGSHLDTTNSPGSSDRDAANALAEGPGLFREVFSRGYSVVFRCALVLASVHRVIKILPATWVCWNKSCGQMDNKQEAEKTEALLLRVFDYAWNKLQNGACRRQEILHKLELRAANHRSLLSRKAGINIKGSGPANTSPSIIKSMLPRVRTIVRFRPQLVNPNNSEGGITGIPYANRQAHRRKSKGYQVKKFDVTKRRTVPIHDSNSVCGVLLEDGFCLEHPVHGRKRCSLHKGKRVKGSPKSSPTSHPCQVGIAITEFCLTEDLDSSVPKQESEIRPKNMSTTLKEPQRQSDNLESQKVNTGEASTEDGTQEVSRDACILEEKAFFHADSESQEQQPSGRMWFELLKSQRKPASAHPSRRGLGSQITAMTDNRSCKMVSIAGMERTEKDSGVEVTAASFSRSSGWPCTCGARTSDGSRCMNMPIEGRKRCALHKGQRAAFPPTPSA

SEQ ID NO: 67087 - protein, 607 aa, Zea mays
  Coding DNA Sequence Number=SeqID_25308
  Gene Ontology: Mol. function=ATPase activity, coupled to transmembrane movement of ions, phosphorylative mechanism; Cellular component=integral to membrane; Biological process=phospholipid transport
  Homolog annotation: Hit_ID=P98205; Match level="QueryCoverage=67%, HitCoverage=32%, E-value=1e-142, Identity=63%"; Hit description =Putative phospholipid-transporting ATPase 2
  Pfam annotation: Domain name=Hydrolase; Domain location=104-470; Score=-3.1; E_value=0.086; Accession=PF00702.16; Description =haloacid dehalogenase-like hydrolase
MAKQWYVKYDDNEPWYQILVIPLRFELLCSIMIPISIKHISVNCIFCMQLYVFHFVVSFCMFSLDFVKSLYAKFIDWDDDIYDLENDTPARAANTAISEDLGQVEYILTDKTGTLTENKMIFRRCCIGGTFYGNESGDALRDVELLNGNISDTTIHIGGTVQLRHKDRDVELLNAVANNSPNVIKFLTVMTLCNTVIPIKSPTGPILYKAQSQDEDALVNAAANLHMVLVSKNGSNAEIHFNRRVMQYEILDILEFTSDRKRMSIVILDCQSGKFFLLSKGADEAMLPCAYSGQKTKTFVDAVDKYAQLGLRTLCLGWRELEPEEYTKWSQSFKEANSSLNDREWKVAEVCQKLEHSLEILGVSAIEDRLQDGVPETIEILRQSGINFWMLTGDKQSTAIQIALLCNLISSGIVHVSLRIIGFGWYSPVHVATKAKLSQQGIEERHPLVNTPQGTGGGRGGGGLCGHLGQRSRLTHALWTSWAEEQAHTRRSRAELAEQRNSQAGQVYGRVQHMCGAVLREKAKRSVHRDVCGTVAGACEQEVKHVRASAGFRVGLLPREAEVCTSECEGGKDRMWGAGIMEGEHCGADIVRWGGRVAMKSEARKRS

SEQ ID NO: 67088 - protein, 75 aa, Zea mays
  Coding DNA Sequence Number=SeqID_25309
MEHLSLVGLDESDESEEEKKEEDEDSGGDGNNDGSNVGSKGGKDEGGGDGNGAGGGSGSGDDGIGSRASGEVPPA

SEQ ID NO: 67089 - protein, 359 aa, Zea mays
  Coding DNA Sequence Number=SeqID_25310
  Gene Ontology: Mol. function=nucleic acid binding; Cellular component= intracellular; Biological process=regulation of transcription
  Homolog annotation: Hit_ID=Q43614; Match level="QueryCoverage=54%, HitCoverage=53%, E-value=4e-11, Identity=58%"; Hit description=DNA -binding protein
  Pfam annotation: Domain name=zf-C2H2; Domain location=143-165; Score =18.4; E_value=0.026; Accession=PF00096.16; Description=Zinc finger, C2H2 type
  Pfam annotation: Domain name=zf-C2H2; Domain location=260-282; Score =18.9; E_value=0.018; Accession=PF00096.16; Description=Zinc finger, C2H2 type
  Pfam module annotation: Pfam domain module=zf-C2H2::zf-C2H2; Domain location=143-165::260-282
  Subcellular localization annotation: CTP_CleavageSite=43; ConfidenceScore=5.18e-01
MGGVQEKEAGMPPAMAVPPVLVKGKRSKRQRVHAPPVVAVAVAAAAEWSSSSAASPAGGDDSGSGTATSPSAADDAEAEAASAGCCLLTEEDEDMALCLMLLAHGEPARDDGGGGNGKTAAKEASSRFRSRRPAAAGDGEYVYECKTCNKCFPSFQALGGHRTSHKKPRLLLLPPVPSQPTQEKDLGLVPTPNPAAAETAEASPPPAAPAEAAADATALAIPVAAAPKQEGQAAAAVATSSTSNSSSGGAKQPHHRPRVHECSICGAEFGSGQALGGHMRRHRPLVPAGARERDDAHAPSRKEKSLLELDLNMPAPCDEAEADAPAVTSPRFAFAVAERPPAPLLFPPATPSALVDCHY

SEQ ID NO: 67090 - protein, 61 aa, Zea mays
  Coding DNA Sequence Number=SeqID_25311
MKRLTIVPSPTTNVEVFSMGGVDESGHENVTREVDDLCEIAPSCEENDEEVVSVSDAANGV

SEQ ID NO: 67091 - protein, 132 aa, Zea mays
  Coding DNA Sequence Number=SeqID_25312
MAPSDGGGASAECPPSDTWQRLTLCRVSVVLTLDNVLTLDKEAPVGSFTSSVAERISWHSARDHLWAPFVSSFVECTRWHSAKLASLTSAKTTTLVKEALPVPRFDRESCAAAADMIGHRRQGPCRRSGGHK

SEQ ID NO: 67092 - protein, 282 aa, Zea mays
  Coding DNA Sequence Number=SeqID_25313
MWKYAVRPYQLQGERLSYRRCRRVEVHRPWDTHYTRTWRQWASAIADGRPTGRGCALECRGQPLPRLPRASASQRSHYSRRHTRRPHAAAHGCTAANVWCRATNTSCRPRCSAALICSNLYSTTRSEACIFERLALMLAHKYTIGGDGDSCINDSDMGIVTAHVHVDSVGDVGVTKLATEVMQCRSKPKLSDTSLLWMVGGTIIRGYCSWVRAASDGRRRGCRLCCRWWRRGGCARRRASWADLEIELVARVRRRWGDRPQGFAHNRQEKRNFPYNFLLILN

SEQ ID NO: 67093 - protein, 613 aa, Zea mays
  Coding DNA Sequence Number=SeqID_25314
  Gene Ontology: Mol. function=signal transducer activity; Cellular component=membrane; Biological process=response to light stimulus
  Homolog annotation: Hit_ID=Q5KS50; Match level="QueryCoverage=99%, HitCoverage=99%, E-value=1e-155, Identity=46%"; Hit description =Coleoptile phototropism protein 1
  Pfam annotation: Domain name=BTB; Domain location=49-156; Score= -13.3; E_value=0.065; Accession=PF00651.21; Description=BTBPOZ domain
  Pfam annotation: Domain name=NPH3; Domain location=242-488; Score =282.3; E_value=9.6e-82; Accession=PF03000.5; Description=NPH3 family
  Pfam module annotation: Pfam domain module=BTB::NPH3; Domain location= 49-156::242-488
MNAWEATERENHVTERGLVPVSTGDVQVQHEHGGAAKADGFVRRDQSCRYASSDIPSDLLVKVGGVNFHVHKHPMVSRSGRLARLVDEASALHGPVAATVVELPDLPGGHGAFELAAKFCYGVVVDITAANVAALRCAAEYLEMTEEVEEGNLAFRAEAFLSYVVASSWRDSVVVLRACEGLSPWADDLHLVRRCSESVAAKACTNPRAVRWAYAGRTSSSPNKSPTAGTAGNSQQQPGPPADWWVEDICVLRIDHFVRVVTAVQARGMRPDLIGAAITRYASKWLSSAGLLANKDSPASRGGGGGGVLQMIVASEGDDAQTETEASEQRRIVESLISIIPPQKDCLSCSFLLRLLRLAVVLKAAPALVTEVEKHVGMQLDQAKLLDIFGAVEQSGRDKEKQEQQSSRALRMASLMDSYLSEVSRDRNLSLGKFQALAESLPESARVCHDELYRAVDSYLKAHPTVTEHERKRLCRAVDCGKLSREARLHAAQNERLPLRVVVQVLLSEQAKMAGALGRAGKKEDDVNALRQEVESVNAKYMELQREVELLQRQVERMLPPSAAAKQHNVSGWSSGWKKLGRLGRIQVEQPVVTAATGETANRQLRRRRNSAS

SEQ ID NO: 67094 - protein, 164 aa, Zea mays
  Coding DNA Sequence Number=SeqID_25315
  Homolog annotation: Hit_ID=Q2QMB3; Match level="QueryCoverage=60%, HitCoverage=58%, E-value=2e-24, Identity=52%"; Hit description=Zinc finger protein, putative, expressed
  Pfam annotation: Domain name=zf-LSD1; Domain location=104-127; Score =24.1; E_value=0.00051; Accession=PF06943.3; Description=LSD1 zinc finger
  Pfam annotation: Domain name=zf-LSD1; Domain location=27-51; Score =43.6; E_value=6.7e-10; Accession=PF06943.3; Description=LSD1 zinc finger
  Pfam annotation: Domain name=zf-LSD1; Domain location=66-90; Score =54.8; E_value=2.8e-13; Accession=PF06943.3; Description=LSD1 zinc finger
  Pfam module annotation: Pfam domain module=zf-LSD1::zf-LSD1::zf-LSD1; Domain location=104-127::27-51::66-90
  Subcellular localization annotation: CTP_CleavageSite=47; ConfidenceScore=5.63e-01
MPVPLAPYPAPPAPFTPPNGAQSQLVCTGCRNLLMYPAGATSVCCAVCSTVTAVPAPGTEMAQLVCGGCHTLLMYIRGATSVQCSCCHTVNLAMEANQVAHVNCGNCRMLLMYQYGARSVKRLQRSTDNDYQCMISIQLLVGTDCHSSEKTVVAAVERRRQRNA

SEQ ID NO: 67095 - protein, 156 aa, Zea mays
  Coding DNA Sequence Number=SeqID_25316
  Gene Ontology: Cellular component=integral to membrane
  Homolog annotation: Hit_ID=Q7EZC8; Match level="QueryCoverage=95%, HitCoverage=89%, E-value=1e-21, Identity=66%"; Hit description =Senescence-associated protein-like
MACRGFFECVLKLLNLVVMAVGLAMVGYGAFLLVTWLQVAPLPPPSSSPDAVPPSGELVRLGRPLLLFVDASLSDGTAERLSSAWLLAIIVQSGNQTDYDSDDEYIGARSGIRQPLVNQQAAAAAADPRVPNLDYRPIRNDAWSQRMREKITFQCA

SEQ ID NO: 67096 - protein, 64 aa, Zea mays
  Coding DNA Sequence Number=SeqID_25317
  Subcellular localization annotation: CTP_CleavageSite=37; ConfidenceScore=5.59e-01
MAARGDVDPPRALAASRAAAARRPTARPGRRARRPPRARRQSILRPPPGFRNITLQGRCCQIFY

SEQ ID NO: 67097 - protein, 184 aa, Zea mays
  Coding DNA Sequence Number=SeqID_25318
RRRRPKPPLVSARPRPAWRLLAQQRDEPAQTAIEALARSCLSALPALPSLRPCHNSTAADESEPPRSCRARPAGAPPSPSGLPSAPFTFPRRPSFVLVSLFTGAVVVRARLDVRRRFRRNWGVVRFAVVPLMGLGVCGSLCQDGDKDDGFDYGNGCLWCNLCSSKEEGVEADLQEFQDFDEFED

SEQ ID NO: 67098 - protein, 106 aa, Zea mays
  Coding DNA Sequence Number=SeqID_25319
MTRPAPQEDFRLDRAGALISINVAGNLDVIPCKDADAPRKQPLAHTLTLLQQLQYGQPLPRGLGRTDNPSASASALYRKSVDASQPHSAPSRRLAERQDISFECNA

SEQ ID NO: 67099 - protein, 181 aa, Zea mays
  Coding DNA Sequence Number=SeqID_25320
  Gene Ontology: Mol. function=RNA-directed DNA polymerase activity; Cellular component=nucleus; Biological process=RNA-dependent DNA replication
  Homolog annotation: Hit_ID=UPI00004C1732; Match level="QueryCoverage =99%, HitCoverage=12%, E-value=1e-55, Identity=58%"; Hit description =UPI00004C1732 related cluster
MLKESCHYHKGSVKHSHTRSLGRRRNKKAPDGGDDDKDDGFLDVHNCYMTFGGDTINLSSRQSKQERREVFSVEVAIPVYLDWSDRAIIFDRDDHPDHVPSPGKYPLVVDPIIGNTRLTKVLMDGGSNLNIIYANTLDLLGVGRSQIRPGAAPFHGITPDKRMHPLGQIDLLVFFRTPTNF

SEQ ID NO: 67100 - protein, 237 aa, Zea mays
  Coding DNA Sequence Number=SeqID_25321
  Subcellular localization annotation: CTP_CleavageSite=13; ConfidenceScore=5.04e-01
MAGRPPPPPLSPRAGELFPPLPLSYRAALAAPPAAIFPATGAPSGFAAPTAAFSHAPGAPPDLAVTPATSSLATGAPPDLAALLAPVSPAAGVLPVPNTPAPLRSAAGTSLHTAASLMTLPYVVSAPAAAAAPPAAPFPSSSAVSTLPRPIAAPGAPTGHAFVITTALPPIAAPTQSATLATAPWPRRVLGPAPVLSLAGCPPCFAPSLLSAGGFPTCSHSNTPGRGLPCLNFPLAD

SEQ ID NO: 67101 - protein, 128 aa, Zea mays
  Coding DNA Sequence Number=SeqID_25322
MGTVEAVRRWDRRWSGGAAVVERRWRGALEAATAAGGEQAGGGARRACGRGRSRAGLDATGGDRVSWRWASQNTNRQMGLAEHKSADGPHTTYVVVFIFLQDFLSHIQTWVLSFKSQIECMKKKNTST

SEQ ID NO: 67102 - protein, 229 aa, Zea mays
  Coding DNA Sequence Number=SeqID_25323
MDHRKLLAPECSHQVRSKRRPSQGRWVVTKHSLDSDPSIVLVINFPRGAVGSSIRGYGISLSSSSSLDGESKAGPCGGEPTSLVLPAGAVSTPVIVGRLMMVVRSVLGPSAVGDGRATGSDGGISIDRQEAKLAELHREVNSVTQSICSRVATRLHCLLNISSHVQNIVDHDIHRGAGIALGYDKAGCGVADAMSVEDLIRMEDGGQSSFPPFLVISLYFFLFDAGFCA

SEQ ID NO: 67103 - protein, 60 aa, Zea mays
  Coding DNA Sequence Number=SeqID_25324
MSTSCMPPPWLSPPIALQQGTLERISKDLGKAKVSRRSNKGVHNRKEIKSDSDAIPFRVP

SEQ ID NO: 67104 - protein, 313 aa, Zea mays
  Coding DNA Sequence Number=SeqID_25325
MALTSGPHVEVVGRMRKAGRSTKDWGPLATPSIHEHLGEVLRAYDWLDNDGEFTLLKLVADTKAVVLAWLLSLAYRASEGMRSRPRRVGASLLPFLARLLHFFLLPAPIVDDVWGIIDASEEVIYEDARPWGLGRSEHNGRCDHVLPGTEEVLRAIAALSEQLMYLPRLGPLSLDTPPLDVPVGMVDLLHVGIELFLLLAEGGLASEDACLALVLVLLLVGGLLVPSAVIVSRCGADQAWSDGDVNARAERWSSPVVVARKSKVPKVMRFPGAKASLLANDDDWVIGASGVTWHAIGPQLGAPTFVVSKTEGQ

SEQ ID NO: 67105 - protein, 33 aa, Zea mays
  Coding DNA Sequence Number=SeqID_25326
MVTDELWTVMDEFSYQSNDSVVAMSGMARYGME

SEQ ID NO: 67106 - protein, 56 aa, Zea mays
  Coding DNA Sequence Number=SeqID_25327
MDGSSREWEGQRWERGEGMENVGECPGAVYIDGGGREGSDRRGQWQAPNLAVLEIE

SEQ ID NO: 67107 - protein, 104 aa, Zea mays
  Coding DNA Sequence Number=SeqID_25328
MKLTYEECLPCHCFSLLMSRYGLAARHRPLGQMVAADLMLAHRQSHRGSLNPGKVPHSDLLVTASASHMLYQRFVANALPLTVLMSPLRADLEGRGRRRMEQEY

SEQ ID NO: 67108 - protein, 104 aa, Zea mays
  Coding DNA Sequence Number=SeqID_25329
  Gene Ontology: Mol. function=ribonuclease H activity; Cellular component=chromatin; Biological process=DNA integration
  Homolog annotation: Hit_ID=Q7XBD9; Match level="QueryCoverage=84%, HitCoverage=4%, E-value=7e-33, Identity=73%"; Hit description =Putative gag-pol
MGMVENTPGPQDPDTDLIKSNTPFFGIELTGEYPLGHLYMPVTFGAPDNYRTEFLCFEVARLECGYNTIIGRPGLVKFMAVPHYPYMIVKMPRPQGIIPARADF

SEQ ID NO: 67109 - protein, 423 aa, Zea mays
  Coding DNA Sequence Number=SeqID_25330
  Gene Ontology: Mol. function=zinc ion binding; Cellular component =intracellular; Biological process=regulation of transcription
  Homolog annotation: Hit_ID=Q5Z6R0; Match level="QueryCoverage=98%, HitCoverage=92%, E-value=1e-124, Identity=58%"; Hit description=Zinc finger protein-like
  Pfam annotation: Domain name=CCT; Domain location=374-412; Score =71.3; E_value=3e-18; Accession=PF06203.4; Description=CCT motif
  Pfam annotation: Domain name=zf-B_box; Domain location=2-33; Score =13.1; E_value=0.0052; Accession=PF00643.14; Description=B-box zinc finger
  Pfam module annotation: Pfam domain module=CCT::zf-B_box; Domain location=374-412::2-33
  Subcellular localization annotation: CTP_CleavageSite=47; ConfidenceScore=5.01e-01
WYCAADDAFLCQVCDTSVHSANSLARRHERLRLRPTSPLQTPPPPTPASANRESHDEVVPAWFKRKARTPRGGRAKSDVRTLSRRLVVPHAAGGDSPDGRNDEGEFEAEEPEEEVLYRVPVFDPALAEFCSPQPLEDAAALASSCNEDGAVEDPAKTDRETPAAAPLVQFFPDGGHANFGPTDAELREFAADMEALLGYGLDDGNEESSSFCMETLGLLEPVEVGEDASRVKVETDAGSACEASGTLACALELLDPDASDEMLDIDFNYGSPQDTTTTENAASSSHTGTDGQFLQTSLSLTLNYEAIIQSWGSSPWTGGAERPHVKLDDSWPHDCTNMWVVGRGMVGHGGEDLLGTPRLGQGMDDVGREARVSRYREKRRTRLFSKKIRYEVRKLNAEKRPRMKGRFVKRATAGGSLTIAGLA

SEQ ID NO: 67110 - protein, 131 aa, Zea mays
  Coding DNA Sequence Number=SeqID_25331
MEGEYEGASAHCWRVVARSEVAGGALPTAASRTTAAMDGSSREWEGQRWERGEGMENVGECPGAVYIDGGGREGYDRRGQWQVRALLIGGRGRLPARAPVCTATEEGTHWTNVFGIFCLDSDPDHCRRFVP

SEQ ID NO: 67111 - protein, 345 aa, Zea mays
  Coding DNA Sequence Number=SeqID_25332
  Homolog annotation: Hit_ID=Q6K5F9; Match level="QueryCoverage=69%, HitCoverage=75%, E-value=1e-33, Identity=41%"; Hit description =Remorin-like protein
  Pfam annotation: Domain name=Remorin_C; Domain location=226-334; Score=81.2; E_value=3.3e-21; Accession=PF03763.4; Description =Remorin, C-terminal region
MSPASEAFLAAGFPFRRRADLSGVVRLLDLFFYFGPPALQGMMGLSYDADSGRRLLARYAKAKPRPSKWDDAQRWLSSSRAHDDDDRRRSSCADDRLLLPSASQKARHSWSAADGGAALPAALGLGARDDAGAEAETKRVDSVLAYGQPPRCPSLRDVGTEMTPAGSKEPSRANTPRATLPATPPSTAGRAIHAPLRPPDLSTVDGGSPPGLAAADRDETAPGAPTTTAVSPAATWDAAERAKHMARYRREEMKNTGLENRRRQKTELQMKVAEAKAERMKLRAQEKTASKLASAQAAAREKRAQAEAKLNRRAARVDRADALRRTGHLPSSSSVFSLKLPLMCR

SEQ ID NO: 67112 - protein, 52 aa, Zea mays
  Coding DNA Sequence Number=SeqID_25333
MANMVVATKTRTIIIVRRPLSFLLVLELLHVMFVLPVMFHLALVQQRHLEEV

SEQ ID NO: 67113 - protein, 149 aa, Zea mays
  Coding DNA Sequence Number=SeqID_25334
MAQWILTSLGGEEDFAHGVVQSAHSDNELRSLCPSIRPTSASVSHAATRRRFLSLSPALDSDGNRNPVSPHTIWLGGGNGVSGGASGQRNRARGVIANVGGMKLPHDLNNPERAEPPHPCCELHRDPAIHGVRWRGMSSEPWPTSQPNK

SEQ ID NO: 67114 - protein, 98 aa, Zea mays
  Coding DNA Sequence Number=SeqID_25335
  Subcellular localization annotation: CTP_CleavageSite=66; ConfidenceScore=5.61e-01
MQAACNRAKWVRPSDFQRTQHGGPRPRVMQPARRSLRASNCTATHTTTTPPRLQNQYCDLRQPCVRPSSASQARRGRERGIPRKGSFSVKETGSEPPY

SEQ ID NO: 67115 - protein, 121 aa, Zea mays
  Coding DNA Sequence Number=SeqID_25336
MSGGANGTAEHCTGEDERRFVWITRTRGKASLLCPGHELSGPELWTVRAAVEGIVKRYTPVIGAKIDADTLFDDSTGRRLQIYKNRAYMADSKDLNGASPNNDTRLTKNDMKKLDKEIQRQ

SEQ ID NO: 67116 - protein, 99 aa, Zea mays
  Coding DNA Sequence Number=SeqID_25337
  Homolog annotation: Hit_ID=Q6QP51; Match level="QueryCoverage=46%, HitCoverage=20%, E-value=2e-09, Identity=63%"; Hit description =Putative growth-regulating factor 1
MAQPQPRPREESCPRPTPASASGGVSASPDLGLGPTAPRGILHYPTPSYLRLQGNKTGVPSRLAPKRVIANPYRRNNRFESRFDLNRCCMFSQTERSDL

SEQ ID NO: 67117 - protein, 74 aa, Zea mays
  Coding DNA Sequence Number=SeqID_25338
MGRKKHTRSGCRPGPTGQTTRSGARDCEAATVGPLVCQRPALLSFVVAPAFGRQPLDRFQPVEDLEDSFLFVVA

SEQ ID NO: 67118 - protein, 105 aa, Zea mays
  Coding DNA Sequence Number=SeqID_25339
MVGSMITSNKTGNLIEVIKDTGEKEGSEGDVEFNESEDDLLSSQELDVLVKDMCVEVTNSQEELTSEKDDTGKQEMDTDEKNKKNKGKGAELMGRNEEEYKIGGK

SEQ ID NO: 67119 - protein, 90 aa, Zea mays
  Coding DNA Sequence Number=SeqID_25340
MSLEALQRDEEITDIEVMQGYASVPISEDLKKIETMTKKGETDKAVEEGEDLEDNVSATGDDVAGEEEYDLHPSKPSYTDMVQYLIKPNE

SEQ ID NO: 67120 - protein, 46 aa, Zea mays
  Coding DNA Sequence Number=SeqID_25341
MSLEALQRDEEVANIEVMQGEGSFPKLKVMVYKSFFWAGLLASENT

SEQ ID NO: 67121 - protein, 186 aa, Zea mays
  Coding DNA Sequence Number=SeqID_25342
  Homolog annotation: Hit_ID=Q2QMZ1; Match level="QueryCoverage=46%, HitCoverage=8%, E-value=1e-10, Identity=47%"; Hit description=HAT family dimerisation domain containing protein
MVNHILDLMGLALSAFIVLPPKKEVTRTRHGYRSARISLDEEAQIDVAMRNSLRDYFSTLEHDSCSSFDKSTASASGAASCSTWKQSRLSRCYAREGHKEKLGIALAKWFHANDIPGRKANCPYFRSALKLAQQFGDEIPFPCGREIDGPLLDTNYANWRLTWLNSNSMGRIVELQSCVIHGKVLP

SEQ ID NO: 67122 - protein, 100 aa, Zea mays
  Coding DNA Sequence Number=SeqID_25343
MPRAHRVITVRSSFCHAYECELKSYELALETIAFEELVAICQQMVKNAMTPKSRVGPLSPPRAPKEVIIDPNYTQGNVVRVSTSLLEKYESMLVDYSLRK

SEQ ID NO: 67123 - protein, 831 aa, Zea mays
  Coding DNA Sequence Number=SeqID_25344
  Gene Ontology: Biological process=regulation of transcription
  Homolog annotation: Hit_ID=Q6AVK7; Match level="QueryCoverage=83%, HitCoverage=94%, E-value=0.0, Identity=78%"; Hit description =Putative transcription factor
  Pfam annotation: Domain name=GRAS; Domain location=468-774; Score =465.8; E_value=5.6e-137; Accession=PF03514.5; Description=GRAS family transcription factor
PQITCWAPRACASARKRAEVSRWDWAAAPLRALGAASHHRRHTQHQHQRRRTTTGAITSASASAGAGGGPGDADWAKLLALLFVSGVPCLQAKVSLNLSPSWTRSCVVSFILAVSEATGKLLLSGGFCKVTWSLPMGLDNTYGDLSGMFYGGLSYDGYTDHSSASDYFRFADPLPATVPQMAPEACSNPSSTVSRANTETDNPEDWEFISDESLDYISRMLMEEDIDEKVSMYQAESAALRAAAKPFYDILGHKFPPSPDRQLISWSMDSPSESSSSICTQSVASTVTSSSVGGTVDSNRRYDIGLSEQLEAYRGLCGQASHPLVGTSSDASNAVDVLEDPLITNGQIPEYLFESLPTWDFRRGIEEAQKFLPVNNKLVIGLEAGGIARPQEARKDVSLNAKKADALKVKKNRQSEDLDVIEGRNIKQSAFCSDEPDWIEMFDDLLLQTEKKATDLRELMRNEASKNSQVTQTKGPSGPRPRGRKPTKKDVVDLRTILIHCAQAVAADDRRTANELLKQIRHHSKPNGDGTQRLAHCFADGLEARLAGTGSQLYRKLIAKRTTASDMLKAYHLYLAACPFKRLSHFLSNQTILSMTKHASKVHIIDFGIYFGFQWPCLIRRLSKREGGPPVLRITGIDVPQPGFRPTERIEETGQRLAEYAEKLKVPFEYQGIASKWETIRVEDLKVGKDEVVIVNCLYRFRNLIDETVAVDSPRNRVLNTIRQVNPAIFIHGIVNGSYSVPFFITRFREALFHFSALFDMLETTVPRDDAQRALIEREMFGREALNVIACEGSDRVERPETYKQWQVRNLRAGFVQSPLNQEIVMKAKDK

SEQ ID NO: 67124 - protein, 187 aa, Zea mays
  Coding DNA Sequence Number=SeqID_25345
  Gene Ontology: Mol. function=hydrolase activity; Cellular component =calcineurin complex; Biological process=G1/S transition of mitotic cell cycle
  Homolog annotation: Hit_ID=Q9LKF8; Match level="QueryCoverage=57%, HitCoverage=36%, E-value=1e-44, Identity=82%"; Hit description =Serine/threonine protein phosphatase PP2A-5 catalytic subunit
  Pfam annotation: Domain name=Metallophos; Domain location=90-187; Score=52.4; E_value=1.5e-12; Accession=PF00149.18; Description =Calcineurin-like phosphoesterase
MPESPWGLSPFKVRERSTARAGKSAIVKYSNKKKGAGKTAIIEGLALIIANGDVHIFLVGGSDPLQFMLQVRALCEKAKEILMEESNVQSPVTICGDIHGQFHDLAELFRIGGKCPDTNYLFMGDYVDRGYYSIETVTLLVALKVRYPQRITILRGNHESRLLKCKSFSLFFQRIKAKICAIVHLVL

SEQ ID NO: 67125 - protein, 33 aa, Zea mays
  Coding DNA Sequence Number=SeqID_25346
MATAHMMSLAWPYKKCETEIVSELSRMARNGQC

SEQ ID NO: 67126 - protein, 70 aa, Zea mays
  Coding DNA Sequence Number=SeqID_25347
MDEGLKPKFFKLSELRFRKRVFTISEEKIPQDKKIAAETKLIEEEKLFEEKKAVNPYIAGFIESMAKTNT

SEQ ID NO: 67127 - protein, 376 aa, Zea mays
  Coding DNA Sequence Number=SeqID_25348
MGIDPYWKLCQYFFRARVTPGHDDQLYVGSADIQLCTSQKVEYFKILLPSSVQYENELFYAKNVADSAPPFTGREPVSTKKWHYDLEARFKSKVGHLLKAVATLKQQGSPGIGLMAPCLSPLLKDVVIKAKRKQKREAELKTLAACRKRRLVRKKEKAVCLARAEPRRGIRPSTYMEDMTSTASRWMEVLALEGSLSNLRDAEVSSNVPAQGRGLALDPIVLAASSRGRVGAPVPVMMRGGATLVALRPPTSQPTDVPCMEPQASLQTPGLFMSSRRREGRKTEVVPSHMPSVATLKKRPTVLGKNSMNSSRFVLRSIGFKFKVEEAKSTLGEDNARLEEAKSKLLKACNAAGELQKLLSQAQDTRKMAEEAKAAT

SEQ ID NO: 67128 - protein, 157 aa, Zea mays
  Coding DNA Sequence Number=SeqID_25349
  Gene Ontology: Mol. function=nucleic acid binding
  Homolog annotation: Hit_ID=Q5JL01; Match level="QueryCoverage=92%, HitCoverage=11%, E-value=4e-28, Identity=52%"; Hit description =Putative rad8
MAAAGERRKLCGYLRAVVSIPGGDVAAAASILPLSPCTLSACGAVALAPLPDDVRAQPRWPRSRAPGVVRLLRTLVANRCVEVEGTLLRVVTRRRPGEGEGEGDGAAVEARAVVLLDVYIPVAAWSGWQFPRSRSAAAAVFKHVRCNFVDPIAISEE

SEQ ID NO: 67129 - protein, 131 aa, Zea mays
  Coding DNA Sequence Number=SeqID_25350
MAGAGAVAESLVARRREARSGEPTQESGRHSELGTTTSVDVRSWTRGRRGSGWSTGGIPSQQRARGQAPRWCLTIGRSTIEGWHWSRGLSLHSELLEEKLVANDVEGGEGYSPLDESLQVAVARAEVTQKV

SEQ ID NO: 67130 - protein, 975 aa, Zea mays
  Coding DNA Sequence Number=SeqID_25351
  Gene Ontology: Mol. function=nucleic acid binding
  Homolog annotation: Hit_ID=Q5JL01; Match level="QueryCoverage=93%, HitCoverage=77%, E-value=0.0, Identity=75%"; Hit description =Putative rad8
  Pfam annotation: Domain name=F-box; Domain location=88-135; Score =24.4; E_value=0.0004; Accession=PF00646.23; Description=F-box domain
  Pfam annotation: Domain name=SNF2_N; Domain location=138-790; Score =6.5; E_value=1.8e-08; Accession=PF00176.13; Description=SNF2 family N-terminal domain
  Pfam annotation: Domain name=zf-CW; Domain location=360-406; Score =57.7; E_value=3.7e-14; Accession=PF07496.5; Description=CW-type Zinc Finger
  Pfam module annotation: Pfam domain module=F-box::SNF2_N::zf-CW; Domain location=88-135::138-790::360-406
MACATGMLGKRCLILIWASHDNTHCDDQSVWRCTDCHVLDCEDHKIASISNKEKSFDLHEIFKTLPGVRMEKNMQVARITPDERALELGIWSVPDDVLHKVLILLKPRDLVRVAATCHHLRTLAATVMPCMKLKLFPHQEAAVEWMLKREQNVHVLAHPLYKDFCTEDGFPFYINVISAEISTGDAPTINDFCGGLFCDEPGLGKTVTTLSLILKTHGTMAYPPQGVDVSWCMHKPDKKCGYYELSPSFSSNRNSSSVSKKLLGEDVIADCPSPDDSVCSTRSSRKRGRLLSPDPTKVMLHAAIENSPSSSNSKVQPMPAMHILKFTKNSRQVRKNPMDAYSDVSVGNKRKIDTTSEVSETWVQCDACRKWRRVSDGTVLDSTTVWFCTMNPDPTRQKCTAPEESWDFKRKITYLPGFYKKNSLPGNEENVSFFTNILKDYVTMINSETKKALLWLAKLSPTKLLEMEFVGLTRPVLDTRATTGKGAHPYYKIFQAFGLVRKIEKGMTRWYYPSMLDDLAFDSAALGAALENPLDSTRFYLSTATLIVVPANLIDHWTTQIQRHVSSDTLNVFVWGDHKKPSAHNLAWDYDIVITTFSRLSAEWGPQKRSPLKQIHWFRVILDEGHTLGSSLALTNKLQMAVALVASNRWILTGTPTPNTPTSQVAHLHLMLKFLHDETYGQNYQSWDSGIHRPFEAQMEEGRVRLVQLLQRTMISARKADLKTIPPCIKKITFLDFNEGHAKSYNELVVTIRRNILMADWNDPSHVESLLNPKQWKFRAATLKNVRFVLLCCRAYQSCGYHYEMQSPETRARPENPNPKWPVPKDLIELQPSYKQDDWDPDWQSTSSSKVAYMIEKLRSLREAHMNHGNNITNSVGHSNTLSYQPQAMLDKVIIFSQFLEHIHVIEQQLTIAGIIYSGMYSPMPLASKLFCSPDLIFPYLFFFKKRRRTAPSYIKEYKGQKGPRYNALHNLYGG

SEQ ID NO: 67131 - protein, 161 aa, Zea mays
  Coding DNA Sequence Number=SeqID_25352
  Gene Ontology: Mol. function=RNA-directed DNA polymerase activity; Cellular component=intracellular; Biological process=RNA-dependent DNA replication
  Homolog annotation: Hit_ID=UPI00004C1733; Match level="QueryCoverage =99%, HitCoverage=14%, E-value=9e-80, Identity=78%"; Hit description =UPI00004C1733 related cluster
MPGILRDVAEHSLDIRAGARPVKQPLLRFDEEKRRAIGEEIHKLMAAGFIKEVPYPLPRIDQIMDSTAGCETLSFLDAYSGYHQIRMKESDQLATSFITPFGMYCYVTMPFGLRNAGATYQRCLNHVFDEHIGRTVEAYVDDIVVKTRKASDLLSDLEVTF

SEQ ID NO: 67132 - protein, 95 aa, Zea mays
  Coding DNA Sequence Number=SeqID_25353
MGEGRGGRCHFGVGGKRRPRRNGGRGRGGVEGARRSKGRGATTKGRGGRGRGGVGRGGREGATTEGVAVKGGVASIAAAWRAAAAARVVKVEHGG

SEQ ID NO: 67133 - protein, 110 aa, Zea mays
  Coding DNA Sequence Number=SeqID_25354
MAHQTSRLPAVRVNLAIVLEDHTSILDGPGRCCGSSYCHHFHRRGLLQQLLQRPGCPVVVQGAPPAGAQESSSSQTLPPTEARKKDPVAPTPVADAPAPRAGGGATSPNG

SEQ ID NO: 67134 - protein, 1387 aa, Zea mays
  Coding DNA Sequence Number=SeqID_25355
  Gene Ontology: Mol. function=ATPase activity, coupled to transmembrane movement of ions, phosphorylative mechanism; Cellular component=integral to membrane; Biological process=phospholipid transport
  Homolog annotation: Hit_ID=Q9LI83; Match level="QueryCoverage=85%, HitCoverage=95%, E-value=0.0, Identity=61%"; Hit description =Putative phospholipid-transporting ATPase 10
  Pfam annotation: Domain name=Hydrolase; Domain location=454-937; Score=35.7; E_value=1.6e-07; Accession=PF00702.16; Description =haloacid dehalogenase-like hydrolase
MAGEDDGNATNGRRRRRRSAVRLSKLYSYACGRRPSVADDHSVSRIGGPGFSRVVTVNAGGGEPSAAAADLLQQQQQQMASSNSISTTKYNLFTFLPKSLFEQFRRVANIYFLLSAGHRLQPPRRLQLLQRHCAACHRPRRHHDQGGNRRLEEEPAGTDTEVNNRKTQVFQVNNIGGGGGFRDAKWKDIRVGDIVKVHKDEFFPADLVLLSSSYDDAICYVETMNLDGETNLKLKQSLEATSASLPPDDGASFGAFRGAVVRCEDPNAHLYTFVGNIEMDGRQHPLSPQQLLLRDSKLRNTDFVYGVVVFTGQDTKVMQNSMKVPSKRSNVEKKMDRVMYLLLFSLIVISVVSSVFFGIATRDHGRTMRRWYLRPDDTEIYYDPKRPAVAAVLHFFTAIMLYGYFIPISLYISIEIVKLLQALFINHDIHMYHEETDTPAHARTSNLNEELGQVDTILTDKTGTLTCNSMEFIKCSIAGTAYGRGVTEVERAMARKKGSAAAADNTDKAKNNGIQQQQHFLSSSSSDDNDDGDNNSKPAATKGFNFVDERVMGGNWVHQPRSDAIEMFFRLLAVCHTCIPEVDQESGKISYEAESPDEAAFVVAARELGFTFYKRTQTGVYLRELDPSSGKQVDRSYRILNVLEFNSARKRMSVIVKDEEGKLFLFTKGADNVMFERLSGSGSAHRDVTQQHINEYADAGLRTLVLAYRELKADEYAHFDRQFAAAKNSVSADRDEKIDEAADLVERDLLLLGATAVEDKLQNGVPECIDKLAQAGIKIWVLTGDKMETAINIGYACSLLRQGMKQITITLETADIAALEKGSDKAALTKASKDSVARQINEGKKLVNASSGESFALIIDGRSLTYALEDDAKDMFLDLAVGCGSVICCRSSPKQKALVTRLVKTGTGKVTLAIGDGANDVGMIQEADIGVGISGAEGMQAVMASDVSIAQFRFLERLLLVHGHWCYSRISSMICYFFYKNITFGVTLFLYDAYTSFSGQPLYNDWAMASFNVFFTSLPVVAMGVFDQDVSARFCLKFPMLYQEGPQDLLFQWRRIIGWMVNGVASAVIIFFLCTASLQHQAFRSGGEVADMATLGATAYTCIVWAVNLQMYITVSYFTLVQHVCIWLSVGLWYVFLPVYGAIAPSFSTTYYMVFVEALAGAPSYWVVTLLVSAASLVPYFTYAVVKSWFFPDYHNRIQWLRHRERAQGPPGPGDQRRRGAQPGLALSSWISRIQIFQVFQDISGSFCALLGRVGAEFKGHFPEPSLSASWDGNRGAINGAEALSLSSSERDQNVRRLNGSFISVSLPPEMDKLKDVCMPVTGFTVTLQKSKPVATDYRSITIYPRKPVQTVWTRLVDCPRVAEKRHDYVMVEGYKYHPNHPFNGTK

SEQ ID NO: 67135 - protein, 182 aa, Zea mays
  Coding DNA Sequence Number=SeqID_25356
MAHLPTKSVEQTCEAEQPTKSLLSKPARWSDGPSLYRATLRGGVADQVSTEPCEVERPTKSLPSNPTRWFTIWSEFVLTSPPNTNSTVPLVSETTTISALGRGPLACQVTPSTLMAQSSAFTSGETFAPGSCIMFDSLNFLATATGKLRLANPDTPVITGIGPARSTRSKEENDASRDASPP

SEQ ID NO: 67136 - protein, 34 aa, Zea mays
  Coding DNA Sequence Number=SeqID_25357
MAATAMMLWSILEPDAPEARAMYRNLQNLVDKAT

SEQ ID NO: 67137 - protein, 70 aa, Zea mays
  Coding DNA Sequence Number=SeqID_25358
MDITETSKHLESITVCTGVAVHSIAFSYVDYAGEKHSTGRWGWGGSGGQPETVVGEELEVLTRMESIYLA

SEQ ID NO: 67138 - protein, 134 aa, Zea mays
  Coding DNA Sequence Number=SeqID_25359
  Gene Ontology: Mol. function=sugar binding; Cellular component =cellular_component; Biological process=protein amino acid phosphorylation
  Homolog annotation: Hit_ID=Q9LL87; Match level="QueryCoverage=62%, HitCoverage=27%, E-value=1e-23, Identity=65%"; Hit description=Beta -glucosidase aggregating factor
  Pfam annotation: Domain name=Jacalin; Domain location=2-99; Score =12.9; E_value=2.6e-06; Accession=PF01419.7; Description=Jacalin-like lectin domain
MGRTLVRDVAIPGWGFLIHLAKSEVVTELSGTIGKVDDRTVITSIKFVTNLKKTYGPWGAYGDDRDTQFIVPMQPGSGIVGFFGHAGDYLDAIGIYARAIPTTTTTPVMGRSLDRGFMVLISFDFLRLLQLVAS

SEQ ID NO: 67139 - protein, 112 aa, Zea mays
  Coding DNA Sequence Number=SeqID_25360
MAPVPKPSVQTRFVLEAMANKEKEDGDRWDRMMAKIDRLTEKVVGVEEVQQKLMMQSELAAAVAQKAAEERVHLAQQVEKTGREVAEIRLEWMARNMEGSESVMEERARGEP

SEQ ID NO: 67140 - protein, 82 aa, Zea mays
  Coding DNA Sequence Number=SeqID_25361
MKEMATDEDEADGADPPVSGLERRHTRDARDAPQTCGRDETRPSAQEWWLTGLTLLSVRRQGANLNSFELCILVIPNYEDVI

SEQ ID NO: 67141 - protein, 82 aa, Zea mays; identical to SEQ ID NO: 67140
  Coding DNA Sequence Number=SeqID_25362

SEQ ID NO: 67142 - protein, 83 aa, Zea mays
  Coding DNA Sequence Number=SeqID_25363
MGMNLSPKLTEGHDRTHDGIQSWLSQESPRRCCRVKIIHGKGGDQAVTARGRRRDRRDVSRVFTVARRDNERIFGRCFYSDFS

SEQ ID NO: 67143 - protein, 73 aa, Zea mays
  Coding DNA Sequence Number=SeqID_25364
MASSEDTDESMGLSTVARAYWCSIEHAGLGESDDSEEVSSEEVDSSNSEEWSGSKGDGGCWGLPLPKEASAPE

SEQ ID NO: 67144 - protein, 77 aa, Zea mays
  Coding DNA Sequence Number=SeqID_25365
MMEVDGSDKRTNTAAPEPSLLPSELVHHFDQPLSKGKIEAIDLVGKWEAVEEGQGHQSRVDCSGMPNYAGLMVELAL

SEQ ID NO: 67145 - protein, 94 aa, Zea mays
  Coding DNA Sequence Number=SeqID_25366
MDRRVFGRVKRSRARLRTADGECVAPATNCGLRELGRARTSAGWRAGWAHGVGVGLAALLGCRVAGTRGAKEAPGARHSEREAERDERRGEGKS

SEQ ID NO: 67146 - protein, 278 aa, Zea mays
  Coding DNA Sequence Number=SeqID_25367
  Gene Ontology: Mol. function=DNA binding; Cellular component=nucleus; Biological process=regulation of transcription
  Homolog annotation: Hit_ID=Q9AV06; Match level="QueryCoverage=63%, HitCoverage=53%, E-value=1e-67, Identity=71%"; Hit description =Putative NAM (No apical meristem) protein
  Pfam annotation: Domain name=NAM; Domain location=10-139; Score =263.5; E_value=4.1e-76; Accession=PF02365.6; Description=No apical meristem (NAM) protein
MGLREIESTLPPGFRFYPSDEELVCHYLYRKVANERSVQGTLVEVDLHAREPWELPDAAKLTASEWYFFSFRDRKYATGPRTNRATKTGYWKATGKDREVRDPAARAVVVGMRKTLVFYQGRAPSGVKSCWVMHEFRLDSPRTTTTPPKEDWVLCRVFQKRKVYGSDQDNGVSPSPPVFAGASQSQGVVLPPDQPCVVDAYVVENLGSGLDALLTNGAMWQYTSSVFGHLLPQEATSSPPVMDLGSRGGEGGDYGCSFFYDSSFEDMANIGFRQGWMG

SEQ ID NO: 67147 - protein, 71 aa, Zea mays
  Coding DNA Sequence Number=SeqID_25368
  Gene Ontology: Mol. function=urocanate hydratase activity; Biological process=histidine catabolic process
  Homolog annotation: Hit_ID=Q2CIA9; Match level="QueryCoverage=100%, HitCoverage=12%, E-value=3e-26, Identity=81%"; Hit description =Urocanate hydratase
MAREPIVLQGLPARICWLGLGEPPRTGLAFNEMVRTGELNAPIVIGRDHLDTGSVASTTRETEAMKDGSDA

SEQ ID NO: 67148 - protein, 139 aa, Zea mays
  Coding DNA Sequence Number=SeqID_25369
MDVGDRGFGTLSAHESLTSLSTYAASVSNAARRALWSLSHTYRQQLHDTRCRHLSLRLRGESQTSVVPGEAGEDCLNTLVGVVAGHNTNLDSATLDLSRVHAALEAQVEGRNPPQAQVPVIAVSLPRKRIRYGFITRLL

SEQ ID NO: 67149 - protein, 509 aa, Zea mays
  Coding DNA Sequence Number=SeqID_25370
  Gene Ontology: Mol. function=protein serine/threonine kinase activity; Cellular component=membrane; Biological process=protein amino acid phosphorylation
  Homolog annotation: Hit_ID=Q6L4U4; Match level="QueryCoverage=91%, HitCoverage=95%, E-value=0.0, Identity=76%"; Hit description =Putative receptor-like protein kinase
  Pfam annotation: Domain name=Pkinase; Domain location=165-439; Score =142.8; E_value=9.4e-40; Accession=PF00069.15; Description=Protein kinase domain
  Pfam annotation: Domain name=Pkinase_Tyr; Domain location=165-439; Score=112.5; E_value=1.2e-30; Accession=PF07714.7; Description =Protein tyrosine kinase
  Pfam module annotation: Pfam domain module=Pkinase::Pkinase_Tyr; Domain location=165-439::165-439
MGLLSSANRCGCKNILSCNLLRCACCCSWIRSVCGGRTTTSNKAAAQQEASDAERKAKRKLARGLCGGAVREAEEPLTSEAKKKRTNTAATIPEPQKCKWTKKARKKKKTKNEQNGLAALVEEISLSTDSPKHRAAAGEILRIGNHNIPSRVFTFRELVDATNSFCPENLLGEGGFGRVYKGCIPDTMEVIAVKQLDKDGLQGNREFLVEVLMLSLLHHPNLVTLVGYSTDCDQRILVYEYMSLGSLQDHLLDLSPKSQPLSWHTRMKIAVGAARGIEYLHEVANPPVIYRDLKASNILLDASFNAKLSDFGLAKLGPSGDNTHVSTRVMGTYGYCAPEYAMTGKLTKTSDIYSFGVVLLELITGRRAIDTTKPTREQILVHWAAPFFRDKRKFVKMADPLLDMKFPLKGLYQALAISSMCLQEEASSRPLISDVVTALTFLADPNYDPPDDIKDPLPITVPNLDMETTGQNGTEGGGRGLVRCNQFLNILETGVCHIGKDVISAHFLE

SEQ ID NO: 67150 - protein, 229 aa, Zea mays
  Coding DNA Sequence Number=SeqID_25371
  Homolog annotation: Hit_ID=Q10ML4; Match level="QueryCoverage=27%, HitCoverage=10%, E-value=2e-10, Identity=57%"; Hit description=TPR Domain containing protein, expressed
MAQMEERLTDVLTGRGREQATHGRTSSFNDDSGADCILINVGTDCTAEDDAPYSVTAAAEVDSLPNPDDVCIEEFNVLDEDTASANAADDDSGAVHVHAPLNLDATSLLVIEFEYATSECVRTCVVGDVPVAHSALKVFDQMLSPGFDGEPIFDEDAGENARKICDLEAMRDQARMSTLFLYRMLQKGYSCIMSALLDAERQRSKDTAAAMAEPEAKQEEVATVQENAT

SEQ ID NO: 67151 - protein, 79 aa, Zea mays
  Coding DNA Sequence Number=SeqID_25372
MATAPAGTISWEAKQARVTEIEVVQYHIISISVFFDSENAVRDLLPVARQIETSPAIPSLTRCQRCSCSLPLWLRPGRR

SEQ ID NO: 67152 - protein, 92 aa, Zea mays
  Coding DNA Sequence Number=SeqID_25373
MARACHPWCVCVAAALPTCLAVGRVDYGGSHAGTKPVSHGGGQALRDRQGWKTGALEPASNMEPPCWPTLTGGMGEAVAVAAGAGGCRGQRG

SEQ ID NO: 67153 - protein, 555 aa, Zea mays
  Coding DNA Sequence Number=SeqID_25374
  Gene Ontology: Mol. function=acyltransferase activity; Cellular component=integral to membrane; Biological process=metabolic process
  Homolog annotation: Hit_ID=Q5Z801; Match level="QueryCoverage=81%, HitCoverage=90%, E-value=1e-156, Identity=79%"; Hit description =Putative JD1
  Pfam annotation: Domain name=Acyltransferase; Domain location=124 -246; Score=-1.0; E_value=0.0037; Accession=PF01553.11; Description =Acyltransferase
  Pfam annotation: Domain name=efhand; Domain location=390-418; Score =2.7; E_value=7.6; Accession=PF00036.22; Description=EF hand
  Pfam annotation: Domain name=efhand; Domain location=463-491; Score =23.3; E_value=0.00088; Accession=PF00036.22; Description=EF hand
  Pfam module annotation: Pfam domain module=Acyltransferase::efhand::ef hand; Domain location=124-246::390-418::463-491
MASTCLAPASLSTPLLSDSIARAPAANGHATNHRHHHHDDSDGAAAVSVCDDGGGDPFAFLSEDRPPRDRGPSPADPFRNGTPAWGGGVYAWSRTLLLLPVALVRLALFGLSIAIGYAATWGGSPRVGGHAREAAGGRRAYAGVAPPGSCGSRGSQLAASSSLSESHDALPFVGTIIRAMQVIYVDRFSPASRKAAVNEIKRKAACNSFPRVLLFPEGTTTNGRFLISFQHGAFIPGYPVQPVVVRYPHVHFDQSWGNISLLKLMFKMFTQFHNFMEVEYLPVVYPPEIKQENALHFAEDTSYAMARALNVLPTSYSYGDSMIMARAIEAGKVNGSNYMVEMAWVKDIYGVSTAEAMDLLEHFLAMNPDNDGRVKAQDFWAHFGLDCSPLCKKIFHYFDLGIKESITFRQFLVGCAHLRKQPLFQGACETAFEKCRDPETSEISRAQLADVLRLSMLLPSGDRMLDLFKTFDIDGDEKISKDDFMTCLGEVPVPDCVLCSPDQWGSVHRDSLKARRCRFKDELAGDKYLRRELVLYCHYGICCEIRAGLIDCRWN

SEQ ID NO: 67154 - protein, 497 aa, Zea mays
  Coding DNA Sequence Number=SeqID_25375
  Homolog annotation: Hit_ID=Q5Z800; Match level="QueryCoverage=99%, HitCoverage=75%, E-value=1e-132, Identity=52%"; Hit description =Putative NF-E2 inducible protein
DTETATAIGSKSYNALASGLAEFKSGKPTEENKYVEEETVDFAAATTAALKIPSPSVSRGRSFDEHTLSNSSTVPHKRRGDLEEEEELMRVLNLSKAKSGDVEVSFDTSHSHSSSNIETPQNESFQSEALELVVATKKEEYGNHATSDHVSMLSVTNVAINGSEVVPEESQENLISKEPEDNGIKNLDIPIQFSETTPYPSHESFASSDHQPAIPTLVEGDKETCKEQFDVQIHGQSNDTEVACDSSVTTCEAVPDHATTELDVKSDSLDNSQSLPSSIQECEPIYQGEEHILGTTNMVYENQEPVYEGEVVLAEQADKIGESSSSGDDKATEHQWELIDNFLLTTANQLTVYGLFCLQEGLNESELCVFFRNNHFNTMFKYNGSLYLLATDQGFISQTDLVWQRLDEDYLAQFDNSTSGNSDLELAIALQQQEFERQPQRFQAPQPQQQQQQQQQPPPQTQYQTQSGRPGLVVGPRRSNAPPPSRSESKKERCIVM

SEQ ID NO: 67155 - protein, 74 aa, Zea mays
  Coding DNA Sequence Number=SeqID_25376
MALFPLLLAERRRRGAWQEDSTAYDAPTVVPLDRVRLTAAKPGLRRHRKLRFARPQGSDSGSAPEDDELHFARP

SEQ ID NO: 67156 - protein, 138 aa, Zea mays
  Coding DNA Sequence Number=SeqID_25377
  Homolog annotation: Hit_ID=Q5Z800; Match level="QueryCoverage=61%, HitCoverage=12%, E-value=4e-34, Identity=82%"; Hit description =Putative NF-E2 inducible protein
MSSDPSPHLPSPVAPPGAAEADPHHLPQPAEPHEVMHRTRAVDFLGRRTPIVYQNDNGPCPLLAICNVLLLKNVISLNPDAGEVSQQKLLSLVAERLIDPNIAGQVRLYLLQDRGFVFGRSMRDGLVLGCSSSLPAGI

SEQ ID NO: 67157 - protein, 626 aa, Zea mays
  Coding DNA Sequence Number=SeqID_25378
  Homolog annotation: Hit_ID=Q9LIQ0; Match level="QueryCoverage=72%, HitCoverage=74%, E-value=2e-44, Identity=28%"; Hit description =Arabidopsis thaliana genomic DNA, chromosome 3, BAC clone:F14O13
  Pfam annotation: Domain name=Krr1; Domain location=395-576; Score =159.4; E_value=9.1e-45; Accession=PF05178.3; Description=Krr1 family
RCSLKKMGRRKKSKEMEKKPLDILSGSDEDFDSGENLSKIQINEEYARRFEHNKRREALQRLEERRKQGLVPASDDDESESESSSEEEDEAAAIASRLVDRRMFEVIRRIRSGDPRILDKDAKVYSSEEEGGEEGEDAKKQEESKQEKEKTKKEKPLYLKDVNARHLLEEGPEFAAQPSRSSSKFERIAYDEQQKKGLEAFLEAQKEALGDGGDDDGDLFQVKEKARAGADDEAEEDEEEKQTKDLAGEVFGKDEELDENEKFLKEFFLKRPYLETEKSKSYLDNIQELSDEEELEIQEEYEHAYNYRHEEAMASGAVVADRVLGHSRVVEGSVRKKESSRKQQRKSKEERMARVKQEQAEELKHLKNLKKKEIAEKLERIRMIAGIEGDAACKLGADDLEEDFDPEDYDKKMQEMFDDSYYEADEVDPEFGSGEEMDLEKPDFGKEDELLGLPKGWASDHSKEESTATDAKGEKGKISLKDKVELEKEMEEYYKLDYEDTIGDIKTRFKYKQVKPNSFGLSTYDILASDDKDLNQYVSVKKLAPYREDEWKVTHHKKQSKDLILGGQKKEGKKDKSGKKSRSEEDPSSSKTENDRMTNGQESTDAKKKSTRSERRKRRKSELRPS

SEQ ID NO: 67158 - protein, 47 aa, Zea mays
  Coding DNA Sequence Number=SeqID_25379
MEPSARPEAKCWWEPSGLFPQQANMEHGVGEHGTKLHFAPKVMPQSQ

SEQ ID NO: 67159 - protein, 376 aa, Zea mays
  Coding DNA Sequence Number=SeqID_25380
  Gene Ontology: Mol. function=4 iron, 4 sulfur cluster binding; Cellular component=integral to membrane; Biological process=protein -chromophore linkage
  Homolog annotation: Hit_ID=P56766; Match level="QueryCoverage=89%, HitCoverage=44%, E-value=0.0, Identity=92%"; Hit description =Photosystem I P700 chlorophyll a apoprotein A1
  Pfam annotation: Domain name=PsaA_PsaB; Domain location=1-374; Score =386.6; E_value=3.9e-113; Accession=PF00223.9; Description =Photosystem I psaApsaB protein
MAKRSYSHWTQCSGPIGGIGHGLKDILEAHKGPFTGQGHKAIFMVRDYDPTTRYNDLLDRVLRHRDAIISHLNWVCIFLGFHSFGLYIHNDTMSALGRPQDMFSDTAIQLQPIFAQWIQNIHAGAPGVTAPGATTSTSLTWGGGELVAIGGKVALLPIPLGTADFLVHHIHAFTIHVTVLILLKGVLFARSSRLIPDKANLGFRFPCDGPGRGGTCQVSAWDHVFLGLFWMYNSISVVIFHFSWKMQSDVWGTISDQGIVTHITGGNFAQSSITINGWLRDFLWAQASQVIQSYGSSLSAYGLFFLGAHFVWAFSLMFLFSGRGYWQELIESIVWAHNKLKVAPATQPRALSIIQGRAVGVTLSLLGGIATTWASS

SEQ ID NO: 67160 - protein, 103 aa, Zea mays
  Coding DNA Sequence Number=SeqID_25381
MAKRGSVVARTRDCRGGRESREDIVAGVAETTVLGGGRGIRGEGVGRGNMGARRSWMGRETRPRSSWRQLRCWKTQTVRVHDMIKSHKGVSEKMVGVKGKRTR

SEQ ID NO: 67161 - protein, 890 aa, Zea mays
  Coding DNA Sequence Number=SeqID_25382
  Gene Ontology: Mol. function=transcription regulator activity; Cellular component=nucleus; Biological process=regulation of transcription
  Homolog annotation: Hit_ID=Q2QXE3; Match level="QueryCoverage=99%, HitCoverage=100%, E-value=0.0, Identity=71%"; Hit description =Expressed protein
MAVGDALRRLCEEVGWSYAVFWKAIGAADPVHLVWEDGCCGHVSCSAGSEAPEAGCELGTSVCTLVRKVMTSQIHVVGEGTIGRAAFTGNHQWIVHDPANDHNLRPEVSAEMNHQFAAGIQTIAIIPVLPRGVLQLGATSVVMENTNLVLQYKNLCSQLNNRSSMASSSSVKNDLNQKIQSRPLNGLTSIHPADTRSKFFSGPPLTYQQCYGPDGRTVSSSTLANMGSNASMLMVAQRNGQVGKEHIVYAPDMRFRPQNPYCDRRVGSNTQNSVVSSGFISSISASMERHPLMTNNRQLEQGNTGEPSDSRSVLLKSLAYHNPLVHENTNMTLLHGRGQVPGFVNGHGGFDFLPEGTRVVKSNLYGSTTNQILDQICSSTSGMKGHGPTISYKIPQPTQFVGKTESSKRETCQASVALLSDSDIQVSSVLKTAISQENQTSRSDLIGSKKANEVHDPTDAIVQAVKNMDRRRLPDISNERSPPFLMDPAAESDLFDMFGSEFHHLCHNVDNDLTWKAAKPENSNRDVPEFSDHLGSSPAFNSVDDEFPYSGIFSLTDTDQLLDAVVSNANPGGKQISGDSASCKTSVTDIPSTSYCRLKEPKQSESSAPPLLIKNELAVSNFVKHPSFPEKAADGCLSQNNAIQKSQIRLWIESGQNLKCESASASNSKGVDTSSKASRKRSRPGENPKPRPKDRQLIQDRIKELRELVPNGAKCSIDALLEKTIKHMVFLQSVTKHADNLKDSNESKILGGENGPLKDYFEGGATWAFDVGSQSMTCPIIVEDLDRPRQMLVEMLCEDRGIFLEIADFIKGLGLTILRGVMEARKNKIWARFTVEANRDVTRMEIFLSLMRLLEPSYDGGGAGENPNNNIKMPLGIVQYPVIPVSGHLR

SEQ ID NO: 67162 - protein, 148 aa, Zea mays
  Coding DNA Sequence Number=SeqID_25383
MGKLGAKLTKLTKSQADYISVPIDRGQRCYPTWAGLSVGLAAPSTSAVLERSAGRQLVTWPISSHSCAAIDPKSKSSKVPQARQRRPWPRSPLTPSPTARRATVARGGEQRAFEDGGVGDASSSYPGGGDEGLNQISHEVMDSWVPPC

SEQ ID NO: 67163 - protein, 343 aa, Zea mays
  Coding DNA Sequence Number=SeqID_25384
  Gene Ontology: Mol. function=ubiquitin-protein ligase activity; Cellular component=ubiquitin ligase complex; Biological process =protein ubiquitination
  Homolog annotation: Hit_ID=Q2QXD4; Match level="QueryCoverage=82%, HitCoverage=62%, E-value=3e-41, Identity=42%"; Hit description=U-box domain containing protein, expressed
  Pfam annotation: Domain name=U-box; Domain location=11-80; Score =64.0; E_value=5e-16; Accession=PF04564.6; Description=U-box domain
MEDLSAMRHHLMCPISLQPMQDPVTAPTGITYDRRAIERWLAAGHATCPVTGQPLALADLTPNHTLRRLIQSWCAPRPSTPPEAAGANKPADGDDAVEHSQSQTDDDVVKKLLRAATSPPIDVLREAAAAAFESDAARRRMVDAGVLQRVLRGVAAIASEVKADDPRHHENESSSAIARAIEARLDLARALAVSSCDDDELRPQLVADSLVHGLLDAATDVLAALERAGAGGAGGDAARASAVRLLDSVTGAAGAAVLERLRPGLFRAVTAVVRDRVSPAATRSALRVLLHACPLGRNRALAVEAGAAREAIELELDAPPAGGGGGNRRATQWRSCIITIGFN

SEQ ID NO: 67164 - protein, 159 aa, Zea mays
  Coding DNA Sequence Number=SeqID_25385
MAAAPCLGRSCRTRRSSTGRHLCWMADDAYPCCCPSSSSSSQVGSGLVNHGGVLDYPVLPPAALPCHVPPPANLRGGTGVFLPRIEAYRYAAAPPATAKGGAATKPWAGTGSRPATGKKQERQQAEQAAPAAKHPQKQRQQQQQATGAALALPQDWCYR

SEQ ID NO: 67165 - protein, 92 aa, Zea mays
  Coding DNA Sequence Number=SeqID_25386
MAPPNISIMQLTNNGSYLNKKHLTIAIASREERQFPCKAKGLAPASSTLHPSLYHVTAHSSARPGIDEVRQRNGRSGIACSIGNPPVSVECA

SEQ ID NO: 67166 - protein, 51 aa, Zea mays
  Coding DNA Sequence Number=SeqID_25387
MATEALEDLVVDEDSGAWRTVMDIQSRLQNPNAMGWMEPGLERSGGDGSRM

SEQ ID NO: 67167 - protein, 1081 aa, Zea mays
  Coding DNA Sequence Number=SeqID_25388
  Gene Ontology: Mol. function=protein kinase activity; Cellular component=integral to membrane; Biological process=protein amino acid phosphorylation
  Homolog annotation: Hit_ID=Q8LQ10; Match level="QueryCoverage=83%, HitCoverage=86%, E-value=0.0, Identity=67%"; Hit description =Putative receptor-like protein kinase
  Pfam annotation: Domain name=LRR_1; Domain location=227-249; Score =15.8; E_value=0.16; Accession=PF00560.23; Description=Leucine Rich Repeat
  Pfam annotation: Domain name=LRR_1; Domain location=251-273; Score =17.5; E_value=0.048; Accession=PF00560.23; Description=Leucine Rich Repeat
  Pfam annotation: Domain name=LRR_1; Domain location=275-294; Score =12.9; E_value=1.1; Accession=PF00560.23; Description=Leucine Rich Repeat
  Pfam annotation: Domain name=LRR_1; Domain location=297-316; Score =10.6; E_value=3; Accession=PF00560.23; Description=Leucine Rich Repeat
  Pfam annotation: Domain name=LRR_1; Domain location=322-346; Score =6.2; E_value=20; Accession=PF00560.23; Description=Leucine Rich Repeat
  Pfam annotation: Domain name=LRR_1; Domain location=348-370; Score =13.6; E_value=0.7; Accession=PF00560.23; Description=Leucine Rich Repeat
  Pfam annotation: Domain name=LRR_1; Domain location=372-394; Score =12.7; E_value=1.2; Accession=PF00560.23; Description=Leucine Rich Repeat
  Pfam annotation: Domain name=LRR_1; Domain location=396-418; Score =6.9; E_value=15; Accession=PF00560.23; Description=Leucine Rich Repeat
  Pfam annotation: Domain name=LRR_1; Domain location=420-442; Score =15.3; E_value=0.22; Accession=PF00560.23; Description=Leucine Rich Repeat
  Pfam annotation: Domain name=LRR_1; Domain location=444-466; Score =13.0; E_value=1; Accession=PF00560.23; Description=Leucine Rich Repeat
  Pfam annotation: Domain name=LRR_1; Domain location=468-490; Score =13.1; E_value=1; Accession=PF00560.23; Description=Leucine Rich Repeat
  Pfam annotation: Domain name=LRR_1; Domain location=492-514; Score =14.3; E_value=0.45; Accession=PF00560.23; Description=Leucine Rich Repeat
  Pfam annotation: Domain name=LRR_1; Domain location=515-537; Score =11.6; E_value=1.9; Accession=PF00560.23; Description=Leucine Rich Repeat
  Pfam annotation: Domain name=LRR_1; Domain location=540-562; Score =15.7; E_value=0.17; Accession=PF00560.23; Description=Leucine Rich Repeat
  Pfam annotation: Domain name=LRR_1; Domain location=564-586; Score =14.5; E_value=0.38; Accession=PF00560.23; Description=Leucine Rich Repeat
  Pfam annotation: Domain name=LRR_1; Domain location=588-610; Score =9.0; E_value=5.9; Accession=PF00560.23; Description=Leucine Rich Repeat
  Pfam annotation: Domain name=LRR_1; Domain location=612-634; Score =15.5; E_value=0.19; Accession=PF00560.23; Description=Leucine Rich Repeat
  Pfam annotation: Domain name=LRR_1; Domain location=636-658; Score =13.8; E_value=0.62; Accession=PF00560.23; Description=Leucine Rich Repeat
  Pfam annotation: Domain name=LRR_1; Domain location=660-682; Score =16.2; E_value=0.12; Accession=PF00560.23; Description=Leucine Rich Repeat
  Pfam annotation: Domain name=LRR_1; Domain location=684-707; Score =7.9; E_value=9.5; Accession=PF00560.23; Description=Leucine Rich Repeat
  Pfam annotation: Domain name=NAD_kinase; Domain location=1-166; Score= -29.3; E_value=0.00065; Accession=PF01513.11; Description=ATP-NAD kinase
  Pfam annotation: Domain name=Pkinase; Domain location=875-1081; Score= -6.1; E_value=3.4e-08; Accession=PF00069.15; Description=Protein kinase domain
  Pfam annotation: Domain name=Pkinase_Tyr; Domain location=875-1081; Score=-62.1; E_value=1.2e-08; Accession=PF07714.7; Description =Protein tyrosine kinase
  Pfam module annotation: Pfam domain module=LRR_1::LRR_1::LRR_1::LRR _1::LRR_1::LRR_1::LRR_1::LRR_1::LRR_1::LRR_1::LRR_1::LRR_1::LRR _1::LRR_1::LRR_1::LRR_1::LRR_1::LRR_1::LRR_1::LRR_1::NAD
  Pfam module annotation: Pfam domain module=Domain location=227 -249::251-273::275-294::297-316::322-346::348-370::372-394::396 -418::420-442::444-466::468-490::492-514::515-537::540-562::564 -586::588-610::612-634::636-658:...
  Pfam module annotation: =:660-682::684-707::1-166::875-1081::875-1081
SEHYRELLDNVLNGPFSITLRNRIQCHVIRDAAKDEIVTEEPFLVLNEVTIDRGISSYLTNLEVYCDSSFVTCVQGDGLIISTTSGSTAYSLAAGGSMVHPQVPGILFTPICPHSLSFRPLILPEYVTLRVQVPYNSRGARLGVLRRQGPEAAVTRIHEGLHWNLRKSQSFDGPPRWPRGRGPDATTPLAPWRAWSATRPPPAVLRLALDGLALSGRMPRDLDRLPALQYLSLARNNISGPLPPGLSLLASLRSLDLSYNAFSGPLPDDIARLASLRSLDLTGNAFSGPLPPAFPETIRFLVLSGNQFSGPVPEGLASGSPLLLHLNVSGNQLSGSPDFAGALWPLQRLRTLDLSRNQFSGPVTGGIARLHNLKTLILSGNRFFGAVPADIGLCPHLSAIDLSSNAFDGHLPDSIAQLASLVYLSASGNRLSGDVPAWLGKLAAVQHVDLSDNALTGGLPDSLGDLKALRYLSLSRNQLSGAVPASMSGCTKLAELHLRGNNLSGSIPDALLDVGLETLDVSSNALSGVLPSGSTRLAETLQWLDLSGNQLTGGIPTEMSLFFKLRYLNLSRNDLRAPLPPELGLLRNLTVLDLRSTGLYGAVPADFCESGSLAVLQLDGNSLSGPIPDSIGNCSSLYLLSLGHNGLTGPIPAGISELKKLEILRLEYNKLSGEIPQQLGALENLLAVNISHNRLVGRLPASGVFQSLDASALEGNLGICSPLVTEPCRMNVAKPLVLDPNEYTQGGGGGDNNLETGGGGGVEAPRKRRFLMSVSAMVAIFAAVAIVLGVIVITLLSVSARRRVEAAGVGGPGHDRKEVDESIVTTSSTTTTKSSSSPPPGGKVKEKLATGKMVTFGPGSSLRSEDLVAGADALLSKATEIGRGALGTVYRAAVGDGRVVAVKKLAAAHLVRSREEFEREVRVLGKARHPNLLALRGYYWTPQLQLLITDYAAHGSLEARLHGGGEAAPMTWEERFRVVSGTARALAHLHQAFRPALVHYNVKPSNILLADAECNPAVGDFGLARLLHGSGSGRQVAMAGSRFRQGGGGGMGYVAPELACQSLRANDKCDVYGVGVLILEL

SEQ ID NO: 67168 - protein, 119 aa, Zea mays
  Coding DNA Sequence Number=SeqID_25389
  Homolog annotation: Hit_ID=Q5JN45; Match level="QueryCoverage=42%, HitCoverage=12%, E-value=1e-08, Identity=63%"; Hit description =Putative Ser/Arg-related nuclear matrix protein
  Subcellular localization annotation: CTP_CleavageSite=56; ConfidenceScore=5.65e-01
MAKPSAWPLPRLAPPRGSSLPLAVPLRLLRLRLRPAPAPSRRRRPSPGVAPLLLLSAEMVIGFRKASPPAESVVLCIDHLSRNVNEAHLKEIFGSTGFDQSAPFAQNRLNSPEGRFNYF

SEQ ID NO: 67169 - protein, 104 aa, Zea mays
  Coding DNA Sequence Number=SeqID_25390
METARLTPREQATTRICQVSSFATELLEIRSKEPSLHVLLIAGNPGIAAFYKDCVEALYENLGGQASITAIGHISHSQKDCEHGRLFSLYEQIDHKVQFACSIS

SEQ ID NO: 67170 - protein, 164 aa, Zea mays
  Coding DNA Sequence Number=SeqID_25391
MSATRSRHSAAGSPRRGEGPDADADARRARGRELEEVTAAGDGVVGGRAAHCRAGGRNPTSGIGGRGVRIQRAPVARRRPLYEGGRTAAGHAASGPGTGRDSIHFLLQVVDVWWWIDSLTLNGSHVDNTTRQELKKVDAAALVPATAMCYAMDYNSSNKKQKIY

SEQ ID NO: 67171 - protein, 742 aa, Zea mays
  Coding DNA Sequence Number=SeqID_25392
  Gene Ontology: Mol. function=DNA topoisomerase (ATP-hydrolyzing) activity; Cellular component=chromosome; Biological process=DNA topological change
  Homolog annotation: Hit_ID=Q8RU34; Match level="QueryCoverage=99%, HitCoverage=80%, E-value=0.0, Identity=51%"; Hit description=Bzip transcription factor-like
  Pfam annotation: Domain name=DUF632; Domain location=289-632; Score =271.4; E_value=1.8e-78; Accession=PF04782.3; Description=Protein of unknown function (DUF632)
MRRSPTVPTVVYEDPNAQTQYTTAETSYGYAYGVGDGYGPAYPYGPYGEVVAGETPEAAPRSPGPPPSPPTAEASPWEFFDPFTQYDQFMEDYTRGNLPTNSPNYAELRRMEGIPELEDEAELVGNAEASKPSTSGVSDQNKKGKGPIQDNAASNGDFSGDSKLQKKATSKADSSGGKLQRDATSISDSPGGKLQRKGSEPPPGGKLQGKGSEPTTDAKGEAGKPVSRNDSGPSNVSSKNKEGRKKNTMSLKGTVSSDIDGSSTSGKKKGVAFERERSIREAEGCGEIHGQSVVSSDPFSPSHHGTRDVREAINEVNELFDEAANCSTDVSRLLEVGKMPRSDTPRVLRYVSSRVMDPLGLAVSTSSCLPKSHGRKSRPSSSMARTSASLDAGSSNDVGHLSSTLEKLWVWEKKLYQEVKDEEKLRMKYEKYYRRLKSMDERGAESSTIDSTRLSARLVESKISINIRTANAFSLKIQEIRDEELYPQLVDLIQRFRSLWKDIMECHEKQLLAIQDSRIHWMKAMTVSESGVVSEASRDLERELTKWYRCFNKWMISQRSCAEALNEWLKKWLPESQEEVTADGAPPFSPGRLGAPPVFVVSNDWFQAIEMVSRTDVLKAIDQFSKVVRRFKKSQEDERRQRRRADHASKDYDRKRKDLEEELGLSTMESPRYSHDNRVVDLEKLRKRRDEESTRHDRVLNHAHVTASATLPVGLVPVLQQITSFFQRNQRVYMQIRTQQGA

SEQ ID NO: 67172 - protein, 99 aa, Zea mays
  Coding DNA Sequence Number=SeqID_25393
MGRHGDQSSNVGDCQGGRVGDEAARRSGDAAEVRARPGAARAQSGRGGRRPGEYTQQTFILHLRPAPSTLVLWNTRLVLWNTREDEMEDKPQIACITES

SEQ ID NO: 67173 - protein, 843 aa, Zea mays
  Coding DNA Sequence Number=SeqID_25394
  Gene Ontology: Mol. function=kinase activity; Biological process =protein amino acid phosphorylation
  Homolog annotation: Hit_ID=Q9SLP5; Match level="QueryCoverage=37%, HitCoverage=85%, E-value=1e-156, Identity=84%"; Hit description =Ferredoxin
  Pfam annotation: Domain name=B_lectin; Domain location=481-588; Score= 92.4; E_value=1.4e-24; Accession=PF01453.15; Description=D-mannose binding lectin
  Pfam annotation: Domain name=NAD_binding_1; Domain location=231-348; Score=151.8; E_value=1.8e-42; Accession=PF00175.11; Description =Oxidoreductase NAD-binding domain
  Pfam annotation: Domain name=PAN_1; Domain location=744-831; Score =3.0; E_value=0.079; Accession=PF00024.16; Description=PAN domain
  Pfam annotation: Domain name=PAN_2; Domain location=742-813; Score= -15.0; E_value=0.048; Accession=PF08276.2; Description=PAN-like domain
  Pfam module annotation: Pfam domain module=B_lectin::NAD_binding _1::PAN_1::PAN_2; Domain location=481-588::231-348::744-831::742-813
  Subcellular localization annotation: CTP_CleavageSite=58; ConfidenceScore=5.90e-01
MAAVTAAAISLSSSSASSPAAAAKAKAASPSSSPCRHLQFLSAASPRRRWRAGARAVRAQVSTTETAAAGPAKTSKKQDEGLVTNKYKPKEPYVGRCLSNTRITGDDAPGETWHMVFSTEGEIPYREGQSIGIIADGEDKNGKPHKLRLYSIASSALGDFGDSKTVSLCVKRLVYTNDQGEIVKGVCSNFLCQFSFSISFVCDLKPGADVKITGPVGKEMLMPKDPNATVIMLATGTGIAPFRSFLWKMFLEEHEDYKFSGLAWLFLGVPTSDSLLYKEELEKMKEMAPDNFRLDFAVSREQTNAAGEKMYIQTRMAEYREELWELLKKDNTYVYMCGLKGMEKGIDDIMLNLAAKDGIDWMQYKKQLKKGEQWNVELALALCVLTAGGVVRAQPFDYPTAKPSTTWANTDASLPHHVTYADGSVARAALLRLNPAGYGPSYAFGFFCTNHLAPLCAEFLLGVAVVYCNSGGLMTSVVAGIPQVVWSANRGSPVGEGAAAELTAAGDLVLRSAQGAVVWSAAGTAGRSVAAMAVARDGNLLLLDARNNTVWQSFDHPTDALLVGQSLRPGARLVANSSAANWSPSRLYLTVAADDDSLSAYVDAEPPQRYYRLGFSGGGGGGGAYATYTNGSPRRVRCCGACSHAAGHHPAPRRRRRYGAVHAAGARRPPPGCTSGAPRGGRRVFDVLRLFPDDCAFPKGVRRLRACARDMQCSCPDAANFRAVDFRRPNRGCVTVAPVAGCGGSHPPARLVSLPGLAYFNDPATSLRALERVSDAACRKACLDDCACAAAQFVYGTDAGDGFCYLQSEVLSLETSRPEVVHYNSTMHLKVRATRRPSPSARF

SEQ ID NO: 67174 - protein, 50 aa, Zea mays
  Coding DNA Sequence Number=SeqID_25395
MGGRGHVPEEEVVPVLKLGMGNGISGLARSAAARCKYYVCIHASIAWQAQ

SEQ ID NO: 67175 - protein, 39 aa, Zea mays
  Coding DNA Sequence Number=SeqID_25396
MPLVIEGRSDPMKDANKLAHLLRRDDLIQIEKANFSNND

SEQ ID NO: 67176 - protein, 222 aa, Zea mays
  Coding DNA Sequence Number=SeqID_25397
  Homolog annotation: Hit_ID=Q1SKW8; Match level="QueryCoverage=39%, HitCoverage=10%, E-value=1e-21, Identity=87%"; Hit description =Membrane attack complex component/perforin/complement C9
MYCLVFSSEDPERDHCKQVPTALEAGTPKTDVIPRLENRLFCVNLNTEHQFKKRVKWHLRRRYRLIAWIKNPLPGTPFNSEVIGIKDIEYVTSEIVEEKRKLGTYIMSSQNPFMIQYYRHLGKVIRLGTDNTPSEDDTHKTPSEDPISKTKLNECPVDANRMFPRPSRPGDKVLRPSGPPGLFRPLIASTPEDKVLRPSGPPGHSCGLLDLWGKRSRSPKVL

SEQ ID NO: 67177 - protein, 301 aa, Zea mays
  Coding DNA Sequence Number=SeqID_25398
  Homolog annotation: Hit_ID=Q1SKW8; Match level="QueryCoverage=60%, HitCoverage=35%, E-value=6e-57, Identity=56%"; Hit description =Membrane attack complex component/perforin/complement C9
MARRATPQEAAVAAAEAAIRSVGLGFDVVSDVRLKFCKQRGAPDPWLIELDHGEVQDIVLPGGVTVAGVTASVKCDKGERMRFRSDVLSFQQMSEQFNQELSLSGKIPSGFFNTMFEFSGSWQKDAANTKALAFDGWFIKKFGTHIVVGLKMGGKDVIYLKQQHSSTLQAVDVQKRLKEMSDSRFLDANVQYDMSRNNQVLLSSGTVTTVMYICHRITIPGYVSTFRRGNRDGGTHCTTASGTLAAHCCGYRDGGTDYTVASDMPAVSGVTIVHLLDRINLLDRNVVHHIYAMDKSLILIA

SEQ ID NO: 67178 - protein, 254 aa, Zea mays
  Coding DNA Sequence Number=SeqID_25399
  Gene Ontology: Mol. function=kinase activity; Cellular component =ornithine carbamoyltransferase complex; Biological process=amino acid metabolic process
  Homolog annotation: Hit_ID=Q6QP54; Match level="QueryCoverage=55%, HitCoverage=47%, E-value=1e-16, Identity=50%"; Hit description =Putative kinase
  Subcellular localization annotation: CTP_CleavageSite=57; ConfidenceScore=5.25e-01
MDESTYLSGTITRGTLKTPKLGWVRLTAAKSSLGRHRKLHLARPQGSDSTSTPRTVSASSDPRARTQPRPRATVSASLDPRARTQPRPRRTVSASPDPRARTQHRPQTTVSASPDPRARTQPRPRRTVSASPDPRARTQPRPRTTVSASPDPMARTQPRPRRSLRLARPWARTDHIAGGYIITLPLASSGYGEQDRRPIWLAPVKQVMMTPRVLHDDSGSQPPTEARRRQQGPDSPDSCASTGFKRSSDGHDIT

SEQ ID NO: 67179 - protein, 62 aa, Zea mays
  Coding DNA Sequence Number=SeqID_25400
MKSNKVVTSSDFLEFSQLAASRTLEEELGEDALEAEQAVDGGVDGEGIHEARYSPRPWRALP

SEQ ID NO: 67180 - protein, 244 aa, Zea mays
  Coding DNA Sequence Number=SeqID_25401
  Gene Ontology: Mol. function=phosphatidylserine decarboxylase activity; Biological process=phospholipid biosynthetic process
  Homolog annotation: Hit_ID=Q5JN42; Match level="QueryCoverage=72%, HitCoverage=29%, E-value=5e-69, Identity=77%"; Hit description =Phosphatidylserine decarboxylase-like
  Pfam annotation: Domain name=efhand; Domain location=145-173; Score =22.4; E_value=0.0016; Accession=PF00036.22; Description=EF hand
  Pfam annotation: Domain name=efhand; Domain location=181-209; Score =29.8; E_value=9.8e-06; Accession=PF00036.22; Description=EF hand
  Pfam module annotation: Pfam domain module=efhand::efhand; Domain location=145-173::181-209
  Subcellular localization annotation: CTP_CleavageSite=43; ConfidenceScore=5.22e-01
MGHSASRPTACAGAGEALPSRFARFRRRLRNRLRRGAGDDSVSSKALAADEFAGIARVRIAKEKKVIVETNGPHIARISVFETNRFSKNTLVGYCEVNLFEMLTKDLEEHSEDLRLLDPSSPNTTVGSISISCHIEDPVETEQSFARRVLAIVDYDEDGTLSLSEFSDLMKAFGNKLAVAKIEELFRQADTNSDGIVDIDELAALLAAQQEEEPLISKLPLSVGEDLGKYDNINDMIHIDTLLR

SEQ ID NO: 67181 - protein, 42 aa, Zea mays
  Coding DNA Sequence Number=SeqID_25402
  Homolog annotation: Hit_ID=Q84XG8; Match level="QueryCoverage=90%, HitCoverage=6%, E-value=2e-13, Identity=94%"; Hit description =Invertase
MLNYDQVFIRDFVPSALAFIMRGETEIVRNFLLHTLQLQSGN

SEQ ID NO: 67182 - protein, 62 aa, Zea mays
  Coding DNA Sequence Number=SeqID_25403
MCCLIAWSYHPLSFGVAPNARSSQGVITVYGDQQTACNIERDFIPGQRNVHCFTAEREGVTP

SEQ ID NO: 67183 - protein, 386 aa, Zea mays
  Coding DNA Sequence Number=SeqID_25404
  Gene Ontology: Mol. function=ATP binding; Cellular component =extracellular space
  Homolog annotation: Hit_ID=Q6ZHC0; Match level="QueryCoverage=63%, HitCoverage=71%, E-value=2e-86, Identity=65%"; Hit description =Putative GAMM1 protein
  Pfam annotation: Domain name=Tryp_alpha_amyl; Domain location=312 -383; Score=8.7; E_value=0.011; Accession=PF00234.12; Description =Protease inhibitorseed storageLTP f
  Pfam annotation: Domain name=UPF0160; Domain location=29-297; Score =48.1; E_value=1.9e-16; Accession=PF03690.4; Description =Uncharacterised protein family (UPF0160)
  Pfam module annotation: Pfam domain module=Tryp_alpha_amyl::UPF0160; Domain location=312-383::29-297
MAFLSPAAASSKRLRVYSSAAIDGAVTGSSKHVGTHNDNFHCVEILDTLDVVLDVGVSMIPVNIAIIITRRASVSQHRHDHHQKGFSEVFEHGFDTKLSSVGLVYKHFGKEIIAKELGVNEDHEDVHRLYLSIYKSFVEALYAIDNGINQYDIDQPPNTFRRQRPPTNSTHLSSRVGRLNPNWTDPEQSPEKVNAAFEHAMILTESEFMESVRFHVKSWLPARSIILECLLSRGNIDPSREIMVLDRFCPCYDQQHIENVLAIISKIVSVRTCSRIGTIRVAGRRKASNAAALVAVLIVAVAAAAAGAIKLCGVDESAVDACTPYCKAGSTQAAPGQLCCAKVKSARWSCLCDYRSALSSDIDAARVMDLATKCKCDYPPASCDDN

SEQ ID NO: 67184 - protein, 89 aa, Zea mays
  Coding DNA Sequence Number=SeqID_25405
MGEGAVGDGGGAALSIEEAAAEEAGEGRSGRHGWRRATGGVVDPWMGDGGGAPLGVERRGRRVTRGIATRETLSGRRGRGIIVGSVGRA

SEQ ID NO: 67185 - protein, 496 aa, Zea mays
  Coding DNA Sequence Number=SeqID_25406
  Gene Ontology: Mol. function=D-alanyl-D-alanine endopeptidase activity; Cellular component=integral to membrane; Biological process=proteolysis
  Homolog annotation: Hit_ID=Q5N808; Match level="QueryCoverage=94%, HitCoverage=92%, E-value=0.0, Identity=67%"; Hit description =Putative growth-on protein GRO11
  Pfam annotation: Domain name=DUF1119; Domain location=203-478; Score=- 117.1; E_value=0.03; Accession=PF06550.2; Description=Protein of unknown function (DUF1119)
  Pfam annotation: Domain name=PA; Domain location=78-173; Score=76.9; E_value=6.3e-20; Accession=PF02225.12; Description=PA domain
  Pfam annotation: Domain name=Peptidase_A22B; Domain location=234-496; Score=259.0; E_value=9.6e-75; Accession=PF04258.4; Description=Signal peptide peptidase
  Pfam module annotation: Pfam domain module=DUF1119::PA::Peptidase _A22B; Domain location=203-478::78-173::234-496
MALRTFPPRVLLLSVVLLAAPAAGAGTGSEFDDGTSPKFPGCDNTLQKVKVTYWVDGDERSSLTGISARFGAVLPDAAPDDEKQRAAVPSPESGCAKSSTPLAGSVAVAVRGECTFIEKAKAAEAGGAVALLLVNDEDDLQRMVCSDKDSPPNIGIPVVMVSKSAGDKVQSAIGDGSKVDILMYAPLKPSFDGAIPFLWMMAVGTVACASVWTVVVVGEEPTKQGDVSLGGEENPDAEVVELQANTALVFIVTSSLVLLFLFFFNSNWSAWLLVCLFCLGSLQGMEFVVSSLVVRLCQRCREAKVKLPALGNVKVVTLVVLPLAFIFAVTWAAHQDSPVAWVGQNLMVASALLVSAFFYDIFWVFISPLIFKKSVMITVARGSDDGPSLPMVLKMPKEFDSWNGYDMIGFGDILFPGLLVAFSFRYDRTHGKDLTDGYFLCLMIGYAFGLSCTYVGLYLMNSGQPALLYLVPSTLGVIVLLGARRGELGQLWNAKV

SEQ ID NO: 67186 - protein, 113 aa, Zea mays
  Coding DNA Sequence Number=SeqID_25407
MGKSKKNRSSSHHSGDKRKREPSLPPRTLGITAEVWMYIRAIERSGLEGSDESEISSNEEDSSDSSKEGSGGDGDDEGDGGDKGDSDKGDGGSGKGDGGSGRASGKKRHWLKY

SEQ ID NO: 67187 - protein, 112 aa, Zea mays
  Coding DNA Sequence Number=SeqID_25408
MAGRKVSSSSAVAMAIMAVALLVMAAEAGTCNVDADAVVNHCKSACSSWWWGGGARPSQGCCNALRYADFGCVCRNYWGILRSTPYAGCAMAIPSRAPRRRLGKPSHGKLLA

SEQ ID NO: 67188 - protein, 33 aa, Zea mays
  Coding DNA Sequence Number=SeqID_25409
MAGVPILATPDKEQVDVRGAPDTLEGPQFRSPT

SEQ ID NO: 67189 - protein, 81 aa, Zea mays
  Coding DNA Sequence Number=SeqID_25410
MRPLFPHAAYQLLMGHTYDKSARWPSGANSASPEADLILEINSDSPKPGLGYLLPANSTGGHSICVTPRLKGKSRRESNVC

SEQ ID NO: 67190 - protein, 95 aa, Zea mays
  Coding DNA Sequence Number=SeqID_25411
MEEEGPRGVLMVKVEQDQLEVLVHSQVRKIKQEGETAREAPGLYPAHLQSSQASCLSLVPGTGHGLSPGSGTDHGLSPSSGTGHGLDQLGNHHGY

SEQ ID NO: 67191 - protein, 195 aa, Zea mays
  Coding DNA Sequence Number=SeqID_25412
  Homolog annotation: Hit_ID=Q7EY69; Match level="QueryCoverage=48%, HitCoverage=41%, E-value=2e-40, Identity=77%"; Hit description =Putative transcriptional coactivator
  Pfam annotation: Domain name=RRM_1; Domain location=12-59; Score=6.6; E_value=0.035; Accession=PF00076.12; Description=RNA recognition motif. (a.k.a. RRM, RBD, or
MAASGIETGTKLYISNLDYGVSNEDIKGTAEVVFTRRSDAIAALKRYNNVLLDGKAMKIEVIGNDLGLPMTPRINVVGASNGRATRTVVMTPEFSQRGRGSSSRPLSLFDLVLTHDLTYCRSSNPSNRFNNRGGFQAGRGRGQFQSWGRGRGQFQSRGRGRAQFQGRGRGRKPEKTADELDKDLESYHAEAMKTD

SEQ ID NO: 67192 - protein, 576 aa, Zea mays
  Coding DNA Sequence Number=SeqID_25413
  Gene Ontology: Mol. function=acyl-CoA dehydrogenase activity; Cellular component=peroxisome; Biological process=fatty acid metabolic process
  Homolog annotation: Hit_ID=Q2R1G8; Match level="QueryCoverage=92%, HitCoverage=85%, E-value=0.0, Identity=80%"; Hit description=Acyl -coenzyme A oxidase 2, peroxisomal, putative, expressed
  Pfam annotation: Domain name=Acyl-CoA_dh_M; Domain location=175-225; Score=34.5; E_value=3.7e-07; Accession=PF02770.9; Description=Acyl -CoA dehydrogenase, middle domain
MATGSAAGEESSAAARRLRRLSLHLLQPAPADRHHQPLALAACGHRVEGGTDVAAALAAYLRGRHRAAQMRLFDFFRARPDLQTPIELPTAAHRDLCYRQLRTLVREAGVRPLTLMATDPAEYFAVMEAAGGADISLGVKLGVQYSLWGGSVINLGTKKHRDKYFDGIDNLDYPGSNVQALQTTATFDHVTDEFIINTPNDGAIKWWIGNAALHGKFATVFARLILPLQGKGGEAADMGIHAFIVPIRDLETHAVLPGIEINDCGHKIGLNGVDNGALRFRSVRIPRDNLLNRFGDVSRDGKYTSSLPTINKRFAATLGELVGGRVGIAYCSVGVLKVAVTIVVRYALLRHQFGPPKQPEISVLDYQSHQHKLMPMLASSYAFHFATVQLVDKYSEMKKTNDEDLIADVHVLSSGLKAYITSYTAKSISQVAGDLLKQYQENFKGGTLSVTWNYLRDSMSTYLSQPNPVTARWEGEDHLRDPNFQLDAFRKHSKTLGGFGAWNRCLNHLLTLESHIESVILAKFIESVKSCPDEKSWEVLKLVCDLYALDRIWQDIGTYRNVDYVAPNKAKVCGLI

SEQ ID NO: 67193 - protein, 187 aa, Zea mays
  Coding DNA Sequence Number=SeqID_25414
MWTRGSRGPRSISTISTLVATPRREVDAIEGEEAGGGEEERGGATEGAWPPRIAGEASTGKELLQIDGGQGGGGADVERGQGHGVAPCGRLQRLRHRESGHRRGGEGRGREGEALNPGRVRRGVLGSCHRGVGQGEQGRRLTRGGRGGGGGDERGCGRADDVDLRKQVDDVDSPKAEPGEAAYPLQH

SEQ ID NO: 67194 - protein, 124 aa, Zea mays
  Coding DNA Sequence Number=SeqID_25415
  Gene Ontology: Mol. function=oxidoreductase activity, acting on the aldehyde or oxo group of donors, NAD or NADP as acceptor; Cellular component=cytoplasm; Biological process=amino acid biosynthetic process
  Homolog annotation: Hit_ID=Q8LNT4; Match level="QueryCoverage=64%, HitCoverage=19%, E-value=3e-35, Identity=87%"; Hit description =Putative N-acetyl-gamma-glutamyl-phosphate reductase
MNCQIVITYKIAYLRKTTTPEYLPTSYRKRIILLLAQSSFVIVSFQNEEFVKLLHGSNVPCTNHVVGSNYCFMNVYEDRIPGRAIIISVIDNLVKGASGQALQNLNLMMGLPENMGLQYQPLFP

SEQ ID NO: 67195 - protein, 120 aa, Zea mays
  Coding DNA Sequence Number=SeqID_25416
MSLHAWRSPEWPSLVSLASVRRVGERAASNHAETPALQVQFNQPLSSTICRNSSSGHSQNNAQANGSTEVKKCVQTPNHFPLFLLYSTLCPKAWKSVRHGSCSLNTITASTIPPMLQTDE

SEQ ID NO: 67196 - protein, 537 aa, Zea mays
  Coding DNA Sequence Number=SeqID_25417
  Gene Ontology: Mol. function=beta-amylase activity; Biological process=polysaccharide catabolic process
  Homolog annotation: Hit_ID=Q10LG9; Match level="QueryCoverage=84%, HitCoverage=84%, E-value=1e-170, Identity=69%"; Hit description =Glycosyl hydrolase family 14 protein, expressed
  Pfam annotation: Domain name=Glyco_hydro_14; Domain location=91-491; Score=107.5; E_value=3.9e-29; Accession=PF01373.8; Description =Glycosyl hydrolase family 14
  Subcellular localization annotation: CTP_CleavageSite=55; ConfidenceScore=5.40e-01
MEAALTQQAAATATATPTRWRCVGDASLASHGQGQQRAGAVRLGAARRAVSGAVRASSSRHLGPVRALVSEAAGGERAAEGEGMDTAVRLFVGLPADAVVSDGRGVGRPRAVSAALRALKLLGVDGVELPVSWAVAQPGPGGWFEWAGYRAVAAMVRDAGLDLRVSLRTDGDALPGWVADAAAADPDVLFTDRSGHRRMGCLSFAVDELPVLVGKSPLQAYEAFFRSFAEEFDDLFGSTITDVTISLGPNGELQYPSYPPGNQGSRGFDGVGEFQCYDKYMLARLKRHAESSGQPLWGLSGPHDGPRYDDESPESSAFFRELGGSWKSAYGEFFLSWYTGELLAHGDRVLAAASSAFRGKPVELSAKVPLLRGPGTGPSPADATAGFHGGYGPVAEMFARHGCAVIAAGVEARPDATAEERLAQVKAACTEHGVHLAAESAPLAVARGSDGDGPTRVVWLSAGRTRPCQFTYQRMGAEFFSPGHWPLFVQFVRALECPEEAHEDDLPASADGGERLTVPSAAAAAPKDQATREVQTV

SEQ ID NO: 67197 - protein, 135 aa, Zea mays
  Coding DNA Sequence Number=SeqID_25418
MGLEVSRTLKGKERVAESCCLSRPDQVELVLVDDDSGEEDDGCGSCVDGAGGGQAEEEDEEEEGSGGVAAAWWSEESGGRCSLWASGRRRADEEGGRQLRADDSESDDEDPAAAAARRQEEDRKFWEACLASGYP

SEQ ID NO: 67198 - protein, 98 aa, Zea mays
  Coding DNA Sequence Number=SeqID_25419
  Homolog annotation: Hit_ID=Q6QP51; Match level="QueryCoverage=61%, HitCoverage=27%, E-value=4e-09, Identity=55%"; Hit description =Putative growth-regulating factor 1
MDGLKYQWQAAPPLRYTDPAHKCLGRNRELRLARPLASASASGEGLRLARPQASASAPASGGVTTSPDLSLGLRRSLRLARPGPRTDYATGDTSLRYS

SEQ ID NO: 67199 - protein, 179 aa, Zea mays
  Coding DNA Sequence Number=SeqID_25420
  Gene Ontology: Mol. function=copper, zinc superoxide dismutase activity; Cellular component=chloroplast; Biological process =superoxide metabolic process
  Homolog annotation: Hit_ID=P28757; Match level="QueryCoverage=82%, HitCoverage=98%, E-value=2e-73, Identity=87%"; Hit description =Superoxide dismutase [Cu-Zn] 2
  Pfam annotation: Domain name=Sod_Cu; Domain location=1-150; Score =323.9; E_value=2.8e-94; Accession=PF00080.10; Description=Copperzinc superoxide dismutase (SOD
MVKAVAVLGSSDGVKGTIFFTQEGDGPTTVTGSVSGLKPGLHGFHVHALGDTTNGCMSTGPHYNPASKEHGAPEDENRHAGDLGNVTAGADGVANINVTDSQIPLTGPNSIIGRAVVVHADPDDLGKGGHELRKSTGNAGGRVACVGALGSKPLVIVAGLLVKNTLAASAVPTVASTDG

SEQ ID NO: 67200 - protein, 66 aa, Zea mays
  Coding DNA Sequence Number=SeqID_25421
MKNNYRTLVTRYMWDVHRMSEGGYNAGASKVELFKGCANMRVLKKRSIFMGTVGGLRLPKVLKNMI

SEQ ID NO: 67201 - protein, 57 aa, Zea mays
  Coding DNA Sequence Number=SeqID_25422
MTIGLAGGNRKGTKKSKGPQGFLRKKKTRALAQEHGHEPVSASSPFVDFGELNDNTV

SEQ ID NO: 67202 - protein, 87 aa, Zea mays
  Coding DNA Sequence Number=SeqID_25423
METGILHRGFMDAADPRFTGDLVALCINFRINWETDFLTRSGLACSGELDHRGAGNVAKLRRCEVGDERRSLDRDLTTLVRSAFPFG

SEQ ID NO: 67203 - protein, 200 aa, Zea mays
  Coding DNA Sequence Number=SeqID_25424
  Gene Ontology: Mol. function=nucleic acid binding
  Homolog annotation: Hit_ID=Q2QU58; Match level="QueryCoverage=55%, HitCoverage=28%, E-value=2e-11, Identity=30%"; Hit description=Zinc knuckle family protein
  Pfam annotation: Domain name=zf-CCHC; Domain location=46-63; Score =6.6; E_value=0.081; Accession=PF00098.13; Description=Zinc knuckle
  Pfam annotation: Domain name=zf-CCHC; Domain location=95-112; Score =6.0; E_value=0.1; Accession=PF00098.13; Description=Zinc knuckle
  Pfam module annotation: Pfam domain module=zf-CCHC::zf-CCHC; Domain location=46-63::95-112
MVKKLEKGTIVASTKPYQKRKQVPRANKKQEKDMSKIQEKSKRSNMRCYGCKEKGHEIGSCPHMKIKSFAPSTNMSLDKEVKKQDKKKAYKNNRHICYICRGKGHLSNEEPVCEAIKKKAIEEEAPHMASILQSAATVTSGSATQRSGSAAPLQRAAADNIQIHDDAYNMMMNKAEMNKPPHIHKVCWFEGIESLDYNGR

SEQ ID NO: 67204 - protein, 91 aa, Zea mays
  Coding DNA Sequence Number=SeqID_25425
  Subcellular localization annotation: CTP_CleavageSite=56; ConfidenceScore=5.72e-01
MSTIAASRRSSSSSSSATAKRPAIADGPGGPKATAAQAKKRVALGNITNVAARGGRASVGGSLGNVMAPTSSAFEFRCVSVLVRRHLFNIP

SEQ ID NO: 67205 - protein, 155 aa, Zea mays
  Coding DNA Sequence Number=SeqID_25426
MAEDREMLGFFLCAKLGRGGCRLAVAASCVRSGRSSFLHGSAGDRWACMKWCYRVGRSGVRRLPGLSPSPNPGSGGAELPMVPAAGPDRLSALLCQVAPQSERRRRRCLSVRPLYADGGYQLRIRSLEGTPNYGPRQIATVNDKRDPPIWSASIV

SEQ ID NO: 67206 - protein, 247 aa, Zea mays
  Coding DNA Sequence Number=SeqID_25427
  Gene Ontology: Cellular component=extracellular region; Biological process=cellulose and pectin-containing cell wall organization and biogenesis
  Homolog annotation: Hit_ID=Q4PNY1; Match level="QueryCoverage=89%, HitCoverage=89%, E-value=1e-96, Identity=73%"; Hit description =Expansin-A11 precursor
  Pfam annotation: Domain name=DPBB_1; Domain location=60-145; Score =168.6; E_value=1.6e-47; Accession=PF03330.8; Description=Rare lipoprotein A (RlpA)-like double
  Pfam annotation: Domain name=Pollen_allerg_1; Domain location=156 -233; Score=157.2; E_value=4.2e-44; Accession=PF01357.11; Description= Pollen allergen
  Pfam module annotation: Pfam domain module=DPBB_1::Pollen_allerg_1; Domain location=60-145::156-233
MGSLGLLVVVAVAAVVLELTAADSWNGGRATFYGGGDASGTMGGACGYGNLYSAGYGKNTAALSTALFNNGQSCGACFEIRCTGSGSCLPGGSAVVTATNFCPPNYALPNNDGGWCNPPQPHFDLAEPAFTQIAVAGAGVVPVQYRRVACTKQGGIRFTVNGHSYFVLLLITNVGGAGELTAVSVKGSRTGWQTMSHNWGANWQNGALLDGQALSFQVTGSDGRTLTSENAAPAGWSYGQTYTGKQF

SEQ ID NO: 67207 - protein, 261 aa, Zea mays
  Coding DNA Sequence Number=SeqID_25428
  Gene Ontology: Mol. function=transferase activity; Cellular component= cytosol; Biological process=Mo-molybdopterin cofactor biosynthetic process
  Homolog annotation: Hit_ID=O74841; Match level="QueryCoverage=83%, HitCoverage=79%, E-value=2e-36, Identity=41%"; Hit description =Probable FAD synthetase
  Pfam annotation: Domain name=PAPS_reduct; Domain location=37-205; Score=62.8; E_value=1.1e-15; Accession=PF01507.9; Description =Phosphoadenosine phosphosulfate reductase family
MEIERAVRGSGDARLRAKYDAAVYIIRRAYALYPFEELAFSFNGGKDSTVLLHLLRAGYYLHRTSSGDVDSTALQTVKNCPMRTIYFEDPDAFPAIDRFTYETASTYGLPLETIRTGYKSGLEALLEEKPTKAIFLGTRNGDPNAVGQQEFSPSSPGWPPFMRVNPILDWSYSDVWSFLLTCEVQYCILYDQGYTSIGSVRDTVPNELLRDGGSGGYRPAYTLSDGSLERAGRGKKQAGKRDASVSTRNGSGSGPRQRSKL

SEQ ID NO: 67208 - protein, 194 aa, Zea mays
  Coding DNA Sequence Number=SeqID_25429
  Subcellular localization annotation: CTP_CleavageSite=75; ConfidenceScore=5.32e-01
MTHTCTCKRAPTLSLSLSLSLLMTLRTLKCAFWPFQSDQSSSLFLNAVAANQRGPGTLGDNQARSYGNTSAIEMAAAKAAQHRLMRGVWTNARFGDMRRALAACERLILLHHDPHELRDYAALLYHCGYYEDCLHYLSLYQTAKSGKSPTNRLEILEDEAVNTLKARLMLILAEDGWSRCRPVARYWTKNSEPW

SEQ ID NO: 67209 - protein, 127 aa, Zea mays
  Coding DNA Sequence Number=SeqID_25430
MPAKGCSTSVHEVDVALHNLQLLEDPNVGFIGPLTTSPRQYDTSHVHKELWNALPALPSTSSEMLNTQVGKDDMSSIGLLANDLEAMVTSSLDGDPILEALFIKSTAVIILALSTNIVMAAMAETLS

SEQ ID NO: 67210 - protein, 72 aa, Zea mays
  Coding DNA Sequence Number=SeqID_25431
MAIPNVAETKTRSMEEEVIKLQKCLQDKDEQLCSSTSSTEQYHHELDDLRTHLSFTQATGEAGVASAKLARM

SEQ ID NO: 67211 - protein, 118 aa, Zea mays
  Coding DNA Sequence Number=SeqID_25432
MATGGAYSLDLLPIRPADKVGGFLPVLPLDHACRTRSHYRNPGTSIALGTIPLGKKPRPEHQYKFFVECSGSGTRQRSTLCRVPYQAFGKVPDMGTSLADSLLSAVRHTLGKAVEKRL

SEQ ID NO: 67212 - protein, 167 aa, Zea mays
  Coding DNA Sequence Number=SeqID_25433
MPGGGGSLEARAGFAIRTVGPMTFFDPAHFEHPRRAVANPEARSYPNLTAVRLGRAARLLQERLNLDSTAASPQQLAGGRRSWRGRASRPSRCPRHMHPSRRRDAVAVTTPPPPGTTAQAQPVPDDLSSRPDVQSEHDATEATPTKPDATGAAPMPPESPRRSPRPP

SEQ ID NO: 67213 - protein, 336 aa, Zea mays
  Coding DNA Sequence Number=SeqID_25434
  Homolog annotation: Hit_ID=Q6QP54; Match level="QueryCoverage=41%, HitCoverage=43%, E-value=9e-07, Identity=41%"; Hit description =Putative kinase
AKSSLGRHRKLRLARPQGSGSTSTMDDELRLARPQGSDTASASEDGLRLARPQGSGSTSMLDDGLRLARHRARTQPQPRKTVSASPDPGLGLNLDLGRRTPPRPTPGLGLSLDLGRRTRPRPRRSRHLAQTRVRTGHVARGAIITLPLASSGYGEQDRRPIWLAPGSRMRRLAARENGPAHKALALSHANTYGFKELFWSRRVREEIKHQAVGYRSYPNLTAVRLGRAARLLQERLNLDSSRFTAAAGRRPPLLAWTSLPPKPLPPLLKILCKTKPPMRSFISSDAGSIPTRVDRRRHSDPPAARTHSKESKKDNRRPPTMEACVLALVTTTSIAS

SEQ ID NO: 67214 - protein, 45 aa, Zea mays
  Coding DNA Sequence Number=SeqID_25435
MEEVSHRQSLRRKGRSAAREDSVAAKSVNVGFLGRPVLVEVLLVI

SEQ ID NO: 67215 - protein, 108 aa, Zea mays
  Coding DNA Sequence Number=SeqID_25436
MGSRGGRGSPDGAPHEPPGLPTSFSPHHCEVSGALQTALLHMPRKDEVLYTIVPASETGGPSGAAKAEGRGTGERELGSQVKINATELTKNDVDIRFKCTSTLRLLQC

SEQ ID NO: 67216 - protein, 45 aa, Zea mays
  Coding DNA Sequence Number=SeqID_25437
MEEVSHRQSLQRKGRSAAREDSVAVKSVNVGFLGRPVLVEVLLVI

SEQ ID NO: 67217 - protein, 224 aa, Zea mays
  Coding DNA Sequence Number=SeqID_25438
  Homolog annotation: Hit_ID=Q6QP51; Match level="QueryCoverage=22%, HitCoverage=23%, E-value=8e-12, Identity=68%"; Hit description =Putative growth-regulating factor 1
  Subcellular localization annotation: CTP_CleavageSite=2; ConfidenceScore=5.34e-01
MQAGSEQKKPNRCARCVQPPSGYKRLSTFAETSGRKGGQPCRRHATAPSGRTSPTPNTPGMEAQADASCNRRAECFVHATAPPLAPPPRLLDCGTNTETRGDPAHDPAAPAWRSGRRFAFAITTASEKGSGKGDTPKRILPREGTRLRASLLIRGSKAGPSEGFDSRLRSRGPYTHYWSEVRRSAPRKGSTTASGYSGSAPTTDQGFEGWPPKVSQPPQTQSEG

SEQ ID NO: 67218 - protein, 294 aa, Zea mays
  Coding DNA Sequence Number=SeqID_25439
  Gene Ontology: Mol. function=protein binding; Cellular component =nucleus; Biological process=negative regulation of ethylene mediated signaling pathway
  Homolog annotation: Hit_ID=Q69X07; Match level="QueryCoverage=68%, HitCoverage=36%, E-value=3e-69, Identity=64%"; Hit description =Putative F-box protein Fbl2
  Subcellular localization annotation: CTP_CleavageSite=84; ConfidenceScore=5.11e-01
MDNALVLQKLRHMTIVSFPGLMDLALASVAKFSPSLRLVNLKNKVTLTGILAFFLNCSPKFKSLSLSQCIEIKDICSTPAQLPVCKSLRSLAIKDCSGFADTSLPMVGMFCPQLENINLSGLSAVIDNGFLPLMKSSDSGLVDIDLNSCENLTDTAVSALVKAHDASLATSVSRDAARPLMQAYSPSVRAAASSSSLAFRTACESCNKDVPIVHVDMQNYSLDEKIRMTLEAYVVEKTDEVHELSDGMMMVVSPRPSGLPVMVTGSHEKAMAVGGFNTIANFSYRPIVASLRAK

SEQ ID NO: 67219 - protein, 639 aa, Zea mays
  Coding DNA Sequence Number=SeqID_25440
  Gene Ontology: Mol. function=catalytic activity; Cellular component =intracellular; Biological process=metabolic process
  Homolog annotation: Hit_ID=Q60DD6; Match level="QueryCoverage=86%, HitCoverage=88%, E-value=1e-173, Identity=56%"; Hit description=PPR repeat containing protein
  Pfam annotation: Domain name=PPR; Domain location=113-147; Score =36.8; E_value=7.3e-08; Accession=PF01535.11; Description=PPR repeat
  Pfam annotation: Domain name=PPR; Domain location=212-246; Score =16.5; E_value=0.082; Accession=PF01535.11; Description=PPR repeat
  Pfam annotation: Domain name=PPR; Domain location=247-281; Score=4.1; E_value=2.4; Accession=PF01535.11; Description=PPR repeat
  Pfam annotation: Domain name=PPR; Domain location=313-347; Score =37.4; E_value=4.8e-08; Accession=PF01535.11; Description=PPR repeat
  Pfam annotation: Domain name=PPR; Domain location=414-448; Score =38.7; E_value=2e-08; Accession=PF01535.11; Description=PPR repeat
  Pfam annotation: Domain name=PPR; Domain location=517-551; Score=0.6; E_value=6.4; Accession=PF01535.11; Description=PPR repeat
  Pfam module annotation: Pfam domain module=PPR::PPR::PPR::PPR::PPR::PP R; Domain location=113-147::212-246::247-281::313-347::414-448::517 -551
  Subcellular localization annotation: CTP_CleavageSite=25; ConfidenceScore=5.58e-01
MLFTPSSSSDAPPFTPRVAAALLARCTSRVAAAALHARLLRCSRAFFRSPYLSNCLGAAYSRLGAAPYAVALLRAAAKPNIFSHNILLSALVSSGLLEDARGLFDGMPQRDAVTYNAMLSGYVAGALLDEAFHLFCSMNERDVRPTPFTFSIVSSAVGSVRRGQQLHAAAVRHGLAHSDVVVGNALIDMYGRVGLLEYAARVFSCMEQVDVTSWNSVMSVYKDQALTSTVFKCFGTMRSKGFSVDGFTVSIVLSACSDVKDLVKGDQMLALCIKMGFLTNFMVSSAIIDFLCMSDRLSDALQLFREMPTWGSEPCNALISGYARSGLMEEALSLFAVSMRNGIVPNEFSFASVLKWSSCFGLMEQGTQIHCLVCKLGFQNDVIVSTALTDMYCKLGLTKHARKIFDTVGAKDLVLWNTMLLGLLQNGRSKEALVIFKRILKCGIQPDRITLFGALSACGLEGLVSEGMEIITLFKDRYHIMPSLEHYTCVVDMLCCTGMFREAVNYVENKLAKFSAAIFSNILEACIVQGNIGIAELVAEKMVMQKSRLSLPYIVLAQIYGARCKWEKMAGVWRSMENQRAKKVQSCSWLCIKNHIYVFTSEQILHHGKGATYEVLDLLFWDMMNHKYAPSFVEPNNLD

SEQ ID NO: 67220 - protein, 165 aa, Zea mays
  Coding DNA Sequence Number=SeqID_25441
  Subcellular localization annotation: CTP_CleavageSite=13; ConfidenceScore=5.33e-01
MARPWSLLLARLRSASSSSSPSPSLSAPWSSPGRDLALLPVALLLQRLSHGAGHPHLCSSALPFSAPGHGAPSSAIPCASVYSLHGAQPPARISPDPKRSSIPGRRVPLRSASSPFFLAKPSQAHPSHSSSSCASTPVLDWLDDDPIVALLFVLHFRSTALCHGR

SEQ ID NO: 67221 - protein, 56 aa, Zea mays
  Coding DNA Sequence Number=SeqID_25442
MALTIAHLHFGGNLCDAIGIPVSGGISYALSGDLVPWLDHFCNVYGFFGSPRSRLV

SEQ ID NO: 67222 - protein, 92 aa, Zea mays
  Coding DNA Sequence Number=SeqID_25443
MAKLQGDWRHPAQPAVVASLEEQRCHGLMPQQSSLSTLSGQTVDNLLRDLGVAHTTLEMANAEVQRLQLWLAVLNDPRKVVFLDLVFGISVF

SEQ ID NO: 67223 - protein, 195 aa, Zea mays
  Coding DNA Sequence Number=SeqID_25444
  Homolog annotation: Hit_ID=Q0WNE9; Match level="QueryCoverage=32%, HitCoverage=42%, E-value=1e-22, Identity=84%"; Hit description=Ras -related GTP-binding protein
  Pfam annotation: Domain name=Ras; Domain location=2-131; Score=-10.2; E_value=1.6e-08; Accession=PF00071.12; Description=Ras family
MGKSNLLSRYARNEFDPHSKATIGVEFQTQSTPHIDGKEVRAQIWDTAGQERFRTVTSTYYRGAPRLRVSRRWLQVEMAKRAARLVLGPSRQARRQSRSDRSHFAAPLIGLTEGQRRLRRSDCCAARQSEADRQSGPASGTIGNSAPPDPRLGLGLSPGRRRTLLRPTKGSDSGSAPKDDELRSARPRARTRARP

SEQ ID NO: 67224 - protein, 698 aa, Zea mays
  Coding DNA Sequence Number=SeqID_25445
  Gene Ontology: Mol. function=RNA-directed DNA polymerase activity; Cellular component=intracellular; Biological process=RNA-dependent DNA replication
  Homolog annotation: Hit_ID=UPI00004C1731; Match level="QueryCoverage =99%, HitCoverage=52%, E-value=0.0, Identity=82%"; Hit description =UPI00004C1731 related cluster
  Pfam annotation: Domain name=RnaseH; Domain location=312-439; Score =6.4; E_value=1.5e-05; Accession=PF00075.14; Description=RNase H
  Pfam annotation: Domain name=rve; Domain location=452-609; Score =97.2; E_value=4.9e-26; Accession=PF00665.16; Description=Integrase core domain
  Pfam module annotation: Pfam domain module=RnaseH::rve; Domain location=312-439::452-609
MPFGLRNAGATYQRCMNHVFGEHIGRTVEAYVDDIVVNTRKASNLLSDLEVTFRCLKAKGVKLNPEKCVFGVPRGMLLVFIVSERGIEANPEKIAAITSMGPIKDLKGVQRVMGCLAALSRFISRLGERGLPLYCLLRKAECFTWTPEAEEALGNLKALLTNAPVLVPSAAGEALLIYVVATTQVVSAAIVVERREEGHALPVQRPVYFISEVLSETKIRYPQVQKLLYAVILTRRKLRHYFESHPVTVVSSFPLGEIIQCREASGRIAKWVVEIMGETISFAPRKAIKSQVLADLVAEWVDTQLPIVPIQPELWTMFFDGSLMKTGAGAGLLFISPLGKHLRYVLRLHFPASNNVAEFEALVNGLRIAIELGVRRLDARGDSQLVIDQVMKNSHCRDPKVEAYCDEVRRLEDKFYRLELNHIARRYNETADELAKIASGRTTVPPDVFSRDLHQPSVKIDNTSEPEKAPGGYTHLLVAIDKFSKWIEVRPLNSIRPEQAVAFFTNIIHRFGVPNSIITDNGTQFTDRKFLDFCEDHHIRVDWAAVAHPMTNGQVERANGMILLGLKPRIYKDVNKFGKRWMKELPSVVWSLRTTPSRATGFTPFFLVYGAEAILPTDLEYGSPRTRAYADQSNQASREDSLDQLEEARDMALLHSARYQQSLRRYHARGVRSRDLQVGDLVLRLRQDARGRHKLTPP

SEQ ID NO: 67225 - protein, 450 aa, Zea mays
  Coding DNA Sequence Number=SeqID_25446
  Gene Ontology: Mol. function=helicase activity; Cellular component =mitochondrion; Biological process=RNA-dependent DNA replication
  Homolog annotation: Hit_ID=Q7F1E6; Match level="QueryCoverage=59%, HitCoverage=96%, E-value=5e-81, Identity=46%"; Hit description =Pentatricopeptide (PPR) repeat-containing protein-like
  Pfam annotation: Domain name=PPR; Domain location=145-179; Score =27.0; E_value=6.5e-05; Accession=PF01535.11; Description=PPR repeat
  Pfam annotation: Domain name=PPR; Domain location=180-214; Score =39.9; E_value=8.9e-09; Accession=PF01535.11; Description=PPR repeat
  Pfam annotation: Domain name=PPR; Domain location=215-249; Score =31.8; E_value=2.4e-06; Accession=PF01535.11; Description=PPR repeat
  Pfam annotation: Domain name=PPR; Domain location=250-284; Score =12.7; E_value=0.24; Accession=PF01535.11; Description=PPR repeat
  Pfam annotation: Domain name=PPR; Domain location=285-319; Score =28.2; E_value=2.8e-05; Accession=PF01535.11; Description=PPR repeat
  Pfam annotation: Domain name=PPR; Domain location=320-354; Score =19.8; E_value=0.0096; Accession=PF01535.11; Description=PPR repeat
  Pfam annotation: Domain name=PPR; Domain location=355-389; Score =36.4; E_value=1e-07; Accession=PF01535.11; Description=PPR repeat
  Pfam annotation: Domain name=PPR; Domain location=390-424; Score =17.1; E_value=0.064; Accession=PF01535.11; Description=PPR repeat
  Pfam module annotation: Pfam domain module=PPR::PPR::PPR::PPR::PPR::PP R::PPR::PPR; Domain location=145-179::180-214::215-249::250-284::285 -319::320-354::355-389::390-424
MSAAAVLCRLGLRLRRLSTLSELPAVAAGAPQPQHPTSKDAYFAAVHHLSTIVRRDFYLERTLNRLRLPSPFPTDLALRVIRAAAPAAPLHATRFLSWLRAKPSFAASAEHFDALLLPLARARLFPHLWSLASDMRGLGLPLSPTTFSAVISSYGHSRLPDQAVEVFNRLPRFGCPQTTEVYNALLDALCANGNFTGAYKLLRRMARKGVAPDRATFSTLVDSWCAAGKLQEAQAFLDDMAGRGLRPPVRGRDLLVDGLVRAGHLEQAKAFALRMTKEGILPDVATFNSLAEALCNAGDVDFAVSLLADASSRGLCPDISTYKVMLPAVAKVGKIEEAFRLFYAAVEDGHRPFPSLYAAIIKALCKAGRFADAFAFFGDMKTKGHPPNRPVYVMLVKMCVRGGRFVEAANYLVEMSEAGFTPRAPTFSAVVDGLRHCGKHDLARRLEQLE

SEQ ID NO: 67226 - protein, 50 aa, Zea mays
  Coding DNA Sequence Number=SeqID_25447
MALSTHALLVALVGHCLDAYHLELKRRRWNRGAAAHVRLHPEHARGCRRC

SEQ ID NO: 67227 - protein, 116 aa, Zea mays
  Coding DNA Sequence Number=SeqID_25448
MGCGPRAHASPGAQDAFRLQLQRRIVESELTHGPQVAVGELAGATRRPRAHLSVTEYVLGAAFMTATGKPVPCASDPSKSNRAGRWETGRCSISRAFHHKDLHASTIRGARGSGST

SEQ ID NO: 67228 - protein, 1681 aa, Zea mays
  Coding DNA Sequence Number=SeqID_25449
  Gene Ontology: Mol. function=kinase activity; Cellular component =cytoplasm; Biological process=intracellular protein transport
  Homolog annotation: Hit_ID=Q6K5K0; Match level="QueryCoverage=90%, HitCoverage=92%, E-value=1e-112, Identity=41%"; Hit description =Myosin-like protein
  Pfam annotation: Domain name=Filament; Domain location=745-1069; Score=-182.3; E_value=0.079; Accession=PF00038.11; Description =Intermediate filament protein
  Pfam annotation: Domain name=Pox_A_type_inc; Domain location=1019 -1041; Score=6.0; E_value=11; Accession=PF04508.3; Description=Viral A-type inclusion protein repeat
  Pfam annotation: Domain name=Pox_A_type_inc; Domain location=336-358; Score=6.4; E_value=9.6; Accession=PF04508.3; Description=Viral A-type inclusion protein repeat
  Pfam annotation: Domain name=Pox_A_type_inc; Domain location=525-544; Score=4.4; E_value=19; Accession=PF04508.3; Description=Viral A-type inclusion protein repeat
  Pfam annotation: Domain name=Pox_A_type_inc; Domain location=752-774; Score=7.7; E_value=6.2; Accession=PF04508.3; Description=Viral A-type inclusion protein repeat
  Pfam annotation: Domain name=Pox_A_type_inc; Domain location=964-985; Score=1.8; E_value=45; Accession=PF04508.3; Description=Viral A-type inclusion protein repeat
  Pfam module annotation: Pfam domain module=Filament::Pox_A_type _inc::Pox_A_type_inc::Pox_A_type_inc::Pox_A_type_inc::Pox_A_type_ nc; Domain location=745-1069::1019-1041::336-358::525-544::752-774::964
  Subcellular localization annotation: CTP_CleavageSite=21; ConfidenceScore=5.60e-01
MGDHSDSDSSPKSSSSSSSPSARRRSSPQRSRAHTDETGSSDGVLVELPTQEARSPGADPDSGVLVNMPADDATSGETFDDAPEDLAAAGSLSARSLDESIAVIDFPEVSSTSAELRKYQEEKAVFAREAVALRRLLQEMLGQEASVALHGEDADETLLHSMLDDCSRLVLELNSMARAREQEIESLHARAAEAEVSSEVAHVYLGSWREGSEQAVGRMLASIDAVVRQDDASFEGADQDGISILERKTSLLVERYRQASMGIEQLEQILAEVKPGFAATGHGDLATTLSVLSDELVGSKRNEVDLLQKMNAFAEEKKAIADELEEVKAARNAVNAEASKAKAEFEQMEQKLSTTKEKLSMAVTKGKSLVQHRDSLKQALAEKTGELQSCMTELQKKSDALQAAESRVDELQIFLDEKTSEHEKCLDELRDTYSAWEAAKTSMEQLNESKSALHASLSLKDGVFERIEDIMSEATFPEDLLSLEMTDRLGWLVEQKKIADMIFSEHQKVKEILSSVDIPHSVLTSELDSQISWLASSLNQAKDDAVRLRDESAEMLAKMAAHESKLVSMHEEIDRLTIILLEEKQEKDILLNEHSELMSLYKAAVNKLSLVSSQNNELLKAFAEFFDVTLEGSQSMDIAKLVQQGLRNIQQRPKSSPIESGSFEKLQALLYTLDQESTLCKMILEEDMINRSERTGELQRMAEEIIVLKNEKVSLQKEVERVEERSALLREKLSMAVKKGKGLVHEREGLKQALDEKRSQIENLKQVLEGKSSEIEKLKHALDENKSVTENVKQVLDGKNTEIERLKHALGDSCVETENLKQAFAEKTSEAYKIKQELDAKNMDIENLRGAIESRESAMTDLREHVEHLLSSQVARLEKLQVDIVTLNDEKVKLESMLEEARASWDTLADSISSLTLPIDQPFEGPMEKFSQIAQYIQESQVAKSSLENELQKANEQITLHASRHSDALSTINMLEHELSKLKDHISSISEEKRQMQLNTSAVQEELEKTNEELAINFRNLESANTTINSLQDALSQARSNIFILAAEKNEAEAKYETEINALNAELTKCLEELDKTHGHLQSHSTEYHGYLEKLGMFMMDDSLLSLIAEEYGKTFNSLRDMCLIVKSMHEQLSVKSFQNDSIVEDSLFCAVKCNDCNFDLFMITKCKQDSELSSLLSLPDYESFVRERLVKNINRKGNIDDTSSFSTIVEQLSNQTEYLSSFLKDLSTYMNSNIIVVLRSLQLVSNTFAHTLEEHDMLKVELGNKDAHNRAQESEVLSLQKDLRAMSSKCIYCVQQIEIVFDDMVDLGYAIDLATGSSSIGSELEVTVSDLKNEDTSDYSKVADTLLATIDTLKSKSEKLSTIKGLVITSLDDFKMKLKQAEAAAETASHEHQLSVERVCMLEKELKILQDECNKMELNIQEYKEREGALKARELELLSVEHTQISADRGESNVQREEATSPLDKLFVVIDEFSALQHEVETLRYENEDLQLNIESYTREIEQLREVSRNSDLTNRELESKGSELLEELGAKLQSREKAVDELSTKVKMLEDLCHAQLSQPEPSKDRSFEASSSTIGSDMSDIEDADVRTRVTEGPVGKTTSVSSVSTAAHARTMRKGSADHLVVNIGSESERLIAAQDSDDKGRIKSLHTSGFIPAQGKHIADRVDAFWKLKELGAPFP

SEQ ID NO: 67229 - protein, 348 aa, Zea mays
  Coding DNA Sequence Number=SeqID_25450
  Gene Ontology: Mol. function=protein serine/threonine phosphatase activity; Cellular component=protein serine/threonine phosphatase complex; Biological process=protein amino acid dephosphorylation
MASTRSSSLPSRGATDGEKRLEALALGRVAEAADAVASAACAGEVVRAIHAVASLLFPVDSEAVAGTVEEPFRSQILDAVTVTLSNEERESWRHAFYHGPAFPTMSKILLGNVALKWLPKINVSARQEIYDSFFVKGPPTEVIQALVPALSEKEFSKEDHQTFCLNLERLLILWLLDNKGVFQIVVDFICSKKHGEDILSPDKTISVSRVAQLLASVPDKARLGASAALTSPYPFKLCSILYFTRQLMSILFLPCGVLVAELIPKVRNHIHRCVPPDHRATIPEMVQHVCQSQFWFNMVEAMRDQHSIERLTEELLRQLASQHISDEEAYWILWTLFNQSFKRLTVMR

SEQ ID NO: 67230 - protein, 413 aa, Zea mays
  Coding DNA Sequence Number=SeqID_25451
  Gene Ontology: Mol. function=glucose-6-phosphate 1-dehydrogenase activity; Cellular component=cytoplasm; Biological process=glucose metabolic process
  Homolog annotation: Hit_ID=Q6K5H5; Match level="QueryCoverage=53%, HitCoverage=43%, E-value=1e-111, Identity=89%"; Hit description =Putative glucose-6-phosphate dehydrogenase
  Pfam annotation: Domain name=G6PD_N; Domain location=205-387; Score =322.3; E_value=8.5e-94; Accession=PF00479.12; Description=Glucose-6 -phosphate dehydrogenase, NAD bindi
  Subcellular localization annotation: CTP_CleavageSite=27; ConfidenceScore=5.10e-01
MGREKISSLQLYLVVVGGAAAFLSDVRGSTGTRSGLRVPVRRDRGPKVPARYGAGREVVGGHQTRAVGLGISRVMECGRLVDKEANASTSKRVRGWDNTAWLVDGSRLGVGRSGQQKAGRKDWRVETEAAGGRRDSAAEPHINCVINSTFSAFVGIYLREEETIQFIMSGGSSESSPLSGQNSLSSLSISKDNELSSESGCLSIVVLGASGDLAKKKTFPALFHLFQQGFLQSGEVHIFGYARSNLSDDGLRERIRGYLKGASDEHLSQFLQLVKYVSGSYDRVEGFELLNKAISEYETSKNNDSGSYRRLFYLALPPSVYPSVCKMIRSYCMSPSSHTGWTRVIVEKPFGKDLNTAEELSAELGQLFQEEQLYRIDHYLGKELVQNLLVLRFANRLFLPLWNRDNIANVQFV

SEQ ID NO: 67231 - protein, 119 aa, Zea mays
  Coding DNA Sequence Number=SeqID_25452
MAAPGVELWRPKPPPFPRLSPCEAARALRADPVSLYVIAAPQHLGVCAQAASWRDADSPSGQPAWPVASVVAARGHHIPCGLPPVGRSAPWPRGAACAPTAAPHAAAASQQVAGELALD

SEQ ID NO: 67232 - protein, 111 aa, Zea mays
  Coding DNA Sequence Number=SeqID_25453
  Subcellular localization annotation: CTP_CleavageSite=50; ConfidenceScore=5.04e-01
MENHPGKQCYHKGGAQGSTQTNKRFKLGTKLNRSKELSVLWTSAPDCPVCHRTVSGAPGPYRVEPATLGKMQARSTIIHRTVWCATGLSGESAGNGYPALTVDSAKCYSAR

SEQ ID NO: 67233 - protein, 134 aa, Zea mays
  Coding DNA Sequence Number=SeqID_25454
MKELLDIKDSHASGDAVGLIFDHRKQSPKHDKELDGGTSGQPDKRNNKDMRRHDDMLVATTGQKGRKPSTEEAIDHFEEMLEASCPNHRSPRLACLQRRWAAYEVPKQGGGPIPKETSSQREKVSLSLTKLDAC

SEQ ID NO: 67234 - protein, 82 aa, Zea mays
  Coding DNA Sequence Number=SeqID_25455
MPQEASDVISQGLIWFLSMGLEVPRVAWAHLTSNQKITLFNGIFICLYMAQLSGANDAKILEVANESFCNKPGERDFKLEHI

SEQ ID NO: 67235 - protein, 42 aa, Zea mays
  Coding DNA Sequence Number=SeqID_25456
MAAAEVRQGGRKLAYAPDDLMMVGSYFRSLLVLWRLKPEEWV

SEQ ID NO: 67236 - protein, 66 aa, Zea mays
  Coding DNA Sequence Number=SeqID_25457
MGKDKKGRGSPRRSGDKRSGGSGGSDDGKGGDKGGGGGSGDSRSDDGGKGGGSGSGSKANGKAPLA

SEQ ID NO: 67237 - protein, 66 aa, Zea mays
  Coding DNA Sequence Number=SeqID_25458
MAAHRTAYSACPVAHRTVRYLRTWAKSMYDVKSMIVTKVGIAPKLRAGELRLNGGKRNRLKGKKAI

SEQ ID NO: 67238 - protein, 126 aa, Zea mays
  Coding DNA Sequence Number=SeqID_25459
  Subcellular localization annotation: CTP_CleavageSite=30; ConfidenceScore=5.32e-01
MRGPPSVSPNASTCFHMWLTGGGPGSDSLPCAARNNLTNATREDLAGEPTARTPSSPCTIRACSPVPVLPLDHTSEPEKKNPNHQHSWELGGEKSSSVAALISRNATVLIPEEVQLVFAGHRWTSL

SEQ ID NO: 67239 - protein, 590 aa, Zea mays
  Coding DNA Sequence Number=SeqID_25460
  Gene Ontology: Mol. function=actin binding; Biological process=actin cytoskeleton organization and biogenesis
  Homolog annotation: Hit_ID=Q6ZKB2; Match level="QueryCoverage=75%, HitCoverage=54%, E-value=2e-61, Identity=37%"; Hit description =Putative formin homology(FH)protein
MGLAVKRVFLLVLLLLSFEVLEGALLRLVTHEVSAVAVTRDAGPGFVSRFRMLLAGLDRHGSRHPHRRHRKGSAPAAPAPAPAPAPAPAPAPAPAPAPVQVQEGRAAPTPTPAPPPPPPHESHRLRNPSHIAPVRSVARRLGGGGHARLPTAAVVALAVAGACLLLLGVAMAAAAAAASLRRSRKLHKKPFKLFSHGSRAHRPTCVTVKVSSHPSADLLCPASAVQSQDYPSLKESTESKTLPVLPTPSISAELIIGEYALKTSTNLQSDEAADDSFRSLPSSHSSGASITESPLQICDKPITDPSPPDSPSSSSYRSLSPDCRSPFCPKTTFTAPSAICHLPENQNEEKTATATDNSGHPEALKVEQANAKIRYLPSGCNSNSCASEATPSETNPASRVSNTDVNLDPKESMRNEAKSKAPGATSTPKTPPPPPPPTKPTSSLNKGQSSGQPPLPPPLPVQLQVGTDGLPLPRLKPLHWDKHTLCRFDEQMIESLFAYNFQGQTKNEDPKSKILATSKHVIEHHKLQNTTILLKTLNASTEQVCSSITEGAGLSTQQLEALVKMRPSEEEEMSYLIMAGIPTCGSNESS

SEQ ID NO: 67240 - protein, 99 aa, Zea mays
  Coding DNA Sequence Number=SeqID_25461
MTLSGVGSDSPIEAKDVTSIELTIGTKTLDAFFVVEVEGNYFVILEWVSNIVPVEKESETLERTNKDLGKANGLRRRIKGVHNSKDIKSDSTAIPSRVP

SEQ ID NO: 67241 - protein, 616 aa, Zea mays
  Coding DNA Sequence Number=SeqID_25462
  Gene Ontology: Mol. function=transferase activity, transferring hexosyl groups; Cellular component=cytoplasm; Biological process =metabolic process
  Homolog annotation: Hit_ID=Q6ZBE1; Match level="QueryCoverage=79%, HitCoverage=99%, E-value=0.0, Identity=72%"; Hit description =Putative glucosyltransferase
  Pfam annotation: Domain name=UDPGT; Domain location=18-497; Score= -22.4; E_value=1.7e-09; Accession=PF00201.9; Description=UDP -glucoronosyl and UDP-glucosyl transferase
MGSVPPAEGDRRQPQQQPHVVMIPYPAQGHVTPMLQLAKLLHTRGFHVTFVNNEFNHRRHLRARGPGALHGAPGFRFTAIDDGLPPSDADATQDVPKLCYSTMTTCLPRFRDLIVRTNAEAEAEGRPAVTCVVADSIMSFGLRAARELGLRCATFWTASACGFIGYYYYRHLVARGIVPLKNEAQLTDGYLDTVVDWIPCAPKDLQLRDFPSFVRTTDPDDIMLNFFIHEVEAMSQASAVVINTFDDLDATLLHAMAKLLSRPIYTVGPLLLTVRNNVPADSPVAAIGSNLWKEQEAPLRWLDGRAPRSVVYINFGSVTVMSNEQLVEFAWGLANTGYTFLWNVRPDLVKGGDSAGAGLPPEFLAATEGRSMLSTWCPQAEVLEHEAVGLFLTHSGWNSTIESICGGVPMVCWPFFAEQQTNCRYKRTEWGIGMEIGNDVRRGEVKALIREAMEGEKGRDMRRRVTELKGSAVAAAKLNGRSMRNVDRFIDEHRPISFTTFISPSSILRKLTGLSASRRPFLPAAPPSPPTLPSAAENSKRTWRTPFDAYAVLASRRKGRKQDDTRGREDLEEGKKIGSLALSSLFVLIVPRLEHQLVPKQALMESAAGEPPDLPR

SEQ ID NO: 67242 - protein, 71 aa, Zea mays
  Coding DNA Sequence Number=SeqID_25463
MSMSGEGAAGLFLATSAEGGVYEAPFLYALAGGASAPPQGTPSAGGAPDGDDDSGSLDHNMELSEEQEPEG

SEQ ID NO: 67243 - protein, 221 aa, Zea mays
  Coding DNA Sequence Number=SeqID_25464
MGISSYHGTQLLPQNTKPRRTYPVGHNDPIQLLLATKSVVSTDAAASIIGGFRTPSMNTDITASTKLEYPVVDQNPTFTKVVDNFSVLDYMHLSTIFAISIIVGYLSSSPPLLDHSPYRSPPLVDPHPNLISHFNPISSSDPRLSSRDQAGDPGSVDGHGWAYRGHGRVRVRLLELSWLPNGILPQRSRGRALPAQAIARIQLNCISLFAAVMSFSFMTSY

SEQ ID NO: 67244 - protein, 369 aa, Zea mays
  Coding DNA Sequence Number=SeqID_25465
  Gene Ontology: Mol. function=acyltransferase activity; Cellular component=chloroplast stroma; Biological process=metabolic process
  Homolog annotation: Hit_ID=Q6ZKB1; Match level="QueryCoverage=99%, HitCoverage=81%, E-value=1e-109, Identity=83%"; Hit description =Putative dihydrolipoamide acetyltransferase
  Pfam annotation: Domain name=2-oxoacid_dh; Domain location=124-369; Score=273.5; E_value=4.1e-79; Accession=PF00198.13; Description=2 -oxoacid dehydrogenases acyltransferase (catalytic domain)
MDVETFHDGIVAVVLVQAGESAPVGAPIALLAESEEEVPLALAKAQELSNGQPQQAPPAPTEDAAATPPPPSAPATAPTPVAVDVEAAAGIQPKSKPAPAAAAPPPVAAPSVGAVPQSAVLPPVPGATVVPFTTMQAAVSKNMVESLAVPAFRVGYPIITDKLDELYEKVKPKGVTMTVLLAKAAAMALAQHPVVNASCRDGKSFTYNSNINIAVAVAIDGGLITPVLQDADKLDIYLLSQNWKDLVKKARAKQLQPNEYSSGTFTLSNLGMFGVDRFDAILPPGQGAIMAVGASKPTVVADKDGFFSVKSKMLIVLDYTGNISPELWLWHSGHRVNVTADHRIVYGADLAAFLQTFAKVIEDPESLTL

SEQ ID NO: 67245 - protein, 116 aa, Zea mays
  Coding DNA Sequence Number=SeqID_25466
MVELSAGMKISRILARTTIRPRCGCLQRMPASTAAARSRVGRVEAESERDAGAVAIGEECSTSEAEAGRSGGLWLVWYRVVESREDGGESKARMALQTPMKLSWTGLYLTVAHLGH

SEQ ID NO: 67246 - protein, 79 aa, Zea mays
  Coding DNA Sequence Number=SeqID_25467
VDFDTKRQKRDHYRSINHVTVTGAVVLDLHKVLVNNGCQTDIIFLHAFDRMGISHSLLKPSDNPLYGFGGKDTFPVSKI

SEQ ID NO: 67247 - protein, 210 aa, Zea mays
  Coding DNA Sequence Number=SeqID_25468
  Gene Ontology: Mol. function=catalytic activity; Cellular component =intracellular; Biological process=metabolic process
  Homolog annotation: Hit_ID=Q6K1V9; Match level="QueryCoverage=89%, HitCoverage=21%, E-value=1e-58, Identity=63%"; Hit description =Ribosomal protein-like
MGENRLLSLRELDESSSDDDDHVILCAAQIIQSYSQVRRQPGGSVPGRAYIYRDREAGHARMYQDYLAENPTYGPNLFRRRFRMNRPLFLRILNDVEQHDDYFEQKRNAAHQHGLSCFQKVTAVFRMLTYGVAADAIDEYVRIGESTTLESLRRFVKAVIDVFGDEYLRSPNEKDIERLLALGNERGFPGGRTVRLRCKVNFPGIIIHQQ

SEQ ID NO: 67248 - protein, 47 aa, Zea mays
  Coding DNA Sequence Number=SeqID_25469
MEAIVGHQLTSILDLLEDDLSHPGSRGPKPGREIITRFENHSIRSYG

SEQ ID NO: 67249 - protein, 42 aa, Zea mays
  Coding DNA Sequence Number=SeqID_25470
MADKVEFAGLMARKLREPKCMGHCKDSGAEVSRPELTRPASQ

SEQ ID NO: 67250 - protein, 70 aa, Zea mays
  Coding DNA Sequence Number=SeqID_25471
MEDEDEVRRWTAANIQFVFSRIRGQPKARGGKILVPKTNDPNNGRDLDDQYLKWLSYPTKVNTYYRQQEY

SEQ ID NO: 67251 - protein, 71 aa, Zea mays
  Coding DNA Sequence Number=SeqID_25472
  Subcellular localization annotation: CTP_CleavageSite=63; ConfidenceScore=5.38e-01
MADSPPPSPVASAHAAISPALPRLYDSELFFGQPRTTRSPRFVTHQLPACPVSRFIPHGWAKLARSNGATI

SEQ ID NO: 67252 - protein, 402 aa, Zea mays
  Coding DNA Sequence Number=SeqID_25473
  Gene Ontology: Mol. function=RNA-directed DNA polymerase activity; Cellular component=nucleus; Biological process=RNA-dependent DNA replication
  Homolog annotation: Hit_ID=Q8S472; Match level="QueryCoverage=99%, HitCoverage=37%, E-value=0.0, Identity=79%"; Hit description =Putative gypsy-type retrotransposon RIRE2
MDIATKFASGQEAVEAIFRKDKQPQSRPPEDVPEASTQCGAKKKGKKKSQAKRDATDADLVAAAEYKNPRKPPGGANLFDRCSRSRAPIIRGPSSTPLRSAPCFGAIFHKAGPPAEGGRARDDDKKEDHQAGEFPEVRDCFMIYGGQAANALARHRKQERREVCSVKVAAPVYLDWSDKPITFDRDDHPDRVPSPGKYPLIVDPVIGDVRLTKVLMDGGTSLNIIYTETLGLLRVDLSSVRAGAAPFHGIIPGKRVQPLGQLDLPVCFGTPSNFRRETLTFEVVGFRGTYHAVLGRPCYAKFMAVPNYTYLKLKMPGPNGVITVGPMYRHAYECDVECVEYVEALAESEALITDLESLSKEAPDVKRHAGNFEPAETVKSVPLDPSSDASKQTRIGSELDPK

SEQ ID NO: 67253 - protein, 122 aa, Zea mays
  Coding DNA Sequence Number=SeqID_25474
  Subcellular localization annotation: CTP_CleavageSite=76; ConfidenceScore=5.43e-01
MGSVAPLLQLSPCCADVWVAPTSRSSTEFTASPQQTTPIPRCLFVSPLDGPGRSDFPSTPRFARAYELLRRARRVVGVAVTGLSPFCASGDINSPVHPTLNLGLEFYPRCRHHVGCVSVEPC

SEQ ID NO: 67254 - protein, 73 aa, Zea mays
  Coding DNA Sequence Number=SeqID_25475
MPQVVRTPGTGANVNRAHAQHGTRLVHYLCFDVLLMSQLMVVGAREAEAVGQRVGMREEAGEWYKRQWRGGPF

SEQ ID NO: 67255 - protein, 83 aa, Zea mays
  Coding DNA Sequence Number=SeqID_25476
MASRSTLAAAPFNHLATFIRPNDGAQVPHGPEHRNRISAPQSEGEEESWARNDGWLDATEEEGEDGPGAQAESARMARSTPSY

SEQ ID NO: 67256 - protein, 168 aa, Zea mays
  Coding DNA Sequence Number=SeqID_25477
  Homolog annotation: Hit_ID=Q8RZT1; Match level="QueryCoverage=34%, HitCoverage=14%, E-value=2e-07, Identity=47%"; Hit description =Putative L-pipecolic acid oxidase
  Subcellular localization annotation: CTP_CleavageSite=90; ConfidenceScore=5.20e-01
MTWMDVLAWLGLVSTGPVCFISWVRRRSADHRKLPGRNLKSYVMFGMASTPQISALLLNSKWSRFHVELELANRSLPCRVFITPLSKLVHAMAILNEHRRGGGGPRADMGVMVKDKTKVVGIRKGLEKGGVVVTTSVSAEFKSAKSMVTIRMWASKMVKSIASLELPI

SEQ ID NO: 67257 - protein, 47 aa, Zea mays
  Coding DNA Sequence Number=SeqID_25478
  Gene Ontology: Mol. function=structural constituent of ribosome; Cellular component=intracellular; Biological process=translation
  Homolog annotation: Hit_ID=Q1T0D3; Match level="QueryCoverage=72%, HitCoverage=57%, E-value=4e-12, Identity=91%"; Hit description =Ribosomal L29e protein
  Pfam annotation: Domain name=Ribosomal_L29e; Domain location=4-42; Score=46.7; E_value=7.9e-11; Accession=PF01779.7; Description =Ribosomal L29e protein family
  Subcellular localization annotation: CTP_CleavageSite=57; ConfidenceScore=5.10e-01
MAKSKNHTAHNQSFKAHKNGIKKPKRHRQTSTKGVKSIQVVKLVPGC

SEQ ID NO: 67258 - protein, 242 aa, Zea mays
  Coding DNA Sequence Number=SeqID_25479
  Gene Ontology: Mol. function=nucleoside-triphosphatase activity; Cellular component=membrane; Biological process=proteolysis
  Homolog annotation: Hit_ID=Q5Z9Q8; Match level="QueryCoverage=59%, HitCoverage=37%, E-value=2e-64, Identity=84%"; Hit description =Putative spastin protein
  Pfam annotation: Domain name=AAA; Domain location=1-129; Score=9.3; E_ value=4.1e-05; Accession=PF00004.19; Description=ATPase family associated with various cellular activities (AAA)
MVRAVSLSHQVTDSKQPFCICGRNVCLGLSLLQIPLMWKPPTLENARVMVLAATNRPSELDEAILRRFTQIFEIGIPVQSERNKILQVVLKGENVEPNVDYDHIARLCEGFTGSDILEVCKQAAFYPIRELLDNERNGRKLDKPRPLRQSDLERALSTSRKCKKAASSGLQSPLWVRPTDSEDDQAALRYIHDSMSCCMLHARPSWRVRAALQLLALKAHVYTMVDGYLINDRHLAGVEHQI

SEQ ID NO: 67259 - protein, 133 aa, Zea mays
  Coding DNA Sequence Number=SeqID_25480
MVSRTNAPKPNLSYPRRARDSSETWERELTEGGGKHRADHDATFLPRRRIRFPRQALGELATEVKRRRGGEGGDSARSLISMRATDSGTTPTAAKIAMAPVELGMVVEDSDPTDAAHTLVEPVTAPRNASDTR

SEQ ID NO: 67260 - protein, 107 aa, Zea mays
  Coding DNA Sequence Number=SeqID_25481
  Subcellular localization annotation: CTP_CleavageSite=67; ConfidenceScore=5.01e-01
MTTSQATSSYPWIRFSKTTDEAPRQGTEVNPSAKLGNDQGNSGPTVNAKVHKVLNMARNVERALQASCSTCTDASVHESTSQHSSTNSAFCPTQNIKRNISLNAPER

SEQ ID NO: 67261 - protein, 150 aa, Zea mays
  Coding DNA Sequence Number=SeqID_25482
  Subcellular localization annotation: CTP_CleavageSite=76; ConfidenceScore=5.09e-01
MVAFGAIHAQTLSGAPGRTLPNQPLSEIQQAHSTIIHQTVRCAPDCPVSKRSNGSLRANDRLCRATIVNSVAAEVRAQKSEATGLSGVAPDCLVQQDDKRLQRSTALNPNGCADVAHSGQCTVTVRWGTGLSGAPIASSLCQRLGSGRGL

SEQ ID NO: 67262 - protein, 73 aa, Zea mays
  Coding DNA Sequence Number=SeqID_25483
MGTPLTDSLSSAGQQTLGKALTISFGKPYTSHEPHCQGQILQDEEHEGCRDGFVRGLGRRLPVNYGCWIVVFV

SEQ ID NO: 67263 - protein, 81 aa, Zea mays
  Coding DNA Sequence Number=SeqID_25484
MGHGVRGDAAFCSEDCRDEQKDMDEALHAAARRHRLLRSPSASSSSQAAAEAAASTRPPPVMRRRPTIANLAARNPPVAAS

SEQ ID NO: 67264 - protein, 42 aa, Zea mays
  Coding DNA Sequence Number=SeqID_25485
MARGRRRVIDADLLENSRTANIRGALFHEDVSLKLIKLHALM

SEQ ID NO: 67265 - protein, 177 aa, Zea mays
  Coding DNA Sequence Number=SeqID_25486
  Subcellular localization annotation: CTP_CleavageSite=29; ConfidenceScore=5.09e-01
KPQSAATSPRSPLHLVFVPFLERSHFAPLAAKAASSAAAGTEHEVAATTTAAIVTTAHFAALAPASVPVHAAPLRCPGGYEDFSLLPDDASAAPTFFAAAEAALAPALTAAIRAHHGMEAGLRVLGQGWEQPKTGGRDRGSKASWRKASSPKHRARVGAHAPPYAGSAERASKRVRF

SEQ ID NO: 67266 - protein, 74 aa, Zea mays
  Coding DNA Sequence Number=SeqID_25487
MKDGKPGKVAMVQYLVSRSRPCQGKAAAAERTVTCRRWSIPCIVSLCPWGRLREGCYYQIASQIDGPENKGTHN

SEQ ID NO: 67267 - protein, 114 aa, Zea mays
  Coding DNA Sequence Number=SeqID_25488
MASDVPMTPELEQIDGEIHDIFRALHGGVLSLSGEWELVATIYSWWLEKSRTEETIGETVGEFCRYQGSGNSSWSVGLPVEACLRGGRGGVSSPVSLQRLEMFAHVGGGLAARD

SEQ ID NO: 67268 - protein, 200 aa, Zea mays
  Coding DNA Sequence Number=SeqID_25489
  Gene Ontology: Mol. function=kinase activity
  Homolog annotation: Hit_ID=Q6QP54; Match level="QueryCoverage=78%, HitCoverage=40%, E-value=8e-15, Identity=48%"; Hit description =Putative kinase
MDTSLCQCYPIPNLEDGDGGVVCIDGLVPTGSSVSPDPRARTQPRLRKTVSASPDPRARTQPRLRKTVSASPNPRARTPPRPRKTVSASPDPRARTQPRLRKTVSASPDPRARTPPRPRKTVSASPDPRARTQPRLRKTVSASPDPRARTQPRPWRNHRLARPWARTDHVTGGPIITLPLASSGYREQDRRPIWLAPVNK

SEQ ID NO: 67269 - protein, 692 aa, Zea mays
  Coding DNA Sequence Number=SeqID_25490
  Homolog annotation: Hit_ID=Q10KU3; Match level="QueryCoverage=93%, HitCoverage=62%, E-value=1e-103, Identity=39%"; Hit description =Expressed protein
MCGLLIHKQKQQSSLSVLISQAYQLGVCQEMKLLVLHLRYSEVQNKLHSEFTTDSNMGKAVNRHGLKPLQMYVKKTNTTFGSANKPVGSIGVPECPVGKNRIELDKASILASPTSTWSHSSAQKPIASAHLHQMRAPHESILGKKPNISVELHQVKVPHETILDEKSSISVELVRVPHESILSKKPSPSAEHASSRAHDSEVCGINYNPTCQQFKSSEAQNKLHSCSNVGDSSGRLGNEYKTNKEQPYAECINIFTTSASNEINPSTRTFDNSNGSTLRYPKQSLSASSSSKLLQSAKVNGSNLMLSDHISLLADNLHQDGATTIFGKNSTSFQCTAKSRTFVFGASSGQYHQTYQQSQSSLLSEQHNSGTSMEHGHSDSINSHRGSAASPSVEHNGVPFAQTRTFSSGSAFEGLDDICNGFTTLNISECPQGTTETRAQDPPTNGPSMCMLDNYEHPVVFRENRSTFDLDSNPSCYQNHSSDPQSGQPPFSDYIWHQPNLSSDMQSSSELSGDKPRHLPNSTEPKVGIILQALGILKTEKIFPTETNIADCICYGELNLTGFDVKKALELAIRHEAVVMKKLLNDMPLFVAKDESLWKCVNVTNTKSKNPIEELGTVYNYISSPDGRSAMMNSQSRYQAAMILKRSCMQQCALGDILQVLHIVVVLKKWLVPHSSGWQPLSLKRNSGSCNY

SEQ ID NO: 67270 - protein, 125 aa, Zea mays
  Coding DNA Sequence Number=SeqID_25491
  Gene Ontology: Cellular component=intracellular; Biological process =RNA processing
  Homolog annotation: Hit_ID=Q10Q44; Match level="QueryCoverage=64%, HitCoverage=10%, E-value=1e-22, Identity=59%"; Hit description=Pre -mRNA processing protein prp39, putative, expressed
MAPFTILDAKDGVVSDFLSLTMMFPNFSADLNGTTGDMVDFQSTGDAGNGATITEMGNPVPEPSYEESVLSAEEARLWSVATMNCLDFDAWTTVVEETDKNVEVMTNHNNCYAYYKITCVLTATM

SEQ ID NO: 67271 - protein, 154 aa, Zea mays
  Coding DNA Sequence Number=SeqID_25492
MARGKELLAAGRGERARLGLQTAMGAAVREMFFFPGDRRAGRTRTPARGTHSQPPALGSWERWQPTKGQDARRGTRSRSCWAWPSSLALRWEARRKMHQEVGELEQGEHAAKKRPMATGWGAACCGQEARDKADRERCVPLEEIRLGWYEGDPV

SEQ ID NO: 67272 - protein, 226 aa, Zea mays
  Coding DNA Sequence Number=SeqID_25493
MAAKVNGTGTGNNMFDSDNDSENYYNESESDYEHESEYNSEYENENSEGASEDIIFKKKHASFKGDRQSHRVRPQKKLKSMNHEVDTLTRSNNEEERENSEGAFEEENTRENMVFMKKHASFKGDRQLHRVRPRKKLKSMNHEVGTLNGADNEERRDTCRPHIQNNNMDTLTRADNEEERDTCRAHIQNNYMDTYTSADNEERRDSCRAHIQNNNMDAAKIGMIQI

SEQ ID NO: 67273 - protein, 414 aa, Zea mays
  Coding DNA Sequence Number=SeqID_25494
  Gene Ontology: Mol. function=RNA-directed DNA polymerase activity; Cellular component=mitochondrion; Biological process=RNA-dependent DNA replication
  Homolog annotation: Hit_ID=UPI00004C1733; Match level="QueryCoverage =92%, HitCoverage=28%, E-value=0.0, Identity=83%"; Hit description =UPI00004C1733 related cluster
  Pfam annotation: Domain name=RnaseH; Domain location=66-193; Score= -8.5; E_value=0.00036; Accession=PF00075.14; Description=RNase H
  Pfam annotation: Domain name=rve; Domain location=285-410; Score =25.7; E_value=4.3e-05; Accession=PF00665.16; Description=Integrase core domain
  Pfam module annotation: Pfam domain module=RnaseH::rve; Domain location=66-193::285-410
MTVVSSFPLGGIIQCREASSRIAKWAVEIMGETISFAPRKAIKSQVLADFVAEWVDTQLPAAPIQPELWTMFFDGSLMKTGAGACLLFISPLGKHLRYVLRLHFPASNNVAKYEALVNELRIAIELGVRRLDARGDSQLVIDQVMKNSNYRDPKMEAYCDEVRCLEDKFYGLELNHIARRYNETADELAKIASGRTTVPPVVFSLDLHQPSVKTDDTPELEEASAQPEAPSAPEAPRALVGNAFRQGFYWPTAVADATRIVRTCQGCQFYARQTHLPAQALQTIPITWLFAVWGLDLVGPLQKAPGGFTHLLVAINKFSKWIEAEAFFTNIIHRFGVPNSIITDNGTQFTGRKFLDFCENHHIRVDWAAVAHPMTNGQWDPENDGVHVSDKADRAEGLLRLRDTDTSLITFCDK

SEQ ID NO: 67274 - protein, 93 aa, Zea mays
  Coding DNA Sequence Number=SeqID_25495
MANTSSAMIIFDAEEVFHFRIFSFIANRKGVLHRIVDVGREIPEACTISSAEKGSSPTSKTTPTVAIVRPQTTTTRTMPMNREPQCNNLNLGV

SEQ ID NO: 67275 - protein, 248 aa, Zea mays
  Coding DNA Sequence Number=SeqID_25496
MDQVHSLFIEADRDLDAKTSPFDRSGEELGPASLVDFDREVFHVEDVPSKQFASALIDQMCGPHGRSAVTERAGRAMEQAQRDEEIEDLESLEGSLATLDNASVETGMEEQSSRVGAIAGESSVVETSHHSANDGRSDGNFGFVNKGKGIVEVAECVTPLSYWSPSFCSDRDLFFDPETSESEEGLDFFAKMDDESSKEDSDFFVVLEIASTMKADAGDEVRHGFSSSFADEGAEWDPRSLPYLGVRA

SEQ ID NO: 67276 - protein, 284 aa, Zea mays
  Coding DNA Sequence Number=SeqID_25497
  Gene Ontology: Mol. function=protein dimerization activity
  Homolog annotation: Hit_ID=Q53M48; Match level="QueryCoverage=47%, HitCoverage=12%, E-value=1e-23, Identity=44%"; Hit description=HAT family dimerisation domain, putative
MAGTVTGPGVDVDPLHAAAQVRERHRGVHQPHMEFAVLVVKINSNMINFGSLLLIDSYHRIIGLLALLRLYKMIDLKSYFSQASSGSRPSTRASGVCNKTGIQVGVRENNSEDANGENVNGQVEGINQFNPDHIISDLGLSIPIDFFAPNIRDDVIRAFIAKGPTQPIGHNFPQSHDKRSFQKHCYRQHSWLEIVWRRIRLIASIVTFLSTIEWIINFAMMHLQKLASHNGEMFIRYFQNMLVGLIAYTILQQQHSRIFVTTRNIIIKTWRYKMGISLQDFAPY

SEQ ID NO: 67277 - protein, 63 aa, Zea mays
  Coding DNA Sequence Number=SeqID_25498
MGCTFVAFFLLLLEERGPVGVGALQSSLGFKDFHHAARLQSLTNGFETALNESVKNCKACRGG

SEQ ID NO: 67278 - protein, 44 aa, Zea mays
  Coding DNA Sequence Number=SeqID_25499
MLPTLILTDLEELEVAKWTDASGKNSEKRYMISIKEWKRGGFKG

SEQ ID NO: 67279 - protein, 143 aa, Zea mays
  Coding DNA Sequence Number=SeqID_25500
MGSDDSTVASTGGNTKTASREGAPAEGWAELEPALGAGGWARSKLGEASAMEEHGSKGTVAMEKGDEDDGAVELEAGPTVSYIRDQGETAGGRVPWLGGCAASLEEQELVRAARVGRRREGERRTEDREKRVGWGRSLCTWEI

SEQ ID NO: 67280 - protein, 67 aa, Zea mays
  Coding DNA Sequence Number=SeqID_25501
MDLGACRGATCALAFVQIRLGYELRDVIGLSEDVTNDALEGLEDDFGVATEAAFNLLLLKDISMVPP

SEQ ID NO: 67281 - protein, 172 aa, Zea mays
  Coding DNA Sequence Number=SeqID_25502
ALGSDAVVHPCHPYLFDQEVAESVVPFWMLCGGSRDRGLTAPGVIAAFHHRRALPLLERRMCLDEMTPKASVESSRMASTALSTDELLKRVKGIVGKADYTAPSRCASSGAMYLYLKRKAGSPILTPMKAVKTDAGSSAGAVAHPIFWVDADREALQRGAKAVRLALERQSG

SEQ ID NO: 67282 - protein, 706 aa, Zea mays
  Coding DNA Sequence Number=SeqID_25503
  Gene Ontology: Mol. function=protein dimerization activity; Cellular component=nucleus; Biological process=regulation of transcription, DNA-dependent
  Homolog annotation: Hit_ID=Q8GST0; Match level="QueryCoverage=94%, HitCoverage=87%, E-value=0.0, Identity=64%"; Hit description=Auxin response factor 1
  Pfam annotation: Domain name=Auxin_resp; Domain location=223-302; Score=93.1; E_value=8.3e-25; Accession=PF06507.4; Description=Auxin response factor
  Pfam annotation: Domain name=B3; Domain location=148-248; Score =101.2; E_value=3.1e-27; Accession=PF02362.12; Description=B3 DNA binding domain
  Pfam module annotation: Pfam domain module=Auxin_resp::B3; Domain location=223-302::148-248
MTSSAAAAAAAAQVAGGGGGGEGDAAAAARGGGGTEDGMYTELWNLCAGPLVTVPRVGDKVYYFPQGHIEQVEASTNQVAEQHMQFYDLPWKILCEVMNVELKAEPDNDEVYAQLTLLPESKQPEENGSSEEMPASPPAALARPRVHSFCKTLTASDTSTHGGFSVLRRHADECLPPLDMTRQPPTQELVAKDLHGVEWRFRHIFRGQPRRHLLQSGWSVFVSAKRLVAGDAFIFLRTSPAEFVVPCDRYMESLKRNYPIGMRFKMRFEGEEAPEQRFTGTIVGNVDPDQAGWAESKWRYLKVRWDEASSIPRPERVSPWQIEPAVSPPPINPLPVHRPKRPRSNAVASLPESSAPTKEAAPKVTLETQQHALQRPLQTQDNVAPKSVFGDNSELDSAHKSSLRPSGFDLDKSTIGMQRKLGSDIWMRMNRPDGYSEMLSGYQPPNEGARNSQGFCSLPDQIAAGRPNFWHTVNAHYQDQQGNHNLFPGSWSMMPSSTGFGMNRQSYPMIQEVGGMSQSCTNTKFGNGVYAALPGRGIDRYPSGWFGHTTPGGRVDDAQPRVIKPQPLVLAHGEALKMKGNSCKLFGIHLDSPAKSEPLKSPPSVATPAAEKWMADGIDADKSPEPHKTPKQLGATQVDPVPERCPQASRGTQCKSQGGSTRSCKKVHKQGMALGRSVDLTKFNGYTELVAELDEMFDFNGELKGL

SEQ ID NO: 67283 - protein, 780 aa, Zea mays
  Coding DNA Sequence Number=SeqID_25504
  Gene Ontology: Mol. function=DNA binding; Cellular component =intracellular; Biological process=DNA integration
  Homolog annotation: Hit_ID=Q9XEJ4; Match level="QueryCoverage=95%, HitCoverage=78%, E-value=0.0, Identity=81%"; Hit description=Copia -type pol polyprotein
  Pfam annotation: Domain name=RVT_2; Domain location=482-737; Score =522.2; E_value=5.5e-154; Accession=PF07727.4; Description=Reverse transcriptase (RNA-dependent
  Pfam annotation: Domain name=rve; Domain location=129-292; Score =200.2; E_value=4.7e-57; Accession=PF00665.16; Description=Integrase core domain
  Pfam module annotation: Pfam domain module=RVT_2::rve; Domain location=482-737::129-292
MTGEKKMFSSYEKNQDPQRAITFGVGNQGVTVFRRSDDSIAFKGVLEGQLYLVDFDRAELNTCLIAKTNMGWLWHCRLAHVGMKNLHKLLKGEHILGLTNVHFEKDRICSACQAGKQVGAHHPHKNIMTTDRPLELLHMDLFGPIAYISIGRSKYCLVIVDDYSRFTWVFFLQEKSHTQETLKGFLRRAQNEFALRIKKIRSDNGTEFKNSQIEGFLEEEGIKHEFSSPYTPQQNGVVERKNRTLLDMARTMLDEYKTSDRFWAEAVNTACYAINRLYLHRILKKTSYELLTGYDSNTRAYRVFNKSTGQVEVSCDVVFDESNGSQVEQVDLDEIGVEEAPCIALRNMSIGDMCPKESEEPPKAQDQPSSSTQASPPTQNEDEAQVDEGDDQASEPPQDDGNDQGGDANDQDKEDEESRPPHPRVHQAIQRDYPVDTILGDIHKGVTTRSRVAHFCEHYSFVSYIEPHRVEEALQDSDWVVAMQEELNNFTRNEVWHLVPHPNQNVVGTKWVFRNKQDEHGVVTRNKARLVAKGYSQVEGLDFGETYALVARLESICILLAYATYHGFKLYQMDVKSAFLNGPIKEEVYVEQPPGFEDSEYPNHVYKLSKALYGLKQAPRAWYECLRDFLITNGFKVGKADPTLFTKTLENDLFVCQIYVDDIIFGSTNESTCEEFSRIMTQKFEMSMMGELKYFLGFQVKQLQEGTFLSQTKYTQDILSKFGMKDAKPIKTPMGTDGHLDLDEGAQMGRRETEREGGKGDGRERRKERIQVYNGGVAEC

SEQ ID NO: 67284 - protein, 110 aa, Zea mays
  Coding DNA Sequence Number=SeqID_25505
MATSSGNMRRRDVMKSQGKRDAAMEAPSRRGTGDPAGRHGDGAEKGARSEPTEGARASRGMAGSAGKRPSAIRKNLGAQDFIQCLSGNRGAAQEDKNDGCDLTGGKRRYF

SEQ ID NO: 67285 - protein, 199 aa, Zea mays
  Coding DNA Sequence Number=SeqID_25506
MGVAVFAERFVVCGFPYFRGFIPGDGLCRIPFPSFMVTPSCWRCTWQSRCRFWCHQRRFLPGWVREAVQDAFLICNEGDGSEVEDHSNIEGDRGVEDDAFLRGAPAVGVCDPTVHHRVTHVMLLGRTSSLIATRWYMKKHFDVAQGFIQLAALHIQGLDHLLTRVIAECLAPQVLRTALPEISMLLKRLTQMLVFIFLD

SEQ ID NO: 67286 - protein, 74 aa, Zea mays
  Coding DNA Sequence Number=SeqID_25507
MALLPPELGLSHHNFSPGARSPARTLSLPWEETPTPLAWRAELHFSGDPSIVGCNGAALMLGAVLGLVCEPSIS

SEQ ID NO: 67287 - protein, 519 aa, Zea mays
  Coding DNA Sequence Number=SeqID_25508
  Gene Ontology: Mol. function=magnesium ion binding; Cellular component=chloroplast; Biological process=metabolic process
  Homolog annotation: Hit_ID=Q5GJ60; Match level="QueryCoverage=99%, HitCoverage=100%, E-value=0.0, Identity=89%"; Hit description =Terpene synthase 6
  Pfam annotation: Domain name=Terpene_synth; Domain location=30-198; Score=131.2; E_value=2.8e-36; Accession=PF01397.11; Description =Terpene synthase, N-terminal domain
  Pfam annotation: Domain name=Terpene_synth_C; Domain location=203 -465; Score=308.7; E_value=1e-89; Accession=PF03936.6; Description =Terpene synthase family, metal binding domain
  Pfam module annotation: Pfam domain module=Terpene_synth::Terpene _synth_C; Domain location=30-198::203-465
MAAPTLTTDGPRLGQQEMKKMSPSFHPTLWGDFFLSYEAPTEAQEAEMRQRAEVLREEVRNMIKGSHDVPEIVDLIITLQRLNLDYHYEDEINEKLAVVYNSNYDGDVFLNFKDQYGNFIEVDTRSLLSLYNAAYLRIHGETVLDEAISFTTRCLQDRLEHLESPIAEEVSSALDTPLFRRVGTLEMKDYIPIYEKDAKQNKSILEFAKLNFNLLQLLYSSELKECTTWWKELRVESNLSFVRDRIVEVYFWMSGGCYDPQYSHSRIILTKIVAFITILDDTLDSHANSYESMQLAEAVERWDESAVSLLPEYMKDFYMYLLKTFSSFENELGPDKSYRVKELVREYTKEIKWRDEDYVPKTLKEHLKVSLISIGGTLVLCSAFVGMGDVVTKKIMEWVMSDAELVKSFGIFVRLSNDIVSTKREQREKHCVSTVQCYMKQHELTMDEACEQIKELTEDSWKFMIEQGLALKEYPIIVPRTVLEFARTVDYMYKEADKYTVSHTIKDMLTSLYVKPVLM

SEQ ID NO: 67288 - protein, 110 aa, Zea mays
  Coding DNA Sequence Number=SeqID_25509
MGSGRPRIWRSTTAAALGGPLLHLVVRISTPDGVWVNEEGPRMTGGFYRRTGFTTAQIYNFLRKEAKASRPLRAINRASRRLHSIPKYSKSTPTLRLSTTKRSSDLVRSE

SEQ ID NO: 67289 - protein, 32 aa, Zea mays
  Coding DNA Sequence Number=SeqID_25510
MTMPPPPPIRRKNRLHNLVGPHLYLRSLQETC

SEQ ID NO: 67290 - protein, 240 aa, Zea mays
  Coding DNA Sequence Number=SeqID_25511
  Gene Ontology: Mol. function=protein serine/threonine kinase activity; Biological process=protein amino acid phosphorylation
  Homolog annotation: Hit_ID=Q9FMY3; Match level="QueryCoverage=56%, HitCoverage=41%, E-value=1e-10, Identity=34%"; Hit description =Serine/threonine protein kinase-like protein
  Pfam annotation: Domain name=Pkinase_Tyr; Domain location=67-231; Score=-135.8; E_value=0.00039; Accession=PF07714.7; Description =Protein tyrosine kinase
MPVRGVPPDSVLRVIGDGDNDQSSKALLGCPSPLFQQHAMPAAIAAPTSLAMKEFSYEEVEAATGGFAAKNLVGKGSHGSMYRARLTEEGGRTVVVAVKRSSHAQGEAKLGNLIAVLSAAPRHPGVIGIVGVSSSAAAAAPGPRLPPLLVMEFMPNGSLHDLLHWSPRPPSWPHRVEIALDVARVVRRVEGTAHRRGVVGWAVGGRRRRLGCTMGRTNRWAARTTGLHKPLGHRHCYGVI

SEQ ID NO: 67291 - protein, 58 aa, Zea mays
  Coding DNA Sequence Number=SeqID_25512
DSGMVIQEGEGSVPEKDTTDAEAKTVDAEADSDDEEDDDILSSSKPSHIEFGKSTVKP

SEQ ID NO: 67292 - protein, 62 aa, Zea mays
  Coding DNA Sequence Number=SeqID_25513
MAYKFSNLAICKAVVGGGRKKTSRIVRVDGGGSTVVSIGRRCNDMGEEGDLTCGPHLEAMQT

SEQ ID NO: 67293 - protein, 104 aa, Zea mays
  Coding DNA Sequence Number=SeqID_25514
MAPKRANSKATASIDDATKATLLAKKKGKAPIADNIPQDAFDDEAVNSKRQYQDNLPTAEGTAHTCSSEGVPQAPPPGFIHPEGEDIIEDDEIIGISAEDQLKL

SEQ ID NO: 67294 - protein, 85 aa, Zea mays
  Coding DNA Sequence Number=SeqID_25515
MTKPRRPTTVLGGPVEIYRHGVSAEVGEAVSGQPGVPGPLASSQRGRPVCVRRGRRVGTVAQRPLAEQLVRGHEVATDSRAPSIR

SEQ ID NO: 67295 - protein, 284 aa, Zea mays
  Coding DNA Sequence Number=SeqID_25516
  Homolog annotation: Hit_ID=Q2HSG3; Match level="QueryCoverage=99%, HitCoverage=6%, E-value=1e-105, Identity=61%"; Hit description =Putative zinc finger in N-recognin, putative
FILEQLCNLICPVKPEPVYLLILNKAHTQEEFIRGSMTKNPYSSVDVGPLMRDVKNKICNQLDLIGLLEDDYGMELLVGGSIISLDLSISQVYEQVWRKHHGQTQHCLSNVSAITGASSIRDCPPMTVTYRLQGLDGEATEPMIKELEEEREESQDPEIEFAIAGAVRECGGLEIILSMIQSLHDDEFRSNQEELTSVLNLLKYCCKIRENRCALLCLGALGLLLETARRAFSADAMEPAEGAKKSNKQQRNEEMVARILPYLTYGEPTAMEALIQHFEPYLRD

SEQ ID NO: 67296 - protein, 895 aa, Zea mays
  Coding DNA Sequence Number=SeqID_25517
  Gene Ontology: Mol. function=ubiquitin-protein ligase activity; Cellular component=signal recognition particle, endoplasmic reticulum targeting; Biological process=ubiquitin cycle
  Homolog annotation: Hit_ID=Q2HSG3; Match level="QueryCoverage=99%, HitCoverage=17%, E-value=0.0, Identity=71%"; Hit description =Putative zinc finger in N-recognin, putative
KDANHNAQKAETTDLGGSTRTSSQSPDMKKNRKADDGSEGSSEKSCMDMEQVVEMFSDKEGDMLKNFINIFLLEWNSAGVRHEAKCVLFGVWYHAKNRLRETMLSILLQKVIHLPLYGQNIVEYTDLITCLLGKVNDFSAKQNHSELVNKCLTSEVISCIFDTLHSQNELLANHPNSRIYNTLSCLVEFDGYYLESEPCVTCSCPDVPYSRTKLETLKSETKFTDNRIIIKCTGSFTIQSVTMNVYDARKSKSVKVLNLYYNNRPVTDLSELKNNWTLWKRAKSCHLTFNQTELKVEFPIPITACNFMIELDSFYENLQASSLESLQCPRCSRSVTDKHGICSNCHENAYQCRQCRNINYENLDSFLCNECGYSKYGRFEFHFMAKPSFSFDNMENDDDMRKGLAAIESESENAHRRYQQLMGFKKPLIKLVSSIGEQEVDSQQKDAVQQMMVSLPGPTCKVNRKIALLGVLYGEKCKAAFDSVSKSVQTLQGLRRVLMTYLHQKSSSDTNALPAFSIPRSPNSCYGCSTTFVTQCLELLQVLSKHENCRKQLISAGVLSELFENNIHQGPRTARTLARAVLSSFSESDEDAVHELNNLIQKKVMYCLEHHRSMDIAQSTREDLLLLSETCALVDEFWEARLRVTFQLLFSSIKVGAKHPAISEHIILPCLRIISQACTPPKSDCGDKESGLGVSSLTLHSKNDDTTGNTASNNPNTKIQSDISGKIYDGSRRDQDIPLLSYSEWEGGASYLDFVRRQYKVSQAVKGSAQKTRHDSYKSDYLVLKYGLRWKRRACLKSSKSDFSKFALGYWVSDLILSSCSQSIRSEICTLISLLCPSNSPRQFQLLNLLMSLLPRTLSAGESAAEYFELLGTMIDSESSRLFLTVRGCLTHYVL

SEQ ID NO: 67297 - protein, 63 aa, Zea mays
  Coding DNA Sequence Number=SeqID_25518
MGVGTTDSNVCANGIRPSLAALRAEVGEWRLGTIPRLTRWAHVKERSRLAVKGADMWSPRIPI

SEQ ID NO: 67298 - protein, 139 aa, Zea mays
  Coding DNA Sequence Number=SeqID_25519
MGKSKKCGSSSHHSGDKRKREPTPPSEDFGDSEYSKEFSSKSERSPVYTSPLALSKDSDDSQGIVAEVWTYIRAIERSGLEGSDESEVSSDEENSSNSSEEGSSGDGDDEDDGDGGKGDGGDGKDDDGSSRASCKAPLA

SEQ ID NO: 67299 - protein, 52 aa, Zea mays
  Coding DNA Sequence Number=SeqID_25520
MAARSSRVDFTNENLYPAGVEFGLLLPSDVAPTVSFAGSCTAVPLVPVAILK

SEQ ID NO: 67300 - protein, 662 aa, Zea mays
  Coding DNA Sequence Number=SeqID_25521
  Gene Ontology: Mol. function=ATP-dependent helicase activity; Cellular component=mitochondrion; Biological process=regulation of transcription, DNA-dependent
  Homolog annotation: Hit_ID=Q9LUW5; Match level="QueryCoverage=57%, HitCoverage=61%, E-value=1e-158, Identity=70%"; Hit description=DEAD- box ATP-dependent RNA helicase 53
  Pfam annotation: Domain name=DEAD; Domain location=169-338; Score =228.4; E_value=1.6e-65; Accession=PF00270.19; Description=DEADDEAH box helicase
  Pfam annotation: Domain name=Helicase_C; Domain location=407-483; Score=123.6; E_value=5.5e-34; Accession=PF00271.21; Description =Helicase conserved C-terminal domain
  Pfam annotation: Domain name=ResIII; Domain location=165-333; Score= -30.0; E_value=0.015; Accession=PF04851.6; Description=Type III restriction enzyme, res subunit
  Pfam module annotation: Pfam domain module=DEAD::Helicase_C::ResIII; Domain location=169-338::407-483::165-333
  Subcellular localization annotation: CTP_CleavageSite=75; ConfidenceScore=5.61e-01
MPSIEISPTPAPFNSSPLLVASLRAPPFPHSRPKTLNPAPPPPPTRKRYSHVRRPPPRGAPSAARRVRARDRAAPAAAGGAGCGGPAGPAPCGRMVSTLIPAWLGFRETGAAGAAARAEFAADNGSFYEEDKRAAAGGGAAAEGLEIAKLGISSKIVERLASKGITKLFPIQRAVLEPAMQGRDMVGRAKTGTGKTLAFGIPIMDAIIRHNEKYKPGKFPLAIVLAPTRELAKQVEREFLDSSPLETLCVYGGTPIMQQIRKLNYGVDVVIGTPGRVIDLLKRGSLSLAEIRFVVLDEADQMLSVGFDLDVETILERVPPQRQTLMFSATMPTWIRKLTQKYLNNPVTVDLVGEDDQKLAEGISLLAVSSENREKPAVLGELIKEHAKGGKCIVFTQTKRDADRLSHNMSRSFQCEALHGDISQSQRERTLAGFRDGRFNILIATDVAARGLDIPNVDLVIHFELPNSSELFVHRSGRTGRAGKKGTAIVMYNYDQSRAVRVIERDVGCKFTELPKITVDGSDLLSGGFDSFGGGYSGSNYGRSGGFGGRGGFGRSGGGGGYGNSGFGHSSGGYGRSGGGGFGDSGFGGRSGGGGGFGDSGFGGQSGGGGGFGDSGFGRTSGGGSGFGRSGGFGDSGSGRFGGGFGGSGSGGFGGFGDKNSR

SEQ ID NO: 67301 - protein, 515 aa, Zea mays
  Coding DNA Sequence Number=SeqID_25522
  Gene Ontology: Mol. function=nucleic acid binding; Cellular component= intracellular; Biological process=DNA integration
  Homolog annotation: Hit_ID=Q7XBC6; Match level="QueryCoverage=99%, HitCoverage=57%, E-value=1e-163, Identity=75%"; Hit description =Putative copia-type pol polyprotein
  Pfam annotation: Domain name=rve; Domain location=392-514; Score =50.2; E_value=6.9e-12; Accession=PF00665.16; Description=Integrase core domain
  Pfam annotation: Domain name=zf-CCHC; Domain location=330-347; Score =30.3; E_value=6.6e-06; Accession=PF00098.13; Description=Zinc knuckle
  Pfam module annotation: Pfam domain module=rve::zf-CCHC; Domain location=392-514::330-347
MSGDHAKKEMETGGKPTTSHGSTSSEESRTKRREKKKSSSNKGKEKKSSSLHKEKKEKSSSQKPHRSGDKQKRMRKVVYYETDTSSTSTSDSDAPSVTSKRQERDKDYDEDEVAQIEHFNSQATTILLASLSREEYNKVQGLKSAKEVWDVLKTAHEGDELTKITKRETIEGELVRFRLRKGEEPQHMYNRLKTLVNQVRNLGSVKWDDHEVVKVILRSLIFLNPTQVQLIRGNPRYTKMTPEEVIEHFVSFECMIEGSRKINELDDPSTSEAQPVAFKATEDKKEESTPSRQPIDASKLDNEEMALVIKSFRQILKQRRGKDYKSRSKKVCYKCGKPGHFIAKCPLSSDSDRGDDKKGRRKEKKRYYKKKGGDAHVCREWDSDESSSDSSDDEDAANIAVTKGLLFPNVGHKCLMAKDGKRKKEKSQTQETLKGFLRRAQNEFGLRIKKIRSDNGTEFKNSQIEGFLEEEGIKHEFSSPYTPQQNGVVERKNRTLLDMARTMLDEYKTSDRFWA

SEQ ID NO: 67302 - protein, 474 aa, Zea mays
  Coding DNA Sequence Number=SeqID_25523
  Gene Ontology: Mol. function=protein dimerization activity; Cellular component=nucleus
  Homolog annotation: Hit_ID=Q2QNH1; Match level="QueryCoverage=85%, HitCoverage=51%, E-value=1e-145, Identity=61%"; Hit description=HAT family dimerisation domain containing protein, expressed
MVRHPTSSYTAELTYYLRAFCHTQYCVNHYDNGQPLIRGLEYVTKPSALALATKSIGHQYLGLRNPDELAIVAVEEQTNTNLEEEGPTQGNDGSNVSAPAHEQFATECHSVDEQFVYSTDIYDPKNWNRLDNKARDILVEKGPIREENLVFPKDGNSRHFSYAHYFRKMKNGELIDRKCCCKSSLAHNCFGGWRHINDRLKDYETSVEHITNMNTWNELRARLAKAQTTDKEIQEEIKREKERLRQVLLRLVAIVKFLGKRCLAFRGSNEQLYNDQNGNFYACVEMIAKFDVVMQDHLRRIKNKETHYHYPSHKIQDELIYLMASNIIESIIKVVKDAKYFSIILDCTPDVSHQEQMTLLLRCVEMCGSSINIQEYFLGFLKVDDTSGLGLFNVLTDSIKLFGLNIDDIRGQGYDNCSNMKGKHQGVQRRLLNINPRALYMPCACHSLNLTLCLIFEELQTFKSIFGFLLSSTT

SEQ ID NO: 67303 - protein, 112 aa, Zea mays
  Coding DNA Sequence Number=SeqID_25524
  Subcellular localization annotation: CTP_CleavageSite=75; ConfidenceScore=5.24e-01
MSVVSPYINLKSRTNHLVLLPAEKTTKWLGNRNLPVRAMHTAGKSTRRSSRPYVPGDDSSPHGSRQRNPGKEPSKLSTVPNIVLTPPLKVYIEPKLYGRDLVMNSMVGIEPV

SEQ ID NO: 67304 - protein, 153 aa, Zea mays
  Coding DNA Sequence Number=SeqID_25525
  Subcellular localization annotation: CTP_CleavageSite=53; ConfidenceScore=5.68e-01
MGKEKKGRVRRVAPATSGSVNQVLPRRTLVTPSTRRRGSPLSPRGRLSTPPPSSSDDSDDSQGIAAEVWTYIRSIECAGLEGSDESEVSSDEENSADSSEEGSDGDDEGDDSGGDGSGGGGDEGGSNGNKGDDEGSGDGGSSSSKASGKAPLA

SEQ ID NO: 67305 - protein, 906 aa, Zea mays
  Coding DNA Sequence Number=SeqID_25526
  Gene Ontology: Mol. function=protein serine/threonine kinase activity; Cellular component=cell surface; Biological process =protein amino acid phosphorylation
  Homolog annotation: Hit_ID=O64477; Match level="QueryCoverage=66%, HitCoverage=73%, E-value=1e-157, Identity=46%"; Hit description =Putative receptor-like protein kinase
  Pfam annotation: Domain name=PAN_2; Domain location=187-254; Score =65.7; E_value=1.5e-16; Accession=PF08276.2; Description=PAN-like domain
  Pfam annotation: Domain name=Pkinase; Domain location=342-611; Score =198.5; E_value=1.6e-56; Accession=PF00069.15; Description=Protein kinase domain
  Pfam annotation: Domain name=Pkinase_Tyr; Domain location=343-608; Score=77.1; E_value=5.4e-20; Accession=PF07714.7; Description =Protein tyrosine kinase
  Pfam annotation: Domain name=S_locus_glycop; Domain location=44-170; Score=134.3; E_value=3.4e-37; Accession=PF00954.11; Description=S -locus glycoprotein family
  Pfam module annotation: Pfam domain module=PAN_2::Pkinase::Pkinase _Tyr::S_locus_glycop; Domain location=187-254::342-611::343-608::44 -170
TVVSGQWFGIDKITYEYQDSVSWKNQEDPAPGPFSYHADLVTMSQYVSIWNHSEVYWQSGNWTGKAFTSIPGMPLKSDYIYDFVNNSRELKFRWTTKDVSVITRVILSNNGQLQRLTWSNDSEEWITGWYFPAALCDVYSVCGPFGVCRTGSDEQCFCLPGFRPASSRSWRLGAWSQGCVRQTDIQCAESNISSAIKESDAFLKITNIKFSQNPVKLKVQSMEGCRSICLSNCSCTAYAHKQDCNIWNSELWDLKQLPNGNTDGSDMYIRLAASDHVVQDSEKKAHHLRLIVLFAVLGSIFMALCALSITVKMFQRTSSRKAFSDNYSLVVYDYSFLRHCTKNFSDRVGQGSFGSVFKGLLPDSKPIAVKKLQGMKQGEKQFHTEVRALGKIHHNNLVHLIGFCLRGAERMLVYDFMVNGSLDAHLFKDEKILDWNTRFLIILGVAKGLQYLHDECQECIIHCDIKPENVLLDVNFSPKLADFGLAKLMERHFSRALTTMRGTAGYLAPEWIGGLPITPKADVYSYGMMLFEIISGRRNSELMESGAIRYFPVWAAIRISEGDISEILDPRLSAVNFQELERACKVACWCIQDNEAHRPTMRQIVQILQDIQDVSAAPVPPHHLKQHLRLHVAKPHLHTHTRRREAKTTIEGDVVAEKNFNNDTFSKRVMSRTLPSLVQDGPNFHRKKTVLKNATPSTGEAASTSITVAETFAQEIPSTSSCQDLGTKHAAFAVILTSRTNPLEGHRHAGCRSSRKAAMITILSGWAHRLGTQNRATPGHVRHTVARAPEPMPTVGHRSQPAPPPCARPCRCRPTPPRRCRMQPNERTYRRHFGRLRSPADTPRQTTGRVLSARAPPRASTSKPCTSYEPSRGANSRHHTTKGPSRCHPGGLLDGSIVGEGRDGEK

SEQ ID NO: 67306 - protein, 346 aa, Zea mays
  Coding DNA Sequence Number=SeqID_25527
  Gene Ontology: Mol. function=zinc ion binding; Cellular component =integral to membrane; Biological process=ubiquitin cycle
  Homolog annotation: Hit_ID=Q9SL78; Match level="QueryCoverage=51%, HitCoverage=47%, E-value=3e-27, Identity=37%"; Hit description =Putative RING-H2 finger protein ATL2D precursor
  Pfam annotation: Domain name=PHD; Domain location=61-106; Score=1.1; E_value=0.045; Accession=PF00628.19; Description=PHD-finger
  Pfam annotation: Domain name=zf-C3HC4; Domain location=62-103; Score =35.8; E_value=1.5e-07; Accession=PF00097.15; Description=Zinc finger, C3HC4 type (RING finger)
  Pfam module annotation: Pfam domain module=PHD::zf-C3HC4; Domain location=61-106::62-103
  Subcellular localization annotation: CTP_CleavageSite=57; ConfidenceScore=5.62e-01
MIFSSTFLVLMYAKFCQPSGSSSTNGAAAAAVCSVGVPKQVIQSLPFFRFATLRGARQGMECSVCLARFDDADLLRLLPRCRHAFHLHCVDRWLQSNASCPLCRTSVDADHATLGLKYPSSARIVFGGDALSSGRFDDAAGAGTGSGRDLLDIFVERVPGPYIKKTISSSPPPPGLDRHKHRIIVSDVLFRSRWSELNSADLIALDTEMLRSVSSGRFVFPPEYNNEMIAAAAAEEEEEEDDGIMPTAMGRKRLLEPVDDVVDDDLLGDGCRSGFAVSASASAARMISSGVRSMSEIVSLSRERLSEEDNRRWLTIARRTARWFAAGRASRGNEEEHRAVHVVDDV

SEQ ID NO: 67307 - protein, 187 aa, Zea mays
  Coding DNA Sequence Number=SeqID_25528
MFGPRECVTPYVICGVEYWIALSLQITGSCGGELKSSYRSKGLPLIFYRLCFQKIQIYAPSGCAQWDFSNSKLSDERTPPPSPGSLSFVCIDDFMRLSTGERAYLRGIDRVILDGSDESEEEEHDDGYDGGDEGDVVGKVGSCGSKGKDGDSNNNKGGRDGGSSDSNNGDCGGGKVAAVTASMAWQP

SEQ ID NO: 67308 - protein, 70 aa, Zea mays
  Coding DNA Sequence Number=SeqID_25529
MEESVVVVVEGEEEVTPSHIYRRGLHDKGGLHDKDSVTNIGEKGGAAPQDQERIWSPLNYLSIDGYKLYL

SEQ ID NO: 67309 - protein, 117 aa, Zea mays
  Coding DNA Sequence Number=SeqID_25530
  Subcellular localization annotation: CTP_CleavageSite=37; ConfidenceScore=5.14e-01
MSGAPEDSNSNSPPSGISRGHFAIIHRTVRCTPDSVRCSKGGRPHELASLGFSLQPLRYNSPDCPVCTGTVRCICGATATSRANGYLQRILLARQRRALACTPMLLTDTLQYMSVRH

SEQ ID NO: 67310 - protein, 102 aa, Zea mays
  Coding DNA Sequence Number=SeqID_25531
MVELQKLESMQWTIHQIAILSFQKANQSGIDNNLDRAKLGKLGDLRNSWNMLSKQYKEEYEKCIEESKSLDYDKLYKGLEVLADLDKHANSRVIIPLIGSPL

SEQ ID NO: 67311 - protein, 96 aa, Zea mays
  Coding DNA Sequence Number=SeqID_25532
  Homolog annotation: Hit_ID=Q1SPG5; Match level="QueryCoverage=55%, HitCoverage=20%, E-value=4e-10, Identity=79%"; Hit description=CCT
NLGANTPRPAANVCVTISDLKTEERKQKLSRYRKKKIKRNFGRKIKEGSGRQPAKSAREICQDRRMRPAEAKQVDPSFCPMYPHGLQHKIVAKGSQ

SEQ ID NO: 67312 - protein, 94 aa, Zea mays
  Coding DNA Sequence Number=SeqID_25533
MEAVAVLLLDPVEAIEGRGARVATDAGASRAGCFHEGAPSDAEVKASEAGGRWRRRRAGIGDMDIDADFLKVTYRGVNRRNQKFINLSAHYKPG

SEQ ID NO: 67313 - protein, 349 aa, Zea mays
  Coding DNA Sequence Number=SeqID_25534
  Gene Ontology: Mol. function=3-oxoacyl-[acyl-carrier-protein] reductase activity; Cellular component=chloroplast; Biological process=fatty acid biosynthetic process
  Homolog annotation: Hit_ID=P28643; Match level="QueryCoverage=90%, HitCoverage=87%, E-value=9e-88, Identity=55%"; Hit description=3 -oxoacyl-[acyl-carrier-protein] reductase, chloroplast precursor
  Pfam annotation: Domain name=AdoHcyase_NAD; Domain location=45-198; Score=-36.0; E_value=0.056; Accession=PF00670.12; Description=S -adenosyl-L-homocysteine hydrolase, NAD binding domain
  Pfam annotation: Domain name=KR; Domain location=70-244; Score=21.8; E_value=1.3e-08; Accession=PF08659.1; Description=KR domain
  Pfam annotation: Domain name=adh_short; Domain location=70-227; Score= 142.5; E_value=1.2e-39; Accession=PF00106.15; Description=short chain dehydrogenase
  Pfam module annotation: Pfam domain module=AdoHcyase_NAD::KR::adh _short; Domain location=45-198::70-244::70-227
  Subcellular localization annotation: CTP_CleavageSite=57; ConfidenceScore=5.61e-01
MAAATAAAAALASPAGLSTSLARRGLVSFAPALRPGPDRSSRAVALLGVRTHVTAVDQAIVKGDTKLEGPVVVVTGASRGIGKATALALGKAGCKVLVNYARSSKEAEEVSKEIEASGGQAITFGGDVSKEADVESMIKVAVDTWGTIDVLVNNAGITRDTLLMRMKKSQWQDVIDLNLTGVFLCTQGRIINIASVVGLTGNAGQANYAAAKAGVIGFTKTVAREYASRNINANVIAPGFIASDMTAELGEELEKKILSTIPLALRKARFESETSVEVGDGKRLAQRGKNRDIVPLHHSSGTNWCTLHKFLGRYGRPEDVAGLVEFLALSPAASYITGQVLTIDGGMVM

SEQ ID NO: 67314 - protein, 562 aa, Zea mays
  Coding DNA Sequence Number=SeqID_25535
  Gene Ontology: Mol. function=prolyl aminopeptidase activity; Cellular component=intracellular; Biological process=protein metabolic process
  Homolog annotation: Hit_ID=Q6K669; Match level="QueryCoverage=97%, HitCoverage=86%, E-value=1e-176, Identity=62%"; Hit description =Leucine aminopeptidase 2, chloroplast precursor
  Pfam annotation: Domain name=Peptidase_M17; Domain location=217-554; Score=572.2; E_value=5.2e-169; Accession=PF00883.11; Description =Cytosol aminopeptidase family, catalytic domain
  Pfam annotation: Domain name=Peptidase_M17_N; Domain location=44-184; Score=59.6; E_value=1.1e-14; Accession=PF02789.7; Description=Cytosol aminopeptidase family, N-terminal domain
  Pfam module annotation: Pfam domain module=Peptidase_M17::Peptidase _M17_N; Domain location=217-554::44-184
MGDAATAAAATLGLTWPNAAVELPQISFAAKDSEFSDWDGDILAVAVTDKDVQVQPHVSGSEFENAVLRRLDVQLGGLLRAAAAEEEFAGRPGQSVVLRVRGQRFKRVALVGFAARDRDRDAGCLHGLGESVASVARAARATSAAILVADPAVVRPESRLNAAAAIASGTVLGLYEDNRYKSEWEKVHLKQVDLIGLGSGPELDQKLRHANRLSSGVMLARDLVNSPANVLTPGALAEAAAKIASTYSDVFTATILDAAKCRELKMGSYLAVAAASETNPPYFIHLCYKPRGGDVRRKLALVGKGITFDSGGYNIKAVPVATIELMKKDMGGAAAVFGAAEVLGQIKPPGVEVHFISAASENMISGSGMRPGDIVTASNGKTIEVDNTDAEGRLTLADALVYACNQGVDKIIDLATLTGAIRVALGPSIAGNMTILDHRCSTPGPWPPLANNSTRILTPSDELAEEFAAAYEVSGEKFWRLPMEESYWESMESSIADMLCAGPLQPQAGAITAALFLKHFVDDKVQWMHIDIAGTVWSNKKRAGTGFGVTTLVEWVLSNSSS

SEQ ID NO: 67315 - protein, 79 aa, Zea mays
  Coding DNA Sequence Number=SeqID_25536
MEIECFRFQPSTSTSFHRRRRRKNEARLMAKWIQIQVGLALTWALWVMLDYGPTEPRHMCVSEARILRSGDEMHRPDKE

SEQ ID NO: 67316 - protein, 224 aa, Zea mays
  Coding DNA Sequence Number=SeqID_25537
  Gene Ontology: Cellular component=integral to membrane
  Homolog annotation: Hit_ID=Q2QLQ4; Match level="QueryCoverage=84%, HitCoverage=83%, E-value=8e-23, Identity=65%"; Hit description=Erg28 like protein, expressed
  Pfam annotation: Domain name=Erg28; Domain location=10-190; Score =127.8; E_value=3e-35; Accession=PF03694.4; Description=Erg28 like protein
MAAEGKRKGVPALGWWLMLVGSLRLASVWFGFFDIWALRVAVFSQTERSICVGYGITDLMPPGHGSSLICAAHFFMKIGRSNKEAPVSPSRGIHEFELDKSVTGAIQDDKIKIALISALTDVHGRTFGVWTLLTCTLCFLCALNLENRPLYLATFLSFIYALGHFLTEYLIYHTMAAANLSTVGFFAGLSFKPFQDLISTLLLHLLRCNAAFISSRLPAFNVAK

SEQ ID NO: 67317 - protein, 282 aa, Zea mays
  Coding DNA Sequence Number=SeqID_25538
  Gene Ontology: Mol. function=hydrolase activity; Cellular component =peroxisome; Biological process=aromatic compound metabolic process
  Homolog annotation: Hit_ID=Q2QLM4; Match level="QueryCoverage=93%, HitCoverage=95%, E-value=1e-108, Identity=62%"; Hit description =Hydrolase, alpha/beta fold family protein, expressed
  Pfam annotation: Domain name=Abhydrolase_1; Domain location=25-270; Score=17.6; E_value=0.00034; Accession=PF00561.10; Description =alphabeta hydrolase fold
RAWTRERCGTGTRTSNGVSIHVAERGPEDGPAVLIIHGFPELWLSWRHQMAALGRPRVFVVGHDWGAQVAWHLCLFRPDRVRAAAVLGIPYYARQAHPIMEVFAAFGDGFYINQFQEPGRAEAAFAQYDVATVLKKFYSIEIDELTAPPGVEIIDFLEASPSPLPWLSEEELGQYAEKFRKSGFTGPLNYYRMWETNWRLLAPWNEAKITVPVKFIAGDKDIGVQSFGVEKYIKSGEFKSTVPDLEVAVIEGHHFLQQEQAERVNSEIISYLVRFTSQEASS

SEQ ID NO: 67318 - protein, 123 aa, Zea mays
  Coding DNA Sequence Number=SeqID_25539
MASGLRSGEAKPRRFDLTMSRRTRRPAAATVERLGFLQPVELIEDEAVDGAATGGTTEGNTPAAGVREFAQLQGAAAGEATRRAGQVPAGRRVIGMVRRYVKVRSIKPKRASPSAEKCASPVC

SEQ ID NO: 67319 - protein, 797 aa, Zea mays
  Coding DNA Sequence Number=SeqID_25540
  Gene Ontology: Mol. function=protein serine/threonine kinase activity; Cellular component=integral to membrane; Biological process=protein amino acid phosphorylation
  Homolog annotation: Hit_ID=Q2QLQ5; Match level="QueryCoverage=94%, HitCoverage=85%, E-value=0.0, Identity=61%"; Hit description=Leucine Rich Repeat family protein, expressed
  Pfam annotation: Domain name=LRRNT_2; Domain location=65-106; Score =31.4; E_value=3.2e-06; Accession=PF08263.3; Description=Leucine rich repeat N-terminal domain
  Pfam annotation: Domain name=LRR_1; Domain location=135-157; Score =2.4; E_value=1e+02; Accession=PF00560.23; Description=Leucine Rich Repeat
  Pfam annotation: Domain name=LRR_1; Domain location=159-181; Score =12.1; E_value=1.5; Accession=PF00560.23; Description=Leucine Rich Repeat
  Pfam annotation: Domain name=LRR_1; Domain location=183-203; Score =11.7; E_value=1.8; Accession=PF00560.23; Description=Leucine Rich Repeat
  Pfam annotation: Domain name=LRR_1; Domain location=217-239; Score =17.1; E_value=0.063; Accession=PF00560.23; Description=Leucine Rich Repeat
  Pfam annotation: Domain name=LRR_1; Domain location=241-263; Score =15.5; E_value=0.19; Accession=PF00560.23; Description=Leucine Rich Repeat
  Pfam annotation: Domain name=LRR_1; Domain location=265-287; Score =10.9; E_value=2.6; Accession=PF00560.23; Description=Leucine Rich Repeat
  Pfam annotation: Domain name=LRR_1; Domain location=289-311; Score =13.1; E_value=1; Accession=PF00560.23; Description=Leucine Rich Repeat
  Pfam annotation: Domain name=LRR_1; Domain location=313-334; Score =6.5; E_value=17; Accession=PF00560.23; Description=Leucine Rich Repeat
  Pfam annotation: Domain name=LRR_1; Domain location=337-359; Score =2.6; E_value=95; Accession=PF00560.23; Description=Leucine Rich Repeat
  Pfam annotation: Domain name=LRR_1; Domain location=361-383; Score =7.0; E_value=14; Accession=PF00560.23; Description=Leucine Rich Repeat
  Pfam annotation: Domain name=LRR_1; Domain location=385-407; Score =5.4; E_value=28; Accession=PF00560.23; Description=Leucine Rich Repeat
  Pfam annotation: Domain name=LRR_1; Domain location=409-431; Score =10.6; E_value=3; Accession=PF00560.23; Description=Leucine Rich Repeat
  Pfam annotation: Domain name=LRR_1; Domain location=433-455; Score =11.0; E_value=2.5; Accession=PF00560.23; Description=Leucine Rich Repeat
  Pfam annotation: Domain name=LRR_1; Domain location=457-479; Score =11.4; E_value=2.1; Accession=PF00560.23; Description=Leucine Rich Repeat
  Pfam annotation: Domain name=Pkinase; Domain location=593-797; Score =5.9; E_value=6.5e-09; Accession=PF00069.15; Description=Protein kinase domain
  Pfam annotation: Domain name=Pkinase_Tyr; Domain location=593-797; Score=-71.5; E_value=4.4e-08; Accession=PF07714.7; Description =Protein tyrosine kinase
  Pfam module annotation: Pfam domain module=LRRNT_2::LRR_1::LRR_1::LRR_ 1::LRR_1::LRR_1::LRR_1::LRR_1::LRR_1::LRR_1::LRR_1::LRR_1::LRR_1: LRR_ 1::LRR_1::Pkinase::Pkinase_Tyr; Domain
  Pfam module annotation: Domain location=183-203::217-239::241 -263::265-287::289-311::313-334::337-359::361-383::385-407::409 -431::433-455::457-479::593-797::593-797
MAVTGDNASATRLAVELGRGGLLGGYGAMVSTLCSPPPLPCFLLFAIVLSFASGDDGGRAAALELDTQAAYLAKMKEEFPGPGMSRWWDFTSPAPDYCSFRGVACDPSGNVTGIDVTSWRLVGRLPPGVCAALPALRELRMACNDVRGGFPLGVLNCTSLEVLNLSFSGVSGAVPRDLSPLRALRVLDLSNNLFTGAFPTGNFLTGRIPESLARLTNLRFLELYYNELEGGIPAELANLTQLTDIDLSENRLTGPIPESLCALRGLRVLQLYTNRLTGPIPAVLGNSTQLRILSLYRNQLTGGIPADLGRYSDLNVIEVSENQLTGPLPPYACANGHLQYILVLSNLLTGPIPPAYAECTPLLRFRVSNNHLEGDVPPGIFGLPHASILDLSYNHFTGAVAATVAGAANLTSLFASNNRMSGELPPEIAGAWGLVKVDLSNNLIAGPIPESVGLLSRLNQLSLQGNLLNGSIPETLAGLRTLNLIKEGLLESVAGNPGLCVAFRLNLTDPALPLCPRPSLRRGLAGDVWVVGVCALACAVATLALARRWVLRARRYAGQDKGLASSSPASSESYDVTSFHKLSFDQHEILEALIDKNIVGHGGSGTVYKIELSGGELVAVKKLWVSSKRRLRGPSSKQVDWAAVTSTTTNSGDSDGGWLGDRELRTEVETLGSIRHKNIVKLYCCYSGADCNLLVYEYMPNGNLWEALHGCYLLLDWPTRHRVALGVAQGLAYLHHDLLFPIVHRDIKSSNILLDADFEPKVADFGIAKVLQARGRGGADRDASTTTIAGTYGYLAP

SEQ ID NO: 67320 - protein, 299 aa, Zea mays
  Coding DNA Sequence Number=SeqID_25541
  Gene Ontology: Cellular component=integral to membrane
  Homolog annotation: Hit_ID=Q1HRC2; Match level="QueryCoverage=79%, HitCoverage=98%, E-value=2e-24, Identity=34%"; Hit description =Conserved membrane protein
MYMTIVERVYESSRHKGKKVAAPRGDGRRIGLAAAQRRRRYDGGYGMTVFHFLNCAFLTFGPHVVYYSATPLSEYDTIGTSIKAAAVYLGTALVKLVCLATLLKVPENDSFDPYQELMKVFIGFIDVAGLYFALTQLTHRNISQNHKFQAVGLGWAFADSVLHRLAPLWIGARGLEFTWEYIFQGLEANANLVMTLSLAALGSLMWLRKNKPRTLVPIIYACALLLATMPSITSRIVHWAQHAQTLQLLEEVIGVADTKGGWLRALLLPCYGFHQLAAVLGLSETDNILLRTSVVTCEL

SEQ ID NO: 67321 - protein, 76 aa, Zea mays
  Coding DNA Sequence Number=SeqID_25542
GEQDAKVESAEEEARTSIPQDAELPALPNKDLNRRRLNLSEISLKDVAANAVPYEEGDRAAAINGARLSTRTLNLD

SEQ ID NO: 67322 - protein, 42 aa, Zea mays
  Coding DNA Sequence Number=SeqID_25543
MPQARKNIAKLTAVTGPPCFADVQDSEEHRQIVAHSYRSWTS

SEQ ID NO: 67323 - protein, 48 aa, Zea mays
  Coding DNA Sequence Number=SeqID_25544
MRERASADDGSGATDADEDKQNALEFDVAHHGVAKRRSSTLPIRCIVF

SEQ ID NO: 67324 - protein, 69 aa, Zea mays
  Coding DNA Sequence Number=SeqID_25545
MGVDLLPRIDDSRTLAMATATAWHAVNGDVLGPGADDGDFVTVDAQGGSGGGNAGNMEDFEEFQDYDEF

SEQ ID NO: 67325 - protein, 83 aa, Zea mays
  Coding DNA Sequence Number=SeqID_25546
MAEWLIAPVLKTGIVLGTIEGSRMNSPGPIAAQSGLATGGLFLVTRLTELGEIGDSPARVATRGWERVLRLRNLETKDGAQLI

SEQ ID NO: 67326 - protein, 92 aa, Zea mays
  Coding DNA Sequence Number=SeqID_25547
MVALRTIDPYSYLDLRVFSKVGHLDQLYDGPYQVHCTSVQSPGETASSPARGAGAPTPGAGAAGLFPLASREVESERSPSLAPQPEMPPTPP

SEQ ID NO: 67327 - protein, 102 aa, Zea mays
  Coding DNA Sequence Number=SeqID_25548
  Homolog annotation: Hit_ID=Q1HTV4; Match level="QueryCoverage=69%, HitCoverage=29%, E-value=7e-17, Identity=61%"; Hit description=Green ripe-like 1
  Pfam annotation: Domain name=DUF778; Domain location=20-93; Score= -74.8; E_value=0.00037; Accession=PF05608.2; Description=Protein of unknown function (DUF778)
MVVNGGQGIVLALPRIRSSDIMGRCSAIGHETLPAQVLQPVHLQLHSFVASYLNRLAYNGSMEWNVLNVAALVWFHGRWVDRMSTILAIEQIIRNPELSITI

SEQ ID NO: 67328 - protein, 274 aa, Zea mays
  Coding DNA Sequence Number=SeqID_25549
MDPSLAGDQGEVAAVGSQLETAAAIGARGRALCVRGLVSAEQGARRPERKQREEEQRLLWRKQGEEDGGVGFLRRGMTAKFTTSADAPASVRLSAAAQAAAIQPSSPRFFCSSLAGTNPTSPASPLPGAGREQNGVGEAGVREHGEGEREDEAGGEQREGAQSHARDRRRDADQLLCAQRREVARLQVHRRRRDAACVGRPGWFEEQRMNSMAARAAALAFAATATDLDRGWGVAAPGREGMSLPGGDGGWCGWRLGASVSAGGCGVERKETLL

SEQ ID NO: 67329 - protein, 111 aa, Zea mays
  Coding DNA Sequence Number=SeqID_25550
  Gene Ontology: Mol. function=receptor activity
  Homolog annotation: Hit_ID=Q5VRG4; Match level="QueryCoverage=79%, HitCoverage=14%, E-value=1e-12, Identity=55%"; Hit description =Receptor-like protein kinase-like
MARSAPTFVAVFLLVLVLLTMDAAQGQQPFPLSTDPSDADALHAVFRQWRLEGGAAMEDPCRKGVWSESSGINASVECNCLPSRKCEWAREHLGDPAGAIQFDRTGLSGFK

SEQ ID NO: 67330 - protein, 314 aa, Zea mays
  Coding DNA Sequence Number=SeqID_25551
  Gene Ontology: Mol. function=phospholipase A1 activity; Biological process=lipid metabolic process
  Homolog annotation: Hit_ID=Q6BTJ4; Match level="QueryCoverage=74%, HitCoverage=27%, E-value=1e-09, Identity=29%"; Hit description =Similar to CA1621|CaIFF6 Candida albicans CaIFF6 unknown function
MSGASAKREIETGGDKSASSRRTHSRESAHKHKEESSSSIKSQRRGDKKKKMKKVVYYETDSSSPFTSAILAFPNEAPPRPTPGLGPRLGLGRRTPLRPTLGLGLSLGSGRRRTPLCPTPGLGLSLGSGRRRTPLRPTPGIGLSLGSKRRRTPPPPTLGLGLGLSPGRRRTPLRPTPGLGLGLSPGRRRTLLRPTPGLGLGLSPGRRRTPLRPTPGLELRLSSGRRRTPLRPTPGLGLSPSLSRRSPPHPTQGLGLDLGLGRQTRPRPRRSLHLAQPRAQTDHVTRGAIITLPQADSGYREQDRRPIWLAPPNK

SEQ ID NO: 67331 - protein, 700 aa, Zea mays
  Coding DNA Sequence Number=SeqID_25552
  Gene Ontology: Mol. function=binding; Cellular component=nucleus; Biological process=metabolic process
  Homolog annotation: Hit_ID=Q2QTL4; Match level="QueryCoverage=95%, HitCoverage=89%, E-value=0.0, Identity=55%"; Hit description =Pentatricopeptide, putative, expressed
  Pfam annotation: Domain name=PPR; Domain location=112-146; Score =27.5; E_value=4.7e-05; Accession=PF01535.11; Description=PPR repeat
  Pfam annotation: Domain name=PPR; Domain location=175-209; Score =24.5; E_value=0.00039; Accession=PF01535.11; Description=PPR repeat
  Pfam annotation: Domain name=PPR; Domain location=236-270; Score =36.9; E_value=7.2e-08; Accession=PF01535.11; Description=PPR repeat
  Pfam annotation: Domain name=PPR; Domain location=298-332; Score =31.5; E_value=3e-06; Accession=PF01535.11; Description=PPR repeat
  Pfam annotation: Domain name=PPR; Domain location=360-394; Score =33.1; E_value=9.8e-07; Accession=PF01535.11; Description=PPR repeat
  Pfam annotation: Domain name=PPR; Domain location=422-456; Score =23.8; E_value=0.00062; Accession=PF01535.11; Description=PPR repeat
  Pfam annotation: Domain name=PPR; Domain location=50-84; Score=33.2; E_value=8.9e-07; Accession=PF01535.11; Description=PPR repeat
  Pfam annotation: Domain name=PPR; Domain location=523-557; Score =54.6; E_value=3.4e-13; Accession=PF01535.11; Description=PPR repeat
  Pfam annotation: Domain name=PPR; Domain location=558-592; Score =13.3; E_value=0.2; Accession=PF01535.11; Description=PPR repeat
  Pfam annotation: Domain name=PPR; Domain location=594-627; Score=7.1; E_value=1.1; Accession=PF01535.11; Description=PPR repeat
  Pfam module annotation: Pfam domain module=PPR::PPR::PPR::PPR::PPR::PP R::PPR::PPR::PPR::PPR; Domain location=112-146::175-209::236-270::298- 332::360-394::422-456::50-84::523-557::558-592::594-627
  Subcellular localization annotation: CTP_CleavageSite=30; ConfidenceScore=5.54e-01
MAAAAATKVTAAAAASAVFRSNKELTRLARSGQLAAARRLFDAMPLRNTVTYNAMLSALARHGRIDEARALFDGMPGRNTVSWNAMIAALSDHGRVADARSLFDRMPVRDEFSWTVMVSCYARGGDLELARDVLDRMPGDKCTACYNAMISGYAKNGRFDDAMKLLREMPAPDLVSWNSALAGLTQSGEMVRAVQFFDEMVKDMTSWNLMLAGFVRTGDLNAASSFFAKIESPNVISWVTLLNGYCRAGRIADARDLFDRMPERNVVAWNVMLDGYVHLSPIEEACKLFDEMPIKNSISWTTIISGLARAGKLQEAKDLLDKMSFNCVAAKTALMHGYLQRNMADDARRIFDGMEVHDTVCWNTMISGYVQCGILEEAMLLFQRMPNKDMVSWNTMIAGYAQDGQMHKAIGIFRRMNRRNTVSWNSVISGFVQNDRFVDALHHFMLMRRGTNRADWSTYASCLRACANLAVLHVGRQLHNLLVRSGHINDSFAGNALISTYAKCGRILEAKQIFDEMVYKDIVSWNALIDGYASNGQGTEAIAVFREMEANGVRPDEVTFVGILSACSHAGLIDEGLFFFYSMTKEYLLKPVAEHYACMVDLLGRAGKLNEAFELVQGMQIQPNAGVWGALLGACHMHKNHELAQLAAERLSELEPRKASNYVLLSNISAEAGKWDESEKARASIKEKGVNKPPGLAGST

SEQ ID NO: 67332 - protein, 84 aa, Zea mays
  Coding DNA Sequence Number=SeqID_25553
  Gene Ontology: Mol. function=mRNA (guanine-N7-)-methyltransferase activity; Cellular component=nucleus; Biological process=mRNA processing
  Homolog annotation: Hit_ID=Q6K833; Match level="QueryCoverage=63%, HitCoverage=15%, E-value=1e-19, Identity=81%"; Hit description=mRNA cap guanine-N7 methyltransferase 2 (EC 2.1.1.56) (mRNA (guanine- N(7)-)-methyltransferase 2)
MPKVCDLYCDGGMDTDKWCDAQVGHYIIIDASALGVNYARELWENRRKPFTAEFIELDPSDVDSPSMPSNTNKCAKLLARSLSS

SEQ ID NO: 67333 - protein, 46 aa, Zea mays
  Coding DNA Sequence Number=SeqID_25554
MNCLLGTIGFFYPDYPRGVYETKKRKKQLTKAMPETMELPVIEETT

SEQ ID NO: 67334 - protein, 386 aa, Zea mays
  Coding DNA Sequence Number=SeqID_25555
  Gene Ontology: Mol. function=DNA binding; Cellular component =mitochondrion; Biological process=DNA integration
  Homolog annotation: Hit_ID=UPI00004C1731; Match level="QueryCoverage =99%, HitCoverage=29%, E-value=1e-151, Identity=68%"; Hit description= UPI00004C1731 related cluster
  Pfam annotation: Domain name=RnaseH; Domain location=1-123; Score= -15.2; E_value=0.0015; Accession=PF00075.14; Description=RNase H
  Pfam annotation: Domain name=rve; Domain location=125-306; Score =56.1; E_value=1.1e-13; Accession=PF00665.16; Description=Integrase core domain
  Pfam module annotation: Pfam domain module=RnaseH::rve; Domain location=1-123::125-306
MYFDGSLMKTGASAGLLFISPLGKHLRYVLRLHFPVSNNVVEYEALVNGLRITIELGVRRLDARGDSQLVIDQVMKNSHCRDRKMEAYCDEVRRLEDEFYGLELNHIARRYNETADELAKIASGRTTVPPDVFSRDIHQPFVKTDDTSKPEEASAQPEVSSAAKEGTRGLLAPAGRHRQILQVDRGPTLTSIRSEQAVAFFTNIIHRFGVPNSIITDNGTQFTGKKFLDFCEDHHIRVDWAAVAHPMTNGQVERANGMILQGLKLRIYNDLNKFYKRWMKELPSVVWSLRTTPSQATGFSPFFLVYGAEAILPTDLEYGSPRTKAYDDRSNQTSREDSLDQLEEARDMALLHSARYQQSLRRYHARGVRPRGFQVGDLILRLRQDA

SEQ ID NO: 67335 - protein, 40 aa, Zea mays
  Coding DNA Sequence Number=SeqID_25556
MAGGVLDDLGHLPKVKMTAELVIHGEGDPQPLRRSERIVR

SEQ ID NO: 67336 - protein, 96 aa, Zea mays
  Coding DNA Sequence Number=SeqID_25557
  Gene Ontology: Mol. function=membrane alanyl aminopeptidase activity; Biological process=proteolysis
  Homolog annotation: Hit_ID=Q84TA3; Match level="QueryCoverage=54%, HitCoverage=8%, E-value=1e-15, Identity=77%"; Hit description =Putative leukotriene A-4 hydrolase
  Pfam annotation: Domain name=Leuk-A4-hydro_C; Domain location=1-77; Score=-42.8; E_value=0.015; Accession=PF09127.1; Description =Leukotriene A4 hydrolase, C-terminal
MENKYFTPIKDDLLIVGYYNVLLATSTRSVGRMKYLCPLYSALAKCSSEEKMLAQRIFSNAQEFYHPIAWSVVEIILSKHIKASQDSCLDQLQQIS

SEQ ID NO: 67337 - protein, 100 aa, Zea mays
  Coding DNA Sequence Number=SeqID_25558
MLLAQHGGHYHHADAIFYHVWTLTNFKVAILLARILGIVWLQHLLAKIFGTGDQQHDDESEATTTHGDESHTTTTHGDESQTTTMYGDESQTMTTYGDES

SEQ ID NO: 67338 - protein, 86 aa, Zea mays
  Coding DNA Sequence Number=SeqID_25559
MGCSQASEARTTIMNCVFSCQGPQPYERQIPLFFMAMFFSTVRTGKVNELRNSWHCGWWPVKIALFMVARGAREGSNDSGGKWDKE

SEQ ID NO: 67339 - protein, 255 aa, Zea mays
  Coding DNA Sequence Number=SeqID_25560
  Homolog annotation: Hit_ID=Q1SD20; Match level="QueryCoverage=26%, HitCoverage=22%, E-value=3e-08, Identity=49%"; Hit description=TMS membrane protein/tumour differentially expressed protein
MACGMAARRLLGAGGGGSGDGGKRMKWRKEMVTGIKYLGTKIHGAELGAKIHDAELSATSARQVLVEQGQSILGLPPTVEQQHYLNNSLAARVHNLVLVIEGIREYITEKRIDSFTAAKQITDDDELCLLLPLSGPQPYERQILVCGYLPPAGEPVCVLFFMAMFFSTVRTGKVNELRNLWHCGWWPVKIALFMDISCSSAHKFYEIYHKAELQIVPNQLPRKVPRGVWDLYLLPTLALRGWIKIHDCQAQTLLA

SEQ ID NO: 67340 - protein, 178 aa, Zea mays
  Coding DNA Sequence Number=SeqID_25561
  Subcellular localization annotation: CTP_CleavageSite=47; ConfidenceScore=5.05e-01
MVHDAPALDFADDDGQSQIAVAPLPHAAHRSPSTPFFDSSEPHARTNSAKVGEASLPRLTRCCPLSTKCGGDRCLVKNSGRTGGQLQRQTDVPALSRSRESLGHNTKGAVDGESGFTCGRSLFPLRRRQSWGLYWCEILRTGGKGGRRLGSYQSLGFVWAWRKNRAELWHVRSSSRCD

SEQ ID NO: 67341 - protein, 179 aa, Zea mays
  Coding DNA Sequence Number=SeqID_25562
  Gene Ontology: Mol. function=oxidoreductase activity
  Homolog annotation: Hit_ID=Q2R0H4; Match level="QueryCoverage=74%, HitCoverage=62%, E-value=5e-23, Identity=83%"; Hit description =Oxidoreductase, aldo/keto reductase family protein, expressed
  Subcellular localization annotation: CTP_CleavageSite=65; ConfidenceScore=5.37e-01
ALAPDFAPPQTQLPPAPSAAPAPASAHLLPRPPSQPRIQILVKYLVPQRSKTHGRSEELLGRWLRARRAPQDSVVVTTKGSNNPQILPVLQLLFSKDSQLLPKLLTLQNLYNLLCQNFDSGLAECCHHERISLLAYSPMAMGILSGKYHLSDNCGPLDARMNLFKGRYSKGESRYKMHL

SEQ ID NO: 67342 - protein, 126 aa, Zea mays
  Coding DNA Sequence Number=SeqID_25563
  Gene Ontology: Mol. function=protein binding
  Homolog annotation: Hit_ID=Q2QYP1; Match level="QueryCoverage=66%, HitCoverage=30%, E-value=7e-28, Identity=78%"; Hit description =BTB/POZ domain containing protein, expressed
MYEYPLGMEYPSGRGMSLELYPSTGWDLVPLPSLSTTPFLRRACEARLAVGVAPRNMLRTLEVAELSSSAALMERAMGAVVEHAEEVVFSAEYERFAARNAGLCVEITRALLARMPTAARSDGARA

SEQ ID NO: 67343 - protein, 82 aa, Zea mays
  Coding DNA Sequence Number=SeqID_25564
MQWQKQNACWKSKRKPIPGSCLSDVDERVLEVQAQNACWKSKRKSMQWQKQNESMSCSSCSPCFTTYAFTYCAVSSLETEAS

SEQ ID NO: 67344 - protein, 82 aa, Zea mays
  Coding DNA Sequence Number=SeqID_25565
  Subcellular localization annotation: CTP_CleavageSite=64; ConfidenceScore=5.40e-01
MAASLSVLPVAHVASVVTGRWALAFRSVPNPASQQPPLRTLFRDHGVGEVPPSWAGVEAPIPVLGASPTHRMDCVVPAGGTG

SEQ ID NO: 67345 - protein, 91 aa, Zea mays
  Coding DNA Sequence Number=SeqID_25566
MVVMKNANINTSKIGTIEVVCTSVNSRSCLHHLASKIIAAREMHGRFFERRHTALHIAIGDWALKEDVVVPPKVPEKIMSQASNPSKEVMT

SEQ ID NO: 67346 - protein, 45 aa, Zea mays
  Coding DNA Sequence Number=SeqID_25567
MVGTDHVRDERRACRGQGHSRGRDRRWRAFLQFVSGTKEQSNREF

SEQ ID NO: 67347 - protein, 112 aa, Zea mays
  Coding DNA Sequence Number=SeqID_25568
METSKGSIGDHGSNLDRARLPWTSWRELRPGSGEKAELGPGARREEAPWRADAGARGPRLLIRMAAREELDGHRVGRGSLVTGGPVEDNAQEYQGKRTARRLKNLKEKERHG

SEQ ID NO: 67348 - protein, 231 aa, Zea mays
  Coding DNA Sequence Number=SeqID_25569
  Gene Ontology: Mol. function=RNA-directed DNA polymerase activity; Cellular component=mitochondrion; Biological process=RNA-dependent DNA replication
  Homolog annotation: Hit_ID=UPI00004C1731; Match level="QueryCoverage =86%, HitCoverage=13%, E-value=1e-106, Identity=91%"; Hit description= UPI00004C1731 related cluster
  Pfam annotation: Domain name=rve; Domain location=67-226; Score =117.3; E_value=4.5e-32; Accession=PF00665.16; Description=Integrase core domain
MGSRLIETGRPRTCNISTKESYPSIEPKLGDWRGAPSRSSWIVRTCQGCQFYARQTHLPTQALQTIPITWPFAVWGLDLVGPLQKAPGGYMHLLVAIDKFSKWIEVRPLNSIRSEQEVVFFTNFIHRFGVPNSIITDNGTQFTGRKFLDFCEDHHIRVDWAAVAHPMTNGQVERANGMILQGLEPRIYNDLNKFGRRWMKELPSVVWSLRTTPSRAMGFTPFFLVYGAEAI

SEQ ID NO: 67349 - protein, 873 aa, Zea mays
  Coding DNA Sequence Number=SeqID_25570
  Homolog annotation: Hit_ID=Q38JB7; Match level="QueryCoverage=30%, HitCoverage=93%, E-value=1e-136, Identity=86%"; Hit description =Chloroplast lipocalin
  Pfam annotation: Domain name=AT_hook; Domain location=543-555; Score =15.8; E_value=0.042; Accession=PF02178.9; Description=AT hook motif
  Pfam annotation: Domain name=Lipocalin; Domain location=102-241; Score=-4.2; E_value=0.071; Accession=PF00061.13; Description =Lipocalin  cytosolic fatty-acid bind
  Pfam annotation: Domain name=Lipocalin_2; Domain location=96-239; Score=-22.3; E_value=9.8e-05; Accession=PF08212.2; Description =Lipocalin-like domain
  Pfam module annotation: Pfam domain module=AT_hook::Lipocalin::Lipocal in_2; Domain location=543-555::102-241::96-239
  Subcellular localization annotation: CTP_CleavageSite=48; ConfidenceScore=5.16e-01
MVLLLLGCSPASSRPDCSPASSSTLSLLVSAWQEKMQHRRTENGQAIPAETFARPGLCQIATVAAIDSASVPLKFDNPSDDVSTGMMMRGMTAKNFDPVRYSGRWFEGVYSFDEKARSIQVDTFCVHGGPDGYITGIRGRVQCLSEEDIASAETDLERQEMVRGKCFLRFPTLPFIPKEPYDVLATDYDNYAIVSGAKDTSFIQIYSRTPNPGPEFIDKYKSYVANFGYDPSKIKDTPQDCEYMSSDQIALMMSMPGMNEALTNQFPDLKLKAPVALNPFTSVFDTLKKLLELYFKTGNAKAAGFTPSHVHGSNRRRVGNLFVGNRTNEQVERKLTMAILCPERPAARRHQHHPQPVLEAITSTPARGREHVRSIGQLNGVPTVGWSPTLLELGRRHTRSQSRPGLHRYRGPPNTWPTSEEAWASILKATFPRVNCGLGSVPQFYLTLPPPSSLSLVFSLAAIRIPPQRPLSPSPSRRSIPPDWRVEGTVGSTGHDVPAVKFVYMQMAGSAGSTKLVKMASEGNKDVPHEALTVDHSSISGSKRKRGRPRKYEYPVNELPQKVQPIQSAPPLLHCTQDGSSLASHASGGGAHGNWSAQPRNSANASLQGNSGKDDFLGKHFVGKLTKKVPGFSLITVKVKDNQVLKGWVPDEINLRPITPKDDLAPELPMLRPSQVRKRASAIHMQPALPVPMHLENVTLAKPLQMRRPVEKTIAKHADAELVIPQSSVSAVPIKFVCPASVPCKQLANQNEFTGNKSVDEVQKDSESPNVTKESPVKAEKPNIALVDVVAKDSLGEGQQLNDQVTDVVRDFSGQTQNVDVTMSDEIKIASGARDKPNSANCEQQSSKEPSDITEQSEQLKTETDVQKGVDAS

SEQ ID NO: 67350 - protein, 80 aa, Zea mays
  Coding DNA Sequence Number=SeqID_25571
MDGAAALGGGGGGFAFLGRAMRERERERGVEGRSPPEKGKGKRGKDQGAQASSRVPYSRVTRTRFGPETIYRYGMYAKAK

SEQ ID NO: 67351 - protein, 110 aa, Zea mays
  Coding DNA Sequence Number=SeqID_25572
  Homolog annotation: Hit_ID=Q337Z8; Match level="QueryCoverage=44%, HitCoverage=46%, E-value=1e-14, Identity=67%"; Hit description =Expressed protein
  Pfam annotation: Domain name=DUF1677; Domain location=3-106; Score =41.3; E_value=3.3e-10; Accession=PF07911.4; Description=Protein of unknown function (DUF1677)
MEIELVKCECCGLKEDCTPHYIASVRSGFHGQWLCGLCCEAVRDEACRRKAHPVAGNVFTCGGVLPRWRVGRGGGLQQCASVLLPRRQRGPLAVAWRRRGWRAGCGGGLQ

SEQ ID NO: 67352 - protein, 181 aa, Zea mays
  Coding DNA Sequence Number=SeqID_25573
MSVEKCCRTVVCGELLPQQCLWRKKPTRVTSRGSCVSSGERWSWGAAELRTPDRSCSDDARDMVLESSGGQLEARREELEAHAHLTDKGVHADGDVVQRLVIEEAWPGCCQLFEWREKGAVTGVKMQGRGRVRGVQHGGRSGVEGANFLASGKLLDLSEQQLVDCERRGEQRARAVIRRPS

SEQ ID NO: 67353 - protein, 69 aa, Zea mays
  Coding DNA Sequence Number=SeqID_25574
  Subcellular localization annotation: CTP_CleavageSite=19; ConfidenceScore=5.11e-01
MASSGGAARLGMETKGNTRTAQAPSTSWTSIGSRRALLEVGGSARGVGEKQAGIHASFKKLGDISRLIK

SEQ ID NO: 67354 - protein, 139 aa, Zea mays
  Coding DNA Sequence Number=SeqID_25575
  Gene Ontology: Mol. function=hydrogen ion transporting ATP synthase activity, rotational mechanism; Cellular component=proton -transporting two-sector ATPase complex; Biological process =intracellular signaling cascade
  Homolog annotation: Hit_ID=Q10MX5; Match level="QueryCoverage=98%, HitCoverage=35%, E-value=2e-61, Identity=80%"; Hit description =Expressed protein
MKGKTVMFVGDSLGRNQWESLVCLLHAAALQSPTQLVSVDPLYTYKFLEYQVTVSFYRAPYLVDIDVVQGKQVLMLDDIYENAESWRDADVLSFNSGLWWTHTGSMQGWDYMGESGRYYEDMDRTVAFQRGAWSTEHWQ

SEQ ID NO: 67355 - protein, 274 aa, Zea mays
  Coding DNA Sequence Number=SeqID_25576
  Homolog annotation: Hit_ID=Q10MP8; Match level="QueryCoverage=85%, HitCoverage=40%, E-value=3e-92, Identity=66%"; Hit description =Transducin family protein, putative, expressed
MGRPSLNGKRLARVTRAWFDTLLHVHVVFAKVLDGNMLATAAGQLRTFDTSSNKKIKKLSGHFIGKRYIAIWKLDSGKTQSSNCILSMEQPAIFLDCKCSDEGEVHILAISKIGACYFWSANDVDDLRNKKPTKIILAESSVSTVHQAFSIFAAKLQGVDGPNSAHVLLAYGSVAKPSFDKLLVCYGTDINLGISQDGVLLPNTQSTMTNKGQSVKKQETVTALDRANAEDAVLPLPKLHTQENKRKHGVRKPSGDVKPEVHSDLTSHRYKIYS

SEQ ID NO: 67356 - protein, 247 aa, Zea mays
  Coding DNA Sequence Number=SeqID_25577
  Homolog annotation: Hit_ID=Q10MP5; Match level="QueryCoverage=44%, HitCoverage=65%, E-value=8e-41, Identity=76%"; Hit description=DnaJ, putative, expressed
  Pfam annotation: Domain name=DnaJ; Domain location=40-106; Score =111.9; E_value=1.9e-30; Accession=PF00226.21; Description=DnaJ domain
  Subcellular localization annotation: CTP_CleavageSite=19; ConfidenceScore=5.08e-01
RCCLAPAASSRVPGFACCCASSVMDGGSGNASSGGAAVCCYYALLGVRKSASATDIRTAYRRLAMKWHPDRWASDPGAAGEAKRRFQRIQEAYSVLSDKGKKAMYDAGLFDPLDDDDQDFSDFMQEMLVMMDNVKNEKPDTLEDLQKMLADIVNGDGGDGVGGRVPPAPPDVARRTRVAPHPQPQQALVDCVSYRPRRRNNCRSWPGAVSCMVYRVDRARGPVSCMVSLGRRRFQLQLPLRSTNAHL

SEQ ID NO: 67357 - protein, 98 aa, Zea mays
  Coding DNA Sequence Number=SeqID_25578
MADSTGTRRSLRAIRGAATDATRLYRRAAGPPLFPFPFALHATREIEHREANLGGIEVAAGFCFLAGVQLLEAAPEGGAWAEGLGAGLGRCWRLPGRR

SEQ ID NO: 67358 - protein, 67 aa, Zea mays
  Coding DNA Sequence Number=SeqID_25579
MTGEKQMFSSYVKNKDSHDTINIGDGVTPQNFHFEIYENFSKKITAKPLLNIDGLTDALNRGEIFSM

SEQ ID NO: 67359 - protein, 79 aa, Zea mays
  Coding DNA Sequence Number=SeqID_25580
MALLLGLALAFCLTVLSIQSSFYAALGRRLDLDADDVRDLAGFQSRVQQCVVHMDSPTDLGISDRLSFIAQNFCARCYL

SEQ ID NO: 67360 - protein, 45 aa, Zea mays
  Coding DNA Sequence Number=SeqID_25581
MRWPASMGQSLCVVAWLYSLGIDQVLVYHDLLGKLQHSHHAKANV

SEQ ID NO: 67361 - protein, 54 aa, Zea mays
  Coding DNA Sequence Number=SeqID_25582
MIQNNKHLISIVPDDFNDTDLKHRRVEDIDHGEARFCGGDPASASNSPMSDAPP

SEQ ID NO: 67362 - protein, 122 aa, Zea mays
  Coding DNA Sequence Number=SeqID_25583
MANSVMGATPARGHQRAQNAAGWPNAGAGHQRAHNAAGWPNGGADQLRRAITWTLGRLRGAWATSGTRGSLGSTVADSGCTRKTPGVTSDSPTVSRDADLLSRDDIGGIFPRYEFIVIPYNG

SEQ ID NO: 67363 - protein, 119 aa, Zea mays
  Coding DNA Sequence Number=SeqID_25584
MRGSLMLGAGFDHWGTEASVMAPIISLRHFGTAIVPRLSLRAEVLVWNSRWSLCDGHFQHSHSEDPREKPRIETLPVHLGSDQWGVAILGQKGNHGSWVKCATSAECYETDILRAPRGG

SEQ ID NO: 67364 - protein, 301 aa, Zea mays
  Coding DNA Sequence Number=SeqID_25585
  Gene Ontology: Mol. function=pyridoxal phosphate binding; Biological process=metabolic process
  Homolog annotation: Hit_ID=Q2QWM4; Match level="QueryCoverage=76%, HitCoverage=50%, E-value=1e-51, Identity=77%"; Hit description=Phage head-tail adaptor family protein, expressed
MPSLRAVMVHGGGEKDGGGSTDGVPPPCAHTLVSLLRARSQRSAKADEKVEWVRSQLVGSDAEFETPFGRRALLYADHTASGRSLRYIEDYIVKHVLPFLREHAHGGQLRGQQDDADGEEGGELHQASLADVVQVGAGADDGLVDLAALRRALGSPEYSSRPMLGSFSACSNVTGVLTDTRAIARLMHQHGAFTCFDFAASGPYVDIDMRSGEMDGYDAVFLSPHKFVGGPGTPGILLMNRALYRLAGMPPSTCGGGTVAYVNGFSEEVRPKPPNWASSYSTATVLICPCMQIPNWALPTI

SEQ ID NO: 67365 - protein, 67 aa, Zea mays
  Coding DNA Sequence Number=SeqID_25586
MGSRHSACSAEAGCRGSFVLLLLVTPLRGEVVMRMMVFDYDYGNDKWYSFHLEKVKKNFVEADLNEF

SEQ ID NO: 67366 - protein, 366 aa, Zea mays
  Coding DNA Sequence Number=SeqID_25587
  Gene Ontology: Mol. function=DNA binding; Cellular component=nucleus; Biological process=RNA-dependent DNA replication
  Homolog annotation: Hit_ID=Q9LGH0; Match level="QueryCoverage=68%, HitCoverage=80%, E-value=4e-38, Identity=32%"; Hit description=NAM -like protein-like
  Subcellular localization annotation: CTP_CleavageSite=47; ConfidenceScore=5.01e-01
MVFGGTRIPQLQMVGVGVPSGGVEPRGGGPPRPPMLARSRDDSDPLAASTFRCSGHLSPSMDFQAADNGYFSSPMVDDTNLEDLDNNNNAYADQQSQSMQVNRAVPSTRPNHKRSKNFSDHEDEVLVSAWLNISLDPVVGKDKKGGRYWSRICDYFHEHKTCSSKRTINSLNAPVAEACALYKSEDEHQKSFQFMHCWNKLRTQPKWLCKRNEMYAAKILNKRHKLNSNGDGSGWIPSEIGEGEVQGVEDNQLTRPIGKKQSKATLLQEKKKSVTITLENMWSQKQETDMEKELKKEERFSKAFALEQERVANEKELVEVRKQEVQLQKQRDEERIMTMDLSGLTEEQQTYYMKLRAKILDQLSDA

SEQ ID NO: 67367 - protein, 156 aa, Zea mays
  Coding DNA Sequence Number=SeqID_25588
PPAAEELTEAGTEERKQSPPPHQTPGAAPGPKTPPPWSWQPPVPVSPPSPAPAPPHGAEEQPKKRQKQPQPQETNATKRAEELGGGARGTKVVDKAARDEKRPKKDSQAGASPAVPSHAQTTETVRPEPARQLLVNAAAAVAVLAGVIAAVWRTLQ

SEQ ID NO: 67368 - protein, 315 aa, Zea mays
  Coding DNA Sequence Number=SeqID_25589
  Homolog annotation: Hit_ID=P40940; Match level="QueryCoverage=16%, HitCoverage=29%, E-value=3e-21, Identity=92%"; Hit description=ADP -ribosylation factor 3
  Pfam annotation: Domain name=Arf; Domain location=223-310; Score= -57.4; E_value=2.4e-05; Accession=PF00025.11; Description=ADP -ribosylation factor family
  Subcellular localization annotation: CTP_CleavageSite=31; ConfidenceScore=5.47e-01
MDRAFTQGSQCWGVRRPQQGKRRPWTSPSPRLSSKKSPSTNIKPRPRDNAGYLRQRRCPDIPPKPSQRDIDMLATAKVVLDATPTGRAHGIGHHLAASAPLPQASVAAPPDDNSAAASTQPLQPLPSRAARSTVQEGRKILPKSQPTGRPMALPTGASTEAHALPRDSTCHGAQRSSHGSCRTRTPGGRARHRRETRTRRQRASPPRPCPPPAASTWAHSTATATKTMSRARIRALATPTSGCLAATVLGVRASIPVCLGVDLPGALDDAAITESLELHKIKSRQWAIFKTSAIKGEGLFEGLDWLSNTLKSGSS

SEQ ID NO: 67369 - protein, 77 aa, Zea mays
  Coding DNA Sequence Number=SeqID_25590
MEVDLGKGSREVSWRARVPKDENDGSATGAGAGEKTGRAMVPSDLDPLNLDQNHSVKKYKEYEGWRRAEAIRRRAST

SEQ ID NO: 67370 - protein, 129 aa, Zea mays
  Coding DNA Sequence Number=SeqID_25591
  Gene Ontology: Mol. function=nucleotide binding; Cellular component =intracellular; Biological process=small GTPase mediated signal transduction
  Homolog annotation: Hit_ID=P40940; Match level="QueryCoverage=52%, HitCoverage=37%, E-value=9e-31, Identity=95%"; Hit description=ADP -ribosylation factor 3
  Pfam annotation: Domain name=Arf; Domain location=4-125; Score=35.4; E_value=1.5e-12; Accession=PF00025.11; Description=ADP-ribosylation factor family
MGIVFTRLFSSVFGNREARILVLGLDNAGKTTILYRLQMGEVVSTIPTIGFNVETVQYNNIKFQVWDLGEMLLQIEAEVHILSAVRKCMVDDVGQVTTPVPHGVLVDSPKPPIGFASSAWLLGGAYMIT

SEQ ID NO: 67371 - protein, 58 aa, Zea mays
  Coding DNA Sequence Number=SeqID_25592
MARNIKSWPNKAKGESDKGTQLQQSEGDATDEMDEDNDDESGSAEVADAGFHLDDDLV

SEQ ID NO: 67372 - protein, 546 aa, Zea mays
  Coding DNA Sequence Number=SeqID_25593
  Gene Ontology: Mol. function=protein serine/threonine kinase activity; Cellular component=cell surface; Biological process =protein amino acid phosphorylation
  Homolog annotation: Hit_ID=Q852A9; Match level="QueryCoverage=90%, HitCoverage=75%, E-value=1e-107, Identity=66%"; Hit description =Putative receptor-like protein kinase
  Pfam annotation: Domain name=APH; Domain location=222-396; Score= -17.5; E_value=0.1; Accession=PF01636.13; Description=Phosphotransfera se enzyme family
  Pfam annotation: Domain name=Lectin_legB; Domain location=2-168; Score=86.7; E_value=7.3e-23; Accession=PF00139.10; Description =Legume lectin domain
  Pfam annotation: Domain name=Pkinase; Domain location=221-483; Score =120.1; E_value=6.5e-33; Accession=PF00069.15; Description=Protein kinase domain
  Pfam annotation: Domain name=Pkinase_Tyr; Domain location=223-483; Score=77.3; E_value=5e-20; Accession=PF07714.7; Description=Protein tyrosine kinase
  Pfam module annotation: Pfam domain module=APH::Lectin_legB::Pkinase:: Pkinase_Tyr; Domain location=222-396::2-168::221-483::223-483
YDVLRFVALAPSAAGPGLAVAGKDLGLFNTSDNAGNGTTSEVVAVELDTALDVEFDDINNNHVGVDVHTLRSVASKPAGYVDAATGGSVDVALASGRLLQVWIEYDGATTRLEVTVSPAGVGVPRPRVPLVSCEVDLSSAVADQTYVGFSAANGAASSSHYVLGWSFRLGGGRAPDLDLSKLPRPPPPSGGHKKATELPLLLTLIIIVVVVLLVDLYAATRGFRDVIGVGGFGVVYRGVHPRPGGVEVAVKKVSHDSRQGLREFVSEIASMSRLRHRNLVQLLGYCRRRGELLLVYDYMVNGSLDRHLFGAGNEPTLSWEQRAKIVRDVAAGLLYLHEGWEQVVVHRDIKASNVLLDADMNGRLSDFGLARLYDHGSESRTTRVIGTLGYLAPEMIKTGKATPSADVACGRRPMESLGNNGDPAGLVDSVLERWKTGRIKDARDPRIGMCDEDDLELVLKLGLLCSHPDPRCRPSMRQVVQILEGAASLPSTPPEDLGGAGGRIFGHYETFDEFVNVFPTTFDITTVTTPSPCSPSSADRQQLISA

SEQ ID NO: 67373 - protein, 118 aa, Zea mays
  Coding DNA Sequence Number=SeqID_25594
MSGAPEDSNANSPPSGISRGHSAIIHRTVRCTPDSVRCSKGEGPQELASFGNLQRLVHYNSPDCPVQPRGNGYSAPTAMGAEVRRAHTGAPDNEQEMSGVHRTSRRAHKSEAPTAFVP

SEQ ID NO: 67374 - protein, 69 aa, Zea mays
  Coding DNA Sequence Number=SeqID_25595
MDPNLGVIIIGAEVTHNDASTIGAPMRYLDANNDGAEQDEESQDSYGSLLFVLKKYGQGISGHCHPYHA

SEQ ID NO: 67375 - protein, 181 aa, Zea mays
  Coding DNA Sequence Number=SeqID_25596
  Homolog annotation: Hit_ID=Q9ZWI9; Match level="QueryCoverage=19%, HitCoverage=3%, E-value=2e-09, Identity=91%"; Hit description =Phytochrome C
  Subcellular localization annotation: CTP_CleavageSite=7; ConfidenceScore=5.04e-01
MSTAKTRAVAVSIKRTISFVTVLSSSSPCIFFITSDGQLWLVGLIAISHGTHSLNSTQVLKPATKQKLRFEGDSYKKALAEFLQAVPAFLGGKCSCLRCESPRDDSVIQAGEGSKKQPRLVSVDDGSPVTDLDFDLDEEEIPSPYSCDNAIRAVIIDLLMVCIFVAFLAGMIDPASVPANA

SEQ ID NO: 67376 - protein, 53 aa, Zea mays
  Coding DNA Sequence Number=SeqID_25597
MVTRRRCDTCRRPRGDVVPAVEVVLATQQPPAQPRSLLQRHPRPWRGFHRLKK

SEQ ID NO: 67377 - protein, 44 aa, Zea mays
  Coding DNA Sequence Number=SeqID_25598
MAHGRLPSRRNLDLALEGRDLRMLRGRQATWDIPRRRFYPTVVY

SEQ ID NO: 67378 - protein, 309 aa, Zea mays
  Coding DNA Sequence Number=SeqID_25599
MNKIKGLSSPGCGSGKRKMRVTVELAGMAEMPRGTPTTRDIGATGELGHHVRSRPQSCPDKLVVVEKDVHMHGTWDRSRDGGRSSLRRNQRGRGWWDPIEGCQGVGKESAAGWGKADMRANGEKGARGASGSDVLVGKTAVAARECPALASSTNRRTTTQVGTGQPERATEWGRTSPAGRTAAQGGTGRPGRAAKRGKAGEDAGQQFVELLLVADGQEHEEARRTREGRDRPRRESCRGPSGRRQLGRRSSRRDPTGGSESTQARTLTSAAEGFSGGGAECTQARTKQAWPCWRSSMRPTGGRGADGWK

SEQ ID NO: 67379 - protein, 393 aa, Zea mays
  Coding DNA Sequence Number=SeqID_25600
  Gene Ontology: Mol. function=protein-tyrosine kinase activity; Cellular component=integral to membrane; Biological process=protein amino acid phosphorylation
  Homolog annotation: Hit_ID=Q8H4T2; Match level="QueryCoverage=90%, HitCoverage=46%, E-value=1e-158, Identity=79%"; Hit description =Putative leucine-rich repeat transmembrane protein kinase 1
  Pfam annotation: Domain name=Pkinase; Domain location=83-354; Score =23.8; E_value=5.6e-10; Accession=PF00069.15; Description=Protein kinase domain
  Pfam annotation: Domain name=Pkinase_Tyr; Domain location=83-354; Score=19.2; E_value=1.2e-13; Accession=PF07714.7; Description =Protein tyrosine kinase
  Pfam module annotation: Pfam domain module=Pkinase::Pkinase_Tyr; Domain location=83-354::83-354
MAAVPLAVTMNKKEHVIDMEKADNFVEDQLHPPQPMALRTEKVTVNPSVRTRRGRVPSVEKVESTTTVKSFSIASLQQYTNSFSEENIIRDSRFGKVYLAKLPDGELLEILKIDSSNSKVPVDAFLELVVRISELRHPNILGLVGYCAEFEQRLLVYEYCSKMTLHDELRHVDDSSKPLSWNARLQVASEAAKALQHLHDGCQPPVVHQNFEPSVVLLNSTLVVHISECGLASLASKSVSQLSGHTLFHYEAPEVHESGSVSDRSDVYSFGVVMLELLTGRKPYDSSYPRAEQHLVRWATSQLYDIDAITKMVDPSIRGQCSDKALSRFADIISRCIQHEPEFRPPMSEVVQDLTRMMPLTTIDAVVGYFGQCKMGGTQWQDAETAPRFVHCQ

SEQ ID NO: 67380 - protein, 560 aa, Zea mays
  Coding DNA Sequence Number=SeqID_25601
  Gene Ontology: Mol. function=ARF guanyl-nucleotide exchange factor activity; Cellular component=intracellular; Biological process =regulation of ARF protein signal transduction
  Homolog annotation: Hit_ID=Q7XIK7; Match level="QueryCoverage=98%, HitCoverage=42%, E-value=0.0, Identity=68%"; Hit description =Putative guanine nucleotide-exchange protein GEP2
  Pfam annotation: Domain name=Sec7; Domain location=424-560; Score =128.1; E_value=2.4e-35; Accession=PF01369.11; Description=Sec7 domain
MLKRLKEKLIAYDHLEGDPGLEGGKNSPIFTDILNMVCGCVDNTSSDSTVLQVLKVLLNAVASNRFRVHGEPLLGVIRVCYNIALNSKSPVNQATSKAMLTQMISIVFRRMESEQVSVLPASSVVKDTPSSITNESENGEISTDGQDEEKVTPGDALSMNRPSEAPPTSVEELQNLAGGADIKVLHWFHLITRDLLQGLEAVLDKAVELEDGKKVSRGIDLDTVNIIQRDALLLFRTLCKMSMKEESDEVATKTRLLSLETAPVLLLRFRESLKGEIGVFFPLIVLRSLDSSDSSLSQKASVLRMLEKVCKDPQMLADVFVNYDCDLEGPNLFERTVSALSRIAQGSQIADTNSIVSSQTVSVKGSSLQCLVSILKSLAVWEQLRRYSLKQGSIVESHEGDASRSVTTDEMKSQEDVRNQFERAKAHKSTLEAAISEFNRKPTKGIEYLLSNKLIENKASSVAQFLKSNPGLDKVMIGEYLGQHEEFPLAVMHAYVDSMKFSGLKFDAAIREFLKGFRLPGEAQKIDRIMEKFAERYCADNPELFKNADTAYVLAYAVIM

SEQ ID NO: 67381 - protein, 76 aa, Zea mays
  Coding DNA Sequence Number=SeqID_25602
  Homolog annotation: Hit_ID=Q8H4T2; Match level="QueryCoverage=57%, HitCoverage=5%, E-value=6e-16, Identity=77%"; Hit description =Putative leucine-rich repeat transmembrane protein kinase 1
MGNPGRSRQLSALVASAAILLSLSALPICRPYTYEQDVFAINGLYTALGAPQLPNWTSNGGDPCNEGWQGHSIAII

SEQ ID NO: 67382 - protein, 62 aa, Zea mays
  Coding DNA Sequence Number=SeqID_25603
  Homolog annotation: Hit_ID=Q7XIK6; Match level="QueryCoverage=76%, HitCoverage=12%, E-value=2e-19, Identity=87%"; Hit description =Putative lysine ketoglutarate reductase trans-splicing related 1
MAEENQSRINDLIHGWGIDYKFGYCAQGDRTKNIGVVDSEFIVHRGVQTLGGSTITKGWEMY

SEQ ID NO: 67383 - protein, 36 aa, Zea mays
  Coding DNA Sequence Number=SeqID_25604
MATPLCRLAKERMRRVYDPKRSFIRWMAGCKDHRVS

SEQ ID NO: 67384 - protein, 367 aa, Zea mays
  Coding DNA Sequence Number=SeqID_25605
  Gene Ontology: Mol. function=oxidoreductase activity; Cellular component=mitochondrion; Biological process=electron transport
  Homolog annotation: Hit_ID=Q8H5X6; Match level="QueryCoverage=90%, HitCoverage=62%, E-value=1e-158, Identity=80%"; Hit description =Putative NADH dehydrogenase
  Pfam annotation: Domain name=Pyr_redox; Domain location=137-215; Score=8.9; E_value=0.0028; Accession=PF00070.17; Description =Pyridine nucleotide-disulphide oxidor
  Pfam annotation: Domain name=Pyr_redox_2; Domain location=1-259; Score=5.2; E_value=0.00012; Accession=PF07992.4; Description =Pyridine nucleotide-disulphide oxidore
  Pfam module annotation: Pfam domain module=Pyr_redox::Pyr_redox_2; Domain location=137-215::1-259
MVFTPLLASTCVGTLEFRSVVEPVSRIQSALATRPGSYFFLASCTGVDTKAHEVYCEAASSDGQLPCHPYRFKVAYDKLVIASGAEPLTFNIKGVQEHAIFLREVSHAQEIRRKLLANLMLAENPGLSAEEKERLLHCVVVGGGPTGVEFSGELSDFITRDVRQRYAHVKDYVKITLIEYGVNLVRGIVKEVKATEITLSDGTRVPYGLLVWSTGVGPSEFVRSLHLPKSPGGRVGVDEWLRVPTAPDVFALGDCAGFLEGTGKPVLPALAQVAEREGRYLARLLGRIAAQNGGKAHCAGKADLGEPFVYKHIGSMASVGRYKALVDLRENKALPLSPSISPLTHQCNAKCGMRLVPRFDKSVLMKS

SEQ ID NO: 67385 - protein, 735 aa, Zea mays
  Coding DNA Sequence Number=SeqID_25606
  Gene Ontology: Mol. function=RNA-directed DNA polymerase activity; Cellular component=intracellular; Biological process=RNA-dependent DNA replication
  Homolog annotation: Hit_ID=UPI00004C1731; Match level="QueryCoverage =93%, HitCoverage=51%, E-value=0.0, Identity=80%"; Hit description =UPI00004C1731 related cluster
  Pfam annotation: Domain name=RnaseH; Domain location=306-433; Score =9.2; E_value=8.1e-06; Accession=PF00075.14; Description=RNase H
  Pfam annotation: Domain name=rve; Domain location=480-606; Score =17.8; E_value=0.00019; Accession=PF00665.16; Description=Integrase core domain
  Pfam module annotation: Pfam domain module=RnaseH::rve; Domain location=306-433::480-606
MRARCTSGGMNHVFGEHIGRTVEAYVDDIVVKTRKASDLLSDLEVTFRCLKAKGVKLNPEKCVFGVPRGMLLGFIVSERGIEANPEKIAAITSMGPIKDLKGVQRVMGCLAALSRFISRLGERGLPLYRLLRKAECFTWTPEAEEALGNLKALLTKAPILVPPAAGEALLVYVAATTQVVSAAIVVERQEEGHALPVQRPVYFVSKVLSETKIRYPQVQKLLYTVILTRRKLRHYFESHPVTVVSSFPLGEIIQCREASGRIAKWAVEIMGETISFAPRKAIKSQVLADFIAEWVDTQLPTAPIQPELWTMFFDGSLMKTRAGAGLLFISPLGKHLRYVLRLHFPASNNVAEYEALVNGLRIAIELGVRCLDARGDSQLVIDQVMKNSHCHDLKMEAYCDEVRCLEDKFYGLELNHIARRYNETADELAKIASGQTTVPPDVFSRDLHQPSVKIDDTPEPEAPSAQPEAPSAQPEGPSAQFEAPSARPEASSVQPEKAPGGYTHLLVAIDKFSKWIEVRPLNSIRKFLDFCEDHHIRVDWAAVAHPMSNGQVERANGMILQGLKPRIYNDLNKFGKRWMKELPSVVWSLRTTPSRATGFTPFFLVYGAEAVLPTDLEYGSPRTMAYTDQSNQASREDSLDQLEEAQDKALLHSARYQQSLRRYHARGVRSRDLQVGDLVLRLRQDARGRHKLTPPWEGPFVIAKVLKPGTYKLANSQGEVYNNAWNIQQLRRFYP

SEQ ID NO: 67386 - protein, 161 aa, Zea mays
  Coding DNA Sequence Number=SeqID_25607
  Gene Ontology: Mol. function=sugar porter activity; Cellular component=integral to membrane; Biological process=carbohydrate transport
  Homolog annotation: Hit_ID=Q10BC6; Match level="QueryCoverage=68%, HitCoverage=20%, E-value=2e-33, Identity=67%"; Hit description=Sugar transporter family protein, putative, expressed
MAVGRRLEERSGRATRPVLHFVVLFGGSLLAYRVADFLGRRKELITAAALYIFGALVSGVAPDYFSLLRGRSLYGIGIGLCGYLVGSLEIDNVRGWRYMFGLSAPLAAVMAIGMWTLLSSPRWLLLRAVQGNASVDAFSERQTLNKNRRRCSLVRRGRSAA

SEQ ID NO: 67387 - protein, 214 aa, Zea mays
  Coding DNA Sequence Number=SeqID_25608
  Gene Ontology: Mol. function=electron carrier activity; Biological process=electron transport
  Homolog annotation: Hit_ID=Q53NA7; Match level="QueryCoverage=75%, HitCoverage=40%, E-value=6e-28, Identity=40%"; Hit description=MTERF, putative
MRGRFPRVRFFLSLLGAPLNRGTGGRKGQTWGIFNANPEKEELGVPAASPLFMQAVGVVTSFPPEKVAAKLDFFKRTLGCSESEVSNAVSKMPQILALSEATLLRKIEFLVNEGAIEPQYIMQRPILLAFSLEKRLVPRYRVIKVLQGKGLLNSNMSLSSLASLAEETFKSKFVDCHKDCVPGLADAYAAACASIVPSTVWMLIGCCPLCNFDF

SEQ ID NO: 67388 - protein, 466 aa, Zea mays
  Coding DNA Sequence Number=SeqID_25609
  Gene Ontology: Mol. function=protein serine/threonine kinase activity; Cellular component=cell surface; Biological process =protein amino acid phosphorylation
  Homolog annotation: Hit_ID=Q852A9; Match level="QueryCoverage=93%, HitCoverage=61%, E-value=1e-147, Identity=64%"; Hit description =Putative receptor-like protein kinase
  Pfam annotation: Domain name=APH; Domain location=132-324; Score= -11.2; E_value=0.036; Accession=PF01636.13; Description =Phosphotransferase enzyme family
  Pfam annotation: Domain name=Pkinase; Domain location=131-403; Score =150.4; E_value=4.8e-42; Accession=PF00069.15; Description=Protein kinase domain
  Pfam annotation: Domain name=Pkinase_Tyr; Domain location=133-403; Score=110.5; E_value=4.7e-30; Accession=PF07714.7; Description =Protein tyrosine kinase
  Pfam module annotation: Pfam domain module=APH::Pkinase::Pkinase_Tyr; Domain location=132-324::131-403::133-403
PRVPLVSCEVDLSSAETDQTYVGFSAANGAASSSHYVLGWSFRLGGGRAPDLDLSKLPRPPPPSGGHKKATELPLLLTLIILVVVVLLVVSAAVTVLVVWRRRRFTEEQEDWEVEYGPHRVSYKDLYAATRGFRDVIGVGGFGVVYRGVHPRPGGVEVAVKKVSHDSRQGLREFVSEIASMSRLRHRNLVQLLGYCRRRGELLLVYDYMVNGSLDRHLFGAGNEPTLSWEQRAKIVRDVAAGLLYLHEGWEQVVVHRDIKASNVLLDADMNGRLSDFGLARLYDHGSESRTTRVIGTLGYLAPEMIKTGKATPSADVFAFGAFLLEVACGRRPMESLGNNGDPAGLVDSVLERWKTGRIKDARDPRIGMCDEDDLELVLKLGLLCSHPDPRCRPSMRQVVQILEGAASLPSTPPEDLGGAGGRIFGHYETFDEFVNVFPTTFDITTVTTPSPCSPSSADRQQLISA

SEQ ID NO: 67389 - protein, 62 aa, Zea mays
  Coding DNA Sequence Number=SeqID_25610
MVIQGKDPYDEEMRRRHQLSHLAMPYSGVGGPELTMLGRTTFDLYGGHHMDIHMSIEEGVDK

SEQ ID NO: 67390 - protein, 682 aa, Zea mays
  Coding DNA Sequence Number=SeqID_25611
  Gene Ontology: Mol. function=protein serine/threonine kinase activity; Cellular component=cell surface; Biological process =protein amino acid phosphorylation
  Homolog annotation: Hit_ID=Q852A9; Match level="QueryCoverage=94%, HitCoverage=92%, E-value=0.0, Identity=68%"; Hit description =Putative receptor-like protein kinase
  Pfam annotation: Domain name=Lectin_legB; Domain location=25-261; Score=328.3; E_value=1.3e-95; Accession=PF00139.10; Description =Legume lectin domain
  Pfam annotation: Domain name=Pkinase; Domain location=344-614; Score =156.4; E_value=7.5e-44; Accession=PF00069.15; Description=Protein kinase domain
  Pfam annotation: Domain name=Pkinase_Tyr; Domain location=346-614; Score=96.2; E_value=1e-25; Accession=PF07714.7; Description=Protein tyrosine kinase
  Pfam module annotation: Pfam domain module=Lectin_legB::Pkinase::Pkina se_Tyr; Domain location=25-261::344-614::346-614
  Subcellular localization annotation: CTP_CleavageSite=90; ConfidenceScore=5.54e-01
MPAAALAVRVAAVLLLLARGGSGSAPGEFVLSGFASGNVTTSGAAVVTSSGLLQLTNATNEVFGHGFYPVPLRFKDASSTPRSFSTTFVFAMVPRHDDAHGHGIAFALAPSPTVPGAVAGKNLGLFNTSDDTGKARSGVVAVELDTAKDEEFSDINDNHVGIDVNSLVSVSSAPAAYVDAGSLVNISLVSGEPLQAWVEYDGASMRLEVTVAPARKPRPAVPLVSSIVNLSSAVADDTYVGFTAANGAASTSHYVLGWSFRLGDGRATDLDASKLPPVPSSKKKTSRLNLVTLSLVVVVALLLASVAVAALVVRHRRFAEEQEDWEIQYGPHRISYKDLHAATRGFRDAIGQGGFGRVYHGVLQRPVNAEVAVKKVSHDSRQGLREFVSEIASMSRLRHRNLVQLLGYCRRRGELVLVYDYMVNGSLDRHLFDAGKPALSWEQRGKIVRDVAAGLLYLHEGWEQVVVHRDIKSANVLLDADMNGKLSDFGLARLYDHGSNPQTTHVIGTLGYLAPEMSKTGKATTSTDVFAFGAFLLEVACGRRPMERDDDLDSPGLVDLVLECWKAGRIVEARDKRIGKCDEADVELVLKLGLLCSHPDPRCRPSMRQAVQMLEGAAPVPETPPKDLASNSRLFYGYSESFDEFATMFPATSEVTSVTTQPSSSHSTGEGQQVSSEQITNV

SEQ ID NO: 67391 - protein, 709 aa, Zea mays
  Coding DNA Sequence Number=SeqID_25612
  Gene Ontology: Mol. function=protein dimerization activity; Cellular component=chromatin; Biological process=electron transport
  Homolog annotation: Hit_ID=Q10BC8; Match level="QueryCoverage=95%, HitCoverage=97%, E-value=0.0, Identity=63%"; Hit description=HAT family dimerisation domain containing protein, expressed
  Pfam annotation: Domain name=DUF659; Domain location=249-400; Score =260.4; E_value=3.7e-75; Accession=PF04937.6; Description=Protein of unknown function (DUF 659)
MERDAVLEDAAAGDGEEQDQDQEEVVVPIGAQKHDPAWKHCVMVRSDGRMRLNVPRDVQDTMLRSLAAVAAKKMQRKLAAASTTPASVSTASGGTGSPIHMISLNEVLDFEAVPLEEQRPPVPEGSIRGSTSGKKKRKQVTYAPAPPLIPQIRPQHVRSTPQNNLLHGLQHVPPTPQTNPLHQVVMAVNAVTPAEHFEHAAPSEKEHVSVAVGRFLYDAGVPLEAVNSVYFQPMLEAIAAAGGRPETLSYHDFRGHILKRSLDDVTARLEFFRGSWTRTGCSVLADEWITDKGRTLINFSVYCPEGTMFLKSVDATSIVTSSDALYELLKSAVEEIGEKKVVQVITNNSEVHAAAGKKLGETFPTLFWSPCTFQCVDGMLEDFSKVEAISEIISNAKAITGFVYNSAYALNLMKKYLQGKDLLVPAETRAAMNFVTLKNMYGLREALQAMVNSDEWIDLLPKKGGIEASNLVNNLQFWNSCAAVVHITEQLVHLLKLVGNPKRPSMGYVYAGLYKAKAAIKKELVSKNDYMVYWNIIDWRWDNQTPQPLHSAGFFLNPLFFDGIRGDISNGIFSGMLDCIERLKLETCKPIASFDRGNHKDIFGLVTKHEWINRLSDIFDRQQHKAKAFDPLSVDYIDVVDDWAVDRPAMFSGPAEQPNWMEINQSGNRMTSREPTEDEFESFIEGVDDEMIQGAAQGFHEDGDDPACG

SEQ ID NO: 67392 - protein, 39 aa, Zea mays
  Coding DNA Sequence Number=SeqID_25613
MANYGLLRRKWAGDVYIKYVEDKTIAHFAGGKNAPTFFG

SEQ ID NO: 67393 - protein, 159 aa, Zea mays
  Coding DNA Sequence Number=SeqID_25614
MAHKCTARTPLYLPTVSSTLLVLEDTIAGHHSKVRGARVPPWEIVHSPVYAADSFAAVVRASPQAIRGKHSFPSFTYVSTLYIYLGGTFWARNQGLAVSGDAAAVETLVAARAAVFGPWKAMASWPLDRPLAGRIIAEVGGAPYLLIWSPTVVIVRWFI

SEQ ID NO: 67394 - protein, 145 aa, Zea mays
  Coding DNA Sequence Number=SeqID_25615
  Gene Ontology: Mol. function=protein kinase activity; Biological process=protein amino acid phosphorylation
  Homolog annotation: Hit_ID=Q9FWD9; Match level="QueryCoverage=72%, HitCoverage=16%, E-value=2e-34, Identity=70%"; Hit description =Putative Ste20-related protein kinase
MWRLKGMVRSDQQRIDLCFRADGADATAAVLIPHLNNLVQQTMFQQDVIMNLLSNLQQDEKVDRTQPGISSQVRTMENGKVADTANSEKERSLLVKISELQSRMITLTDELIAAKTKHVQLQQELNALYYREEIEDVRDEDIEET

SEQ ID NO: 67395 - protein, 602 aa, Zea mays
  Coding DNA Sequence Number=SeqID_25616
  Gene Ontology: Mol. function=protein serine/threonine kinase activity; Cellular component=nucleus; Biological process=protein amino acid phosphorylation
  Homolog annotation: Hit_ID=Q10SQ6; Match level="QueryCoverage=92%, HitCoverage=76%, E-value=0.0, Identity=66%"; Hit description=Protein kinase, putative, expressed
  Pfam annotation: Domain name=Pkinase; Domain location=32-293; Score =251.0; E_value=2.4e-72; Accession=PF00069.15; Description=Protein kinase domain
  Pfam annotation: Domain name=Pkinase_Tyr; Domain location=32-293; Score=89.9; E_value=8e-24; Accession=PF07714.7; Description=Protein tyrosine kinase
  Pfam module annotation: Pfam domain module=Pkinase::Pkinase_Tyr; Domain location=32-293::32-293
MGRNGSVRRSAFSGAAGAAAGPPSFSVNPADYRLMEEVGYGAHAVVYRAIFLPTKGVVAVKCLDLDQLNNNIDEIQREAQIMSLIDHPNVIRAYCSFVVEHSLWVIMPFMTEGSCLHLMKISYQEGFDEPIIGSILKETLKALDYLHRQGQIHRDVKAGNILIDGAGVVKLGDFGVSACMFDRGDRQRSRNTFVGTPCWMAPEVLQPGTGYNFKADIWSFGITALELAHGHAPFSKYPPMKVLLMTLQNAPPGLDYERDKRFSKSFKEMVAMCLVKDQTKRPTAEKLLKHSFFKNAKPPELTIKSILSGLPPLWDRVKALQLKDEAQLALKKMPSSEQEALSLIHDDEPPEIKEDEDIARNIEVEKVEAKCNGISVCNCHLLALQQDLSSRNHLGKSFANECNSRQRAFVTTLKSDGNRPTTNEAFDFDFDFSEAATTRRADGHERNIRENDSLPSTAKRDPESNHWTSDVGQRQLSSGGSNSSTAERGYGFERDAVVQTIPEKQRSEARKTASLSGPLSLPTRASANSLSAPIRSSGGFVDSSGDKSKRSVVEIKGRFSVTSENVDLAKVQEGPLSSLSRKSPEVRLLPFRSQFPFTRVHC

SEQ ID NO: 67396 - protein, 50 aa, Zea mays
  Coding DNA Sequence Number=SeqID_25617
MLVAGRHSCGTEQRKAQQKAQSCTAQLRQKAGECWRRKAEGRSGAGGRHR

SEQ ID NO: 67397 - protein, 93 aa, Zea mays
  Coding DNA Sequence Number=SeqID_25618
MERSPPTSGARRLGDGGHGEGNHTVGVNPLRTSHGNRNMQRLQISRPIAVKDRLNRPYDRFNRLGQADSHYASQTGRLQLQLKKLSSAEVQLS

SEQ ID NO: 67398 - protein, 87 aa, Zea mays
  Coding DNA Sequence Number=SeqID_25619
MQRPRAGLPVVLRHVCHSSTVVHGQGGCGCRWDSPTPLSRPPSPALSRMKLTSAKPRKKASAAALERQQAYDAALARLARQKRRPAL

SEQ ID NO: 67399 - protein, 85 aa, Zea mays
  Coding DNA Sequence Number=SeqID_25620
MWWCHRHWSQTVCLPRGQGVDRLDQERVSLTRGKKVAMARNWLVAINTTQPHPFNTSKDSIHTHSIQEQELHSKTHSKLQRSSKC

SEQ ID NO: 67400 - protein, 49 aa, Zea mays
  Coding DNA Sequence Number=SeqID_25621
MPPMPEISRVAQQNIADLAAGSESDFGRYPGYKTRAAPSRHLSQRIKLL

SEQ ID NO: 67401 - protein, 62 aa, Zea mays
  Coding DNA Sequence Number=SeqID_25622
MALMESIRLLMALLEMVFVKQAPCLVSKGQEHGVDSSFYGLWAVQNLRELPKDEDSQLELQL

SEQ ID NO: 67402 - protein, 203 aa, Zea mays
  Coding DNA Sequence Number=SeqID_25623
MDDEVLNDEGVVCSADFSCVWTSLVLGWLIFENDATQVHHLASTQVEHLEHQRCAPVLQLGRVWLRRLDMATHPNVLKNETSSFLSSMPCLEGRYALQNSVDVRFAFIMLHANVDDGLIPLFHDLILLERVGCDEGLCIHTGSAAQFLSKTTACASADIETCRRSNNKSEMHHKVDLQHGKGNIHKNFIYQYLKLQIERDISN

SEQ ID NO: 67403 - protein, 301 aa, Zea mays
  Coding DNA Sequence Number=SeqID_25624
  Homolog annotation: Hit_ID=Q8S0Z6; Match level="QueryCoverage=34%, HitCoverage=37%, E-value=7e-50, Identity=76%"; Hit description=Myb -related transcription factor LBM2-like
  Pfam annotation: Domain name=Myb_DNA-binding; Domain location=14-62; Score=49.3; E_value=1.3e-11; Accession=PF00249.21; Description=Myb -like DNA-binding domain
MGRAPCCDKTSVKRGPWSPEEDDLLRSYVQNHGTGGNWIALPHKAGLNRCGKSCRLRWLNYLRPDIKHGGYTEQEDRVICSLYSSIGEQNYWNTKLKKKAIAMQQQQQQQQEYYQQQHSSGGRGRRAAAAAAAPRSQCASVQPSPASASSAVTTASASDACSFGAMYPSPSALQAAPVLARYDSTAAAPAPLSLPQQASSLAAEFVPPAPPPVGASWAGGLPLDDMFLPELLGDSEFPPGDGDFFGAGAGAGLLAPLLLQDRFPAASLQELSACYFPTRGRRRGGGRGPRPCQPRGSAQLT

SEQ ID NO: 67404 - protein, 190 aa, Zea mays
  Coding DNA Sequence Number=SeqID_25625
  Gene Ontology: Mol. function=racemase and epimerase activity, acting on amino acids and derivatives; Cellular component=nucleus; Biological process=response to DNA damage stimulus
  Homolog annotation: Hit_ID=Q1SHK1; Match level="QueryCoverage=58%, HitCoverage=7%, E-value=4e-24, Identity=47%"; Hit description=ATP -dependent DNA ligase; DNA repair metallo-beta-lactamase; RNA- metabolising metallo-beta-lactamase
  Subcellular localization annotation: CTP_CleavageSite=54; ConfidenceScore=5.73e-01
MASLLSSPDDSKSLSVTTSSLFLSSIASLPSSHAFSIFTSASTPLPPVPVSVPPAALIPGSRFLVDAFRHAGNFSVAYFLSHFHSDHYSGLGPSWRRGLVFCSAPTARLVSSVLSVPPQLVVSLDIGVRITVDGWGVTAVDANHCPGAVQFLFASPGPRAERYVHTGETSPYFQPNFVKLKEIMMERGIN

SEQ ID NO: 67405 - protein, 86 aa, Zea mays
  Coding DNA Sequence Number=SeqID_25626
  Subcellular localization annotation: CTP_CleavageSite=26; ConfidenceScore=5.42e-01
MAQPGQRGGGGSAPGSARRRAPWSPRALGRRQLQVVGKEDQRRCGGPSGRTASRTPRVNIYRQTGGEETLGLPPTGGWRQDREKTS

SEQ ID NO: 67406 - protein, 266 aa, Zea mays
  Coding DNA Sequence Number=SeqID_25627
  Gene Ontology: Mol. function=RNA-directed DNA polymerase activity; Cellular component=mitochondrion; Biological process=RNA-dependent DNA replication
  Homolog annotation: Hit_ID=Q1RUM6; Match level="QueryCoverage=83%, HitCoverage=66%, E-value=4e-62, Identity=44%"; Hit description =Pentatricopeptide repeat
  Pfam annotation: Domain name=PPR; Domain location=154-188; Score =53.3; E_value=7.9e-13; Accession=PF01535.11; Description=PPR repeat
  Pfam annotation: Domain name=PPR; Domain location=189-223; Score =23.4; E_value=0.00081; Accession=PF01535.11; Description=PPR repeat
  Pfam module annotation: Pfam domain module=PPR::PPR; Domain location =154-188::189-223
MESALAASAVSLSSPLLDAVMRRFRFAHGDPLRALSLLSLAADRGGIAPSPYAIDTALYVLGRARRFPHMWNLVANTRRICPDALTPRTAMIVLGRVAKEKSMSDARNVFHALKYEFRVNRHTFNILLSGWKSAEDAEAFVTEMRELGVEPDLVTYNSLIDCHCKNRDVQKAYKLLDEMRHKDISPDIITYTSLIGGLGLIGQPDKAKDLLKEMLCHRYGKVALALELWSDMVSSSFGSLTLWIAKESNTLLKAGLVMVMQLTLIY

SEQ ID NO: 67407 - protein, 227 aa, Zea mays
  Coding DNA Sequence Number=SeqID_25628
  Gene Ontology: Mol. function=nucleotidyltransferase activity; Cellular component=cytosol; Biological process=biosynthetic process
  Homolog annotation: Hit_ID=Q10Q59; Match level="QueryCoverage=71%, HitCoverage=38%, E-value=3e-64, Identity=76%"; Hit description=ADP -glucose pyrophosphorylase family protein, putative, expressed
  Pfam annotation: Domain name=NTP_transferase; Domain location=9-226; Score=-70.0; E_value=0.00016; Accession=PF00483.13; Description =Nucleotidyl transferase
MAGYEQRVVAVIMVGGPTKGTRFRPLSLNVPKPLFPIAGQPMVHHPISACSRIPNLAQIYLIGFYDEREFALYVSSISNELRIPVSVWLGALGRFKRAVSLTGSLANLNFRYLREDKPHGSAGGLYIFRDYIMEDSPSHIVLLNCDVCSSFPLPDMLGVASPYALPLKCKKGLIVLCRLTALITICLGTLFGQILSTNGRDLKRQFINNFGVACDREKTWYDLGQIL

SEQ ID NO: 67408 - protein, 89 aa, Zea mays
  Coding DNA Sequence Number=SeqID_25629
MKKKKDNLLAGSTVGTKACDNSATSIELHKNSTFAPLKWPSFKWSTRYLFQTIESSVPPDTLCPLEYLTKNSIVLTYGTLRLSPQLLLT

SEQ ID NO: 67409 - protein, 116 aa, Zea mays
  Coding DNA Sequence Number=SeqID_25630
MKDALTKNGWVNDISGSISAQFLSEYFMVWDLIQGFQLRPGVSDQHRWTPSASKSAYHRFFEGMVTFEPAARDRVRVVKIRDRYRTGPDNNSGGFALGLAAWARIDNGPLDFGPAL

SEQ ID NO: 67410 - protein, 127 aa, Zea mays
  Coding DNA Sequence Number=SeqID_25631
  Gene Ontology: Mol. function=nucleotidyltransferase activity; Biological process=biosynthetic process
  Homolog annotation: Hit_ID=Q10Q61; Match level="QueryCoverage=99%, HitCoverage=36%, E-value=6e-48, Identity=69%"; Hit description=ADP -glucose pyrophosphorylase family protein, putative, expressed
  Pfam annotation: Domain name=Hexapep; Domain location=29-46; Score =7.3; E_value=19; Accession=PF00132.14; Description=Bacterial transferase hexapeptide (th
  Pfam annotation: Domain name=Hexapep; Domain location=47-64; Score =15.4; E_value=0.21; Accession=PF00132.14; Description=Bacterial transferase hexapeptide (th
  Pfam module annotation: Pfam domain module=Hexapep::Hexapep; Domain location=29-46::47-64
MSLRCSGLYLSRFRRTSPHLLASGDGKRTATIVGDVYIHPSAKVHPTSKIGPNVSISANARVGAGARLINCIILDGVEIMGEGDQNAKLGITILGEAVDVEDEVVIVNSIVLPNKTLNVSVQEEIIL

SEQ ID NO: 67411 - protein, 179 aa, Zea mays
  Coding DNA Sequence Number=SeqID_25632
  Gene Ontology: Mol. function=DNA binding; Biological process=DNA integration
  Homolog annotation: Hit_ID=O24587; Match level="QueryCoverage=31%, HitCoverage=5%, E-value=2e-25, Identity=96%"; Hit description=Pol
MGELNYFLGFQVKNLKDGTFISQTKYTQDLLKRFGMKDAKPAKTPMGTDGHVDLNKGVLKREVQNKEKPKSSSVWHTELSGGAPNSVRCARLDSGEKAALEKNRRRTAIIHRTVRWCTGLSGEPTVASAMVGYTIRGRRVARTNGRQEAPDSVRCANCPGNATVICARKGRRSAPDRLQ

SEQ ID NO: 67412 - protein, 61 aa, Zea mays
  Coding DNA Sequence Number=SeqID_25633
MTRCIRTNGYATVGDLHVLNELSRLRTASRDADWVPKAMIRFRNLDFVLYGNEERVRALEA

SEQ ID NO: 67413 - protein, 46 aa, Zea mays
  Coding DNA Sequence Number=SeqID_25634
MAVMGSTSEKMYLCEVRKRQTFVASVLRWYRRKNTRNEVAGGKDPP

SEQ ID NO: 67414 - protein, 141 aa, Zea mays
  Coding DNA Sequence Number=SeqID_25635
MGKNKKDGSSLHHFGDKRKREPTPPSEDFGDSEYSEEVFSSESEGSSAPASPPASSDDSDDSQGIAAEGSDESEYSSDEENSSDSFEEGSGDDGGDGDDDGGDGDGGGGDDKSGDGGGKGGSGDGGGGSKGSSRGNNKASG

SEQ ID NO: 67415 - protein, 82 aa, Zea mays
  Coding DNA Sequence Number=SeqID_25636
  Subcellular localization annotation: CTP_CleavageSite=56; ConfidenceScore=5.44e-01
GTTPTLQYSTDHGSNSAARKTDQVPPPAARVQAAASPLAARVQGSRQPPLHQPSPRYAAAADVFVGRGRIILSGDDQLRHRK

SEQ ID NO: 67416 - protein, 81 aa, Zea mays
  Coding DNA Sequence Number=SeqID_25637
  Gene Ontology: Biological process=vesicle-mediated transport
  Homolog annotation: Hit_ID=Q6K8K1; Match level="QueryCoverage=99%, HitCoverage=97%, E-value=1e-14, Identity=54%"; Hit description=NFkB activating protein-like
MAYEISEIKKIGIGLVGFGILFSFLGVILFFDRGLLALGNLFTKKANLKWLWASYPGLPVSNTNHWLDSAVPIPAAWSVEA

SEQ ID NO: 67417 - protein, 431 aa, Zea mays
  Coding DNA Sequence Number=SeqID_25638
  Gene Ontology: Mol. function=small protein activating enzyme activity; Cellular component=dendrite; Biological process=protein modification process
  Homolog annotation: Hit_ID=Q2RBM4; Match level="QueryCoverage=96%, HitCoverage=36%, E-value=0.0, Identity=84%"; Hit description =Ubiquitin-activating enzyme E1 2, putative, expressed
  Pfam annotation: Domain name=ThiF; Domain location=9-124; Score=-9.2; E_value=2.1e-05; Accession=PF00899.11; Description=ThiF family
ISVPIAILKRHQVAAKNLVLAGVKSVTLHDDGKVELWDLSSNFFLSEKDIGQNRAQACVPKLQELNNAVIISTITGDLTKEQLSNFQAWCSGEISQSHQATACTLHNLRILELALSQAVVFTDISIEKAVEFDDYCHSHQPPIAFIKSEVCGLFGSVFCDFGPAFTVLDVDGEEPHTGIVASISNDNPALISCVDDERLEFQDGDLVVFSEVHGMTELNDGKPRKIKNARPYSFTLEEDTTSYGTYIRGGIVTQVKPPKVLKFKTLKEAIKEPGEFLMSDFSKFDRPPLLHLAFQALDKFRTELTRFPIAGSADDAQKLIDLAIGINETLGESKLEEIDKKLLQHFASGSRAVLNPMSAMFGGIVGQEVVKACSGKFHPLYQFFYFDSVESLPVEPLEPSDLKPENSRYDAQISVFGAQLQKKLEQSKIFM

SEQ ID NO: 67418 - protein, 165 aa, Zea mays
  Coding DNA Sequence Number=SeqID_25639
  Homolog annotation: Hit_ID=Q5W6R0; Match level="QueryCoverage=90%, HitCoverage=94%, E-value=1e-15, Identity=34%"; Hit description =Putative LOB family protein
  Pfam annotation: Domain name=DUF260; Domain location=10-73; Score =92.7; E_value=1.1e-24; Accession=PF03195.5; Description=Protein of unknown function DUF260
MAGSGSGSPPCASCKLLRRRCTQECVFAPYFPPDDPHKFAIVHKVFGASNVSKMLQQQVSQLQVQLALAKAEILCVQMQHDESAAASAAPAPAKQQQLYHHHQQQQTMECEAYGSLLVQNGLMMNTLGSAGAAHQQQQMLGGFGSAGNTAMALQEACLKKETLWA

SEQ ID NO: 67419 - protein, 331 aa, Zea mays
  Coding DNA Sequence Number=SeqID_25640
  Gene Ontology: Mol. function=transition metal ion binding; Cellular component=chloroplast; Biological process=iron ion homeostasis
  Homolog annotation: Hit_ID=P29036; Match level="QueryCoverage=99%, HitCoverage=97%, E-value=8e-59, Identity=45%"; Hit description =Ferritin-1, chloroplast precursor
  Pfam annotation: Domain name=Ferritin; Domain location=154-317; Score= 77.8; E_value=3.3e-20; Accession=PF00210.14; Description=Ferritin -like domain
  Subcellular localization annotation: CTP_CleavageSite=46; ConfidenceScore=5.63e-01
MMLRVSPSPAAAVPTQLSGAPATPAPVVRVAAPRGVASPAAGAACRAAGKGKEVLSGVVFQPFEEIKGELALVPQSPDKSLARHKFVDDCEAALNEQINSTNRITNVSIRHQFDSGTSLSGRAAWSTTPRMHTTPSSPTSTATTWLSKDLPSQSSPLATKFGYPYRFYVFLSNDDVVLPGSSRESSDEEREHAEKLMEYQVSFDPLVRSILLHANTCCAVLTGQCACQNKRGGRVRLQSIVTPLTEFDHPEKGDALYAMELALALEKLVNEKLHNLHGVATRCNDPQLTDFIESEFLEEQVEAINKISKYVAQLRRVGKGHGVWHFDQMAA

SEQ ID NO: 67420 - protein, 383 aa, Zea mays
  Coding DNA Sequence Number=SeqID_25641
  Homolog annotation: Hit_ID=Q67UF2; Match level="QueryCoverage=30%, HitCoverage=34%, E-value=7e-09, Identity=29%"; Hit description =Putative storekeeper protein
  Pfam annotation: Domain name=DUF573; Domain location=52-153; Score =175.1; E_value=1.7e-49; Accession=PF04504.5; Description=Protein of unknown function, DUF573
  Subcellular localization annotation: CTP_CleavageSite=36; ConfidenceScore=5.07e-01
MVSSSFPDADAYGNGDSDGLDFPVDPNPNPVFSSPAAAAAPGSAGAAGERRQLFQRLWTDEDEIVILRAFAEFTAQRGTSFASHQYDTTPFYEDMRRRLNTGFTKNQLAEKIRRLKRKYRNCVERLRVAGSGFTFRSPHEQAIFEIARTIWRPASDKHGRDSDDEGGGGNVHDATFAPFAIDAAANGESAKSSRPRRGRRRRTGDFPADAVALPPAPMPMQVMTEDALPSFPQATAAAVMNGGCGLIVDPASGLPTALSSAAAAATAVSGGSTTENPILTALFKEMVRAMLSVVGSGGGTTALQGLEPPPPYRGGADGRGEVAAAADPGAGGVPASDGPAAGPGQGGAGGTQARAAVEQGVFVCNPDFLSALQTSRASSFLFI

SEQ ID NO: 67421 - protein, 399 aa, Zea mays
  Coding DNA Sequence Number=SeqID_25642
  Gene Ontology: Mol. function=peptidase activity; Cellular component =nucleus; Biological process=response to oxidative stress
  Homolog annotation: Hit_ID=Q8LGH3; Match level="QueryCoverage=98%, HitCoverage=86%, E-value=4e-72, Identity=38%"; Hit description=4 -methyl-5(B-hydroxyethyl)-thiazole monophosphate biosynthesis protein, putative
  Pfam annotation: Domain name=DJ-1_PfpI; Domain location=21-159; Score= 119.2; E_value=1.2e-32; Accession=PF01965.14; Description=DJ-1PfpI family
  Pfam annotation: Domain name=DJ-1_PfpI; Domain location=243-380; Score=87.2; E_value=5.1e-23; Accession=PF01965.14; Description=DJ -1PfpI family
  Pfam module annotation: Pfam domain module=DJ-1_PfpI::DJ-1_PfpI; Domain location=21-159::243-380
MGTEEMEAVIIAGVLRRASADVTLASVEDGLEVEASCGSRIIADTHIASCADQVFDLVALPGGMPGSVRLRDSDILQRITVRQAEEKRLYGAICAAPAVVLVPWGLHRRKKITCHPSFIGDLPAFRAVESNVQVSGELTTSRGPGTTFQFALSFVEQLFGLRAAEDMDKILCNQTSLKDWMLQGQTLGRMMAQTHDGLERSAEVNELEWSCGRNPDVLIPIANGCEELEIIILVDILRRAKINVVLASVEKYPAVLGSQRMKIVADKSIMSASDSIYDLIILPGGPAGAEQLHRSRILKKLLKQQMQAGRMYGGVCSALKVLQQEGLLEDKTVTAHHAVASELTCQVIDQPNVVIDGNLITGKGLGTVVDFALAIIRKFFGHGRAKAVANGIVFEYPKS

SEQ ID NO: 67422 - protein, 152 aa, Zea mays
  Coding DNA Sequence Number=SeqID_25643
  Subcellular localization annotation: CTP_CleavageSite=24; ConfidenceScore=5.06e-01
MPLPLSLSPPLLPLPDLPLSARLLTAEGSSLALPPRSLNPHVGESSSTCQGARSLLLALHEHNHLQAPDPLLPRHGSSERATPPCLHRSSTMLRRPWRGCRGQWSEIARIMELDEDAVTTGEDDDSVLLDIKIERQYICHYENFGKVFIIPK

SEQ ID NO: 67423 - protein, 828 aa, Zea mays
  Coding DNA Sequence Number=SeqID_25644
  Gene Ontology: Mol. function=protein serine/threonine kinase activity; Cellular component=cell surface; Biological process =protein amino acid phosphorylation
  Homolog annotation: Hit_ID=O64477; Match level="QueryCoverage=94%, HitCoverage=91%, E-value=0.0, Identity=44%"; Hit description =Putative receptor-like protein kinase
  Pfam annotation: Domain name=B_lectin; Domain location=85-211; Score =89.3; E_value=1.2e-23; Accession=PF01453.15; Description=D-mannose binding lectin
  Pfam annotation: Domain name=PAN_1; Domain location=378-452; Score =6.6; E_value=0.035; Accession=PF00024.16; Description=PAN domain
  Pfam annotation: Domain name=PAN_2; Domain location=368-433; Score =76.7; E_value=7.5e-20; Accession=PF08276.2; Description=PAN-like domain
  Pfam annotation: Domain name=Pkinase; Domain location=524-806; Score =161.5; E_value=2.1e-45; Accession=PF00069.15; Description=Protein kinase domain
  Pfam annotation: Domain name=Pkinase_Tyr; Domain location=525-806; Score=124.4; E_value=3.2e-34; Accession=PF07714.7; Description =Protein tyrosine kinase
  Pfam annotation: Domain name=S_locus_glycop; Domain location=225-351; Score=124.2; E_value=3.8e-34; Accession=PF00954.11; Description=S -locus glycoprotein family
  Pfam module annotation: Pfam domain module=B_lectin::PAN_1::PAN _2::Pkinase::Pkinase_Tyr::S_locus_glycop; Domain location=85-211::378- 452::368-433::524-806::525-806::225-351
MEDARRPDAQSPATPRMSLAAAVATALAVLAYSCTAADPDTVSARRPLRGNGTVVSAQGKFELGLFSPGASGRFYLGIWYKNVPVQTVIWVANRASPLSSAASAELRVSPDDGNLELVGLIQNSASPAVAWSSNMSLSPSTSPSPSPGSNIAVMRDDGNLVLLGGDDSSTVLWQSFDHPTDTLVPYAWLGENKVTGEYQTLTSWRDAEDPAPGMFTDTVDRNGSSEFFLLWNGSRAYWRSGVWTGSVFANLPEAVNNVLFNQTYVDTPAYRRVTSVLYDNATITRMVLDLTGQTKQYIWVPGSQSWQFFWAAPTVQCDVYSLCGAFGVCSRRSQPPCQCPRGFAPAAERDWGLSDWSAGCQRSAPLLCGGNGRPTDDGFLELPDMKLPDDPLAVSVRTRAECESACLNNCSCQAYAFSGDGSCAVWNDGFRNLEQLYADAGNSSAATLYLRLPESELHGAKRKSRRLWLVLGIILACLAALGASALVAWVLLSRRKRRRSEMADQLKGSSLQVYSCGDLRAATKNFSEMLGGGGFGTVYRGVLNGGTEVAVKKLEGLRQGDKQFRTEVSTLGLIKHVNLVQLLGFCSSGDEKMLVYEYMRNGSLDAYLFGGSGRQRPSWRDRCGIMVGIARGLAYLHEGCRECIIHCDVKPENILLDGDLCPKIADFGMAKLVGRDFSRVLTTMRGTIGYLAPEWISGLPISAKADVYSFGMLLFELISGRRNADAGHGSDADEGDAGGQQRPPSTFFPVWAASRVVAGDMAAVADPRLRGDVVEGELERACRVACWCIQDQEAHRPAMAQVVQALEGVVDVQMPPVPRVLQHLATMT

SEQ ID NO: 67424 - protein, 107 aa, Zea mays
  Coding DNA Sequence Number=SeqID_25645
MSGAPEDSNSNSPPSGISRGTRAIIHRTVRCSKEERPQELASFGKTQRALRYNSPDMSGVHQTVRCNSGATAISAPTATYNAFIARQRAQRSGVPILAHRTLYSTCP

SEQ ID NO: 67425 - protein, 431 aa, Zea mays
  Coding DNA Sequence Number=SeqID_25646
  Gene Ontology: Mol. function=transporter activity; Cellular component= integral to membrane; Biological process=transport
  Homolog annotation: Hit_ID=Q8H6D6; Match level="QueryCoverage=98%, HitCoverage=84%, E-value=1e-146, Identity=62%"; Hit description =Major facilitator superfamily antiporter
  Pfam annotation: Domain name=MFS_1; Domain location=11-417; Score =49.7; E_value=9.7e-12; Accession=PF07690.6; Description=Major Facilitator Superfamily
MRDFKIAKQEQDIGFYAGFVGATYFLARTVSSVPWGIFADKYGRKPCIVISIISVIVFSTLFGLSTSYWMAIVTRGLLGLLCGILGPIKAYATEVCRKEHQALAMSVVTSSRAIALVVGPAIGGFLAQPAEKYPNIFSNGSIFGRFPYFLPGLVISILAAGSCIACIWLPETLHFHDNEKVEAIDEMEAQVGDSNLEVGKAKESGCTSTKNLLKNWQLMSAVILYCIFCLHDTAYLETFSLWAVSSRKFRGLSLTSQDVGIVLAVSGIGVLVYQLAVYPFIVKYFGPVRPLRPSVVLSILVLAMYPFMAKLQGLELKLLINIASLLENVFSTYAYANKIGYSYYCVQYFAKHRSDNFYETCADTRTQRYCEWHLSDTDVIVQRFSWTQKHMTGLLLPGDQILFLVINSVSIIGLIFTFKPFFSMSDALRRS

SEQ ID NO: 67426 - protein, 343 aa, Zea mays
  Coding DNA Sequence Number=SeqID_25647
  Homolog annotation: Hit_ID=Q6QP51; Match level="QueryCoverage=58%, HitCoverage=98%, E-value=6e-27, Identity=47%"; Hit description =Putative growth-regulating factor 1
MQAACNCTTGTYPFDFDASSMEAQAHTSCNRRAGYYVRKTAPPLAPVLRLLDCRTGAATRGNPAHGPTVPTKHIDHGSVSSRRRRDDRNGQKWADSNGGSRRAEAAVKSSAGSCPLLEQDRERGYFERDPSPRRKRAPSPLTDQGFEGWPLGRVRQPPQTTRAPHPLLIRGSKAGPSKGFDSRPRTRRARDDSGYVRYMAEARATLPRGVKPLLRGLGGYTRQENNAACPAPTAVPPARVRLTAVESRLRRHRKLRLARPQGSAPASASEGGLRLARPQGSASTSTSEGGLRLARHQGSDSTSTSGGITSLPDPGLGLRRSLCLARPWARTDHATGGTSLPYL

SEQ ID NO: 67427 - protein, 396 aa, Zea mays
  Coding DNA Sequence Number=SeqID_25648
  Gene Ontology: Mol. function=hydrolase activity, acting on ester bonds; Cellular component=cellulose and pectin-containing cell wall; Biological process=lipid metabolic process
  Homolog annotation: Hit_ID=Q69LT9; Match level="QueryCoverage=84%, HitCoverage=85%, E-value=1e-128, Identity=66%"; Hit description =Putative family II extracellular lipase 1
  Pfam annotation: Domain name=Lipase_GDSL; Domain location=67-386; Score=106.2; E_value=9.6e-29; Accession=PF00657.12; Description=GDSL- like LipaseAcylhydrolase
  Subcellular localization annotation: CTP_CleavageSite=42; ConfidenceScore=5.29e-01
MASHSHRSRSPTAPCPSWGHAHAPRCRRRLVRALLLVAALALAAAGGGGRGSAAAAAAATQQRIPAIFMFGDSIVDPGNNNNRLTEAKANFPPYGQDFPGGVATGRFSNGLVPGDLLGTCLDFNATAQLSKLGIKELLPPFIGTDLQLEDLLTGVALRLRRQWLRSAHTTLSSADQLQLFQDYKDKLAALAGEEEMERVVSQAVYFTVMGANDIVNNYFILPIRRHQYDLSSYVDFLVSSAINFTRTLNDMGAQRIAFLGVPPLGCCPSQITLAGSPSRQCDPARNQASELYNSRVSKEIERLNAERSGSGSKFVYVDIYYNLLDLIQNPASYGFKDVSEGCCGSTVLNAAIFIAYHSACPNAPDYIFWDGFHPTQKAYDIVVDKLIQQNSKYLMM

SEQ ID NO: 67428 - protein, 105 aa, Zea mays
  Coding DNA Sequence Number=SeqID_25649
  Gene Ontology: Mol. function=ferredoxin-NADP+ reductase activity; Cellular component=thylakoid membrane; Biological process=electron transport
  Homolog annotation: Hit_ID=P41345; Match level="QueryCoverage=90%, HitCoverage=25%, E-value=6e-42, Identity=79%"; Hit description =Ferredoxin--NADP reductase, root isozyme, chloroplast precursor
MALAWKNRTQQPRRLNKVLCMSVQQASRSKVAVVPIELEKAKEPPLHLYKPKEPYTATIVSVERLVGPRAPGETCHVVIDHGGNVPYWEGQSYGVIPPVILRRED

SEQ ID NO: 67429 - protein, 695 aa, Zea mays
  Coding DNA Sequence Number=SeqID_25650
  Gene Ontology: Mol. function=zinc ion binding; Cellular component =nucleus; Biological process=anti-apoptosis
  Homolog annotation: Hit_ID=Q10CF1; Match level="QueryCoverage=93%, HitCoverage=68%, E-value=0.0, Identity=60%"; Hit description =Expressed protein
  Pfam annotation: Domain name=zf-C3HC; Domain location=89-258; Score =193.3; E_value=5.8e-55; Accession=PF07967.4; Description=C3HC zinc finger-like
  Subcellular localization annotation: CTP_CleavageSite=72; ConfidenceScore=5.30e-01
MREEVRSSAAAAPDPPPGRSASPPPTPVASSAGASSPPAQTNVASIDWLDSDQVSKAGSSHIAPPTSRPALSTNANGAAMDCLQSSCRPWERGDLLRRLATFKPSTWASKPKAASSLACARRGWVNIDMDKIECESCGAHLIFIALTSWSPAEELNYIELVGHLDLILAELVLITSNCVYSAFSIQDICATLSLDVISAGEAFAEQLDASHQNNCPWRGNSCADSLVQFHLTPSALVGGFKDRCDGLLQFTSLPAIALSAIESMKLTRSVQIDRVLSQSVTVLSGELGYRTDSTTGIDIAQQDETCCYSQAQKLISVCGWEPRWLPNVQDWEENSTRSARNAGSAEPDGQFHSQFPEHHQNSNSVSIKKDKGKGRKPVLVRGISATSGINGLVTEGAERENIEGRDEAGIVEGKSLSNAQVDLNLTMAGGLPSNNSALPPMPGHLNYGGMGRDLIIGQPTGSELGGRAASIESRGPSSRKRNLEEGGSTADKPISRLQPADSIEGTVIDRDCDEVDDAAQDSGARSKRSRCFNLFDINRPSSSGAGPSRNLSFDLDIDVNRFDTSNAEVPSALRNPFPRDSMRESSVIAMDTVHGMEENSMESVEYHPCDVDDVNKPSSALRSGLMSDTLDPNYSNQAQQSSFVQPAAETESNAREIGGSSMNGGEEVLNAETTPAFARDQLSLGVSGGECRDGC

SEQ ID NO: 67430 - protein, 75 aa, Zea mays
  Coding DNA Sequence Number=SeqID_25651
  Gene Ontology: Mol. function=catalase activity; Biological process =response to oxidative stress
  Homolog annotation: Hit_ID=P55307; Match level="QueryCoverage=84%, HitCoverage=9%, E-value=5e-17, Identity=65%"; Hit description =Catalase isozyme 1
  Subcellular localization annotation: CTP_CleavageSite=34; ConfidenceScore=5.29e-01
MDPYKHRPSSGSNSSFWTTNSGAPVWNNNSALTVGQRVAVEPLRYLRERKHIPGPILLEDYHLIAPCSVRQRTYP

SEQ ID NO: 67431 - protein, 60 aa, Zea mays
  Coding DNA Sequence Number=SeqID_25652
MAVPAHKDPQRAAPLDISKMAAVVEGPGHTSASGEEDGKWGPIIGESTGEGWLLGRWEWV

SEQ ID NO: 67432 - protein, 44 aa, Zea mays
  Coding DNA Sequence Number=SeqID_25653
MSVAGPVVPHHGLAAAWAARVPLFNQGGSGDNRDCVAKNWMKAS

SEQ ID NO: 67433 - protein, 105 aa, Zea mays
  Coding DNA Sequence Number=SeqID_25654
  Subcellular localization annotation: CTP_CleavageSite=79; ConfidenceScore=5.10e-01
MDWPLRRSRLRFLARGASLRFMLRRSAFCTVGLRTSLGAPKAHPMGVAPELRVDFCKQSAQRSSLQLTGVPMGVGLRETASAAWHVFRRFELHIEFLRFGGYGRR

SEQ ID NO: 67434 - protein, 191 aa, Zea mays
  Coding DNA Sequence Number=SeqID_25655
MKPLRWLLDGSRAMSFLKFPPSCCWNLYLVQSKNMSTAAGCHTDELNRHSGRTTVTRPREEKPVAEAGVDEDQKLRRKPSGEEAESESAKHSTKTVAVLSGQARTVRGQGPNGGSIVVVMGDSRRRTLFRVQSCTNEQGVSDMVPVNRLAAAVPGGSIVVVMGDSRRSSIVVGLGHAFLLQLNMGMLWSDK

SEQ ID NO: 67435 - protein, 690 aa, Zea mays
  Coding DNA Sequence Number=SeqID_25656
  Gene Ontology: Mol. function=transferase activity, transferring hexosyl groups; Cellular component=integral to membrane; Biological process=carbohydrate biosynthetic process
  Homolog annotation: Hit_ID=Q339E2; Match level="QueryCoverage=94%, HitCoverage=95%, E-value=0.0, Identity=79%"; Hit description =Glycosyltransferase QUASIMODO1, putative, expressed
  Pfam annotation: Domain name=Glyco_transf_8; Domain location=338-663; Score=353.9; E_value=2.7e-103; Accession=PF01501.10; Description =Glycosyl transferase family 8
  Subcellular localization annotation: CTP_CleavageSite=49; ConfidenceScore=5.44e-01
MAFSAASSAAAAAAYPRTTLPLRRRPGLLALLLLLLCFLSFQVVIHVPSARSAVSLWLFSGHRAERGTRENCPGCSKLQDVDKAEKTIAYTDQHGRIKLFKVTAREFGSSSIWENPWLPRDSQPQEVAGDHLLASGSETTNLSSAETLATTIVDPIKLRRQVFRRRRKERRVQELLQMDKKIELQMRNAAINSSRNFNNKVRGSYNIWRQEFRLVNTDSTLRLMKDQIIMAKLYATIALSQKEPDMYALLMKRIKESQTSIGDALIDSELDSSSALERAKAMGHVLSSARDVLYSSGEVSRKLRVMLQSTELNIDAVKKQNSFLVQHAAKTVPMPLHCLHMQLTTDYYFRDYVTKEHFDDDALKAGQYKEKLEDLSLYHYAIFSDNVLAASVVVKSTVANANEPEKHVFHIVTDRLNFAAMKMWFITHPPQLATVHVENIDNFKWLNSSYCSVLRQLESARLKEYYFKAHDPSSLSDGNENLKYRNPKYLSMLNHLRFYMPEIHPKLEKILFLDDDVVVQKDLTPLWDVDLKGMVNGAVETCKESFHRFDTYLNFSHPKISENFDPHACGWAFGMNMFDLKEWKKRNITGIYHYWQDLNEDRKLWKLGTLPPGLITFYNLTYPLNRTWHVLGLGYDPAVDIAEIDNAAVVHYNGNYKPWLDLAISKYKPFWSKYVDVDNSHVRRCYEGKQ

SEQ ID NO: 67436 - protein, 140 aa, Zea mays
  Coding DNA Sequence Number=SeqID_25657
MAPSVDVVGPCPRLGDVEAPPRSRSSLSSETEVESEPLGRARRRPSAEARAESEPWGRAKRSSSSSGAEPESEPWVGRSGVRRLPGLSPSSSPGSGEAEFPMVPEAGPDCLSASFCRATQQSERHRRRYPSVRPVSGAAK

SEQ ID NO: 67437 - protein, 69 aa, Zea mays
  Coding DNA Sequence Number=SeqID_25658
MTYGAKIMVAELKELGEMDAPVVGFFKIREEGNDMRSLLELVKELRPRWMKLYVRDMHHTVFTRHGDQK

SEQ ID NO: 67438 - protein, 88 aa, Zea mays
  Coding DNA Sequence Number=SeqID_25659
  Gene Ontology: Mol. function=protein serine/threonine kinase activity; Cellular component=plasma membrane; Biological process =protein amino acid phosphorylation
  Homolog annotation: Hit_ID=P27450; Match level="QueryCoverage=50%, HitCoverage=10%, E-value=2e-09, Identity=77%"; Hit description =Probable serine/threonine-protein kinase Cx32, chloroplast precursor
MRSKRKSSKEHGKSLSLVTKGLSGIGEDLISLYVSRIECLALSEVNFLGRISHPNLVRLLGYSMDDNELLLVYEFMAKGELGEPPVPK

SEQ ID NO: 67439 - protein, 80 aa, Zea mays
  Coding DNA Sequence Number=SeqID_25660
MPSIQVELHRDSCNCSPDFGFHHVPWRARFPSSNRELGATIAGGACSGNDAAVPSLCDAVLTHAGLRDVYAVRCKLDDHD

SEQ ID NO: 67440 - protein, 76 aa, Zea mays
  Coding DNA Sequence Number=SeqID_25661
  Subcellular localization annotation: CTP_CleavageSite=47; ConfidenceScore=5.26e-01
MTSLTFREAPRLTGSNSTTVYRRSFSPPTSLPACARGQNSSDHHRRRADHRRDPRDLPEVADHPTGTLPSPEILGG

SEQ ID NO: 67441 - protein, 163 aa, Zea mays
  Coding DNA Sequence Number=SeqID_25662
MAVWSGRAAARASHSELARREQMQLAGGRKPTDFPWEVSAGVLLAVEQGRKGVIPGKGSRGKGAMGGSWKNSGRHPWGELLLASKEQGRALRSRAKRSRGVGMDALRMHRKTEGRRGTSWISSPWGRRAQGGGGCCSAPARGRRGMRPWISSCVLNRGWESCA

SEQ ID NO: 67442 - protein, 126 aa, Zea mays
  Coding DNA Sequence Number=SeqID_25663
MVSDVGEAGELVSVEKFGLYTEVEFDPVSRGASQKFGVVVGARNLGMAHLVVRSTCCGGWPKSGEVDLTVPVGQGLGSSLGRLHGLSGKLSKDSGEVGGLREWLATAAVLGRWWRAVVLALCGELR

SEQ ID NO: 67443 - protein, 75 aa, Zea mays
  Coding DNA Sequence Number=SeqID_25664
  Subcellular localization annotation: CTP_CleavageSite=32; ConfidenceScore=5.62e-01
MAAVQRSSAPARSSPCRVPLHPQPVSCARAPVCFKLSASISLCTPLSRACLSSSLHQAMELAGLQLPSDFFPGYG

SEQ ID NO: 67444 - protein, 263 aa, Zea mays
  Coding DNA Sequence Number=SeqID_25665
MVQVPGNLCLLLQRCSQPGYNDDMHGLPADKRVPYEPAYLSVISILIMFKKARLYEPGRREPGSRDTTNLPAPAESGPGCFKYRASLTSHLHAAISLLHCNHQYHVDFDICHDSHGLVIGEHVPHLSVEVPSYIVDDELDDVMAPSSDAMPQNNSRVIGVGDDHEVPLFDDGQRDAAALDRVQAVGCAGACRTQRRMRPHRTASRGGTGSAKLLLVDDERRQRERLLLVVFVRGFEVRNMDSSLAMVYENVSQVRSMEKYYGE

SEQ ID NO: 67445 - protein, 83 aa, Zea mays
  Coding DNA Sequence Number=SeqID_25666
MGFDWERTYYDVWCLLDYFTLQMVQPPMVVARLNTIVCSLLRIDFLPVDYSGDTVADSEGTASEIATKADAGSAADIPEGDSA

SEQ ID NO: 67446 - protein, 89 aa, Zea mays
  Coding DNA Sequence Number=SeqID_25667
  Subcellular localization annotation: CTP_CleavageSite=56; ConfidenceScore=5.35e-01
MVARPRWLGLRDQQAARPAGVVARSQPARPANARRLGAATRCGSPSASGAALAHVGAAHRDSFLSFEESTFKLWRPNDPVLQVLRDRRP

SEQ ID NO: 67447 - protein, 147 aa, Zea mays
  Coding DNA Sequence Number=SeqID_25668
MTGIHSCVTLGLLPCVKPKGKGLGGTGKKPSINDALSRGSDQRRWLALRDGGARGSGVMVGVTGAMGKLGNGSWSLLVHSRSSDQGSTMMSTTSKGGAMRGRSLGRRHDESSRTRTGSDAWLAAMMNGAFGFYREGEGLGNRGKDGR

SEQ ID NO: 67448 - protein, 93 aa, Zea mays
  Coding DNA Sequence Number=SeqID_25669
  Gene Ontology: Mol. function=protoporphyrinogen oxidase activity; Cellular component=chloroplast; Biological process=porphyrin biosynthetic process
  Homolog annotation: Hit_ID=Q9M629; Match level="QueryCoverage=97%, HitCoverage=18%, E-value=2e-30, Identity=75%"; Hit description =Protoporphyrinogen IX oxidase
MATAASAASPLLNGSRRLRGSAIADSGYSAEAPASTGAQLYADCVVVGGGISGLCTAQALSRRHGVGDVLVTEARARSGGNITPVERPEEGYL

SEQ ID NO: 67449 - protein, 189 aa, Zea mays
  Coding DNA Sequence Number=SeqID_25670
  Gene Ontology: Mol. function=oxidoreductase activity; Cellular component=cellulose and pectin-containing cell wall; Biological process=lignin catabolic process
  Homolog annotation: Hit_ID=Q75J71; Match level="QueryCoverage=90%, HitCoverage=32%, E-value=3e-65, Identity=70%"; Hit description =Putative L-ascorbate oxidase
MDAAARPAIVIDNGTGLPHLAGRVRLAGRARRLLHGGLHAVHPRRQVRLHPHPLRRLQRSLADAQHDRAAGRLGDWAWSINQARSFRWNLTASVARPNLQGSYHYDQINITRTIKVMVSRGHIDGKLHYGFNDISHRDTETPLKFAEYFNVTHGVFSYNQMGNVPPAVNGPLHVIPNVITAELHLFDQF

SEQ ID NO: 67450 - protein, 292 aa, Zea mays
  Coding DNA Sequence Number=SeqID_25671
  Gene Ontology: Mol. function=peptidase activity; Cellular component =extracellular region; Biological process=proteolysis
  Homolog annotation: Hit_ID=Q8RWB6; Match level="QueryCoverage=99%, HitCoverage=70%, E-value=1e-112, Identity=63%"; Hit description =Putative serine protease-like protein
MQSEAWNGYRKPPSEQKYSEDVGHIHQGLNFEPTREELDSLSKACSRLWELDMNRIVPGKDYIIDCGEGKKVYQKGDMASESLFSWLGDDVLRKPTYSRFCALLDNYNPHQDKHEEIAFVEEIARTSPIKYLHRYLVQKGVVPQDYEDFKKMLTSLWFDLYGRGGNSSCSTAFEHVFVGEIKGPGQGESEFYLEEAKGNVDYQGYIFPRRRGESPDSEIQLLIVQFEWHGVLKSVSNTLIGVSPKFEVALYTLCFFVGGEDNRVDIGPYSVNVKCYRLGNNKIGSTFPIAEN

SEQ ID NO: 67451 - protein, 89 aa, Zea mays
  Coding DNA Sequence Number=SeqID_25672
  Gene Ontology: Mol. function=structural constituent of ribosome; Cellular component=ribonucleoprotein complex; Biological process =translation
  Homolog annotation: Hit_ID=Q60E59; Match level="QueryCoverage=97%, HitCoverage=21%, E-value=4e-23, Identity=68%"; Hit description =Putative chloroplast ribosomal protein L1
  Pfam annotation: Domain name=Ribosomal_L1; Domain location=1-89; Score=-100.3; E_value=0.0064; Accession=PF00687.11; Description =Ribosomal protein L1pL10e family
MNLDPKYNDQQLRATVLFLLFWPSLFGCLCPVAFVNLCWSWVTTGEKIDEARAAGADIVGGEDLIEQIKGGFMEFDKLIASPDMMPKIK

SEQ ID NO: 67452 - protein, 40 aa, Zea mays
  Coding DNA Sequence Number=SeqID_25673
MWLLQSYMSLRICQTTEDAYRLAEVQSQINPHPSAVIRCI

SEQ ID NO: 67453 - protein, 124 aa, Zea mays
  Coding DNA Sequence Number=SeqID_25674
  Gene Ontology: Mol. function=protein serine/threonine kinase activity; Cellular component=cytoplasm; Biological process=protein amino acid phosphorylation
  Homolog annotation: Hit_ID=Q6ASU0; Match level="QueryCoverage=83%, HitCoverage=22%, E-value=4e-24, Identity=50%"; Hit description =Kinase domain containing protein
MAVSSKDSRERPRQGVDWWTFGVFLYELVNVRTPFKGHTKEVTLKNILSKQATYPQLDGEADASQSQLRDLVGRLLERDPRHRMGATRGATKIKRHPFFTGVDLALIRCVAPPVVAEPDYHTRF

SEQ ID NO: 67454 - protein, 145 aa, Zea mays
  Coding DNA Sequence Number=SeqID_25675
MGQAHKISNRFSACEAADGYDSFSSLDHVLVGSPKLACHGVCLQSSSSFGAGYSLICAQWRSATKKRGMEVWLEEDRGLDIAALARYFLCVGEGGARRVADLPQRREHDDTEEGRGPRPMVVRRNDACRWPEEVVDLETGEGEVL

SEQ ID NO: 67455 - protein, 63 aa, Zea mays
  Coding DNA Sequence Number=SeqID_25676
MGYSPRTMIFGGGEDILACVPNAGEARIVRNIARSIGFLEIETAPSKLKKWKLSQSLTYTSIK

SEQ ID NO: 67456 - protein, 65 aa, Zea mays
  Coding DNA Sequence Number=SeqID_25677
MTKVDALPKIMELDRRQESKRDAQVNTSQREQYGGTIHLFIGTRHNLCKITFMPFTFTIDLRTIQ

SEQ ID NO: 67457 - protein, 45 aa, Zea mays
  Coding DNA Sequence Number=SeqID_25678
MAGTDHVRDDLRVRCGQGHSRGRDRRWRAFLQFVSGTEEQLNKEF

SEQ ID NO: 67458 - protein, 155 aa, Zea mays
  Coding DNA Sequence Number=SeqID_25679
MGTRTRELEERVEVQDNTIEVLENQLHDLQIELDEVNAHMEMHHQEMQQGMEIDEDIEEEEDPEELDPASRLDSINLAHSAKVRLAAQQLRGHARTWWDHFLAMQSTDLMVTCDEFKEDCIVAHRAEKKRKASMARPSAQPQCFKIVSNNHSKGP

SEQ ID NO: 67459 - protein, 55 aa, Zea mays
  Coding DNA Sequence Number=SeqID_25680
MASTRSTTLVVRPAVLEMSENRRRGARRAQPEQQAPQEEAAPHQHLPPPPLMTIE

SEQ ID NO: 67460 - protein, 88 aa, Zea mays
  Coding DNA Sequence Number=SeqID_25681
MSEFENISRFEFLGCYNNVRHGQIRAELQIDGHQDKLRQSDLATTASWSVGELGRCDQGNWRAHAGASSMPSKTDMATRKEPLECGQD

SEQ ID NO: 67461 - protein, 104 aa, Zea mays
  Coding DNA Sequence Number=SeqID_25682
  Subcellular localization annotation: CTP_CleavageSite=89; ConfidenceScore=5.26e-01
MAIAPACPISHGALLLCSIFPSSDRAPGPCSSLPSLAPLAGDSRADRWQLPVIPCSAPARSPSVVLAPATGAVAELDPAMVLAAVALAPCSMPQSLVPNRRRHQ

SEQ ID NO: 67462 - protein, 115 aa, Zea mays
  Coding DNA Sequence Number=SeqID_25683
  Subcellular localization annotation: CTP_CleavageSite=39; ConfidenceScore=5.03e-01
MAPEARLSCCQPHSVEWHSSRSGAGSAVFLSGRARVRIRCQAILALNAPAIRSAGVAIWPRLLLREDWASGEPKLCANGGYQLRLGVLGVPLIMVPDRYNDLRAKVMKDIPSSSK

SEQ ID NO: 67463 - protein, 71 aa, Zea mays
  Coding DNA Sequence Number=SeqID_25684
MDPEVDWGLRGSSASMEKRSTQALVLACVRRSSEVELLFLKRVLAAAIGGQGRQLQSSAHVSLLARDAGRL

SEQ ID NO: 67464 - protein, 572 aa, Zea mays
  Coding DNA Sequence Number=SeqID_25685
  Gene Ontology: Mol. function=zinc ion binding
  Homolog annotation: Hit_ID=Q6ZI78; Match level="QueryCoverage=99%, HitCoverage=88%, E-value=0.0, Identity=70%"; Hit description =Putative DDT domain-containing protein
  Pfam annotation: Domain name=DDT; Domain location=205-263; Score =37.5; E_value=4.6e-08; Accession=PF02791.7; Description=DDT domain
MEKAQNLPTELMAQVLRMTQYSPLGLYELVDKIYASLLEEVFEGIELHANKDGNVAPCKILKILDSGGTKMCEVGWIRKGKAITNTSVIKAADLFYRRAPVSRNTLKFFIRDATSQSNPWVIHENLAKKFGITIEPPDSVMKKGRKRQENETVEDGRKKLKTDEEHAYVLIKYPIDDLLVRPNADDPSLFKRPLLATDFRVPRCSVGDLLMVWDFCSSFGRALNLSPFPLTDLENAICHKESNVLLVEIHAALFHLLMKDEGDYFTVPQNKKQKLKVSSVTWAEYLCDFLEMTKNEELSTNIATVRRGYYGLIDTNIKLKILRELVEEAIETSAIREILSDRVDQKQVLNATKRENTRKDKKEQNLNTEIAMKNEENQTDAVQGGHEGVDELVRRKEENDKSNISRGRTEVKRHMVQHLETEIEKLSIRSSPLGKDRQYSRYWFFKREGRLFVETADSREWGYYSTKEELDALMDSLNVKGIRERALKRQLEKFYSKIRLSAFVTCDVLVISVLVLGGLQGVCNALEKRSKDIANKTLLEEGVLRRSTRVRAQPKDNPSMAFLKYVNKWRDN

SEQ ID NO: 67465 - protein, 212 aa, Zea mays
  Coding DNA Sequence Number=SeqID_25686
MDSASPDPRAQTQPRLRRRRTPPRPTLGSDSASALEDDELRLARPQGSDSASAPEDDGLRLARPQASDSTSTSEESPPRPNSGPDRPRRQGAIITLPLASSGYEEQDRRPIWLAPVNNRSAARPMLLPPLRSRRGRRAASACEVRAGLHGLDSVGGPHLQAALEHAEAALYTLADAADAAVGAGADAGQAVAVQKNSGWFGFISEALEVMLK

SEQ ID NO: 67466 - protein, 428 aa, Zea mays
  Coding DNA Sequence Number=SeqID_25687
  Gene Ontology: Mol. function=zinc ion binding; Cellular component =integral to membrane
  Homolog annotation: Hit_ID=Q10GD6; Match level="QueryCoverage=77%, HitCoverage=62%, E-value=1e-112, Identity=65%"; Hit description=Zinc finger, C3HC4 type family protein, expressed
  Pfam annotation: Domain name=zf-C3HC4; Domain location=113-153; Score= 27.1; E_value=6.4e-05; Accession=PF00097.15; Description=Zinc finger, C3HC4 type (RING finger)
MQPGPTSPPHESPSPPHEVTPQEEPATLPLPGEEAQPQGQADDGDAVKAAAGAREDRNDRSGATASARGRKRRRRGGTSSTSPSPFPSPAAAAGTTRGVVMVKRDLLARCMTCPLCRRLLRDATTISECLHTFCRKCIYQKFDDEEVECCPVCKIDLGCTPTEKLRADHSLQDVRSKLFPFKRKKINAEEVSSSISLPTKIKERSISSLVVDTPKVKPTGLTGRRTRAVARKAAAVATATVTLHELRPVIEDPVKKEIDSCDSHPHDSNLPASSSKAPQIRRQISPNVEASNRSSNKDTEGDSNDELADKSELWRPLNCLVEAANRTKSFRSSSQSPVVKGEQPNGSTSSTFASKAKARENLEKSKIQDDKKDVPMPPVLPKRRAQGTARKKRDRLQAPTDVKPDAAVAQNAKKFSSIWFSLIASFDQ

SEQ ID NO: 67467 - protein, 309 aa, Zea mays
  Coding DNA Sequence Number=SeqID_25688
  Gene Ontology: Mol. function=protein binding
  Homolog annotation: Hit_ID=Q10GD4; Match level="QueryCoverage=85%, HitCoverage=43%, E-value=1e-118, Identity=81%"; Hit description =Leucine Rich Repeat family protein, expressed
MESSGGGGWLAASAGLGRWQSGAAEDGWLVLGADLLWGRRPAVAQVMNCPNMSELSLCFTEHSSDCTNLITLMDGLGRTCPNLEKMHISSKQLSNEAVCALENANLRGLFMLSLILGSKITDAAVASIVRSCASLELLDLSGSSISDNGVGMICKAYPRTLSRLLLALCPNVTTRGIQLATAQLPCLQLMDCGMSLCANVKNEKEGPYFGEINGGIRIIRKLSILKRQPIHQKLIIKHGNLKKLSLWGCSALDALYLNCPELNDLNLNSCTNLHPELLAPERLLLQCPNLKNVYASGCQDMLIGAIRNQ

SEQ ID NO: 67468 - protein, 103 aa, Zea mays
  Coding DNA Sequence Number=SeqID_25689
MAFENVNEVRKEEEREAVRWRCPIWAEAQPHSTVPGSRPPWVQNYIQKKVAVVVGRERIDEPAEGKCAAVPPAPTAGAAGLHVSPACDASALLPVPGWRTGHT

SEQ ID NO: 67469 - protein, 133 aa, Zea mays
  Coding DNA Sequence Number=SeqID_25690
  Gene Ontology: Mol. function=unfolded protein binding; Cellular component=prefoldin complex; Biological process=protein folding
  Homolog annotation: Hit_ID=Q9AR47; Match level="QueryCoverage=99%, HitCoverage=100%, E-value=6e-53, Identity=82%"; Hit description=VIP3 protein
  Pfam annotation: Domain name=Prefoldin_2; Domain location=16-127; Score=86.7; E_value=7.1e-23; Accession=PF01920.10; Description =Prefoldin subunit
MQQGDGTEAQVTWEDQQNINRFGRLNNRLHELQDEIKLAKILAYYEKETNENLDDAGNELILSDEDVVRFQIGEVFAHMPRDDVETRLEQMKEDAAKKLERLEEEKESILAQMAELKKILYGKFKDAINLEED

SEQ ID NO: 67470 - protein, 82 aa, Zea mays
  Coding DNA Sequence Number=SeqID_25691
  Subcellular localization annotation: CTP_CleavageSite=64; ConfidenceScore=5.74e-01
MAVAGLAPSPAPALLRRFPCSAPPWAPSPFRPRRPRRGRSMMSPFTGARRGMSEPNIVCSVICLCTHSPQDGAIAFWWWCFC

SEQ ID NO: 67471 - protein, 259 aa, Zea mays
  Coding DNA Sequence Number=SeqID_25692
ELDSPIQSESSGIASSNGGAREGPAEQRDDRAAGQAELSSCGSGRLNSKLFIPDTVQLALASRSSKGAISAASACFARSHIEPSFRPASRSVLRRRHRTVVTRRARDVVVSASSRHCQARAPGSCGFSGPMGRHTGAGIHCSVPLALTVVVLLLLASVSVSHGIRPAPVAGANGLVHDSTAEMVVVATAPSAPAQGRQMSRGGKKDDDGDDNVLLREEVVRATGSSLPDCSHACGACSPCSRVMVSFKCSAAEPLPCPM

SEQ ID NO: 67472 - protein, 518 aa, Zea mays
  Coding DNA Sequence Number=SeqID_25693
  Gene Ontology: Mol. function=transferase activity, transferring hexosyl groups; Cellular component=integral to membrane; Biological process=carbohydrate biosynthetic process
  Homolog annotation: Hit_ID=Q9SKT6; Match level="QueryCoverage=90%, HitCoverage=88%, E-value=0.0, Identity=68%"; Hit description =Expressed protein
  Pfam annotation: Domain name=Glyco_transf_8; Domain location=178-493; Score=304.6; E_value=1.8e-88; Accession=PF01501.10; Description =Glycosyl transferase family 8
EDALSGAEDLRPESVRCEGPESAEGAHRLTRKDEAARTYLEGITDALNMTDEMLSARSFSRQLMDQIYLAKTYVVVAKEANNLQFVAELSAQVRRAQSILAHAAAYGGTVMEQEAEKAIRDMSVLLFQAQQLRYDSSITIMKLKGQIQSLEEKSKVEVEKSTKYGQIAAEDLPKGLYCLGVRLTMEWFKSPELQRKFSDRSPAVQSNLRDNSLYHFCVFSDNILAVSVVVNSTAINSRHPDKVVFHLVTDELNYAPMKAWFGMNDYRGVTVEIQKVEDFTWLNASYVPVLKQLQNAATQKFYFSGSGSRGTPIKFRNPKYLSMLNHLRFYIPEIYPELQKVVFLDDDIVVQKDLSELFTINLNGNVMGAVETCMETFHRFHKYLNHSHPLIRAHFDPDACGWAFGMNVLDLVEWRNKNVTGIYHYWQERNADHTLWKLGSLPPGLLAFYGLVEALDPKWHVLGLGYTNVDLATIKEGAVLHYNGNMKPWLKIGMEKYKSFWDNYVDYSHPLIQQCFMR

SEQ ID NO: 67473 - protein, 131 aa, Zea mays
  Coding DNA Sequence Number=SeqID_25694
MVIFKRTKVMPMSNQMILPEGSHSDKSELQQGNQTLIDNQEASKEESDSTRQVENPQDEASNHSRESKVLEKENEKEINREGTSSEVSLSEASQNKTQAVEPVVDPTDVNPSTSTNNERRETSKRHRKEKV

SEQ ID NO: 67474 - protein, 82 aa, Zea mays
  Coding DNA Sequence Number=SeqID_25695
MASAGGPKGKAAPASEHFGQSGGRLTDDWHGDGWRWRAERTYVEQQRVSDTYVRAQGKFAVCRSTRSAALIASRPHHVQFFN

SEQ ID NO: 67475 - protein, 909 aa, Zea mays
  Coding DNA Sequence Number=SeqID_25696
  Gene Ontology: Mol. function=RNA-directed DNA polymerase activity; Cellular component=intracellular; Biological process=RNA-dependent DNA replication
  Homolog annotation: Hit_ID=UPI00005A975E; Match level="QueryCoverage =99%, HitCoverage=52%, E-value=0.0, Identity=87%"; Hit description =PREDICTED: similar to Retrovirus-related Pol polyprotein from transposon 297
  Pfam annotation: Domain name=RVT_1; Domain location=56-225; Score =149.1; E_value=1.2e-41; Accession=PF00078.17; Description=Reverse transcriptase (RNA-dependent
  Pfam annotation: Domain name=RnaseH; Domain location=455-582; Score =9.1; E_value=8.3e-06; Accession=PF00075.14; Description=RNase H
  Pfam annotation: Domain name=rve; Domain location=780-908; Score =80.1; E_value=6.7e-21; Accession=PF00665.16; Description=Integrase core domain
  Pfam module annotation: Pfam domain module=RVT_1::RnaseH::rve; Domain location=56-225::455-582::780-908
MPDIPRDVAEHSLDIRAGARPVRQPLRRFDEEKRRVIGEEIHKLMAAGFIKEVFHPEWLANPVLVRKKGGKWRMCVDYTGLNKACPKVPYPLPRIDQIVDSTAGCETLSFLDAYSGYHQIRMKESDQLTTSFITPFGMYCYVTMPFGLRNAGATYQRCMNHVFGEHIGRTVEAYVDDIVVKTRKASDLLSDLEATFRCLKAKGVKLNPEKCVFGVPRGMLLGFIVSERGIEANPEKIAAITSMGPIKDLKGVQRVMGCLAALSRFISRLGERGLPLYRLLRKAECFAWTPEAEEALRNLKALLTKAPVLVPPADGEALLVYVAATTQVVSAAIVVERQEEGHALPVQRPVYFVSEVLSETKIRYPQVQKLLYAVILTRRKLRHYFESHPVTVVSSFPLGEIIQCREASGRIAKCAVEIMGETISFAPRKAIKSQVLADFVAEWVDTQLPTAPIQPELWTMFFDGSLMRTGAGAGLLFISPLGKHLRYVLRLHFPASNNVAEYEALVNGLRIAIELGVRRLDARGDSQLVIDQVMKNSHCRDPKMEAYCDEVRRLEDKFFGLELNHIARRFNETADELAKIASGRTTVPPDVFSRDLHRPSIKIDDAPEPEAPSAQAEVPSAQPEAPSAQPEVPSAPEGEALGVEEEQNGATPNRDWQAPYLQYLRRGELPPDQVEARRVARRAKSFVLLGDEEELYHRSPSGILQPCVSIAEGQELLQEIHSGACGHHAAPRALVGNAFRQGFYWPTAVADATRIVRTCEGCQFYAKQTHLPAQALQTIPITWPFVVWGLDLVGPLQKAPGGYTHLLVAIDKFSKWIEVRPLSSIRSEQAVAFFTNIIHRFGVPNSIITDNGTQFTGKKFLDFCEDHHIRVDWAAVAHPMSNGQVERANGMILQGLKPRIYNGLNKFGK

SEQ ID NO: 67476 - protein, 114 aa, Zea mays
  Coding DNA Sequence Number=SeqID_25697
MRRKVDELEAKTSALSIERAELKNKLMDSETTTTYLTNTQKELEAALVEKESHINQMKESAAAANTDQTTTIKELLQQKEAGPELDKSESTVIRFLLHQKNISTVYNFRRAGPH

SEQ ID NO: 67477 - protein, 87 aa, Zea mays
  Coding DNA Sequence Number=SeqID_25698
  Gene Ontology: Mol. function=phosphopyruvate hydratase activity; Cellular component=phosphopyruvate hydratase complex; Biological process=glycolysis
  Homolog annotation: Hit_ID=P26301; Match level="QueryCoverage=97%, HitCoverage=15%, E-value=8e-26, Identity=74%"; Hit description =Enolase 1
MSFVSEYPIESIEDPFDQDDWSTYAKLTDEIGQKVQIVGDDLLVTNPTSYAQDAVLNVTCLAYAVQRVAKAINEKTYNALLLKFSDI

SEQ ID NO: 67478 - protein, 133 aa, Zea mays
  Coding DNA Sequence Number=SeqID_25699
MESRKIEYKECREQRGDCWVCPLQPVNRDWIGLNPTIVSLIGPLIGRAHANLGWSPQTHDAIYRTKGSQERLTLVPRPKTLVLRCPHRLGVGVFGNATTYSGSDPDACCFSARRRYEDSNSNKGKLITREQTV

SEQ ID NO: 67479 - protein, 51 aa, Zea mays
  Coding DNA Sequence Number=SeqID_25700
MLLGGEDMHRFPIYLMFPADSTYSEEDVSNYFRKLQHAHHGGAEFAGFIAF

SEQ ID NO: 67480 - protein, 587 aa, Zea mays
  Coding DNA Sequence Number=SeqID_25701
  Gene Ontology: Mol. function=hydrolase activity, hydrolyzing O -glycosyl compounds; Cellular component=apoplast; Biological process =carbohydrate metabolic process
  Homolog annotation: Hit_ID=P49174; Match level="QueryCoverage=99%, HitCoverage=100%, E-value=0.0, Identity=95%"; Hit description=Beta -fructofuranosidase, cell wall isozyme precursor
  Pfam annotation: Domain name=Glyco_hydro_32C; Domain location=415 -539; Score=183.6; E_value=4.8e-52; Accession=PF08244.2; Description =Glycosyl hydrolases family 32 C termi
  Pfam annotation: Domain name=Glyco_hydro_32N; Domain location=58-374; Score=592.1; E_value=5.2e-175; Accession=PF00251.10; Description =Glycosyl hydrolases family 32 N termi
  Pfam module annotation: Pfam domain module=Glyco_hydro_32C::Glyco _hydro_32N; Domain location=415-539::58-374
MGTRPRGVVLAPWAVVLVLVLALRLAGASHVIHRSLEAEAAPSVPASIVSPLLRTGYHFQPPMNWINAPLYYKGWYHLFYQYNPKGAVWGNIVWAHSVSRDLINWVALEPAIYPSIPSDKYGCWSGSATILEDGTPAILYTGIDRADINYQVQVLALPKDASDPLLREWEKPEEYNPVATPAAGGINATQFRDPTTAWRHAGHWRMLVGSVRGARGMALVYRSRDFRKWTKAKHPLHSAALTGMWECPDFFPVSGPGLQAGLDTSAPGRKYVLKSSLDLTRYDYYTIGSYDGGKDRYYPDDPAGDYHHRLRYDYGNYYASKTFYDPVERRRVLLGWANESDSVTDDKAKGWAGIHAIPRKIWLDPTGKQLLQWPIHEVEKLRGKAVSVDAKLVKPGDHFEVTGIATYQADVEVSFELELEAGTSLLEKAEAFDPAYDDDAQKLCGVKGADARGGVGPFGLWVLASADLQERTAVFFRVFRDGHGKPKVLMCTDPTKSSLSPDLYKPTFAGFVDADISSGKITLRSLIDRSVVESFGAGGKTCILSRVYPSIAVGKDAHLYVFNNGEVDVTVSGLTAWEMKKPLMNGA

SEQ ID NO: 67481 - protein, 145 aa, Zea mays
  Coding DNA Sequence Number=SeqID_25702
MGKSKKGGSSSHHSGDKHKREPTPPSEDFGDSEYSEEEFSSESEGSPAPASPPASSNDSDDSQGIAAEVWTYIRAVERVGLEGSDESEYSSDEEDSSDLSEEGSGGDGGSGSGSGKGGDGSCKGGGGDGGSGSKGSSKGSKKASG

SEQ ID NO: 67482 - protein, 192 aa, Zea mays
  Coding DNA Sequence Number=SeqID_25703
  Subcellular localization annotation: CTP_CleavageSite=51; ConfidenceScore=5.47e-01
MPSSRAQSRTRSPSTEAGRRSLPFSLPDARDRAPSSRLARAPASRIPRNARAEPPAPRPWPSSPAPEQHPRQEPHPTRAAGRQDTEPPAPAALCPKADATRAQRPTAPAPLSRDPPTPTDAPGSRAPCPTVRCKPEDRPTPKDTEASRRPFFSLRYGPSRQPFLPRHYSLPPSMAAMKPPVVSLPFPGALSL

SEQ ID NO: 67483 - protein, 164 aa, Zea mays
  Coding DNA Sequence Number=SeqID_25704
MPPSPPQGIPAAGGDPERDGDDNDDSGSSSHNTELLEEKEPEGWIARPITRGTARGCHFHNTLDLKYYPRCSAGSVGGVIVSLVGEGNPMLNNMVNLVVVLNTELDHALDELGKACAKIRNCVLSVQHATIRMVVPSLLSRFSTLTTCRPVVAFLMALLTAGPR

SEQ ID NO: 67484 - protein, 503 aa, Zea mays
  Coding DNA Sequence Number=SeqID_25705
  Gene Ontology: Mol. function=acyltransferase activity; Cellular component=integral to membrane; Biological process=biosynthetic process
  Homolog annotation: Hit_ID=Q5Z6S3; Match level="QueryCoverage=88%, HitCoverage=84%, E-value=0.0, Identity=80%"; Hit description =Putative very-long-chain fatty acid condensing enzyme CUT1
  Pfam annotation: Domain name=ACP_syn_III; Domain location=222-313; Score=-19.9; E_value=0.072; Accession=PF08545.1; Description=3 -Oxoacyl-[acyl-carrier-protein (ACP)
  Pfam annotation: Domain name=ACP_syn_III_C; Domain location=389-475; Score=19.3; E_value=1.4e-07; Accession=PF08541.1; Description=3 -Oxoacyl-[acyl-carrier-protein (ACP)
  Pfam annotation: Domain name=Chal_sti_synt_C; Domain location=334 -477; Score=14.3; E_value=0.00011; Accession=PF02797.6; Description =Chalcone and stilbene synthases, C-te
  Pfam annotation: Domain name=Chal_sti_synt_N; Domain location=73-297; Score=-90.5; E_value=0.097; Accession=PF00195.10; Description =Chalcone and stilbene synthases, N-te
  Pfam annotation: Domain name=FAE1_CUT1_RppA; Domain location=62-377; Score=609.5; E_value=2.9e-180; Accession=PF08392.2; Description =FAE1Type III polyketide synthase-lik
  Pfam module annotation: Pfam domain module=ACP_syn_III::ACP_syn_III _C::Chal_sti_synt_C::Chal_sti_synt_N::FAE1_CUT1_RppA; Domain location= 222-313::389-475::334-477::73-297::62-377
MAVYRRVVDNILAVVAVPVAAAALVAAARFGPPEELAGRLGEVRPAHLFLAAFVPAAAATVYLMLRPRAVYLVDYACFRTASNCRVPFSTFLEHAKQPVRGCTLNLINHAITLSPHNVGLFPTVPVLNERSIRFMTKLLERSGLGEETCLPPAHHYIPPYKYCTIDAARGEVDLVVFSTLDDLFAKTGVSPGAIDIVVANCSLFCPTPSLVDMIINRYGLRSDVRSVHLSGMGCSAGLISVGLARNLLQVAPEGTHALVVSTETITPNYYVGSERAMLLPNCLFRIGGAAALLSNSPAKARFRLKHVVRTLTGAQDNAYTCVFQQEDDSGNVGINLNKDLMTIAGNALKANITAMGPLVLPASEQLLFALSFIARKVLSGKFKPYIPDFRTAFDHFCIHAGGRAVIDELQRSLKLSDEQVEASRMALHRFGNTSSSSLWYELAYIEAKGRMRRGDRVWMIGFGSGFKCNSAAWECIAPAADAQGPWATSIHRYPVDIPDVLKH

SEQ ID NO: 67485 - protein, 107 aa, Zea mays
  Coding DNA Sequence Number=SeqID_25706
  Subcellular localization annotation: CTP_CleavageSite=73; ConfidenceScore=5.27e-01
MAGSDASRGGRGRWGGCWRLRASGFGLLGRRGSSWRLVERRASGSQTQRRARPGRLGLAAGSGLVLRCAGGFRSMAQSGRARRLACSREAGRRRERRLETRGGYRLG

SEQ ID NO: 67486 - protein, 72 aa, Zea mays
  Coding DNA Sequence Number=SeqID_25707
MARFGRLRNPGRVLLPIQTTRATDGIRCDNLATMAAIVMVRREEDGPDEMAPPIREEIAGSWGLRGWRGGPT

SEQ ID NO: 67487 - protein, 313 aa, Zea mays
  Coding DNA Sequence Number=SeqID_25708
  Gene Ontology: Mol. function=pyridoxal phosphate binding; Cellular component=cellular_component; Biological process=metabolic process
  Homolog annotation: Hit_ID=Q1RY50; Match level="QueryCoverage=94%, HitCoverage=96%, E-value=2e-90, Identity=53%"; Hit description =Pyridoxal-5-phosphate-dependent enzyme, beta subunit
  Pfam annotation: Domain name=PALP; Domain location=30-299; Score =143.9; E_value=4.3e-40; Accession=PF00291.15; Description=Pyridoxal -phosphate dependent enzyme
MGSKDGTGDISEAQGYAADIDSIREAQARIAPYVHRTPVMSSTSIDAMVGKKLFFKCECFQKAGAFKIRGASNSIFALDDEQVSKGVVTHSRCDISRTESGNHAAAVALAAKLRGIPAHIVIPRNAPACKVENVKRYGGHIIWSDASIESREYVCKRVQEETGAVLIHPFNSKYTIRQNGQGTVSLELLEQVPEIDTIIVPISGGGLISGVALAAKAINPSIRILAAEPKGLWCVNLVDDVIVVDDTAIVDAMKMCYEILKVAVEPSGAIGLAAALSDEFKQSSAWHESSKIGIIVSGGNVDLGTLWQSMYKH

SEQ ID NO: 67488 - protein, 100 aa, Zea mays
  Coding DNA Sequence Number=SeqID_25709
MQTAYNCTKGTHPFDFDASSMEAQAHTSCNRRAGYYVRETAPPLAPVSCILDRGIGAVTRGNPAHGPAVPTQACRSRGPGKGILRKGSFPAKEAGPEPSY

SEQ ID NO: 67489 - protein, 133 aa, Zea mays
  Coding DNA Sequence Number=SeqID_25710
  Gene Ontology: Mol. function=hydrolase activity, acting on acid anhydrides, catalyzing transmembrane movement of substances; Cellular component=integral to membrane; Biological process=copper ion transport
  Homolog annotation: Hit_ID=Q6JAG2; Match level="QueryCoverage=97%, HitCoverage=13%, E-value=1e-36, Identity=65%"; Hit description =Putative copper-exporting ATPase
  Pfam annotation: Domain name=HMA; Domain location=74-132; Score=22.5; E_value=0.0015; Accession=PF00403.16; Description=Heavy-metal -associated domain
MAASTRALFLSCFHGGGGAEVSRHLALRPRYPSNPRRPRSAVVAGEGGEGGGSGGDLEAAKGTADRDEEEKVSVFAVTGMTCAACAGSVEKAVKRLPGIHDAAVDVLGGRAQVVFYPAFVSNSKLEHLMQIAM

SEQ ID NO: 67490 - protein, 625 aa, Zea mays
  Coding DNA Sequence Number=SeqID_25711
  Gene Ontology: Mol. function=protein-tyrosine kinase activity; Cellular component=integral to membrane; Biological process=protein amino acid phosphorylation
  Homolog annotation: Hit_ID=Q9ZTJ6; Match level="QueryCoverage=80%, HitCoverage=85%, E-value=2e-61, Identity=31%"; Hit description=Hcr2 -5D
  Pfam annotation: Domain name=LRRNT_2; Domain location=25-66; Score =30.6; E_value=5.4e-06; Accession=PF08263.3; Description=Leucine rich repeat N-terminal domain
  Pfam annotation: Domain name=LRR_1; Domain location=104-126; Score =13.4; E_value=0.86; Accession=PF00560.23; Description=Leucine Rich Repeat
  Pfam annotation: Domain name=LRR_1; Domain location=128-150; Score =9.9; E_value=4.1; Accession=PF00560.23; Description=Leucine Rich Repeat
  Pfam annotation: Domain name=LRR_1; Domain location=152-174; Score =15.8; E_value=0.15; Accession=PF00560.23; Description=Leucine Rich Repeat
  Pfam annotation: Domain name=LRR_1; Domain location=176-198; Score =6.8; E_value=15; Accession=PF00560.23; Description=Leucine Rich Repeat
  Pfam annotation: Domain name=LRR_1; Domain location=200-222; Score =13.6; E_value=0.72; Accession=PF00560.23; Description=Leucine Rich Repeat
  Pfam annotation: Domain name=LRR_1; Domain location=254-276; Score =3.3; E_value=69; Accession=PF00560.23; Description=Leucine Rich Repeat
  Pfam annotation: Domain name=LRR_1; Domain location=278-300; Score =10.8; E_value=2.7; Accession=PF00560.23; Description=Leucine Rich Repeat
  Pfam annotation: Domain name=LRR_1; Domain location=302-324; Score =11.9; E_value=1.7; Accession=PF00560.23; Description=Leucine Rich Repeat
  Pfam annotation: Domain name=LRR_1; Domain location=326-348; Score =18.0; E_value=0.034; Accession=PF00560.23; Description=Leucine Rich Repeat
  Pfam annotation: Domain name=LRR_1; Domain location=368-392; Score =6.8; E_value=15; Accession=PF00560.23; Description=Leucine Rich Repeat
  Pfam annotation: Domain name=LRR_1; Domain location=394-416; Score =14.4; E_value=0.41; Accession=PF00560.23; Description=Leucine Rich Repeat
  Pfam annotation: Domain name=LRR_1; Domain location=418-440; Score =12.5; E_value=1.3; Accession=PF00560.23; Description=Leucine Rich Repeat
  Pfam annotation: Domain name=LRR_1; Domain location=443-465; Score =1.3; E_value=1.6e+02; Accession=PF00560.23; Description=Leucine Rich Repeat
  Pfam annotation: Domain name=LRR_1; Domain location=467-489; Score =18.6; E_value=0.023; Accession=PF00560.23; Description=Leucine Rich Repeat
  Pfam annotation: Domain name=LRR_1; Domain location=491-514; Score =10.7; E_value=2.8; Accession=PF00560.23; Description=Leucine Rich Repeat
  Pfam module annotation: Pfam domain module=LRRNT_2::LRR_1::LRR_1::LRR_ 1::LRR_1::LRR_1::LRR_1::LRR_1::LRR_1::LRR_1::LRR_1::LRR_1::LRR_1: LRR_ 1::LRR_1::LRR_1; Domain
  Pfam module annotation: Domain location=200-222::254-276::278 -300::302-324::326-348::368-392::394-416::418-440::443-465::467 -489::491-514
  Subcellular localization annotation: CTP_CleavageSite=64; ConfidenceScore=5.55e-01
LIITLAMFQPCLLANASSSTGGVHLGSQQAALLQWKSTLRSSSASLDSWRAGTSPCSSNWTGVVCGAVAHRGRRATPQAVVRIDLPNAGVDGRLGALNFSALPFLRYIDLSYNSLRGEIPRSIASLPELSHLDLTGNRLHGHVPREMGSMGSLTVLLLSLNNLTGTIPASIGNLTRLVQLTIHKTSLIGSIPEELSKLTSLEYLQLSGDLLSGRIPESLGNLTKAKPPAPLRQPAISRNQLVGRIPPSLGNLSALYEIWMYENELAGSVPAEIGALAGLQTLHLAENLISGPVPETLTGLTNLNMLQIFSNKLSGPLPLGFSNLSKLEVLDLANNSFSGDLPSGFCNQGNLIQFTVSLNIKDLGLEHHLTIFDVSSNMNQFSGNIPPEFGRMSSLQYLDIQLNSLSGPIPQELGSCTQLLFLRINGNRLTGHLPVTLGSLWKLQIVLDVSSNELTGELPPQLGNLVMLELLNLSHNNFSGSIPSSFSSMASLSTLDVTYNDLEGPLPTGRLFSNASSPVTWFLHNNGLCGNLTGLPACSSPPTIGYHHNSRRRRTRILVATTISVPLCMLTVLFGIIVIIRRSDKPHKQATTTTTAGRGDVFSVWNFDGRLALRTSFGRQKTQRE

SEQ ID NO: 67491 - protein, 481 aa, Zea mays
  Coding DNA Sequence Number=SeqID_25712
  Gene Ontology: Mol. function=small conjugating protein ligase activity; Biological process=protein modification process
  Homolog annotation: Hit_ID=Q9ZVX1; Match level="QueryCoverage=95%, HitCoverage=43%, E-value=4e-82, Identity=37%"; Hit description =Putative ubiquitin-conjugating enzyme
WLNGFWRTNRLEGTITKVEFVAVLVYWIASAHFATDQQSVPLEEQNPEDLTLLSRFSYTNWQLTDWCLSQRYTSCTNDTMIDSDKHTWQICTCSENSVPLSGIPESQADAQIDTDTGHRQTDVDSTADVLSMSDGDNSCIAKESETGTSASSISNEGPQDNATSRKKFRKDGTKECGVAATALIPIHSPNEHEFFPEQYVVDKVTNDVGVDDSSEPRRVGLVRGVNAKDRTATVSWFKPPLHPEEPKEIACNEIVSVYELDVHPDYDYCYGDIVVRLPPVKPVIESTNSKEQMELDKTLDSSEGFAASYSAPPDTSADEQLSQKESCLQFTSLSWAGNIVGFQDGEIEVIWGDGSISKVGPHEIYVVGREDDGASLDDGTASDGSSWETVDDNEMDVLHDSAKGDSQNVPENSIGRENGSFSSQDGSSVATGPLSVAFEFVTRLASDLFARGRRHLDGSSDAMDEVESHWSNEISEIGDDI

SEQ ID NO: 67492 - protein, 197 aa, Zea mays
  Coding DNA Sequence Number=SeqID_25713
  Gene Ontology: Mol. function=small conjugating protein ligase activity; Biological process=protein modification process
  Homolog annotation: Hit_ID=Q9ZVX1; Match level="QueryCoverage=84%, HitCoverage=22%, E-value=3e-32, Identity=65%"; Hit description =Putative ubiquitin-conjugating enzyme
  Pfam annotation: Domain name=UQ_con; Domain location=31-193; Score= -11.8; E_value=0.00024; Accession=PF00179.16; Description=Ubiquitin -conjugating enzyme
MANPTQIGDMTSFNIFRKVQVEKSGSKRYNRNWSILEKNLPDYIYVRVFEDRMDLLRAVIVGASGTPYQDGLFFFDFHLPLEYPLVPPSAYYHSGGLRVNPNLYVDGKHFEDFVKSHFRKRGHYILKACHAYLQGNVVGTLTDDACTTDRSKEHSSSVGFKLVLAKILPRLITALKDTGADCDQYEHLGRTETVTES

SEQ ID NO: 67493 - protein, 598 aa, Zea mays
  Coding DNA Sequence Number=SeqID_25714
  Gene Ontology: Mol. function=structural molecule activity; Cellular component=viral capsid; Biological process=lignin catabolic process
  Homolog annotation: Hit_ID=Q9AWU4; Match level="QueryCoverage=96%, HitCoverage=97%, E-value=0.0, Identity=72%"; Hit description =Putative spore coat protein
  Pfam annotation: Domain name=Cu-oxidase; Domain location=241-401; Score=-17.2; E_value=0.0047; Accession=PF00394.12; Description =Multicopper oxidase
  Pfam annotation: Domain name=Cu-oxidase_2; Domain location=441-597; Score=35.1; E_value=1.9e-07; Accession=PF07731.4; Description =Multicopper oxidase
  Pfam annotation: Domain name=Cu-oxidase_3; Domain location=88-229; Score=-6.9; E_value=4.8e-05; Accession=PF07732.5; Description =Multicopper oxidase
  Pfam module annotation: Pfam domain module=Cu-oxidase::Cu-oxidase _2::Cu-oxidase_3; Domain location=241-401::441-597::88-229
MVAARAQLAALLLLVAAVCSATGFRPGGGGPPSVTEDTLEKVAASLEMYVDALPQMPKVLGYSIKHGRPTPTHLTIGMYQKKWKFHRDLPPTTVFVFGTSVESATFPGPTIEALQGVPLQVTWDNHLPDRHILPWDPTVPTAIPRGGGVPTAVHLHGGVHPPQSDGHAYAWFTAGFRERGPAWTTPTYAYPNVQSPGGALWYHDHALGLTRANLLAGLLGAYVVRNPAAEAPLGLPRGDAFDRVLVLADRSFYADGSLYMNRTGDNPGVHPQWQPEYFGEAVTVNGKAWPFLRVARRRYRFRVINASNARFFNLSLSASSDGLSLSLIPLHVVGSDTSYLPRPVAVTHLLVAAAEAFDVVVDFSECAAPEAELVNTAPYPYPDGDAPNHLNGKVMKFVVEPARVRDDDDDSRVPARLLDYVKVAEEDAARRRYIVLYEYEDEATGDPTHLYINGKRLEDPATETPRPGSTEVWEVINLTQDNHPLHLHLATFQAVRARELDGLEEFKHCMERLNDAVRCDVGRHAVGEEVAVPEHERTWKNVVKIAPGFMTTVVVKFLMVDTGRSYPFDATAEPGYVYHCHILDHEDNAMIRPLKLIK

SEQ ID NO: 67494 - protein, 160 aa, Zea mays
  Coding DNA Sequence Number=SeqID_25715
  Gene Ontology: Mol. function=nucleic acid binding; Cellular component= intracellular; Biological process=chromatin assembly or disassembly
  Homolog annotation: Hit_ID=Q5WMW4; Match level="QueryCoverage=86%, HitCoverage=21%, E-value=3e-49, Identity=66%"; Hit description =Uknown protein
MAFVRRSLYPWGDNASMDEGVPINKLQATCASEGRGLGKTIQTIAFLSSVIGKGNGHGQLTNKGKMTGPVLILCPTSVIRNWENEFSEWAEFSVAVYHGPIRDLVFGKIETQGLEVLITSFDTFRIHDKVLCGISWELVVVDEAHRLTGTIMQNNIVFCK

SEQ ID NO: 67495 - protein, 41 aa, Zea mays
  Coding DNA Sequence Number=SeqID_25716
MGSPNSIREQERWFKENDGSGAVCQRNGQDALNAEGHIACQ

SEQ ID NO: 67496 - protein, 640 aa, Zea mays
  Coding DNA Sequence Number=SeqID_25717
  Homolog annotation: Hit_ID=Q6L4I8; Match level="QueryCoverage=13%, HitCoverage=19%, E-value=4e-15, Identity=48%"; Hit description =Putative cytochrome P450
MTPNELRYEEPIADDWDKPSTASTDEPNLVHVLRHGPPRLVESRLHALRVAQELGARPRAGGRARVLTREDDGDHHPHDLGLGRAALVPVPGLHQALQHVVVPGSDGGAPARPDVLGEDTLFDGTDVTKLPTTCSTSGLTAELAMAHYGSHLPSDKGGSIASWQPAPSLALACQQASSARGTPTMASMGKMSVGDLTESDLKGKRVFVCVEIHEPPDENQNSTNDILSTLNATPIGSSPESTSCWFPCDNKSSKQLQLQRGGPSLAERQQPRAMLACRAITKRVKQPKEEEQVASVPEAAVVADVEGKEEYNSVARLTGVNCRSDFIIWRSLFNTCCRLCKLFTCQELKLTDSQSALILIDAQVVFEEMQQSATSVGAPQDAFNMFCNKTSSSKQVARAIFVNPEHDLYPKIFHLEHLISGKEDTTNNFSRGYYTIGKGMVLVANNFGDDLLARRSEIKQPWPPPQELACLGLNIMVVSVFLAASDLHAVTYIYAQSLFGIPVVLRTAAWGQAASQGERNVRSLTLGSRTPVVCEATLTNTIPGVTRIPTASSSDSGGAGDGRRGSRGHGVFYACSGQPPRLEIWLANPRWRATYPQQPHLRGDGQHDNRDPPARGAELRRGRGAFQLASRPHMSASTER

SEQ ID NO: 67497 - protein, 111 aa, Zea mays
  Coding DNA Sequence Number=SeqID_25718
MALNTTGGGPPSQNADEKLGVRYQAHMDHHWAVLERTVSNDVTPIDPNEVLDNHRVGELIATFTSAADVAFSSTADVECGVVHSYAATNIEIDVVEAAAATRVDALESWRP

SEQ ID NO: 67498 - protein, 193 aa, Zea mays
  Coding DNA Sequence Number=SeqID_25719
MTTRATTRETCANRRAARGADPATAREFAYGSDEGAYHGQTVTNDMGSTDDGETQTHDEGAAQAHDVEALARRWRGMRAARRLLRDALDRRATRLGAGRATRAAVRLGRACWARLRRGQARGEGDRSGALGEKEENWARAVLAEAHGGRLTRTSRRGRPSREDSWRRPPGTRDGRADHGRAERPGEQRSGRAR

SEQ ID NO: 67499 - protein, 68 aa, Zea mays
  Coding DNA Sequence Number=SeqID_25720
  Gene Ontology: Mol. function=zinc ion binding
  Homolog annotation: Hit_ID=Q10BU5; Match level="QueryCoverage=92%, HitCoverage=25%, E-value=1e-19, Identity=70%"; Hit description=DHHC zinc finger domain containing protein, expressed
LAMLLWSYFSVVFTDPGSVPPNWNLDFDVEMGETAPLASSELCSQMNSQQSVALGNMTNPRVRWKMCS

SEQ ID NO: 67500 - protein, 120 aa, Zea mays
  Coding DNA Sequence Number=SeqID_25721
MARRSEGKNTTTAGPYARRLSDGNNEGAANNGGIEARARHGARRAEALGRGLAGRFLSEARRGRRRGFTTRTGVGERNQFSKKEENVERPNDWVAGASARRARATTCWGPYTWNVCVVGR

SEQ ID NO: 67501 - protein, 177 aa, Zea mays
  Coding DNA Sequence Number=SeqID_25722
  Gene Ontology: Mol. function=transferase activity; Biological process= paclitaxel biosynthetic process
  Homolog annotation: Hit_ID=Q9LGF6; Match level="QueryCoverage=88%, HitCoverage=36%, E-value=2e-40, Identity=63%"; Hit description=3'-N -debenzoyltaxol N-benzoyltransferase-like
  Subcellular localization annotation: CTP_CleavageSite=61; ConfidenceScore=5.56e-01
MAGRRRSRRARAAPRRRWRSSSRCTSSSPTRRVTGRAPRRPSSGPSRGALVDYYPLVGRLAVSEGAGGLHVDCSAEGVWFIEAVVRCRLEDVDYLEYPLQIPNDDLLLHPLPRPTHEEESKLILLVQVTAFECGGFVVGFWFSHAVADGLGAAKFMGAVGELARGVDRVSVAPTSLL

SEQ ID NO: 67502 - protein, 292 aa, Zea mays
  Coding DNA Sequence Number=SeqID_25723
  Homolog annotation: Hit_ID=Q1SHH2; Match level="QueryCoverage=37%, HitCoverage=42%, E-value=9e-16, Identity=36%"; Hit description=Zinc finger, DHHC-type
MAAAVAAPPWASLGPDSPPPLPTGDPTKPDQLRRTCDMQPPGRIVKFEIGDEIGELLKTASSSGGGPAVEFYTFLETTLVTLSLLPHFIAFFSDAEIPGSPAALATTFLTFGNCITVIIYIKCAAYEKKTTPHWIYDLGRKRNFAQVFGNDRKYWFIPAYSEEDLRRTPALQGLDYPLTLEVWIQITSSNFCHPIQLWLQTASRNSGDSFERFEWRLSPSCLSSSSHGKKIKLSHWPSAIFETCSYAANMAYETRLEIHELRYRSGLPPLEVPRPPLAYSGISSGEDNIEEI

SEQ ID NO: 67503 - protein, 55 aa, Zea mays
  Coding DNA Sequence Number=SeqID_25724
MGDSSDGRDPRASRCVTLTNRSHGTAAEGAGAPVLDLGHEVNIHSKEMKLLLKTV

SEQ ID NO: 67504 - protein, 181 aa, Zea mays
  Coding DNA Sequence Number=SeqID_25725
  Gene Ontology: Cellular component=integral to membrane; Biological process=vesicle-mediated transport
  Homolog annotation: Hit_ID=Q8H3D2; Match level="QueryCoverage=95%, HitCoverage=67%, E-value=1e-76, Identity=84%"; Hit description =Putative Vesicle-associated membrane protein
MVSPTPGGKDAREGGGKAEWMIYAFVARGTAVLAEYTEFTGNFPAIAAQCLQRLPAGSSSAGTGPDGRGDAPARFSYACDRHTFNFLLYRGYAYCVVAEESVPKNVSVAFLERLKDDFMKRYGGGKADTALAKCLNKEYGQVIKQHIQYVLDHSEELDKMLKVQAQVSEVKNIMLDSIEKI

SEQ ID NO: 67505 - protein, 56 aa, Zea mays
  Coding DNA Sequence Number=SeqID_25726
MATPSSSYDDCIECFKEFHAKNILLLQISIMLICSMVSRTGGRWYYSVCDMFDNVI

SEQ ID NO: 67506 - protein, 170 aa, Zea mays
  Coding DNA Sequence Number=SeqID_25727
  Gene Ontology: Mol. function=nucleic acid binding
  Homolog annotation: Hit_ID=Q8H6I0; Match level="QueryCoverage=81%, HitCoverage=8%, E-value=8e-54, Identity=77%"; Hit description =Putative gag-pol polyprotein
MKRNLRPFYTKSFSRRLLLPKRPSATKHRPNNSQEDFLIKENKKHVKVKNAYALEVEKCDKLSSELSTFHDIIANLRNENARLIPKVDSNVCDDSNSNLRNDNVNLLTKIEELNVSLASLKIENENLIAKTKDLDVCNVTISDLRTKNDILHAKIVELNSCKPSTSTVEH

SEQ ID NO: 67507 - protein, 134 aa, Zea mays
  Coding DNA Sequence Number=SeqID_25728
  Gene Ontology: Mol. function=protein binding; Cellular component =nucleus; Biological process=regulation of transcription from RNA polymerase II promoter
  Homolog annotation: Hit_ID=Q6YVM7; Match level="QueryCoverage=99%, HitCoverage=66%, E-value=3e-57, Identity=47%"; Hit description =Putative WD40 protein Ciao1
  Pfam annotation: Domain name=WD40; Domain location=53-91; Score=39.9; E_value=9e-09; Accession=PF00400.22; Description=WD domain, G-beta repeat
  Pfam annotation: Domain name=WD40; Domain location=7-50; Score=45.5; E_value=1.8e-10; Accession=PF00400.22; Description=WD domain, G-beta repeat
  Pfam annotation: Domain name=WD40; Domain location=98-134; Score =20.0; E_value=0.0083; Accession=PF00400.22; Description=WD domain, G- beta repeat
  Pfam module annotation: Pfam domain module=WD40::WD40::WD40; Domain location=53-91::7-50::98-134
MDVGAELREAHRLTGHADRVWALAWNPAPGPGSSPVLASCSGDKTVRIWKRAPDGAWQCSGHDNEVKSVSWSPSGSLLATCSRDKMVWIWEVLPGNEFECVSVLPGHTQDVKMVQWHPILDILVSVSYDNSIRV

SEQ ID NO: 67508 - protein, 193 aa, Zea mays
  Coding DNA Sequence Number=SeqID_25729
  Gene Ontology: Mol. function=hydrolase activity, acting on acid anhydrides, catalyzing transmembrane movement of substances; Cellular component=integral to membrane; Biological process =metabolic process
  Homolog annotation: Hit_ID=Q9LT02; Match level="QueryCoverage=72%, HitCoverage=16%, E-value=2e-42, Identity=49%"; Hit description =Putative cation-transporting ATPase
MEIVAYFRRTYFRWLFSSVYAYFRGFLAHEKLGVSCSELPVELSIAANTSLIALARHGIFYTKPFRIPFAGKVGDPLEKAAIKGLDWIYTSDEKAMSKKPGGQPVQIVHRYHFASHLKRMSIIVCIQQKFYAFIKGAPETIQEKLVDLPAAYVETYKKYTRQGSRVLALAYKLLPEMPCTSIKALCQNKAKNF

SEQ ID NO: 67509 - protein, 1010 aa, Zea mays
  Coding DNA Sequence Number=SeqID_25730
  Gene Ontology: Mol. function=ATP binding; Cellular component =membrane; Biological process=defense response
  Homolog annotation: Hit_ID=Q943S7; Match level="QueryCoverage=79%, HitCoverage=99%, E-value=0.0, Identity=54%"; Hit description =Putative stripe rust resistance protein Yr10
  Pfam annotation: Domain name=LRR_1; Domain location=592-613; Score =8.1; E_value=8.8; Accession=PF00560.23; Description=Leucine Rich Repeat
  Pfam annotation: Domain name=LRR_1; Domain location=615-636; Score =9.2; E_value=5.3; Accession=PF00560.23; Description=Leucine Rich Repeat
  Pfam annotation: Domain name=NACHT; Domain location=192-345; Score= -23.8; E_value=0.0041; Accession=PF05729.3; Description=NACHT domain
  Pfam annotation: Domain name=NB-ARC; Domain location=153-456; Score =199.4; E_value=8.3e-57; Accession=PF00931.13; Description=NB-ARC domain
  Pfam module annotation: Pfam domain module=LRR_1::LRR_1::NACHT::NB -ARC; Domain location=592-613::615-636::192-345::153-456
MDIVVGALSGIVDALPGKLGELLEQEYALLSGVRGDVIFLKDELSSMRAAIHYCESLDHHDSQTTGWISLVREVAYDIEDWVDLFSIRVHGGAQSTSGFRAWLSRSVDKLTALPARHTIASELQGLKERVLEISRQRNRYRLGQMVGTTSQHPHDPRLSALFVDPGRLVGFDGKVEDVSKTVMDAGGSNGLRIVSIVGMAGSGKTTLANAVYRRLQADNTFQCSAFVSIGPKPDMVKTVKDMLSRLGDGHRGGEDISQLIPRVRGILEKKRYLAWIDDIWSSEQWGVIRCCFPDNSLGSRIITTSRNDALPTNHHYGSSKFVYKIGLLTDNEARELFLKKAFSSRNDCPQHLVDAFTKVLRRCAGLPLAVVSVAAKLAHKQSREEWEKHGLNLLYSSHSDGSDGLKQILHLSYSDLQPQLRSCLLYLSIFPENSEVETDRLVRRWIAEGLIAASNEDTAISSLNELIGRNLVQPLDLNHDSIPRCCRVHPVIYDFIVCMSMQDNFATVTDAQHVPINNKTVRRLSLNLKSNSKQDQPAARNETTDLSHARSVTVFGHASATPHLTDLKVVRVLDLEGCKGPVCLDGLCKLVLLRYLSLRGTDVSELPAAIGDLRCLETLDVRSTKVEELPPSIVRLQKLMHLLAGSAKLPDGMDKMKALRSLSCAATTKSSANVVEELSKHHNLRQLELYYYATETPGNEKQIKFPADGLQTVKQLCIRCTSPSVTFEPRVLPKVQALVLRFEKGRADDTIGVSGLEHLSSLKHLVLEFEQHDAGAMATVTAVRMAAEGLHLDHQYITLKVDGKNCGACGLLESLCRLHRLRTPVTGESDNGVVFPSLCSGAVTIPLWASCLPSPIPQRYNGYPDSGVPENLTLIQIWSLFLIPPCPALLSRRCVVDDSGAPVRSAGARVADAQRGGWLVAMELDAVAEHEEHLLETHNEEEDAAQALFGSSSAALRRDAAAAPSSDVGGTGSSSATRTEASTGNEGRTRKRASSSPVWEDFEQVFNFEN

SEQ ID NO: 67510 - protein, 336 aa, Zea mays
  Coding DNA Sequence Number=SeqID_25731
  Homolog annotation: Hit_ID=Q6QP54; Match level="QueryCoverage=28%, HitCoverage=40%, E-value=9e-18, Identity=51%"; Hit description =Putative kinase
  Subcellular localization annotation: CTP_CleavageSite=31; ConfidenceScore=5.08e-01
MDGGRILDPLLSGAMDSASLLRSHPARPPPRTASRMPSMADPPPHPHPNHLLLVASTIPFVGAASTAGPASLIIGPYLVPFLLPTSASASPATLADLSRARGSQPRLPILPSPVYSRKRYFVLEDAVLRFFKSMSSSKREPESARGRVMIALPVDVAGLCPRLGDVEAPPKPGSSLSSMAEVESEPLGRARRKSSAEARAPESEPWVGRSGVRRLPGLSPSPSPGSGGAEFVVFRGLSPSPSPGSGGAEFVVFRGLSPSPSPGSGGAEFVVFRGLSPSPSPGSGGAEFAVFRGLARVRALGRAELPMAPLAGPGFLCVKCSCGLAGRCGDLVRVAS

SEQ ID NO: 67511 - protein, 798 aa, Zea mays
  Coding DNA Sequence Number=SeqID_25732
  Homolog annotation: Hit_ID=Q10T01; Match level="QueryCoverage=98%, HitCoverage=91%, E-value=0.0, Identity=47%"; Hit description =Expressed protein
MEEPSSSKPTVKRLMEDELRKLKQLKLPNDEVERILADLGHGACLDKSSAQNSKAKKGDQNHIRGITTTAAPSGSLDPTASNCIKEAEENELEFALADFLGRIHRNCNNNGELCTEMKALIQTKIAELDNPPCTFAYEQQTSRGDEYDTAGGKHRCSSSKTQPKKFRDALEMLSSDTELFFQKSNSRILESAQRNQNRLIGNNLEPTKIADNTDSNKDPKSLNQHELATRRYGKESRNIFFWKKERSSPRQTAQGTSSSQPVNKIVILKPNPRREIGHAVAVSSTQAPKLGATESSKFSIKEVRRRFRIVTSEATKGIPSVSEDNLQKGQHWLNSSAFTIIKDTRQLAEQTSEGKFSSSVMKDFRSSNSGRQKKRKNDGPTEKNSSIITSSKDESVFYDEARKHLTEILKDKRQTTKQHPTLEISRSLVRMLSFPQSSTSSPRSSPRAKDCIYLSPEEASIRAIYKSNKDLLEEESQSGRISRECCAELDTLRTKEIDKLDCMGKNSNAWGTPAKQCTYKPSQDMVGEAEPGQRHVRTFPSSPENDFEKLECQEPTTPRPSAQIEQISQFSPDGNHEKQEQPSPQSVLDVFFLDGTDTENMIECELHKDILRTRYNTTGDGSDQGIFWEDKHPRLCYIKELLELSELCANQNLEVWYLEDELISPCLFEEVHGGNQIDGTKLLFDCICEAVTEIQDIYFRNPPCLSSLTHSIRAPPPAGQNLISEINKRVERHLHYRFPSTLDQLVNMDLEGGSWMDLGSESGEVAVVIWDCTLDELLEELVYDLWISGFNLAAGNHL

SEQ ID NO: 67512 - protein, 130 aa, Zea mays
  Coding DNA Sequence Number=SeqID_25733
MERHILLVTGSSTLNPQAGLLQVKKRMMKKLPPSLGISLHHHHHPHLLLTYASWLKVNGRYLRTQVGITADQNNTKVDTAPKVNSTPVLFTLIWHSLFASRLYFHLLQVEAFENKSPTLAPTSGELTSTL

SEQ ID NO: 67513 - protein, 195 aa, Zea mays
  Coding DNA Sequence Number=SeqID_25734
MNRERGSHPLPQHLAPEGPVQLNELVPKSFSRDGRDAALARLKWSRGGFSNVVVGSLRYSPYSEGNSADAGDNRGKKVKTQSEEGTSKGKVMIAATRKRKIEAKGGRWHRKDPIPWAANDVYFTSHMARELKIFPDRRNIGAVVSTVMYKDRQEALRKKRKAPLRLVDPRCDAKISRSSAKGATPAAVMPLLWHQ

SEQ ID NO: 67514 - protein, 130 aa, Zea mays
  Coding DNA Sequence Number=SeqID_25735
MMTNATMEDTKMYEVSSNNDRKAQDILEEVNCEQLDAAAEEGCFELIRVAEIERKIQSMANKIMDRAVATMVEEIVDRVLDEDVNNLAFEKAYAGMETTMVGHNVAPTAIVGGDQNGYFYLTQTENNGAI

SEQ ID NO: 67515 - protein, 224 aa, Zea mays
  Coding DNA Sequence Number=SeqID_25736
  Gene Ontology: Mol. function=transferase activity; Cellular component= nucleus; Biological process=regulation of transcription, DNA-dependent
  Homolog annotation: Hit_ID=Q5VPG5; Match level="QueryCoverage=91%, HitCoverage=66%, E-value=7e-59, Identity=50%"; Hit description =Putative CCR4-associated factor 1
  Pfam annotation: Domain name=CAF1; Domain location=20-206; Score =95.2; E_value=2e-25; Accession=PF04857.10; Description=CAF1 family ribonuclease
MARPLLVFMPNGVLLKAAVRDVWASNFDEELSNLSAVLPRYPCVCVDTEFPGAVHDSDMPRYMRGPRESYELVKRNVDDLKLLQGMDFAMLNEFGIDPKDFAAGFRRSGLACGRLTWTAFSGSYDFAYLAKALTGGQPLPDTLDVFLALVRRLFGHSVFDVKHLARCCAMRGGLEQVATALGVKRAAGRAHCAGSDSLLTTDVLLLMLHRFFRNVDVLAHAGTI

SEQ ID NO: 67516 - protein, 274 aa, Zea mays
  Coding DNA Sequence Number=SeqID_25737
  Gene Ontology: Mol. function=transferase activity; Cellular component= nucleus; Biological process=regulation of transcription, DNA-dependent
  Homolog annotation: Hit_ID=Q5VPG5; Match level="QueryCoverage=85%, HitCoverage=68%, E-value=3e-69, Identity=53%"; Hit description =Putative CCR4-associated factor 1
  Pfam annotation: Domain name=CAF1; Domain location=42-252; Score =157.8; E_value=2.8e-44; Accession=PF04857.10; Description=CAF1 family ribonuclease
  Subcellular localization annotation: CTP_CleavageSite=34; ConfidenceScore=5.13e-01
MPMYSKSELIHVPPPPCSRPRYVMAPPLVFTSIGASMNAAVRDVWASNFDEELSNLSAVLPRYPCVCLDTEFPGAVHDSDMPRYMRGPRESYELVKRNVDDLKLLQVGIALSGPAGRFPIAWQFNIRGFDPALHPHAPASIAMLREQGMDFALLNEFGIDPEDFAAGFRRSGLACGWLSWTAFSGSYDFGYLAKALTGSQPLPDTLDGFLALMLRLARGLEQVATALGVKRAAGRAHCAGSDSLLTTDVLLLMMDRFFRNVDVLAHAGTIVDLT

SEQ ID NO: 67517 - protein, 99 aa, Zea mays
  Coding DNA Sequence Number=SeqID_25738
  Homolog annotation: Hit_ID=Q9LTB9; Match level="QueryCoverage=85%, HitCoverage=27%, E-value=7e-20, Identity=54%"; Hit description =Arabidopsis thaliana genomic DNA, chromosome 5, TAC clone:K14A3
MDCGEVVRYSRMVVENDASAQVEPGNGGGSAARALNQTLSSEEMQDQLEQFTYVMQQKFLSGEDTEHMDYSRIDNDEMLDDHWSREVNYDAEEKYFEED

SEQ ID NO: 67518 - protein, 174 aa, Zea mays
  Coding DNA Sequence Number=SeqID_25739
  Gene Ontology: Mol. function=protein serine/threonine kinase activity; Cellular component=plasma membrane; Biological process =protein amino acid phosphorylation
  Homolog annotation: Hit_ID=Q2QMD5; Match level="QueryCoverage=84%, HitCoverage=20%, E-value=2e-46, Identity=60%"; Hit description =Protein kinase domain containing protein, expressed
MGYMDPECMVTGTACAVSDVYSFGVVALETACGRRPVVVLRETQQGSEATAGHTHLVRWVWEHYGRGRVVDAADARLSGEFDRSEVERVMVTALWCAHPDRSLRPSIRQAVNVLRLEAPLPILPAKMPVATFVPPAHGLLSEAMAIVTDSGSSGSGTTSSSTVLAPQESSPTPR

SEQ ID NO: 67519 - protein, 389 aa, Zea mays
  Coding DNA Sequence Number=SeqID_25740
  Gene Ontology: Mol. function=protein serine/threonine kinase activity; Cellular component=anchored to membrane; Biological process=protein amino acid phosphorylation
  Homolog annotation: Hit_ID=Q2QMD1; Match level="QueryCoverage=60%, HitCoverage=33%, E-value=3e-42, Identity=42%"; Hit description =Protein kinase domain containing protein
  Pfam annotation: Domain name=DUF26; Domain location=212-266; Score =29.3; E_value=1.2e-06; Accession=PF01657.8; Description=Domain of unknown function DUF26
  Pfam annotation: Domain name=DUF26; Domain location=84-139; Score =42.2; E_value=1.7e-09; Accession=PF01657.8; Description=Domain of unknown function DUF26
  Pfam module annotation: Pfam domain module=DUF26::DUF26; Domain location=212-266::84-139
MALHRSFLIFTVMSSFATLTAVVVCGQVQHYYTAYHPYCSTTGNYSTGSPYQVNLVKLMGELPSIALANRGFQVDTAGEHPSTVFGLAMCYADTSWTACRPCLEAGAAGVQQACPFGREMKALYDEVCLLRYSDQPFFSAADVDVAFYVWQKDSVVAAADVPAFNATRWRLMARLAAEAAVSSLRLANGSEAYAAEAEDSRGAGAQQVAVPVHGLVQCTRDLNASECTRCLTSFLAGLSSSLPNYTYGTAKGYSCYMAYRVGDKLDITIPPPALVASSPPPLPSTTTSPLPDRTPTAALVAGVSVSSAAVFIVSAGVSIWLLLRRRRRRQKAREQELRAFDGDYNYNDEEEPLQDEFEKGTGPRKFRYRELAMVPGFFSDEEKLGERGL

SEQ ID NO: 67520 - protein, 75 aa, Zea mays
  Coding DNA Sequence Number=SeqID_25741
RCIGISSRPDEDTEQQAAQRRRHSLGRSADPSAPRRGLQDSQADGRWVGVAELVRVHTCGTHWQQDPIFSQRTPN

SEQ ID NO: 67521 - protein, 75 aa, Zea mays
  Coding DNA Sequence Number=SeqID_25742
  Subcellular localization annotation: CTP_CleavageSite=26; ConfidenceScore=5.08e-01
MEFVALIGWELPLCLCDCSSVKRLRRGSVVRRGQLRVAPNFRSFSARFAFGLIAGPWRRCRCSKRCQGHGGGMAG

SEQ ID NO: 67522 - protein, 152 aa, Zea mays
  Coding DNA Sequence Number=SeqID_25743
MGKNNKRKREPTPPSEDFGDSEYSEEEFSSESEGSPAPIPLRESSDDSDDSQGLAAEVWTYIRAVERSGLEGSDESEYSSDEEDSDGGGEDEDDDDDDDDEGGGDGDGSGRGDSSGSKDGDGGGSRGDSGGGGSSRGSNRGDSGGGGNRASG

SEQ ID NO: 67523 - protein, 233 aa, Zea mays
  Coding DNA Sequence Number=SeqID_25744
  Homolog annotation: Hit_ID=Q9LTB9; Match level="QueryCoverage=81%, HitCoverage=59%, E-value=4e-45, Identity=51%"; Hit description =Arabidopsis thaliana genomic DNA, chromosome 5, TAC clone:K14A3
MEPAAMDRIATRLSAVEDLYFPSSFLGPSPAGTGAAPPPSPPRRRAELRSLLARDAPLFLERYGAALSADELAAFDALSPDYEVDWHLRRLRAAAAGAPPPASRVRNRRRAFLDRLVREGEYFSEDAMREREPYLHHEYLGRFQDPLGRAMARPGERWSETLMRRAEEAVIVEKIRGEQIRRGVDPSEWVGGGTDETMEEQEEEEEEEEEEEDGEEGMKENGTEVEKQIATEQ

SEQ ID NO: 67524 - protein, 135 aa, Zea mays
  Coding DNA Sequence Number=SeqID_25745
  Gene Ontology: Mol. function=threonine endopeptidase activity; Cellular component=proteasome core complex (sensu Eukaryota); Biological process=ubiquitin-dependent protein catabolic process
  Homolog annotation: Hit_ID=Q4TZW1; Match level="QueryCoverage=82%, HitCoverage=45%, E-value=1e-53, Identity=91%"; Hit description=Beta1 proteasome-7D
  Pfam annotation: Domain name=Proteasome; Domain location=3-134; Score= 27.7; E_value=1.9e-08; Accession=PF00227.16; Description=Proteasome A- type and B-type
MMVYNYLRYLTCEVVDAKVTLLCRIQLGQPATVKVAANLIRLLAYQNKNMLQAGMIVGGWDKYEGGQIFSVPLGGTILKQPFAIGGSGSSYLYALLDHEWKEGMSQEEAEKFVVKVVSLAMARDGASGGVVRTVT

SEQ ID NO: 67525 - protein, 108 aa, Zea mays
  Coding DNA Sequence Number=SeqID_25746
MGSGQCTLGVARRGRTRGGLLLLLSKHSFGRLNVQISARIPWVLQTPYGFACNEKKKVKKKAPSSSSSSDDDDDQASTSSFEDEETVRRVGKVDDLLFNIDRKKQRKR

SEQ ID NO: 67526 - protein, 113 aa, Zea mays
  Coding DNA Sequence Number=SeqID_25747
MGKDWDGPSLILPACPWAPVASELAPEAEVGVATAAPATSLLKSVQLLGLLVSASGTFSQWSSVVAVATAIAELHPHGVPAVLAEHAMHLCAYSQTSVEITHIYQIYLCSLLA

SEQ ID NO: 67527 - protein, 144 aa, Zea mays
  Coding DNA Sequence Number=SeqID_25748
  Subcellular localization annotation: CTP_CleavageSite=36; ConfidenceScore=5.16e-01
MQESLAGPPSQQNPPEGLPTLTTPLLPLPLSGKDIRSTVSPKGPNRYPSPNHARPISKSTVTRSSSPRRQPGRIGPSPILPSGVSTQGGRARRCPSTEGARAGYLWFQERESGKRGVGDGEIESLGEGLTGAGTLYEPVATPIA

SEQ ID NO: 67528 - protein, 109 aa, Zea mays
  Coding DNA Sequence Number=SeqID_25749
MMAEGATVRKKQRRPKAGQEQSGEPLFSIDVHPQGGEEATDGGGIGVMVTQCVKRSKSKNSRVLKTQQTLPQVITKSNKHKLSLDSTKLHEINGCTLITLYVIMRPLIQ

SEQ ID NO: 67529 - protein, 92 aa, Zea mays
  Coding DNA Sequence Number=SeqID_25750
MGRIVAMSEIGSAYQTCQRRDDDKWGEGVARVWGQTASRVGKEAVAGSIMGRLARTSSNRMGPNKYMWRLDQGGGRARGLGRYDKKIRTRLI

SEQ ID NO: 67530 - protein, 112 aa, Zea mays
  Coding DNA Sequence Number=SeqID_25751
MTSCDNIMLIQNKVSFFAELHRHSTKAQKHSAKPLQRATLGKGSKALDKAFAKSHTTQKGLREPIIDNGLFGYYFPSGARQSKVTMTTTGDGAFVECLGLRHSSKKALVPPA

SEQ ID NO: 67531 - protein, 52 aa, Zea mays
  Coding DNA Sequence Number=SeqID_25752
MERLTSRLFYLRFKSPTSTPLNTVGPSELLPGQSSPYADRLILHQGYRMAPQ

SEQ ID NO: 67532 - protein, 137 aa, Zea mays
  Coding DNA Sequence Number=SeqID_25753
MAAYLARRAAQKKWVHLLYHTTLNFHRHLFYEEISSPNPPLSASLLISISLPASGRDWPCVVSPAQVSDLLDKFEANRHVVRHPPADPFSHTSSHSAAVGSESDVDLEEKVDVIISEWMGYMLLCEVVAPIKMTFHM

SEQ ID NO: 67533 - protein, 125 aa, Zea mays
  Coding DNA Sequence Number=SeqID_25754
MTWRQHRGTLVAPQHKILSGGGGVKAQPASPASVVVEQAKVSVRRHLDKPAGDGAIGLTQTNKKNKLGFKKKGANETEGCPGLAHRTVRCTREINSELLSFGFSPGHSAIIHPTVRCSTGLSDVP

SEQ ID NO: 67534 - protein, 246 aa, Zea mays
  Coding DNA Sequence Number=SeqID_25755
  Subcellular localization annotation: CTP_CleavageSite=37; ConfidenceScore=5.18e-01
GPNRAAPIVVRTGTTWDPFPARRIPRPHPPPPRQSPRALPVPNTCRPIDDPHTGSVARGKGVVPYHVGDSTGEPINVARAPPRETRPIRPLNKHTREAYKDERGEENGQGCRAHRHQFTSQSRSRGGRGAEEREASRSWGLGGCRAVRLSPPLHPPATSGGQGKHLRPPFPNPGWMERDFLAAIGKEQQHPRKEKAGGGAEESGRLPRPPFAACRAAFLDLYARRAVLGWVGLGSAHSIRFGEMRL

SEQ ID NO: 67535 - protein, 150 aa, Zea mays
  Coding DNA Sequence Number=SeqID_25756
MAFMEQREKWGRKRNGRSKAPLLAMKNERRGASVPAGCRGRGSMGRARSGPLGAAAGGFDCAQGLGGSPGREAAGVLAWQGREACTGQVAWARGVARLAGHSRSLGMAGVARLEKGQGAGWARGVLGVEQRAGEGKEKGGGWGNTRGDGC

SEQ ID NO: 67536 - protein, 105 aa, Zea mays
  Coding DNA Sequence Number=SeqID_25757
MEERGRSALLEEEERRRWASLAGVLLETCVREGEEGLLLLGAELKKGKVQGARPWGGAARGRDVQSMHGRCRDALERGWSRGEKGGRPWGGERGGRRRELGGHHG

SEQ ID NO: 67537 - protein, 172 aa, Zea mays
  Coding DNA Sequence Number=SeqID_25758
MVNVSRYPFPFFLLCLGELPYSLVVVEPPLPLRPDESPRREAHATAYSLRPCDLSSLLRPLRSLRCTWPPAVPPCAPGAAVRSLAQRPSRIARGSLRNSRRGSLRGLPAAAPAWLARRSLRDVPAATPAQSAWHSYNLVVARVVCRARSTSSTCLAVRRRRKEFQDFDEFED

SEQ ID NO: 67538 - protein, 204 aa, Zea mays
  Coding DNA Sequence Number=SeqID_25759
AEPLPQPSLRSACPPLWPAGKGEARPGVNKPQRRRTAAVALHDPSPTPPWPLQLQAAACMRLREAHHAHEPHHCHQPRPSSAHHQARVQTRHQTTHAASGQSIVHGSVQMALLPLLLLRRGLKRVAGWIRHSGGQDSPQLPPAGPRYLTVRSFSTNNRRGMDGRVTRHRGRTQKALGGEEHTEEEAAVPVRLIGPASRSGDSGC

SEQ ID NO: 67539 - protein, 106 aa, Zea mays
  Coding DNA Sequence Number=SeqID_25760
  Gene Ontology: Mol. function=protein tyrosine/serine/threonine phosphatase activity; Biological process=protein amino acid dephosphorylation
  Homolog annotation: Hit_ID=Q6Z648; Match level="QueryCoverage=80%, HitCoverage=32%, E-value=6e-27, Identity=67%"; Hit description =Protein phosphatase-like
MRKRERENPCGICGHYHKYEEGEVCGVCGHRPPAASPVGARQQDSAFPSEILKEFLFLGSYDNASRSELLKTIGVSHILNWVRDMEIKCHRWISWYDWVRQRWWMA

SEQ ID NO: 67540 - protein, 427 aa, Zea mays
  Coding DNA Sequence Number=SeqID_25761
  Gene Ontology: Mol. function=pepsin A activity; Cellular component =cellulose and pectin-containing cell wall; Biological process =proteolysis
  Homolog annotation: Hit_ID=Q5Z4D4; Match level="QueryCoverage=95%, HitCoverage=85%, E-value=1e-119, Identity=54%"; Hit description =Putative nucleoid DNA-binding protein cnd41
  Pfam annotation: Domain name=Asp; Domain location=134-423; Score= -133.6; E_value=1e-05; Accession=PF00026.14; Description=Eukaryotic aspartyl protease
MASQLVVRLLVLCLLCGASAAAKRRYLSVSMDELLSSSKAHVWTKKPASGNKLTVSASSGLAPKNGASGSFVRHDMNRLSTLLRRSSVSSAAPPSADPFPIPGIPISYPPVAPPAEAPSVTIPDSTGTSLDTLEFVVTVGFGTPAQTYTVIFDTGSDVSWIQCLPCSGHCYKQHDPIFDPTKSATYSVVPCGHPQCAAADGSKCSNGTCLYKVEYGDGSSSAGVLSHETLSLTSTRALPGFAFGCGQTNLGDFGDVDGLIGLGRGQLSLSSQAAASFGGTFSYCLPSDNTTHGYLTIGPTTPASNDDVQYTAMVQKQDYPSFYFVELVSIDIGGYILPVPPTLFTDDGTFLDSGTILTYLPPEAYTALRDRFKFTMTQYKPAPAYDPFDTCYDFTGQSAIFIPAVSFKFSDGSVFDLSFFGILIFPR

SEQ ID NO: 67541 - protein, 177 aa, Zea mays
  Coding DNA Sequence Number=SeqID_25762
MTGPNIQMDKEKGPKLNDDECVSQLELKEKIHTMTEAFNKYQDSTTTSYERLDRCVTELVTRMDMIEARPPPQGPVPAIGAVVLSTAEDVDDDADVDALLRRCLARNQQALIIFFGKPYTSHEPPPSNVRKETDKIDIMQFKVTYHKDIVEPTPKKKKRVPEFRVPISDLNIRVFSG

SEQ ID NO: 67542 - protein, 685 aa, Zea mays
  Coding DNA Sequence Number=SeqID_25763
  Homolog annotation: Hit_ID=Q9LHL0; Match level="QueryCoverage=28%, HitCoverage=22%, E-value=5e-19, Identity=33%"; Hit description =Arabidopsis thaliana genomic DNA, chromosome 3, P1 clone: MJH23
  Pfam annotation: Domain name=WW; Domain location=164-194; Score=34.8; E_value=3e-07; Accession=PF00397.16; Description=WW domain
MAAAGRRVKLDLFLDSSPGEASHNNGIGGENRDQQTVVPTSPSSSDKKENPLALLGQYSDDEVEDEEAADQPTGEAKGSPGDASAQLTSQRADIAGDNSEAKIEPSASVGDQQEAAPQAGDVKNYTQSVTEENTIAPEPTVQEESVKATESLPDSSGMQIVGDVGGNWKAVMHEQSNQCYYWNTVTGETSWDIPNGLASGVATAFVPSDVDYSNEAQTHVLPHSTLEAYPSDMSVGNGTTYPNLGMACGSAHVTQDAYAYAAPIASNEPLDIDPLYLAKYGDGLLQRLDLLERLCGSNKGLELIRREIEIRMSDLNALSSYGSSLLPLWLHAEVHLKQLDSSISKLEMNYHADSEPRNSKTEVAEHRAPDDADLITPSNGEALKYEVCAGITIDANMKIGKPASTSQNSQGRDNAAVPPKIESDNDEDMDVEMEVDEDNVEEQAQCSSVPEKEHPPSEQLSSSNLPSFEDPTPPEDNSVPPPPPEEEWIPPPPPEHEHEPAPPASPEEPAASYVQVDTIPQPYIAQENVGYTISGMEYYSTEGTNANYYMQVSEPHVLQAQHSYYAPVSGSGISVSVDGTSIAPESYYTYPSVTVAASAVAAEHSGYYASSVSAIYSSAADIKTSSASLVSAISNSDLKNHDNVISNDASIVPFTQAVVATSAAGTTSVPEVLHSLLAVLQTRSK

SEQ ID NO: 67543 - protein, 87 aa, Zea mays
  Coding DNA Sequence Number=SeqID_25764
MEQFFSEFDKPNWKGLTPSYSEASRCNALRDKEIENLAGLEGSLTTQDSGGFRDWACADKFGSSDKGKEIIRVAECVTLLTRWSSSE

SEQ ID NO: 67544 - protein, 195 aa, Zea mays
  Coding DNA Sequence Number=SeqID_25765
  Gene Ontology: Mol. function=pepsin A activity; Biological process =proteolysis
  Homolog annotation: Hit_ID=Q5Z4D1; Match level="QueryCoverage=61%, HitCoverage=24%, E-value=1e-34, Identity=62%"; Hit description =Putative nucleoid DNA-binding protein cnd41
  Subcellular localization annotation: CTP_CleavageSite=71; ConfidenceScore=5.29e-01
MASSHMLLCVLLLCSYSLTALGGGNEQHGFVVVPTTTGTSTSSNPACSPAPQVTSDPNRASMPLAHRHGPCAPATTSSWPSLAERLRRDRARRDHITRKAKASGRTTTLSDVSIPTSLGAAVDSLEYVVTLGIGTPAVQQTVLIDTGSDLSWMQCKPCNSSSCYPQKDPLYDPDRVVHVRARSRATPKACKDLRA

SEQ ID NO: 67545 - protein, 719 aa, Zea mays
  Coding DNA Sequence Number=SeqID_25766
  Gene Ontology: Mol. function=nucleotide binding; Cellular component =cortical microtubule, transverse to long axis; Biological process =translation
  Homolog annotation: Hit_ID=Q5Z4M1; Match level="QueryCoverage=83%, HitCoverage=100%, E-value=0.0, Identity=80%"; Hit description =Putative microtubule-associated protein
  Pfam annotation: Domain name=MAP65_ASE1; Domain location=145-718; Score=105.0; E_value=2.2e-28; Accession=PF03999.3; Description =Microtubule associated protein (MAP65ASE1 family)
  Subcellular localization annotation: CTP_CleavageSite=51; ConfidenceScore=5.01e-01
MAPADKRVFLLTQQRRRQSLGGRRPVRWIGRNSSSAALLLPPLQSQAPISELSAVAAGDRRAPPASDPLEWSVEPRCGPAFTTSVLSFVFSASSEFVVVGGASLEGGILLMRWLLWSVMAGDITCGSLLQKLQFIWDEVGESEEDRDKVLYQLDQECLDVYKRKVDQATNSRDLLIQALDDSKIELARLLSALGEKAIARTPEKTTGTIKQQLAAIAPTLEQLTKQKNERKREFVNVQSQIDQICGEIAGTIEVGEQMTTPQVNEDDLTLERLEDFRSQLKDLEKEKSNRLEKVLDYVGIVHDLCTVLGMDFLSTVIEVHPSLDDSIGDNCKSISNDTLSKLDNTVATLNEDKKLRLSKLQELAGQLYDLWDLMDAPKEERRMFDHVTCNRSASVDEVTAPGSLALDLIEQAEVEVQRLDQLKYSKMKEIAFKKQTELEDIYAGAHIVIDTAAAHEKILALIEAGNIEPSELIADMDTQIAKAKEEALSRKDILDKVERWMSACEEESWLEDYNRDDNRYNSSRGAHLNLKRAEKARILVNKIPGMLYVPLIADVMSSFILALVETLVSKTTAWEENRGLSFMYDGVPLLAMLDEYAMLRQEREEEKKRMREQKRYIEQQLNTDHEGPFGSRVSPNRPASSKKAVGVKVNGSVSNGTPPNRRLSISGQQNGGGHGVRSGGKDSKKDTAKTASPGNNAVAAAPVDAVSQISVTDPVPSTP

SEQ ID NO: 67546 - protein, 173 aa, Zea mays
  Coding DNA Sequence Number=SeqID_25767
MGMVEVMLQHMVLRVVVGVSNLAPTSKLIMHVLGFERIIEGSASGGFPRKESSDKGQVSIGHECTIGRGVHKFIHNHSKSTVRNAVDYSGQEKLFGKSPTRGPSEPLRQTVRDTRVTLGQNQCKNTSLHYGQSDGKSKDLPRPSADRPASGADRPGRTIRTRGADRPRSAEKE

SEQ ID NO: 67547 - protein, 256 aa, Zea mays
  Coding DNA Sequence Number=SeqID_25768
  Homolog annotation: Hit_ID=Q6QP51; Match level="QueryCoverage=90%, HitCoverage=75%, E-value=2e-10, Identity=31%"; Hit description =Putative growth-regulating factor 1
  Subcellular localization annotation: CTP_CleavageSite=19; ConfidenceScore=5.03e-01
KGGTFGGRSRRRFTSAIMTASKKAGPSEGFNSRLRALRLRAHYWLALEGFDSRLRRRARDDPGYVRYITKARATLPSSLETPWSAPSKGNMALFPHSSLRKGDAGAAACAAPTAMPLDRVRLTAAKSGLGRHRKLRLARPQGSDSASAPEDDELCLARPQGSDSASAPEDDELRLARPQGSASAPEDDELRLARPHGSDSASAPEDDELRLARPRGSDSTSTSEDRLDLDLGGASASPDPGLGPTTSQEGPSLSYP

SEQ ID NO: 67548 - protein, 151 aa, Zea mays
  Coding DNA Sequence Number=SeqID_25769
  Gene Ontology: Mol. function=GPI anchor binding; Cellular component =membrane; Biological process=cell adhesion
  Homolog annotation: Hit_ID=Q6K489; Match level="QueryCoverage=58%, HitCoverage=22%, E-value=4e-35, Identity=80%"; Hit description =Putative endosperm specific protein SC3
MARMISRPAVLLSPLAMIVVAAAVMALAPAPVAATKYNITKILAPYKEYSKFNDMLSKTRLAYDINRRQTITVLAVDNSAMSALDHYSLQTIRHILELHVLVDYYGDKKLKKLAHGSTASSSMFQLVEKEIASIETSHFSNSIGSSFMIKP

SEQ ID NO: 67549 - protein, 161 aa, Zea mays
  Coding DNA Sequence Number=SeqID_25770
  Gene Ontology: Mol. function=ribonuclease H activity; Cellular component=mitochondrion; Biological process=DNA integration
  Homolog annotation: Hit_ID=Q7XBD9; Match level="QueryCoverage=88%, HitCoverage=7%, E-value=2e-51, Identity=67%"; Hit description =Putative gag-pol
  Pfam annotation: Domain name=RnaseH; Domain location=1-129; Score= -4.5; E_value=0.00015; Accession=PF00075.14; Description=RNase H
MEVWKMYSDGSLKLQGARARILFIAPKGEQLKYGLQVLFPVSNNAVEYETMIHGLHIVVSLGIKRLMVYGDSLVVISQVNKDWECSTEVMTKYCVAVRQIEDMFEGPEFHHMKRDRNVAADTLSKLGSIRAPTPQMFLCKKYIIPIFHKTREKSAKRLRTT

SEQ ID NO: 67550 - protein, 66 aa, Zea mays
  Coding DNA Sequence Number=SeqID_25771
MWMPMKLQVMQDYFRRKVIRFLCRSSIHRIGIRGRWGKMKMRSHRGGEKAKSYRPIIENDRGGQKA

SEQ ID NO: 67551 - protein, 45 aa, Zea mays
  Coding DNA Sequence Number=SeqID_25772
MELVSEGFSVHARTSCGQVLFVGKPSSPLVWGEDREEYDLKPRAR

SEQ ID NO: 67552 - protein, 107 aa, Zea mays
  Coding DNA Sequence Number=SeqID_25773
MLLKLEEALIKTKELLEKMANDHEELKCSHANFQLSNKSQVQKKMLINKDRNKRLNKKAKQLRRRHHAQAPQDIHGCMVKKLEKGETAACTKLQHKDVPKATRKQEN

SEQ ID NO: 67553 - protein, 60 aa, Zea mays
  Coding DNA Sequence Number=SeqID_25774
MTNLPHGPYRPEVWLPLLERVDVTSGIKKGFLAICVTVPHPLPSVPQWEGDPGQCNLRPL

SEQ ID NO: 67554 - protein, 78 aa, Zea mays
  Coding DNA Sequence Number=SeqID_25775
MEVAEGLSIDGGALRWRGLGFRGPHHYLLVKTPKMDGHFGGPYNVVAGHSEFGEEDIENTQGPYLAHQLSEFRTISDI

SEQ ID NO: 67555 - protein, 483 aa, Zea mays
  Coding DNA Sequence Number=SeqID_25776
  Homolog annotation: Hit_ID=Q6K476; Match level="QueryCoverage=31%, HitCoverage=32%, E-value=8e-72, Identity=89%"; Hit description =Putative U4/U6-associated RNA splicing factor
MDRDRSSRRTRNDDGHHRSRGRDDDRHRRRSRHDTEDHQHDGGDEDRRHRRHRDKDGGRGGEDDRRHRDHHDKDDSRCHRYRDGGDDDRRRGNRRSVSPSESPPPSAKRDRSSSRPRELVERRDSTDREPRSPSRKRKGHEGGGDGDEPGREGGKRARASVDPPPPKEERPRRERRRFEDVGANGKNGDVSKSSKEISSHGQKGELSINGDSQNGNGPNAGSQQLLSAVPMPSSVPIPSKLNNKLGTSVTATQVSKEEAKTSVSAVDAQLFSKGEAKPTDVSVLPTSTISGTPAVGGAIGIPGLTNIPNLESVKRAQELAAKMGFRQDPQFGPLINLFPGTSTEVTVPQRPAKAPVLRLDAQGREIDEQGNVISMTKPTNLSTLKVNINKQKKEAFQIIKPDLDSLAKSSVHFDERMGINQKKLLRLKRPGFQFVEEGKLTRQAELQKIKSQFGEAQAKELKVLQAQLAKAKTEVDRSKHEFF

SEQ ID NO: 67556 - protein, 151 aa, Zea mays
  Coding DNA Sequence Number=SeqID_25777
  Gene Ontology: Mol. function=transporter activity; Cellular component= intracellular; Biological process=transport
  Homolog annotation: Hit_ID=Q6ZCZ7; Match level="QueryCoverage=95%, HitCoverage=29%, E-value=6e-56, Identity=63%"; Hit description =Phosphatidylinositol transfer-like
  Pfam annotation: Domain name=CRAL_TRIO_N; Domain location=12-86; Score=25.0; E_value=5.7e-05; Accession=PF03765.5; Description =CRALTRIO, N-terminus
MEGLLTLDDWKERRSDVDNSEDERRRLSIGSLKKKAFECIKQAHTFHSRRGEKERFLKARKFDTEKAIHMWAEMLQWRKESGADTILEDFSFEELDDVLCYYPQGYHGVDRQGRPVYIERLGKVEPNKLMHITPVDRYMKYHVQELRNESS

SEQ ID NO: 67557 - protein, 91 aa, Zea mays
  Coding DNA Sequence Number=SeqID_25778
MGGRVMEKVTKEINALLNGLCLNYEGKDASHISKDVSVNIQDMNGQVGHSKGWDHEGFVMDINILLTEFGDFSDFFQEEELYFGEVGILHP

SEQ ID NO: 67558 - protein, 103 aa, Zea mays
  Coding DNA Sequence Number=SeqID_25779
MRVADIAGAAARRGDGGRSRGKLKKNRRELNNPRWLRHRPMGIILADGVIHDSCCVGLGGATAGGRRQAWGKGRRDGKQGWAKSGTVIIGQGSEARWNKVSFV

SEQ ID NO: 67559 - protein, 203 aa, Zea mays
  Coding DNA Sequence Number=SeqID_25780
  Gene Ontology: Mol. function=homoserine dehydrogenase activity; Cellular component=chloroplast; Biological process=aspartate family amino acid biosynthetic process
  Homolog annotation: Hit_ID=P49079; Match level="QueryCoverage=79%, HitCoverage=17%, E-value=1e-87, Identity=100%"; Hit description =Bifunctional aspartokinase/homoserine dehydrogenase 1, chloroplast precursor (AK-HD 1) ...
  Homolog annotation: Hit description=(AK-HSDH 1) [Includes: Aspartokinase (EC 2.7.2.4); Homoserine dehydrogenase (EC 1.1.1.3)]
  Pfam annotation: Domain name=Homoserine_dh; Domain location=103-202; Score=91.0; E_value=3.7e-24; Accession=PF00742.9; Description =Homoserine dehydrogenase
  Pfam annotation: Domain name=NAD_binding_3; Domain location=1-95; Score=26.1; E_value=2.1e-05; Accession=PF03447.6; Description =Homoserine dehydrogenase, NAD binding domain
  Pfam module annotation: Pfam domain module=Homoserine_dh::NAD_binding_ 3; Domain location=103-202::1-95
MEAIAKEHKLSKNRFDWKGKSGQHSHGATGQPDTPKKRVLVDCTADTSVASHYYDWLKKGIHVITPNKKANSGPLDRYLKLRTLQRASYTHYFYEATVGAGLPIISTLRGLLETGDKILRIEGIFSGTLSYIFNNFEGARTFSDVVAEAKKAGYTEPDPRDDLSGTDVARKVIILARESGLGLELSDIPVRSLVPEALKSKVE

SEQ ID NO: 67560 - protein, 77 aa, Zea mays
  Coding DNA Sequence Number=SeqID_25781
MASLVKNQIKKRLGYNNPFFPKPVRQPATAVDVAGAGGGGGVDDDKEEMLYGASLCTHGETTEPVSSTREKTERNYA

SEQ ID NO: 67561 - protein, 1208 aa, Zea mays
  Coding DNA Sequence Number=SeqID_25782
  Gene Ontology: Mol. function=protein serine/threonine kinase activity; Cellular component=integral to membrane; Biological process=protein amino acid phosphorylation
  Homolog annotation: Hit_ID=Q6ZCZ2; Match level="QueryCoverage=99%, HitCoverage=99%, E-value=0.0, Identity=69%"; Hit description =Putative brassinosteroid receptor
  Pfam annotation: Domain name=LRRNT_2; Domain location=28-75; Score =38.6; E_value=2.1e-08; Accession=PF08263.3; Description=Leucine rich repeat N-terminal domain
  Pfam annotation: Domain name=LRR_1; Domain location=127-150; Score =6.9; E_value=15; Accession=PF00560.23; Description=Leucine Rich Repeat
  Pfam annotation: Domain name=LRR_1; Domain location=152-173; Score =7.5; E_value=11; Accession=PF00560.23; Description=Leucine Rich Repeat
  Pfam annotation: Domain name=LRR_1; Domain location=174-198; Score =10.0; E_value=3.8; Accession=PF00560.23; Description=Leucine Rich Repeat
  Pfam annotation: Domain name=LRR_1; Domain location=200-222; Score =14.7; E_value=0.34; Accession=PF00560.23; Description=Leucine Rich Repeat
  Pfam annotation: Domain name=LRR_1; Domain location=224-247; Score =7.8; E_value=10; Accession=PF00560.23; Description=Leucine Rich Repeat
  Pfam annotation: Domain name=LRR_1; Domain location=250-273; Score =13.2; E_value=0.96; Accession=PF00560.23; Description=Leucine Rich Repeat
  Pfam annotation: Domain name=LRR_1; Domain location=275-299; Score =16.0; E_value=0.13; Accession=PF00560.23; Description=Leucine Rich Repeat
  Pfam annotation: Domain name=LRR_1; Domain location=301-324; Score =12.1; E_value=1.5; Accession=PF00560.23; Description=Leucine Rich Repeat
  Pfam annotation: Domain name=LRR_1; Domain location=326-348; Score =10.5; E_value=3.1; Accession=PF00560.23; Description=Leucine Rich Repeat
  Pfam annotation: Domain name=LRR_1; Domain location=351-373; Score =14.4; E_value=0.43; Accession=PF00560.23; Description=Leucine Rich Repeat
  Pfam annotation: Domain name=LRR_1; Domain location=375-398; Score =9.6; E_value=4.5; Accession=PF00560.23; Description=Leucine Rich Repeat
  Pfam annotation: Domain name=LRR_1; Domain location=400-420; Score =7.8; E_value=9.7; Accession=PF00560.23; Description=Leucine Rich Repeat
  Pfam annotation: Domain name=LRR_1; Domain location=426-449; Score =9.0; E_value=6; Accession=PF00560.23; Description=Leucine Rich Repeat
  Pfam annotation: Domain name=LRR_1; Domain location=451-473; Score =12.6; E_value=1.2; Accession=PF00560.23; Description=Leucine Rich Repeat
  Pfam annotation: Domain name=LRR_1; Domain location=475-497; Score =10.0; E_value=3.8; Accession=PF00560.23; Description=Leucine Rich Repeat
  Pfam annotation: Domain name=LRR_1; Domain location=499-522; Score =5.0; E_value=33; Accession=PF00560.23; Description=Leucine Rich Repeat
  Pfam annotation: Domain name=LRR_1; Domain location=524-546; Score =12.9; E_value=1.1; Accession=PF00560.23; Description=Leucine Rich Repeat
  Pfam annotation: Domain name=LRR_1; Domain location=548-570; Score =15.6; E_value=0.19; Accession=PF00560.23; Description=Leucine Rich Repeat
  Pfam annotation: Domain name=LRR_1; Domain location=572-594; Score =10.7; E_value=2.8; Accession=PF00560.23; Description=Leucine Rich Repeat
  Pfam annotation: Domain name=LRR_1; Domain location=596-618; Score =13.7; E_value=0.66; Accession=PF00560.23; Description=Leucine Rich Repeat
  Pfam annotation: Domain name=LRR_1; Domain location=688-710; Score =16.3; E_value=0.11; Accession=PF00560.23; Description=Leucine Rich Repeat
  Pfam annotation: Domain name=LRR_1; Domain location=712-734; Score =15.3; E_value=0.22; Accession=PF00560.23; Description=Leucine Rich Repeat
  Pfam annotation: Domain name=LRR_1; Domain location=736-758; Score =12.9; E_value=1.1; Accession=PF00560.23; Description=Leucine Rich Repeat
  Pfam annotation: Domain name=LRR_1; Domain location=760-781; Score =7.0; E_value=14; Accession=PF00560.23; Description=Leucine Rich Repeat
  Pfam annotation: Domain name=LRR_1; Domain location=78-101; Score =9.1; E_value=5.7; Accession=PF00560.23; Description=Leucine Rich Repeat
  Pfam annotation: Domain name=Pkinase; Domain location=912-1184; Score= 137.9; E_value=2.8e-38; Accession=PF00069.15; Description=Protein kinase domain
  Pfam annotation: Domain name=Pkinase_Tyr; Domain location=912-1184; Score=116.3; E_value=8.6e-32; Accession=PF07714.7; Description =Protein tyrosine kinase
  Pfam module annotation: Pfam domain module=LRRNT_2::LRR_1::LRR_1::LRR_ 1::LRR_1::LRR_1::LRR_1::LRR_1::LRR_1::LRR_1::LRR_1::LRR_1::LRR_1: LRR_
  Pfam module annotation: Pfam domain module=LRR_1::Pkinase::Pkinase _Tyr; Domain location=28-75::127-150::152-173::174-198::200-222::224 -247::250-273::275-299::301-324::326-348::351-373::375-398::400
  Pfam module annotation: Domain location=:475-497::499-522::524 -546::548-570::572-594::596-618::688-710::712-734::736-758::760 -781::78-101::912-1184::912-1184
MGAARTAAPVFMLLLLLHLSPRAVAAGTGDEAAALLAFKRASVAADQAGRLASWAEPNSTSGSASPCEWAGVSCVGGHVRALDLSGMSLVGRLHLDELLALPALRSVLLGGNAFHGDLTHRAPPRCALVDVDLSSNALNGTLPRAFLASCSSLRLLNLSGNTFTGGGGFPFASSLRTLDVSRNELSDAGLLNYSLSACHGIRHLNLSANQLTGELPPRFAQCSQVSVLDLSGNLMSGALPGRLLATAPASLTRLSIAGNNFSGDISRYQFGGCANLSVLDLSYNRLSATIGLPPSLANCHHLRELDMSGNKILSGRVPEFLGGFRALRRLGLAGNNFTEEIPDELSLLCGTLVQLDLSSNQLVGGLPASFSGCRSLEVLDLGSNQLSGDFVITVISKISSLRVLRLPFNNITGTNPLPTLAAGCPLLEVIDLGSNMLEGEIMPELCSSLPSLRKLLLPNNYINGTVPPSLGNCSNLESLDLSFNLMVGPITPEVLLLPKLVDLVMWANSLSGEIPDTLCSNSTALKTLVISYNNITGVIPVSITRCVNLIWLSLAGNSMTGSVPAGFGNLQKLAILQLHRNSLSGPVPAELGRCSNLIWLDLNSNNFSGAIPPQLAAQAGLITGGMVSGKQFAFLRNEAGNICPGAGVLFEFFDIRPERLAQFPAVHSCASTRIYTGMTVYTFNQSGSMIFLDLSYNSLTGTIPASLGNMTYLDVLNLGHNDLTGAIPDAFTGLKAIGVLDLSHNHLTGVIPAGLGCLNFLADFDVSNNNLTGEIPTSGQLSTFPASRFENNSGICGIPLDPCTHNASTGGVPQNPSNVRRKFLEEFVLLAVSLTVLMVATLVVTAYKLRRPRGSKTEEIQTAGYSDSPASSTSTSWKLSGSKEPLSINLAIFENPLRKLTYAHLHEATNGFSSEALVGTGGFGEVYKARLMDGSVVAVKKLMHFTGQGDREFTAEMETIGKIKHRNLVPLLGYCKVGDERLLVYEYMNNGSLDVLLHERDKTDVGLDWATRKKIAVGSARGLAFLHHSCIPHIIHRDMKSSNVLLDDNLDAYVSDFGMARLVNAVDSHLTVSKLLGTPGYVAPEYFQSVICTTKGDVYSYGVVLLELLSGKKPINPTEFGDNNLIDWAKQMVKEDRCSEIFDPILTDTKSCESELYQYLAIACQCLDDQPSRRPTMIQVMAMFSEFQIDSGSFFLDGFSLDSDRGII

SEQ ID NO: 67562 - protein, 987 aa, Zea mays
  Coding DNA Sequence Number=SeqID_25783
  Homolog annotation: Hit_ID=Q6ZCZ7; Match level="QueryCoverage=11%, HitCoverage=17%, E-value=2e-44, Identity=80%"; Hit description =Phosphatidylinositol transfer-like
  Pfam annotation: Domain name=CRAL_TRIO; Domain location=1-112; Score=- 9.7; E_value=7.4e-05; Accession=PF00650.10; Description=CRALTRIO domain
  Pfam annotation: Domain name=zf-CCHC; Domain location=212-229; Score =18.5; E_value=0.00088; Accession=PF00098.13; Description=Zinc knuckle
  Pfam annotation: Domain name=zf-CCHC; Domain location=231-248; Score =21.1; E_value=0.00033; Accession=PF00098.13; Description=Zinc knuckle
  Pfam module annotation: Pfam domain module=CRAL_TRIO::zf-CCHC::zf -CCHC; Domain location=1-112::212-229::231-248
GLKNFSKTARDMLSRMQKIDSDYYPETLHQMFVVNAGSGFKLLWSSVKGFLDPKTASKIHVLGTKFQNKLLEVIDASQLPEFLGGTCTCAAVGGCMRSNKGPWNDPDIMKSGGRTKFERWGGVSPGSVPSSGLPFRDDVLSSSPPATAAVRLQPESRPPPLVRRSTFRTTPRLPAGADAEGWELVESRRAKRLRLRALRVRRHGPSPSAFNGVCFNCLSPRHLARHCRLDSRCFNCLALGHKAASCPRDPATSPVPRVHSSTAVHPVWARLGGSVAAGSSVWSRLGGTKGPGRPISVWGRISPPMDRSDVGRQRLVHAPKRVWRRKFLPALGEDNQQHSQPSVNGASGSPRGRTRRRHSRKRLAPPLEEGHLVPHRLERTAQVSPSPGAAVRPVPPCILGWSHAMSSAEEDLKKAVVISVISERTTVPGEEVAALLAPWLEVEEGSLSLLRLSASSFLLFLPSVGLIRLLEEKKSLLKASSFSVICQQWSRFTNSSGGILPFLVNFHLDGIPVHAWEVATVERLLNPFASVFCVQSDLDDRTSFRCSAWCVDPALIPDSRELWITEPLQSPENAGQGFRTLIYQVKIHWSFPSSSAELGPSLSLGDLGARDWARRSPRSRSPPGNGRGQSSRPRRSVMERLGPHINDGSSASNKRCSGIEAALVPLAADLGDIDEGISNLVNRAGLEASSVTALAPVPLVPLMARADKEGEHLVYDHRAGLETPSLGVSAPVYMAASSPIDGAAAAETLICVHRAGLEAPSLGVSAPGRSHGILDPNSVRGGALSVAGTVSPRALLVYSRRRPILADVGADSVSGSADRVDALVRSSPTGRQELLEGHAGEDCSADCISASVLDTTTSDVDLSLVQDFLATITKPVDCILARPATQKRRRKQTPKDFIPRRSNRLKKDGRGAPSTAVRKIRVDIARTLGIWADQEGLAQEALDEYGRLFSKPLTQDHVAALAALFGWAIPENADAADSLLGQSPIIV

SEQ ID NO: 67563 - protein, 980 aa, Zea mays
  Coding DNA Sequence Number=SeqID_25784
  Homolog annotation: Hit_ID=Q6Z1K3; Match level="QueryCoverage=22%, HitCoverage=47%, E-value=3e-17, Identity=26%"; Hit description=Zinc knuckle domain containing protein-like
  Pfam annotation: Domain name=zf-CCHC; Domain location=156-173; Score =19.0; E_value=0.00073; Accession=PF00098.13; Description=Zinc knuckle
  Pfam annotation: Domain name=zf-CCHC; Domain location=175-192; Score =20.6; E_value=0.0004; Accession=PF00098.13; Description=Zinc knuckle
  Pfam module annotation: Pfam domain module=zf-CCHC::zf-CCHC; Domain location=156-173::175-192
  Subcellular localization annotation: CTP_CleavageSite=67; ConfidenceScore=5.53e-01
MASPLPPPPPPPPPSHAPNPPTSTHHPCPSPASTPEPATNPENSLGVPLAPHVGRLKAQRWSDTSPVSSSGDSWLAPQSYKEALLAYPLAPAAPPPAPSVKPVYSAKAVADSLPVVQGRRAGPRHDDDGWQVVRSKRRQFRGVQLPRREPPVVLRGRCFNCFSSGHLAAVCRRPTRCFRCLRLGHQAAKCPGRLEVQRKKTVWQRLEKQQSKVSVWQRLSEQREDSPVASQRADPCRRRSVWVQISRPEAAAMKEDPPRMADDGESHRSLRYKRKRRRSKHGKGSSRSVVAPGQALSASSEDEVPPSTRQTPVQWAGDQGERNWGALSSCTLEFSDDMAREEANMRRALFVTIVGTRPLVMGPEILEEVAHSFNVKLEDMKIHHTKPEDFLLILPDEDTASRVLNGGKILRGPRFSLIFKRWTRCSHASSSIMSGLVDLEIRGIPEHAWALSTAKSILIDSCLIAEVHPDTLLKQDLSSFVVKVWCFNPEKLQRDSVLHIIEPGLQMFEKRCLTYKIQVSVLRAGSSITPADPTPSVAGGKSPGDEDGNGTQDPHPRRPGGSQVQRRPLHLRLGPQSSSGRGNEAPAQSCALEEVAGDAGRDLHLTLGTDMSPTSEVRTLHLRQAPQPSLGRDFEAPAPPYASRENSGDTLRVTQLMPLTTEEPLHAEALPEASPHIDGAPSQDFEVAGQVTMEKRNSPQGCYSAVHESGGMTSRLVINGPVRFLRPDPARCLVGSLETSGPVPVSPHEPAGPLETCISLPVSPQLCSGPLKTNTLMIVSPQLVSGFPESTFPSAGLPLQMLGMAGRMAVTVRHNEATKALKVYFRRRTKAQPLQISQNEETEASIIQTNNTSHSDSRLLNQSLSGKEEFLRKISKAADKILPAPKQTMNTSSAPQSSQVAAPRRSRRIAGAGVEFNMRDWGNRSTKKAMRALHILSDDNGTTQEALDAYAKIFKQPLSHNQVEALAALFGWTPPPGLVC

SEQ ID NO: 67564 - protein, 124 aa, Zea mays
  Coding DNA Sequence Number=SeqID_25785
MSCVLRMFPNLTGSSIYGCFYLQRLVEAKLQVVQLDANLLSIRRALLEKGIEAVLRSTFWQQEMKGKVFKLLYAQRFHGQLQGSSMAISIATFKVKYSHSQEMGSPTKCKIQIKDMLLRNRKKQ

SEQ ID NO: 67565 - protein, 106 aa, Zea mays
  Coding DNA Sequence Number=SeqID_25786
  Gene Ontology: Mol. function=structural constituent of ribosome; Cellular component=intracellular; Biological process=translation
  Homolog annotation: Hit_ID=Q10RZ3; Match level="QueryCoverage=79%, HitCoverage=51%, E-value=2e-37, Identity=89%"; Hit description=60S ribosomal protein L21, putative, expressed
MGLTDGIVKLSYAGHIMLCVVVNGRIIRKRIHVRVEHVQPSRCTEEFRLRKVKNDQLKADAKERGEVISTKRQPLGPKPVFMVEGTTIETVTPIPYDVVNDLKGGY

SEQ ID NO: 67566 - protein, 138 aa, Zea mays
  Coding DNA Sequence Number=SeqID_25787
MGKNKKGGSSSHHSGNKRKREPTPPSEDFGDSEYSEEEFSSESEGSSVHASPPASSDDSDDSQGLAAELWTYIRTVERTGLEGWDESEVSSDEEGGGDGDGEGDDDDGGDDDGDDDDEGGRGDGDGVDGSKGSNKASG

SEQ ID NO: 67567 - protein, 123 aa, Zea mays
  Coding DNA Sequence Number=SeqID_25788
  Subcellular localization annotation: CTP_CleavageSite=63; ConfidenceScore=5.79e-01
MACNLAQCATAAAATVAPRTPRPAASASVSFSARKPAGGSLRLQRQACCEPSVAPSRAVFACRAAASGSAADLASGGRRSSGVPECGTALHRRKAVQASLSALKSAGGKGVMVERVGGASSNR

SEQ ID NO: 67568 - protein, 161 aa, Zea mays
  Coding DNA Sequence Number=SeqID_25789
MERFFSNPSNAPRYIEDGDEIRKYFAAFHLLDDFPAAVIVDDFADFFSDRSCQQRYGIARARDLAMVRALALCHNAIGHANAKLGTLGYCNLLLSDVHQGDTPRLLFIYQRWINSIYTIRGDGNGSYILQNLGSSETGSKKARKAKYSIALQYLVLEETST

SEQ ID NO: 67569 - protein, 725 aa, Zea mays
  Coding DNA Sequence Number=SeqID_25790
  Gene Ontology: Mol. function=metal ion binding
  Homolog annotation: Hit_ID=Q10RY0; Match level="QueryCoverage=81%, HitCoverage=87%, E-value=1e-174, Identity=55%"; Hit description=Zinc finger family protein, putative, expressed
  Pfam annotation: Domain name=PHD; Domain location=104-151; Score=0.1; E_value=0.055; Accession=PF00628.19; Description=PHD-finger
  Pfam annotation: Domain name=VWA; Domain location=260-442; Score =83.7; E_value=5.8e-22; Accession=PF00092.18; Description=von Willebrand factor type A domain
  Pfam annotation: Domain name=VWA_CoxE; Domain location=217-421; Score= -88.8; E_value=0.049; Accession=PF05762.4; Description=VWA domain containing CoxE-like protei
  Pfam annotation: Domain name=zf-C3HC4; Domain location=105-148; Score= 45.9; E_value=1.4e-10; Accession=PF00097.15; Description=Zinc finger, C3HC4 type (RING finger)
  Pfam annotation: Domain name=zf-MIZ; Domain location=101-151; Score= -13.7; E_value=0.079; Accession=PF02891.10; Description=MIZ zinc finger
  Pfam module annotation: Pfam domain module=PHD::VWA::VWA_CoxE::zf -C3HC4::zf-MIZ; Domain location=104-151::260-442::217-421::105 -148::101-151
MAPAWERARRALATRFCMRFAARRVVVEDAPRGMDDIEAEEEEEQEQQQHQEEPAEDEREMSLAAESEDLASSWSGSRSSEVSQAPVFVFWTFLVIDRTDIEFTCAICLSGMRSGRGQALFTAECSHKFHFNCISSNVQHGNKICPICRAVWKELPFQGHVATSAAAHVVWPQMSMQSVSPLDELPVFGYQDTAVMNDDEQIQPTETAVGDEAPPPPPPLLEITTYTEFPAVQESVAHEEFAIVIHLKAPSWVSTRAPLDLVTVLDVSGSMSGPKLALVKRAMRFVIENLDPSDRLSVVAFSSAAWRLFPLRRMTASGQQQSLQAVNCLVADGGTNIADGLRKATRVVQDRHARNPVCSIMLLSDGVDSHVLPPRRGSAPDYGRLVPRSALLPGSEHHVPIHAFGFGIDHDSRALHAVAQMSGGTFSFIDVVGSIQDAFAQCIGGLLSVVAQETTLSVECADQGVLLTSIKSGSYASGADGDGRGGFVDVGRLYADEERDFLVTVRVPPSRGTIALVRPSCTYRDAVTTEMVRVGGDPVTLLRAASPVSAAMSLQVEREWHRVHATEDMAAAQAAAEEHDYARAASILEARRRLLESCASLSSDQQTQALVAELREMQERVLNPRLYQGFGRAYILSGLSSHSWQRATARGDSTELTGLVHTYQTPSMVNMLNRSQALQPEVAEALTRSPTIAPLRSPAPASGSRGTRRGPRSFRPAKSFTGRSS

SEQ ID NO: 67570 - protein, 254 aa, Zea mays
  Coding DNA Sequence Number=SeqID_25791
  Gene Ontology: Mol. function=protein dimerization activity
  Homolog annotation: Hit_ID=Q2QNH1; Match level="QueryCoverage=98%, HitCoverage=30%, E-value=4e-90, Identity=69%"; Hit description=HAT family dimerisation domain containing protein, expressed
  Pfam annotation: Domain name=hATC; Domain location=140-230; Score =70.8; E_value=4.3e-18; Accession=PF05699.5; Description=hAT family dimerisation domain
MSIDSALQQIEGIMQYFEKYRNEGFQVSLEIAKGLATEMAVHPSFPVKRQGTRKKQFDESDCSEEILQAEKDFEVNYFLVMVDMAISSLKNRFEELQVFKTIFGFLLSSRTLMSLDDNELTNCCNKFDKTFTFDNSSDVDLNDLISELKILQLTLPDRQMSAMEIFEFVREVDSYPNVVIAYRILFTMPVTVASAERSFSKLKLLKNYLRSVMSQERLNGLATLCIEKQLLDDIDTDSIITDFASRSVRRNIFK

SEQ ID NO: 67571 - protein, 153 aa, Zea mays
  Coding DNA Sequence Number=SeqID_25792
  Subcellular localization annotation: CTP_CleavageSite=20; ConfidenceScore=5.15e-01
MARRLGRLYLCEQPHPHELRAATPSSRSLLGSRVSPPVSTFINLSSTIFVVVVGSHRQPATARLGQAIRQLRCPVPLLLQSASLRAPVRVCSPLVVLRRAPGSQPLLGLAPYCLPPPASARHLAVPSSPCALKLWRAVVVYASDLLYASPSIF

SEQ ID NO: 67572 - protein, 57 aa, Zea mays
  Coding DNA Sequence Number=SeqID_25793
MVAGLLLLLLLRGSGHEEAWGSWAREEHLSRSVGVTKIRSDNGTEFKNSQIEGFLEE

SEQ ID NO: 67573 - protein, 328 aa, Zea mays
  Coding DNA Sequence Number=SeqID_25794
  Homolog annotation: Hit_ID=Q9ZU41; Match level="QueryCoverage=88%, HitCoverage=82%, E-value=9e-36, Identity=36%"; Hit description =Predicted by genscan and genefinder
  Pfam annotation: Domain name=DUF789; Domain location=33-324; Score =473.6; E_value=2.4e-139; Accession=PF05623.3; Description=Protein of unknown function (DUF789)
SSAECRRNLLDSPATGSVLWELLAWLGEGMPPSNLQCFLDCTTPTVDTHILPKTNGRLPADAWHHAEMDSVEYFNLSDLWEQYYEWSAYGAGATVQLPGGERVVQYYVPYLSGMQLFTNKVLTASRSFGEDNGMDFWSDDEDNEKMSRSWSSTSDESLFNCDVVWPNRKRPGHLSFEFFEVGSPYGRVPFIDKVYELSQGFPGLTLLKSADLSPVSWMSVACVKDLSACFLTYHTISSSFQDYGLETMTNDCCHPVADGKQNGHMDKKSTPCHCLHSASQAHKVHGSLWTNPMTGDHRKMDFLFSAADSWLKQLGVQHHDFNFFITHP

SEQ ID NO: 67574 - protein, 151 aa, Zea mays
  Coding DNA Sequence Number=SeqID_25795
MAGEGTTTVCGGHGQDSEAVEWSGGMVEAAVGARGWWSMTTASRRLALGHWASGAGRRHAGGFFREGRIFLLQKTYKNRVPRYAELDKGAIDCSRWQDLYTVAGEGTTAVRGGRGPDAKAVEWSGSMVEAAGEAPGWWSTGATSRRLALEH

SEQ ID NO: 67575 - protein, 198 aa, Zea mays
  Coding DNA Sequence Number=SeqID_25796
MEHDNDEQEAGVEALGRWSRATTRWRKGPGDKAVEQVRGPRPLPAMVQGCAQDRWHKRIGGVVEATMTSGSSDGGFNWSERPDRVEFHPGRKKFFTPKDIKIGYGSGYHGPVTGTSGVVRYTMAYVVVSTYYHPPLQKRRNRSFFVAVNFRHVSATGIRIRCSLTTRGGDKWYIPLCPDVCASKILIRCPICYRLDKF

SEQ ID NO: 67576 - protein, 461 aa, Zea mays
  Coding DNA Sequence Number=SeqID_25797
  Gene Ontology: Mol. function=serine carboxypeptidase activity; Biological process=proteolysis
  Homolog annotation: Hit_ID=Q9FP87; Match level="QueryCoverage=90%, HitCoverage=90%, E-value=1e-144, Identity=71%"; Hit description =Carboxypeptidase C-like
  Pfam annotation: Domain name=Peptidase_S10; Domain location=27-439; Score=121.2; E_value=3e-33; Accession=PF00450.12; Description=Serine carboxypeptidase
  Subcellular localization annotation: CTP_CleavageSite=36; ConfidenceScore=5.70e-01
MASLVPRAAAASLLAVLVMTTTTTTTPASAQRFPVRARPTRSGYLNITSTNSLYFAFYEATEPVTTPATAVPLLVWLQGGPGCSSLIGNFAEVGPFLLLNSSSSGLSRNRNRWNRRFGVIFIDNPLGSGFSAPAHSTTSPGTSPPSPRTSSRRCSRSWRLTRPSARALCSSQERATPGKYIPRGPRGTSSTRTTSSPAGQRVNFAGHRHRQRHDSPRGAGDRSRRPGVLRRSHQRQAEGHRRGHAEQDGEPGEGRQLGGSQEGAERHHKLPPESHRRGDGLQLRARECETKYPTRPLRNFLNTDEAKAALGARRDVRWVRCSKDVSEALGDDIMKSVKGDVENILARNGTARVLLFQGVFDLHSAPASVAAWVRELSWPGLPAFLDADRAVWKLGGGRLAGYVQSSGALSNTVIVGAGHMAAGDNRPAAQAMIEGWVLQTGPFATAGGQASTPAAIEPVPV

SEQ ID NO: 67577 - protein, 642 aa, Zea mays
  Coding DNA Sequence Number=SeqID_25798
  Gene Ontology: Mol. function=protein serine/threonine kinase activity; Cellular component=nucleus; Biological process=protein amino acid phosphorylation
  Homolog annotation: Hit_ID=Q5ZCI1; Match level="QueryCoverage=95%, HitCoverage=100%, E-value=0.0, Identity=83%"; Hit description =Mitogen-activated protein kinase 10
  Pfam annotation: Domain name=Kdo; Domain location=21-212; Score= -84.5; E_value=0.057; Accession=PF06293.4; Description=Lipopolysacchar ide kinase (Kdo)
  Pfam annotation: Domain name=Pkinase; Domain location=25-316; Score =300.9; E_value=2.4e-87; Accession=PF00069.15; Description=Protein kinase domain
  Pfam annotation: Domain name=Pkinase_Tyr; Domain location=25-316; Score=48.5; E_value=1.9e-15; Accession=PF07714.7; Description =Protein tyrosine kinase
  Pfam module annotation: Pfam domain module=Kdo::Pkinase::Pkinase_Tyr; Domain location=21-212::25-316::25-316
MQHDQRKKGSVEAEFFTEYGDASRYKIQEVIGKGSYGVVCSAVDVHTGEKVAIKKIHDIFEHISDAARILREIKLLRLLRHPDIVEIKHIMLPPSRREFKDIYVVFELMESDLHQVIKANDDLTKEHYQFFLYQLIRALKYIHTANVYHRDLKPKNILANSNCKLKICDFGLARVAFNDTPTTIFWTDYVATRWYRAPELCGSFFSKYTPAIDIWSIGCIFAEVLTGKPLFPGKNVVHQLDLMTDLLGTPSMDTISRVRNEKARRYLSSMRKKETISFSQKFPNADPLALDLLQRLLAFDPKDRPTAEQALAHPYFKGLAKVEREPSCQPITKMEFEFERRRVTKEDIRELIFREILEYHPQLLKDYINGTERTTFLYPSAVDQFRKQFAHLEENSGNGPVIPMERKHTSLPRSTIVHSSPIPVKEQPRIGPCRERPSSDESYRNPRETEQYSGNLPRTSQAPQRVPTARPGRVVGPVMPYQNGDTKDPYDTRRLAMSSGYPPQQIPQTFGYYQTHGKPACCEPSQAERYTLHQQAAYACANRTAASDVALDMRAPPFQHLSAGQRSDSCDRLTAQTYLSATSSNGIDATAPRLAATTHRRSALFRLACQTCISDWIMAEIMEKRNTAGGMKPAKKFVSACA

SEQ ID NO: 67578 - protein, 425 aa, Zea mays
  Coding DNA Sequence Number=SeqID_25799
  Gene Ontology: Mol. function=oxidoreductase activity; Cellular component=integral to membrane; Biological process=electron transport
  Homolog annotation: Hit_ID=Q8LL72; Match level="QueryCoverage=98%, HitCoverage=97%, E-value=0.0, Identity=82%"; Hit description =Cytochrome P450 monooxygenase CYP72A28
  Pfam annotation: Domain name=p450; Domain location=1-425; Score =138.4; E_value=2e-38; Accession=PF00067.12; Description=Cytochrome P450
MTTGKTSITWFGPVPRVTITEPELVREVLSNKFGHYEKLKFGRLQRMLHNGLGSLEGEKWAKHRRIINPAFHLEKLKGMLPAFAACCTELVQRWEGLVADGQPCEVDVWPEMQNLTGDVISRAAFGSSYLEGRRIFQLQGEQVQLVVQAMHKLHIPGHLYLPTKTNRRMKQIASEVEELLKGIIAKRENALRSGSAAGDDDLLGLLLESNMEHCRGDGSDAARAGITTDDVIGECKLFYFAGMETTSVLLTWTMVVLSMHPDWQHPGQGRRCSTSWVTRRRAPDYDALSRLRIVTMVLYEVLRLYTPLTALQRQTYKPMELGGVRYPAGVMLMLPLLCIHHDKDVWGPDASEFRPERFAEGVSKASRDAPAFFPFGWGPRTCVGQNFALLEAKMGLAMILQRFAFELSPAYTHAPFPHGMLQPEH

SEQ ID NO: 67579 - protein, 479 aa, Zea mays
  Coding DNA Sequence Number=SeqID_25800
  Gene Ontology: Mol. function=phosphoric monoester hydrolase activity; Cellular component=chromosome, pericentric region
  Homolog annotation: Hit_ID=Q6VEY3; Match level="QueryCoverage=32%, HitCoverage=35%, E-value=1e-58, Identity=66%"; Hit description=CTD -phosphatase-like protein
  Pfam annotation: Domain name=NIF; Domain location=291-470; Score =262.8; E_value=6.8e-76; Accession=PF03031.8; Description=NLI interacting factor-like phosphatase
MTQDDPDLGCGTTIPVCCIAELSGENTEIMEISLLHNESDAGSTSLLPLPLLSYGPRSMHYIVCQKHTARVIPLYVPYDLIHHKGKKAASALDSQAVNALLRNNSVSVEVPIQVPPSSDFESILSPEPIYSDLQLKEMNYNAAAMDESTEFLHLILSGNDEGYNSTTELQVWDVVDFYVSENFSALQFDSLMGFTNEVSTSYNDCMNLVDMVERPVARLSLDDTPKPSNSDDAVPADNVTMDPDETSLYLQTKPTDSETESSSAAGDVETEYLDLKLLSRCMPDLMDVDSPNCLSKTPVKKKHVTLVLDLDETLVHSTLDHCDNADFTLEVFFNMKNHTVYVRKRPYLKMFLEKVAQMFEVVIFTASQRVYAEQLIDKLDPDGKYISRRIYRESCVFSDGCYTKDLTILGIDLAKVAIVDNTPQVFQLQVDNGIPIKSWFDDPSDQELIELLPFLESLVDSEDVRPIISKTFHDKLEQN

SEQ ID NO: 67580 - protein, 347 aa, Zea mays
  Coding DNA Sequence Number=SeqID_25801
MKTFLAGMVELIVKKQMSLQGIPVVVPGKKCWNPLVATEHEIQYVFHVVLYVEFPEKAAKLAVDLATEDALVQDDEKHVLVDGTQVQVAKEHLVFAAVYMKHSGGAYDVFVEDRPVVVGKLAAGHVEAAAELESLTASEVEYFDVEVKLADVDVVAVQQYVAAAEVELVVLGDQMVGEEHDLVGTVELGLTELIDEAVTDLQVVEHGKDEGDFGDEVELDAAEAAVDLSMDGPGVDFELASSVGRIALEAEHKKQVVQILAPHFGMVLALKVACNADTPAGIGYTVDIAACKGWIQDAAADNIVSIGAAAAAELVTAVAVVKDGFGRVVTAGAADPAEASDGSWVTG

SEQ ID NO: 67581 - protein, 108 aa, Zea mays
  Coding DNA Sequence Number=SeqID_25802
RRELMLDALLLKETFNLRVERELEPAHYNSPDCPVYTGQCPVLQEDAALELGCLGNSQRLLRYNSPDMSGVTAGQRLLRRQRLPASALNARQRAQKSGTPMLAHRTLY

SEQ ID NO: 67582 - protein, 102 aa, Zea mays
  Coding DNA Sequence Number=SeqID_25803
  Subcellular localization annotation: CTP_CleavageSite=49; ConfidenceScore=5.55e-01
MASWSTSPALRPPRPCLDGLVRPRRVAMASRNCVGLATPASCRAMAVARAEAAVPTPLRQGRARLEEPRSERATRSSGLSPRRQRLPPWLQHGERAVMVFNP

SEQ ID NO: 67583 - protein, 78 aa, Zea mays
  Coding DNA Sequence Number=SeqID_25804
MKGLQVGPDCGGVGPGSHGSLVWPSLASRTLDFDGAWTSLLREELSLRDAWGSYTSPPSCSMALHSDVSEGRDRGPRC

SEQ ID NO: 67584 - protein, 463 aa, Zea mays
  Coding DNA Sequence Number=SeqID_25805
  Gene Ontology: Mol. function=oxidoreductase activity; Cellular component=cytosol; Biological process=leukotriene metabolic process
  Homolog annotation: Hit_ID=Q8S0M7; Match level="QueryCoverage=75%, HitCoverage=98%, E-value=1e-168, Identity=83%"; Hit description =Putative allyl alcohol dehydrogenase
  Pfam annotation: Domain name=ADH_zinc_N; Domain location=273-420; Score=113.7; E_value=5.2e-31; Accession=PF00107.16; Description=Zinc- binding dehydrogenase
  Subcellular localization annotation: CTP_CleavageSite=67; ConfidenceScore=5.33e-01
MVTWTTTSSLPDNQPRAEPTGSPQLTVAPQPSCTNVPWDVGGLQGSNWNPRRGPSLPQSRCPPVPTRSAHARTPTYPLRLHKILLDPHRKVPAEELGGRKAKPTCSRAGGDSGMERERQAVARNRKVVLRGYIDRAPREEDMELVDGGAVELRVPEGGGGPAVLVKNLYLSCDPYMRGRMRDFRNSYIPPFKPGSPIEGFGVGRVVDSTHPGFSAGDVVSGMTGWEDYSLITKPEQLRKIQQSDIPLSYHLGLLGMPGFTAYVGFYEICSPKKGEFVFVSAASGAVGQIVGQLAKLHGCYVVGSAGTDQKVELLKEKFGFDAAFNYKEEPDLTAALKRHFPEGIDIYFENVGGPMLDAVLLNMRVHGRIAVCGMVSQHGVTAPAGIHNLFSLISKRIEMKGFIQSDYVHLFPQFVDDITRHYRDGKIVYVEDMSVGLESGPASFVGLFSGKNVGKQVVCVSRD

SEQ ID NO: 67585 - protein, 151 aa, Zea mays
  Coding DNA Sequence Number=SeqID_25806
  Homolog annotation: Hit_ID=Q10NM2; Match level="QueryCoverage=49%, HitCoverage=28%, E-value=1e-17, Identity=53%"; Hit description=RNA recognition motif family protein, expressed
MGEEQEGREEIYRSAGVHYFAHLATLLCNSIGGFSHNSGDHYNEPFMNVDSSDAENPGKQPVIDASIVYDPWTREPRGFGFVTMAATKEADHCIKYLDCSVLQGQVIIVEKCISIFTDETTISVFNESVELNCKNRNCSILFECTNRTQRN

SEQ ID NO: 67586 - protein, 237 aa, Zea mays
  Coding DNA Sequence Number=SeqID_25807
MAVGGPPLVLVVWLCGMSRLAGRRALPLLNRVGLDKAAWLAAMPPANGPGRHKVVVTATVFYSFFPSIIPFRPRMVSSAGKAWAALGPGMMDLMPWWLDLVPLGLDAVPVVSAMLGATALAYPGFPSSWPDPGSIGRRAMVVVCARARDVFGTWQCDARGKVIPGSMGPTGGGVAIEVRLGHSVTFAIDAFASQCPVCVWEEGTCNVKSELLHQGMWLINDDMRRVPPFRGLDCFRG

SEQ ID NO: 67587 - protein, 338 aa, Zea mays
  Coding DNA Sequence Number=SeqID_25808
  Gene Ontology: Cellular component=cellulose and pectin-containing cell wall
  Homolog annotation: Hit_ID=Q6YVK6; Match level="QueryCoverage=84%, HitCoverage=63%, E-value=1e-63, Identity=43%"; Hit description =Putative pectin acetylesterase
  Pfam annotation: Domain name=PAE; Domain location=35-337; Score =376.6; E_value=3.7e-110; Accession=PF03283.4; Description =Pectinacetylesterase
  Subcellular localization annotation: CTP_CleavageSite=39; ConfidenceScore=5.27e-01
MAIAEHTPSSSSPFRQHRPTGWVTFTAATPLLALQLALLAALVMATDPSPSPELVELTLLTGAREKGAVCLDGSPPGYHLQRGFGSGSHSWIVYLQGGAWCSSNTTDTETCSERKMTAYGSSKLMGAVTFDGIFRNQQPQNPDFYNWNKVYVRYCDGASFSGDAEGEAQDGTKLFFRGSRIWDAVVDELMGKGMDAAEQALLAGCSAGGLATLLHCDDFRARFPQEVPVKCLPDGGFFLDIKDLSGERHMRSVFSGVVQLQNVSGVLPKRCLAKKDPAEARSCSLDLYDIFASPFNMLSCQRFVFLDLRQCFFPAELIKSISTPTFIVNSEYDSWQVR

SEQ ID NO: 67588 - protein, 545 aa, Zea mays
  Coding DNA Sequence Number=SeqID_25809
  Homolog annotation: Hit_ID=Q6YVK6; Match level="QueryCoverage=42%, HitCoverage=75%, E-value=2e-48, Identity=37%"; Hit description =Putative pectin acetylesterase
  Pfam annotation: Domain name=PAE; Domain location=268-501; Score =194.8; E_value=2.1e-55; Accession=PF03283.4; Description =Pectinacetylesterase
MYLAAWCVEATTTRSTSSEDAAASRSFSVSVGHSPLPALSRVGDGVAYCCAWIAMWGWGTREPRRWGDGGVGVGEGAVAAHAGAAEGDDSADGRHVAVLNCCADARRRRVDAAVAAEAHQQPTGEARVRVDSSTALGPWPLPRHPSGTEIQVPTRAHGDTVAAGGAGRASCNSRRNGPAPTRLRRRTNQDLNTHCSRPRTGSAVGRAVTWDGLRPTGRHLFASIWAGLSRPGGLSGSHAVAKAMATAPRWSHPVPPPGFAAAPRIITVALLAVSALLSRSPVPTVAAELVKLTLLANAREKGADFYNWNIVDVRYCDGGSFAGDGEGEDRNGTKLFYRGLRIWEAVVDELMAKGMDTAEQALLVGCSAGGLAALLHCDSFRARYPPEIPVKYLSDAGFFLDCLFPPELIKSISTPTFIRNSGYDSYQIEALNGFRRELVEDLKVAQHKRGWGLFIDSCFNHCQTPFGATWHSPISLRLGNKTIAEAVADWYVGENHGVEEIDCAFPCINPTCSSQLDLVFLCAVACSSAGPDILEVWSKIYNGGP

SEQ ID NO: 67589 - protein, 430 aa, Zea mays
  Coding DNA Sequence Number=SeqID_25810
  Gene Ontology: Mol. function=RNA-directed DNA polymerase activity; Cellular component=nucleus; Biological process=RNA-dependent DNA replication
  Homolog annotation: Hit_ID=Q9LGH0; Match level="QueryCoverage=69%, HitCoverage=85%, E-value=1e-34, Identity=29%"; Hit description=NAM -like protein-like
MWSGAPRVAERLELERQATLDGHVPRDLEAGVNSGGAQGPHPLRVRRLPPTTGRFGGMDNIWQQYGDTNQAYGNVTYTPGIDLTLSPGNDLTQFQDPAVVHGPGPIIQENQSFSSTSQVPQPVNDRRKKGVAKREKNYSNLEDETLCSAYLNVSKDPVVGVNQPMKSYWARITDYFNEMRTTDVERSSSSLQHRWGDISRDTTLFCSYYAEIERKHQSGKSEDDKIKDALKMYEGLRSSKFKFLHCWLILRKEQKWSEFLATTTSSTSQARSKADPVQQGDPTATSTPEVNVSGKIARPIGRDRAKKQRSNNSSSSSACFEMLQKIQLDRSRFEEDMKAASKYESEEMAVRYDRKLAIQEQHLKLVAESTMIQKEMLRFQQKEREDRVMTMDLDKVAPWVREYYINEQKAIAAKSEREMCPWAISKYFGD

SEQ ID NO: 67590 - protein, 197 aa, Zea mays
  Coding DNA Sequence Number=SeqID_25811
  Gene Ontology: Mol. function=nucleotide binding; Cellular component =cellular_component; Biological process=biological_process
  Homolog annotation: Hit_ID=Q10NM7; Match level="QueryCoverage=77%, HitCoverage=75%, E-value=7e-67, Identity=77%"; Hit description =Josephin, putative, expressed
  Pfam annotation: Domain name=Josephin; Domain location=38-197; Score =102.4; E_value=1.3e-27; Accession=PF02099.8; Description=Josephin
MDNSQFTKAYKNGHHSRTFHPGVDPGPELAEPQPRLTVSVMFSEVQEKECFTRAELDGIAGNLVLNDPNKGQWTPLPFIFKPHHNVITGNYDVNVLITALEARNKKVVWHDRRKGASSVDLNAETLVGLVINVPIRRFRGLWTGRHWVAIRRIDGIWFNLDSDLSEPKQFKDQENVIGFLDSVLSQGGELMVVLQGE

SEQ ID NO: 67591 - protein, 566 aa, Zea mays
  Coding DNA Sequence Number=SeqID_25812
  Homolog annotation: Hit_ID=Q84QB1; Match level="QueryCoverage=45%, HitCoverage=96%, E-value=1e-81, Identity=82%"; Hit description =Putative sulfolipid synthase
  Pfam annotation: Domain name=Glycos_transf_1; Domain location=350 -518; Score=73.3; E_value=7.9e-19; Accession=PF00534.10; Description =Glycosyl transferases group 1
MGTSFLMGVNIFHGYGFGIAKPGGKLLEMLSQIEHPGLCWLRGRASHVPCLDSGLADWLAGLQSAALPMQTSTPPLRTARMGARGKIPTPTPARRTTSTRYYSVDRLDSRSHRLTGRRVQGQAARRTRWGPHTRHCGRILVGGLVPGQLFSPSSTAVSRLISIGSWRESVRFPVCRSASFPFLWLRLGSFLRSSYFFSTTSFIFFFFLPPYTATTSPPQTTSPPSSSRFPYARPVASRCCCWVRPRVAVKGEAASARRRRHLPRVGCKSSSRLGRGRSRRGRAKRDKGGRGTRTQEADAEWSSKPRRIALFVEPSPFALVSAFSSRPFSAASQIRVDRIGVYISGYKNRFQNFIKHLREMGDEVLVVTTHKGAPEEFHGAKVIGSWRVMERLPGARIAFVGDGPYRSELEKMFTGMPAVFTGMLQGEELSQAYASGDVFAMPSESETLGQVVLESMASGVPVVAARAGGIPDIIPKDKEGKTSFLFTPGDLDECVRKIEQLLSSKDLRETIGMAAREEMEKCDWRTASKKIRNEHYSTAISYWRKKMGKTNQTSLFQDSSVAALSN

SEQ ID NO: 67592 - protein, 497 aa, Zea mays
  Coding DNA Sequence Number=SeqID_25813
  Gene Ontology: Mol. function=nucleoside-triphosphatase activity; Cellular component=membrane; Biological process=defense response
  Homolog annotation: Hit_ID=Q10NN1; Match level="QueryCoverage=71%, HitCoverage=51%, E-value=4e-74, Identity=64%"; Hit description =ATPase, AAA family protein, expressed
  Pfam annotation: Domain name=AAA; Domain location=222-398; Score =27.6; E_value=1.7e-06; Accession=PF00004.19; Description=ATPase family associated with various cellular activities (AAA)
MDMDMEMPDPDELEWMESHGLVPEEEDAYFDDPDEGFVLAPGDSDQPCNSPQPQESAAPRASMQCTPFLDEEEERSKRRNVEQEDEDWLRYSPPPAPEIVVAEKTISRFASEIHGDSVPVTAPNGERVYAKLAMEGLVGRGISGTRQGVQFSNPNSNHKGLLSESFDSLTRRAEQEALAKSKGGPVASQDGTPLNAQSSNPEGLGGSFSKKSSVDNAPEQKVLLLCGPPGLGKTTLAHVAVRHCGYHVVEINASDDRSASSIETKILDVVQMNSIMSDSKPKCLVIDEIDGALGDGKGAVEVILKMINAEKSNNSDKSTNGEETQARKTSRKSHRTAKLLRPPTISRVVNRLKYICKNEGFKASSIALSALAEYTDEQGAGTTFEDELETPTRVESPRAAAVDCLEAAGGRGQAVERARVLKAKTLRDGSVKITQGVKEMTIVELSGSKHKLTKNARASVDAASGHKHCGGCSQATSMAITVVDAITKRQRDGRYHD

SEQ ID NO: 67593 - protein, 189 aa, Zea mays
  Coding DNA Sequence Number=SeqID_25814
MTTAALSSLTEAGGRQQELNRYDNCPSARLRCSSDSHDTTPAGCQDLSGCHIGIHVALCYTPIVHLDPLLTPIKGRTRAFLEKVGRAGTRTGQALSWGRSLPSPAWTLVTPYCKRTRPGRETNTKAAGFPPLSRPSPAASLPPFALAHALDPSGLGHAAHSLVGLGTPRSRNADRIEWPKKLRRRGQRI

SEQ ID NO: 67594 - protein, 65 aa, Zea mays
  Coding DNA Sequence Number=SeqID_25815
MGNYPLTSLARRDDGHHHVTLLLLGPCGCAAVLIIPFGKTCDSNYRCLPDSKNENTTAFSRRDDW

SEQ ID NO: 67595 - protein, 281 aa, Zea mays
  Coding DNA Sequence Number=SeqID_25816
  Subcellular localization annotation: CTP_CleavageSite=74; ConfidenceScore=5.64e-01
AARGRLPPLVLPSVNLHRPMASVNLHRPPLLTPTFVLVSTPMFVPRLPLFHPPVRTCRPCSPCSHPPPLLPLSRAAVTGSENTPADASRIQGLPLPSPALTRTPSPPPPPSCEREEGPLDLRGAWRSGTTHAEAAPVGCCCIRPGSGEFQEAGERSIGEPRFLEQKLGVRRICEMRAAAPAARRSSCVRAGSQVPQPFHLPRLHAFVCSAQRARPPPSAGASRARAPTTPTPTPPRPSGTAQAPGTHTGTAQARPWLRLYDQLVYLLVSSLTYSFRSLLGL

SEQ ID NO: 67596 - protein, 749 aa, Zea mays
  Coding DNA Sequence Number=SeqID_25817
  Gene Ontology: Mol. function=protein serine/threonine kinase activity; Cellular component=integral to membrane; Biological process=protein amino acid phosphorylation
  Homolog annotation: Hit_ID=Q5ZBB1; Match level="QueryCoverage=99%, HitCoverage=94%, E-value=0.0, Identity=74%"; Hit description=Dual -specific kinase DSK1-like
  Pfam annotation: Domain name=APH; Domain location=424-610; Score= -12.0; E_value=0.041; Accession=PF01636.13; Description =Phosphotransferase enzyme family
  Pfam annotation: Domain name=Pkinase; Domain location=432-683; Score =83.0; E_value=9.5e-22; Accession=PF00069.15; Description=Protein kinase domain
  Pfam annotation: Domain name=Pkinase_Tyr; Domain location=432-678; Score=46.6; E_value=2.5e-15; Accession=PF07714.7; Description =Protein tyrosine kinase
  Pfam module annotation: Pfam domain module=APH::Pkinase::Pkinase_Tyr; Domain location=424-610::432-683::432-678
MMVGSSRHQLLQRKGKSVADKGAAAAAATVAAEKVVVAVRAATREISKTAIIWALTHVVQPGGSIILLVVIPAHSSGIVSGFSFPVCSCLKVSARLSISGRKFWGFPLFAGDCASGHKSMLDQKCDLSELCSQMLKKIDVYDIDKINVRYKLVSGSPSGVVAAECKQAQASWVVLDKDLKHEEKRCVEELQCNIVVMKRSQPKVLRLNLVGSPDKESKATCAVPPVLDGSTSKIATDVKEARSSIRGPVVTPNSSPDLETPFGSTEAGTSSVSSSDPGTSPFSASETNGSLKKEVQQTKDKIQHSDANISDSDSETLSPPANFSLQPWMSDILQGPASSRSLGKVPRKNRTATADVLLEKFSKLDLLNEINAMRSRSDLNFRGDVRDVVLLARNAPPGPPPLCSICQHKAPVFGKPPRWFSYAELELATGGFSQANFLAEGGFGSVHRGVLPDGQAIAVKQHKLASSQGDVEFCSEVEVLSCAQHRNVVMLIGFCVEDRRRLLVYEYICNRSLDSHLYGHNRETLEWTARQKIAVGAARGLRYLHEECRVGCIIHRDMRPNNILVTHDFEPLVGDFGLARWQPDGDMGVETRVIGTFGYLAPEYAQSGQITEKADVYSFGVVLVELVTGRKAVDINRPKGQQLLTEWARPFLEEYAIDELIDPRLGERYSENEVLRILEGDMVVESGGSVTGSSDSGSRSWRMLNEQQHCQEYSSPAQQESQRAGEGKRSYSALRASWDRDKQSISNRY

SEQ ID NO: 67597 - protein, 399 aa, Zea mays
  Coding DNA Sequence Number=SeqID_25818
  Homolog annotation: Hit_ID=Q84R52; Match level="QueryCoverage=39%, HitCoverage=36%, E-value=9e-20, Identity=44%"; Hit description =Putative fertility restorer-like protein
  Subcellular localization annotation: CTP_CleavageSite=52; ConfidenceScore=5.34e-01
MEHYPSPNYRLLPTQLSVPSSPSRLRHDRPPPRPNYCFLRCSSVNMPEGRVALMHEGASGASPSDHECPSTWACSPTAWASGFGRLCRPQRRGSPGDALVLSSGSCSGMGQFDRDDYVNIQRSALKGQTQEMSLQPKESPKCSCDYAIVVVVVLNGTVTTFGSSPFSPILLNNLPASYILRCAAFRHPVPTLMRYPPMRRQYQEMSTGTGVWLAAHTRLLHLVEQEPGITKPPIPAQRNDQGIVALRVRGTVELVHATERGKLANAWHGSTSSPSTWITSVSEEVETIEACARREEAETGKSAWARVSASTMALGARVQRLGQGQGGRGRAIRRGKQGKRCYWEKGSYTEPRRKMYGEVKDAGVPVIDIGDAVWLPGAIAGGDDHVQDPAPELSSSCVG

SEQ ID NO: 67598 - protein, 181 aa, Zea mays
  Coding DNA Sequence Number=SeqID_25819
MTKQPLLLFSGKHMFTRACSRWRVIAGEWRVANPSGGYVKETRNYGAPAIGAGRGRCSFCGGRMGPRREFGEGNGNGVEGGYGGETVETEGAPAVAEAENKLEEAPQSEVEKGKEGESTEVEEPEDKVVDIFKCESCTFNKLLALQVLNFTQPIDSLGSSVKEAAAHLWLSIKNTNTLDLP

SEQ ID NO: 67599 - protein, 43 aa, Zea mays
  Coding DNA Sequence Number=SeqID_25820
MSVADEDTRLTIWRLPVSEYAVERFTLRADDQRGGSSCCSWTY

SEQ ID NO: 67600 - protein, 321 aa, Zea mays
  Coding DNA Sequence Number=SeqID_25821
  Gene Ontology: Mol. function=protein serine/threonine kinase activity; Cellular component=anchored to membrane; Biological process=protein amino acid phosphorylation
  Homolog annotation: Hit_ID=Q94HS1; Match level="QueryCoverage=80%, HitCoverage=80%, E-value=1e-86, Identity=60%"; Hit description =Putative thaumatin-like protein
  Pfam annotation: Domain name=Thaumatin; Domain location=30-249; Score= 260.2; E_value=4.1e-75; Accession=PF00314.8; Description=Thaumatin family
  Subcellular localization annotation: CTP_CleavageSite=65; ConfidenceScore=5.42e-01
MAIHRLMLPISILLMSSLSGAVSTTFTLANSCGYTVWPGLLSSAGSAPLPTTGFALAPGESRVVDAPAAWSGRIWGRTRCAADNQASGRFACATGECGSGAVECAGGGAAPPTTLAEFTLDGAGGNDFYDVSLVDGSNLPMAVVPQGGAGTSCGATGCLADLNGPCPADLRVVGSDGAGIACKSACGAYGRPQDCCSGDYGTPATCQPSASSQFFKNACPRAYSYAYDDATSTFTCTSGTASYLVTFCPSISSLKSSVSRTNPGLPLVNDTVSFAGRGDGSSYPYAYASAPPRSSAPCPLALAATAFTWLFAAPYRRRLRL

SEQ ID NO: 67601 - protein, 40 aa, Zea mays
  Coding DNA Sequence Number=SeqID_25822
MAHGMRGSLPCATRAGALFTVEGGIAVAPPLRQEIADAQI

SEQ ID NO: 67602 - protein, 98 aa, Zea mays
  Coding DNA Sequence Number=SeqID_25823
  Subcellular localization annotation: CTP_CleavageSite=69; ConfidenceScore=5.60e-01
MQAACNCGKWAHPSDFQRTQHGGPGPCVMQPARRMLRASNCTTTRTTTTPPRLRNQYRDSRQPCVRPSSASLARRDREREIPRKGSFSMKETGSEPPY

SEQ ID NO: 67603 - protein, 242 aa, Zea mays
  Coding DNA Sequence Number=SeqID_25824
  Homolog annotation: Hit_ID=Q2HV82; Match level="QueryCoverage=34%, HitCoverage=14%, E-value=9e-18, Identity=52%"; Hit description=E -class P450, group I
MPPLSTPEKLVVTLDMCMTRLDKKRASIFFKASADGYTSCAKEMTKLSAHYINNMKLNRVEVDLIRLLEATLWQQNRLNLSMYDIFKVLSSFYRMKKPQQGRFCADLIHKGLNHTFPLALKNLTKGGPVSVVPKVGLITSFCLLVDDVRPFHIFKEFLLRYWSFVMGTSLIPADGEIWRVRRRVIAPALHQKYVTAMIGLLGEDSQRLCKKLNKATTDEEDMEMLLIERKRRVRACSLLPTG

SEQ ID NO: 67604 - protein, 151 aa, Zea mays
  Coding DNA Sequence Number=SeqID_25825
  Gene Ontology: Mol. function=transferase activity
  Homolog annotation: Hit_ID=Q9LGQ6; Match level="QueryCoverage=61%, HitCoverage=23%, E-value=6e-35, Identity=79%"; Hit description =Putative taxadien-5-alpha-ol O-acetyltransferase
MFMMIGVIGLPSVGKSMHIFRSGAGEASTMIWAALAFFYPLAGRIVEGEHPGRPAIRCTADGVYFTEAEADCSLEDVRFLERPLLLPKEDLVPYPDDDRWTVEPHNTIRSELPPVVWTIRPADELSSSAASSIPWTATAAGLNRLARRLLL

SEQ ID NO: 67605 - protein, 123 aa, Zea mays
  Coding DNA Sequence Number=SeqID_25826
  Gene Ontology: Mol. function=transferase activity
  Homolog annotation: Hit_ID=Q9LGQ6; Match level="QueryCoverage=60%, HitCoverage=17%, E-value=6e-31, Identity=88%"; Hit description =Putative taxadien-5-alpha-ol O-acetyltransferase
MIWAALAFFYPLAGRIVEGENPGRPAIRCTADGVYFTEAEADCSLEDVRFLERPLLLPKEDLVPYPDDDRWPVEPHNTIRSELPLLFGPYDPPTSSARRQPVPFHGQQQRPGSIVWQGGCRYD

SEQ ID NO: 67606 - protein, 61 aa, Zea mays
  Coding DNA Sequence Number=SeqID_25827
  Gene Ontology: Mol. function=adenosylmethionine decarboxylase activity; Biological process=spermidine biosynthetic process
  Homolog annotation: Hit_ID=O24215; Match level="QueryCoverage=67%, HitCoverage=10%, E-value=4e-11, Identity=73%"; Hit description=S -adenosylmethionine decarboxylase proenzyme (EC 4.1.1.50) (AdoMetDC) (SamDC) [Contains: ...
  Homolog annotation: Hit description=S-adenosylmethionine decarboxylase alpha chain; S- adenosylmethionine decarboxylase beta chain]
MPPLSTPKKLVVTLDMCMTRLDKKRASIFFKASADGYTSCAKEMTKLSAHYINNMKLNRLI

SEQ ID NO: 67607 - protein, 532 aa, Zea mays
  Coding DNA Sequence Number=SeqID_25828
  Gene Ontology: Mol. function=acyltransferase activity; Cellular component=integral to membrane; Biological process=biosynthetic process
  Homolog annotation: Hit_ID=Q10PV5; Match level="QueryCoverage=92%, HitCoverage=99%, E-value=0.0, Identity=88%"; Hit description=Very -long-chain fatty acid condensing enzyme, putative, expressed
  Pfam annotation: Domain name=ACP_syn_III; Domain location=215-306; Score=-14.9; E_value=0.024; Accession=PF08545.1; Description=3 -Oxoacyl-[acyl-carrier-protein (ACP)
  Pfam annotation: Domain name=ACP_syn_III_C; Domain location=381-465; Score=21.0; E_value=9.6e-08; Accession=PF08541.1; Description=3 -Oxoacyl-[acyl-carrier-protein (ACP)
  Pfam annotation: Domain name=Chal_sti_synt_C; Domain location=324 -467; Score=9.9; E_value=0.00026; Accession=PF02797.6; Description =Chalcone and stilbene synthases, C-te
  Pfam annotation: Domain name=Chal_sti_synt_N; Domain location=61-284; Score=-87.3; E_value=0.059; Accession=PF00195.10; Description =Chalcone and stilbene synthases, N-te
  Pfam annotation: Domain name=FAE1_CUT1_RppA; Domain location=79-367; Score=739.1; E_value=2.8e-219; Accession=PF08392.2; Description =FAE1Type III polyketide synthase-lik
  Pfam module annotation: Pfam domain module=ACP_syn_III::ACP_syn_III _C::Chal_sti_synt_C::Chal_sti_synt_N::FAE1_CUT1_RppA; Domain location= 215-306::381-465::324-467::61-284::79-367
MPSGGVFSGSVNLKHVKLGYQYLVNHFLTLLLVPVMAATALELARLGPGELLSLWRSLELDLVHILCSAFLVVFVGTVYVMSRPRPVYLVDYACYKPPASCRVPFATFMEHTRLISDDDKSVRFQTRILERSGLGEDTCLPPANHYIPPNPSMEASRAEAQLVIFSAIDDLVRRTGLKPKDIDILVVNCSLFSPTPSLSAMIINKYKLRSNIRSFNLSGMGCSAGLISIDLARDMLQVHPNSNALVVSTEIITPNFYQGSRRDMLLPNCLFRMGAAAILLSNRRREARRAKYRLVHVVRTHKGADDRAYRCVYEEEDEQGFSGISLSKELMAIAGDALKSNITTIGPLVLPMSEQLLFFFRLVGRKLVNKGWRPYIPDFKLAFEHFCIHAGGRAVIDELQKNLQLSPRHVEASRMTLHRFGNTSSSSLWYELAYIEAKGRMRRGDRVWQIGFGSGFKCNSAVWKCLRSIKTPTNGPWDDCIHRYPVDVPEVKCNAVWHGDNLLPATGLSVEGRRFAKHLPVPSPPHSILEPP

SEQ ID NO: 67608 - protein, 97 aa, Zea mays
  Coding DNA Sequence Number=SeqID_25829
MAHRTVWCATGHCPVRQLRHPTRWVLTVGASDSWATEQSGGAPDSHCSLSDCNLADGEYILVPEQGVAQEVAQDPAPEPAIEDLPAPALEGKPRFYA

SEQ ID NO: 67609 - protein, 359 aa, Zea mays
  Coding DNA Sequence Number=SeqID_25830
  Gene Ontology: Mol. function=nucleoside-triphosphatase activity; Cellular component=nucleus; Biological process=ribosomal large subunit assembly and maintenance
  Homolog annotation: Hit_ID=Q6YU01; Match level="QueryCoverage=84%, HitCoverage=27%, E-value=1e-89, Identity=65%"; Hit description=CCAAT- box-binding transcription factor-like protein
  Pfam annotation: Domain name=CBF; Domain location=285-358; Score=8.3; E_value=7.1e-09; Accession=PF03914.7; Description=CBFMak21 family
MAICATYSSTTTLRTKSVLGYDDQHERDREVYFVSEASRGPGVYGCIAIGRYLMTVFMLLKSKSEQERRLLTALVNKLGDPERRAASSAAYLLTCLLAAHPNMKMVVIDEVDSFLFGPHVGLRAKYQAFYYPSHGHLLYELPLGAFCGLVNGALWHMEGAIVSLQVCTEMGMILDGGEHTGKKRHSGVVLMSSGDTKGDTYSKDSKKKVGKIEGGNNKMDSRSKGNNEVGSTAGSDLELDSRILSALLTGVNRALPYVASSEVDDIVEVQTPILFRLVHAENFNVGVQALMLLFQISIKNNIASDRLYRALYSKLLSPSAVTSSKPELFLGLLVKAMKNDVMLKRVAAFSKRLLQVSCT

SEQ ID NO: 67610 - protein, 118 aa, Zea mays
  Coding DNA Sequence Number=SeqID_25831
MDSPRSPEIVTGHLDRVSPPIYKCPITRTLGHKPSLPDTIAQLRRITGRRATLQVGILASTVAACVLTSDEPRFRARVYRGTTHETLEGTPYEITDQGSWNCSSELFLRCGPRHDMNR

SEQ ID NO: 67611 - protein, 239 aa, Zea mays
  Coding DNA Sequence Number=SeqID_25832
  Homolog annotation: Hit_ID=Q6YU01; Match level="QueryCoverage=85%, HitCoverage=20%, E-value=1e-60, Identity=64%"; Hit description=CCAAT- box-binding transcription factor-like protein
MAEPTPKSKRTKKAKKPSAREGDGEDMDTLKSDVATFASSLGLLPGAGDSNGGFDDSDFRKSGPMYKSSKFPSKQPHQKPDNTANPHLNPRPTKKPHPLELRDSYAATKPGAVNTNYPLMKAAALSGQWYTDADELEARVLGGRKQVPPAVGLQEMQGIVERKRELAEKLMLQYAREYDAVRRGHGDLKLLDISAKSGTSADKVSAFTCLVEDNPIANMKALDSLLGELHAIGSKNKRL

SEQ ID NO: 67612 - protein, 93 aa, Zea mays
  Coding DNA Sequence Number=SeqID_25833
MPQHLGAMCNTLSTVIVHPTVTKAEHHIHVTHAHCVAGSPQSANDIGDRGHLRKPEKVSGLRSRLVGGSKEGRYSANECSVSPAEVIVIDVAL

SEQ ID NO: 67613 - protein, 67 aa, Zea mays
  Coding DNA Sequence Number=SeqID_25834
MERAYIRSIEHAGLEGSDYSREDSSEEEDSEEGGDDGEGDDDGDEGSGDDDEGSDDGNNAGGKMPPA

SEQ ID NO: 67614 - protein, 46 aa, Zea mays
  Coding DNA Sequence Number=SeqID_25835
MAAAGDPPPPIYAEGAARTRGEISPHFQVHSFTRFLCSSMCFNLSI

SEQ ID NO: 67615 - protein, 188 aa, Zea mays; identical to SEQ ID NO: 56763
  Coding DNA Sequence Number=SeqID_25836

SEQ ID NO: 67616 - protein, 78 aa, Zea mays
  Coding DNA Sequence Number=SeqID_25837
MALTMPAHDPEDERTMLGFFFFFAEGPQDINTFAKMPQEVRPTSVEGSQDEDLGKKQRCRTPKLSSFGSDQAKKEKTR

SEQ ID NO: 67617 - protein, 350 aa, Zea mays
  Coding DNA Sequence Number=SeqID_25838
  Homolog annotation: Hit_ID=Q6ZKV8; Match level="QueryCoverage=21%, HitCoverage=9%, E-value=4e-21, Identity=66%"; Hit description =Putative adenosylmethionine-8-amino-7-oxononanoate aminotransferase
  Pfam annotation: Domain name=Cyclin_C; Domain location=156-290; Score= -4.1; E_value=0.08; Accession=PF02984.9; Description=Cyclin, C -terminal domain
MQRQEPPQKEQFWAPVPLTTKSWADVEDDDDYFATTASPRPVWGTAGEPAKEEDDVDDVVRAALQELISVADATHSTKLYIVDLTTGREDSYLPFAIQLYIEINVKRNLRLCKRLTQVGQPVQSSISVHQSATQQTVLPQFVEPLARRMWPLCGDPLTMSILVGTLGNKVEKEMEDMAFFFAELALMQYEYGLVTRLPSLVAASAVYTVRLTVKRAPSGPTPSSTTLLCTRCSEERPTKGSGSWSSPVGLVPSGGQPGADNGSTTIEIALKIAFRKFSLDHGIMASSENSTRNERNIKLKVLVLNGSYHGDTLGAMEAQAPSSYTSFSSVAMWFSVPTAVFFVPAFSLVA

SEQ ID NO: 67618 - protein, 179 aa, Zea mays
  Coding DNA Sequence Number=SeqID_25839
  Gene Ontology: Mol. function=serine carboxypeptidase activity; Biological process=proteolysis
  Homolog annotation: Hit_ID=Q75I01; Match level="QueryCoverage=75%, HitCoverage=32%, E-value=6e-18, Identity=53%"; Hit description =Putative serine carboxypeptidase
MAVHTPLELEALAAGAAEELMNSAEVRAELGVWGDAPPWVLNSPAVEEAHDDEMKSAKPDVETLLWGRRACACCSTRASSTRGMGWCLRRCGCGRCTRTGSPRSRTPPHRVAEEKRRQTGAEARWVRAEAWRSRGRGAGGAGDDRGVRQGPVQWQRHDSLKQGDRMGYCGANLYYFIRH

SEQ ID NO: 67619 - protein, 88 aa, Zea mays
  Coding DNA Sequence Number=SeqID_25840
MTPLWLLLLTLLMLLISQCLSVGSSISTFGIVEAAVELPTTLNLEKGALRPVKVLDRRLVKKVNHFSNSGHKLKGVGRLQSLPIQTLV

SEQ ID NO: 67620 - protein, 337 aa, Zea mays
  Coding DNA Sequence Number=SeqID_25841
  Gene Ontology: Mol. function=protein binding
  Homolog annotation: Hit_ID=Q9ZVQ5; Match level="QueryCoverage=60%, HitCoverage=64%, E-value=4e-53, Identity=47%"; Hit description =Expressed protein
  Pfam annotation: Domain name=SNARE_assoc; Domain location=162-283; Score=105.7; E_value=1.3e-28; Accession=PF09335.1; Description=SNARE associated Golgi protein
MGSPGSANGRRGDYVRIPEEAEVASKGEGDAAAAVKAAAAAECPRVLRCSAIRWWAKVAVLGIVLAGAGAAAVVFLGPLLIKKAWCSGPPVVNVFPPKGGWVGIVSQTNWFLIFLDVKMWYRIAVDLIIVVPILHWESTTFSRPSIALICFGTIALFPSVLLPSSPFMWLAGMTFGYLYGFLIITVGMSIGMSLPYFIGSAFHCRIHRWLEKWPKKAAFVRLAGEGDWHHQFKAVALLRISPFPYIVFNYASVATNVKYYPYIAGSMAGTIHETFLAIYSGKLLQSLAVATSQGSFLSVDQIIYNGIGFIVAAASTATITIYAKKALQRLQAEEEIL

SEQ ID NO: 67621 - protein, 35 aa, Zea mays
  Coding DNA Sequence Number=SeqID_25842
MEHLAILRLTLLQACNRRLIVQICALGVVNEFELL

SEQ ID NO: 67622 - protein, 293 aa, Zea mays
  Coding DNA Sequence Number=SeqID_25843
  Homolog annotation: Hit_ID=Q6AWX8; Match level="QueryCoverage=86%, HitCoverage=93%, E-value=9e-74, Identity=59%"; Hit description =Growth-regulating factor 11
  Pfam annotation: Domain name=QLQ; Domain location=116-152; Score =59.9; E_value=8.1e-15; Accession=PF08880.1; Description=QLQ
  Pfam annotation: Domain name=WRC; Domain location=183-228; Score =93.9; E_value=4.8e-25; Accession=PF08879.1; Description=WRC
  Pfam module annotation: Pfam domain module=QLQ::WRC; Domain location =116-152::183-228
MAAEGEAKNPSGGGEGGNPQHQQAVQAAPAEPPTAQGEAVQEAGAQATGQEPEGEKANRDGEGSAGEKDDGACRDLVLVEDPEVLAVEDPEEAAATAALQEEMKALVASVPDGAGAAFTAMQLQELEQQSRVYQYMAARVPVPTHLVFPVWKSVTGASSEGAQKYPTLLGLATLCLDFGKNPEPEPGRCRRTDGKKWRCWRNTIPNEKYCERHMHRGRKRPVQVVEEAEPDSASGSKSAPSKATEGAKKVDDKSPGLQGKDRFNIPFQFQDDSIDRSYARIQPQALKLKKGLM

SEQ ID NO: 67623 - protein, 69 aa, Zea mays
  Coding DNA Sequence Number=SeqID_25844
MELIQVTEFTPSSNMVINWVKEESHLWCRARAMVYLAPLCSNEPIRDLCFRVSMVTGLAVYIIVFLPII

SEQ ID NO: 67624 - protein, 96 aa, Zea mays
  Coding DNA Sequence Number=SeqID_25845
MDCCRHVNPFRACSGLRGLGYLMVALVAAIVAVSYYAVVVYAWGPMLLAGGAAAAGAAAVIAAFHILVSADALTSHTPSPLSVKICVQYYSVRHLQ

SEQ ID NO: 67625 - protein, 41 aa, Zea mays
  Coding DNA Sequence Number=SeqID_25846
MESALCLHAIVCGDGTRLAQYALVARNWGVTIGVLNSIFEL

SEQ ID NO: 67626 - protein, 63 aa, Zea mays
  Coding DNA Sequence Number=SeqID_25847
  Subcellular localization annotation: CTP_CleavageSite=26; ConfidenceScore=5.40e-01
MPPPPGARAATASSLQPVRAAAAPPQAGHATAPTHRRTTPVGAWRERIIVCSGLRLMDIVKVN

SEQ ID NO: 67627 - protein, 177 aa, Zea mays
  Coding DNA Sequence Number=SeqID_25848
MQSGPTSEPKGPEYHQGSCQGDLQPWCNGSVMNTGLKEFRRGPTLQRTTLHSDDDGTLAAARKPWIRHPKVPVLHQRRLPKACSIPGKFFHGGRSRFSPSVTDDQRFGQPIGRVAKSVAGRRGQTLELTRITQDRRFQPQRWTLFLSLLDTWRRSGDGQRRRPSIYIRLNPRRMRRS

SEQ ID NO: 67628 - protein, 275 aa, Zea mays
  Coding DNA Sequence Number=SeqID_25849
  Gene Ontology: Mol. function=RNA-directed DNA polymerase activity; Cellular component=chromatin; Biological process=RNA-dependent DNA replication
  Homolog annotation: Hit_ID=UPI00004C1732; Match level="QueryCoverage =98%, HitCoverage=40%, E-value=3e-68, Identity=82%"; Hit description =UPI00004C1732 related cluster
MAVPNYTYLKHKMSGPNGVITVGSTYRHAYECDMECVEYAKALAESKALIADLESLSKEVPDAKRHAGNFEPAEAVKSVPLDPSNDASKQVRMGSELDPKYEAVLVDFLRTNAEVFPWSPSDMPGIPRDVAEHSPDIRAGARPVKQPLRRFDEEKCRAIGEEIHKLMAAGFIKEKTGAGAGLLFISPLGKHIRYVLRLHFPASNNVAEYEALVNGLRIAIELGVRRLDARGDSQLVIDQVMKNSHCRDPNMEAYRDEVQCLEDKFYRLELNHVAR

SEQ ID NO: 67629 - protein, 115 aa, Zea mays
  Coding DNA Sequence Number=SeqID_25850
  Subcellular localization annotation: CTP_CleavageSite=78; ConfidenceScore=5.39e-01
MAGSLNDIIGRFADARPAQTHLAIKRGLNPNKPLLRLSRPSSSPPVRIVPIGFRRRGQLRVGVAPTPLSLGEKLRRVSAELQFTWAEGEDHWVTGISPLHNRIRPVPWLGIITFL

SEQ ID NO: 67630 - protein, 48 aa, Zea mays
  Coding DNA Sequence Number=SeqID_25851
MGDHVSGRVRGKVYCQVQSGGGTRLASIHWTTKNSDPRLFGKLGKSTT

SEQ ID NO: 67631 - protein, 132 aa, Zea mays
  Coding DNA Sequence Number=SeqID_25852
MVEGLLDMNPGEILDPFGSLVGPLYVAQIVGGKWSFGARLDGSTGDGLRRWGRPPLVRDLLRSAIGGGRQPMNRRSRYQWPRLEDRANLTRAYLRHSIMIVRAGLHSVVLNPSPSAGNLTVLVAYRFGNGLI

SEQ ID NO: 67632 - protein, 115 aa, Zea mays
  Coding DNA Sequence Number=SeqID_25853
MYQRERGTASFSAGSLIVGEDGEPLEELKRSTTWHVEKGPRLSTELLDQVKVLEVLIHSPFRHHPFPSYAKKEFYRTRHLWVYLIFQRADGLRLRLDDLSLVPDGALFSFGQSVV

SEQ ID NO: 67633 - protein, 86 aa, Zea mays
  Coding DNA Sequence Number=SeqID_25854
MVGRQIHERRVARSNGREVAPDCLVCTGQCPGSPIHPPLGALNSSGQAAMEGCEHSELGGGAVPNFTGAGVMATRGGGGDRRGSHQ

SEQ ID NO: 67634 - protein, 157 aa, Zea mays
  Coding DNA Sequence Number=SeqID_25855
MASRCLAAASEAAVVFLIRPILAIVFVFTLILLGWYVAWTTVLVHVPLVQEIAGLRPKKPSKPKPANRGRVAKFYRNQAEAAQRLGFCLQLRILHAHPLSNLFGTMPKGPGGIINCIFMFFMFTLWVWDAYLKFLSFLVMPTVGAKVKLFDAIQRKA

SEQ ID NO: 67635 - protein, 80 aa, Zea mays
  Coding DNA Sequence Number=SeqID_25856
MEGRTQIQREGKRSAHTGLVLIAGEGTGEGALTPSHASLASSARLTMVVMPAPPRRLMAAASVRARVTGEEGIRERGKAR

SEQ ID NO: 67636 - protein, 75 aa, Zea mays
  Coding DNA Sequence Number=SeqID_25857
MQRRRLMRAKVVALMAMVSSALVNVVTVTHHPRPSAVAGTARAPGPEEVKMEQLLCKDDGGFGAERDYNPSKEKQ

SEQ ID NO: 67637 - protein, 138 aa, Zea mays
  Coding DNA Sequence Number=SeqID_25858
MAVAGCIARIWWEMARHIGGGARGGTGVVACLRASLEDLLRSSPPCAVGGARATPSCASSRRRPLTRASAGRSVRGSAHRGLGDSAGPVRWLRRGCPLGGDCGGALAVRSQRCCCLLGLHFGPAAVAGFPTVGEWLLC

SEQ ID NO: 67638 - protein, 128 aa, Zea mays
  Coding DNA Sequence Number=SeqID_25859
  Subcellular localization annotation: CTP_CleavageSite=55; ConfidenceScore=5.38e-01
MDRAFAHVRQCWGADALNRGSGAQGRRRRQSFRPRKSQQNDRPRTRDKATTFAATAAHTTHTNPSRGTSTRQLPQQPQSCVDHHHLWLDPWTWSSGGSTSRRTSRRPSLAAASATRQIQWHAHHRRRQ

SEQ ID NO: 67639 - protein, 573 aa, Zea mays
  Coding DNA Sequence Number=SeqID_25860
  Gene Ontology: Mol. function=nucleic acid binding
  Homolog annotation: Hit_ID=Q5Z807; Match level="QueryCoverage=64%, HitCoverage=92%, E-value=1e-116, Identity=60%"; Hit description=Zinc finger protein-like
  Pfam annotation: Domain name=zf-CCCH; Domain location=170-198; Score =10.4; E_value=0.057; Accession=PF00642.15; Description=Zinc finger C- x8-C-x5-C-x3-H type (and similar)
  Subcellular localization annotation: CTP_CleavageSite=93; ConfidenceScore=5.54e-01
MGPPAPGLGRIFIGPAAPSPALAPHPGRGPGRILPTPTLRRTPRLRRRPPASRATPTPRRPPRGKNTGYFPFPYAPVSQVASRASRRREFRVREQAVAVGGGDETLGLELQRTARVLLTVPGDGPAAGALQELPARAGAEYSPPPLRCRGMRLPPAVHIYLSSVVMLALGARTFCGFHSRPGWCSCKYGSHCRFVHASSQQQQQAKPNPFGFGLGSRQQQQQQSSFRAQFQQQQQQKPNPFGFGVQGSAAAQSRNAPGQAKPFQNKWVRDPSAPTKQQEAAQPPAAAHTSCTDPESCRQQIAEDFKNETPLWKLTCYAHLRSGPCDITGDISFEELRANAYEQGRQGHPLQSIVEGEKNLKNAKLTDFNNFLNTPRLSVSQTPSFPTVASFPEVKNNSAFGVSQNNGPPVFSSFSQIGVTTNMGPGSRTTPGVPTNTLFGQSTQPSHPTFPAPTFGRSDMKFGVSGPFGSQISQQSSGTFQGSNMSSFGNFSKPHASYQQSPSSSSHHRDIDRQSQDLLSGIVVPTSATNEAPVEDNKNENQDDSIWLKEKWSIGEVHNHNTSNWGHKMHLKC

SEQ ID NO: 67640 - protein, 73 aa, Zea mays
  Coding DNA Sequence Number=SeqID_25861
  Subcellular localization annotation: CTP_CleavageSite=5; ConfidenceScore=5.12e-01
MSAPAAQAVVALALAAILSTPAPQADTFSNVPPTLSETKVSVADGGGYGFWGRREARADQAPQVGQGVAVHDQ

SEQ ID NO: 67641 - protein, 367 aa, Zea mays
  Coding DNA Sequence Number=SeqID_25862
  Gene Ontology: Mol. function=DNA binding; Biological process =regulation of transcription
  Homolog annotation: Hit_ID=Q5Z811; Match level="QueryCoverage=58%, HitCoverage=46%, E-value=2e-40, Identity=46%"; Hit description =Putative transfactor
MSSGLGQRSMYLGAIAYSAEQKVAVRAVTRRAATTLGGCQGAWLVGSVACGLWPAACARRRDPGPGGVRLQGIASGLASAAAPGYSITAFCGESDPSFRAAGKTRLQRSSASSSSSSSSSSYQHWHCTPPISWGPRLQTASDYRASKPFASTELNPQSVVAMDQIATPDETAHASAPSVHKLFDAKLGHHSVMDGTLASTSQSSNIKTQLIRSSSLSRSISVNLEKRSPESDPESPQSHVSHPKFAEPMFSNSSTFCTSLFSSSSTTEPCRQMGTLPFLPHPPKCEQQVSAGHSSSSSLLLSGDTGLDVAEQSDDLNDLLNLSGDASDGSFHGENNALAFDEQMEFQFLSEQLEIAITDNEKNPHLD

SEQ ID NO: 67642 - protein, 262 aa, Zea mays
  Coding DNA Sequence Number=SeqID_25863
  Gene Ontology: Mol. function=protein methyltransferase activity; Cellular component=cytoplasm; Biological process=protein amino acid methylation
  Homolog annotation: Hit_ID=Q6L4V6; Match level="QueryCoverage=79%, HitCoverage=28%, E-value=6e-54, Identity=52%"; Hit description =Putative zinc finger protein
  Pfam annotation: Domain name=zf-C3HC4; Domain location=53-88; Score =18.9; E_value=0.0017; Accession=PF00097.15; Description=Zinc finger, C3HC4 type (RING finger)
MPLQIESRRELLQRSGRSPDGISSVILVEKDRSFIKSKVVIRIMEYLNLFEIHGIIRKTRTVMECLHRFCRDCIDKSMRLGNNECPACRTHCASRRSLRDDPNYDALIAALYPDIDKYEEEEFAFTTATAFARKYRRTRGRVRTIPPDITPTGSSEEERGEGNSKETIREQSSTDDHSPDLRQKRCRKRSGPQGSPAGTIGSIDYSFEENDELVGGKEILATSPLQGEMLAWGGKWCTEPKSTWQCWFKWQDWKEWAHCKIG

SEQ ID NO: 67643 - protein, 471 aa, Zea mays
  Coding DNA Sequence Number=SeqID_25864
  Gene Ontology: Mol. function=kinase activity; Cellular component =cytoplasm; Biological process=regulation of transcription, DNA -dependent
  Homolog annotation: Hit_ID=Q5Z809; Match level="QueryCoverage=99%, HitCoverage=87%, E-value=0.0, Identity=77%"; Hit description=Ternary complex factor MIP1-like
  Pfam annotation: Domain name=DUF547; Domain location=241-386; Score =253.9; E_value=3.2e-73; Accession=PF04784.5; Description=Protein of unknown function, DUF547
MAYLPTNAQELLSTICILETAVTKLEEEMVSLHFQLTQERNERRLVEYRLKHLPPPPSRLLLPLRETRTRREKCSSQTEEVYPRAVLHEQAVKLQRQISVKSFVDPNQLSEDIVRCMRNIFISLSDSCRDSSRNSNMENQQSIPSPTGNYSISAFWTLSEPSSISSWVQSPQVDLNYNNNVLASETVFDPYKAREKLSWADIGSYGAAAEVSWMSVGKKQLEYAAESLRKFSTNDRPLECRLFIEQLAEINPIHLSDDARLAFWINLYNALMMHAYLAYGVPRSDMKLFSLMQKAAYTIGGHSFSAAFIEYVILKMKPPSHRPQMALLLALQKIKVPEEQKKFCIAAPEPLLTFALSCGMYSSPGVKIYTANNVREELQDAQRDFIRASVGVSRKGKLLAPKILHCFARGFVDDNSFPIWISHFLPQQQATFVDHCVSQRRQSLLGTRTFGVVPFDSRFRYLFLPDAGSLN

SEQ ID NO: 67644 - protein, 102 aa, Zea mays
  Coding DNA Sequence Number=SeqID_25865
  Subcellular localization annotation: CTP_CleavageSite=39; ConfidenceScore=5.11e-01
MGRTDPETGQRNNMPKPKVVGATAMAAVQARYGIRFFCQASRSRTSEATRVIRHDGNSRDSSYTVERSIRALDFITSVGRWQLGCLKACNISAEGNHINLLL

SEQ ID NO: 67645 - protein, 104 aa, Zea mays
  Coding DNA Sequence Number=SeqID_25866
  Subcellular localization annotation: CTP_CleavageSite=69; ConfidenceScore=5.10e-01
MGAAAASKRRKAARRGLTVAEGSGSGAWPGRSHRGRGLGGGTARGRGRAAARPTGERAAGGWPGAPAFAAAAAAEVRVSSFVFLTKALCDQGNQGPTQPLGVIT

SEQ ID NO: 67646 - protein, 278 aa, Zea mays
  Coding DNA Sequence Number=SeqID_25867
  Homolog annotation: Hit_ID=Q1SPJ4; Match level="QueryCoverage=51%, HitCoverage=9%, E-value=7e-26, Identity=41%"; Hit description =Thiolase
MRCVAWWAVLLAAASLVGAWGNHTVSALTLVSETWYDDRLALVPVEFGGGDGEDAAGLRSELPCQTYSANSRSCEELNGSGSFNTTCVISSSSSLDGDLCVYGDGSVEIRPHVKIICPFRGCYITVNVSGSVRIGEHVEVIAGSVSLYAANVSLDHHSTINTTALAGEPPPQTSGTPHSLEGAGGGHGGRGASCKVSNDTNWGGDVYAWSTLDWPWSYGSMGGSMSAGQFGGYGGGRVMLRTSGFLNVDGQVLAEGGVGSLKGGGGSGGSIIIHAFKL

SEQ ID NO: 67647 - protein, 137 aa, Zea mays
  Coding DNA Sequence Number=SeqID_25868
  Subcellular localization annotation: CTP_CleavageSite=7; ConfidenceScore=5.18e-01
MTRNKARLMAKGHKVKNRRSWPSAEGTKGPSFISFSLQSTFELSYVKKPKKPSSFKLSLQISDNLRMKGIEIKYSTLAPTSGDSTTTSTYIMPPKKATTTSFVPRTLDTNQGYGALLREARNQKRKAVRKMDLDPFD

SEQ ID NO: 67648 - protein, 218 aa, Zea mays
  Coding DNA Sequence Number=SeqID_25869
  Homolog annotation: Hit_ID=Q1SPJ4; Match level="QueryCoverage=25%, HitCoverage=4%, E-value=4e-10, Identity=50%"; Hit description =Thiolase
MWNDFDFVIFLYHGNPQLERHGVRVELGWFQSTASAYYQLGIIVAVNENFYKNLRHHEHATEFCERSRKNVAVPLQDFNQANLDQPCTSYAVSRKRLTGGVNGGIINEGTLKSLHYKRDYLFPFSLLLRNSRPLGYAIVAIIYGSLYFWLSSLAVSSVHQVYNTKSFKSREDNEWWILPTILFLIKSLQAGLVNWHVANLEIQDYSLFSPDPDRFWAM

SEQ ID NO: 67649 - protein, 107 aa, Zea mays
  Coding DNA Sequence Number=SeqID_25870
MACRRSETVGDAKVGIVSPTFVAGAGRTSHPSLDDIYFARCTDEDRIRRTRRMNKDAVHTEAYSAPFAPGRQDEGLVKTIGPTPPSEQGEAHVQFGPCSRAPRPDPA

SEQ ID NO: 67650 - protein, 35 aa, Zea mays
  Coding DNA Sequence Number=SeqID_25871
MTQDVMAKSIAANGASRSRCSAIGPCCFVPMSSWR

SEQ ID NO: 67651 - protein, 46 aa, Zea mays
  Coding DNA Sequence Number=SeqID_25872
MEATVKDNDNVILPMGRVALPLKPYIDDHDVYMWVTSKVHVPCVEG

SEQ ID NO: 67652 - protein, 141 aa, Zea mays
  Coding DNA Sequence Number=SeqID_25873
  Gene Ontology: Mol. function=nucleic acid binding; Cellular component= intracellular; Biological process=DNA integration
  Homolog annotation: Hit_ID=Q3LRV2; Match level="QueryCoverage=54%, HitCoverage=33%, E-value=1e-26, Identity=74%"; Hit description=Gag
MLGEHAKKEIPTEDKPETLRMKHEDKTPSREIKKSGDKHKHKEEFAGSSKSYKEKGKPPHFDGEDYSIWSDKMRNHLTSFHENIWDIVEFGAQGPQVGEEDYDSDEVAQIQCFNSQATTNLLASLCREELKREMCPWAHFL

SEQ ID NO: 67653 - protein, 223 aa, Zea mays
  Coding DNA Sequence Number=SeqID_25874
MRNYQAICELGSVIGAVEEIDLKALEIDEVVKFKVHVKSVSLIPKVIEVGVKPFLFDVFFKVDSIVEEGWNEEPVNLGKRATSNIGASDSSMGKDKEVQRCWEKSPDGEDGSEGKVDLELSEDDLLSSQELLELAKSVGLDIQGSHESDNDKARSEILAQGAVGIEIKRPNPKQVTWWKIPREGESEDGLSLIWTTKLSMQMMSGIDQVKEKGGNIGLPYIER

SEQ ID NO: 67654 - protein, 558 aa, Zea mays
  Coding DNA Sequence Number=SeqID_25875
  Gene Ontology: Mol. function=malate synthase activity; Cellular component=glyoxysome; Biological process=tricarboxylic acid cycle
  Homolog annotation: Hit_ID=P49081; Match level="QueryCoverage=96%, HitCoverage=99%, E-value=0.0, Identity=83%"; Hit description=Malate synthase, glyoxysomal
  Pfam annotation: Domain name=Malate_synthase; Domain location=16-529; Score=1034.9; E_value=0; Accession=PF01274.12; Description=Malate synthase
MAASTAAPCYDAPEGVDVRGRYDREFAGILTRDALDFVAGLQREFRAAVRYAMEQRREAQRRYDAGELPRFDPATTLVREGDWTCAPVPPAVADRTVEITGPAEPRKMVINALNSGAKVFMLRPREREKTWQADFEDALSPTWENLMHGQVNLRDAVAGTISFRDAARGRTYELNDRTAKLFVRPRGWHLPEAHILIDGEPAIGCLVDFGLYFFHNHAAFRAGQGAGFGPFFYLPKMEHSREARIWNGVFQRAEKAAGIELGSIRATVLVETLPAVFQMNEILHELREHSAGLNCGRWDYIFSYVKTFRAHPDRLLPDRALAAQIPIKDDAAANEAALELVRKDKLREVRAGHDGTWAAHPGLIPAIREVFEGHLGGRPNQIGDAAGHEGASVNEEDLIQPPRGARTVDGLRLNVRVGVQYLAAWLAGSGSVPLYNLMEDAATAEISRVQNWQWLRHGAALDAGGVEVRATPELLARVVEEEMARVEAEVGPDRFRKGRYAEAGRIFSRQCTAPELDDFLTLDAYNLIVAHHPVESAFKNNTSLSNAAIEIRTDDQQT

SEQ ID NO: 67655 - protein, 42 aa, Zea mays
  Coding DNA Sequence Number=SeqID_25876
ALTHPLWTNLAEETLGFRGIGFSPMFSFHFPIEDEPQPVLER

SEQ ID NO: 67656 - protein, 84 aa, Zea mays
  Coding DNA Sequence Number=SeqID_25877
MALSFRTLVLLLLNLIYPHRGQPPAPPVKKGGQRTKLANFASDEDMWVCHAWMVVSCDPIVNTGPEASKVFGIGLLRHTTLEED

SEQ ID NO: 67657 - protein, 86 aa, Zea mays
  Coding DNA Sequence Number=SeqID_25878
MNPYLDSNVPLRMAQEMKGKKKSWRLRRTCILGGVVHITRVGFACIAMCLSASLMLCNKSIPTSFSSQTVSVNEVLFEVGIVSEGE

SEQ ID NO: 67658 - protein, 86 aa, Zea mays
  Coding DNA Sequence Number=SeqID_25879
MALRIDDRDTGARTSGENASVWLAMPRQIRMWLRLAGIALCASGTVRRCGNATLRRDLRRDQDCAAALGSRLGKKSRGRWISSRRR

SEQ ID NO: 67659 - protein, 142 aa, Zea mays
  Coding DNA Sequence Number=SeqID_25880
  Homolog annotation: Hit_ID=P49161; Match level="QueryCoverage=20%, HitCoverage=9%, E-value=2e-08, Identity=96%"; Hit description =Apocytochrome f precursor
  Pfam annotation: Domain name=Apocytochr_F_C; Domain location=70-127; Score=-54.2; E_value=0.0036; Accession=PF01333.10; Description =Apocytochrome F, C-terminal
MKGNHQFNRWGGCLSMGAPDSPVRHPKHCPVHQPRHPTVRVLTVSIVGALTSWCIGQSGAALDRRLLELTVALPSRCSAGRPDIPEKVKPYFPFNIIPPGPELLVSEGESIKLDQPLTSNPNVLKNLPLGGEQQLETVANTP

SEQ ID NO: 67660 - protein, 96 aa, Zea mays
  Coding DNA Sequence Number=SeqID_25881
  Gene Ontology: Mol. function=chromatin binding; Cellular component =chromatin; Biological process=chromatin assembly or disassembly
  Homolog annotation: Hit_ID=Q94HV4; Match level="QueryCoverage=94%, HitCoverage=6%, E-value=9e-15, Identity=44%"; Hit description =Putative retroelement
  Pfam annotation: Domain name=Chromo; Domain location=8-58; Score =41.5; E_value=2.8e-09; Accession=PF00385.14; Description='chromo' (CHRromatin Organisation MOd
MENGRLLPTPEKVLRARMKCGQWQVLVQWNGAQPEDATWEPLQQFTASYPLFQLEDELFVEGGRDVMFDKVYSRRPRRAADRPIVGVDADKRLEED

SEQ ID NO: 67661 - protein, 97 aa, Zea mays
  Coding DNA Sequence Number=SeqID_25882
  Gene Ontology: Mol. function=transferase activity, transferring glycosyl groups; Cellular component=integral to Golgi membrane; Biological process=protein amino acid glycosylation
  Homolog annotation: Hit_ID=Q2WBH6; Match level="QueryCoverage=70%, HitCoverage=14%, E-value=2e-10, Identity=52%"; Hit description =Sialyltransferase like protein
MTRAHLPVAAQRRPTVALLLGLALAFCLAVLSIQSSFYTTPGAPGRRLDLDADDVRDLAGFQSRVQQCVVHMDSPTDLGISDRLSFIAENFCARCYL

SEQ ID NO: 67662 - protein, 124 aa, Zea mays
  Coding DNA Sequence Number=SeqID_25883
MGKTRALLLALHQVINFLKFVRLSIWWNFLINVLAWGFSCLGTRYSDERNLRCESQVTALAYLGPRESILQVISDLTQGRKFFFYANDEDVAEDGDQDAELLILRFEKDNTAHTCNAPHILVVL

SEQ ID NO: 67663 - protein, 58 aa, Zea mays
  Coding DNA Sequence Number=SeqID_25884
MRAGLAQESRVTQAGTTSHRRRFACVVTDVLEHTTEMSVACEHDVIEHRKRLLSGRLA

SEQ ID NO: 67664 - protein, 276 aa, Zea mays
  Coding DNA Sequence Number=SeqID_25885
  Gene Ontology: Mol. function=binding; Cellular component =intracellular; Biological process=protein amino acid phosphorylation
  Homolog annotation: Hit_ID=Q6Z0F9; Match level="QueryCoverage=84%, HitCoverage=71%, E-value=1e-73, Identity=37%"; Hit description=PPR -repeat protein-like
  Pfam annotation: Domain name=PPR; Domain location=122-156; Score=2.4; E_value=3.9; Accession=PF01535.11; Description=PPR repeat
  Pfam annotation: Domain name=PPR; Domain location=188-222; Score =39.7; E_value=1e-08; Accession=PF01535.11; Description=PPR repeat
  Pfam annotation: Domain name=PPR; Domain location=55-89; Score=17.0; E_value=0.066; Accession=PF01535.11; Description=PPR repeat
  Pfam module annotation: Pfam domain module=PPR::PPR::PPR; Domain location=122-156::188-222::55-89
  Subcellular localization annotation: CTP_CleavageSite=39; ConfidenceScore=5.52e-01
MNPLSGSSSTISCFSTQLRSLAQVLLSGRAGSRLRRVLPAAHARAIISDGLGFLFLANLLLDGYSKLGRIHDARRLFDGMPHRNLVSWSSAISMYAQHGADGQALALFAAFRRSSDEAPNEFVLASVVRACMQSRDVPFGEQVHGKIINLGLDVNLYVGTALVNLYAKVACMDAAMRVFHALPTKNPVTWTAIITGYSRIGHGELALGLFQTMVAQGVQPDRFVLASAVSACSALAFLQGGRQIHGYAYRSAAEVDASVINALIDLYCKCSRPLVA

SEQ ID NO: 67665 - protein, 99 aa, Zea mays
  Coding DNA Sequence Number=SeqID_25886
  Gene Ontology: Biological process=carbohydrate metabolic process
  Homolog annotation: Hit_ID=Q05212; Match level="QueryCoverage=80%, HitCoverage=34%, E-value=1e-34, Identity=86%"; Hit description=DNA -damage-repair/toleration protein DRT102
  Pfam annotation: Domain name=Cupin_2; Domain location=24-95; Score =26.2; E_value=0.00012; Accession=PF07883.2; Description=Cupin domain
MEFEPVGIMPGGEMRIVRESPTSAYVRFKAGSVEPAHHHTFGHDLVVIKGKKKVWNLTKKESYDLVDGDFLFTPAGDVHRVNDGNASEGAMLTYPHLGL

SEQ ID NO: 67666 - protein, 64 aa, Zea mays
  Coding DNA Sequence Number=SeqID_25887
  Gene Ontology: Mol. function=nucleic acid binding; Cellular component= intracellular; Biological process=translation
  Homolog annotation: Hit_ID=O24586; Match level="QueryCoverage=98%, HitCoverage=13%, E-value=8e-13, Identity=47%"; Hit description=Gag
MELIEGELRRFAINKGEGTNEMYNRLKSLLNQIWNYGSSKWTDHKVIKLKLRYEVVTLEEVLGK

SEQ ID NO: 67667 - protein, 564 aa, Zea mays
  Coding DNA Sequence Number=SeqID_25888
  Gene Ontology: Mol. function=hydrolase activity; Cellular component =nucleus; Biological process=mRNA processing
  Homolog annotation: Hit_ID=Q652P4; Match level="QueryCoverage=99%, HitCoverage=89%, E-value=0.0, Identity=83%"; Hit description =Cleavage and polyadenylation specificity factor 100 kDa subunit
  Pfam annotation: Domain name=RMMBL; Domain location=454-496; Score =39.8; E_value=9.2e-09; Accession=PF07521.2; Description=RNA -metabolising metallo-beta-lactamas
MKHLGLSAPVYATEPVFRLGLLTMYDHFLSRWQVSDFDLFTLDDVDAAFQNVVRLKYSQNYLLNDKGEGVVIAPHVAGHLLGGTVWKITKDGEDVVYAVDFNHRKERHLNGTVLGSFVRPAVLITDAYNALNNQGYRKKQDQDFIESLIKVLATGGSVLLPVDTAGRVLELLLLLDMYWDERRLQYPIYFLTNVSTSTVDYVKSFLEWMGDQIAKSFESSRANAFLLKKVTLIINKEELEKLGDAPKVGFSHDIFVEMANEARNLVLFTEKGQKIFALQFGTLARMLQVDPPPKALKVTMSKRIPLVGNELKAYEEEQERIKKEKSLKASLVKEEELKASHGSNTKASEPMVIDASSSRKSVNASHFGGNNDILIDGFVPPLTSVAPMFPFFENTAEWDDFGEVINPDDYMMKQEEMDNTLMLGPGDGLDGRIDDGSARLLLDSTPSKVISNEMTVQVKCSLVYMDFEGRSDGRSVKSIIAHVAPLKLILVHGSAEATEHLKMHCAKNLDLHVYAPQIEETIDVTSDLCAYKGSTGSQQIVIEGPLCEDYYKIRELLYSQFYLL

SEQ ID NO: 67668 - protein, 148 aa, Zea mays
  Coding DNA Sequence Number=SeqID_25889
MANRSLEFPPYYRVVPRHRYTLARASGFEGLVGVTVTALVGDFNLVITKIGGAPAGLRRGIGWRHRGPLLLQPSVRDLTVDARYRFRRIIDLIMAARSSSYGPTSLVPLRQRKNCKRAPWVMGNQLAILCGVLCVWGISRVSPRVFEK

SEQ ID NO: 67669 - protein, 49 aa, Zea mays
  Coding DNA Sequence Number=SeqID_25890
MAVSNSTTDTIDGVVDATVDCTTLDALGISFYGVVTNDLGDTTTSITRS

SEQ ID NO: 67670 - protein, 84 aa, Zea mays
  Coding DNA Sequence Number=SeqID_25891
MESAPSPSLIPLDEVLETGKTEFEMRWLCSAEVSSVWVHRTVRWCTGQCPVRQAGSGEQAALGTSTAVYGYNSPDCPVVHRTVR

SEQ ID NO: 67671 - protein, 161 aa, Zea mays
  Coding DNA Sequence Number=SeqID_25892
MEVDEQGGLGGQGIGAIVGECSDGEVQAPARRSARSSWREGEGEQRGGKRNDCGSFWLLARSGVGRGHKASAGCAGRLGACRRSRPGAVRRAGQRVGARVPGGSMLGAMAARRPGRCGLGARRPWRLESGESREEGREKGAGGARAAGERGEFPLAAVAGR

SEQ ID NO: 67672 - protein, 713 aa, Zea mays
  Coding DNA Sequence Number=SeqID_25893
  Gene Ontology: Mol. function=structural constituent of ribosome; Cellular component=intracellular; Biological process=translation
  Homolog annotation: Hit_ID=Q2R0M9; Match level="QueryCoverage=25%, HitCoverage=20%, E-value=3e-23, Identity=36%"; Hit description =Expressed protein
  Pfam annotation: Domain name=DUF594; Domain location=621-685; Score =72.6; E_value=1.3e-18; Accession=PF04578.4; Description=Protein of unknown function, DUF594
MSESESSNTAGFAAALELWQENQLRILVLISLATQCFLFVFAPLRQHRIPGPLRLSIWLAYLGSDAVAIYALATLFNSHRCDTGTGTGTARAGVELLWAPIMLVHLGGQDSIPAYNIEDNELWRRHVVTAVSQVAAAIYVFVKSWPKSMAATAAHLVVDQDTRNRINAFMAHKSEMAAYGRILGPALLLFFSGITKCVCKPWDLKRVSVNSLVDSSSSGSSEEKGDAGESEMMDSLQEYVGAAAQYFESVGHEEEEEDDDAACKADEVWKPYNLCVDLAPPYSGRLSCLKHLARSPADEAHRLVKSSLSATFHQLYTKESLKLHDMSHIVLTDNRALNRLKLVTSARGLRTVAAATLLGAIAAFYGEGDVDQDPTDVTITYALLWSAFVMECVLPTVIHHTFAWIERLFTGHRTWPDQVAQYSLMGYVARGRSHSWLMKAVACLGCGDLVDQLWTMKPRMGASSREITGLVHAHVAGAWMQGHIAGADSFRAFNDYRGQWTLGNCREIGVGVSSSMVVLMSSVSRPFDESVLVWHLATDFCFHLLQVQGDPSRANATARRCIEMSNYMAYLLFVKPEMLMPGARRKLFRDACRELVGLLEEDRPDAPRARGKRDLAHKVVQLLKRDGDDVLGSAGVGVVRRGLGVWVEMLCFSASRCKGYLHAKGLGTGGEYLSYVWLLLLYMGMETLAEKMQRTELYEGSTAAALSISGQNV

SEQ ID NO: 67673 - protein, 331 aa, Zea mays
  Coding DNA Sequence Number=SeqID_25894
  Homolog annotation: Hit_ID=Q2R0M9; Match level="QueryCoverage=61%, HitCoverage=38%, E-value=2e-16, Identity=25%"; Hit description =Expressed protein
  Pfam annotation: Domain name=DUF594; Domain location=170-224; Score =21.1; E_value=7.4e-06; Accession=PF04578.4; Description=Protein of unknown function, DUF594
MARNRKHWILRKLPTFVKDLIDQLWCMEPYKSSSGITQLVANHVTAGWWQIHGIASYHRFNDSRGQWTLDREGLLDALGWSLNRPFDESLLLWHLATDLFCFHLATPSSTQQRQAACRSMAMSNYMAYLLFVNPEMLIAGARRSLFKDAYEELEGIIPPNEPASSSSIIRRLRETGNSGSGVAHDAWAVTQVLIGCRGYLHAKSMGSGGQYLSYVWLLLSYMGMETLAEKMQRTDMVDQGRHEAGASTGTTTVPRSAVPASPTGAGDRGSVLPTQAQAIDPTVPSSPVSAVGAGDDNNDRKRAQVGVPGRRVTAEGAGDQEGAAEETIPVS

SEQ ID NO: 67674 - protein, 417 aa, Zea mays
  Coding DNA Sequence Number=SeqID_25895
  Gene Ontology: Mol. function=structural constituent of ribosome; Cellular component=intracellular; Biological process=translation
  Homolog annotation: Hit_ID=Q2R0M9; Match level="QueryCoverage=91%, HitCoverage=56%, E-value=7e-21, Identity=24%"; Hit description =Expressed protein
  Pfam annotation: Domain name=DUF594; Domain location=371-416; Score =40.2; E_value=7.2e-09; Accession=PF04578.4; Description=Protein of unknown function, DUF594
MEDDGDDDTCKAGEPSGRSPSPGEIQPLRDVPPALHQGITELRGWKVLGTAARSLRTTLPVSTLLGAIAAFHYGGGADQVPADVTITHALLWSAIVMESGLLPTVIRHASPRIKRLFTWLRTWPDQVAQYNLMGYAARSRKHSWLMKLAACLRCRDMVDHLWTMEPCKGASSAREITGLVHAHVARAWMEDHIADADSFRAFNDYRGQWTLNNSSSLPSTVVLMSVSRPFDESVLVWHLATDFCFHFLHGDPSRVNATARRCIEVSNYMAYLLFVKPEMLMPGARRNLFKDACRELVGLLQEDRPDAPRGRGMRGLARRVVQQLKRDDDDVLASVRGLTHKLLNLLNKDDDGVLGSGGVGVVRLACCVAKDLMNSHSGNEEKIWTVIQGVWVEMLCFTASRCKGYLHAKSLGTGGEC

SEQ ID NO: 67675 - protein, 281 aa, Zea mays
  Coding DNA Sequence Number=SeqID_25896
  Gene Ontology: Mol. function=methyltransferase activity
  Homolog annotation: Hit_ID=Q012M7; Match level="QueryCoverage=51%, HitCoverage=54%, E-value=8e-19, Identity=35%"; Hit description=[O] KOG4400 E3 ubiquitin ligase interacting with arginine methyltransfera se
  Pfam annotation: Domain name=zf-CCHC; Domain location=174-191; Score =28.1; E_value=2.3e-05; Accession=PF00098.13; Description=Zinc knuckle
  Pfam annotation: Domain name=zf-CCHC; Domain location=196-213; Score =20.9; E_value=0.00035; Accession=PF00098.13; Description=Zinc knuckle
  Pfam annotation: Domain name=zf-CCHC; Domain location=215-232; Score =29.1; E_value=1.5e-05; Accession=PF00098.13; Description=Zinc knuckle
  Pfam annotation: Domain name=zf-CCHC; Domain location=242-259; Score =13.6; E_value=0.0056; Accession=PF00098.13; Description=Zinc knuckle
  Pfam module annotation: Pfam domain module=zf-CCHC::zf-CCHC::zf -CCHC::zf-CCHC; Domain location=174-191::196-213::215-232::242-259
MAERWRSRARRDPDLDEDASPPSRQPRHSGGDEEDDELGNEDLSLEIVARAQRKRRGESAGGVPVFADLLSVSSADEEGAVVELDEADEPRRKQKKKQRRKQRKKHRKETTEAAAGAAVEVDENAVCSTEEGPIGTAESVLTENGADAPASDNMVLRKLLRIPRYFDPGETLLETCFNCSEEGHVAANCPLEKRKKPCFVCGLFGHNAKQCTQGQDCFICKKGGHMAKDCPDKHRRNDHQSTLCLKCGEIGHDMFGCTNDYPPDDIEVYLMMCESNRDSAR

SEQ ID NO: 67676 - protein, 114 aa, Zea mays
  Coding DNA Sequence Number=SeqID_25897
  Gene Ontology: Mol. function=structural constituent of ribosome; Cellular component=intracellular; Biological process=translation
  Homolog annotation: Hit_ID=Q2R0M9; Match level="QueryCoverage=84%, HitCoverage=16%, E-value=4e-16, Identity=39%"; Hit description =Expressed protein
MPAAFSLSFLQGSVTEQLRVLVVASLAIWLRFSIWLAYLGSDAVPIYALATLFNSHRCDTGSSSRAGVEFLWASIMLVHLGGQDSITAYNIEDNELWRRHVFTAVSQTVSYVYK

SEQ ID NO: 67677 - protein, 375 aa, Zea mays
  Coding DNA Sequence Number=SeqID_25898
  Gene Ontology: Mol. function=cysteine-type peptidase activity; Biological process=proteolysis
  Homolog annotation: Hit_ID=Q2R216; Match level="QueryCoverage=98%, HitCoverage=93%, E-value=3e-36, Identity=33%"; Hit description=F-box domain containing protein
  Pfam annotation: Domain name=F-box; Domain location=1-51; Score=40.8; E_value=4.8e-09; Accession=PF00646.23; Description=F-box domain
MASSSLPEELVEEILVRLPQDDPVHLVRASLVCKSWRRVLSDQDCFLRRCRGFHGAAPPLLGYFAINRCYGNDATQFVPATSTASPVRVPAVDHRRRWFLPVDCRHGRVLIHYEDRDRSTKRGFVVWDPLTGSRQHLGMPSASYPSHSCRYTSYTGAVVCAKAGCDDDHLDCQAGPFRVVCVETNLLKPVFACATSYSSVTGAWSAPVPNHDSHDFNYYCLRSYGKQSLLVGDAVYFLFQDDQSILRYDLGRHRLSEIGMPPAMCNTALMKTEGGGLGLAALPNNNRIHIWSRHDEDGCWVEHRVVELETLLPRRMRNRYHRVVGSAEGTNTVFVNVCNTIFMLDVKSNKVRKFSKRKSGQFEYILPYLRFYAPS

SEQ ID NO: 67678 - protein, 237 aa, Zea mays
  Coding DNA Sequence Number=SeqID_25899
  Gene Ontology: Mol. function=phosphoribosylformylglycinamidine cyclo -ligase activity; Cellular component=cytoplasm; Biological process =purine nucleotide biosynthetic process
  Homolog annotation: Hit_ID=Q850Z8; Match level="QueryCoverage=69%, HitCoverage=54%, E-value=2e-72, Identity=68%"; Hit description =Putative 5'-phosphoribosyl-5-aminoimidazole synthetase
  Pfam annotation: Domain name=AIRS; Domain location=16-151; Score =108.5; E_value=1.9e-29; Accession=PF00586.14; Description=AIR synthase related protein, N-terminal domain
MAATGERCPSSRPPFPCRPASPLGLHCPLLRRLQWKARRRTSGGDDDYLIASTDGVGTKLKLAFETGIHDTIDIDLVAMSVNDIVTLGAKPLFFLDYYATSKLDVDLAEKVIKGIRDGCEQSDCALLGGETAEMPGFYAEGEYDLSGFALPRNDGITTTVGEALMAPTFIYVKQVLEIISKGGVKGLAHITGGGFTSNIPRVFPSGCGAKNLLGHGKYLQSSVGFNRQEQMIFKLRL

SEQ ID NO: 67679 - protein, 719 aa, Zea mays
  Coding DNA Sequence Number=SeqID_25900
  Gene Ontology: Mol. function=structural constituent of ribosome; Cellular component=intracellular; Biological process=translation
  Homolog annotation: Hit_ID=Q2R0M9; Match level="QueryCoverage=94%, HitCoverage=95%, E-value=8e-53, Identity=26%"; Hit description =Expressed protein
  Pfam annotation: Domain name=DUF594; Domain location=632-691; Score =97.1; E_value=5.2e-26; Accession=PF04578.4; Description=Protein of unknown function, DUF594
MGDSTSTGFAAALELWQEHQLSILVVASLAIQWFLFVFAPLRQHRIPGLLRLSIWLAYLGSDAVAIYALATLFNSHRCDTDTGRPGVELLWAPILLVHLGGQDSITAYNIEDNELWRRHVVTAVSQVAAAIYVFVKAWPKSLVTTAHQAVNQATLDKVNAIQAHNEEMEAYGRIFTPALLLFFCGITKCVFKPWDLKRVSVNSLVDSSSGSEEKGGESEMNSLQGYVGAATRYFESRGHGRGAGLQEDDGDDDTCKAGEVWKPYNLCVDLAPPYSGRLSCLKHLARSPADEAHRLVKSSLSATFHQLYTKESLKLHDISHFVFTNNAALNRWKVLTSARGLRTVAAATLLGAIAVFHYGGGAADQVKADVTVTYALLWSAFVMEYVLPTVIHHTFGRVQRLFTGHRTWPDQVAQYNLMGYVARRRKHSWLMEVVGWLGCRDLVDQLWTMDPCKGASSREITGLVHGHVAGGWMEGHIAGADSFRAFNDYRGQWTLNNSSVPSMVLMSVSRPFDESVLVWHLATDFCFHLLQEDPSPSSATARRCREMSNYMAYLLFVKPEMLMPGARRSLFRDTCGELVGLLGEDRPGAPRARGKRGLAHKVVQLLKRDDGGGVLGSAGVGVVRRAWCVAEDLMDSHRGSEEKMWAVIQGVWVEMLCFSASRCKGYLHAKGLGTGGEYLSYVWLLLLYMGMETLAEKMQRTELYEGPTAAASSISGHNV

SEQ ID NO: 67680 - protein, 203 aa, Zea mays
  Coding DNA Sequence Number=SeqID_25901
  Gene Ontology: Mol. function=N-acetyltransferase activity; Cellular component=intracellular; Biological process=response to DNA damage stimulus
  Homolog annotation: Hit_ID=Q5JLP9; Match level="QueryCoverage=99%, HitCoverage=30%, E-value=8e-84, Identity=77%"; Hit description=Pax transcription activation domain interacting protein PTIP-like
  Pfam annotation: Domain name=BRCT; Domain location=1-72; Score=24.0; E_value=0.00053; Accession=PF00533.16; Description=BRCA1 C Terminus (BRCT) domain
MSKVHVLLSHSMDKETIKMQTKILIYFGLQVAATISEATHFVAEKFARTRNMLQAIAMGIPIVTPSWLECCREARCFVDEKAYIMRDMKKEKELGFSMPVSLSRARKKPLLQGRRVLITPNAKPSKELLKSLVVAAHGQPLERITASTMKKKIFEGAFVLSCEQDHSVCMPLIESGLEVFDSELLLNGIVTQKLEFARYRLFP

SEQ ID NO: 67681 - protein, 875 aa, Zea mays
  Coding DNA Sequence Number=SeqID_25902
  Gene Ontology: Mol. function=hydrolase activity, acting on acid anhydrides, catalyzing transmembrane movement of substances; Cellular component=integral to membrane; Biological process=calcium ion transport
  Homolog annotation: Hit_ID=Q8RUN1; Match level="QueryCoverage=99%, HitCoverage=90%, E-value=0.0, Identity=84%"; Hit description=Calcium- transporting ATPase 3, plasma membrane-type (EC 3.6.3.8) (Ca(2+) -ATPase isoform 3)
  Pfam annotation: Domain name=Cation_ATPase_C; Domain location=697 -851; Score=-33.1; E_value=0.019; Accession=PF00689.11; Description =Cation transporting ATPase, C-terminus
  Pfam annotation: Domain name=Cation_ATPase_N; Domain location=21-100; Score=49.7; E_value=9.6e-12; Accession=PF00690.16; Description=Cation transporterATPase, N-terminus
  Pfam annotation: Domain name=E1-E2_ATPase; Domain location=114-356; Score=214.9; E_value=1.8e-61; Accession=PF00122.10; Description=E1 -E2 ATPase
  Pfam annotation: Domain name=Hydrolase; Domain location=360-693; Score=68.6; E_value=2e-17; Accession=PF00702.16; Description =haloacid dehalogenase-like hydrolase
  Pfam module annotation: Pfam domain module=Cation_ATPase_C::Cation _ATPase_N::E1-E2_ATPase::Hydrolase; Domain location=697-851::21 -100::114-356::360-693
MARQRGFSVSAEELAAVARNHDAKSLRHHRGVDGIAAKLNVSLADGVRSDEAGVRAEVYGANQYTEKPPRTFWMFLWDASQDMTLLLLAFCAFISVAIGLATEGWPSGMYDGLGIVLTIFLVVMITAASDYKQSLQFRDLDREKKKIDIQVTRDGYRQKVSIYDIVVGDIVHLSIGDQVPADGLYIDGYSLVVDESSMSGESEPVHPSTAKPFLLGGTKVQDGSARMLVTAVGMRTEWGNLMETLSQGGEDETPLQVKLNGVATIIGKIGLVFAVLTFTVLMARFLVDKAHAPGGLLQWRGADALSILNFFAVAVTIIVVAVPEGLPLAVTLSLAFAMKKLMQERALVRHLSACETMGSASCICTDKTGTLTTNHMVVEKVWASGAAQTVSTAKGFDELRSSVSENFTRVLLEGVFHCSGSEVVTGKDGRTSVMGTPTETAILEFGLEVEKYMGVEHAGAKKLKVEPFNSVKKTMAVVIASPNSAGHPRAFLKGASEVVLSRCSSVIDGTGSVEKLTEAKAKRVGSAIDAFACEALRTLCLAYQDVGGAGDVPGDGYTLIAVFGIKDPLRPGVREAVRTCHDAGINVRMVTGDNINTAKAIARECGILTDDGVAIEGPEFRAKRPNEMRELIPKIQARSWSNVMARSLPLDKHTLVTNLRGMFNEVVAVTGDGTNDAPALHEADIGLAMGIAGTEVAKENADVIIMDDNFSTIINVAKWGRSVYINIQKFVQFQLTVNVVALMVNFVSASFTEADWFRRPHRISLSEPLQVFNEVNSREMEKINVFSGIFSSWIFSAVAGATAAFQVIIVELLGTFASTVHLSGRLWLASVLIGSVSLLIGAVLKLIPVGSGSDDSSSADRHDGYQPIPTGPNAV

SEQ ID NO: 67682 - protein, 98 aa, Zea mays
  Coding DNA Sequence Number=SeqID_25903
MGSRSFSYHRLKKLPVAAPSPPPATTAPASRGLEHEGDPRRAAAAIEDSYRSYYRALVARGYAVLGVPEKTALGGSYLWHDKNKSIFRGQIATPTTPP

SEQ ID NO: 67683 - protein, 431 aa, Zea mays
  Coding DNA Sequence Number=SeqID_25904
  Gene Ontology: Mol. function=single-stranded DNA binding; Cellular component=nucleus; Biological process=response to DNA damage stimulus
  Homolog annotation: Hit_ID=Q40742; Match level="QueryCoverage=99%, HitCoverage=100%, E-value=1e-113, Identity=55%"; Hit description =Probable DNA repair protein RAD23
  Pfam annotation: Domain name=UBA; Domain location=186-228; Score =39.3; E_value=1.3e-08; Accession=PF00627.21; Description=UBATS-N domain
  Pfam annotation: Domain name=UBA; Domain location=377-416; Score =37.8; E_value=3.8e-08; Accession=PF00627.21; Description=UBATS-N domain
  Pfam annotation: Domain name=XPC-binding; Domain location=296-354; Score=91.7; E_value=2.3e-24; Accession=PF09280.1; Description=XPC -binding domain
  Pfam annotation: Domain name=ubiquitin; Domain location=6-98; Score =48.7; E_value=1.9e-11; Accession=PF00240.13; Description=Ubiquitin family
  Pfam module annotation: Pfam domain module=UBA::UBA::XPC -binding::ubiquitin; Domain location=186-228::377-416::296-354::6-98
MKVSVKTLKGSSFHIEVDPTDKIRQHKHDVNIDGLSNRDGSQVADVKKVIESIQEQASYPADQQVLIHQGKVLKDDTTLEENQVVENNFLVIMLRQNKGSSSAAPAKVTANQVLFGSALVKGMAPSTQTVPATPPQTSAAPDAPAPIVPVSAPAATATASAAPAVAVSTEADSYGQATSNLVAGSNLEGTIKSILEMGGGTWDRDTVLRALRAAYNNPERAVEYLYSALHAMNFQRFMCAQGIPEQMEVPAPPPSSQPVDPVQAVQPAQAGPNANPLDLFPQSLPNDSANANTGNLDVLRNNSQFQNLLGLVQANPQILQPLLQELRKQNPRVMQLIQENQAEFMRLISEPLEGDEENEMMLDQMADATETIAVTPEENEAILRLEGMGFDRALVLEVFFACNKNEQLAANYLLDHMHEFDNDDGLGGPPL

SEQ ID NO: 67684 - protein, 170 aa, Zea mays
  Coding DNA Sequence Number=SeqID_25905
  Subcellular localization annotation: CTP_CleavageSite=35; ConfidenceScore=5.19e-01
MWWGGIHGHWKRSKGMPTAGWLRLSVATKKAGGTTAATVVAGTGNGTDATVVEVAEACQVAAWAGAGEKTLAVGAARGGGGRLASRGARTAPAPGVGSQRKRPNGGYNITTRHDFIPEEPRSLKGIVWKCRSCGDTLLRFTNQGPPSDACCIENDDINASCGNMLCYWHK

SEQ ID NO: 67685 - protein, 137 aa, Zea mays
  Coding DNA Sequence Number=SeqID_25906
MAPPVTWSVPSPGSGEAEVPSEVEAESRGPGGRARRKTRLSEVEVESEPWGSGEAEDRRPRSRLSPSPGVGQGGDRRPRSRLSPSPGVGRGEDCRLRSRLSPSPGVGRGGVRRPASRLSPSTGVRRGGASYGARGWT

SEQ ID NO: 67686 - protein, 259 aa, Zea mays
  Coding DNA Sequence Number=SeqID_25907
  Homolog annotation: Hit_ID=Q8LGT9; Match level="QueryCoverage=99%, HitCoverage=99%, E-value=9e-99, Identity=62%"; Hit description =Phosphoglycerate mutase-like protein
  Pfam annotation: Domain name=PGAM; Domain location=17-188; Score =74.0; E_value=4.8e-19; Accession=PF00300.12; Description =Phosphoglycerate mutase family
MGTWRHHCPVPSAPLQTIYLVRHAQGIHNVAGEKDFGAYMSHELFDAQLTPLGWNQVDGLREHVKKSGLAEKIELVITSPLLRTMQTAVGVFGGEKYTDGVNAPPLMVENAGHSGRPAVSSLNCPPFIAVETCREHLIENDGDVLWEPDVRETNEAVALRGMKFMDWLWTREEKEIAIVSHSGFLFHTLSMYSKECHPTIRDEVSKHFANCELRSMVLVDRSMLGSYSSRFNYAGKNPTGLDVPSDIADKKQVDEAQKN

SEQ ID NO: 67687 - protein, 271 aa, Zea mays
  Coding DNA Sequence Number=SeqID_25908
  Gene Ontology: Mol. function=protein binding; Cellular component =cytoskeleton; Biological process=phagocytosis
  Homolog annotation: Hit_ID=Q2R485; Match level="QueryCoverage=90%, HitCoverage=86%, E-value=3e-74, Identity=54%"; Hit description =Phagocytosis and cell motility protein ELMO1, putative, expressed
  Pfam annotation: Domain name=ELMO_CED12; Domain location=90-251; Score=287.1; E_value=3.4e-83; Accession=PF04727.4; Description =ELMOCED-12 family
MASIDGCIELGLVILMLLQKRKGVGGWLGGMRVDATMVGNRAWFGGLFSGSGKRRQVSAEKIVLDLTPVQEQRLQSLKERLNVPYDETRTDHQDSLRALWNASFPDTELTSLVSEQWKDMGWQGVNPATDFRGCGFVSLENLLFFARTYPASFKRLMLKQQGMRTTWEYPFAVAGVNISYMLIQLLELNSVRPKSLPGINFIKVLTEHEDAFDVLYCIAFEMMDAQWLAMRASYMQFKEVLEATRQQLERELSLEDLNSIHDLPACNLLYK

SEQ ID NO: 67688 - protein, 48 aa, Zea mays
  Coding DNA Sequence Number=SeqID_25909
  Homolog annotation: Hit_ID=Q5HZ67; Match level="QueryCoverage=89%, HitCoverage=7%, E-value=8e-11, Identity=72%"; Hit description=WRKY transcription factor 78
MAAIMNKSTHLDILPSPRDNSADSGQEDGGSREFEFKPHLSSQSSIGP

SEQ ID NO: 67689 - protein, 212 aa, Zea mays
  Coding DNA Sequence Number=SeqID_25910
  Subcellular localization annotation: CTP_CleavageSite=20; ConfidenceScore=5.66e-01
MDTNFINSYFTPCTVSRGISSAFIGGRRTPSLAPRVGAICLGSFPPCSFVLSLDSRPLLRRTQGPATDTPVKSETLSRWRWHNAHAQCGVLRRELGPSGWDLGGDNSVGGGGGEVSLEQRSREEEGREGQERGEWEQWGTDQSKPKDSTRREQKNAGGIAAKISGLASPSQGLWARLPWSIGEHCGAMDVKGQGTPSGARLAGIVGAWMKSG

SEQ ID NO: 67690 - protein, 88 aa, Zea mays
  Coding DNA Sequence Number=SeqID_25911
  Subcellular localization annotation: CTP_CleavageSite=55; ConfidenceScore=5.21e-01
MAMRMAAAAVALVAVMGVLAPRAAAQTPNCAEKLIPCSPYMNTTGTPPGYLLRPRSRTPSRTTSSFSRIRVNGGISLPSPFMWKSTRK

SEQ ID NO: 67691 - protein, 70 aa, Zea mays
  Coding DNA Sequence Number=SeqID_25912
MHPRRDRHPRQHHGDPRGAGDGVASTESDAEEGITGDALERIEPDLEALGRGKVTASSIYGWGGGATGES

SEQ ID NO: 67692 - protein, 166 aa, Zea mays
  Coding DNA Sequence Number=SeqID_25913
  Gene Ontology: Mol. function=DNA binding; Cellular component=nucleus; Biological process=regulation of transcription, DNA-dependent
  Homolog annotation: Hit_ID=Q3C253; Match level="QueryCoverage=76%, HitCoverage=19%, E-value=1e-32, Identity=53%"; Hit description=GAMYB- like1
  Pfam annotation: Domain name=Myb_DNA-binding; Domain location=119 -162; Score=14.5; E_value=0.17; Accession=PF00249.21; Description=Myb- like DNA-binding domain
  Pfam annotation: Domain name=Myb_DNA-binding; Domain location=66-113; Score=47.4; E_value=4.7e-11; Accession=PF00249.21; Description=Myb -like DNA-binding domain
  Pfam module annotation: Pfam domain module=Myb_DNA-binding::Myb_DNA -binding; Domain location=119-162::66-113
MTQLPSKFKNKMMVVRVDENPAPDGENSPLDDEYVSADDEHVDNEDKETDSIGDYENPSGAPQLKKGPWSPEEDKRLKDYVEVHGAGNWNKVQKNAMLNRCGKSCRLRWTNHLRPDLKKDPFDAEEEEKIIKLYIRWGPKWSMMASYVSVALAVLLQFPAYLLHLH

SEQ ID NO: 67693 - protein, 452 aa, Zea mays
  Coding DNA Sequence Number=SeqID_25914
  Pfam annotation: Domain name=F-box; Domain location=38-85; Score =23.5; E_value=0.00078; Accession=PF00646.23; Description=F-box domain
MVIGPGGGSGSGAKKQRADEQGDGCEAVGADADPIPLDHSSVLPNDLRYLILTHLPLKYAIRTGALSREWHGLWKRRWSHRDPAEGEVHLRRGAGSRRELHKFEQQRRPLPPMDRFSLVVETGLRSSELRRFMRYAADRRVQDLHVETRKSIKKNENLNFHLPLSSPALVRLSLRRINISNMYYRGAQPFRALEVIQLYLVCINVCFAKMMGLCPSLLTLDLRGCVVRCGAQRLFVPPTVRNVTVAECGGQHNADNLRFAIPKNLPGLNVLTICSNALQVASYSLPMPNDGAPFPTRNLRSLRELQLLMLDMEAVNLADLFVFLKTCRCPNLERIFVQLPAFSHVPVKGPIDEVMEEPSQDGYGFDNLVMVKVMNFNWRPTEVQLLGFLLRRASPLCELLIVSNNAMPLNLSGVPDEDLTLLLDGIDNGKITVRKSDDAEIQPCHSEDFIKF

SEQ ID NO: 67694 - protein, 237 aa, Zea mays
  Coding DNA Sequence Number=SeqID_25915
MDCETPGESHGKKRSNECSKEKVVDVQELVDELIVFEHLDYAFCAPEHEACSETQAPDLCSGSDAVFDPSQCYPVASFSDLGISDTLLTKGLLNDIALASLLNVNLKDQSHINRQEPTNDTSLGGASFLNANLKDQSHLNWQEHMNETSPVAGLLNANLEEQSHLNWQEPKNESSPEAGFLNANLEEQSHLNWPLQEYLRFGGGTDLCNCVPGPGTGGHWTLIAGERARQGHNEECG

SEQ ID NO: 67695 - protein, 70 aa, Zea mays
  Coding DNA Sequence Number=SeqID_25916
MASSSGGAVVAAMMGISTSWLKPRKVEHNIVAAAVMHISTRWLKALVELTKQLCLVEQRLSCHPEALDNP

SEQ ID NO: 67696 - protein, 239 aa, Zea mays
  Coding DNA Sequence Number=SeqID_25917
MELLLEKEKESLAEVKKQNVQDMKLHLDTQPTSPATTSAQVLPDPQYVRRSTRLLRDHGKDLHRWSLHPRRGHATATPVRALGLRPHRCSAWFGGAVSRPRARAVVTCRVRARAGPRGLPRRRDHARACAPLGACSFEPPGPGARPCVPRGAALHACRGRSAAPKPRSGCRARDDGTAAHDRRAGRVMLVSPPSRRGRAPMATHIPRRHRTAVPAPDLRGRACPSCARAISGRGVSVPP

SEQ ID NO: 67697 - protein, 96 aa, Zea mays
  Coding DNA Sequence Number=SeqID_25918
  Subcellular localization annotation: CTP_CleavageSite=84; ConfidenceScore=5.03e-01
MAQWSYVRPIPQAYVMHSRPLGCTRSSPGYIVWTGCKGNPSLKKGFPPGAAGTGGAGPQAAQATQTAPGPQAVEVMRKTLDDLRAEQRAEAQRIAT

SEQ ID NO: 67698 - protein, 932 aa, Zea mays
  Coding DNA Sequence Number=SeqID_25919
  Gene Ontology: Mol. function=zinc ion binding
  Homolog annotation: Hit_ID=Q10RY0; Match level="QueryCoverage=74%, HitCoverage=96%, E-value=0.0, Identity=69%"; Hit description=Zinc finger family protein, putative, expressed
  Pfam annotation: Domain name=PHD; Domain location=95-142; Score=4.1; E_value=0.022; Accession=PF00628.19; Description=PHD-finger
  Pfam annotation: Domain name=VWA; Domain location=267-444; Score =105.3; E_value=1.8e-28; Accession=PF00092.18; Description=von Willebrand factor type A domain
  Pfam annotation: Domain name=VWA_CoxE; Domain location=211-420; Score= -66.5; E_value=0.0016; Accession=PF05762.4; Description=VWA domain containing CoxE-like protei
  Pfam annotation: Domain name=zf-C3HC4; Domain location=96-139; Score =44.2; E_value=4.5e-10; Accession=PF00097.15; Description=Zinc finger, C3HC4 type (RING finger)
  Pfam module annotation: Pfam domain module=PHD::VWA::VWA_CoxE::zf -C3HC4; Domain location=95-142::267-444::211-420::96-139
MAAAWARAKRALATGLCVGVPARQLAIEDAPPVVEAPSSVAEDKLESAPVSVRRLTSFGSRSSQQGILFDPQLLGKVKLATRGYSDMYSWGKQKTCAICLGGMRSGQGHALFTAECSHKFHFHCISSNIKHGNLICPICRAKWKELPGAQPADASYGRARVNPLNWPQDEGHMAVVRRLSHTYSGNLQEHLPFFRTLEAGVFNDDEHIDLQSDNISEHNAVAGSVKIKAYSEVPAIEQSTTKEIFAILIHLRAPKSSHSASSRAPLDLVTVLDVSGSMAGTKIALLKNAMSFVIQTLGPNDRLSVVAFSSTARRLFPLRRMTLSGRQQALQAVSSLVASGGTNIADGLKKAAKVIEDRRLKNSVCSIILLSDGQDTYTLPSDRNLQDYSAVVPPSILPGTCQHVQIHTFGFGSDHDSAAMHAIAEISSGTFSFIDAEGSIQDGFAQCIGGLLSVVVKEVRLGIECVDNGVLLTSIKSGGYTSQVAEDGRGGSVDIGDLYADEERGFLVTLHVPAAQGQTVLIKPSCMYHDAITTENIEVHGEEVRIQRPEHRVDCKMSPEVEREWHRVQATEDMSAARAAAEVGAFSQAVAILEARRRILEAQAAQSSDDQFLALMAELREMQQRVENRRRYEESGRAFMLAGLSSHSWQRATARGDSTEITTTIHTYQTPSMVDMLQRSQILVPPIADMLNSSPTVAPPNRFSRPSRQWDESVEAENHVDSGINKSIDHIEHAKPKIHAKGGSPWRGPLPKPRVSKMTFAAALDKAIHVDPCSRERSKSASRFLERVHPFSAFTGGVVRDTTQSLSNFENQKVRSCKNVGPFSPFLRRDYWRSAFTGDCVGDTKEALSKFENQKVGHYKNIGPKPGAQSLKLGMEWDEKYPLSTLVALSRDVSDHTPLLLHMGETRKGNQNSPFKLELGWLLRDGFYDMVK

SEQ ID NO: 67699 - protein, 125 aa, Zea mays
  Coding DNA Sequence Number=SeqID_25920
MPPDPEPCCLRDGRWRTGGRGSEYRRPRPRRRAGHRPQALPKGGEGTGVSDEHNKDKAEGVGNKRVWEKAEATGDTSEQMRVWLELRRGEWIRLEWARCQGLRHSFSIRPYFDELKNELTNAYPG

SEQ ID NO: 67700 - protein, 138 aa, Zea mays
  Coding DNA Sequence Number=SeqID_25921
  Gene Ontology: Mol. function=zinc ion binding
  Homolog annotation: Hit_ID=Q2R1H8; Match level="QueryCoverage=99%, HitCoverage=23%, E-value=5e-17, Identity=88%"; Hit description=Zinc finger, C3HC4 type family protein, expressed
MGVIVLGLFTVIGIFYSVLVATMVGQRIWQRHYHILAKRMLTKVSVSATVYSLSHSVSPRDGNGYPRPDTRWVFTPLGAILELLLYAIIFGVLNGWLNDARNFVMEYVVEDVDGERTDWCPPPLPAEHISQLRSLGLL

SEQ ID NO: 67701 - protein, 113 aa, Zea mays
  Coding DNA Sequence Number=SeqID_25922
METVVMYGHFASSSNKFLRTMMYARKIGGKSGFQETEQQVIRILELMQMASEGYSKADRMSPEPPSLASASGGGIGASGARKLLLYPPMISAAEIIRSAEVSLILTIETFDTM

SEQ ID NO: 67702 - protein, 107 aa, Zea mays
  Coding DNA Sequence Number=SeqID_25923
MPPTLMALGLHQIPMCVFAWALGIECDSGSRNPLTVGGTPPRALYVSTLRAHGLHEVVADDCRSLTGATLAVLAAWNGEPRVDADCSPKINVAADPLRAVAISHHRP

SEQ ID NO: 67703 - protein, 83 aa, Zea mays
  Coding DNA Sequence Number=SeqID_25924
  Gene Ontology: Mol. function=zinc ion binding
  Homolog annotation: Hit_ID=Q2R1H8; Match level="QueryCoverage=71%, HitCoverage=18%, E-value=6e-27, Identity=90%"; Hit description=Zinc finger, C3HC4 type family protein, expressed
  Pfam annotation: Domain name=zf-C3HC4; Domain location=29-63; Score =32.6; E_value=1.4e-06; Accession=PF00097.15; Description=Zinc finger, C3HC4 type (RING finger)
MEEKASSPLVPPPSEIDLEAGGGGEQLQCRICLETDGRDFIAPCKCKGTSKYVHRDCLDHWRAVKAYSPPVRVDAQELLDDVT

SEQ ID NO: 67704 - protein, 422 aa, Zea mays
  Coding DNA Sequence Number=SeqID_25925
  Gene Ontology: Mol. function=protein binding; Cellular component =cytoskeleton; Biological process=actin cytoskeleton organization and biogenesis
  Homolog annotation: Hit_ID=Q2R1J5; Match level="QueryCoverage=97%, HitCoverage=98%, E-value=1e-169, Identity=68%"; Hit description =Kelch repeat-containing F-box family protein, putative, expressed
  Pfam annotation: Domain name=Kelch_1; Domain location=169-211; Score =10.7; E_value=0.24; Accession=PF01344.15; Description=Kelch motif
  Pfam annotation: Domain name=Kelch_1; Domain location=213-258; Score =44.7; E_value=3.1e-10; Accession=PF01344.15; Description=Kelch motif
  Pfam annotation: Domain name=Kelch_1; Domain location=260-307; Score =38.4; E_value=2.5e-08; Accession=PF01344.15; Description=Kelch motif
  Pfam annotation: Domain name=Kelch_1; Domain location=314-354; Score =2.6; E_value=1.9; Accession=PF01344.15; Description=Kelch motif
  Pfam annotation: Domain name=Kelch_2; Domain location=160-211; Score =1.3; E_value=26; Accession=PF07646.5; Description=Kelch motif
  Pfam annotation: Domain name=Kelch_2; Domain location=213-258; Score =20.2; E_value=0.0074; Accession=PF07646.5; Description=Kelch motif
  Pfam annotation: Domain name=Kelch_2; Domain location=260-307; Score =8.8; E_value=2.6; Accession=PF07646.5; Description=Kelch motif
  Pfam annotation: Domain name=Kelch_2; Domain location=314-354; Score =3.9; E_value=12; Accession=PF07646.5; Description=Kelch motif
  Pfam module annotation: Pfam domain module=Kelch_1::Kelch_1::Kelch _1::Kelch_1::Kelch_2::Kelch_2::Kelch_2::Kelch_2; Domain location=169
MPLAASAPASGFLLVCVDLAAGRLIDAAFRITVDSLNCVIGSLQVARAQKGGHVEGLVNCCHSKKKKKNRTGSGLWDSATKSWASGMGGDDENSEANMSELIGRIGRELAISCLLRLPRSGNLYRLRRAVGIAEQMIYCSCNVLEWEGFDPCRQRWFGIPSMPPIECFMLADKESLAVGTSILVFGKRVESHVVLRYSLLTNSWTTGEMMNTPRCLFGSASFGEKAIVAGGIGQSGPLSSAELYDSEMQTWTTLPSMSRARQMCSGFFMDGKFYVIGGKAERHNEVLSCAEEFDLENGSWHLIPDMAQGLNGGSGAPPLVAVVNNELYAADYATKEVRKYDKENNAWITLGLLPGRYTSVHGWGIAFRSCGDMLIVIGAMSAGGSGVIEICSWVPNNEQPDWKIIGTRRSGSFVYNCAVMSC

SEQ ID NO: 67705 - protein, 108 aa, Zea mays
  Coding DNA Sequence Number=SeqID_25926
MKGNSSKGRNSSPKGVFNLIYNYNKYPPQSEGRRQALEPGPSIKMTSYLPSSKLGQGDLTNIWRKVEKRRLKRFAIDLKQRLNRHTAAIKQGATKASPMAFKVDPCGG

SEQ ID NO: 67706 - protein, 67 aa, Zea mays
  Coding DNA Sequence Number=SeqID_25927
MGKQENMTEIQQSSAHKASSFVDFAGKKAKYVSRYRITDSYSLDAAMEATDDQRQISVGVVFCDRWA

SEQ ID NO: 67707 - protein, 295 aa, Zea mays
  Coding DNA Sequence Number=SeqID_25928
  Gene Ontology: Mol. function=phosphoribosyl-AMP cyclohydrolase activity; Cellular component=chloroplast; Biological process =histidine biosynthetic process
  Homolog annotation: Hit_ID=Q5NBQ1; Match level="QueryCoverage=85%, HitCoverage=75%, E-value=1e-110, Identity=81%"; Hit description =Putative phosphoribosyl-ATP pyrophosphohydrolase At-IE
  Pfam annotation: Domain name=MazG; Domain location=219-281; Score =0.9; E_value=0.0023; Accession=PF03819.7; Description=MazG nucleotide pyrophosphohydrolase domain
  Pfam annotation: Domain name=PRA-CH; Domain location=72-146; Score =122.6; E_value=1.1e-33; Accession=PF01502.9; Description =Phosphoribosyl-AMP cyclohydrolase
  Pfam annotation: Domain name=PRA-PH; Domain location=167-282; Score =42.7; E_value=1.3e-09; Accession=PF01503.8; Description =Phosphoribosyl-ATP pyrophosphohydrolase
  Pfam module annotation: Pfam domain module=MazG::PRA-CH::PRA-PH; Domain location=219-281::72-146::167-282
MEAYSFATNFASVLMEEDYVFLLFPLSLKPNISLLLCWIKNQVDTLLDSVKWDSKGLAVAIAQNVDTGAILMQGFANKEALAKTISTRKATFFSRSRSSLWTKGETSMNFINVHDIFLDCDHDSIIYLGKPDGPTCHTGAETCYYTSVYDALQSSKPNEGRQVMTTLYSLEDTISRRHEEKVTDGGGKPSWTKKLLLDNQLLCSKIRIKKVQPFNMTFPSALSVYDRSSEEAGELIQTLLENEDQSRAASEMADLLYHAMVLLRVKDVKMEQVLEVLRKRFSQSGIEEKASRNKS

SEQ ID NO: 67708 - protein, 84 aa, Zea mays
  Coding DNA Sequence Number=SeqID_25929
MPAAIAARCACLLLAVRLSCCDVELKQPRGDSPSHAKRAYRTHEEPTWLAPHQVGAPSPISAAARTSGSVDRKAWSALNRRIEI

SEQ ID NO: 67709 - protein, 63 aa, Zea mays
  Coding DNA Sequence Number=SeqID_25930
MGRIVGGPPFWTRSQDEPTSSQVFVRWPSTSEASSEGWRLRLRPNICPPRDQFDKVIWCRRRR

SEQ ID NO: 67710 - protein, 166 aa, Zea mays
  Coding DNA Sequence Number=SeqID_25931
MSTTASRGARMSEAELGRARPLSPVRSRAVGRDFHGSRDRDARRTKEGTHAIVSRRQNAGQGGLRNSAERYEQRKECAGKHMAAMGTSLTMGATDEPKPSARKNEGDEDAPVREHPRAGRWSSRTRLPWARNEPRELGAVQWSSGTAAEQERAEQRASRTPWWSVA

SEQ ID NO: 67711 - protein, 120 aa, Zea mays
  Coding DNA Sequence Number=SeqID_25932
MAMMGSTSEKMYLCQVRKKIPNLSSGSGAPTGLSEDPRAVAREFEMARWRSESEESTVARDWWLSPLWAHRRSPDVCNMSYCDVAGTAAGAEQWPEFINDVIFHTLKSYLHPTEHESQRR

SEQ ID NO: 67712 - protein, 119 aa, Zea mays
  Coding DNA Sequence Number=SeqID_25933
  Subcellular localization annotation: CTP_CleavageSite=44; ConfidenceScore=5.13e-01
MGSIYTRRGSPRVGGQNNRACGKDGVRAVAHDRATPNSSRFVAVAQQEMNLTTRAHTPMKATSAGVVATMARGSGITGPPTSEKDSVTHAVEDWAVAPFVSLRRRRPARDQSWQVGSET

SEQ ID NO: 67713 - protein, 428 aa, Zea mays
  Coding DNA Sequence Number=SeqID_25934
  Gene Ontology: Mol. function=polygalacturonase activity; Cellular component=cellular_component; Biological process=carbohydrate metabolic process
  Homolog annotation: Hit_ID=Q5QLZ2; Match level="QueryCoverage=99%, HitCoverage=100%, E-value=1e-143, Identity=58%"; Hit description =Putative polygalacturonase
  Pfam annotation: Domain name=Glyco_hydro_28; Domain location=88-426; Score=424.1; E_value=1.9e-124; Accession=PF00295.8; Description =Glycosyl hydrolases family 28
MAASTNNTLRVLFTLMVVCAAVCTAKRTVAKAGDLAPAPAPLGAGGATAAPEGAARASRTFDISKFGATSDGKTDSTQAVQDTWTSACGAMGDATMLIPKGDYLVGPLYFSGPCMGDITIQLDGILLGSNDLAKYTASWIQVSHVNNIVINGSGTLDGQGTAVYTKSKTDVVKAMPNTLVLFYVTNGTVSGIKLLNSKFFHINIDTSKDITVKDVNITAPADVENTDGVHVGGSSNVRITNSTIGTGDDCVSIGPGSDGVMVNNITCGPGQGISVGCLGRYKDEKDVSDVTVRDCVLRNTTNGVRIKSYEDAESVLTASHLTFENIRMEEVANPIIIDQYFCPQKVCPGKRSNSSHVSIKNVTFRNISGTSSTPEAVSLLCSETQPCSGVSLIDVNVEYAGKNNKTMAVCSNAKGTAKGSLQALDCLV

SEQ ID NO: 67714 - protein, 44 aa, Zea mays
  Coding DNA Sequence Number=SeqID_25935
METSSRRGGWENRGCAQLEEQIALPWTTSPELGPSPFAVKDRGL

SEQ ID NO: 67715 - protein, 307 aa, Zea mays
  Coding DNA Sequence Number=SeqID_25936
  Gene Ontology: Mol. function=magnesium ion binding; Cellular component=chloroplast; Biological process=metabolic process
  Homolog annotation: Hit_ID=Q10L25; Match level="QueryCoverage=68%, HitCoverage=38%, E-value=1e-54, Identity=57%"; Hit description =Terpene synthase, N-terminal domain containing protein
  Pfam annotation: Domain name=Terpene_synth; Domain location=1-184; Score=131.6; E_value=2.1e-36; Accession=PF01397.11; Description =Terpene synthase, N-terminal domain
MGERANFLKGEVRKKFEAAAMSAIDAAMLVDAVVHLGIDHCFREEIATALRSVHEDEEGEFGSCDDLHTVAVRFLVLRQHGLWVSADVFDKFRDDKGSFSKSLLCSNPRGLLSLYNAAHMAVTPEEKVLDDAIAFARSHLVEAMIGELRSPMVEQVSRSFDIPLPRFSRRLESMHYIAEYGQEEEGHDAQILELARLEFELVRSLHLRELREICRRGGLCVIANMTEIAWRKINQACMEMDPAMLPGVQGCRGRPVKIHRDHIPRGQEGRLHLRQQPQGPRYLPVPQAVCLTRSTTCFGVQATIRTV

SEQ ID NO: 67716 - protein, 123 aa, Zea mays
  Coding DNA Sequence Number=SeqID_25937
  Homolog annotation: Hit_ID=Q2R149; Match level="QueryCoverage=62%, HitCoverage=8%, E-value=6e-08, Identity=38%"; Hit description=HAT family dimerisation domain containing protein
MQLTISSSAFKQCLKVCPSIGAIGISNENENANEGRENGKVKGKGNMNLLIYVTTDLDPRYKLSNYNKLEIGEMFDKEKEEKGWGSVRQCFYDLFEEYRSMYAPNDDLTSEVNEDQTQKEEEE

SEQ ID NO: 67717 - protein, 183 aa, Zea mays
  Coding DNA Sequence Number=SeqID_25938
LGRQDHNNGVWRDRGSPHARFGHTVVKLSMFGWGHPSVVAEGYGALTVRIAVGAAGIPPWSHTATTKSRAVMASGLRRVSRRYVTSLMFTKVSASCNIGWGGKKHTVVAEALHTGRALPWAHTRIATATSIALEEEDALGTVVSNGVAKIRSYPESKQTGCWGPSASEGPQKQDLTVFLEYNV

SEQ ID NO: 67718 - protein, 283 aa, Zea mays
  Coding DNA Sequence Number=SeqID_25939
  Gene Ontology: Mol. function=zinc ion binding; Cellular component =endoplasmic reticulum; Biological process=spore wall assembly (sensu Fungi)
  Homolog annotation: Hit_ID=Q10L00; Match level="QueryCoverage=97%, HitCoverage=89%, E-value=1e-128, Identity=78%"; Hit description=Zinc finger family protein, putative, expressed
  Pfam annotation: Domain name=zf-DHHC; Domain location=176-239; Score =97.2; E_value=4.9e-26; Accession=PF01529.11; Description=DHHC zinc finger domain
MEVPWLLLVHGSVTALVVVSFLCGQWPIFEGTFIQSINHFLTFGAYHYLLRFVQSVCGTGARDLVLGVEGYCCDRPNPILQLQCSVDYLTLQTRSFFKDQNVDDQVFYVAIIGVTYFIIVQTSFQYIPGYYVSGLHRYLSVVAVSVGAILFVLTSFSDPGTVTAENVSQYVSSYPYDNIIFVEKECSTCKITRPARAKHCRICDKCVARFDHHCGWMNNCIGEKNIRYFVAFLVWHFLICLYGALILGFILAGEIKERKIIYILTGFLRIFGNRVPQQRLSVR

SEQ ID NO: 67719 - protein, 148 aa, Zea mays
  Coding DNA Sequence Number=SeqID_25940
MVGRRRWGGAEEEVKLNIDNVFVELESLKKKGNKAGRSGRPPGRSIVQGPCSSSSRNRLRRRSSGLPHHSLPTPSLVAFPANDDDSLDNPDLGPFLLNQARDTMVLCEGGGTTHYLVTPVQELSANCEAKAGAAGGGDDQQLQPVEPD

SEQ ID NO: 67720 - protein, 176 aa, Zea mays
  Coding DNA Sequence Number=SeqID_25941
MKRLKLSAKTSQEVIGRLTKWLIALTKEGPYLRSMIKLDNICIQTLIRASNKNSPNTGILIQLCATGPKMRQMRPDHHHKLPATSFGQLWRWLNGCSIAKLAPEVLSKVDKKVASTRTMDRAMNDMLWVMVGHQINPSSDRYTTISCSLGHYGRDCAHSTRRSSRVEAWDFGYFLF

SEQ ID NO: 67721 - protein, 283 aa, Zea mays
  Coding DNA Sequence Number=SeqID_25942
MHQQMCLADAKRSLEIVVYDRAFAESQQRANKRARQDEAAAKSSSSLPEEAMASATSSSRPRYGRHRRLPAAEKSRHACAGISSRRWGLRADLPVHFIHDKRMSKTDLDGHQSRFRIPRDGVERHLRPILSPQELDAANLLEGPRRRPRRQEPGPSEPQDGNNRRKTSKKKGKAHGGLPVMLVDLNAGAKELRLSRWDSSQGTIVKGEGYLQFMRPCTFKEGDDVAIWALCSGGSASSAWTCATTAYCTSSSSRNKTKARCRVCRAPAQPESLVSSFFFRRLS

SEQ ID NO: 67722 - protein, 121 aa, Zea mays
  Coding DNA Sequence Number=SeqID_25943
  Subcellular localization annotation: CTP_CleavageSite=71; ConfidenceScore=5.16e-01
MVDIPRAVFATPCSAFSQDIDTSGEDTSINARKQGNSRGRASTGRLQESLRRKSSSRKREIKILKKSTSFRASSLSFQRMGEASVPTERNRDEAGAAKDRLSKVHHHLDHRACLVEKGPRG

SEQ ID NO: 67723 - protein, 38 aa, Zea mays
  Coding DNA Sequence Number=SeqID_25944
MKACVGSFNDSVVMTKDHMDEDPIGTCSFERLCTLISR

SEQ ID NO: 67724 - protein, 421 aa, Zea mays
  Coding DNA Sequence Number=SeqID_25945
  Gene Ontology: Mol. function=zinc ion binding; Cellular component =nucleus
  Homolog annotation: Hit_ID=Q2R448; Match level="QueryCoverage=81%, HitCoverage=93%, E-value=2e-49, Identity=36%"; Hit description=MYND finger family protein, expressed
  Pfam annotation: Domain name=Sel1; Domain location=175-207; Score =3.6; E_value=6.2; Accession=PF08238.2; Description=Sel1 repeat
  Pfam annotation: Domain name=Sel1; Domain location=208-246; Score =17.8; E_value=0.04; Accession=PF08238.2; Description=Sel1 repeat
  Pfam annotation: Domain name=Sel1; Domain location=247-282; Score =16.8; E_value=0.079; Accession=PF08238.2; Description=Sel1 repeat
  Pfam annotation: Domain name=zf-MYND; Domain location=357-398; Score =43.3; E_value=8.5e-10; Accession=PF01753.9; Description=MYND finger
  Pfam module annotation: Pfam domain module=Sel1::Sel1::Sel1::zf-MYND; Domain location=175-207::208-246::247-282::357-398
MPWWGRRGRGRRRPSPGECACCERRKRPADGPGLPGRTPRRPRPLHPDQGPRPDSSAPADLLSVHLTYVCPGTTRFSSTPRVPSDGERSLSLHVAWGESSKQFCGLRKTLGIRRMPRIGRFADVLGVCRCKRLNELGSHDMVFAKASPASLSVKAAAWSEAAQRFLKRSADAGNLEACYILGMIRFYCLGSRSGGAALLAKAAVGGHAAALYSLAVIQFNGSGGAKSDRDLRAGAALCARAAALGHVDALRELGHCLQDGYGVRRDPAEGRRLLVSANARELTLALSAAASRHAAGVVVGGGGGGGCPLLSDFGWSLPEAEPHAANQFHGGLVAGGKITGESGVDGDGAELRLCSHVRCGRRETRRHEFRRCSVCGAANYCSRACQALDWKRAHKVQCVPVDRWLLGAVGDAQDQQQQQPQ

SEQ ID NO: 67725 - protein, 286 aa, Zea mays
  Coding DNA Sequence Number=SeqID_25946
  Gene Ontology: Mol. function=DNA binding; Cellular component=nucleus; Biological process=regulation of transcription, DNA-dependent
  Homolog annotation: Hit_ID=Q8LFW6; Match level="QueryCoverage=50%, HitCoverage=43%, E-value=1e-14, Identity=37%"; Hit description =Squamosa promoter-binding-like protein 13
  Pfam annotation: Domain name=SBP; Domain location=3-69; Score=33.1; E_ value=9.5e-07; Accession=PF03110.5; Description=SBP domain
MELEKVHACSPPSFSGADNQIPDSSSRFQNIRESEPRRFHLLEEFDEVKRSCRKRLDGHNRRRRKPQPDPLSPAGLFGDHHHGGVTRFTSYPHRFTTSIAKPEWGAVVKTETDAFQDQYYPAVHLNGAGAGALFHDKDRKHLPFLTNHNNGCQPFTVTTTASSESSSKHSNGNCALSLLSDNPTPAQAQTATIPTAQPLVATASQYGRLPGGDDDDVSLAGMSYMRVGDSRQASNLTTSSPGPATAAATQQHLQYHHGYYYHVSGGEQGNNSPDGAAIQALPFSSW

SEQ ID NO: 67726 - protein, 67 aa, Zea mays
  Coding DNA Sequence Number=SeqID_25947
MAMWENDSPMKFVTDAKILRRNFIIELLSYEENSCRYAIPANIQQRVNNIVKKDYISVQGVNIFTYD

SEQ ID NO: 67727 - protein, 159 aa, Zea mays
  Coding DNA Sequence Number=SeqID_25948
  Gene Ontology: Mol. function=enzyme inhibitor activity
  Homolog annotation: Hit_ID=Q2PWW1; Match level="QueryCoverage=81%, HitCoverage=66%, E-value=3e-18, Identity=40%"; Hit description =PME/invertase inhibitor-like protein
  Pfam annotation: Domain name=PMEI; Domain location=25-157; Score =60.2; E_value=6.6e-15; Accession=PF04043.6; Description=Plant invertasepectin methylesterase inhibitor
MLLLLLLILQQLSAAAVAGMATTKLGLSDVVTDTCDRCSKSNPQVNYTLCVSSLSSDPESRQADLHGLAIISAKLLRSGAVAMEAKMADLSRKERPWSPRRSCLDACVGVYRNSLYDLGSSIVAIQERRYADAKTSMSAAVDAPVTCEDEFKEQGWSHP

SEQ ID NO: 67728 - protein, 123 aa, Zea mays
  Coding DNA Sequence Number=SeqID_25949
MQAACNCTKGMHPFDFDASSMEAQVHTSCNRCAGYYVQETAPPLAPVPRLLDCGTGATTRGNPAHGPTVPTKHIGHGTGDTFGRRSGRRFTYAIMTASKKGPGKGILRKGSFSAKEAGPEPSY

SEQ ID NO: 67729 - protein, 68 aa, Zea mays
  Coding DNA Sequence Number=SeqID_25950
MTLQSIPEPDELEAKAMYRNLHNLVERATVHALANITKCDGSTNPSVWLEDYQLACHMVGIKDDHLVI

SEQ ID NO: 67730 - protein, 155 aa, Zea mays
  Coding DNA Sequence Number=SeqID_25951
MAIFPASAGSETFTLWSHITFGSLNFLAQKTSELRLVGHDEANVAGLGPRHSTRTKAEKRRLKRCDAALKQRLNASAIAVKWRARVAPPSTMVAIVRCEPASILDLLEDGSSSASMEPDVLDALIERLDQVYVNIEQRCLKAEQSQARNTCNQIT

SEQ ID NO: 67731 - protein, 191 aa, Zea mays
  Coding DNA Sequence Number=SeqID_25952
HSATGAGKRTDRSGLVPETPAIDRWGPGVGAALAHDGDVARARAGVGYGDSKAVGVGQNCRGGLDEHTEGVLATRLGSERGEWRRESSGQVEVTSARNSDHWERQSTAIGLGLVPVEVGERYGPTSGHWTRLGWPDTMRARRANAAAHWRGQIGYGSPVSASGDSRARERVSLREMGQGSKCVCRRGSKGS

SEQ ID NO: 67732 - protein, 137 aa, Zea mays
  Coding DNA Sequence Number=SeqID_25953
  Gene Ontology: Mol. function=structural constituent of ribosome; Cellular component=intracellular; Biological process=translation
  Homolog annotation: Hit_ID=Q653V9; Match level="QueryCoverage=86%, HitCoverage=54%, E-value=6e-46, Identity=76%"; Hit description =Putative 50S ribosomal protein L24, chloroplast
  Pfam annotation: Domain name=KOW; Domain location=83-116; Score=41.4; E_value=3.1e-09; Accession=PF00467.19; Description=KOW motif
  Subcellular localization annotation: CTP_CleavageSite=50; ConfidenceScore=5.55e-01
MASLSISALGAATASSSSFWGNRLATYSAPQPGVCSCFPIPFRSADGLVRFMVKICPIEMRLKRWERKKCKPNSLPVLHKMHVRIGDTVQVIAGREKGKVGEVTRLFKHNSTVIVKDLNLKSKHKKGTDDEPGEIVM

SEQ ID NO: 67733 - protein, 149 aa, Zea mays
  Coding DNA Sequence Number=SeqID_25954
  Gene Ontology: Mol. function=ubiquitin-protein ligase activity; Cellular component=ubiquitin ligase complex; Biological process =protein ubiquitination
  Homolog annotation: Hit_ID=Q6ETF7; Match level="QueryCoverage=89%, HitCoverage=29%, E-value=6e-26, Identity=48%"; Hit description =Putative photoperiod responsive protein
MGALDRNAVDPKLSCLGAMFGSRHATHGEMVHALHAMMDPSVSAKALRVLESAEGHAVLCTDTEDAIPEVVGKMMKAGRDGVEATVAMLWAVCHWYQDRQAADVAVTAEGRLTRLLLLMQSECMPAARQMALKLLVGICSPEQDDPTGE

SEQ ID NO: 67734 - protein, 101 aa, Zea mays
  Coding DNA Sequence Number=SeqID_25955
  Pfam annotation: Domain name=SRF-TF; Domain location=1-34; Score =14.4; E_value=0.0094; Accession=PF00319.9; Description=SRF-type transcription factor (DNA-binding and dimerisation domain)
MGLFKKANELAILCDVQIGVIIFSGSGRMLDMGVSKVILRTAAVNGVANTFIKLKYFFPAVRSVVAFSGLMVRLNAWLATISLAIYKAFDHLGMLKKKKCF

SEQ ID NO: 67735 - protein, 137 aa, Zea mays
  Coding DNA Sequence Number=SeqID_25956
MEATQKHLSGQSLKRALADSGSGSERDRVTAQPQECFSRAKPSRGDGRVSDSVSVRQAAIRLLSTSLLRFVARSNKNTHRLPRLESGPLQCNAVGGVLRSTVTLPCPDRLSTHQLLAPACSELRTQFPVLTALMPCR

SEQ ID NO: 67736 - protein, 102 aa, Zea mays
  Coding DNA Sequence Number=SeqID_25957
  Homolog annotation: Hit_ID=Q6QP51; Match level="QueryCoverage=51%, HitCoverage=30%, E-value=7e-14, Identity=77%"; Hit description =Putative growth-regulating factor 1
MAQQCQPSTSVTGPVSRGRRRDGRYGQKDRERGYFERDPSPLRKRASSPPTDQGFEGWPPGRVRQPPQSTRDSGSLLIRGSKAGPSEGFDSRLRALGLRAHY

SEQ ID NO: 67737 - protein, 134 aa, Zea mays
  Coding DNA Sequence Number=SeqID_25958
MWARADGPGAVKDKCWILANGPKQLRDQPWWLKHGTRTRARTWQSGSCCRRGQELQDTCPRRGGHAHGAIHTAVWWFEPQNHPTLWMAGFVEFGRQNSSVVIPVGIGSSMWHYNEWCVKAKQLRVESVPVGSKT

SEQ ID NO: 67738 - protein, 53 aa, Zea mays
  Coding DNA Sequence Number=SeqID_25959
MEAECKTSADGMGGCWWSAADGEEVVDSLGMRIEGAGGSNVNFGPKTEFRALM

SEQ ID NO: 67739 - protein, 304 aa, Zea mays
  Coding DNA Sequence Number=SeqID_25960
  Gene Ontology: Mol. function=transferase activity; Cellular component= membrane; Biological process=electron transport
  Homolog annotation: Hit_ID=Q10R71; Match level="QueryCoverage=51%, HitCoverage=33%, E-value=5e-70, Identity=77%"; Hit description =Glycosyl transferase family 2 protein, putative, expressed
  Pfam annotation: Domain name=Glycos_transf_2; Domain location=80-251; Score=34.4; E_value=4e-07; Accession=PF00535.16; Description=Glycosyl transferase
MAAWAVPALAAAAWALRAAVWACLAASAMLVAEAAYMGLASLASAAAMLWRRPDARYRWEPMPGGCDVEAATGADFPMVLVQIPMYNEREVYKLSIDAACALTWPPDRIVIQVLDDSTDPIIKELVELECQDWATKKINIKYEVRNNRKGYKAGALKKGMEHIYAKQCEFVAIFDADFQPEPDFLLKTIPFLVHNPKIALVQARWEFGPTFTCEQYVEKLKQICYASHTVRGLERVSLNVKPYPHNMQRLGLEPGTFWLQTKATRDTTQQFEGDATEEMDEDNDDESGSAEVADAGFHLDDDLV

SEQ ID NO: 67740 - protein, 210 aa, Zea mays
  Coding DNA Sequence Number=SeqID_25961
  Gene Ontology: Mol. function=transferase activity; Cellular component= membrane; Biological process=protein metabolic process
  Homolog annotation: Hit_ID=Q7PC67; Match level="QueryCoverage=88%, HitCoverage=35%, E-value=1e-101, Identity=92%"; Hit description =Cellulose synthase-like A2
MAVIILVKMFLTWPLPGDFAVNYDVCLMTRIQKMSLDYHFKVEQESGSFVYSFFGFNGTAGVWRVSAINQSGGWKDRTTVEDMDLAVRASLKGWEFLYVGDIRVKSELPSTFKAYRHQQHRWTCGAANLFRKMAWEIITNKEVSIWKKHHLLYSFFFVRRVIAPLVTFLFYCVVIPLSAMVPGVSIPVWGLVYIPTAITCMNAIRNPWYA

SEQ ID NO: 67741 - protein, 38 aa, Zea mays
  Coding DNA Sequence Number=SeqID_25962
MGVLLTMPTTPTDRMKEIAQASQEFIYTDADGRATDVA

SEQ ID NO: 67742 - protein, 162 aa, Zea mays
  Coding DNA Sequence Number=SeqID_25963
MGMLLALERRKIDEWRVSEPSRKNMNHPSHDVYAQPIQIRPTRPRGALPLTARPLEERPCGGHVLRDGGCVPYGQGPRDSGFDSYFSSGTQFPSYGDRFPSGPGMSGVFLTFLWADATTLYYPLLMQDEGLENIWLMDSGYSHHMTESKKWFSSLDPVIGKE

SEQ ID NO: 67743 - protein, 65 aa, Zea mays
  Coding DNA Sequence Number=SeqID_25964
MEVRGFICKNGDIAKKAKKWYCRQIVEKIAKAAVAIETKLINVTGIFVLHSSVGQGRTRGAKWAM

SEQ ID NO: 67744 - protein, 145 aa, Zea mays
  Coding DNA Sequence Number=SeqID_25965
MARGVHRKLESMGRPASCHSRIDLSQQLHTGEISKVTNAGMKLSVSSGQTGRDALRSVSATRQNVVIGDLGEEARWGTEEAEDDCVMNAQSALRAVSVCVPPRCLLVPLFGRITVNDLDGGTGCSTRHAGGMQGRVKCRREPKCV

SEQ ID NO: 67745 - protein, 315 aa, Zea mays
  Coding DNA Sequence Number=SeqID_25966
  Gene Ontology: Mol. function=acyltransferase activity; Cellular component=nucleus; Biological process=cell cycle
  Homolog annotation: Hit_ID=UPI0000E4987F; Match level="QueryCoverage =78%, HitCoverage=23%, E-value=4e-22, Identity=30%"; Hit description =PREDICTED: similar to N-acetyltransferase ESCO1 (Establishment of cohesion 1 ...
  Homolog annotation: Hit description=homolog 1) (ECO1 homolog 1)
MQPKISAFFERQETDPDPISGDGEGNGQGNVGAATEAKRKANGCRLDGLVSKKRNYAQLHLELGQPDFVLHTCSVCGMMYARGNDEDEKVHRAYHKSYSEGVPFKVKLTDELQGWKKETVIARSEGGDRVVLATDENSCMSKSKVREVITVVEKELGFGEGKLLHKLCKVYLYISAQRIVGCLVTEPIKTGHRVIPSSTEGSPNDLPVSSTERGKNGHTLEFGSISFKREIIRRHSRSVKNKEECQDPGAILCETEAVPALCGFRAIWVAPSCRRKRIASKLMDVASNAAAAAPSMELGECIYKMDVFEQENDRL

SEQ ID NO: 67746 - protein, 94 aa, Zea mays
  Coding DNA Sequence Number=SeqID_25967
MGGLELAMALLGGVEGHHTQNEIGEDVYLWKIVEYSELFTCVGLEGLCQEAEMAAMRKGEAQKIQRLTQRRSYEAEKLRHVRRKGNRLKDEKVI

SEQ ID NO: 67747 - protein, 446 aa, Zea mays
  Coding DNA Sequence Number=SeqID_25968
  Homolog annotation: Hit_ID=Q1RSF1; Match level="QueryCoverage=29%, HitCoverage=51%, E-value=4e-34, Identity=56%"; Hit description =Expressed protein, putative
  Pfam annotation: Domain name=DnaJ; Domain location=12-62; Score= -10.5; E_value=0.047; Accession=PF00226.21; Description=DnaJ domain
HVPVFPRYRIRDPYKLLGVDRDASEEEIRGARNFLIQQYAGHEPSEEAIEGAYEKIIMKSYQQRKKTKINLKTKLKKRVEESPSWVKALLGCFEVPSMDIISRRLFFFAFIAGWSIATSAENGPAFQLGVAAAAALDNPPTHSCSRSTCNRALPLPPCDGHPFHEVLRCGEAPLEQDDVVDAIGHPVHRTINATDAHGQAHDQRTHVEGLQPAAWMVQLVLGPCVLCAKVLLIRRHLPEHGRAAAVGTDGVAHHLLDVCAFAAGVDRSRAASQQVTAACGGEHGKEGPKWPEACTRGANTSTGQTQCELAGAQPASGPASAARDVRAVAWDARGEFRAAGRSSTGTVGELAEHAQPRRSWAGPAWSSDKVTRAAVGSEFAQALGSGGVAGAVSGDGGTADGKSFAFTSGETFALRSRITFGSLDFLATATDELRLADSSSPIDALV

SEQ ID NO: 67748 - protein, 224 aa, Zea mays
  Coding DNA Sequence Number=SeqID_25969
  Gene Ontology: Mol. function=nucleic acid binding; Cellular component= intracellular; Biological process=DNA integration
  Homolog annotation: Hit_ID=Q8H6I0; Match level="QueryCoverage=99%, HitCoverage=14%, E-value=6e-90, Identity=70%"; Hit description =Putative gag-pol polyprotein
MSGDHAKKEMVTGEKPATSHGKAPSGESYNKGKGKEKESPSHKSRRSGDKKKKMRKVVYYETDTSSPSTSGSDTPSVTSKRHERKKFSKIPLRYPRIPKHTPLLSVPLGKPPTFDGEDYARWSDLMRFHLTSLHKSIWDVVEFGVQVPSVGDEDYNEVEVAQIQHFNSQATTILLASLSREGYNKVQGLKSAKEIWDTLKTVHEGDEVTKITKRETIEGELGCF

SEQ ID NO: 67749 - protein, 200 aa, Zea mays
  Coding DNA Sequence Number=SeqID_25970
  Gene Ontology: Mol. function=protein binding; Cellular component =cytosol; Biological process=protein folding
  Homolog annotation: Hit_ID=Q2VCK8; Match level="QueryCoverage=93%, HitCoverage=76%, E-value=9e-48, Identity=47%"; Hit description=ChaC -like family protein-like
  Pfam annotation: Domain name=ChaC; Domain location=4-193; Score =287.6; E_value=2.3e-83; Accession=PF04752.3; Description=ChaC-like protein
MSPIWVFGYGSLIWNPGFAYDDRVVGFVRDYRRVFYQGSTDHRGTPQFPGRTVTLEHQPGATCVGPFSCPPSYSVNWGVAYRIKEEDKEIALEYLEVREKQYDEKVYLDLYTDSSPKVPAVENVMVYFATSNKENNQNYLGPAPLEEMTRQIYLAQGPSGPNKEYVFKLEDALHKLGVVDQHVQELANALREYSDTELSK

SEQ ID NO: 67750 - protein, 475 aa, Zea mays
  Coding DNA Sequence Number=SeqID_25971
  Gene Ontology: Mol. function=pepsin A activity; Cellular component =cellulose and pectin-containing cell wall; Biological process =proteolysis
  Homolog annotation: Hit_ID=Q766C3; Match level="QueryCoverage=77%, HitCoverage=80%, E-value=1e-85, Identity=44%"; Hit description =Aspartic proteinase nepenthesin-1 precursor
  Pfam annotation: Domain name=Asp; Domain location=115-470; Score= -58.2; E_value=3.6e-10; Accession=PF00026.14; Description=Eukaryotic aspartyl protease
MEPSSAAARLLLLVAVAAVAAASGATTGALAATPSPRPNPKLRGLRVRLTHVDAHGNYSRLQLLQRAARRSHHRMSRLVARATGAASTSSSKAAAAGDGSGGKDLQVPVHAGNGEFLMDLSVGTPALPYAAIVDTGSDLVWTQCKPCVECFNQTTPVFDPAASSTYAALPCSSALCADLPTSTCASSSSSSSASSPCGYTYTYGDASSTQGVLATETFTLARQKVPGVAFGCGDTNEGDGFTQGAGLVGLGRGPLSLVSQLGIDRFSYCLTSLDDAAGRSPLLLGSAAGISASAATAPAQTTPLVKNPSQPSFYYVSLTGLTVGSTRLALPSSAFAIQDDGTGGVIVDSGTSITYLELRAYRALRKAFVAHMSLPTVDASEIGLDLCFQGPAGAVDQDVQVQVPKLVLHFDGGADLDLPAENYMVLDSASGALCLTVMASRGLSIIGNFQQQNFQFVYDVAGDTLSFAPAECNKL

SEQ ID NO: 67751 - protein, 143 aa, Zea mays
  Coding DNA Sequence Number=SeqID_25972
  Subcellular localization annotation: CTP_CleavageSite=72; ConfidenceScore=5.36e-01
MCLHPKVHLTAPVHLAPPPSSSAYMDSIRWDPTAPFVTRRATASTTQMDATRCGGPAALVSRTLCSLGSSHVASAGGGHQRRSRGGWCVWTADGDGRLAPQSRDAGEKGQRRELREDGGGGGGTAGVVCESRGRGLGAMVAGA

SEQ ID NO: 67752 - protein, 147 aa, Zea mays
  Coding DNA Sequence Number=SeqID_25973
  Subcellular localization annotation: CTP_CleavageSite=67; ConfidenceScore=5.29e-01
MGRSVQLGWFAFPQAVPRLQMPGAPQPLPLSYAAPRMPPSSQRKKRECRRRERERTREVERRFGIFSAGAGADRGVPYVPRCNRAVASIGRRAGISPSENKARRRVASPVDNPARAPNSVEEPVTEDPGEQQVEVAEQELIEGKLCP

SEQ ID NO: 67753 - protein, 67 aa, Zea mays
  Coding DNA Sequence Number=SeqID_25974
MDLVADGLGLGNTNMRGELPWALLPLTDHIMHDEVPDKDPVGAYFQCYSPIFENRTSFRIPIEGVVR

SEQ ID NO: 67754 - protein, 130 aa, Zea mays
  Coding DNA Sequence Number=SeqID_25975
MEFGLPLLGLIALMVSSAGSCAAVPLQYLFDGQAGWLVGHLWEAFRPSFGYPVLRGLCSVRGAPFPATVRHALGMSPSASLFKGWTLFYDGSSCTGHESIGLSVNDVAHYTRRSTLGFPGGPHYVSQNMR

SEQ ID NO: 67755 - protein, 138 aa, Zea mays
  Coding DNA Sequence Number=SeqID_25976
  Gene Ontology: Mol. function=protein serine/threonine phosphatase activity; Cellular component=integral to membrane; Biological process=protein transport
  Homolog annotation: Hit_ID=Q8VYE2; Match level="QueryCoverage=89%, HitCoverage=32%, E-value=6e-32, Identity=56%"; Hit description =Import inner membrane translocase subunit TIM50, mitochondrial precursor
  Pfam annotation: Domain name=NIF; Domain location=4-119; Score=-72.0; E_value=0.034; Accession=PF03031.8; Description=NLI interacting factor-like phosphatase
MALTMFITVFISLFLQSYVERVFERLNSRGTISHRLSRPATKYVDGKHYRDLSKLNRNPAQVIYLSAHALESCLQHENCVEIKPFKLEDKNDTQLLDLIPFLEYVAMARPSDIRTVLASYQGHDVVAKFIERSKEHQQ

SEQ ID NO: 67756 - protein, 123 aa, Zea mays
  Coding DNA Sequence Number=SeqID_25977
MGSLKYNLLGFDISEDKSRTSSGHMIFRSAIGILRIRDGANEKETQLLYCFTHTPEGTRQYTVPGIRLHMIKGDTKGMTEDEVVLKSSSLNKYNPLVSDPPSSPCRSPFGDSNIGFLDRDALS

SEQ ID NO: 67757 - protein, 39 aa, Zea mays
  Coding DNA Sequence Number=SeqID_25978
MERSEPSLKPEWLLRPTVPATTYKPATLPHTGSSSSVEL

SEQ ID NO: 67758 - protein, 295 aa, Zea mays
  Coding DNA Sequence Number=SeqID_25979
  Gene Ontology: Mol. function=hydrolase activity, hydrolyzing O -glycosyl compounds; Biological process=carbohydrate metabolic process
  Homolog annotation: Hit_ID=Q94ED2; Match level="QueryCoverage=40%, HitCoverage=18%, E-value=5e-49, Identity=77%"; Hit description =Putative exo-1,3-beta-glucanase
  Pfam annotation: Domain name=Glyco_hydro_3_C; Domain location=2-121; Score=44.9; E_value=2.7e-10; Accession=PF01915.12; Description =Glycosyl hydrolase family 3 C terminal domain
MNQLDSLPYAETVGDSTDLQKIDPGPDTIRTVCAAVKCAVVIISGRPIVIEPYVPLVEALVAAWLPGTEGQGVADVLFGDYGFTGKLPHTWFKSVDQLPMNVGDLQYDPLYPFGFGLMINSSLPGFSGRLKPEAYLTEGIQPGEFSSCYNHTRCAKALGVFACSPRRLKNTTRNPNPLARERYNDIPTTTHMDQRHNYINEFWLVKAEAKIYVHLLVDGASQPIKASLEGYGTPLEASLLLLIPRGGRACGSSHAHCDGHIGVCEADLTGGDGEEVNGTECDAAPRRKGLTAGER

SEQ ID NO: 67759 - protein, 114 aa, Zea mays
  Coding DNA Sequence Number=SeqID_25980
  Gene Ontology: Mol. function=DNA binding; Cellular component =mitochondrion; Biological process=DNA integration
  Homolog annotation: Hit_ID=UPI00004C1731; Match level="QueryCoverage =99%, HitCoverage=11%, E-value=1e-37, Identity=53%"; Hit description =UPI00004C1731 related cluster
MAWLGVVLRLQITEGSSKLRNFFPVTGCRYLMMELGTPKRWIMFVKNATACSDWMLARGRTSIHLENLSTATSRCVKPSGTFNRGPTRSNPHITKGQVIGIVYRAWAGMSICLA

SEQ ID NO: 67760 - protein, 109 aa, Zea mays
  Coding DNA Sequence Number=SeqID_25981
  Gene Ontology: Mol. function=RNA-directed DNA polymerase activity; Biological process=RNA-dependent DNA replication
  Homolog annotation: Hit_ID=UPI00004C1732; Match level="QueryCoverage =96%, HitCoverage=8%, E-value=2e-30, Identity=55%"; Hit description =UPI00004C1732 related cluster
MDRGSSLNIIYADTLELMGIGRSQVRVELRLFTASPLARGKEVLTFEVVGFRGTYHAVLWRPCYAKFIATLNYTYLKLKMSGPASIITVGPTYRHTNKCDVKCVEYRHS

SEQ ID NO: 67761 - protein, 170 aa, Zea mays
  Coding DNA Sequence Number=SeqID_25982
  Gene Ontology: Mol. function=signal transducer activity; Biological process=response to light stimulus
  Homolog annotation: Hit_ID=Q1SEC5; Match level="QueryCoverage=39%, HitCoverage=11%, E-value=1e-08, Identity=47%"; Hit description =BTB/POZ; NPH3
MTEDHQADNLVARAEAYLAEVALWSLDGALEVLCRCDGPVAEQVGLVARCVDAVAASAGKEQLDASSHAAQNDRLPIQMVVRVLYFEQLRLKSSFSGGGSGCVGLGGADGSFSQRQVKGNRSKTVVRDADGGAEARRLRGMQTAARGRRKIAGGAWISLLGGDPVGEERS

SEQ ID NO: 67762 - protein, 142 aa, Zea mays
  Coding DNA Sequence Number=SeqID_25983
  Homolog annotation: Hit_ID=Q5N8Y6; Match level="QueryCoverage=95%, HitCoverage=66%, E-value=7e-14, Identity=39%"; Hit description =Aromatic-rich family protein-like
MLPCARSVLRRRGLASSVPRRCGGEGECSTCAGELVANARCSSTLAALGGGGRVLEHGGRWAYPQTGVIGAGRMTRTQTRCFFGCGDGEEGGVLSKVYEERRVIGYAVNRELPYELEIGFKFLVESYVSRVEMEKPQNTCKL

SEQ ID NO: 67763 - protein, 372 aa, Zea mays
  Coding DNA Sequence Number=SeqID_25984
  Gene Ontology: Mol. function=hydrolase activity, hydrolyzing O -glycosyl compounds; Cellular component=integral to membrane; Biological process=carbohydrate metabolic process
  Homolog annotation: Hit_ID=Q9LLB8; Match level="QueryCoverage=97%, HitCoverage=71%, E-value=1e-127, Identity=57%"; Hit description =Exoglucanase precursor
  Pfam annotation: Domain name=Glyco_hydro_3; Domain location=84-240; Score=96.5; E_value=8.2e-26; Accession=PF00933.12; Description =Glycosyl hydrolase family 3 N terminal domain
MADAEYMKYKDPKQPINSRIRDLIGRMTLAEKIGQMTQIERQVASANVMKQYFIGSILSGGGSVPSPQASPAIWVNMVNEFQKGALSTRLGIPLIYGIDAVHGNNNVYNATLFPHNIGLGATRDPGLIKRIGEATALEVRATGIQYTFAPCIAVCRDPRWGRCYESYSEDHKVVQQMTDIILGLQGEIPVNHTKGVPYVAGKVFVISDWLGVDRITSPPGANYTYSVQAGINAGIDMVMVPYNYTDYINDLTSLVHKGVINISRIDDAVKRILRVKFTMGLFENPLADLSFAEQLGKKEHRELAREAVRKSLVLLKNGNSPDQQFLPLPKRARSILVAGSHASNLGYQCGGWSIQWMGDSGNITTGVHCMEI

SEQ ID NO: 67764 - protein, 174 aa, Zea mays
  Coding DNA Sequence Number=SeqID_25985
SSVERQTGADGPTTNFTMTSGGATARGQGFDNGERERESRGEGAASSSTMNGVHQWGEGVMGNEEKTDGRRRGTGMARLAGRVEVAAGVVHVARQLDIAQGRARLDPRGAGRPDPSLLGVPALRRERGKGRREKRRLRGRGRGRLAQGAGRRLLGLGVGGAVGWGFWAEWAKFG

SEQ ID NO: 67765 - protein, 72 aa, Zea mays
  Coding DNA Sequence Number=SeqID_25986
MPHGVRFRTTAQFSMSENRHRGGRRAQQEQAAQQDEVPQQQQLPPPPPMSIEQMFLMQTQVSSRIERHRLTS

SEQ ID NO: 67766 - protein, 50 aa, Zea mays
  Coding DNA Sequence Number=SeqID_25987
MGRPQRVTTTRWKGRATRHKAERRCFTGEPICPSRKAEECGEVSSSSKSS

SEQ ID NO: 67767 - protein, 173 aa, Zea mays
  Coding DNA Sequence Number=SeqID_25988
  Subcellular localization annotation: CTP_CleavageSite=39; ConfidenceScore=5.37e-01
MELSLPAEPSPFLPLPSSLSSRALLPGRDLATGARPHLLARTRARRPDRLRPPRPPRPSSLPLLCLRDRSPTPSCRALVAALRPRREPSVVAVVVVARVGACPCNTPTTVPTPFINRPPSVEPHRNSRPTVQTHRRSYAVRHRRDRAAHQLDHPRPRRSSSSVHPRLKRIKTI

SEQ ID NO: 67768 - protein, 185 aa, Zea mays
  Coding DNA Sequence Number=SeqID_25989
MTGGPNITVRRERRERWKRGLAVTMWAKGKGVVGPGFSHMSQGVDGKSHKEINSFISLIIWVLQYLPPGVVRNRVAAQPGPVPWAYTFHRPAQAYVIAFPYKRDPDSISAGKDYAASAGVALEAGSGQPHQRRRPPLHRRIAGDIDYLCTSSDNDLRFGWLDSSSDRLRASATVKRSLPPSSYGG

SEQ ID NO: 67769 - protein, 144 aa, Zea mays
  Coding DNA Sequence Number=SeqID_25990
MESLPIEKQQNFLSEKFNLTSVKLNLTFVELSISSSELSFSLAELNLTSDELNLTSVELSFSSYELNLTLAELNLTSNEKHSSQNQLNLPQGKFNLGFLSKPLRSIPLELDVGAVQLVSGLADQSNFLFPSLSVSLTTRRLNRL

SEQ ID NO: 67770 - protein, 75 aa, Zea mays
  Coding DNA Sequence Number=SeqID_25991
MAEPEVTAELATLRSSNATDKKMETTVVEIGILARAAETSTWSKKEVLKIFKIILSKATGKESLHKNFEYHNFQN

SEQ ID NO: 67771 - protein, 110 aa, Zea mays
  Coding DNA Sequence Number=SeqID_25992
MELRRLGPSCGTPFYHPTIEAHCCYPTTEVRVAVTLRAGKQSWISSLRGTEMVMAVGMNPATMDVVLELTRLHRELSPCPTMEEVDAAVDAEEARLAEITKEEKAARVLA

SEQ ID NO: 67772 - protein, 766 aa, Zea mays
  Coding DNA Sequence Number=SeqID_25993
  Subcellular localization annotation: CTP_CleavageSite=27; ConfidenceScore=5.45e-01
MSSSSLSAASASSATPSSEKTLSHSVVVELQPGHTVEFRTSRIFSGRVLEMQRLGISGAIGGTFGFMWLSRISKGCRVFPPAILCSHFYVVFPQFEVAKKDEDEGALRLNRVFELNHLSNGSYLEGDSADTADRRGKQTRPSTDEGPSRDKAPGAVDRKRKLGTTAEELGLRASDHFVGELLETRNIGVVVSVVMEKDRQDAQRKKRQYPVRVESGRLAVVLAASSASLVVAATEEKGDIGASKDPWARFCAGGEIASTATAAGVAASIAQQLKYATAFVERIASGALTLEFAAERRWLEGRIERLRTQHTEAVWDKLAAENKSCSLLEKLSIVEKAREDLSRRPAEEKAGAEKACAEAQAAHAEAEVVRAEAELALKCAADKESELKSIRSYCEKTEVSTRAGVKRAHTLFVEAYRKLSAQTAPFDKSGEEMGLRFLGWVQEELESLPSIVTGLMCYTYLVTCEGAANALSREGCRHFEVFDRASEDFDRGIFQVEDNVLKRSVGALYDRMWGPHGRGTIRERADRARAQMMNEEEVDDLTDLESSMTRMDDVEEVGGEGLSAPQDGSGEDPAAASAPVQVRTSRPAQANPDDIDINDVLMAANAMFLSGNVSEGSELGSWSSNEEEFGSPFSWVEESSEDDLDYFAVLDLAASESPPRSVPRKVLATSADVRAEDSRRRRMDVSKQSISESSQSGRRRRRMGMERSRLRGGLRLDRGAQRELLSSTSGTCIGEGDLQDLFEGEELRMMLFNFWEAGLIPKEEPM

SEQ ID NO: 67773 - protein, 161 aa, Zea mays
  Coding DNA Sequence Number=SeqID_25994
  Gene Ontology: Mol. function=protein dimerization activity
  Homolog annotation: Hit_ID=Q2QNH1; Match level="QueryCoverage=74%, HitCoverage=14%, E-value=2e-25, Identity=52%"; Hit description=HAT family dimerisation domain containing protein, expressed
MARRMEQGVEGSIVGVGERIEGFSSSMAIAKGIASKMGVEASFSVKRKAQGKKYFDENEYNEEILQAKKAFEVNYFLFVVDMENNSLKNRFQELQTFKIIFGLLLSSTTLKSLNDTELEACCSEFAKTFSSQDSFDVERRGARPVTKQIPRAKSRECSQQL

SEQ ID NO: 67774 - protein, 596 aa, Zea mays
  Coding DNA Sequence Number=SeqID_25995
  Gene Ontology: Mol. function=protein serine/threonine kinase activity; Cellular component=integral to membrane; Biological process=protein amino acid phosphorylation
  Homolog annotation: Hit_ID=Q8RZV7; Match level="QueryCoverage=99%, HitCoverage=63%, E-value=0.0, Identity=37%"; Hit description =Putative extra sporogenous cells
  Pfam annotation: Domain name=LRR_1; Domain location=1-23; Score=7.7; E_value=10; Accession=PF00560.23; Description=Leucine Rich Repeat
  Pfam annotation: Domain name=LRR_1; Domain location=121-143; Score =14.6; E_value=0.36; Accession=PF00560.23; Description=Leucine Rich Repeat
  Pfam annotation: Domain name=LRR_1; Domain location=145-167; Score =14.1; E_value=0.52; Accession=PF00560.23; Description=Leucine Rich Repeat
  Pfam annotation: Domain name=LRR_1; Domain location=169-191; Score =14.9; E_value=0.3; Accession=PF00560.23; Description=Leucine Rich Repeat
  Pfam annotation: Domain name=LRR_1; Domain location=193-215; Score =4.1; E_value=50; Accession=PF00560.23; Description=Leucine Rich Repeat
  Pfam annotation: Domain name=LRR_1; Domain location=217-239; Score =17.1; E_value=0.062; Accession=PF00560.23; Description=Leucine Rich Repeat
  Pfam annotation: Domain name=LRR_1; Domain location=241-263; Score =6.7; E_value=16; Accession=PF00560.23; Description=Leucine Rich Repeat
  Pfam annotation: Domain name=LRR_1; Domain location=25-47; Score =12.1; E_value=1.5; Accession=PF00560.23; Description=Leucine Rich Repeat
  Pfam annotation: Domain name=LRR_1; Domain location=265-288; Score =4.6; E_value=39; Accession=PF00560.23; Description=Leucine Rich Repeat
  Pfam annotation: Domain name=LRR_1; Domain location=289-311; Score =11.7; E_value=1.9; Accession=PF00560.23; Description=Leucine Rich Repeat
  Pfam annotation: Domain name=LRR_1; Domain location=313-335; Score =13.8; E_value=0.64; Accession=PF00560.23; Description=Leucine Rich Repeat
  Pfam annotation: Domain name=LRR_1; Domain location=336-359; Score =8.0; E_value=9.2; Accession=PF00560.23; Description=Leucine Rich Repeat
  Pfam annotation: Domain name=LRR_1; Domain location=360-382; Score =12.4; E_value=1.3; Accession=PF00560.23; Description=Leucine Rich Repeat
  Pfam annotation: Domain name=LRR_1; Domain location=384-406; Score =13.8; E_value=0.63; Accession=PF00560.23; Description=Leucine Rich Repeat
  Pfam annotation: Domain name=LRR_1; Domain location=408-430; Score =15.3; E_value=0.22; Accession=PF00560.23; Description=Leucine Rich Repeat
  Pfam annotation: Domain name=LRR_1; Domain location=432-454; Score =13.8; E_value=0.64; Accession=PF00560.23; Description=Leucine Rich Repeat
  Pfam annotation: Domain name=LRR_1; Domain location=456-479; Score =15.2; E_value=0.24; Accession=PF00560.23; Description=Leucine Rich Repeat
  Pfam annotation: Domain name=LRR_1; Domain location=49-71; Score =14.5; E_value=0.39; Accession=PF00560.23; Description=Leucine Rich Repeat
  Pfam annotation: Domain name=LRR_1; Domain location=516-538; Score =6.0; E_value=22; Accession=PF00560.23; Description=Leucine Rich Repeat
  Pfam annotation: Domain name=LRR_1; Domain location=540-563; Score =4.1; E_value=48; Accession=PF00560.23; Description=Leucine Rich Repeat
  Pfam annotation: Domain name=LRR_1; Domain location=564-586; Score =12.6; E_value=1.3; Accession=PF00560.23; Description=Leucine Rich Repeat
  Pfam annotation: Domain name=LRR_1; Domain location=73-95; Score=9.8; E_value=4.1; Accession=PF00560.23; Description=Leucine Rich Repeat
  Pfam annotation: Domain name=LRR_1; Domain location=97-119; Score =11.1; E_value=2.4; Accession=PF00560.23; Description=Leucine Rich Repeat
  Pfam module annotation: Pfam domain module=LRR_1::LRR_1::LRR_1::LRR _1::LRR_1::LRR_1::LRR_1::LRR_1::LRR_1::LRR_1::LRR_1::LRR_1::LRR _1::LRR_1::LRR_1::LRR_1::LRR_1::LRR_1::LRR_1::LRR_1::LRR_1::LRR
  Pfam module annotation: Domain location=1-23::121-143::145-167::169 -191::193-215::217-239::241-263::25-47::265-288::289-311::313 -335::336-359::360-382::384-406::408-430::432-454::456-479::49
MLKEIVLDRNSLSGQLIPAIAKLQQLAKLTISKNNISGELPPEVGSLKDLEVLDFHQNSFNGSIPEALGNLSQLFYLDASKNQLTGSIFPGISTLFNLLTLDFSSNDLAGPIPKEIARMENLECLVLGSNNFTGGIPKEIGNLKKLKKLILSACNLSGTIPWSIGGLKSLHELDISDNNFKSELPASIGELGNLTVLIAMRAKLIGSIPKELGSCKKLTLLRLSFNRLTGCIPKELAGLEAIVHFEVEGNKLSGHIADWFQNWGNVVSIRLGDNKFNGSILPAICQANSLQSLDLHLNDLTGSINETFKRCRNLTQLNLQGNHFHGEIPEYLAELPLTILELPYNNFTGLLPAKLFKSSTILEIDLSYNKLTGCIPESICELHSLQRLRMSSNYLEGSIPPAVGALKNLNEISLDGNRLSGNIPQELFNCRNLVKLNLSSNNLNGSISRSISQLTSLTGLVLSHNQLSGSIPAEICGGFTNPSHPESEYVQYHGLLDLSYNRLIGRIPPEIKNCVILEELHLQDNFLNESIPVELAELKNLMNVDLSFNALVGPMLPWSTPLLKLQGLFLSNNHLTGNIPAEIGRILPNIVVLSLS

SEQ ID NO: 67775 - protein, 196 aa, Zea mays
  Coding DNA Sequence Number=SeqID_25996
MAGWSGHVAQMVRTPDSPRGHSGISLSNIIELTMKNLSAEDQQEFKEHKKQLIKEAMVKYLANCKVDRHQKFVRQWETDLALLPPTTTAPNNGTHNLSDANGCSQPQPLYGVPMNSCVGQPQPFPPIWDKPTNLHTVKPSGPKLGLSNQAAVVSIFRDKPPRSMLGPPYSAQGLTNIVGPSTYDIGSSKYTTGPSA

SEQ ID NO: 67776 - protein, 261 aa, Zea mays
  Coding DNA Sequence Number=SeqID_25997
  Gene Ontology: Mol. function=protein serine/threonine kinase activity; Cellular component=membrane; Biological process=protein amino acid phosphorylation
  Homolog annotation: Hit_ID=Q9ASK4; Match level="QueryCoverage=90%, HitCoverage=33%, E-value=3e-99, Identity=75%"; Hit description =Putative LRR receptor-like protein kinase
  Pfam annotation: Domain name=Pkinase; Domain location=3-201; Score= -41.1; E_value=4.1e-06; Accession=PF00069.15; Description=Protein kinase domain
  Pfam annotation: Domain name=Pkinase_Tyr; Domain location=1-201; Score=-51.9; E_value=2.7e-09; Accession=PF07714.7; Description =Protein tyrosine kinase
  Pfam module annotation: Pfam domain module=Pkinase::Pkinase_Tyr; Domain location=3-201::1-201
MTECHIACHRLTHVGRGRPVMDWPTRVKIAAGSARGLAYLHEDCHPRIIHRDIKSSNILLDDQFEAQVADFGLARLAENDVTHISTRVMGTFGYLAPEYASTGKLTEKSDVFSFGVVLLELITGRKPVDSSRPLGDESLVEWSRPLLNRAIETQEFDELVDVRLEGNFDDVEMFRVIEATAACIRHSAARRPKMGQIVRVLDDSLTDVDLSNGVQPGKSQMFNVANTADIRQFQRMAFGSQDFSSDYSQSRPSIGSSRRDF

SEQ ID NO: 67777 - protein, 143 aa, Zea mays
  Coding DNA Sequence Number=SeqID_25998
MSGGGGGGGVAVGTGAGGGGGNAAGAGGGGNAAGGGGDDASGGGGALSSGEGGGGAEAAGGVEGEGSGGVGEAGEGGGGVGVEEDGTSVGGGVEALVGDEEEGGGPEAEPGVVNVFATLPTTAPAGGWTRVAILFCRSYNSCK

SEQ ID NO: 67778 - protein, 43 aa, Zea mays
  Coding DNA Sequence Number=SeqID_25999
MGSTLGCGTQGWWSTAEVKVMRPRADDPGVVKGECCVFIDEPE

SEQ ID NO: 67779 - protein, 127 aa, Zea mays
  Coding DNA Sequence Number=SeqID_26000
MEESDEKRNGSSDAPLTRDERTAGARGRHAVGALLDGASGSRRVGLGTWAARSGGARPWASGLRPGGWRVGCGVAALGVAASGTGRGAPGREAGRGPGGADLQEREGEGVKNGGGGCCLGRVGAQLE

SEQ ID NO: 67780 - protein, 108 aa, Zea mays
  Coding DNA Sequence Number=SeqID_26001
MGRTLCHRRNNSANVLPANPDGQDSALCRGIPVRNIVYRSTRSRWIARSTRCSEYIGHNVIRYHDVGPLYQYPASSDRLVTPCLLDNTIVLQDLDITTGDFRVATSSF

SEQ ID NO: 67781 - protein, 297 aa, Zea mays
  Coding DNA Sequence Number=SeqID_26002
MWRPLLPYTRVYSRRKNRPTSLMQAAANDSEIDVVLSMLAGESSESAQVESGEWSSWSIEMLGKRSAVLKVLIASEYVEQIFRLNLLSALEEAIPKDLLLELPKIKVVDVHVECPDDVPSTSLLAGQEVTLLDCHGSLAPEDAVIYSLSTASMDVHVGSPMPRSDDVVVTSFDLLVGLAGPATLEVSGHSTEDPMGAPGVEIAWTTPFLWRSVMFMILFLLMSFLLGVRRYHQPWDFPRSFPTFSSLTTLERSHRFTMAELERKRDELKESQDEVSKLSKSLSLKDSIIKELRTSKN

SEQ ID NO: 67782 - protein, 159 aa, Zea mays
  Coding DNA Sequence Number=SeqID_26003
MTPWGVLLGKLRASKVLQRAALALASFDAGHVFLGRVGREEEEQRKARVSEESGHRQAGYLKRAKVESLLPARSANSRKDFNSHSSFQEKEQMADTYSRNTAPEDSKVNRSGTTLPLHHIRLLFLDKTVYTTRSIHTHWVYNLDFSRISGAMRSVKYPQ

SEQ ID NO: 67783 - protein, 79 aa, Zea mays
  Coding DNA Sequence Number=SeqID_26004
  Subcellular localization annotation: CTP_CleavageSite=21; ConfidenceScore=5.22e-01
MAIIHRTVRWCTGLSGEPTVVSANGRSRNLRATRGRANGRLGTPDCPRLQVVEIPRKRENTLKKKTVVFKLIIGSLERG

SEQ ID NO: 67784 - protein, 87 aa, Zea mays
  Coding DNA Sequence Number=SeqID_26005
MMMRVNCEDRVVGGYLLVGRGAELLRAAFLEILAARISAALLQRELPIAFCSKIDLDKVGANWLLRRGVPKKTREVLALSTSWGIWE

SEQ ID NO: 67785 - protein, 213 aa, Zea mays
  Coding DNA Sequence Number=SeqID_26006
  Gene Ontology: Mol. function=ATPase activity, coupled to transmembrane movement of ions, phosphorylative mechanism; Cellular component=integral to membrane; Biological process=phospholipid transport
  Homolog annotation: Hit_ID=Q67VX1; Match level="QueryCoverage=99%, HitCoverage=17%, E-value=1e-103, Identity=89%"; Hit description =Putative Potential phospholipid-transporting ATPase 8
VPECIDKLAQAGIKMWVLTGDKLETAINIGFACSLLRQGMTQIIVTLEQPDIIALEKNGDKPKIAKASKQRVMGQIEDGIKQIPPSTQISTASFALIIDGKSLTYALEDDVKFKFLDLALKCASVICCRSSPKQKALVTRLVKEVTHKVTLAIGDGANDVGMLQEADIGVGISGAEGMQAVMASDVAVAQFRFLERLLLVHGHWCYRRISLMV

SEQ ID NO: 67786 - protein, 118 aa, Zea mays
  Coding DNA Sequence Number=SeqID_26007
MRLSTTARAYWRSIERARLDGSDDSNEASSKEVEDSSDSEEWSSGKGDSGEDDGSNGDDDDKGNSDGEGGDGDGEGGDGEGNGEGDSDGDNKGNSSDGKGDDKDDGGDGKADGIMLLA

SEQ ID NO: 67787 - protein, 123 aa, Zea mays
  Coding DNA Sequence Number=SeqID_26008
MATPPSTLIPRQATPPDDHPSCEAHHDSCPRNSLHDRPCTMLATTATPCAAAKSGEEGELTRPGGHPDALRLQPLHGSAIRLHGSAQHPPVATHSALGTLSLPASSRGQEAATQRGLQVAQRE

SEQ ID NO: 67788 - protein, 66 aa, Zea mays
  Coding DNA Sequence Number=SeqID_26009
MGEEFVLPFSDFPTSDSGTLMLTPLSLYLTSTGFEVASPGHRDVVGFSAIANAHAGRCKLCNMFEL

SEQ ID NO: 67789 - protein, 198 aa, Zea mays
  Coding DNA Sequence Number=SeqID_26010
  Gene Ontology: Mol. function=DNA binding; Cellular component=nucleus; Biological process=regulation of transcription
  Homolog annotation: Hit_ID=Q9SDW0; Match level="QueryCoverage=52%, HitCoverage=31%, E-value=1e-12, Identity=36%"; Hit description =Transcription factor GT-3a
  Subcellular localization annotation: CTP_CleavageSite=34; ConfidenceScore=5.16e-01
MARCAGWPPGFESNKPDADLGPSRRKAAPARRRRCEATASSPVAAPPPGYGALVPVKTEEPVPVATVSSPPRALSPPRLCRIIELHTFQNCRQPHRRQLHAAGLPSHAWPPPAAVGYGMMEVGGTGAGGRDERVPQWGAQETRELIMARGEMERETVAACRSAKTMWEAIAARLQERGYRRTAEQCKCNWKNLVNCYK

SEQ ID NO: 67790 - protein, 92 aa, Zea mays
  Coding DNA Sequence Number=SeqID_26011
MGGAARDGAVMGHDEEARRGGGDGDGSRRWVTAMAMGHNEEQRDDGSRRWGTARRRARRGPGTPMGHDEEAGATMAGAAMGHGEEAGTEMVF

SEQ ID NO: 67791 - protein, 88 aa, Zea mays
  Coding DNA Sequence Number=SeqID_26012
  Gene Ontology: Mol. function=DNA binding; Cellular component=nucleus; Biological process=regulation of transcription, DNA-dependent
  Homolog annotation: Hit_ID=Q6YZE8; Match level="QueryCoverage=71%, HitCoverage=13%, E-value=1e-23, Identity=79%"; Hit description=SBP -domain protein-like
  Pfam annotation: Domain name=SBP; Domain location=18-77; Score=60.9; E_value=4.3e-15; Accession=PF03110.5; Description=SBP domain
MKRPRLRPGGAGGAQCPSCAVDGCKADLSKCRDYHRRHKVCETHSKTPIVVVTGREMRFCQQCSRSPIVICKKTKGMSSYALNIFSNY

SEQ ID NO: 67792 - protein, 55 aa, Zea mays
  Coding DNA Sequence Number=SeqID_26013
MAELAARTPAAYQSAASDDHASVGYERLAVGPHGQSQRGKRTRPQLWSRLAQAAR

SEQ ID NO: 67793 - protein, 64 aa, Zea mays
  Coding DNA Sequence Number=SeqID_26014
MSQDKKVVAEMKLSLSEEKNLGFLESIAKTNTELLGAFGFRSVKKYKEYEGWCRAEVMSRRASA

SEQ ID NO: 67794 - protein, 356 aa, Zea mays
  Coding DNA Sequence Number=SeqID_26015
  Gene Ontology: Mol. function=protein serine/threonine kinase activity; Cellular component=integral to membrane; Biological process=protein amino acid phosphorylation
  Homolog annotation: Hit_ID=Q5VQM7; Match level="QueryCoverage=94%, HitCoverage=29%, E-value=1e-154, Identity=81%"; Hit description =Putative receptor-like protein kinase INRPK1
  Pfam annotation: Domain name=APH; Domain location=26-207; Score= -10.8; E_value=0.033; Accession=PF01636.13; Description =Phosphotransferase enzyme family
  Pfam annotation: Domain name=Pkinase; Domain location=24-301; Score =125.1; E_value=1.9e-34; Accession=PF00069.15; Description=Protein kinase domain
  Pfam annotation: Domain name=Pkinase_Tyr; Domain location=24-301; Score=70.9; E_value=4.1e-18; Accession=PF07714.7; Description =Protein tyrosine kinase
  Pfam module annotation: Pfam domain module=APH::Pkinase::Pkinase_Tyr; Domain location=26-207::24-301::24-301
MLPPWDVTLYQKLDITVGDVARSLTPANVIGQGWSGSVYRASVPSTGAAIAVKRFRSCDEASAEAFACEVGVLPRVRHRNIVRLLGWAANRRTRLLFYDYLPNGTLGGLLHSAGGGSAGAAVVEWEVRLSIAVGVAEGLAYLHHDCVPAILHRDVKADNILLGERYEACLADFGLARVAEDGANSSPPPFAGSYGYIAPEYGCMTKITTKSDVYSFGVVLLEAITGRRPVEAAFGEGRSVVQWVREHLHQKRDPADVVDQRLQGRADAQVQEMLQALGIALLCASARPEDRPTMKDAAALLRGLRSDDGSAEARKVSGSRPPPLDSARWAAASSPAKPTALPRPSPSASSSLAYSM

SEQ ID NO: 67795 - protein, 39 aa, Zea mays
  Coding DNA Sequence Number=SeqID_26016
MTAEPELRRGSHDSVTNTPGTSAPQDDEAVLQNLIEFQM

SEQ ID NO: 67796 - protein, 130 aa, Zea mays
  Coding DNA Sequence Number=SeqID_26017
  Gene Ontology: Mol. function=RNA-directed DNA polymerase activity; Cellular component=mitochondrion; Biological process=RNA-dependent DNA replication
  Homolog annotation: Hit_ID=UPI00005A975E; Match level="QueryCoverage =98%, HitCoverage=8%, E-value=7e-40, Identity=60%"; Hit description =PREDICTED: similar to Retrovirus-related Pol polyprotein from transposon 297
MTNVEQVVRTCEGCQYYARQTYMLSQALHTIPVTWPFVVWGLDLVGPFKKAPEGCSDLLVVVYKFNKWIEARPIAKLMSSEAATSFSDIIYQFGVPNSIITDNGTHLLGNLSYISAMTSTSVSTGRLWST

SEQ ID NO: 67797 - protein, 63 aa, Zea mays
  Coding DNA Sequence Number=SeqID_26018
  Subcellular localization annotation: CTP_CleavageSite=23; ConfidenceScore=5.22e-01
MAMMGSTSKKMYLCQVKKQQTFVASVPKSYQKKRIKTKSCERKGPPLKTVTFYLGGVFASHVM

SEQ ID NO: 67798 - protein, 50 aa, Zea mays
  Coding DNA Sequence Number=SeqID_26019
MGIANKNSLKDGIKTKLARWKRKGNNQGSNILKYMLAQMTILNKKYRRVT

SEQ ID NO: 67799 - protein, 84 aa, Zea mays
  Coding DNA Sequence Number=SeqID_26020
MGEKQGKSRLGKMPGRGTRHHRRALGHAGRAGSAAAMGDGGQAGAERAQRRDQEELFISESVDLSEKQQTDKTDFGFNNLLCLI

SEQ ID NO: 67800 - protein, 107 aa, Zea mays
  Coding DNA Sequence Number=SeqID_26021
MSGAQGSGTQGFMAGEVGQLTAIGFHESRELADIRAMAVAAVRIARITLTARAHAEVRVLRAGERVLACGPDFTATQDDAWVRQRTGPRVRKTPMGQIGDSRISFRV

SEQ ID NO: 67801 - protein, 72 aa, Zea mays
  Coding DNA Sequence Number=SeqID_26022
  Homolog annotation: Hit_ID=Q10DP6; Match level="QueryCoverage=68%, HitCoverage=16%, E-value=1e-08, Identity=59%"; Hit description=Maf -like protein, expressed
MARVACTLRGKRLDGGVSMLSVGYSDDQAFAVNFVLVTNLSTGVTKGGRDIPEVNTMDIVQGVPRELTEKLI

SEQ ID NO: 67802 - protein, 47 aa, Zea mays
  Coding DNA Sequence Number=SeqID_26023
MAAETVRGDIRRQQSPSMRCIGGRPPPTTCDLMALETKISSKFARMQ

SEQ ID NO: 67803 - protein, 1004 aa, Zea mays
  Coding DNA Sequence Number=SeqID_26024
  Gene Ontology: Mol. function=binding
  Homolog annotation: Hit_ID=Q7EY18; Match level="QueryCoverage=94%, HitCoverage=59%, E-value=0.0, Identity=72%"; Hit description =Putative tetratricopeptide repeat(TPR)-containing protein
MAPKSRRGKAKGEKKKKDEKAYQSDSVLYVVIVVLPVAIDITVNLPDQSHVILKGISTDRIIDVRRLLCVNTATCAITNYSLTHEMRDGALKDAADIATLKPCTLTLVEEEYSEESAVEHVRRLLDIVACTTCFGPAPPPPPPPSPKDADAAKETSSSSSTSKAVASASSGGRRTASPPPASPSSAAAKESSAAKEAAAKESAAAVELEAEMSGACPRLGAFYEFFSLANLTPPLQFVRRVLQPRQEEQPSDDHLFFLEAKLCSGKFLVVEARRKGFFSLGKQRVLCHNLVDLLRHLSRAFDNFGNFPYGFRANTWLVPPIAAQSPSTFPPLPAEDETWGGSGGGWGRDGKSDMVPWADEFLYLTSMPCKTAEERELRDRRAFLLHSLFVDVAIFRAIAAVRHVMEGTELSASTNIDEVLYSETVGHFSITVTRDSSDASCKMDTKIDGNRATGMDSKDLAERNLLKGITADENTAAHDVDSLGIINLRYCGYVAVAKVDNIDKTKVNASIKPMNIADQPEGGAHALNINRMLLNEATSTGEKKISNLSQNHRQEELIAAQTFVEKLLKESLQKLEEEENVKHSFMRWELGACWVQHLQDQKNSDKDKKQGGEKDKKKTLDKSKEPKIEGLGKPLKALKNAKNVDSADLGSSAGPKSSAESQKDKPSDVKLPQGESSASENENLLKDLLPESAFTRLKESETGLHQKSPPELIEMALKYYDEVALPKLVADFGSLELSPVDGRTLTDFMHTRGLQMRSLGRVVKLSEKLSHVQSLCVHEMIVRAFKHIVRSVIAAISDIRQLALTIAAALNLLLGVPESDVSGSSPNVHPLVWRWLVIFLKKRYEFELTEKHYHDVRKYAVLRGLCHKQVACSSADGRQLLESSKTALDKGKLEDAVNYGTKALSKLITVCGPYHRMTAGAYSLLAVVLYHTGDFNQHEQTTLQILRAKLGPDDLRTQDAAAWLEYFESKVIEQQEAARNGTRKPDASIASPTIPIINASLNPY

SEQ ID NO: 67804 - protein, 184 aa, Zea mays
  Coding DNA Sequence Number=SeqID_26025
  Gene Ontology: Mol. function=nucleic acid binding; Cellular component= intracellular; Biological process=DNA integration
  Homolog annotation: Hit_ID=Q8H6I0; Match level="QueryCoverage=99%, HitCoverage=12%, E-value=2e-65, Identity=64%"; Hit description =Putative gag-pol polyprotein
MSGAHAKKEMVTGEKPATSHGKAPSGESGNKKREESPPRVKSHWSGDKKKKMKKVVYYETDSSLPSTSGSDTTSVTYKSHERKKFSKIPLRYPHISKHTPLLSVPLGKPPVFDGEDYCMWSDKMRHHLTSLHASIWDIVEFGAQEPSMGDEGYDSDEVAQIRHFNSQATTILLASLSQEEYNKV

SEQ ID NO: 67805 - protein, 182 aa, Zea mays
  Coding DNA Sequence Number=SeqID_26026
  Homolog annotation: Hit_ID=Q84VD2; Match level="QueryCoverage=47%, HitCoverage=33%, E-value=8e-18, Identity=56%"; Hit description =Myosin-like protein
  Pfam annotation: Domain name=DUF827; Domain location=9-180; Score= -114.0; E_value=0.06; Accession=PF05701.2; Description=Plant protein of unknown function (DUF827)
MTIGELYCRRAHRTVRKRCKPISLSVIAIKTSQNSNEGSTKELKAIVLELQQELQAKDVQISTISSDLSCQLRAAESSAKQFSVDLEDARMELQNLEKQVDVLQNQKKDLETQLNEHKNMESMASEQRGRIEKLTDELSRKDQEIEGLVQALNEEEKELEILENKSLQLEQMLQEKEFALKT

SEQ ID NO: 67806 - protein, 188 aa, Zea mays
  Coding DNA Sequence Number=SeqID_26027
MTEKDASDAKPGLIRLRYKYKFEDEFGEPCDEWLDSIEASAMRFLATIANRRSKHCIEPFCRERNETKKRKKQMMKVTTKHHKILKVKPEVTTSHTSEETAIMLDEEKTGSMKPATTSDKGKGPAEIEEAKKDIEYDTPVGEGPFDQEFGDRRYRVHHLAEKVMSAKQVAEAIGFAEQLGCPSRCTIF

SEQ ID NO: 67807 - protein, 146 aa, Zea mays
  Coding DNA Sequence Number=SeqID_26028
MVSASQILELSKDYKAKFYLQKPDSTRISVDSDKRAGKHGLDQSRSISNNISCSVTGGRNPTFQVKDGEVGQQDAGHQSASHVFQIIDYSRFVSQQDAGHQGCHHQIFHEIHPGSSSGEVKGELITNKVIAGPTSPLCFSLKACAP

SEQ ID NO: 67808 - protein, 163 aa, Zea mays
  Coding DNA Sequence Number=SeqID_26029
MPRCIIFKNQPLENEEDLWIMFRPIVCTNETTLIPRAQPRDAASSLDGNEDDDLVHLGDNLNPKPNTKAKGMRQVLHDSPLLKKKKDIMDEYMKRIVQAIKSRTFSSKKTVTSFDNDLMSDTDNKVTNEGYLLALLAMYIWKYRDNAELQMYLWLERRKIYED

SEQ ID NO: 67809 - protein, 79 aa, Zea mays
  Coding DNA Sequence Number=SeqID_26030
MKERGDRGEDGITLGGKLEMEARNGPKGALPSTDTECIYFVKGISKCPISVENISVYQDGVYHVYRILVSTRMVSTMYP

SEQ ID NO: 67810 - protein, 431 aa, Zea mays
  Coding DNA Sequence Number=SeqID_26031
  Homolog annotation: Hit_ID=Q6QP54; Match level="QueryCoverage=19%, HitCoverage=29%, E-value=6e-17, Identity=73%"; Hit description =Putative kinase
  Subcellular localization annotation: CTP_CleavageSite=59; ConfidenceScore=5.71e-01
MRKDAPTRRSTPPLPPSPTLTRTPPFRPGRRRLGLRPRPTSTRCRYPHPHTSLRPWDVVVAYFSVIFVIVVRPWGSNASSSNIQEHTDMKMDDDGDDYTFDAAQPLHYLRFVGDAGIMGPPLLYSIFKRPKSLPWVAPVEPETTIVPLGWLLLVDRNPSPSPTPADKTESDDNLRWVLTAETGRHILLSHIASHEGLYYLSGTIIRGTLKTPNSQLSETDRQSGLAKGAIGSSARPRARTRAQPRKMANSALPDPGLGLGLKPRKTANSAPPDPGLGLGLKPQKMANSALPDPGLGLGLKPRKTVNSAPPDPGLGLGLKPRKTANSAPPDPGLGLGLRPRKTANSAPPDPGLGHGLRPRKMANSAPPDPGLRLELSPRRRRTPLRPTPGLGLRPGLCRTTSASPDPGARARPRPWKTDSTSASEEPPRRPT

SEQ ID NO: 67811 - protein, 110 aa, Zea mays
  Coding DNA Sequence Number=SeqID_26032
MTVIEILFELDNTTVLVTEEEFCDLSLDTMSGDLVIHDHVEEVVDESGMEPHENASKNDVEEATPPAIHGGESMSSLMLMRLVMLTDYATLAREAVRTPKLDELTRLTVW

SEQ ID NO: 67812 - protein, 36 aa, Zea mays
  Coding DNA Sequence Number=SeqID_26033
MLMEGQEFEDSGLAVGVRTIQKSVYYVTEVLNEAKA

SEQ ID NO: 67813 - protein, 115 aa, Zea mays
  Coding DNA Sequence Number=SeqID_26034
MMPWASHVQGQADATGDKSHTCHMDCSAWGKREWARRRYEGGVSSGLGGAVRQELVGMRYGADRVEGQMEIGGRRADMWAPRPGGDGGASAARGAEGRPWRLGVAHARVAGSATR

SEQ ID NO: 67814 - protein, 875 aa, Zea mays
  Coding DNA Sequence Number=SeqID_26035
  Gene Ontology: Mol. function=transferase activity, transferring glycosyl groups; Cellular component=membrane; Biological process =protein amino acid glycosylation
  Homolog annotation: Hit_ID=Q2QM83; Match level="QueryCoverage=76%, HitCoverage=100%, E-value=0.0, Identity=68%"; Hit description =Galactosyltransferase family, putative, expressed
  Pfam annotation: Domain name=Gal-bind_lectin; Domain location=160 -388; Score=137.3; E_value=4.1e-38; Accession=PF00337.12; Description= Galactoside-binding lectin
  Pfam annotation: Domain name=Galactosyl_T; Domain location=434-624; Score=66.9; E_value=6.3e-17; Accession=PF01762.12; Description =Galactosyltransferase
  Pfam module annotation: Pfam domain module=Gal-bind_lectin::Galactosyl _T; Domain location=160-388::434-624
MKRARSSEVFIGVGRLRARRGLAPLLAAAAFAYLLFVSVKLTYLGSAGPAPAVGRLATTGAGEPAARARSSGGGAVSGYGRITGEILRRHEAFEERRKRWGQLGNFTELERVAAEAWALGAAAWEEASAFDGDVDYIASRDVAGEGTAKCPGSLALGAGETTAFLPCGLAAGSAVTVVGTARTARPEYVEALERSGTGNGTVLVAQFAVELRGLRATDGEEPPRILHLNPRLRGDWSSRPVLEMNTCFRMQWGRAQRCDSTPSGDDDLVMMASFRPLYLFLQLVDLAVDGLRKCEKWDWQDVVESKETKTSSWFNRFIGRAKKPEMRWPFPFSEGKMFVLTIQAGVEGYHINVGGRHVASFPHRMGFALEDATGLAVTGGIDVHSVYATALPKAHPSFSLQQVLEMSERWKARPVPEEPIHLFIGILSATNHFAERMAIRKTWMQFPAIQSGNAVARFFVALSHRKEINAALKKEAEYFGDIVILPFIDRYELVVLKTVAICQYGVHNVTADYIMKCDDDTFVRLDIVLHQISTYNKTSPLYLGNLNLLHRPLRRGKWAVTYEEWPEAVYPPYANGPGYVISAGIARDVASRHTNHSLRLFKMEDVSMGMWVEDYNASAPVQYVHSWRFCQFGCVDNYFTAHYQSPRQMLCLWEKLSAGRAHCCASRLMTFVPFAWLRWFGSIRPSAQMTNARNHDLDTACSLVLRLKAAGLFVELQIRTHWNGKLSPLCGFGAQRTAAGPVDRRDKETRAVSGGFAKTLPRLQARRQAIGETSGVVEGSRPSLPLSRPLAPSPPAFSPPATDGAHCAGSQPRLSPERLRSPHRVGVALYWHHPGPRALLAPDRRGVARRPVPARRPFRAIPALIRTCFVALLPD

SEQ ID NO: 67815 - protein, 86 aa, Zea mays
  Coding DNA Sequence Number=SeqID_26036
MADSKDLNNVSPSNDIRLIMDDLSVYEHKEFEDYMKKLDEEDQRRRAQLHEECYGTLSLRARCVARLALGNKAPKGCPWGDALGGM

SEQ ID NO: 67816 - protein, 85 aa, Zea mays
  Coding DNA Sequence Number=SeqID_26037
  Subcellular localization annotation: CTP_CleavageSite=38; ConfidenceScore=5.33e-01
MAGPPSASAGPRAHVVGSRGPRASGLVVGEFRDSDAVRASPGRPQPTAVATAACLSVPPHVRPRNLMTASGDVQWKEMKQSQSMR

SEQ ID NO: 67817 - protein, 207 aa, Zea mays
  Coding DNA Sequence Number=SeqID_26038
  Gene Ontology: Mol. function=sequence-specific DNA binding; Cellular component=nucleus; Biological process=regulation of transcription, DNA-dependent
  Homolog annotation: Hit_ID=Q94LW3; Match level="QueryCoverage=93%, HitCoverage=61%, E-value=1e-102, Identity=92%"; Hit description=KNOX family class 2 homeodomain protein
  Pfam annotation: Domain name=ELK; Domain location=111-132; Score =27.7; E_value=4.2e-05; Accession=PF03789.4; Description=ELK domain
  Pfam annotation: Domain name=KNOX2; Domain location=6-53; Score=48.7; E_value=1.9e-11; Accession=PF03791.4; Description=KNOX2 domain
  Pfam module annotation: Pfam domain module=ELK::KNOX2; Domain location=111-132::6-53
MRAGMRPYMWVQAQYLMLLCSFREQLQQHVRVHAVEAVMACREIEQSLQDLTGVTLEEGTGATMSEEDEDEAPMLEVGLVDMGSDGHDMMGFGPLLPTDSERSLMERVRQELKIELKQGFKSRIEDVREEILRKRRAGKLPGDTTSILKQWWQQHSKWPYPTEDDKARLVEETGLQLKQINNWFINQRKRNWHNNSQTSTLKSKRKR

SEQ ID NO: 67818 - protein, 209 aa, Zea mays
  Coding DNA Sequence Number=SeqID_26039
  Gene Ontology: Mol. function=transferase activity, transferring glycosyl groups; Cellular component=chloroplast; Biological process =tryptophan biosynthetic process
  Homolog annotation: Hit_ID=Q10SD6; Match level="QueryCoverage=62%, HitCoverage=33%, E-value=1e-42, Identity=70%"; Hit description =Anthranilate phosphoribosyltransferase, chloroplast, putative, expressed
  Pfam annotation: Domain name=Glycos_trans_3N; Domain location=74-138; Score=58.2; E_value=2.6e-14; Accession=PF02885.7; Description =Glycosyl transferase family, helical bundle domain
  Subcellular localization annotation: CTP_CleavageSite=48; ConfidenceScore=5.70e-01
MAAASLKFASPKPLASAPSALLCGRRAQARPLPASRLPPPTRVAVHPPAAPVATRIGSFDKVASFRLLLSWRWRWRQVLEALIGGTDFSEEDAEATLKLLLDEKDEARISAFLVLLRAKGETFEEIVGVAKAMLSCCIRVDGLVDAVDIVGTGGDGADTVNISTGSTILAAAAGAKVAKQGSRASSSACGSADVLEALGVNIELGPEVF

SEQ ID NO: 67819 - protein, 160 aa, Zea mays
  Coding DNA Sequence Number=SeqID_26040
  Gene Ontology: Mol. function=small conjugating protein ligase activity; Cellular component=synaptonemal complex; Biological process=protein modification process
  Homolog annotation: Hit_ID=Q0PMR8; Match level="QueryCoverage=89%, HitCoverage=95%, E-value=5e-78, Identity=88%"; Hit description =Putative E2 SUMO conjugating enzyme
  Pfam annotation: Domain name=UQ_con; Domain location=25-159; Score =201.9; E_value=1.5e-57; Accession=PF00179.16; Description=Ubiquitin -conjugating enzyme
RGRAEEEEVAAAATASMSGGIARGRLAEERKAWRKNHPHGFVAKPESLPDGTVNLMIWHCTIPGKQGTDWEGGYFPLTLHFSEDYPSKPPKCKFPQGFFHPNVYPSGTGWRPAITVKQILVGIQDLLDQPNPADPAQTDGYHLFIQDPTEYKRRVKLQAK

SEQ ID NO: 67820 - protein, 218 aa, Zea mays
  Coding DNA Sequence Number=SeqID_26041
MSPCPTTGAGPSERAQEIARRREEMLHDLPESEYELSLTDLVEKAAGGGDCGEAAPAPMAEGKDPGASRPAPGGQLPPAAARRASARRRDSGGSFRFRSSSDGVLLNFYMPRSLTRSFTAPRPARTPSSASGCRSPTIASDCSKRERDSDAETVKCWSLLWDRRWRKSSRRDPGAPPSESESAIRAASVVKAKRPSTPLRRPISEPTFFRPSPAPPAG

SEQ ID NO: 67821 - protein, 571 aa, Zea mays
  Coding DNA Sequence Number=SeqID_26042
  Gene Ontology: Mol. function=protein serine/threonine kinase activity; Cellular component=membrane; Biological process=protein amino acid phosphorylation
  Homolog annotation: Hit_ID=Q10SE3; Match level="QueryCoverage=70%, HitCoverage=77%, E-value=1e-165, Identity=73%"; Hit description =Protein kinase domain containing protein, expressed
  Pfam annotation: Domain name=Pkinase; Domain location=126-397; Score =133.8; E_value=4.6e-37; Accession=PF00069.15; Description=Protein kinase domain
  Pfam annotation: Domain name=Pkinase_Tyr; Domain location=126-397; Score=155.6; E_value=1.3e-43; Accession=PF07714.7; Description =Protein tyrosine kinase
  Pfam module annotation: Pfam domain module=Pkinase::Pkinase_Tyr; Domain location=126-397::126-397
ANPYYPADTKLLKKHLQQQATPTPTPTKDIQEIVRRQQEPAVQLAKAVPQPQPQPQTPPPPPPPQHRPPARKTPGSGVSATTSGGSERDGATPRSTGSGAGLPEVSHLGWGHWFTLRELEEATGGLAEENVIGEGGYGIVYKGTLHDSTLVAVKNLLNNRGQAEKEFKVEVEAIGRVRHKNLVRLLGYCVEGAYRMLVYEYVDNGNLDQWLHGDVGEVSPLTWDIRMNIMLATAKGLAYLHEGLEPKVVHRDIKASNILLDQQWNAKVSDFGLAKLLCSERSYVTTRVMGTFGYVAPEYASTGMLNERSDVYSFGVLIMEIITGRCPVDYTRAAGEVQLVEWLKNMVAERKAEEVVDSKMAERPPPKTLKRALLVALRCVDPDANKRPKMGHVIHMLEMDDLQFRDDKRPGAGRDGRRPQGPDRLVVDVDVDVDGSKNKGLEDFAEKKTTGRGAHNNVAGGNQRVLSCQLDEVCGSSAGGSPGLKPRTKQPLSIPSDVLDILNCSQITSSKNMSSAADKRHNQSLFLSGPFMQLAHGPGKRPQQTATYVTEIDNQSAQAKFLVSVIIMTKP

SEQ ID NO: 67822 - protein, 64 aa, Zea mays
  Coding DNA Sequence Number=SeqID_26043
  Subcellular localization annotation: CTP_CleavageSite=51; ConfidenceScore=5.38e-01
MANIQASLRTITSSQQQIGKNKKNYTSPLALAQYKAPMAAREESSGSSCCRSSEVRTRLADQCN

SEQ ID NO: 67823 - protein, 273 aa, Zea mays
  Coding DNA Sequence Number=SeqID_26044
  Homolog annotation: Hit_ID=Q9FF25; Match level="QueryCoverage=62%, HitCoverage=49%, E-value=2e-33, Identity=43%"; Hit description =Arabidopsis thaliana genomic DNA, chromosome 5, P1 clone:MXI10
MSIPPERYSCACTVHLKKRAIYRADKQANCPEERLSTSHLFAVFHLPFTSRAACATTRATAAALRPAAHVFVGPFAGDGNPPHQVNTVASNSCFGKLHENLVVPTVVNGGILAFYFVLWGKGLLACGPLVHSDLRAAHMNLHDCIWGWGVALTLLGLCNSFGSEPVEKAAQTIGVKAMMVPITAGILSALRRVLARRVSLKNQLKRRLHAITIASATCFLFPFAMWDTILGSASDSIVKLQLPSWAYFSTVLFGMVLIFYVDNVAEEKSQSEP

SEQ ID NO: 67824 - protein, 348 aa, Zea mays
  Coding DNA Sequence Number=SeqID_26045
  Gene Ontology: Mol. function=tRNA isopentenyltransferase activity; Biological process=tRNA processing
  Homolog annotation: Hit_ID=Q5N7L0; Match level="QueryCoverage=93%, HitCoverage=92%, E-value=6e-87, Identity=58%"; Hit description =Cytokinin synthase-like
  Pfam annotation: Domain name=IPPT; Domain location=88-292; Score=7.8; E_value=2.1e-11; Accession=PF01715.8; Description=IPP transferase
  Pfam annotation: Domain name=IPT; Domain location=54-284; Score= -115.4; E_value=0.0011; Accession=PF01745.7; Description=Isopentenyl transferase
  Pfam module annotation: Pfam domain module=IPPT::IPT; Domain location= 88-292::54-284
  Subcellular localization annotation: CTP_CleavageSite=29; ConfidenceScore=5.26e-01
MAAAAVAGIVSNDAPRKRPRRPPSGVRMEAMSRGGGCCCSSSDKKLEAAEPATTRLVVIVGATGPGKTKLSIDAAVALGGEVVNADKIQLYAGLDVTTNKVPHADRRGVPHHLLRAVRADAGELPAPSYRALAAEAAASVAARGRVPVVAGGSNSLIHALLAADSLGAGDPFKVDDGYRPSLRFPCCLLWVDVDGAVLDEYLDRRVDDMVREGMVEELREYFASAPPASHAAGLGKAIGVPELGAHFAGRKSLAAAIDEIKANTRVLAAAQVRKIRRMAGAWGWPVRRLDATPTVRARLAGAGRAAEAAAWERDVRGPGLAAMRQFLDGHEQQERWPLARRQCRGMVV

SEQ ID NO: 67825 - protein, 60 aa, Zea mays
  Coding DNA Sequence Number=SeqID_26046
MDCGLIQTFAKISLAIKSSEEISGTNTISLPRGEQRRTEPRRPTTLRRGQPPTPERHPQS

SEQ ID NO: 67826 - protein, 73 aa, Zea mays
  Coding DNA Sequence Number=SeqID_26047
  Subcellular localization annotation: CTP_CleavageSite=45; ConfidenceScore=5.47e-01
MAGSARPARPRPGRLGQPPAVPPAGARAGRSGLPVADWQCGTGTSSGTRRTTAQVHNGTSTTVNREQTTGGQV

SEQ ID NO: 67827 - protein, 182 aa, Zea mays
  Coding DNA Sequence Number=SeqID_26048
  Gene Ontology: Mol. function=zinc ion binding
MADHFALMTGRLLTESTLQSAIQEAFADAVASTAAGYDRTDPSAVPEDVQPGMGVGKGKGKSGVMVECRICQEEGDEAYMETPCCCKGSLKARLISSASLFGELEKYGKTSVLVMVKPRIRLMLLLFRTAGIVIPVYIILVSVTALLHWCNQRRIFRIQVVHETTVSEPRGAGGLQHIINIR

SEQ ID NO: 67828 - protein, 66 aa, Zea mays
  Coding DNA Sequence Number=SeqID_26049
  Subcellular localization annotation: CTP_CleavageSite=43; ConfidenceScore=5.05e-01
MVRRVTGQSDAHPKKEGGQSTNPMTAADQSVQLSSRLFIGSVRDNFTKANFTGIRSCGITQIGGGG

SEQ ID NO: 67829 - protein, 63 aa, Zea mays
  Coding DNA Sequence Number=SeqID_26050
MGISSPRVERESWLMGKMVRDTRIMLWFWFDYDDVVSSMRKWFTGEGEAVEGDFQEFQDYDEF

SEQ ID NO: 67830 - protein, 208 aa, Zea mays
  Coding DNA Sequence Number=SeqID_26051
MPDDRQGGTPTDEWDSHTLIRSTLQCTHSYTEEVSSLRICDTDSAFFVPAPKERESQAASRRDARWIARSCSSSDSRPCSSSPTSLTSSRRRLPTSATPITTLLTTNIRIRRIIPTRLIPIRTRRIIPTRTRRTTTSTPTPPRQSYRSHVWMRLDSAAQWSCNSVPPARTSEPARPLCLGVARTVGCLLNSFGYLLCMSVVTLSAFCK

SEQ ID NO: 67831 - protein, 163 aa, Zea mays
  Coding DNA Sequence Number=SeqID_26052
  Gene Ontology: Mol. function=selenium binding; Biological process =cell redox homeostasis
  Homolog annotation: Hit_ID=Q1SPM5; Match level="QueryCoverage=81%, HitCoverage=59%, E-value=2e-47, Identity=65%"; Hit description =SelT/selW/selH selenoprotein
MTDMESLWGGLTDRSNVLGWGTAVTMKRMLETSFPGIHVILHNYPPPFPKRVLSKVIPIVQVGAVATIMAGDQIFPRIGMVAPPWYYSLRANRFGTMATIWLFGNFAQSFLQSSGAFEVYCNGDLVFSKLAEQRFPSEFELRDLVGSRLPGSPFGRNPGKTLT

SEQ ID NO: 67832 - protein, 215 aa, Zea mays
  Coding DNA Sequence Number=SeqID_26053
MGEDASATNSSTEAVERVVASTGLPHQKPRGHSDGRTQAPTTIQPRRSGEQRHLLVLPPPKTKQNEVPVDQAPRFEQRKANSPTNAVAACGASDRDLRHHHPVKKAGVGYEPASHLNLQPSLIHVRTEKMLHRMNSPKMRRKPTKLNVEEHRQDSTASGQLLTTPPFKVQPKRRNEKRFSSIVGTNDMILRGEEDQERVGRSTLELEHISFKAKP

SEQ ID NO: 67833 - protein, 191 aa, Zea mays
  Coding DNA Sequence Number=SeqID_26054
MTPEASVISPWMASVALSTNELLRRVKGTVRKADYSVVVPMRPEQGLHVPDMQENDVDLTAIVDKYFVQAHPATRQLITMASACGALRRSMSLASKVWATTLWLSAGLISGHPIFGGLGFRAIPGGMCRVFAMEKIVKPSLLRDSAIASASSVAVAALLRGVLMATSSVSSLLLIGDGVHLGLVTVWPTKV

SEQ ID NO: 67834 - protein, 172 aa, Zea mays
  Coding DNA Sequence Number=SeqID_26055
MDQELSMDDYLVGGVTMFDAQTGLSPAGAKAGQLAMVLSKVPAGPAAVFADQVASGVLTSQLLSERKQHEGRIEHLRTQHTEVVRDKSAVENKSRNLLDKVMVLEKEKKELGRRLSDEKEDAENARAEAQAARKRVADLELEVRNMRNYREKTELATCTGVDQAHTLFVDTL

SEQ ID NO: 67835 - protein, 79 aa, Zea mays
  Coding DNA Sequence Number=SeqID_26056
MSYASLVTCEGAANALSSKECRHFEAFDRGNEDFDASVFQIEDDVLKRYTEALYDRMGSSRLRRCSREGRPSTDTGDEG

SEQ ID NO: 67836 - protein, 136 aa, Zea mays
  Coding DNA Sequence Number=SeqID_26057
  Homolog annotation: Hit_ID=Q3LRV2; Match level="QueryCoverage=96%, HitCoverage=56%, E-value=4e-26, Identity=47%"; Hit description=Gag
MVTGKKPKASGKKNDERTPSKEAGDKHKEESGGSIKSHRKGDKKKKKMKKVVYYKTDSSPSTSGVESTSSKRQERKKYSKMPLHYPRIPKRAPLLSVPLDKPPYFDDEDYCMWSDKTKHHLTSLYKSIWNIVEFGA

SEQ ID NO: 67837 - protein, 453 aa, Zea mays
  Coding DNA Sequence Number=SeqID_26058
  Gene Ontology: Mol. function=protein binding
MVYLYVHRDIVQLDDTSLWGIVNEEAKEVAQYTGIMDHMVVVACILYTWKLKDMGNIDWDTHASNYWVCDGIIQGSSSSEAWAWKVGDALQRNTQLDWRRFASPPFLYCSNLRFLRLHRCEDDGTSITPTEGKELDDQSGAWRACFGKLRVMDLSYTQWCWLLSERMMNIMANLRELNAKGIKNLSTSHLRGCGSLIKLRVEDGSVDGQRLILENSVALEQAVLTNDAKDEGATVDRIRNISFRGCAQLRSILLRGLFCCLHELDLSCTSVETVNLRKVQAQRLKRLILLGCQKLRAILWPLSTSSIAKTLDVFCVSTTPSMTASGQEWPRLCKWEEKRKEANSASTTESSSLDRNWYICVRDARLLRSLQIFRTYENNRFSLGWPTRVEFTTPPASCDLVAAQGVSILQQTIHVVDVYARDMITHTQLIHDEDALLVMRTVKDRSTGMWDCQ

SEQ ID NO: 67838 - protein, 178 aa, Zea mays
  Coding DNA Sequence Number=SeqID_26059
  Gene Ontology: Mol. function=protein binding; Cellular component =membrane; Biological process=defense response
  Homolog annotation: Hit_ID=Q8LQ12; Match level="QueryCoverage=72%, HitCoverage=14%, E-value=1e-12, Identity=31%"; Hit description =Putative NBS-LRR type disease resistance protein
MAKHIWNWSPRAYPSAYSFQQLQFLHLDYCPRVIFVLPLDSNMSLPQLETLEIICCGDLREIFRSWDPRLENQEEVVKHFPKLRRIHLHNLPTLRGICGRMMSSPMLETINVTGCPALRRLPAVGGRLAQPPTVVCEKDWWDGLEWDGLEAKHHPSLFRPKHSCHYRKPKLLRGSVLR

SEQ ID NO: 67839 - protein, 65 aa, Zea mays
  Coding DNA Sequence Number=SeqID_26060
MAARGGACGGGGAVAAREELAVAGGEGGLERLGSGRGGGAVQREEQRHGERRGGAVRGETKRRRG

SEQ ID NO: 67840 - protein, 129 aa, Zea mays
  Coding DNA Sequence Number=SeqID_26061
MELSSGLVVRPKLLKKFLDRGDFCAFAGARGVVSILEKVWMKGDHEIANEAIKHEKEPHDAQEEAKRAEEAAERAKLIVELSPLPEPYDPEADPSIKEALDIIKIANDAIDEAIDRLLNKAVDKVLKDY

SEQ ID NO: 67841 - protein, 55 aa, Zea mays
  Coding DNA Sequence Number=SeqID_26062
MAQILTRSTFAGERKKSGEGIKVNALGFELEAEIQKSEFSDFSRKPLIEWLVWGF

SEQ ID NO: 67842 - protein, 203 aa, Zea mays
  Coding DNA Sequence Number=SeqID_26063
  Gene Ontology: Mol. function=transferase activity; Cellular component= integral to membrane; Biological process=glycolysis
  Homolog annotation: Hit_ID=Q2KNB5; Match level="QueryCoverage=61%, HitCoverage=28%, E-value=7e-41, Identity=61%"; Hit description =Hexokinase-10
  Pfam annotation: Domain name=Hexokinase_2; Domain location=11-190; Score=-114.5; E_value=0.00032; Accession=PF03727.6; Description =Hexokinase
MQRNSRRRLQTTTSGHREAAALQQTSAGHREAAALQQTTSAAGGADPLEQHRCKAHNVRPGEADGTPSLAAIREDDSPDLRVVGRVLEEHLKMQDVPLKTQRLVVRYYRKFGRDGSLCGTTLVRKIRGEPKRSVVAIEGGLYQGYSVFKEYVNEAMDEILGDEIASTVSLRVMEDGSVIGAALVAASYSSSPPQLVLGLWRIV

SEQ ID NO: 67843 - protein, 97 aa, Zea mays
  Coding DNA Sequence Number=SeqID_26064
AELEEIAAGERPRLRGEEDCVSARGMGEPGREKTPGTLHAAGGERRSGWAGMALLLRAWERKLGDGGVEDAETQGMHDFYPAMAEKINMAARFSSQA

SEQ ID NO: 67844 - protein, 56 aa, Zea mays
  Coding DNA Sequence Number=SeqID_26065
MDDRSKWFAAVLPCVVAGAYGLRDSRSEHLGADVGLAGGLRCRGSVVRRRDCAGDG

SEQ ID NO: 67845 - protein, 201 aa, Zea mays
  Coding DNA Sequence Number=SeqID_26066
  Gene Ontology: Mol. function=oxidoreductase activity; Cellular component=chloroplast; Biological process=electron transport
  Homolog annotation: Hit_ID=Q5W5X6; Match level="QueryCoverage=62%, HitCoverage=22%, E-value=1e-62, Identity=92%"; Hit description=Zeta -carotene desaturase ZDS2
  Subcellular localization annotation: CTP_CleavageSite=36; ConfidenceScore=5.45e-01
MASVAATTTLAPALAPRRRARPGTGLLPPRRASAVRCSLDRNVSDMGVNAPKGLFPPEPEHYRGPKLKVAIIGAGLAGMSTAVELLDQGHEVDLYESRPFIGGKVGSFVDRQGNHIEMGLHVFFGCYSNLFRLMKKVGADNNLLVKEHTHTFVNKGGTIGGIYPFLTRTNRDPIFMETMQKYLRKIIFAPNCGCDQAIVRP

SEQ ID NO: 67846 - protein, 89 aa, Zea mays
  Coding DNA Sequence Number=SeqID_26067
MGVGEVLPSWADVEAPIPVPSASPTHRMDCVTGDGEWSTDFVIGAGLRSRVAELAFAQRSKSTWAPTLASPAGCAAGVQLCAAVIVLEM

SEQ ID NO: 67847 - protein, 179 aa, Zea mays
  Coding DNA Sequence Number=SeqID_26068
MEVGGGLRTGVLTRFATADGYKAAFQGIWRYLHAFFFLGSRCQTNYIFGSTHLGLKLYTKQFLAKTTDYEQFDNRGGFCWVLSPVAALTPSPCCCYARRHATSLELRLSSSSEARPGSLCFLASAVPSSPEAHSRSSSSIRRRHRQGLVVPAIARDLPFDTSNRVRFFPDNRVPVAPTR

SEQ ID NO: 67848 - protein, 227 aa, Zea mays
  Coding DNA Sequence Number=SeqID_26069
  Homolog annotation: Hit_ID=Q019E6; Match level="QueryCoverage=60%, HitCoverage=59%, E-value=1e-15, Identity=34%"; Hit description =Homology to unknown gene
  Subcellular localization annotation: CTP_CleavageSite=35; ConfidenceScore=5.10e-01
MDKPTNHWLFSLQGAGDSRSDLLCIGRRRLTGAVRAAPDAPPVVRAAVSAVTELLRALSPNKALRGAATQQQQGEEPDPDPTCGSVEDVLAVLRDDYRRAYFLTGDFTPGIYTEDCLFEDPTIKFRGLSRYSQNLGLLVPFFDSPSLELENIEKGSRAETKFVKATWKLRTYLRLPWRPLVAIGGSTTYDLDGDFKVTRHSESWDVSALQAIAQIFVSAPEEKLEGS

SEQ ID NO: 67849 - protein, 107 aa, Zea mays
  Coding DNA Sequence Number=SeqID_26070
  Subcellular localization annotation: CTP_CleavageSite=62; ConfidenceScore=5.20e-01
MERTKGSRANRLAFVGVARRRRLRAKGSVFAFAPTPTSGGKPVHDPGLARGCRCPCLVLQVREGAATAASSSSAIGRVVSEVGCLWLTWSAVTGAEHDFMRERLQAS

SEQ ID NO: 67850 - protein, 221 aa, Zea mays
  Coding DNA Sequence Number=SeqID_26071
  Gene Ontology: Mol. function=carotene 7,8-desaturase activity; Cellular component=chloroplast; Biological process=carotenoid biosynthetic process
  Homolog annotation: Hit_ID=Q9ZTP4; Match level="QueryCoverage=86%, HitCoverage=41%, E-value=1e-101, Identity=80%"; Hit description=Zeta- carotene desaturase, chloroplast precursor
MVVCREGAREGETWEMTFEIFILFACYTELDFRFPVGAPLHGIQAFLRTNQLKVYDKARNAVALALSPVVRALVDPDGALQQVRDLDDVSFSDWFMSKGGTRESITRMWDPVAYALGFIDCDNISARCMLTIFTLFATKTEASLLRMLKGSPDVYLSGPIKKYITDRGACDVPGIKRLLPSEWREWEMFDNIYKLDGVPVVTVQLRYNGWVTELQDLEKSR

SEQ ID NO: 67851 - protein, 100 aa, Zea mays
  Coding DNA Sequence Number=SeqID_26072
MARLGAMAEGPAPPFPVMPAPTPIDVARPTRLPLLALETRPRSPVLLRIESHHVSSAASCRCCCRCSHYRACSSHWVTADGIHVSIVRRTRKPAASSGKP

SEQ ID NO: 67852 - protein, 86 aa, Zea mays
  Coding DNA Sequence Number=SeqID_26073
  Homolog annotation: Hit_ID=Q9M587; Match level="QueryCoverage=44%, HitCoverage=15%, E-value=2e-07, Identity=63%"; Hit description =Prohibitin
MSRIRVRYPVPFRFWIRIPVCSPGPLFAASTEGDPVIATQFLQLGDHLPTIFTSLGFEYNDKVIPSIGDEVLKIVITQFLTELPRG

SEQ ID NO: 67853 - protein, 123 aa, Zea mays
  Coding DNA Sequence Number=SeqID_26074
  Gene Ontology: Mol. function=aspartate-tRNA ligase activity; Cellular component=cytoplasm; Biological process=tRNA aminoacylation for protein translation
  Homolog annotation: Hit_ID=O81892; Match level="QueryCoverage=68%, HitCoverage=13%, E-value=1e-15, Identity=48%"; Hit description =Putative aspartate--tRNA ligase
MVVTVLPEYPEVYNIVNKLRVESVVAVEGVIQPRPVDAINADMRTGTIEVVAHHVLVLNSVTRSLPFPVTISDTVKEKFPEEIRLRCDFSYRLAIHSLYDLDCAHYDSCWKLNPYPKQGWEWY

SEQ ID NO: 67854 - protein, 404 aa, Zea mays
  Coding DNA Sequence Number=SeqID_26075
  Homolog annotation: Hit_ID=Q6QP51; Match level="QueryCoverage=49%, HitCoverage=90%, E-value=1e-13, Identity=36%"; Hit description =Putative growth-regulating factor 1
  Subcellular localization annotation: CTP_CleavageSite=69; ConfidenceScore=5.34e-01
MQATCNRTKGAHPFDFDASSVEAQAHTSCGRKQRSSRQQAHVPSWNSERTLSHGVKTMRLRRFTFAIMTASKKARHVVRFRILFLFLFLSLTTGTGKGDIPKGILLHEGSGPRAPLLIRGSKAGPSEGFNSRLRALGLRAHYWSEVRRPAPRKGSTAASGHSGSAPTTDQGFVGWPPKGSIAASDPERGMTWVRSIHNQGSGYAPEPSPALGAIGNSASPDPGLGLGLSSGRQRTPPHPTQGSDSALAPEDDELRLARPRAWTRPRLRKKTNSASPDPGLGLGLSSGRRRTPPRPTLGLGLSLGSGRRRTLPRPTQGSDSASVPEDDELRLARPQGSDSASAPKDDELRLAQPPRLGPSLVLRRWSPPRPTRGSDSTSTSEDRLDLDLGGATASPDPGLGPTTT

SEQ ID NO: 67855 - protein, 136 aa, Zea mays
  Coding DNA Sequence Number=SeqID_26076
  Gene Ontology: Mol. function=catalytic activity; Biological process =cellular metabolic process
  Homolog annotation: Hit_ID=Q9AQV6; Match level="QueryCoverage=67%, HitCoverage=28%, E-value=2e-31, Identity=73%"; Hit description =Putative cinnamoyl-CoA reductase
MAEAAAEKLVCVTGAGGFIGSWLVKELLQRGYVVRGTARHPEDPKNAHLLALDGAQERLSLYHADVLDYMSLCRAFSLCHGVFHVASPVSNDPVSSLYFLLLLIYDRYTYLSLLTLMLMLDDAMIYMHVEPCAGCC

SEQ ID NO: 67856 - protein, 347 aa, Zea mays
  Coding DNA Sequence Number=SeqID_26077
  Gene Ontology: Mol. function=enzyme inhibitor activity; Cellular component=cell wall; Biological process=cell wall modification
  Homolog annotation: Hit_ID=Q1SFY8; Match level="QueryCoverage=88%, HitCoverage=55%, E-value=1e-107, Identity=61%"; Hit description =Pectinesterase; Pectinesterase inhibitor
  Pfam annotation: Domain name=Pectinesterase; Domain location=26-305; Score=604.4; E_value=1e-178; Accession=PF01095.10; Description =Pectinesterase
MDVEDEEELVAKRARRAGRTSSTRVDVVVAQDGSGRYRTVSEAVARAPSHSKRKYVIYVKRGEYHENVEVRKKKTNIVIVGEGMGETVISGSRSFSSGWTTFRSATFAVSGAGFIARDLTFRNTAGPAAHQAVALRVDSDRSAFFRVAVEGHQDTLYAHSLRQFYRDCRIAGTVDFVFGNGIVVVQRSLVATLPLAPGQTGSVTAQGRKDPNQNTGFSFHGCVLEAKYPTYLGRPWKPFSRVVVMESYLGSGIQARGWLEWAAAGSGDHSPGLATLFYGEYRNYGPGAGVAGRVKWPGYHVIMGRRRRQPVHRQAIHRRACVVARHRHHLHGGSIQEMTMASANAVA

SEQ ID NO: 67857 - protein, 438 aa, Zea mays
  Coding DNA Sequence Number=SeqID_26078
  Gene Ontology: Mol. function=protein transporter activity; Cellular component=membrane; Biological process=intracellular protein transport
  Homolog annotation: Hit_ID=Q5S1U0; Match level="QueryCoverage=55%, HitCoverage=80%, E-value=9e-91, Identity=76%"; Hit description =Syntaxin related protein
  Pfam annotation: Domain name=SNARE; Domain location=350-412; Score =94.0; E_value=4.4e-25; Accession=PF05739.9; Description=SNARE domain
  Pfam annotation: Domain name=Synaptobrevin; Domain location=351-438; Score=-4.3; E_value=0.1; Accession=PF00957.11; Description =Synaptobrevin
  Pfam module annotation: Pfam domain module=SNARE::Synaptobrevin; Domain location=350-412::351-438
  Subcellular localization annotation: CTP_CleavageSite=36; ConfidenceScore=5.13e-01
MAELSWGKKKLPPASVGPQCQRSARSRGWQRECGGAAAAVAGPTGRPTGQQREWRVRLRQTAADARDPRGPIPNPASQPEPGSFQPSPPDSTDKARQRNQPHLASGFAPVGPEPPKPRALRMRTRDKLIAAFGPSPARRETWRRATSGGAPPRRRPEERPGGGAPAPGAGASQAVASGVFQINTAVATFQRLVNTLGTPKDTPDLRDRMCVRSPTRLPALPFAPQPVPIAVPLIPICFGIADSARSAFGPPGKLRFVPVATKKIADAKLAKDFQAVLKEFQKAQRLAAEREAAYAPFISQAGLPQSYNSSEVNNGADRLAEQRTQLLESRRQELVFLDNEIVFNEAIIEERDQGIQEIQHQITEVNEIFKDLAVLVHDQGAMIDDIDSHIENAVVATSQAKGQLSKAAKTQKSNSSLICLLLVIFGVVLLIVIIVLAA

SEQ ID NO: 67858 - protein, 124 aa, Zea mays
  Coding DNA Sequence Number=SeqID_26079
YYAVYGGLILKYYGGSYAKCYGRREGPGHGGGWNRGAFSATVRNPEVPSRNPRLLKPRTPSSCSSEAPRHDTKDAVVKSARVDYGGYPFRSVLTTMWFTGKRMGSRWRVAVQGEMVKKARRFYG

SEQ ID NO: 67859 - protein, 166 aa, Zea mays
  Coding DNA Sequence Number=SeqID_26080
  Gene Ontology: Mol. function=catalytic activity; Biological process =cellular metabolic process
  Homolog annotation: Hit_ID=Q9AQV6; Match level="QueryCoverage=98%, HitCoverage=50%, E-value=2e-61, Identity=67%"; Hit description =Putative cinnamoyl-CoA reductase
MVAEKTAMEEASKRGIQLLIVVPPGTIGRMLQPTLNLSLSIVATYMKGTKKAYSNAVGAYVDVRDVALAHILVYEDVSTHGRYLCIGHMLHQSEFLQMMRDLFPQYPITTKCKDENKPLIKPYKFSTQRLNALGMKFTTLKESLYNTVVSLQENGHIPVLLHKSSL

SEQ ID NO: 67860 - protein, 167 aa, Zea mays
  Coding DNA Sequence Number=SeqID_26081
  Gene Ontology: Mol. function=catalytic activity; Cellular component =cytosol; Biological process=cellular metabolic process
  Homolog annotation: Hit_ID=Q9AQV6; Match level="QueryCoverage=94%, HitCoverage=48%, E-value=6e-66, Identity=77%"; Hit description =Putative cinnamoyl-CoA reductase
  Pfam annotation: Domain name=3Beta_HSD; Domain location=11-166; Score= -113.3; E_value=0.00013; Accession=PF01073.9; Description=3-beta hydroxysteroid dehydrogenaseisomerase family
  Pfam annotation: Domain name=Epimerase; Domain location=10-166; Score= -24.7; E_value=0.00014; Accession=PF01370.11; Description=NAD dependent epimerasedehydratase family
  Pfam annotation: Domain name=KR; Domain location=12-147; Score=-93.8; E_value=0.064; Accession=PF08659.1; Description=KR domain
  Pfam annotation: Domain name=NAD_binding_4; Domain location=12-165; Score=-97.6; E_value=0.026; Accession=PF07993.2; Description=Male sterility protein
  Pfam annotation: Domain name=Polysacc_synt_2; Domain location=10-164; Score=-186.0; E_value=0.022; Accession=PF02719.6; Description =Polysaccharide biosynthesis protein
  Pfam annotation: Domain name=adh_short; Domain location=8-137; Score=- 52.2; E_value=0.015; Accession=PF00106.15; Description=short chain dehydrogenase
  Pfam module annotation: Pfam domain module=3Beta_HSD::Epimerase::KR::N AD_binding_4::Polysacc_synt_2::adh_short; Domain location=11-166::10 -166::12-147::12-165::10-164::8-137
MAEAAAEKLVCVTGAGGFIGSWLVKELLQRGYVVRGTARHPEDPKNAHLLALDGAQERLSLYHADVLDYMSLRRAFSLCDGVFHVASPVSNDPDLVPVAIEGTKNVLNAAADMGVQRVVFTSSYGAVHMNPNRDPDRTVDESCWSDLEFCKQTQVHCYFYAIQAFFW

SEQ ID NO: 67861 - protein, 317 aa, Zea mays
  Coding DNA Sequence Number=SeqID_26082
  Pfam annotation: Domain name=LEA_3; Domain location=222-311; Score =62.4; E_value=1.5e-15; Accession=PF03242.4; Description=Late embryogenesis abundant protein
  Subcellular localization annotation: CTP_CleavageSite=6; ConfidenceScore=5.42e-01
MGIYPRGERGWGRNAPRKSSWGSPRGNFFVAGMGTGRQNPTGKSPLPSLVPTQRSQSFSAATPAAGTHHAARHTRTAPAPTGTSSCDHSSVAPSLRVTPPARRPTEPDTTWQADAFARPSAASTSRRAFPARQGATATPNGNGALAFRRSPADPRGRAQHVRAGGPPAGLALAALFLRPLPLESRGARAPPTTAGREQSATSQAVRSFVCRSPSPSSRTGPMALALSGCSARAALTSLAPRARGYAASAASGAMRRAAAESAAAGEAKEAGRRTAAAEVSWVPDPVTGHYRPSNWAAAAADPADLRAAHLAPTYARA

SEQ ID NO: 67862 - protein, 105 aa, Zea mays
  Coding DNA Sequence Number=SeqID_26083
MDRSNVDILADYQDPNDEEVDTKDEEDSNDLEWTTSGHNTSTSWDNTLRSGLYRPRLLARTDMEAEKVEAMTTTLLSAKDTFEAKVQRCSHHGYVILLHPQMRMS

SEQ ID NO: 67863 - protein, 149 aa, Zea mays
  Coding DNA Sequence Number=SeqID_26084
  Gene Ontology: Mol. function=catalytic activity; Biological process =cellular metabolic process
  Homolog annotation: Hit_ID=Q9AQV6; Match level="QueryCoverage=98%, HitCoverage=50%, E-value=4e-47, Identity=58%"; Hit description =Putative cinnamoyl-CoA reductase
MAAENTAMEEALKRGIQLLIVVPSVTIGRMLQPTLNISLANVAAYMMGTKKAYSNVIGGYVDVQDVALAHILVYEDLRTHGRYLCIGDMLHLSKCKDENKPMVKPYKFSTKRLGALGMKFTTLKESLYNTVVSLQENGHIPILLHKSSL

SEQ ID NO: 67864 - protein, 243 aa, Zea mays
  Coding DNA Sequence Number=SeqID_26085
MTLGKKALLQSEDELRPELVYGEAGPSASGVFDDHGRDCGGGSVPAEGGRANILSSAGPTVELRRMGRRRSTVRDDDEVESRASSHSYWRDRAERNTQGVDQRGRSLASRGQAPGRLGGGTGKRRALGKTSPARRQAVEEFGTTPRAAALVNSGGDQARAGRSGGAERIGRNDSEGLGVRAGDEDEAPGPGGAQLGSFDGAVAMEGALPGCGLIGGEAGWTREHRGNKAERCVQDKGKALVNR

SEQ ID NO: 67865 - protein, 300 aa, Zea mays
  Coding DNA Sequence Number=SeqID_26086
  Homolog annotation: Hit_ID=Q53K52; Match level="QueryCoverage=59%, HitCoverage=47%, E-value=2e-91, Identity=92%"; Hit description =Expressed protein
MNCSTSFFRCQMEDMEMDGAFEQVAVELVAQGVIGKRVDEMESGFLMALDYMIQLAQKDTDDERKSILEVIKQTVLDHLTKKCPPHVQVVGLLCQTEKKESRHELLRRVAAGGGVFKNDKGLKCQIPGANLNDIANQADDLVESMESRDTIPDRKLLARLVIVREEARNMMGGGLLDERNDRGLTTLPEAETREIGSTSTSLNLRDSFDEFQRSTQMLTPMCPFRATLSPSSATTSVDTHIHLTLSAIRAPFLLPLRIRCHSLPLETSLKSAPPWTISQIVSFELCVDHAIAVCNTSKKQ

SEQ ID NO: 67866 - protein, 54 aa, Zea mays
  Coding DNA Sequence Number=SeqID_26087
MGHPDSRGGPAGSRQAQLPRPHHSPVVYNVITQQDRVPDRMIWNVCGRTKLVHH

SEQ ID NO: 67867 - protein, 170 aa, Zea mays
  Coding DNA Sequence Number=SeqID_26088
  Gene Ontology: Mol. function=nucleic acid binding; Cellular component= intracellular; Biological process=translation
  Homolog annotation: Hit_ID=Q8H6I0; Match level="QueryCoverage=98%, HitCoverage=9%, E-value=5e-60, Identity=70%"; Hit description =Putative gag-pol polyprotein
  Subcellular localization annotation: CTP_CleavageSite=23; ConfidenceScore=5.15e-01
MKKVVYYETDSSSPSTSSSDSSVASKRHERKKYSKMPLRYLRISKRAPLLFVPLGKPPYFNDEYYCMWSDKMRHHLTSLHASIWDIVEFGAQVPKVGDEGYDSDEVAQIRHFNSQATTILLASLCREEYNKVQGLKSTKEIWDVLNTAHKSFRVTKITKHKTIEGELERI

SEQ ID NO: 67868 - protein, 166 aa, Zea mays
  Coding DNA Sequence Number=SeqID_26089
MAFNTWPPLRGEWSMPELKDSIPSEKEPDLIGLKYTYRFEIVFGSHVMNGLKLLRTSVRASAEKSYEEMTTVIELKPIVGASRLWKLSLQTKQVIELPIINETPLAKMSVEPRRILTLTPSEEASRKSEQINHVISAFLYEDITEKMMRSKILQRPRRRGPSPQQW

SEQ ID NO: 67869 - protein, 59 aa, Zea mays
  Coding DNA Sequence Number=SeqID_26090
MESHDLRAERESQLMGKVAMRLMVFGIDSGNGCQHCNPCSGEDEVVEGDLQEFQDYDEF

SEQ ID NO: 67870 - protein, 988 aa, Zea mays
  Coding DNA Sequence Number=SeqID_26091
  Gene Ontology: Mol. function=RNA binding; Cellular component =ribonucleoprotein complex; Biological process=regulation of translation
  Homolog annotation: Hit_ID=Q6K4E4; Match level="QueryCoverage=93%, HitCoverage=93%, E-value=0.0, Identity=61%"; Hit description =Putative CRS1
  Pfam annotation: Domain name=CRS1_YhbY; Domain location=357-440; Score=105.8; E_value=1.3e-28; Accession=PF01985.11; Description=CRS1 YhbY domain
  Pfam annotation: Domain name=CRS1_YhbY; Domain location=555-663; Score=18.1; E_value=0.00059; Accession=PF01985.11; Description=CRS1 YhbY domain
  Pfam annotation: Domain name=CRS1_YhbY; Domain location=792-879; Score=112.8; E_value=9.6e-31; Accession=PF01985.11; Description=CRS1 YhbY domain
  Pfam module annotation: Pfam domain module=CRS1_YhbY::CRS1_YhbY::CRS1_ YhbY; Domain location=357-440::555-663::792-879
  Subcellular localization annotation: CTP_CleavageSite=94; ConfidenceScore=5.92e-01
MALLLPPPALSTTPPFLSAPRPARLPCLRCTRTTTATSSVSTCPPASTSSPSTSSPVASDGAVGRKSKNKSRPLKPSFEEQALRRWSARAPSQRASVPWEQPQQQSPLPPSLPHRAGRGSGDAGDQKRSGGGSSATLRSIVDYFAGGSSDDEGVRVEEGACDTTAVPDQAAREQDDGSHFRPSYLLGSHPFSAPWIHREESTNDRGVSGPVAEEEERLDIRDASDDELGLVDEDKEETDNGEELLTGGLEDEFYDDYATPTMNSSYGVDLSVDKDAYGSRFDRSMMQSSVNTIVKTLRNSMEESDPNATVELSNAEDFVQKLGPALLPWEREEEDDEAFSGGRAVRRSNTELAERSIPEPELRRLRDTALRMKERIKVGPGGVTQDIVESIHRKWKVDEVVKMRFEGPPSLNMKRTHDLLEDRTGGVVIWRSGRSVVLYRGMNYNFQCVQSYAKFIEIDSGKGVSDANSAVLSHDGHNLQASRADGMKSLTSTGNFSLESSETFDIDNFLDQLGPRYKDWSGRGPIPVDADLLPGVVHGYKPPFRVLPYKIKSTLRDKEMTTLRRLARQTAPHFALGRNREHQGLAAAMVKLWEKSAIAKIAIKRGIPNTCNDRMAEEIKLTLTLMVKSVESDNHTSRPNLEYEKLTGGVLLSRNKEFIVFYRGNDFIAPKVRQVLVEKQEQAITQQDEEELARLKASASIITIPKDIKGPLVAGTLAETTEAKSRWGKSVNDKQREEEMKHLSLLKHTSLLKNLKRKLILAKTKVAKAEKALAKVQEFLTPAELPTDLETVTDEERFLFRRIGLKMRAFLMLGRREVFDGTVQNMHLHWKHRELVKIVVRGKSFAQAKHIAISLEAESEGVLISLDKTTKGYVIIFYRGKNYRRPQIMKPRNLLTRRQALARSIELQRREALKHHISSLQGKISKLQSQLVQTKVASEKHDLKLLQTVEDDFSSSDDDVEDDGEEAYLQTYSSADEEDAEDDANEYI

SEQ ID NO: 67871 - protein, 91 aa, Zea mays
  Coding DNA Sequence Number=SeqID_26092
MAAEGNKSREAPPLTPAENEAFLRMLRDAGQRLGSAAPEVEVQFDGVSVGAQAHNCKAARVIYQSQLQRQLDQEPSVKIGTTQNFQETFDR

SEQ ID NO: 67872 - protein, 95 aa, Zea mays
  Coding DNA Sequence Number=SeqID_26093
MGLGGLCVRSWIFSSVDNFVHDLAIPELEFGLNLLSDLNSSFSNTTDDVANSMVLPNFAMTRNILTLKEFPGEWVSQPGVGGGGRWCPRTVVILE

SEQ ID NO: 67873 - protein, 798 aa, Zea mays
  Coding DNA Sequence Number=SeqID_26094
  Gene Ontology: Mol. function=nucleoside-triphosphatase activity; Cellular component=integral to membrane; Biological process=transport
  Homolog annotation: Hit_ID=Q8GU82; Match level="QueryCoverage=96%, HitCoverage=94%, E-value=0.0, Identity=48%"; Hit description=PDR -like ABC transporter
  Pfam annotation: Domain name=ABC2_membrane; Domain location=522-736; Score=221.1; E_value=2.5e-63; Accession=PF01061.14; Description=ABC -2 type transporter
  Pfam annotation: Domain name=ABC_tran; Domain location=235-425; Score= 88.6; E_value=1.9e-23; Accession=PF00005.17; Description=ABC transporter
  Pfam annotation: Domain name=PDR_assoc; Domain location=100-165; Score=101.1; E_value=3.4e-27; Accession=PF08370.2; Description=Plant PDR ABC transporter associated
  Pfam module annotation: Pfam domain module=ABC2_membrane::ABC _tran::PDR_assoc; Domain location=522-736::235-425::100-165
MSSMCDLRPNSPYKGLKWDAHLGYRPYVLVYTVQVRSYVLVYKIIPAITGTSGHTSNVTGPLSFGSNNNLQSWLSWGYWASPFTYALNAVTLNEFLDMRWARVFYFKNSKTLGEAILMLRGLLNEWQWYWTCIGILFGFTLVFNILSVLALHFLKSPHKREVNIKSQDRQNKEYNDQAVVNVNASIGQSLPFQPLTLVFKNINYSVELPKGMRKHGVTESRLQLLRDVSGSFRPGVLTALMGITGAGKTTLLDVLAGRKTGGYIEGVISICGYPNKYETVSRITGYCEQTDIHSPYLTVYESLKFSASLRLPSVVKSHQRDMYVEEVMDLVELTGLRNAIVGIPGATGLSAEQRKRLTIAVELVASPSIMFLDEPTTGLDARAAAIVMRTVRKMVNTGHTVVCTIHQPSIQIFESFDELLLMKSGGQLIYSGSLGPLSRDLIKYFEAVPGVPKIKDGQNPAAWVLDISSHAMQYMINVDYAEIYYNSNLYKENMAMINELSKPKTNHEDLHLPSKYWPGFKEQCIACIWKQHLSYRKNSELNVFRFINTFATSIVFGIVFWQTGSTIKVEQDVFNILGIGYGSALFLGFVNCTSLLPVVAAERAVSYREMNSGMYSSMAFIIAQVAAEIPYMVIQPLIFSAIVYPMVGFQLAVKKFFLFVLYMILIFMDYTLYGMMAVALTPTAEIATGLSLTIFVVWNFFSGFIVTVKAMPVWWRWMYWACPTAWTLYGLVSSQLGDHKELIRVLGQPDQPVITFLQEYLGLENGYLPLVTALHFVLSALFCFVFCVGIKYLRFQKR

SEQ ID NO: 67874 - protein, 153 aa, Zea mays
  Coding DNA Sequence Number=SeqID_26095
MAPTTPICLRVAPTPRPCRVRVGRGRGGQRQQGGRDGLDTFMLFYTVFSVIDPKCDARDSHVPMSTNQRQDPIQEGQSIGVIANDVDKNGKPHKSRCPPSCGGKTQSCYWGAMFSLEERVPSRSREEIEYNNSNIGLLCIAGSTLFILLEGVT

SEQ ID NO: 67875 - protein, 164 aa, Zea mays
  Coding DNA Sequence Number=SeqID_26096
MAASVDAAAALAVTPPAVEEAGGAVEQARTLIGALNLLSRNLPLPPDVLRAVSSIYHDGGAGDDEEEEGGEREAEKEGNMEMTAAEEGYPVDVATKVRVGGSSGLCGDCPPSVRVLGTAPDRCLCLQLIALLALALVALIVSIWRLMRLYEVLQISLLRGLHIH

SEQ ID NO: 67876 - protein, 836 aa, Zea mays
  Coding DNA Sequence Number=SeqID_26097
  Gene Ontology: Mol. function=nucleic acid binding; Cellular component= chromatin remodeling complex; Biological process=regulation of transcription, DNA-dependent
  Homolog annotation: Hit_ID=Q60EX7; Match level="QueryCoverage=94%, HitCoverage=72%, E-value=0.0, Identity=79%"; Hit description =Putative transcriptional regulator
  Pfam annotation: Domain name=DEAD; Domain location=172-335; Score= -44.6; E_value=0.033; Accession=PF00270.19; Description=DEADDEAH box helicase
  Pfam annotation: Domain name=Helicase_C; Domain location=490-569; Score=101.9; E_value=1.9e-27; Accession=PF00271.21; Description =Helicase conserved C-terminal domain
  Pfam annotation: Domain name=ResIII; Domain location=168-337; Score= -14.5; E_value=0.00077; Accession=PF04851.6; Description=Type III restriction enzyme, res subunit
  Pfam annotation: Domain name=SNF2_N; Domain location=174-438; Score =319.1; E_value=7.8e-93; Accession=PF00176.13; Description=SNF2 family N-terminal domain
  Pfam module annotation: Pfam domain module=DEAD::Helicase _C::ResIII::SNF2_N; Domain location=172-335::490-569::168-337::174-438
MALHGEEPAARGAEVKSEVEPGSLYHAWHVRARQRISRQEKNRLNLLKIGDQVAYMKMVEESKNERLKMLLDKTNELLEGIGKAVQRQKDAEHVSQHEGSEVPKGSESEDCSQISGVKSESPGESPSDDDADFAGSADESKFNAGRRLDFTVHSIEEKVTEQPSALEGGELRPYQLEGLQWMLSLFNNNLNGILADEMGLGKTIQTIALIAYLLENKEVAGPHLIIAPKAVLPNWSNEFKTWAPSIGTILYDGRPEERKLLREKNFDGLQFNVLLTHYDLILKDKKFLKKVHWHYLIVDEGHRLKNHECALARTLVSGYYTKFAKYIRTKFLLNFEEWFNAPFACDVSLNDEEQLLIIHRLHQVLRPFLLRRKKDEVEKYLPVKTQVILKCDMSAWQKAYYEQVTSREKVALGFGLRSKALQNLSMQLRKCCNHPYLFVEHYNMYQREEIVRASGKFELLDRLLPKLQRAGHRVLLFSQMTKLLDVLEIYLQMYNFKYMRLDGSTKTEERGRLLADFNKKDSEYFMFLLSTRAGGLGLNLQTADTVIIFDSDWNPQMDQQAEDRAHRIGQKNEVRVFVLVSVGSIEEEILDRAKQKMGIDAKVIQAGLFNTTSTAQDRRALLQEILRRGTSSLGTDIPSEREINRLAARTDEEFWLFEKMDEERRLRENYKSRLMDGNEVPDWVFANNDLPKRTVADEFQNIMVGAKRRRKEVVYSDSFGDQWMKSDEGFEDIPKATQRSKKTAYSSDIQVEFSERRKRPRSVENSADGVSNPTWTPDKGRAGVSSYSKDETEDDGEDEVITSGLQKGNSFTWNTLGRRRSSHFSSSSDSRGRPTF

SEQ ID NO: 67877 - protein, 858 aa, Zea mays
  Coding DNA Sequence Number=SeqID_26098
  Homolog annotation: Hit_ID=Q5JLV4; Match level="QueryCoverage=4%, HitCoverage=18%, E-value=1e-07, Identity=68%"; Hit description =Putative PIT1
MSDFVRSRYDKQEDFQVLLSKKDPGEQPQHKDYLWMAHWTKASSAAEPRNNDSNPLEDTNNGTTTKDSETLPYEFMKSTVAERLMVGVRHGSASMQHVRQFKSSMRGMPRLSNELGPKNSEQVDESFEKSLKNDAMNLRTRQVVSETYSIHKLSELPLDFQNLGSSDDPSPDWSHFPMFEINQKIDSIVNRKRRSPPLDLNVSASHVMALSSQEYMMHSHQTADENMDTCKPAEGFASRVEDHAGFNSDPPGPKLKGQLLDTMSCSCSKDDNNSADCPIDEQHTSHYFANSKHELPSVSNKKKFKFAGNNHNRIVASASHDLKTKRSAVHKQQSAAEAVFCAPVLDSEFQNEPITISNIDKKDGENFHDMYKCLGKAVSCPLLPYEHRHLNTQRTESAENLKVCTLPDHQTANKLTEKSHGELLTYGPKSKEMYTGKSSDFGVCMYGTNIGSQLFRAQNQSSAKTETLHSDTLIGSKSPAGIASLSAQKDYGCTDEAKSEQLVAPSRRGDSGYGKEDGFHNVNEGHDVWSKATIGSKQSCMPGTGITNLDLILSQMSRMRNQISIGRIQPPIGAEPSDRWLKRLQPDIPDPDIPGSRRPNVGGSPPLRQRNRSFDMALPCNRTDTGTTDCVMEDQSLDKVEKTQEKQESTPIPAKSVNSWIGRWCQGGTPVFHEGPGQGRQATKPGRPSEELEGRFPSIAAMAMMGRAMNKLRPCEHQKMGPLVDLSGGRRRGLHGGSLLLQGKLEVRPIADAFSGGVTRRETPAPGYIQARPMQNADHSATSTGYGHDQTPDPTGVLCCRIIAIALMVLLVFRDAVSVFLGDQDAYTVAVVTVVHGQASDHAAEERTQPQQHVISIQ

SEQ ID NO: 67878 - protein, 508 aa, Zea mays
  Coding DNA Sequence Number=SeqID_26099
  Gene Ontology: Mol. function=zinc ion binding; Biological process =cell redox homeostasis
  Homolog annotation: Hit_ID=Q5EUC0; Match level="QueryCoverage=92%, HitCoverage=93%, E-value=0.0, Identity=73%"; Hit description=Thiol oxidoreductase
MAASTAAARRLLLALAVLAACLGSAPHGAVALRSLGVGGAKAADGDAAVDLDASNFTAFLQTSPESFAVVEFFAHCGPPAQKLMVTPGYDAALWDEAGVQRLSWCPACRNYKPHYERVAKLFNGPDAAHPGTVVMARVDCASKFSFSVMSEDDEAAQVNVDLCNKFSVDHYPYLVWGPPTKFNLAQWKPKQENSELELIDDGRTADRLLKWINKKMGSSFNLDDKKYENESMHPKNTSDPEQIVRAIYDVEEATSHALQIILEHKMIKPDTRDSLISFLQILVAHHPSKRCRRGSAELLIDFDDHWHTNLSLSLEDSTTLLKGAGEKVCGNGVPRGYWIFCRGSKKETRGFSVSVPFKSARDLALWLWTAHNKVNERLMKEEKELDNADPSFPKIIWPPKQLCPLCYRSSSRTADGAMQVEWNEDEVFNFLVNYYGKMLVSSYRETSMQSFQVASISDDSSASSAATVPIGAALGIALASCTFGALACFWRTQQKNRKYYHLRSLKKI

SEQ ID NO: 67879 - protein, 132 aa, Zea mays
  Coding DNA Sequence Number=SeqID_26100
MAGPRRVAGSAAVRLPARPTGEIGEGGKVCHARSEVAEVKSYTNLTRTQQRGEGGSSPEMKMTAALAQLSSGKGEEMAEAGVRNLGSSGQSFYRRPGLGRGREVASTGDLATTGMVAHSGDDGMARADGATG

SEQ ID NO: 67880 - protein, 332 aa, Zea mays
  Coding DNA Sequence Number=SeqID_26101
  Gene Ontology: Mol. function=DNA binding; Cellular component=nucleus; Biological process=regulation of transcription, DNA-dependent
  Homolog annotation: Hit_ID=Q8S0Z6; Match level="QueryCoverage=99%, HitCoverage=100%, E-value=3e-55, Identity=40%"; Hit description=Myb -related transcription factor LBM2-like
  Pfam annotation: Domain name=Myb_DNA-binding; Domain location=105 -183; Score=8.7; E_value=0.71; Accession=PF00249.21; Description=Myb -like DNA-binding domain
  Pfam annotation: Domain name=Myb_DNA-binding; Domain location=14-99; Score=24.9; E_value=0.00028; Accession=PF00249.21; Description=Myb -like DNA-binding domain
  Pfam module annotation: Pfam domain module=Myb_DNA-binding::Myb_DNA -binding; Domain location=105-183::14-99
MGRAPCCDKASVKRGPWSPEEDEQLRSYVQLNGIGGNWIALPQKAGQGSTVQPHPIVVVRYSDCSESLFAAANANQGSITVHGLNRCGKSCRLRWLNYLRPNIKHGGYTDEEDRIIWSLYSSIGSRWVGVRWQPGDRSIGFRLCAGLTDRAMLRMPIPRWSIIASKLPGRTDNDVKNYWNTKLKKKAMAASSSGAAFAAPATPALSPASSCVTSSSSGDVRLGAAYTEPPPPRQHAGLVRSDAPRTELAPVPAVAHLDGACWPAAAALDVLLPELGGEQLFPYGYGDFFGGLQDRALEQQLSSCYFPNVAEIWGAAAVAPDGKPPGLCNRLT

SEQ ID NO: 67881 - protein, 80 aa, Zea mays
  Coding DNA Sequence Number=SeqID_26102
MQPKFSVSANDIREPLAEAIALGGKFYSKRNILPPEPYDPKVDPALKGILDEFKIVNAAIDETIDKLLNEAAKKVLIEDD

SEQ ID NO: 67882 - protein, 245 aa, Zea mays
  Coding DNA Sequence Number=SeqID_26103
MGAHVKCKAYQRGWLKPTEKDQTAHESSPSPSLLTQGGATDSPRRRNIPTTSAPVDAPIRDQRVLRTEEDEANAKIEDSPSIGAATTTAHGTRDSMAEFPLRRGIPVVQSVIPPRRSRDEHQRGPVIAPGRFRSPNARYNEIEVGRAHGEEKITRFVGARDICADSVLSGESDSRRISDRITGKEGRFVIRGCCCPIFAPKGVEVATPVHHGGATFTAHASGRVCLAESSTIGLGKKLLRVGPSR

SEQ ID NO: 67883 - protein, 90 aa, Zea mays
  Coding DNA Sequence Number=SeqID_26104
  Gene Ontology: Mol. function=transcription coactivator activity; Cellular component=nucleus; Biological process=regulation of transcription, DNA-dependent
  Homolog annotation: Hit_ID=Q69SU7; Match level="QueryCoverage=70%, HitCoverage=63%, E-value=1e-19, Identity=70%"; Hit description =Transcriptional coactivator p15 (PC4) family protein-like
  Pfam annotation: Domain name=PC4; Domain location=12-88; Score=30.7; E_value=9.4e-07; Accession=PF02229.6; Description=Transcriptional Coactivator p15 (PC4)
MWGKGKKRFGGGGSGEPAAKRQAARDDGPSESAEDGTVVAEISKNKKVSVRSWKGRVFVDLREFYFKDGKTLPTRKAVRRSKALDHRLDT

SEQ ID NO: 67884 - protein, 118 aa, Zea mays
  Coding DNA Sequence Number=SeqID_26105
MGIDGDCCLDAEGENSPASSLGRRRMASAQCEIDDGCCLGAEGDNSPASSLGRRRMASARCEIDNGCPATPKSRVASTNVGKLQQQRATIGGNDACLKDAQPAQPLRQPEAIAVIVAS

SEQ ID NO: 67885 - protein, 475 aa, Zea mays
  Coding DNA Sequence Number=SeqID_26106
  Gene Ontology: Mol. function=L-ascorbate peroxidase activity; Cellular component=chloroplast thylakoid membrane; Biological process=response to oxidative stress
  Homolog annotation: Hit_ID=Q5J331; Match level="QueryCoverage=91%, HitCoverage=90%, E-value=1e-180, Identity=73%"; Hit description =Thylakoid ascorbate peroxidase
  Pfam annotation: Domain name=peroxidase; Domain location=79-329; Score=164.6; E_value=2.5e-46; Accession=PF00141.13; Description =Peroxidase
  Subcellular localization annotation: CTP_CleavageSite=66; ConfidenceScore=5.71e-01
MAERLAASLLPAASPSPSARRATVAAAAAASFPSPCSARAGLRLRSRPPLFSQKAAGRGCGLRVVRCMAASDAVQLKAAREDIKELLKSTYCHPIMVRLGWHDSGTYDKNIKDWPQRGGANGSLRFDAELSHGANAGLINALKLIQPIKDKYPGITYADLFQLASATAIEEAGGPKIPMKYGRVDVTAAEQCPPEGRLPDAGPRDPAEHLREVFYRMGLDDKEIVALSGAHTLGRARPDRSGWGKLETKYTKDGPGEPGGQSWTVEWLKFDNSYFKEMKLFFLNEIQDMKFLSQLPWKEQKEQDLLVLPTDAALFEDPSFKIVLALTENLWHIQVYAEKYAEDQEAFFKDYGEAHAKLSDLGAKFDPPEGFSLDDDTCSSPSDEKTEEPTLVAVGAAVATATADDNNGAAPQPEPFIAANYSYGKRELSDAMKQKIRAEYEGFGGSPDKPMQSNYFLNIMILIAGLAFLTSLLGN

SEQ ID NO: 67886 - protein, 122 aa, Zea mays
  Coding DNA Sequence Number=SeqID_26107
MVATPLGELEYDERRIAPNSPSYRHRVGQLDFRVKDASGSEACGRSYVGAREVSAENISPTDGVHTAVSSWDGAILGLTKPNPLTEILSSRFLGGAGGGGGGSGLAVEHVGAGAWQALTGGL

SEQ ID NO: 67887 - protein, 126 aa, Zea mays
  Coding DNA Sequence Number=SeqID_26108
  Subcellular localization annotation: CTP_CleavageSite=34; ConfidenceScore=5.11e-01
MANPLQVRRRARSPSFAVGDLGLRRNRSVGASVRMFETQKNSAKDSLWVFQIARGLCAKTPTRGLNLDFWNFRNYWIALKIIKIFGPIPERPTRNGSGEMARVACTLRGKRLDGGVSVLSVVVNPV

SEQ ID NO: 67888 - protein, 151 aa, Zea mays
  Coding DNA Sequence Number=SeqID_26109
MATCSTRPGIARARPDAQPRAHRVAPSQTRAPAPPAHIKPIEASTLLEPRIELYLAGDNGSVLPDFTRSPTYVDRAPRLEHTPPTSPTAYARGPIDSGHHRRRAIHRRDCKEFPELTPPFAGSPSPPEPAPEPAIEDLPAPALEGKPQFYA

SEQ ID NO: 67889 - protein, 49 aa, Zea mays
  Coding DNA Sequence Number=SeqID_26110
MGGALLHPNVSDLLAIRILSTRRGSLTTVGTWAHQKLRGGVVIGAARGS

SEQ ID NO: 67890 - protein, 55 aa, Zea mays
  Coding DNA Sequence Number=SeqID_26111
MGFVPIPDVIEPPKKQQNSAIFLTYNNMGLKTPEYGVYFRKSYPTKEKTLKDMLA

SEQ ID NO: 67891 - protein, 106 aa, Zea mays
  Coding DNA Sequence Number=SeqID_26112
  Subcellular localization annotation: CTP_CleavageSite=26; ConfidenceScore=5.17e-01
MASVVLWSQPDLSVRSVFIHRASRVLAFTVELLNMSFLACDFVIAKALTRFMSSPAHSKFGLVVVPCVIKKSQESGEDEASRVIFTKFAGGRFIAARRRGPVIVKN

SEQ ID NO: 67892 - protein, 115 aa, Zea mays
  Coding DNA Sequence Number=SeqID_26113
  Homolog annotation: Hit_ID=UPI00004C1733; Match level="QueryCoverage =32%, HitCoverage=2%, E-value=7e-09, Identity=78%"; Hit description =UPI00004C1733 related cluster
MARVACTLRGKRLDGGIFVLSIGMNPFCHLRSLRRGQVYVGPISWEVPSQDLKAMNDVCEECYCLFGFDASERLDLNPFGEFFNGKQQQYESLRPLSQASGLGLAKREFSSKDKL

SEQ ID NO: 67893 - protein, 71 aa, Zea mays
  Coding DNA Sequence Number=SeqID_26114
MTPVGQSRSNWDNDVIVAEAGDGEDVERLLVQVFVEDLMSTTQILHCLLNHNNTQHDYSEIMKTITSHSSN

SEQ ID NO: 67894 - protein, 116 aa, Zea mays
  Coding DNA Sequence Number=SeqID_26115
MSSIFQPDTRSSKSPEPSPTGRRKLAELLQEAMQDGPEESADEEEQQQQSLSAAADGKPPVSESTSSSACSTVPTPVAVAKSRKEKACCVMDHAGFVVFSADRAYDKGRLTAKNVM

SEQ ID NO: 67895 - protein, 184 aa, Zea mays
  Coding DNA Sequence Number=SeqID_26116
  Homolog annotation: Hit_ID=UPI0000D9C0B2; Match level="QueryCoverage =47%, HitCoverage=63%, E-value=2e-10, Identity=41%"; Hit description =PREDICTED: similar to e(y)2 protein
MRWGDGFRRESINRPPTPSAVEDRDKEPSLVEIINIKFVESGEKEKLTELLRERLVECGWMDEMKAFCRDYVRKKGRNNVRVDDLIHVIVPKGRGRTPATYPVLHGYHTSVVIYRDGWSYMYHCTNTGRSILLGTKGAGTEHEKDQCDLHDAIDMFLVRQAVGVISGVATRSYNPEYCTVKGTL

SEQ ID NO: 67896 - protein, 122 aa, Zea mays
  Coding DNA Sequence Number=SeqID_26117
  Homolog annotation: Hit_ID=Q5JJJ9; Match level="QueryCoverage=87%, HitCoverage=22%, E-value=3e-36, Identity=72%"; Hit description=CBS domain containing protein-like
MAAVFFHHVVGDLTVGKPEVAELHDTDTLDDAARAIAASPEGAVPVWRPRAAPDDPPSGARFIGMISALDIAAFVASAGVGDRSMRAVVGEVVQPNPALLREIDPGTRSESFPGLYMGKIQI

SEQ ID NO: 67897 - protein, 151 aa, Zea mays
  Coding DNA Sequence Number=SeqID_26118
  Homolog annotation: Hit_ID=Q10NM2; Match level="QueryCoverage=49%, HitCoverage=28%, E-value=3e-15, Identity=50%"; Hit description=RNA recognition motif family protein, expressed
MGEEQEGREEIYRSARVHYFAHLATLLCNSIGGFSHNSGDHYNEPFMNVDSSDAENPGKQPVIDASIVYDPWTMEPRGFGFVTMAATKEADHYIKYLDCSVLQGQVIIVKKCISIFTDETTISVFNESVELNCKNRNCSILFECTNRTQRN

SEQ ID NO: 67898 - protein, 122 aa, Zea mays
  Coding DNA Sequence Number=SeqID_26119
MEGGPSSTPVGGQAVDANHGGFETPLVLLPLVRLAGPSSFAGREKAGGREGGADPGGVQLCEKKRHRGWTTAPQRECWGGACGSWCRIARREEAFDGMGFPARRRQLRVKKRCRGHTITPPS

SEQ ID NO: 67899 - protein, 120 aa, Zea mays
  Coding DNA Sequence Number=SeqID_26120
MGACASVHKDPGHPKKQFLDSPTKAKAANGKGGGGGGVAPVGDGFGDLKSKVDAEAEQLRAEFNPKNPDSGSKDEVFFESRAWLDSDCEDDFYSVNGGSLMTQLYLSLESNGVRMTISDS

SEQ ID NO: 67900 - protein, 439 aa, Zea mays
  Coding DNA Sequence Number=SeqID_26121
  Gene Ontology: Mol. function=transferase activity; Biological process= metabolic process
  Homolog annotation: Hit_ID=Q118M0; Match level="QueryCoverage=70%, HitCoverage=88%, E-value=9e-16, Identity=26%"; Hit description =Glycosyl transferase, family 9
  Subcellular localization annotation: CTP_CleavageSite=38; ConfidenceScore=5.40e-01
MQTPTMSTSMATTAPAKPPAPPRQCCRYLLLPSTGHRRSVAAWSAKKKNPWLDPFDDGPDEEFDYQGMFSGGKQEEDPRPPEDPENPYGFLRFPQGYNPELDSLASKMLKDRYPGVLVDVVASARGKQVYEMCKNVRYANVYDPDDDWPEPAEYTHMLGVLKNRYYDLIISTRLAGIGHALFLFMSSARDKVGYVYPNVNSVGAGLFLNEMFKAPTNNLADGGYHMYKDMLEWIGRPAKNVPQQPTQPLRVSISKKLRAYVEDKYSRAGVEKGKYVVIHGIASDSVANMKSRGDDDCLLPLGHWAQIAKEISSGDRGLKPLFVIPHEKHRDEIEEEVGDDTSILFITTPGQLTCLINDSAGVVATNTAAVQLANARDKPCVALFSSAEKARLFLPYVEGKSSCTVISSATGNLIDIDLNAVKNVVKDLEPAPSFALAQK

SEQ ID NO: 67901 - protein, 92 aa, Zea mays
  Coding DNA Sequence Number=SeqID_26122
MDHRIARSTRGGGRPKFGDGESASLVRQYLGSSLEKLHGFTGKRSRGWGKARATSRRARQGDHARGTRCRGQSVLGRPDTASSKWLFAPARV

SEQ ID NO: 67902 - protein, 58 aa, Zea mays
  Coding DNA Sequence Number=SeqID_26123
MQIIERKCEAQKGAGISVKYLTLNLGYGYKHEKTSKDMRNDPKISPWKDLSGIKTLMY

SEQ ID NO: 67903 - protein, 70 aa, Zea mays
  Coding DNA Sequence Number=SeqID_26124
MALAGVGRLSTKTKKKLIPERPTRNGSGEMARVACTLCGKRLDGGVSVLSVGVNPVWPYETRWRVDICKA

SEQ ID NO: 67904 - protein, 76 aa, Zea mays
  Coding DNA Sequence Number=SeqID_26125
MAELQSRAPEVDYPGENLCRVGPTVRVVFDPDLGSVTLDALLVGVKPAARGMLRRVQALGVADDVLGVGSSSNGGD

SEQ ID NO: 67905 - protein, 51 aa, Zea mays
  Coding DNA Sequence Number=SeqID_26126
MAKVVVQALVVEGGRSSSQEAAGFGMKLEPLLVVVVRHMQLESGLPKPLKM

SEQ ID NO: 67906 - protein, 46 aa, Zea mays
  Coding DNA Sequence Number=SeqID_26127
MAAAELREQLNALLSSMITLISSLSSVLAVGVRLYVPRCRPVDMHI

SEQ ID NO: 67907 - protein, 362 aa, Zea mays
  Coding DNA Sequence Number=SeqID_26128
  Gene Ontology: Mol. function=RNA-directed DNA polymerase activity; Cellular component=intracellular; Biological process=RNA-dependent DNA replication
  Homolog annotation: Hit_ID=UPI00004C1733; Match level="QueryCoverage =99%, HitCoverage=28%, E-value=0.0, Identity=90%"; Hit description =UPI00004C1733 related cluster
  Pfam annotation: Domain name=RVT_1; Domain location=35-204; Score =144.8; E_value=2.3e-40; Accession=PF00078.17; Description=Reverse transcriptase (RNA-dependent
MKQPLRRFDEEKRRAIGDEIHKLMVAGFIKEVFHPEWLANPVLVRKKGGKWRMCVDYTGLNKACPKVPYPLPRIDQIVDSTAGCETLSFLDAYSGYHQIKMKESDQLATSFITPFGMYCYVTMPFGLRNAGATYQRCMNHVFGKHIGRTVEAYVDDIVVKTRKASDHLSDLETTFRCLMAKGVKLNPEKCVFGVPRGMLLGFIVSERGIEANPEKIAAITNMGPIKDLKGVQRVMGCLAALSRFISRLGERGLPLYRLLRKTECFTWTPEAEEALGNLKALLTNAPILVPPAAGEALLIYVAATTQVRPVYFISEVLSETKIRYPQIQKLLYAVILTRRKLRHYFESHPVTVVLSFPLGEII

SEQ ID NO: 67908 - protein, 102 aa, Zea mays
  Coding DNA Sequence Number=SeqID_26129
MLATVRLGSAAVQIAPVRGNWRVGPTLVPQNADIGAEVELGSRRANHAELATVRLGKIPTGGPLMPVEGGIGARGEELVLTGGVHTEVTAAMEWEWAAVRLR

SEQ ID NO: 67909 - protein, 456 aa, Zea mays
  Coding DNA Sequence Number=SeqID_26130
  Homolog annotation: Hit_ID=Q9SI07; Match level="QueryCoverage=89%, HitCoverage=77%, E-value=2e-89, Identity=41%"; Hit description =Expressed protein
MDPNRPPLGRRAFLSSSVHAATALLSILLLVTLLRLPLSTSPHAASTIADQKPKEQTCDPTSPLDCADPRLFHLMMRSAIEAFPAVHFARFGRPVPGDPPSSSCDMAWRSRSDFDSPSKATTKDYRRFAIGRDPHTCAYSVLSIGDYHSGPNARKPRRGATNATIATPPPPALSRSQFAKGAYLAYLGGGDRCKPMPHYLRSLLCALAEARYLNRTLVLDLTLCLAASYAAPGTGEMPEEGKRLAFYIDVEHLHSQVPIIEERQFWADWDSWGVQGQLRAHLIEDTRLALIKFSKVKDTLIIRKFGDVEPGNYWYNVCEGEAKHLLSPLHWVIRWTPSLMHIVDDILSRMQPDFDSVHIDAKGEDLRQRVEEVLGGGRQVYVAGVGVNRALLESLKEKCIVHYLDEFEDLWGTDSKWFLEMKRLNGGVPVEFDGYMRDVVDREVFLKGKKKVEVLR

SEQ ID NO: 67910 - protein, 585 aa, Zea mays
  Coding DNA Sequence Number=SeqID_26131
  Homolog annotation: Hit_ID=Q6YYY6; Match level="QueryCoverage=75%, HitCoverage=89%, E-value=3e-27, Identity=29%"; Hit description =Putative auxin-regulated protein
  Pfam annotation: Domain name=DUF966; Domain location=29-459; Score =32.5; E_value=3.9e-14; Accession=PF06136.4; Description=Domain of unknown function (DUF966)
MSSEEVAKMEAEMAQMRRCSSPGQGGVPVTVVYYLCRSGRHLEHPHMLEMHLASPNQALYLRDVICRLDELRGKGMATMYSWSCKRRYKTRFVWHDVMEDDMLLPAQESEYVLKGSLLPLRHSTPPIVGAAPPTKDHDQLNIDTTIIPKAPCVKANPHEESPTHSQKGWTTNSSSSPPMVEDEEPPPVALHQGSQPALSSISPSSCCTTGDGDDETASPHPSCSGRPSSPNKSTTKGSSGGTLYPTPSSLALHSKQMMPGCCYVIAAAQDLATQTQGISTGKEIHKDTSCSTDSTPAKATIPTNNKQRDNAGYFYSRSGRSGTLESLIRAEAHGRRVATAKRTQEEDDDKEAVQSFATKLNPANLLMRLVACGSTMSARQHLPACSLMRTAHKPRYLTQHVEFLPSSPVLSPLGTLIMRPRSADEARGASDSGDCNHCRGKLLQTTENRCESGKVMSTIVRPSSHCDHNSVSEKEVPIANLDNLEDGSKLISQKIRMAPCQQHTSGTFVTTDVGGEQKSNTLSRSTSKKMINPSSRPSRVSFHDEREKVIKIEERNRIEYLANTNKAVWGRKFPPKVYYVRLADQ

SEQ ID NO: 67911 - protein, 92 aa, Zea mays
  Coding DNA Sequence Number=SeqID_26132
MAIDQDGSHLPQPEDVKPLPATVLLHAVLDAVPGSRVLPEDGKLLPAAAPLPQLAILDSTPGSHLQPPAIALPPLIDGHTPHFPQVDHRAGG

SEQ ID NO: 67912 - protein, 255 aa, Zea mays
  Coding DNA Sequence Number=SeqID_26133
MARLQAATCRPQGLAHPPLQFTVLIHSHVDSKNMYGWVVMSPLELATAQDVELIKLGSKGVAMHSIIARGQAAFEGWGMSWGGSQEHGGHRDRLRLAVLRLWHAASWRNINHGKRWRGCRQRLDVFRLQHVASWRGIKHGKWQQWRGCRLRSVVPWHIDLHRLAGLADPPLQFTVLIHSHVDSKNMSGWVALPPLELTTAQAVELIKLGSKGVAYDAWILLKIHVPVSDTVSDTDTPRILLDTYLRRIENSCEFK

SEQ ID NO: 67913 - protein, 117 aa, Zea mays
  Coding DNA Sequence Number=SeqID_26134
MSQRKDFEMSFCQGGVPILLTQTPLDLWESLATSHTCLEAADGEVVSLRAHLEEADRRGAELELEVSGLQEGADRVVALVHAQGADREERLLDASNWVLQAVHRGAHRGAADALAFV

SEQ ID NO: 67914 - protein, 139 aa, Zea mays
  Coding DNA Sequence Number=SeqID_26135
MTYEPLDLRCTHDLLRLGLSVQAIYMAYNTMSHAETQAIKTRGWRGIEAVMMASRPMLSIIMSMSQDNRVTNTHTNNASSPRPRKEHYKLSVSCFDYTCIENKNEEEESDPRTRAQRTRVKTLCVVTRSLEWILDLERL

SEQ ID NO: 67915 - protein, 139 aa, Zea mays
  Coding DNA Sequence Number=SeqID_26136
MEQRRPAMAGPREDEGGQGAGTRGARRELHGEGDELKRPERALGHGGGEGAGSRARLPWAMGLGEAAMFVLEGRWTSAGEESVGMRVRKKKLGCGLQEYQARSATAAKASSEGWRLCLRPNICPPRDQFDKVTWCRRRR

SEQ ID NO: 67916 - protein, 103 aa, Zea mays
  Coding DNA Sequence Number=SeqID_26137
MAGAKGSTQTNKKIEVRVQKKEQKKPKNPGLAHRTVRCATGQCPVQHRTVSGALGRIDLKLFTFGFLQAHSAIIHQTVQCATGLSGAPSGATAISTTVDCAVP

SEQ ID NO: 67917 - protein, 77 aa, Zea mays
  Coding DNA Sequence Number=SeqID_26138
MTYTLHSYAYIEVISAAYLSQAFEHTKHMSGNMVTDSTSAFGKPNPLIQTASRSRGRGVDSSHRVYCVFSESHHRVS

SEQ ID NO: 67918 - protein, 100 aa, Zea mays
  Coding DNA Sequence Number=SeqID_26139
MASGSICATMGPCLLPVVAFLHSHPECPLRLLRGVIGNYLHHEVAPLMARQLPLYKMYVNTPTEGTRLSTLSPSDAEIASWLRETMEVCKGAEKPGDQSR

SEQ ID NO: 67919 - protein, 165 aa, Zea mays
  Coding DNA Sequence Number=SeqID_26140
  Homolog annotation: Hit_ID=Q8GVD4; Match level="QueryCoverage=18%, HitCoverage=22%, E-value=7e-09, Identity=70%"; Hit description =Glycine-rich protein
  Pfam annotation: Domain name=GRP; Domain location=1-73; Score=70.8; E_ value=4.5e-18; Accession=PF07172.2; Description=Glycine rich protein family
MASKALLVLTLLLAATFLAASANEQAKAAKEEKKVEVQDWHGGGGYPGHGGGGGGGYPHCRWGCCNRGYHGGCRCCSHPDQIPEPMYRPELVELITQTESAAFSAAPKHRRLWDVIKLGVGDGKCRDDQNTLVALLRPMHVAGYAGCSGSKIYCLRDVGGDLMRV

SEQ ID NO: 67920 - protein, 75 aa, Zea mays
  Coding DNA Sequence Number=SeqID_26141
  Homolog annotation: Hit_ID=Q7F0I5; Match level="QueryCoverage=98%, HitCoverage=9%, E-value=6e-13, Identity=48%"; Hit description =Putative cyclopropane synthase
MGTTDMSFSASMRLNKGKTFKWGSHGCMSGVLAQKSNLLSPRFWLVFHEIFKIKNHAIKYLEDHRSSPDPNETLG

SEQ ID NO: 67921 - protein, 579 aa, Zea mays
  Coding DNA Sequence Number=SeqID_26142
MALAIGGVHVDESSALGRNVFGVKRVVFPVAEMPVPARRLLRKRLRSELDAVRDLLSKAELYSCASGAAGKDDDRLFVPEAAVEDDGRRKASPCAGRKRESTKPDDRERLAGRLASMAAVLPDHVVAFLQDRRAGDADSRGGDGEIETDVQSMKDGALFQLKVLLDKFAPETTPKLVPRAPRVGSGISCLSQARHQEAGDRIPPVQEEGQGINVCGGVSRISIQDIAEEYGELVNGIRVQLLSPLQRKYVDLAEQGGYIDICGDASPVVFPAKTGDSSSPNLSSSSDSDATSSTDSDSSSSSPEAGEPVPAPEADPIQGKHNTHSQPPEPAPEAIQIAEPENQCPATVCAITKSPPAPTVLPKECGTLAQQPPGPPPLEQAPEAVQIAEPGELKEKCVAAGATMHPITGSAPPPAVLPNGNGTSSQPAPVAAQIAQPQVVQPEGVRRARTQTNDLIAMARQEGKRRAMAKARRELLELERAVLPDERIHPLDMELLGIAAFEHVVSTVRDARTAQPRVNYGVGLSVSPGRPSILQQLGLFLKADGGGEEEEGEEERPPPLAVASDGEDMDMEVEDGQIL

SEQ ID NO: 67922 - protein, 118 aa, Zea mays
  Coding DNA Sequence Number=SeqID_26143
MEKKISEFEVSNAEKDKRIASFEGELKRAREEYEVETSKIRLESVEVVVILNLAQVKMGDLNDVINHIRQLNENYLILMRNCYTLGNRCRNELQRTFSSAGERSQERNLAYGDLEGIM

SEQ ID NO: 67923 - protein, 176 aa, Zea mays
  Coding DNA Sequence Number=SeqID_26144
  Homolog annotation: Hit_ID=Q94CG6; Match level="QueryCoverage=31%, HitCoverage=12%, E-value=6e-20, Identity=84%"; Hit description=Seven transmembrane protein Mlo9
MDVKKVFKGKVEEQCSKIEDLRNNMFQGEIFVCSFDYLFIFARQTYMKGIVSQSSDNQYWDIWNRQKLSPEFEVKRQNILRANQGIELCQLNIILLAYISFQWQIGISGAFKSGRLRSHMSQQLEGNQHLPNPIHSALGAKIMWWLVCFIAQFGQSLVRADYLILRKGFIMVDMDA

SEQ ID NO: 67924 - protein, 82 aa, Zea mays
  Coding DNA Sequence Number=SeqID_26145
  Subcellular localization annotation: CTP_CleavageSite=76; ConfidenceScore=5.44e-01
MVFSVLVHSTPKKLQEKFNVGVPETSRSHFAAVPTGTSSKRHAARKWKRSLSDPFRSRPHSAPELVSGCKGSPPVPVAPEAR

SEQ ID NO: 67925 - protein, 95 aa, Zea mays
  Coding DNA Sequence Number=SeqID_26146
  Homolog annotation: Hit_ID=Q5YLM3; Match level="QueryCoverage=87%, HitCoverage=9%, E-value=4e-36, Identity=91%"; Hit description =Roothairless 1
MEELHYLVPYYLILQIESRNNGLEMQSVNNKGLMEELDKLLERLWIPHEFTTSLTGGSFEESWMLKNVEACEWLTGAIRSLEVPNLDPCYVNMRA

SEQ ID NO: 67926 - protein, 253 aa, Zea mays
  Coding DNA Sequence Number=SeqID_26147
  Homolog annotation: Hit_ID=Q9LW61; Match level="QueryCoverage=35%, HitCoverage=35%, E-value=3e-17, Identity=47%"; Hit description =Arabidopsis thaliana genomic DNA, chromosome 3, P1 clone: MLM24
  Pfam annotation: Domain name=ENTH; Domain location=27-121; Score =15.7; E_value=1e-06; Accession=PF01417.11; Description=ENTH domain
MAASTARWQLLAGQVKRQASGFLQDKYKQARLALGDEATNNEPCVPDAKTLACIADSAFDMDDFWRIAKVLHQRLSRAADWKEWRPVYKALVVLEFLLTTAPRTAIRVSHEVRGGGVVGGSPTSSSSPSSASSSASSRTSRTWSFGGSSHYSDGPAMCLTCASDADYRHDKKCDAYTADDDCWASSNHKSSRWAARLDESDGEDQHQGLMDDAWDAHLVEDSTSTWSARLLGSLSLSTSRASGFQSLSQPEQR

SEQ ID NO: 67927 - protein, 92 aa, Zea mays
  Coding DNA Sequence Number=SeqID_26148
  Subcellular localization annotation: CTP_CleavageSite=30; ConfidenceScore=5.03e-01
MAAEPAATAAASAAAAISAVMDWRSSPDARAAAFAYLESVCSTPLPRHLLFPFGLRFPESAFGLLNCSFDRCCIVLWRAFLVDAACCGWIFA

SEQ ID NO: 67928 - protein, 104 aa, Zea mays
  Coding DNA Sequence Number=SeqID_26149
MPPKRANSKATASIDDVAKEALLAEKKGKAPIADDIPQEAFDDEAIKSKRQRQHNLPTPEGTARTCSSKGVPQAPSPGFVHLEGEDTIEDGEIIGITAEDQLKL

SEQ ID NO: 67929 - protein, 45 aa, Zea mays
  Coding DNA Sequence Number=SeqID_26150
MANSTVGITPAREHQRARDTARRANGGVDQLRVFNPNSNQVSNSN

SEQ ID NO: 67930 - protein, 112 aa, Zea mays
  Coding DNA Sequence Number=SeqID_26151
  Subcellular localization annotation: CTP_CleavageSite=53; ConfidenceScore=5.30e-01
MLGHRRRSPLFVHAITDLTALRSRLNVASSKRSTALGVVVDRQQGPVMVITVTVAMLMEPINPPCSHFVCLISTKPNSSFLSCESNQPLAITFCPPSSVINGVPLNRFLPPP

SEQ ID NO: 67931 - protein, 498 aa, Zea mays
  Coding DNA Sequence Number=SeqID_26152
  Gene Ontology: Mol. function=zinc ion binding; Cellular component =intracellular
  Homolog annotation: Hit_ID=Q69WH1; Match level="QueryCoverage=63%, HitCoverage=100%, E-value=3e-79, Identity=50%"; Hit description=RNA -binding protein-like
  Pfam annotation: Domain name=Extensin_2; Domain location=1-359; Score= -104.6; E_value=0.003; Accession=PF04554.4; Description=Extensin-like region
  Pfam annotation: Domain name=zf-RanBP; Domain location=261-292; Score= 29.8; E_value=9.3e-06; Accession=PF00641.9; Description=Zn-finger in Ran binding protein and others
  Pfam module annotation: Pfam domain module=Extensin_2::zf-RanBP; Domain location=1-359::261-292
MRPRGRGDDVEDDEDEYEDITPPRRTPEPEADPVRSPSPSPAPAPAPPHPARAPLSSLVVRPPPQQQENGGGSSPPSSSARSLSPSTGGHRGRGASPPRRRRDFSPPPPRGWVRRRSPLPPPPERRRPGSPPPQRRRFSPPPRSHLPRHPRFHDEQEATNYTVNYQKAAIQLSCSGNGYGMHAGPSPPRRAEASKFDDDVSPRYTHGYQGGGRGGARFREGPPPYGRGRSYGRGYGAPHGKDLINIDGEYVHRNDPNLSPREGDWICQNPNCGNLNFARRTHCNNCNKFRYSAREAYEPRRSPPFRSYPSPPRGPPRMVGPPGDRAPAREMARYRSPPHGWGASDPRAYAGRSPPERAGRFTDPSTKGRMGFRGERDPRDRVKYEWSATDDYVQRERPYDGYLDRSRRRSGSPRGNWGNDLRDRSRSPARNRPMKSSFTGRGRPDDYAADPYGSRGRPNGMEAGRGRGHAYRAGSGPYPGETRGDQRAAPRARNEDGY

SEQ ID NO: 67932 - protein, 69 aa, Zea mays
  Coding DNA Sequence Number=SeqID_26153
MARGSVLPHLRTRCVSLAVGARLTIRSTARFLWREGPNWQHALPGVRIAGAGDGAVVHRGRRRRRGKRE

SEQ ID NO: 67933 - protein, 227 aa, Zea mays
  Coding DNA Sequence Number=SeqID_26154
  Gene Ontology: Mol. function=nucleoside-triphosphatase activity; Cellular component=membrane; Biological process=defense response
  Homolog annotation: Hit_ID=O24003; Match level="QueryCoverage=82%, HitCoverage=82%, E-value=2e-67, Identity=66%"; Hit description =Hypothetical protein precursor
  Pfam annotation: Domain name=BSP; Domain location=19-221; Score =345.7; E_value=7.7e-101; Accession=PF04450.3; Description=Plant Basic Secretory Protein
  Subcellular localization annotation: CTP_CleavageSite=82; ConfidenceScore=5.16e-01
MDLRVAAAVSLLLALATTTGAVTFNATNTATGTIGGLRFDVAVGLDYANLVLSNASAFIWSSAFNQTRPADRKPVDAVTLVVAADVSGAAAFTAADVITLSAPYVGNYSGDVRTEVTGVLFHETTHVWQWDGQGHANGGLVEGVADFVRLKAGYAPAHWVKPGQGDRWDQGYDVTARFLDYCDSLKPGFVALLNAKMEDGYTDDFFAGILGKGVQQLWQDYKANYDA

SEQ ID NO: 67934 - protein, 103 aa, Zea mays
  Coding DNA Sequence Number=SeqID_26155
MAQGHISLSEPLGVREVRGVYPSNAGPPRAWNILIVSTMSSGKHLRTSPQQGHFKFELISLSRTYRFFVEITIPGILPDKGYIGLHALAKKNLIGIRTTNKSF

SEQ ID NO: 67935 - protein, 93 aa, Zea mays
  Coding DNA Sequence Number=SeqID_26156
MALLDPPERLQPEVALNLVRNPLEWDTRTPIAEWWSVQAYGQQAGFMRVDLTGLAYTWGSAYGTLLGSVLAIGLGPDPGLPSVFADRVHVLTL

SEQ ID NO: 67936 - protein, 59 aa, Zea mays
  Coding DNA Sequence Number=SeqID_26157
MSHFGRVWLAMPPTYASPELEDGQLGAKVVIDKDMLAPPKLALLVSNAEDANLALLVAS

SEQ ID NO: 67937 - protein, 209 aa, Zea mays
  Coding DNA Sequence Number=SeqID_26158
  Homolog annotation: Hit_ID=Q8W1N6; Match level="QueryCoverage=41%, HitCoverage=18%, E-value=4e-24, Identity=69%"; Hit description=CSLA7
MQAALVCLLGSTRRFHARLASLGRGDLKPDWPTMRADALHAISVYVSGMLTVRETLLFATEFRLPYALSSERKRARVDQLGLFCAADTIIGNEGHHGTSSVAASCTRCVLVMQVAAWAWAAYTRSCTTTSLVYASRPLGGGSSGGSSGSPSTAPTGDKRSAHFPMVLVQMPMYNELEVHKLLAAACELQWSKDMIIVQVVDDSTDPFIK

SEQ ID NO: 67938 - protein, 48 aa, Zea mays
  Coding DNA Sequence Number=SeqID_26159
MAVPGTGRFLLRRRLGTAVRRMGVTRTHACEAICAAWQFLLRPFEIEI

SEQ ID NO: 67939 - protein, 129 aa, Zea mays
  Coding DNA Sequence Number=SeqID_26160
MAVLAMAHSPDAVPGRVPLPRTVPRPGALRYNLPDMSGEPAEQRLTRANGRLQKCTVMNSVAQKSEHRSQRSLDMSGVPPDCPVQQKDKGFQRSTAPNPNGRAPDSEQWLSGAPPDCLVCPSPAESANS

SEQ ID NO: 67940 - protein, 407 aa, Zea mays
  Coding DNA Sequence Number=SeqID_26161
  Gene Ontology: Mol. function=oxidoreductase activity, acting on paired donors, with oxidation of a pair of donors resulting in the reduction of molecular oxygen to two molecules of water; Cellular component=membrane; ...
  Gene Ontology: Cellular component=Biological process=fatty acid biosynthetic process
  Homolog annotation: Hit_ID=Q6Z9G4; Match level="QueryCoverage=99%, HitCoverage=100%, E-value=1e-179, Identity=67%"; Hit description =Putative Omega-6 fatty acid desaturase, chloroplast
  Pfam annotation: Domain name=FA_desaturase; Domain location=122-352; Score=170.0; E_value=6.2e-48; Accession=PF00487.14; Description =Fatty acid desaturase
  Subcellular localization annotation: CTP_CleavageSite=28; ConfidenceScore=5.33e-01
MSTASGVSAGSVLQLPSFRVPAKRFLPRRTAAGAPAGNFFVKRDIIYNRSYHQFLPLKHIGGLQAAVLPVTPPLLDGEGKKKQMAEEYGFTQIGDELPDDITLKDVMDTLPKEVFEINDVKAWTSVLISVTSYALGLYFIAKSPWNKLVEDVVGTLAFMPLIYPYEPWRFKHDRHHAKTNMLIEDTAWQPVWQKEIESSPFLRKAIIFGYGPIRPWMSIAHWLIWHFDLKKFRPNEVPRVKISLACVFAFMAIGWPLIILKSGLAGWFKFWFMPWMMSTFTMVHHTAPHIPFKSSEEWNAAQAQLNGTVHCNYPQWIEILCHDINVHVPHHISPRIPSYNLRAAYDSIKQNWGKYVNEANWNWRLMKTILTRCHVYDKERYYVPFDELAPQESQPIKFLRKFMPDYA

SEQ ID NO: 67941 - protein, 91 aa, Zea mays
  Coding DNA Sequence Number=SeqID_26162
MKRHEWSLGYGASWKLRSGLIYGGVGAKIAWHVEEHGGTERGKRTSLRVSLFRAHFLLLERGFDVEGELDRLSLGSLALPGKKGKITLLPS

SEQ ID NO: 67942 - protein, 70 aa, Zea mays
  Coding DNA Sequence Number=SeqID_26163
MDLCSLPMEPCSPLAVLCLSHPALEDKPNVNHHNASNNNREGLALCGVKVKQLLLVDQVAHFTHEPWFPL

SEQ ID NO: 67943 - protein, 73 aa, Zea mays
  Coding DNA Sequence Number=SeqID_26164
MALRARFAARPLSRCGPVLAARYLIRDGWFTGGDKDDGYDYGNGCLWCNLCSGKEEGVEANLQEFQDFDEFED

SEQ ID NO: 67944 - protein, 201 aa, Zea mays
  Coding DNA Sequence Number=SeqID_26165
  Gene Ontology: Mol. function=transcription regulator activity; Cellular component=nucleus; Biological process=regulation of transcription
  Pfam annotation: Domain name=HLH; Domain location=26-77; Score=31.1; E_value=3.8e-06; Accession=PF00010.16; Description=Helix-loop-helix DNA-binding domain
  Subcellular localization annotation: CTP_CleavageSite=23; ConfidenceScore=5.04e-01
MEMRAKKSSRSSTSNTSGSTTTTAVERKEIERRRRQQMKSLCAKLASLIPKEHYSSKDAMTQLGSLDEAATYIKRLKERVEELRHKSASARLLAAGSGTRRGGGGGGASTSSAATTTASGGAGSSEEAGRREDDMPPAVVEVRQHNDGSSLDVVLISSAARPFKLHEVVTVLEEEGAETVNANLSVAGTKIFYTIHCKLLS

SEQ ID NO: 67945 - protein, 419 aa, Zea mays
  Coding DNA Sequence Number=SeqID_26166
  Subcellular localization annotation: CTP_CleavageSite=58; ConfidenceScore=5.43e-01
MKPWKETSRSSKTTTSSRRGLAATPSRLPVKAAVIYVSFSYFDLLTHVDTRTGTSRMKCSSAKECQRTKYAAGTNVQVAPVAIPAEVQDIPAQHTQDHEVVPGPTEVQGNPVKYSAEQLGSHTMNCDLDNRVNSVSSKDAVEHDHVHSALPDAHRGNTHADTITNDGEPIGANNNGKVSRLTYGEDKFRPGIQRSENHTESMEGLSCLQRAGDSVGSPASINNTGLPKNNVSSEAHIDDNELRRNDLVNDVESNLIDDFFNSRRFLGFADEAMAQSGRTGSSGQARENSCNQFHQIWNYLELPNPMDEATPSIIHHNPNLTYQSSSCRCCINDNTKVTHHRKITSSSNLNGGIADNYLHTRHVKIVKAWPLHVPPMATEDTKMSIRDSVFSTDKQQNGGFEGLELEEGDCIVYLSAATC

SEQ ID NO: 67946 - protein, 87 aa, Zea mays
  Coding DNA Sequence Number=SeqID_26167
  Gene Ontology: Mol. function=protein transporter activity; Cellular component=nuclear pore; Biological process=intracellular protein transport
  Homolog annotation: Hit_ID=Q9SLX0; Match level="QueryCoverage=82%, HitCoverage=14%, E-value=4e-17, Identity=58%"; Hit description =Importin alpha-1b subunit
  Pfam annotation: Domain name=IBB; Domain location=4-83; Score=23.0; E_ value=1.1e-06; Accession=PF01749.10; Description=Importin beta binding domain
MSLRPSEREQMRKGNYKQTVDAEESRRRREGQMMDMRKAKREESLQKKRCDGFPASAAGVPPMGHSTALQQKMSAWYFFLNSHYNFM

SEQ ID NO: 67947 - protein, 73 aa, Zea mays
  Coding DNA Sequence Number=SeqID_26168
MELSMLCLLALSRLVDGGATTLVLIPRGEALIGKLSIGIEFSKIPLLFAIQRRTYSVNLMTSTTQQQLLSKSN

SEQ ID NO: 67948 - protein, 116 aa, Zea mays
  Coding DNA Sequence Number=SeqID_26169
MKSRRQSSGGSSGACAAGERNAHSSGGGCKLERKDVEKNRRLHMKGLCLKLSSLIPPAAATTHASLLSDAASAAVSSNPGNKQVTATRVCSGVTRHVIIWLRRTCRMPERRNSWAQ

SEQ ID NO: 67949 - protein, 453 aa, Zea mays
  Coding DNA Sequence Number=SeqID_26170
  Gene Ontology: Mol. function=protein serine/threonine kinase activity; Cellular component=chloroplast; Biological process=protein amino acid phosphorylation
  Homolog annotation: Hit_ID=P27450; Match level="QueryCoverage=77%, HitCoverage=79%, E-value=1e-113, Identity=57%"; Hit description =Probable serine/threonine-protein kinase Cx32, chloroplast precursor
  Pfam annotation: Domain name=Pkinase; Domain location=98-393; Score =149.8; E_value=7.2e-42; Accession=PF00069.15; Description=Protein kinase domain
  Pfam annotation: Domain name=Pkinase_Tyr; Domain location=98-393; Score=121.1; E_value=3.2e-33; Accession=PF07714.7; Description =Protein tyrosine kinase
  Pfam module annotation: Pfam domain module=Pkinase::Pkinase_Tyr; Domain location=98-393::98-393
  Subcellular localization annotation: CTP_CleavageSite=53; ConfidenceScore=5.65e-01
MGNICGGCGKDRVAEDFRPSSPGTTMTSKTSGSITTTSQSTTGKLSSVGSSFMASAGSRSTSGGFDEGAKYPDGGQILEAPNLRTFTFMELKTATKNFRLDSVLGEGGFGTVYKGWVDEKTMTPTRNGTGMVVAVKKLNSESMQGYEEWQMLTSIANLHCSIYLQSEINFLGRLSHPNLVKLLGYCWEDRELLLVYEFMAKGSLENHLFRRGCAPLSWELRLKIAIGAARGLAFLHASEKQVIYRDFKASNILLDANYNAKLSDFGLAKLGPTGSKSHITTRVMGTYGYAAPEYVATGHLYVKSDVYGFGVVMLEMLSGQRALDPNRPNGQLSLADWAKPFLADRRRLARLMDPRFEGQYNSKQAFQAAQLTLNCLAGEPRSRPSMKEVVETLEQIESVKSRAREARGGSSRDRHHGRAGATHQRSPRAGGEPRGRGGSRAAANGHAARAAAR

SEQ ID NO: 67950 - protein, 152 aa, Zea mays
  Coding DNA Sequence Number=SeqID_26171
MAETADASNALDHGLHYLRSTGNACAARALLWWGWDNSDAHAGMATSVELSLFLPPSVNFLGSCLLRQLHVLTADVAATHRLLCSSSGEHPLLEPPWRSATGRHDSSSPSDASRLFDEMCEKQNRDINDVFMCLIQIYFLKHSQIAFSTGTK

SEQ ID NO: 67951 - protein, 337 aa, Zea mays
  Coding DNA Sequence Number=SeqID_26172
  Gene Ontology: Mol. function=carboxypeptidase activity; Cellular component=proton-transporting two-sector ATPase complex; Biological process=ATP synthesis coupled proton transport
  Homolog annotation: Hit_ID=Q6ZGL3; Match level="QueryCoverage=80%, HitCoverage=67%, E-value=1e-110, Identity=67%"; Hit description=Leaf senescence related protein-like
  Pfam annotation: Domain name=DUF231; Domain location=241-331; Score= -60.1; E_value=0.011; Accession=PF03005.6; Description=Arabidopsis proteins of unknown function
  Subcellular localization annotation: CTP_CleavageSite=45; ConfidenceScore=5.29e-01
MRRKRATSVSPTASASATRRLRLLRLPLLAFALLAIAAVLRRHVSAPARRSVSEPDPLPCGAAPSDLTAGRWVATPRPVPAPLYSATCPFHSGSYNCLRNGRPPLAALSWAPARCGVVPRIDPSAFLAAAAGRRVGLVGDSLSENLAIALLCALRSADPNARRWKRRGAWRGGYFPRHDVTVAFHRAVLLAKYTWQPVEDPEQVHKDGIKGIYRVDVDIPADDWISVTKFYDVLIFNTGHWWGTYKFPRETPLVFYEGGRPIEPPLSIPDGLKRVIKSMAAYIDAEAPSTTLKLWRTQSPRHFHGGEWDRNGSCVTDKLLKEDEVLPYHQLSWDDIT

SEQ ID NO: 67952 - protein, 113 aa, Zea mays
  Coding DNA Sequence Number=SeqID_26173
  Subcellular localization annotation: CTP_CleavageSite=33; ConfidenceScore=5.01e-01
PLGQGRRKASHQLGAKHAAARDWGGSRHWAGWAAMARMGRRRRLLGQRDRGSTRGSWAARWPRRASRVERQHACAADDDAKATRTKTQQGGDADLTSQDDIGKHDAQGVPEST

SEQ ID NO: 67953 - protein, 109 aa, Zea mays
  Coding DNA Sequence Number=SeqID_26174
  Homolog annotation: Hit_ID=Q6ZGL3; Match level="QueryCoverage=85%, HitCoverage=23%, E-value=7e-38, Identity=73%"; Hit description=Leaf senescence related protein-like
  Pfam annotation: Domain name=DUF231; Domain location=4-98; Score= -27.0; E_value=1.8e-05; Accession=PF03005.6; Description=Arabidopsis proteins of unknown function
MLIFVVLIFVQLDAWFDPQFGGVNKDARTVNAVTEEALAGSSGIRLVNLTYMSEFRADAHPAAWLGKKGVVAAYGQDCMHWCLPGVPDTWVDVMAVQILHHFKRLEKGK

SEQ ID NO: 67954 - protein, 382 aa, Zea mays
  Coding DNA Sequence Number=SeqID_26175
  Gene Ontology: Cellular component=cytoplasm; Biological process =autophagy
  Homolog annotation: Hit_ID=Q3MQ01; Match level="QueryCoverage=99%, HitCoverage=100%, E-value=1e-171, Identity=81%"; Hit description =Autophagy protein 5
  Pfam annotation: Domain name=APG5; Domain location=103-378; Score =191.4; E_value=2.1e-54; Accession=PF04106.3; Description=Autophagy protein Apg5
MAAPHDEAAAWAEEAARRVWAGAVPLQVHLHDADVTALPPPPPFLTLGPRIGYLPLLIPVIRAHFSNALPPGVDTVCFDGHLLELNNAIVQHSLKLLTAFSILVFELSDPERPWNLIVHFRGYPSEILSPCEGEDSVKWSYMNSLKEATFIITGNSKSVMNMSHADQVALWESVMKGNLDGYKNISTRLKLGPFEDDVLVRTASVERQRQQNSDEPESPGSSKPCRVPVRLYVRNVQEDLEYIEHAVPVSDWENVSYINRPFETRKAEGRSYITLEHALQTLLPEFFSSKPPGSADGSQHAGAMDAAADSSDATNSSSRSQEAEQALASPAEAGSAKRAKVKLVRVQGVELDMDIPFLWVADHLKNPEYYVHICVYVGTRKQ

SEQ ID NO: 67955 - protein, 139 aa, Zea mays
  Coding DNA Sequence Number=SeqID_26176
  Gene Ontology: Mol. function=ionotropic glutamate receptor activity; Cellular component=membrane; Biological process=ion transport
  Homolog annotation: Hit_ID=Q6ZGL7; Match level="QueryCoverage=97%, HitCoverage=15%, E-value=4e-45, Identity=62%"; Hit description =Putative glutamate receptor
  Pfam annotation: Domain name=Lig_chan; Domain location=1-92; Score= -135.9; E_value=0.052; Accession=PF00060.17; Description=Ligand-gated ion channel
MAVAGQDFTSGGWGFAFPRDSPLQVDLSTAILTLSEDGELQRIHDKWLKTGDCSSDNTEFVDSNQLRLESFMGLFLICGAACVLALLIYFGITLRQYLRHEQPGSAISADSGSSTSKRSLRKFISFVDERQRSPKKNGP

SEQ ID NO: 67956 - protein, 155 aa, Zea mays
  Coding DNA Sequence Number=SeqID_26177
  Gene Ontology: Mol. function=protein dimerization activity; Cellular component=nucleus; Biological process=regulation of transcription, DNA-dependent
  Homolog annotation: Hit_ID=Q9AVC9; Match level="QueryCoverage=83%, HitCoverage=61%, E-value=7e-20, Identity=39%"; Hit description=RISBZ5
  Pfam annotation: Domain name=bZIP_1; Domain location=63-111; Score =13.5; E_value=0.0051; Accession=PF00170.11; Description=bZIP transcription factor
MDGGSWWYGNVRTPNPVMSQAASISASPGLTISANHALESESDSDSESLYEVEGVPYERGNRSIETKRIRRMVSNRESTRRSRRRKQAQLSDLESQVKMAEDMVARSVVSCDLGDLGLAPYVNSRKMCQALNVLTGLDLLGSDAFTYGARPHDTY

SEQ ID NO: 67957 - protein, 515 aa, Zea mays
  Coding DNA Sequence Number=SeqID_26178
  Gene Ontology: Mol. function=calcium ion binding; Cellular component =mitochondrion; Biological process=metabolic process
  Homolog annotation: Hit_ID=Q6ZKM5; Match level="QueryCoverage=79%, HitCoverage=91%, E-value=1e-175, Identity=75%"; Hit description =Putative drought-inducible protein 1OS
  Pfam annotation: Domain name=PPR; Domain location=192-225; Score=2.5; E_value=3.7; Accession=PF01535.11; Description=PPR repeat
  Pfam annotation: Domain name=PPR; Domain location=228-262; Score =25.1; E_value=0.00026; Accession=PF01535.11; Description=PPR repeat
  Pfam annotation: Domain name=PPR; Domain location=263-297; Score =24.6; E_value=0.00035; Accession=PF01535.11; Description=PPR repeat
  Pfam annotation: Domain name=PPR; Domain location=298-332; Score =14.5; E_value=0.14; Accession=PF01535.11; Description=PPR repeat
  Pfam annotation: Domain name=PPR; Domain location=333-367; Score =38.9; E_value=1.7e-08; Accession=PF01535.11; Description=PPR repeat
  Pfam annotation: Domain name=PPR; Domain location=368-402; Score =10.8; E_value=0.4; Accession=PF01535.11; Description=PPR repeat
  Pfam module annotation: Pfam domain module=PPR::PPR::PPR::PPR::PPR::PP R; Domain location=192-225::228-262::263-297::298-332::333-367::368 -402
  Subcellular localization annotation: CTP_CleavageSite=88; ConfidenceScore=5.24e-01
CPRLPTRPPARPPDATAAICPPAVIAAGLSRPPSGRHPFSSAHAQSSHPVDFPTIAACRAAISASKGDRRRRPGVGQHSSSPSPSLATAAAKEEQEQPVLVRIKHERDPERLYQLFRANAHNRLLVENRFAFEDAVARLAGARRNDLVEEILEQHKALPRGGGKGSWKAGMPGHALRTFQEMGMYGCPRTAKSLNATMKVLLRARMFDEALSLFEEGPEKYDVEVDDISCNTVVKMFCDMGDLRAAYRVMQGMERAGLRSDVITYMTLMAAFYKCGRHEVGDGLWNLMRLRGWVPTLATYNVRIQFLVNRGRGWQANEMARKIYVAGIKPDEITYNLIIKGFFMMGEHEMAKTVFGAMHGRGCKPNSKVYQTMVHYLCERRDFDLAFRLCKDSMEKNWFPSVDTINQLLKGLMAISKDRNGKEIMKLVTGRKPSYSYASLARNFLRYFEPPLFQRAAMAWSRQECGSTSWLQLDSRGGSGGLTICCNANAWDMGCRSKCHPDIRFPFLSKWTFRK

SEQ ID NO: 67958 - protein, 54 aa, Zea mays
  Coding DNA Sequence Number=SeqID_26179
MKHDSAFEAAFLEPKQLFVSTWYDDDDDPIGDTEMRSCLGALLVGSRAVAYRKV

SEQ ID NO: 67959 - protein, 208 aa, Zea mays
  Coding DNA Sequence Number=SeqID_26180
  Gene Ontology: Mol. function=zinc ion binding; Cellular component =intracellular
  Homolog annotation: Hit_ID=Q7F1K4; Match level="QueryCoverage=98%, HitCoverage=79%, E-value=6e-69, Identity=61%"; Hit description=P53 binding protein-like
  Pfam annotation: Domain name=zf-RanBP; Domain location=156-187; Score= 31.3; E_value=3.4e-06; Accession=PF00641.9; Description=Zn-finger in Ran binding protein and others
  Pfam annotation: Domain name=zf-RanBP; Domain location=90-121; Score =20.7; E_value=0.0027; Accession=PF00641.9; Description=Zn-finger in Ran binding protein and others
  Pfam module annotation: Pfam domain module=zf-RanBP::zf-RanBP; Domain location=156-187::90-121
MTRYGITQFPGGSAYPYGYGGRISMGSPYGPMQMAGPTAYSGGSMMGAGGMYGMPMDRYGLIPAGSGPMGTRAGSYSDEDSQKKSAGAGRDNDWECPNCHNINFGFRTVCNMRKCNTPRPENQYYDFTIVLEVDFAATRLPGSKPDGLRGSKPKTPEGSWKCEQCNNINYPFRTKCNRPQCGAEKPSQTNNANESAEDQDNQVLSEWL

SEQ ID NO: 67960 - protein, 91 aa, Zea mays
  Coding DNA Sequence Number=SeqID_26181
MAPLGFAWATIGPEELELNRHGTAPDFNHPCADLANNTPPDPRRVGRRLVEIWGRVREVEDRPEEVAPRVRARIAWGKKVYGEKELRAGWS

SEQ ID NO: 67961 - protein, 434 aa, Zea mays
  Coding DNA Sequence Number=SeqID_26182
  Gene Ontology: Mol. function=oxidoreductase activity; Cellular component=cytoplasm; Biological process=flavonoid biosynthetic process
  Homolog annotation: Hit_ID=Q6YYX9; Match level="QueryCoverage=91%, HitCoverage=94%, E-value=1e-118, Identity=57%"; Hit description =Putative iron deficiency protein Ids3
  Pfam annotation: Domain name=2OG-FeII_Oxy; Domain location=282-381; Score=139.8; E_value=7.5e-39; Accession=PF03171.10; Description=2OG -Fe(II) oxygenase superfamily
MAAIAEDRQPQHGVNREAATKAVHTQLQMERSDEGDSRSQEEGSYCYCLVKSVSHLSRNNRGFTTLPERYVLPPSDRPDDDGLGRVKLPVVDLARLRDPAYRASELDTLDAACRSSGFFQASTLHAQACHLLGRVCIHTDRPKIKAHACICMYVRVQVVNHGVAPELVEGLLDVARRFFELPLVGRARYMSPDVRAPVRYGTSFNQAKDAVLFWRDFLKLACQPLHAVVASWPDEPADLREVAARYAMANQQLFMQLMGAALEALGIPCHRSQGLLRELEAGYSQIMLNCYPACPQPDLTLGLPPHSDYCLFTLLLQDQVKGLQVLRRGHWFTVDAAPGSIIANVGDHLEIYSNGLYKSMLHRVRVNSTQTRISVASFHSVPAERVIGPAAELVDEANPRRYMDTDYATFLNFLASAEGKHKTFLQSRKLPMLS

SEQ ID NO: 67962 - protein, 103 aa, Zea mays
  Coding DNA Sequence Number=SeqID_26183
  Subcellular localization annotation: CTP_CleavageSite=33; ConfidenceScore=5.24e-01
MADQASVTQGIPSSALCGTVLLCSTSGVLSSVVCGLPMASFGDPKGDFLPGDGSEAEDRSLAEGAHALEGDCHGVSVDQRRTPYLGALAVGVVNRPHTMGLSS

SEQ ID NO: 67963 - protein, 44 aa, Zea mays
  Coding DNA Sequence Number=SeqID_26184
MAPVYSSSAQTVRLSHQTVRCAPDRCCILIALSPILFASRELQL

SEQ ID NO: 67964 - protein, 221 aa, Zea mays
  Coding DNA Sequence Number=SeqID_26185
  Subcellular localization annotation: CTP_CleavageSite=70; ConfidenceScore=5.20e-01
MPPPPHDIAHPLFSLPSLSAVDVRSPGAIACAWLPPSLAPRWTSRLVWGHGSPTDRGSRRLMRNVLRRLGAFMLVNLPKKKVVVEEILVELHHLHVGNGVILEDGSEEILATPSPLSESHAFAAGASSSAPPVLASQARAPRGDDPDDSGEEDDDEEEEEEENNDNKDLHDTVYRHLPICPRGESQTGVVLGLNTDLDSATLDQLRVHKELKDGHARIAAL

SEQ ID NO: 67965 - protein, 42 aa, Zea mays
  Coding DNA Sequence Number=SeqID_26186
MAYFPDSCPRSCSPSVRLLCGIAVGWGVDDRQSIVHTGLMKS

SEQ ID NO: 67966 - protein, 107 aa, Zea mays
  Coding DNA Sequence Number=SeqID_26187
  Pfam annotation: Domain name=zf-CCHC; Domain location=40-57; Score =25.3; E_value=6.6e-05; Accession=PF00098.13; Description=Zinc knuckle
MAAQRSKVLGGEGLDNHQVANYETITVDELFRKWRGGSKDECFNCGDPDHYIASCPKTKSRAEADKGDHHSGRRKGKQEYTSGEHKSKGTFDKEALKKAYLHKAKIK

SEQ ID NO: 67967 - protein, 176 aa, Zea mays
  Coding DNA Sequence Number=SeqID_26188
  Gene Ontology: Mol. function=RNA-directed DNA polymerase activity; Biological process=RNA-dependent DNA replication
  Homolog annotation: Hit_ID=UPI00004C1732; Match level="QueryCoverage =99%, HitCoverage=15%, E-value=3e-42, Identity=46%"; Hit description =UPI00004C1732 related cluster
  Pfam annotation: Domain name=rve; Domain location=68-176; Score=1.1; E_value=0.0048; Accession=PF00665.16; Description=Integrase core domain
MVAYCDEVRRLEDKFYGLELNHIARLYNETADELAKIASGRTTVPSDVFSRDIHQPSVKTDDTPEPEEASAPPEEASAQPEKAPWGFSHLLVAINKFSKWIEVQPLTSIRSEQAVAFFTNIIHRFGVPNSIITDNGTQFTGKKFLDFCEDNHIRVDWAAGLKPKIYNDLTSSASGG

SEQ ID NO: 67968 - protein, 233 aa, Zea mays
  Coding DNA Sequence Number=SeqID_26189
MGVTKYPSHKLESIKRWRQKEKFGSTSLESCITREPQSLYMMEKKAMLSFNPSSLPAPFYLVAVEEVLVELQHLHVGNGVILEDSSEHILATPIPLSESHAFDVGASSSAPPVPASQAPAPRGDDPDDSGDEDDDEEVEEEENNDNEDVNNEQEDNFVGLRLAQSTTPQCSRRDTSQTSCRMCCMHGEPTFDLNMTQGGCLSPLELVTTSLTCISECWMQETEVSGLYHPMSL

SEQ ID NO: 67969 - protein, 86 aa, Zea mays
  Coding DNA Sequence Number=SeqID_26190
MASRDLLYLSQIYVDARDEEYYDDDIEVSRGENLTHVGILSGKGWRRPYTGTRPRTDKLMIQSDDDPIRTQILIWFHHSLAIHGLL

SEQ ID NO: 67970 - protein, 74 aa, Zea mays
  Coding DNA Sequence Number=SeqID_26191
MAGIGLTVCVGGRARRRLVLRPALGGRAQFMAHGASLNVREAIFPRNQQMAYLIARSTCDGGRLKSGDVDPVFR

SEQ ID NO: 67971 - protein, 94 aa, Zea mays
  Coding DNA Sequence Number=SeqID_26192
MTLSAGQLTSESILCSVFVLSCKSGDMFALPCNRHNSRGSSEGYGQGRVSRYNIRGHDWRICEGWRGLKEDTMAAAAGPMREAATACCLQQPST

SEQ ID NO: 67972 - protein, 209 aa, Zea mays
  Coding DNA Sequence Number=SeqID_26193
  Gene Ontology: Mol. function=zinc ion binding
  Homolog annotation: Hit_ID=Q5VRS8; Match level="QueryCoverage=70%, HitCoverage=17%, E-value=1e-16, Identity=40%"; Hit description =Putative transcription factor
  Subcellular localization annotation: CTP_CleavageSite=43; ConfidenceScore=5.36e-01
MGARPPPGISVQAGGANAYRTMQQTPTMDPLRHTRMSMNQTALAAAGQTTAAAYVRPTQADIQNHLFPVQQSQAPRSQQVPRTTTPPLQRAPPHLQPPSVPPTVPSTPQAGPSHGLPPELPVDDSWRPTGQMRGSLTGNAYSSAIRHYRGHSEQQQGEPRPPNTSGTRFALWQIKMRDILTQTEVDDTLDKFSKKDPKSWTHEEKIVRP

SEQ ID NO: 67973 - protein, 50 aa, Zea mays
  Coding DNA Sequence Number=SeqID_26194
GALSEGDKGVAEDCGLEVLNNGYLGFTLSEEREPFQKFSVAQWAKEGVWK

SEQ ID NO: 67974 - protein, 294 aa, Zea mays
  Coding DNA Sequence Number=SeqID_26195
  Gene Ontology: Mol. function=subtilase activity; Biological process =proteolysis
  Homolog annotation: Hit_ID=Q8L7B7; Match level="QueryCoverage=71%, HitCoverage=17%, E-value=3e-25, Identity=34%"; Hit description =Subtilisin-like protein
MEKRLAYAALLPLLLLTLRILPLPSGSPNCSGGEGETPPASRHVVRFLEYRRAEEHREYLDAGLRDGAPAAAWRWVERRNPAAAFPTDFAVLEIRDAHREAVVAAVRALGRVRDVHADATYSRSALSAAPDRSRPPRRGKLFTAMSFEGEEEGGGETGNSSSAAWGRKLLLQTLVLEEEWRKINILPIFLALSMENGRRVGLRSQVTSLFGAERLWGRGFTGKKVKMAIFDTGIRADHPHFRNIKICQRPGKATSSVVTKTCSSILTQEADFKAHHEGATTHGPHGLGTSFGPY

SEQ ID NO: 67975 - protein, 732 aa, Zea mays
  Coding DNA Sequence Number=SeqID_26196
  Gene Ontology: Mol. function=subtilase activity; Cellular component =endoplasmic reticulum lumen; Biological process=proteolysis
  Homolog annotation: Hit_ID=Q8L7B7; Match level="QueryCoverage=92%, HitCoverage=66%, E-value=0.0, Identity=64%"; Hit description =Subtilisin-like protein
MSQKAWITQILPEDVEMLPLQLTDGEELESSARAGGGGSTSSLLVWELTANNIIMVSAIGNDGPLYGTLNNPADQSDVIGVGGIDYNNHIASFSSRGMTTWELPHGYGRVKPDVVAYSRDIIGSKISTGCKTLSGTSVASPVVAGVVCLLVSVIPEDKRKLILNPAAMKQALVEGASKLSGPNMYEQGAGRLDLWQSYEILKNYQPRASIFPTMLDFTDCPYFWPFCRQPMYAGAMPVIFNATILNGMGVIGYVKDQPLWQPSEDIGNLLSVHFTYSDVIWPWTGYLALHLQVKDEGSQFSGIISGNVTLTIYTPAAHGESSPRSSTCILHMKVKVVPTPVRSKRILWDQYHNIKYPSGYVPRDSLNVHNDILDWHGDHLHTNFHILFNMLRDAEYYIETLGSPLTCFDASNYGTLLMVDLEDEYFDEEIQKLRDDVIHKGLGIAVFAEWYHVDTMVKMTFFDENTRSWWTPITGGANIPAINELLAPFGIALGDKILTGDFSINGFLHSFQLQENSKTVQDHIRNTGYRKHPGEKPRLSSILGVIEAGEGRIAVYGDSNCLDSSHMVTNCYWLLRKILEFTGNRVKDNVLFSEAAQLKFPVFENIHHPSRRTDVNFSTYSTVVGKELICHQDSRFEVWGTKGYGVQPIGTSRKLPEYQMHESSSSPNVTIQIAGSRQDKVERLQRNLSIPNAAKFDDKRDYFGFIGHEEVDIGMLMASQWMIPCFAATACQ

SEQ ID NO: 67976 - protein, 98 aa, Zea mays
  Coding DNA Sequence Number=SeqID_26197
  Gene Ontology: Mol. function=sequence-specific DNA binding; Cellular component=nucleus; Biological process=regulation of transcription, DNA-dependent
  Homolog annotation: Hit_ID=Q41828; Match level="QueryCoverage=70%, HitCoverage=44%, E-value=2e-26, Identity=82%"; Hit description=MADS box protein
  Pfam annotation: Domain name=SRF-TF; Domain location=39-89; Score =89.9; E_value=8e-24; Accession=PF00319.9; Description=SRF-type transcription factor (DNA-binding and dimerisation domain)
  Subcellular localization annotation: CTP_CleavageSite=26; ConfidenceScore=5.12e-01
MTIVTTDLSCGPSSKAKGGQPAVTVSGGDRQGSSKIEIKRIENMTNRQVTFCKRRNGLLKKAYELSVLCDAEVALVVFSSVAASTSTPTTGDEEQVCC

SEQ ID NO: 67977 - protein, 61 aa, Zea mays
  Coding DNA Sequence Number=SeqID_26198
  Gene Ontology: Mol. function=transporter activity; Cellular component= auxin efflux carrier complex; Biological process=auxin mediated signaling pathway
  Homolog annotation: Hit_ID=Q6L5F6; Match level="QueryCoverage=91%, HitCoverage=9%, E-value=2e-17, Identity=75%"; Hit description =Putative auxin efflux carrier component 3b
MATGFFLGPAVMADTSAAVGLHGTLLRVAVVQAALPQGIVPFVFAREYSLHATILSTGFVC

SEQ ID NO: 67978 - protein, 85 aa, Zea mays
  Coding DNA Sequence Number=SeqID_26199
  Gene Ontology: Mol. function=sequence-specific DNA binding; Cellular component=nucleus; Biological process=regulation of transcription, DNA-dependent
  Homolog annotation: Hit_ID=Q41828; Match level="QueryCoverage=98%, HitCoverage=53%, E-value=9e-33, Identity=83%"; Hit description=MADS box protein
  Pfam annotation: Domain name=SRF-TF; Domain location=39-85; Score =86.5; E_value=8.1e-23; Accession=PF00319.9; Description=SRF-type transcription factor (DNA-binding and dimerisation domain)
  Subcellular localization annotation: CTP_CleavageSite=26; ConfidenceScore=5.06e-01
MTIVTTDLSCGPSSKAKGGQPAVTVSGGDRQGRGKIEIKRIENTTNRQVTFSKRRNGPLKKAYELSVLCDAEVALVVFSRRGCLF

SEQ ID NO: 67979 - protein, 419 aa, Zea mays
  Coding DNA Sequence Number=SeqID_26200
  Gene Ontology: Mol. function=transporter activity; Cellular component= integral to membrane; Biological process=auxin mediated signaling pathway
  Homolog annotation: Hit_ID=Q6L5F6; Match level="QueryCoverage=93%, HitCoverage=68%, E-value=3e-79, Identity=49%"; Hit description =Putative auxin efflux carrier component 3b
  Pfam annotation: Domain name=Mem_trans; Domain location=9-388; Score =5.4; E_value=8.9e-08; Accession=PF03547.8; Description=Membrane transport protein
MISWHDLYTVLCAVVPLYVAMILAYGSVQWWGVLTPDQCSGINRFVAVFAVPLLSFHCISASNPYVMNLRFIAADTLQKVLVLAALAVWSHLPPARGCGGGTKLREPFDWSITLFSPVHPCPTSSSWGYRSSWPMYGAVLGRTSWVQGVGVLQCTCGKTLLPVLYEFRAARVLIAGQCPDGAAARIADVRVDPDVVSLCGSQAVTEAEVAPDGRVRLVVRRSTSASRRSLATPRPSNLAGVRSTQGSSGIAHADAICAAAPPPHGASSLRMSSFGAADLFSLHPTPRPSSFEEQAVRARSAAAVAPSNDPRDAHMFEWSSGASATSEVRGLPVFHGGDIHRGMDPRRLVPSEAPPRAMRPGERVVTGYPADAGQDIVLAKLESGSTEAERKDACGRDGGAGEQQAAAPAGVMMRLIVTM

SEQ ID NO: 67980 - protein, 134 aa, Zea mays
  Coding DNA Sequence Number=SeqID_26201
  Gene Ontology: Mol. function=sugar porter activity; Cellular component=integral to membrane; Biological process=carbohydrate transport
  Homolog annotation: Hit_ID=Q69NC3; Match level="QueryCoverage=81%, HitCoverage=28%, E-value=3e-14, Identity=36%"; Hit description =Putative monosaccharide transporter
MVSGSRILMKLWWQLSRLVALICVPTEDALPVSVPIKEHPDILDGHMFGLHQQEDDEDGHGDNERGEEHEDSYRRWHNATSFVGHHEEADGHHQHCAHALAQFLAFSKLEDKDHTHHGLQKQQKIIRMHHYDPS

SEQ ID NO: 67981 - protein, 242 aa, Zea mays
  Coding DNA Sequence Number=SeqID_26202
MAGSAYNRVDYFSPDIISQLLAFANKFCYEGLNPTYDNRLNVRFPLGQLDLHQLSLLTDADKGNGDKYTDFSYEIHMVFYPTLVPFAQKCAWTSSPSILTLLTEWAHYKLSLSCACAASSSPIPTPTLPLSFAWHILDGAVACFFTGAAACFFDDVEACGGLPSGRVRGRTDLRRLADLRRAAYRLWTDLRCLVPWYILDIAWRSTRLEKTGRLASSLTSRPDSSKARRPDSSTARRPAGFV

SEQ ID NO: 67982 - protein, 108 aa, Zea mays
  Coding DNA Sequence Number=SeqID_26203
  Subcellular localization annotation: CTP_CleavageSite=32; ConfidenceScore=5.24e-01
MAWKSGSDLPTATTQQQLTKAQSRFNLPLQVMEVAVSAMEHIPTTFVTTPQEDIPTTSVAVASTLAFEVASTESSVAASTISMVESKMVSDQIPTTSVVALFGYGDIS

SEQ ID NO: 67983 - protein, 212 aa, Zea mays
  Coding DNA Sequence Number=SeqID_26204
  Homolog annotation: Hit_ID=Q8LHP0; Match level="QueryCoverage=33%, HitCoverage=78%, E-value=2e-11, Identity=48%"; Hit description =Transcription elongation factor 1 homolog
  Pfam annotation: Domain name=Elf1; Domain location=7-70; Score=44.7; E_value=3.2e-10; Accession=PF05129.4; Description=Transcription elongation factor Elf1 like
MGKRKSRPSKLTAKPKKQLETDFTCPFCSHPGSVQCDIFLKERRPFAVASCSICTESYATKAHALTEPIDVYILPNTGSLCSQMRLDAVSVHFNVTYRMGPLQTFTMFCAAASSSPTLTPTLLRLAHPRRRGSLLLHRGGCFFTGAATCFFTGVAAYFFDDAAAYRAVGSADERISGACRIFGRGAAAYRADGSTDERISGVTACFFTGAAT

SEQ ID NO: 67984 - protein, 132 aa, Zea mays
  Coding DNA Sequence Number=SeqID_26205
  Gene Ontology: Cellular component=integral to peroxisomal membrane; Biological process=peroxisome organization and biogenesis
  Homolog annotation: Hit_ID=Q69M23; Match level="QueryCoverage=64%, HitCoverage=22%, E-value=3e-24, Identity=66%"; Hit description =Peroxisomal biogenesis factor 3-like
MEGGLISYKKILFHGLDLWTALSLPQPLGRAALWPPHRTIHQHLQCFRKIVSPMWAMTLLSLYVRVHVTILGSHLYLDFAQCTNGAHLQVESDTFNGNGHKTLVAMDDYLVTDKITAFIVQMQHAATEVLKE

SEQ ID NO: 67985 - protein, 122 aa, Zea mays
  Coding DNA Sequence Number=SeqID_26206
MSLGGEFVIRSAGSRDVGTTPPCGGGISDDSVDATSNANVDATATDAVGISSCGGSGSRHTPNNATNFVDQIFNTSDLRPDDPPQGWDAHEARNSQSQGVEGSESKVEGFMLDLASRNIDDV

SEQ ID NO: 67986 - protein, 179 aa, Zea mays
  Coding DNA Sequence Number=SeqID_26207
  Gene Ontology: Mol. function=metal ion binding; Cellular component =nucleus; Biological process=regulation of transcription, DNA -dependent
  Homolog annotation: Hit_ID=Q8LEF3; Match level="QueryCoverage=66%, HitCoverage=99%, E-value=9e-16, Identity=40%"; Hit description =Transcription elongation factor 1 homolog
  Pfam annotation: Domain name=Elf1; Domain location=8-71; Score=37.3; E_value=5.4e-08; Accession=PF05129.4; Description=Transcription elongation factor Elf1 like
MGKRKSRTSNKLTAKPKKQLETDFTCPFCSHLGSVQCDIFLKEHQPFVVASCSICTESYTTKAHALTEPVDVYSEWIDSCREANKGVVAPRPDLDSEAKRRRKTEDDGSALASISAARNLNVIPRKDAEAPPGNQRALVNNAVHRHIGWQGAKCNTQTSVAQLRYPNVASLRGVREQDY

SEQ ID NO: 67987 - protein, 107 aa, Zea mays
  Coding DNA Sequence Number=SeqID_26208
  Gene Ontology: Mol. function=metal ion binding; Cellular component =nucleus; Biological process=regulation of transcription, DNA -dependent
  Homolog annotation: Hit_ID=Q8LEF3; Match level="QueryCoverage=98%, HitCoverage=89%, E-value=3e-17, Identity=44%"; Hit description =Transcription elongation factor 1 homolog
  Pfam annotation: Domain name=Elf1; Domain location=7-70; Score=47.6; E_value=4.3e-11; Accession=PF05129.4; Description=Transcription elongation factor Elf1 like
MGKRKSRTSKLMAKPKKQLETDFTCPFCSHPGSVQCDIFLKERQPFAVASCSICTESYATKAHALTEPIDVYSEWIDSCREANEGVVAPRPHLDGEAKRRRKTEDDG

SEQ ID NO: 67988 - protein, 62 aa, Zea mays
  Coding DNA Sequence Number=SeqID_26209
MQPRPREGLSATDEIASPGAMHTLPPIVPEGKGGDIASAADPKVSAQMPVRWGKLYRRYDIR

SEQ ID NO: 67989 - protein, 131 aa, Zea mays
  Coding DNA Sequence Number=SeqID_26210
  Homolog annotation: Hit_ID=Q943L0; Match level="QueryCoverage=30%, HitCoverage=16%, E-value=6e-11, Identity=80%"; Hit description =Putative thaumatin-like cytokinin-binding protein
MYNSPRTYRASKYSEFFKRECLQALTNPHDSPSLTHEAIARASDEGQGSKRDRYIRSEGNLLLNDSKQHAADAPEPDAAGEEPWYFESSSTMPRSQSTEKIVGKDTYRRGGGGVRRGRILSGAAAARESVR

SEQ ID NO: 67990 - protein, 151 aa, Zea mays
  Coding DNA Sequence Number=SeqID_26211
QGSKRDRYIRSEGNLLLNDSKQHAADAPEPDAAGEESWDFESSSTMPSRGGIRRGCILSGAAAARESVRQGLGADGKENERATVRALQAGPATLKKRSKIIVLKVTTLKADVFDVVVYRRMANIKDSVSVIVAKLECYKSITRVPSSNIIF

SEQ ID NO: 67991 - protein, 507 aa, Zea mays
  Coding DNA Sequence Number=SeqID_26212
  Gene Ontology: Mol. function=oxidoreductase activity, acting on single donors with incorporation of molecular oxygen, incorporation of two atoms of oxygen; Cellular component=chloroplast; Biological process=abscisic ...
  Gene Ontology: Biological process=acid biosynthetic process
  Homolog annotation: Hit_ID=Q6Z251; Match level="QueryCoverage=83%, HitCoverage=71%, E-value=1e-97, Identity=40%"; Hit description =Putative Lignostilbene-alpha,beta-dioxygenase and related enzymes
  Pfam annotation: Domain name=RPE65; Domain location=9-468; Score =65.0; E_value=5.5e-20; Accession=PF03055.6; Description=Retinal pigment epithelial membrane protein
MACLIGDCVSNTCNRSEPSQPNTDGRGLRVRLDVVHSGGARGWEVSYRNKYVGSDTLQLERRKKTTAWPFVPSVDGQPYATLAAFALNILRFGKAVKDSANTNIFEHAGRAFAVTENHLPYEINISNLSTLGPYSVNGAWNQPFTSHPKKIQGSGELVMMGTNTEKPYYVLGVISSDGERLVHKVDLKFEEGKLIHDIGVTKRLIENDMDGKSRFGVMPRFGDAESIIWFDVKNHCSYHLFNCFEDGNEVVIRGCRLLGSILPSGRHRADKSKWYGRAFLQPDKDSEDFDPSLDGILFSRPYEWRLNLENHSVYEGYITSEKVAMDFPVINDKFMGIQNKYGYAQVADSLETSKTGLFKFNMIAKLHFDTPDKYKLKYQKNLQENEQLIFVEYHTLQEQQFCSGVQFVVKENGIDEDDGWLVTYVHDERTNISQVYIIDAKRFSEEPVAKITLPQRVPYGFHGNFFYTKGSIDYLGVTTYIMMGIDWSIVLRVSMACHLLILKFNYS

SEQ ID NO: 67992 - protein, 389 aa, Zea mays
  Coding DNA Sequence Number=SeqID_26213
  Gene Ontology: Mol. function=oxidoreductase activity; Cellular component=proton-transporting two-sector ATPase complex; Biological process=flavonoid biosynthetic process
  Homolog annotation: Hit_ID=Q9XIW9; Match level="QueryCoverage=92%, HitCoverage=99%, E-value=1e-158, Identity=77%"; Hit description =Putative anthocyanidin synthase
  Pfam annotation: Domain name=2OG-FeII_Oxy; Domain location=239-338; Score=134.7; E_value=2.5e-37; Accession=PF03171.10; Description=2OG -Fe(II) oxygenase superfamily
  Subcellular localization annotation: CTP_CleavageSite=39; ConfidenceScore=5.22e-01
MSTRTTAFTITYTATPSPNLPTPAAVPMETAAPARVQALAEAGVSRLPAQYIQPPEHRPTPSPSPIAAALSVPVVDLSTSTADDAVRAACADWGAFHVVGHGVPVDLLDAVRAAGLAFFRAPMEDKLRFACDPARGAASEGYGSRMLANDDSVLDWRDYFDHHTLPESRCDPARWPDFVPGYSMLLLPITREITPCTFYRDTIAKYSNSMKDLAQKLLCIISENLSLPPSYIQEAVGEVFQNITISYYSPCPQPDLALGLQSHSDMGAITLLIQDDVGGLEVLKDGMWIPVPALRDGILVILADQTEIITNGRYKSSVHRAVVNAEHARLSVATFYDPSKSRKICTAPQLVSENEPQKYRDVIYGDYVSSWYSKGPEGKRNIDALLIQH

SEQ ID NO: 67993 - protein, 245 aa, Zea mays
  Coding DNA Sequence Number=SeqID_26214
MNVAWKVHRILQDGSTSVLLHSAAYGRYLAASHDPAPPGHLDLRVDLGVYDQDVDPILRKAVGSGDAGYVLLRHVFNRLLRANGRYRLWHRGVSVDDVDNQSTMMHWKVETIPTSPRPPALPAPTRRNRGSFRGLFLLHEEPVVLQRTVRFVRADNYGNFPDNWGTLQFQGRSVFELRAEMARRLNYALFFFRLLMCVRGGRYGRLTPLLIDLPRNEETLDIIVLFIGTQVAQELRYPVVNPRGV

SEQ ID NO: 67994 - protein, 285 aa, Zea mays
  Coding DNA Sequence Number=SeqID_26215
MEPNRSRGRWCVLLGDGELHKKGGDRPGEDGGQVGLLKKIHDKAGRSSRHDTFDREARRPREWHQAPRMEKAGRGPRPRCSLAIGREEQGEAVAVQGTEWGERRAPARGRCHGRSHSRAPSGEEKGEEVGRPRWEEQRRHRSGCLRRPTAVEEQGTSASAMGEPDWRTPDAQGVKVGGEDAGDGLRSSGVQAKGSLAPCEEHTLLEEEEERLCAWELLQKPGCRGEEGRELAAEAGAEGSHAHGGLAPARWGKGSLLQRRGEWEHQGGRTSAGEKDRERSDCSLI

SEQ ID NO: 67995 - protein, 108 aa, Zea mays
  Coding DNA Sequence Number=SeqID_26216
MGEPDWRPPYAQGVEVGGEYAGGGLRSSDVRAKGRLAPCEERTLLEEEEERLCAWELLQKTGCRGEEGRELDAEAGAEGSRANGGLAAARWGKGSLLQRRGEWEHQGG

SEQ ID NO: 67996 - protein, 45 aa, Zea mays
  Coding DNA Sequence Number=SeqID_26217
MNGPITRSRAQSPGTLEKTSKDLGKAKVLRRRSKGGHNRKEIKSD

SEQ ID NO: 67997 - protein, 119 aa, Zea mays
  Coding DNA Sequence Number=SeqID_26218
MAIGKKQEESPEAAQRGIYWAKSPVTTKLALVTYSGVVAWLVTWRTPMNGDHRGDGRAAMSRHKWGAKRNTGVNPSAGPPAARYTAPGIPCNQCTMGIVFSVPDSASLSAIYSKIRMTT

SEQ ID NO: 67998 - protein, 443 aa, Zea mays
  Coding DNA Sequence Number=SeqID_26219
  Gene Ontology: Cellular component=integral to membrane; Biological process=peroxisome organization and biogenesis
  Homolog annotation: Hit_ID=Q53LH2; Match level="QueryCoverage=92%, HitCoverage=92%, E-value=1e-178, Identity=71%"; Hit description =Transmembrane amino acid transporter protein
  Pfam annotation: Domain name=Aa_trans; Domain location=31-433; Score =317.1; E_value=3.2e-92; Accession=PF01490.8; Description =Transmembrane amino acid transporter protein
MVASKAAPFDEVSSVEAGAYGGRDDDGRPRRTGTVWTASAHIITAVIGSGVLSLAWAIAQLGWAAGPAVMLLFAVVIYYTSTLLAECYRSGDPVAGKRNYTYMDAVRASLGGAKCFLYISVSISDELTLMLHDRRRSSAIKRADCFHAKGHKHACRSSSNPYMILFGVAEVVFSQIPDFDQIWWLSIVAAVMSFTYATIGLVLGIMQTVANGGFQGSLTGISIGAGVTPTEKDTVKAPPPSEAKVMKRATMVSVATTTVFYMLCGCMGYAAFGDAAPDNLLTGFGFYEPFWLLDIANVAIVVHLVGAYQVFCQPLFAFVEKWAAATWPDSAFIAREFRVGPFALSLFRLTWRTAFVCLTTVAAMLLPFFGDVVGLLGAVSFWPLTVYFPIEMYVVQRAVRRWSTHWICLQMLSAACLLVSVAAAAGSIADVIGALKVYRPFSG

SEQ ID NO: 67999 - protein, 79 aa, Zea mays
  Coding DNA Sequence Number=SeqID_26220
  Subcellular localization annotation: CTP_CleavageSite=42; ConfidenceScore=5.01e-01
MVVANAGDSRVVLSTTTDNGAITPSNSSSPESQPATQESSVLAMSRAFDDYYIKDCGVISALEVTQRMTDNNDHSPLSG

SEQ ID NO: 68000 - protein, 83 aa, Zea mays
  Coding DNA Sequence Number=SeqID_26221
MVAELRLHRKISGERGQGGLEGLGANGGMFQVAGDRTELTGATDAAGSSTAAVEWVADVGVWWRGSGHARRARDRAREFYWGH

SEQ ID NO: 68001 - protein, 155 aa, Zea mays
  Coding DNA Sequence Number=SeqID_26222
MGKSKKGGGSSHHSGDKRKREPTPPSEDFGDLEYSEEEFSSESEGSPAPASPPASSDDSDDSQRIAVEVWTYIWAVERAGLEGSDESEYSSDEENSSDPSEEGSGGDGGDGDDDGGDSDGGGDSGKGGDGSGKGDSGDGGGSSKGISKGSNKASG

SEQ ID NO: 68002 - protein, 181 aa, Zea mays
  Coding DNA Sequence Number=SeqID_26223
MGKNNKRKREPTPPSEDFGDSEYSEEEFSSESEGSPAPVPLRESSDNSDDFQGLTAEVWTYIWVVERSGLEGSDESEYSSDEEDSDGGGEDEDGDDDDDDDEGGGDGDGDGSGKGGSSGSKDGDGGGSRGGSGDGGSSRSSNRGGSGGDSNRGSNRGGSGGGSNRGSNRGGSGGGSNRASG

SEQ ID NO: 68003 - protein, 260 aa, Zea mays
  Coding DNA Sequence Number=SeqID_26224
MPKGAKKRAKLKKQQQQGHPDDGGNTNASSGNGNGSDNNNNASSGRDGDPHLCIPPKVSRVDASEDSMESSEEMEERKAPAAEVPVERAVEADVAGSGEVIVDAFPPETAGHVREGEVDEAEVEVHAVVAQEPEVKDVLVAEESVVQESVADAPAVKEVAKVHPVLEPKLKVDEVVVVEQTPVAPDVKGAGATVVLKTPELIRRNVVVKDPAEVSRSQDAADVHTTEVARGPAVAVVASGQRATWWNCCGLFDAFTGSGR

SEQ ID NO: 68004 - protein, 141 aa, Zea mays
  Coding DNA Sequence Number=SeqID_26225
  Subcellular localization annotation: CTP_CleavageSite=69; ConfidenceScore=5.05e-01
MRSPCLTMDNTVQPLWTESKRRLHWSLSYTAAPAATTTAAGAASRRRLPARPTAKQEIPYRELVGHECSAQSFRPKGGATGCFQIPIDKRVCSPPHDGGRLMTDETRRRRRPQAHRRQAAKSTDGNHLNLTVSVLVLINSR

SEQ ID NO: 68005 - protein, 111 aa, Zea mays
  Coding DNA Sequence Number=SeqID_26226
MKYNLDFTSVVAWLALKATSSRQSDLMYTDEVLIMTKLSMLCLNNGKIVHALQAIQRRNWIQRPFSLSAVSAYGHEGVVLEALSGCLRVRSKLSCFSMTVSQPSMNKLLWI

SEQ ID NO: 68006 - protein, 875 aa, Zea mays
  Coding DNA Sequence Number=SeqID_26227
  Gene Ontology: Mol. function=nucleic acid binding; Cellular component= intracellular; Biological process=DNA integration
  Homolog annotation: Hit_ID=Q7XBC6; Match level="QueryCoverage=99%, HitCoverage=51%, E-value=0.0, Identity=71%"; Hit description =Putative copia-type pol polyprotein
  Pfam annotation: Domain name=rve; Domain location=595-741; Score =109.3; E_value=1.1e-29; Accession=PF00665.16; Description=Integrase core domain
  Pfam annotation: Domain name=zf-CCHC; Domain location=91-108; Score =30.5; E_value=5.9e-06; Accession=PF00098.13; Description=Zinc knuckle
  Pfam module annotation: Pfam domain module=rve::zf-CCHC; Domain location=595-741::91-108
MTPEEVIENFVSFECMIKGSKKINELDEPSTSEAQPVAFKATEEKKEESTSSRQPIDASKLDNEEMALIIKSFCQILKQQRGKDYKPRSKKVCYKCGKPGHFIAKCPISSDSDRGDDKKGKRREKKKYYKKKGGDAHVCREWDSDESSTESSSDEDAANIAVTKGLLFPNVGHKCLMAKDGKRKKVKYKSSTKYESSSDDNASDEENNLRTLFADLNMQQKEKLNELISAIHEKDDLLDSQEYFLIKENKKHVKVKNAYALQVEKCEKLSSELSTCHETIDNLRNENARLIAKVDSHVCDASIPNLRNDNDDLLAKIKELNESLASLRIENENLIAKAKDFDVCNTIISNLRTKNDMLHAKVVELKSCKPSTSTVEHTSICTRCRDVDINAIHDHMSLIKQQNDHIALLDAKIAEHNLENEKFKFARSMLYNGRRPGIKDGIGFQRGDNVKLNAPPKNLSNFVKGKAPMPQDNEGYILYPAGYPESKIKKIHSRKSHSGRNHAFMYKGETSSSRQPTCAKLPRKKTPSASNDHGISFKTFDASYVLTNKSGKVYASGGSSWILDSGCTNHMTGEKKMFSSFEKNQDPQRAITFGDGNQGVTVFRRSDDSIAFKGVLEGQPYLEKSHTQETLKGFLRRAQNEFDLRIKKIRSDNETEFKNSQIEDFLEEEGIKHEFSSPYTPQQNGVVERKNRTILDMARTMLDEYKTPDRFWAEAVNTACYAINRLYLHRILKKTSYELLTGKKPNISYFRVFGSKCFILVKRGRKSKFAPKTVEGFLLGYDSNTRAYRVFNKSSGLVEVSCDVVFDETNGSQVEQVDLDEIGEEQAPCIALRNMSIGDVCPRDPKSPHHTHRINPPSFMPAIFHQPQMKTKAPV

SEQ ID NO: 68007 - protein, 366 aa, Zea mays
  Coding DNA Sequence Number=SeqID_26228
  Gene Ontology: Mol. function=protein kinase activity; Cellular component=cell cortex; Biological process=protein amino acid phosphorylation
  Homolog annotation: Hit_ID=Q8L594; Match level="QueryCoverage=91%, HitCoverage=65%, E-value=7e-72, Identity=47%"; Hit description =Putative NPK1-related protein kinase
  Pfam annotation: Domain name=APH; Domain location=13-197; Score=-2.1; E_value=0.0078; Accession=PF01636.13; Description=Phosphotransferase enzyme family
  Pfam annotation: Domain name=Pkinase; Domain location=11-264; Score =196.2; E_value=8e-56; Accession=PF00069.15; Description=Protein kinase domain
  Pfam annotation: Domain name=Pkinase_Tyr; Domain location=11-264; Score=70.1; E_value=7.1e-18; Accession=PF07714.7; Description =Protein tyrosine kinase
  Pfam module annotation: Pfam domain module=APH::Pkinase::Pkinase_Tyr; Domain location=13-197::11-264::11-264
  Subcellular localization annotation: CTP_CleavageSite=44; ConfidenceScore=5.17e-01
MATAAPVSCRWTRVLTLGRGASGAVVSLAADAASGALFAVKSAPAGTRAAESLRREGSILSALRSPHVVPCLGLRAAADGGCELLLEFAPGGSLADVAARRSGRDERAVAAYAADVARGLAYLHGRSVVHGDVKARNVVVGADGRAMLADFGCARAAAGGADPGRPVGGTPAFMAPEVLRGEGQGPAADVWALGCTVVEMATGRAPWSDLDGLPAAVLRVGYTDAVPEAPRWMSPEAKDFLARCFARDPRERCTAAQLLEHPFLASAGCGAMAEWVSPKSTLDAALWESDADDGSDDEGDVSESPAQRIKALACPCCSALPDWDSEEGDWIEVLGEQCEANGLVPPTKEVAKETASEDEISYCSVS

SEQ ID NO: 68008 - protein, 347 aa, Zea mays
  Coding DNA Sequence Number=SeqID_26229
  Gene Ontology: Mol. function=protein kinase activity; Cellular component=cell cortex; Biological process=protein amino acid phosphorylation
  Homolog annotation: Hit_ID=Q8L3T2; Match level="QueryCoverage=64%, HitCoverage=44%, E-value=5e-53, Identity=52%"; Hit description =Putative NPK1-related protein kinase
  Pfam annotation: Domain name=Pkinase; Domain location=6-246; Score =67.9; E_value=3.2e-17; Accession=PF00069.15; Description=Protein kinase domain
  Pfam annotation: Domain name=Pkinase_Tyr; Domain location=18-246; Score=-78.7; E_value=1.2e-07; Accession=PF07714.7; Description =Protein tyrosine kinase
  Pfam module annotation: Pfam domain module=Pkinase::Pkinase_Tyr; Domain location=6-246::18-246
MARWVWCSERCCLASNSVRGPKVSTPSQRPFYIGARVDLDGGHVLLRREGGGGSVRLPLPAAPVVPITNRATAAGPSSLSHRIASSVCAPDVLRGLAYLHTRSVVHGDVKARNVLVGAGGRAMLADFGCARALSGSGSGSARRPIVGATPAFMAPEVARGEDQGPPADVWALGCTVVEMATGRAPFGGMGGAGGALAAVHRIAYTDAVPEVPAWLSPEAGDFLARCFARDAADRWTAARLLEHPFVALARHDDKAPRPSPKSALDAAFWESETECEDEADDASGSASERIESLACSAGALPDWDGEGGWIDVLGEHCGAPGKASSVLVAVPDSNINSMTVKLRQQYY

SEQ ID NO: 68009 - protein, 107 aa, Zea mays
  Coding DNA Sequence Number=SeqID_26230
MAHRTVRCAHAQNSAASPAISPAVGARHLAVDRAFPSTLRPNWPYHRDPLPPPVSSHHSVVAEPGSRWRTAADLTGGRAPTGPSATKHGPNSSPFTVLDRFLYELDP

SEQ ID NO: 68010 - protein, 105 aa, Zea mays
  Coding DNA Sequence Number=SeqID_26231
MWYAGRGHNGDLDDKLESRNGAQVYFGSSSRFLNVGRKLGWEVVFITIGVALMDLRKGEEDKQPPPGFEANHQTENMEETVGKIGKIRNSRLTSLDAKSSNWPPL

SEQ ID NO: 68011 - protein, 1068 aa, Zea mays
  Coding DNA Sequence Number=SeqID_26232
  Gene Ontology: Mol. function=zinc ion binding; Cellular component =membrane; Biological process=defense response
  Homolog annotation: Hit_ID=Q5N8I7; Match level="QueryCoverage=95%, HitCoverage=97%, E-value=0.0, Identity=73%"; Hit description=Zinc finger protein-like
  Pfam annotation: Domain name=FYVE; Domain location=609-677; Score =34.3; E_value=1e-07; Accession=PF01363.12; Description=FYVE zinc finger
  Pfam annotation: Domain name=PH; Domain location=21-124; Score=15.8; E_value=0.072; Accession=PF00169.19; Description=PH domain
  Pfam annotation: Domain name=RCC1; Domain location=284-333; Score =21.3; E_value=0.0034; Accession=PF00415.9; Description=Regulator of chromosome condensation (RCC1)
  Pfam annotation: Domain name=RCC1; Domain location=336-388; Score =20.2; E_value=0.0046; Accession=PF00415.9; Description=Regulator of chromosome condensation (RCC1)
  Pfam annotation: Domain name=RCC1; Domain location=391-440; Score =25.8; E_value=0.00015; Accession=PF00415.9; Description=Regulator of chromosome condensation (RCC1)
  Pfam annotation: Domain name=RCC1; Domain location=453-502; Score =15.8; E_value=0.014; Accession=PF00415.9; Description=Regulator of chromosome condensation (RCC1)
  Pfam annotation: Domain name=RCC1; Domain location=505-554; Score =30.8; E_value=4.8e-06; Accession=PF00415.9; Description=Regulator of chromosome condensation (RCC1)
  Pfam annotation: Domain name=RCC1; Domain location=559-606; Score =26.4; E_value=0.0001; Accession=PF00415.9; Description=Regulator of chromosome condensation (RCC1)
  Pfam module annotation: Pfam domain module=FYVE::PH::RCC1::RCC1::RCC1: :RCC1::RCC1::RCC1; Domain location=609-677::21-124::284-333::336 -388::391-440::453-502::505-554::559-606
MWQNSCDTTFVFHFLKALITLKKGSKLIKYSRKGKPKIRSFRLSSDETALIWYSHKKEKFLRLSSVSKVIPGQRTAVFRRFLRPEKDYLSFSLIYKNGQRSLDLVCKDQVEVEVWFSALEALISSCHRNSSVDEHKDRVSFSDDVSYYRDGHPYDSTLDIASSISRSFNTADYCRGSSFSFRRSDAGSDRANMIRTSGADSTRLSISSAPSSSSQGSGTDDIESLGDVYVWGEVWTDAAPSDGHTSSSCSKVDVLIPKPLESDVVLDVNQIVCGSRHVALTTRQGEVFTWGEELGGRLGHGTDTDISRPKLVESLSVTIVDFISCGEFHTCAISASGDLFNWGDGSYRAGLLGYDTGASHWLPKRVSGPLEGLQVLSVACGSWHSALITSTGRLYTFGDGKFGALGHGNRESAAYPKEVEALNGFRTVKVACGVWHSAAIVEASVQTGMNVVSKKLYTWGDGDKNRLGQGDKEARLIPTCLQALLEHNFHQLGCGQNMTVALATSGHVYTMGSSDNGQLGNPKSDGKHPCLVKDKLANELVEEISCGAAHVAVLTSRSEVYTWGLGANGRLGHGDLNDKKTPTIVEALKDRHVKSISCGSNFTTCICIHRWVSGADQSVCTGCRQAFGFTRKRHNCYNCGLVHCHACSSRKVLKAALAPTPGKPHRVCDSCFLKLKNADTSSSNANRRNAATRRSTDSREKPEIRPPRLVATPSAEPGKYMEVKASKSDMKPADSIMKASQASALLQFKDLGFGAQFGGLQPMGMPPALAMSPAIPAFSLAPPSPYTKKMKSPPTSAIPQSSKVDVDHLQKSNDLLNQEVLKLQSQASTVEDLKQKCEAQHEQLQKSDKKAKSVASMATEESSKRNAAVEFVKFLDNELKGIADKLPVDVADSLKALQMRTQSLLREQSGHPLELVNPMERDHLHLSSGGSGRYDLVTHKSGGVGYLTMSQDGSSASGSAMSITSESPSHRFMENSSKAHGDFAPKQGTHGEVQLIEQFEPGVYVTLIQLKDARGDSQRIRLKNGGGKTKSGSSRNTATQLMHHMETQLLTRKSIIHDLQIRSTQVVM

SEQ ID NO: 68012 - protein, 91 aa, Zea mays
  Coding DNA Sequence Number=SeqID_26233
MDGAPEALAPFTSDSLDVIESLDFIGLVPQEECLMVTSAGDTSTLVENPEVAPTDVAAYVAVSVPPGFDLPSREPLSGQSPTHGGRGLKLA

SEQ ID NO: 68013 - protein, 34 aa, Zea mays
  Coding DNA Sequence Number=SeqID_26234
MADMDLIGLDLSMISLRATQRAFCEWGGNARHEL

SEQ ID NO: 68014 - protein, 192 aa, Zea mays
  Coding DNA Sequence Number=SeqID_26235
MEIDYIDLHAIFRCTTSNTLFYLLRYNMNVVYNYLSHIFRKVSKRTEPNRFRKALNHLLAGATSNHFNGIVLLSLLPLADLGRDMDTKMEDRALASSTGLKMAVAMEGIFSNNIIIPVPRGHNRRNAEVHPLSQGNNIQQHWRTQGPATLGACPGSETAVSVDFYCRTFYKLQGLSGLDQGQETTPTILLEV

SEQ ID NO: 68015 - protein, 263 aa, Zea mays
  Coding DNA Sequence Number=SeqID_26236
MGLQRPRASLHEDDTPSPIANAAGHVLMGKDKTVPEGSYPAGARSGWIDGRDSAGSPPPRTVNNGPRMSLGLDPPRCLVGPLETTWPVSVSPQVPVGPPETCILMPVSPQLRYGPLETNALTYVSPQLVSGYPETTGPISGSTHQLTGMAGTVAATSDEATKALKVYFRRRTKANLLQFSQNEGTKEGSFQIIDTLHSALRTTNQPPTKKDEFFRKISTTTEQLLPAPKQDMNDLLSPQSSRVAAPRRSRSIAGAGVEFNMQD

SEQ ID NO: 68016 - protein, 175 aa, Zea mays
  Coding DNA Sequence Number=SeqID_26237
  Homolog annotation: Hit_ID=Q6Z1K3; Match level="QueryCoverage=62%, HitCoverage=25%, E-value=3e-08, Identity=30%"; Hit description=Zinc knuckle domain containing protein-like
MSGLVDIEIRGIPEHAWFLSTVKSILNDSCLIAEVHPDTMSKQELSSFVVRAWCFNPENLQRTSVLHIIEPGLQMFEKRCLTYKLQIRVLHAGSHITPEGPPPSADGDKPPWDDDGNDAHQLMTPILDVRLALWRCASHCTFAWAHCRLKAATPRRLRRQAPRRRGLGILGEICI

SEQ ID NO: 68017 - protein, 294 aa, Zea mays
  Coding DNA Sequence Number=SeqID_26238
  Homolog annotation: Hit_ID=Q8H912; Match level="QueryCoverage=22%, HitCoverage=6%, E-value=1e-07, Identity=40%"; Hit description =Putative zinc knuckle domain containing protein
  Pfam annotation: Domain name=zf-CCHC; Domain location=152-169; Score =15.7; E_value=0.0025; Accession=PF00098.13; Description=Zinc knuckle
  Pfam annotation: Domain name=zf-CCHC; Domain location=171-188; Score =18.6; E_value=0.00083; Accession=PF00098.13; Description=Zinc knuckle
  Pfam module annotation: Pfam domain module=zf-CCHC::zf-CCHC; Domain location=152-169::171-188
  Subcellular localization annotation: CTP_CleavageSite=70; ConfidenceScore=5.59e-01
MTAPPPPPLPSLPPGPNPPTSIHHPCLSSASTPDPATTPDNPLGVFPGRRSEAPQVGRLKAQRWSDSSPNSSSGDSWWAPPSYREALLACPSRPAAPPLAPSVKVVTDIQPEVQSRRAAPRCDDDGWQVVQSKRRCRGDHRPRRESPVDLRGRCFNCFSSDHFAAVCRRPTRCFKCFKTGHQAVRCPGRREVQSKKTVWQRLEKQQARGSVWQRLSVQRGASSATSACAVPRRRRLVWVKINTPEVVAKMEDSPRMAAEGESHRCLRNNEREDGRSTKKVRVLSLPWSGVSDLV

SEQ ID NO: 68018 - protein, 584 aa, Zea mays
  Coding DNA Sequence Number=SeqID_26239
  Gene Ontology: Mol. function=nucleotidyltransferase activity; Biological process=metabolic process
  Homolog annotation: Hit_ID=Q00XF0; Match level="QueryCoverage=64%, HitCoverage=55%, E-value=6e-93, Identity=45%"; Hit description =Homology to unknown gene
MPRRTEPQNNLPSPPPSPASRTQGVSTAPIEREPPGLAPTPAPTPAQQPHQDPAIAAEVARLSAARERLRAAHTLHEKLRALDAEPRVAAFFGEESSRGVLGVLEPREVLLLKCLVAAGQEHVLGHELDWYGGDGGHHEHHHRNGVSGGSALRDALYSLAGLVGKWTSEGVVAAKERREEMEVLPRLLKFLDNVEEFYDCIGGIIGHTRSYQIMVLELLSASKDRMHRPSKDKFVDFHVPSGLNLLKDKEYASQAALWGIEGLPELGEIYPIGGAGDRLGLVDSDTGESLPAALLPYCGRSLLEGLIRDLQAREFLHFKIFGGQCITPVAIMTSSVKDNHEHIIAICERLDWFGRGRDNFRLFEQPLVPVVNAKDGKWLISKSLFPVGKPGGHGAIWKLAYDRGVLQWLQNCGRKGATVRQVSNVVAATDLTMMALAGIGLRCNKKLGFASCERRPGATEGVNVLIEKQNLEGLWSYGITCIEYTEFEKYGIPEPTLTNRGPRYEMPGVMTGLLRAPENGPHSSQVSFPANTNILYVDLQAVQEVGSRKNASCLPGMVLNLKKAVSYPNHLGFECRYFLSSNSP

SEQ ID NO: 68019 - protein, 64 aa, Zea mays
  Coding DNA Sequence Number=SeqID_26240
MGRRNEKVQTKQLLQLQNQILGLKKSKDEDDSEGEGLFHEEGDDDSSDQDDTGDDNEEETSTPN

SEQ ID NO: 68020 - protein, 580 aa, Zea mays
  Coding DNA Sequence Number=SeqID_26241
  Gene Ontology: Mol. function=pyruvate decarboxylase activity; Cellular component=cytosol; Biological process=branched chain family amino acid catabolic process
  Homolog annotation: Hit_ID=P28516; Match level="QueryCoverage=99%, HitCoverage=100%, E-value=0.0, Identity=89%"; Hit description =Pyruvate decarboxylase isozyme 1
  Pfam annotation: Domain name=TPP_enzyme_C; Domain location=411-551; Score=30.2; E_value=7e-09; Accession=PF02775.11; Description =Thiamine pyrophosphate enzyme, C-term
  Pfam annotation: Domain name=TPP_enzyme_M; Domain location=245-349; Score=17.8; E_value=4.3e-05; Accession=PF00205.12; Description =Thiamine pyrophosphate enzyme, central
  Pfam annotation: Domain name=TPP_enzyme_N; Domain location=47-223; Score=301.2; E_value=1.9e-87; Accession=PF02776.8; Description =Thiamine pyrophosphate enzyme, N-term
  Pfam module annotation: Pfam domain module=TPP_enzyme_C::TPP_enzyme _M::TPP_enzyme_N; Domain location=411-551::245-349::47-223
METLLAGNPANGVAKPTCNGVGALPVANSHAIIATPPAAATLAPAGATLGRHLARRLVQIGASDVFAVPGDFNLTLLDYLIAEPGLTLVGCCNELNAGYAADGYARSRGVGACAVTFTVGGLSVLNAIAGAYSENLPVVCIVGGPNSNDYGTNRILHHTIGLPDFSQELRCFQTITCYQAIINNLDDAHEQIDTAIATALRESKPVYISVSCNLAGLSHPTFSRDPVPMFISPRLSNKANLEYAVEAAADFLNKAVKPVMVGGPKIRVAKAREAFAAVADASGTTFCAEIVESADAYLFAGPIFNDYSSVGYSLLLKREKAVIVQPDRMVVGDGPAFGCILMPEFLRALAKRLRRNTTAYDNYRRIFVPDREPPNGKPNEPLRVNVLFKHIKGMLSGDSAVVAETGDSWFNCQKLRLPEGCGYEFQMQYGSIGWSVGATLGYAQAAKDKRVIACIGDGSFQVTAQDVSTMLRCGQKSIIFLINNGGYTIEVEIHDGPYNVIKNWDYTGLVNAIHNSEGNCWTMKVRTEEQLKEAIATATGAKKDCLCFIEVIVHKDDTSKELLEWGSRVSAANSRPPNPQ

SEQ ID NO: 68021 - protein, 141 aa, Zea mays
  Coding DNA Sequence Number=SeqID_26242
  Homolog annotation: Hit_ID=Q6QP51; Match level="QueryCoverage=27%, HitCoverage=17%, E-value=5e-07, Identity=64%"; Hit description =Putative growth-regulating factor 1
  Subcellular localization annotation: CTP_CleavageSite=44; ConfidenceScore=5.52e-01
MQAACNRAKWTRISDSQRAQPGGPGPRVMQPARRMLHASNCTATCATTSPPRLRNQYRDSRNQAPSLLTDQRFEGWPPEGFQQPPQIAWALHPLLVRGSKAGPPKGSTAASGYSGSAPITDQGFEGWPPKGSQPPQTPSEG

SEQ ID NO: 68022 - protein, 342 aa, Zea mays
  Coding DNA Sequence Number=SeqID_26243
  Gene Ontology: Mol. function=zinc ion binding; Cellular component =integral to membrane
  Homolog annotation: Hit_ID=Q5QLT9; Match level="QueryCoverage=91%, HitCoverage=57%, E-value=8e-97, Identity=58%"; Hit description =Putative ring finger protein 5
  Pfam annotation: Domain name=zf-C3HC4; Domain location=30-65; Score =4.5; E_value=0.054; Accession=PF00097.15; Description=Zinc finger, C3HC4 type (RING finger)
QPPEPEEPVHDTVEENKVAAEGAVVGVSEDDGTEHVVTSCGHLFCWPCLYQWLHVHSSHKECPVCKGEVTEGNITPIYGRGNSGSAMEKVAEDGNASGPKIPPRPHGNRLESFRQQFHHLRPISRRLGEAHGFLSTWRRIFDQHLANSMSRFEGTPELSVSETAQHASRLGRMTTRLRARRLQREAENPTPIVSSAPDSGQPRNNTPDLPRRSSSPFPSEGMDLLRQIAFAGLEDSERFATAVSELRRIARPSHYGASTSSNPPNPEPIDGTHIAMALAADQASNSSTMAVIQEDAAFAESAGEPSNAGSSRSLRRRRGSGALGSLDVDGGDLHQNKRRRLN

SEQ ID NO: 68023 - protein, 202 aa, Zea mays
  Coding DNA Sequence Number=SeqID_26244
  Gene Ontology: Mol. function=nucleotidyltransferase activity; Biological process=metabolic process
  Homolog annotation: Hit_ID=Q00XF0; Match level="QueryCoverage=92%, HitCoverage=28%, E-value=4e-37, Identity=40%"; Hit description =Homology to unknown gene
LLCIPEWGSTPEGSLLDIMRNAHDLLSSCGIDIPMVQDNSEYMHSGPPFLIFLHPALGPFWDIIRQKFVGGSVSKGSELQIEVAEFLWKDVELDGSFIILADNVMGSTKNSKNGEQILHYGSRCGRCRLQSVKIVNEGINWTSPNNVYWKHDVERSESVKIILHGNAEFEAKDVVLKGNHVFEVPDGHRMCIIQDRAVDEWG

SEQ ID NO: 68024 - protein, 87 aa, Zea mays
  Coding DNA Sequence Number=SeqID_26245
  Subcellular localization annotation: CTP_CleavageSite=72; ConfidenceScore=5.02e-01
MARATPSVELELDLIGHISSQASVSWNSSCLYRGCSSKHTKVRCLRLCFYFNSCSGKRRGSRIMARSFISSRCSAEDVHMERARQPE

SEQ ID NO: 68025 - protein, 109 aa, Zea mays
  Coding DNA Sequence Number=SeqID_26246
MAVVAAIALVLLPVGRGEEMPTAAHPHGLSFESPLALSPAAYDFFHPSARARRAHGVAPVPALAPRGQEQLRPEGVRAAALVAIGVAYAVVRRRVVAARGGAGAPKSNA

SEQ ID NO: 68026 - protein, 265 aa, Zea mays
  Coding DNA Sequence Number=SeqID_26247
MEKLRSGRIQSAWPTNEFRAAHPARVRLPTGGLGPPVEIGDVTPAGSLPRGTRLSEAVPRERGLSYCSSSPPKSRAACPTISARATAWAQLPRCVPRPGYKDLGRVRLLQPIFTRESLTTTNSERIGGSPPPPSDFIVPPPSELLHAYSRLLGGTIGACASAQMEALWSGKPSVRHHLELPFSPLVVNSCVAEEEPGSCSAYSDGRRWIWGFYLGCLGGDELWRGNDWWHSSSLVRVPVRRGALCACERWRRRLVTVGFLIGGYD

SEQ ID NO: 68027 - protein, 154 aa, Zea mays
  Coding DNA Sequence Number=SeqID_26248
  Subcellular localization annotation: CTP_CleavageSite=56; ConfidenceScore=5.50e-01
MAVGRLLSHGAPDSPVRHRTLSGVPATSASHWGSTVGALTCGASGLSGGAPDRSCRLSAVVVVALDARSLRGEGRRRFRWPVTSHASPIITVLAVAAPLSSTIAETAVPVTGNVTGELDRRNEGIHGGGCGDDLILDDCDGGYGGVGCSWESRA

SEQ ID NO: 68028 - protein, 203 aa, Zea mays
  Coding DNA Sequence Number=SeqID_26249
  Subcellular localization annotation: CTP_CleavageSite=56; ConfidenceScore=5.18e-01
MAHQQARPHLSNYRRGTFLSELSSSTDWGRISWPGMSRPNTRSAKSQACMPRDSPVAMDRWGPKGVLGSFQFLAVSISPPWDPDYVVGGVPLRHYRPVRFFPIESPRFSLRVAPANLRIGAPWHRSRLRRRAPYCGHWAAPPSSPSGEGDGVLASDLEMDGWDLIGQVNATIKESESLTYRSAAENSLRYLKSRPLDLDPKAS

SEQ ID NO: 68029 - protein, 68 aa, Zea mays
  Coding DNA Sequence Number=SeqID_26250
MTAQVAHQAHNSCLFLRRRAPPCRQHDHELQASMIRTLSSHQQIRREKSWKTRIPSQKHDRGNTRDTI

SEQ ID NO: 68030 - protein, 135 aa, Zea mays
  Coding DNA Sequence Number=SeqID_26251
  Gene Ontology: Mol. function=oxidoreductase activity; Biological process=metabolic process
  Homolog annotation: Hit_ID=Q9FJP5; Match level="QueryCoverage=76%, HitCoverage=35%, E-value=3e-21, Identity=48%"; Hit description =Similarity to dehydrogenase
MEKKERNNCECWKYYRSGTWTMGWVELRSFGINVMTVAPGGTRSNLGNSSAAKYDQMHEWKYYKKYEEGLRARTGISQGPRSTPAEELAKAVVASVLKKNPPAWFAYGQYSAILSILYYAPLWFRDCLYKFVMKC

SEQ ID NO: 68031 - protein, 219 aa, Zea mays
  Coding DNA Sequence Number=SeqID_26252
MASIITGDFAEAYVRKNACEEETRKAEASTAGGVAAAATPGDKKADASASSEKKVAKEAAAGSNKGEGGSLFGLLKKKDPTPVRHNWKVLTTESALPYIGIRLAKRVVSRGELFAENDGVTAFPELSTSKENEGAEQFGGGLGALQAGEDILFIRVDPHTQKRSGSFHILALPTDENNFNIWPYKVQRKNEVMFFATDILSLHATGSKSCSSFHARLLK

SEQ ID NO: 68032 - protein, 457 aa, Zea mays
  Coding DNA Sequence Number=SeqID_26253
  Gene Ontology: Mol. function=gamma-glutamyltransferase activity; Cellular component=endoplasmic reticulum; Biological process =cellular response to nitrogen starvation
  Homolog annotation: Hit_ID=Q8W1X8; Match level="QueryCoverage=99%, HitCoverage=86%, E-value=1e-154, Identity=56%"; Hit description =Gamma-glutamyltransferase
  Pfam annotation: Domain name=G_glu_transpept; Domain location=1-452; Score=496.1; E_value=4.1e-146; Accession=PF01019.11; Description =Gamma-glutamyltranspeptidase
MYGGNESLKARGALSIAVPGEIAGLHEAWKHHGKLPWKRLVLPAARLALAFRVSPYLRIQMEATRDGILANNGTRAVYAPGGDILRAGDVCRNPRLAQTLRAVAEHGPTVFYGGAVGARLVRDVREAGGVVTLEDLKRYQVKVRRPLTGNVLGLQVVTMPPPSAGGAGMMLVLNILEQYGVPAGFAGSLGIHRLIESLKHYMAVKMNLGDPDFVNNSEVVSDMMSPKFAAELKKTIYDNMTFAPKHYGGRWNILEDHGTSHLSIVDSERNAVSMTSTVNAYFGSLILSPRTGVLLNNEMDDFSMPANASENSPPPAPANFVSPLKRPLSSMAPTVVVKDGKLVAAVGASGGGMIPAGTIEVFINHFVKNMDPLASVMAPRVYHQLIPNEVRYENWTTVTGDHFELDAATRADLHRRGHVLTPIAGGTISQLVVHNVGRQGDLTAVSDPRKGGVPAGY

SEQ ID NO: 68033 - protein, 149 aa, Zea mays
  Coding DNA Sequence Number=SeqID_26254
MEEAVHMRQTEALHDDFQGFTACMGHPLTQCPPPPSSPTYHANHNEWHQQEFGVPFVTPKDEAQEFDDSFYASTPPPYPGPGPIPGDSRPSGSGHPPPPPYQGPRPIPGDPRPSGSSHHHPRPPYQVFPLHQVFLLLMSPIENRQLGKI

SEQ ID NO: 68034 - protein, 181 aa, Zea mays
  Coding DNA Sequence Number=SeqID_26255
MQVELTPQASEENLATPKARVAAEIEELPSTGAEEAKIGEVVAMKTQRVTPLESLPESKEEEEEGRIAPVMSSFFDVDEDETKEKRYCWYNTSTKAEEKGSSKLTLTEDKGKGPAKIEEAKKAIEDDTPLGEEPFDQELGGRRYRVRHAACKVMGAKELVEAIGFAKQHGYPLGSTIFGAG

SEQ ID NO: 68035 - protein, 63 aa, Zea mays
  Coding DNA Sequence Number=SeqID_26256
MAAASRRATVAASRRAKLEGSDVRWVLPKPNAEQTLATNPTPTWNSVPWDNVVLLTATHAFSL

SEQ ID NO: 68036 - protein, 235 aa, Zea mays
  Coding DNA Sequence Number=SeqID_26257
  Homolog annotation: Hit_ID=Q9FWL0; Match level="QueryCoverage=16%, HitCoverage=6%, E-value=3e-10, Identity=82%"; Hit description =Putative peptide transport protein
MRVQSSALGAIRLLDHEGSLRRCSQRSCGQQGRTIATQPTSRRHISGSSPKGKANVLSWTLSTQGGSIKEDKQGINESARGTSEIDQNKVVALVVVPHDNPPKAPSSTSPGSVVTSWSNSDSIRFPVSYRLLFSGAVSGADWGLLEKGSSVVPFLTNSVLMCAIIALGTNVMASTGSILSICFVSTTHHALSLCWIWRSMRALPQSIGCSSLVFLALASIRSFLKSHWHNELYGV

SEQ ID NO: 68037 - protein, 34 aa, Zea mays
  Coding DNA Sequence Number=SeqID_26258
MEQELAHSDGPWIDPGSRDFRRGSKKSSILLVIF

SEQ ID NO: 68038 - protein, 108 aa, Zea mays
  Coding DNA Sequence Number=SeqID_26259
  Homolog annotation: Hit_ID=Q6F3C5; Match level="QueryCoverage=39%, HitCoverage=27%, E-value=9e-07, Identity=58%"; Hit description =Putative ML domain protein
MTGWFELFAIGCLPAMASSCWEMPLCHRPPLRCGFFLARKNASPIPRGFLSLLTHILLMCFNCAGKTIEKRKLVIDVKYFFFYVHLEPRDIGGETSCLATRDFMLSHQ

SEQ ID NO: 68039 - protein, 289 aa, Zea mays
  Coding DNA Sequence Number=SeqID_26260
  Gene Ontology: Mol. function=hydrolase activity
  Homolog annotation: Hit_ID=Q5NBD6; Match level="QueryCoverage=83%, HitCoverage=43%, E-value=1e-96, Identity=74%"; Hit description=5' -nucleotidase, cytosolic II-like
MADAAEMVRLLYLRTPPRPLLPQFAVHTHRPQSLLRVSPRFRPPIRLRCRALDASRPVAVEGERDEEDGLEDEEESYFSVTSSGLSEVDYLGESTRGDLNVRRERLEALGNSKSTLHGPIEEIAWKEAGEAETLLHDLGIAVRFYPFKHYLVIVDVRTLNLRSISVVGYDMDYTLIHYNVMAWEGRAYDYGMDNLKSMGFPVDDLKFDPDLVIRGLVIDKEKGNLVKADRFGYIKRAMHGTQMLSTRAVSEIYGRELVDLRKEIRWEFLNTLFSVSEAVMFMQAKGPLT

SEQ ID NO: 68040 - protein, 183 aa, Zea mays
  Coding DNA Sequence Number=SeqID_26261
MLLNEAARDAWSQPPPNENQGVEAGVPKNRKRGGADDRKTAMQNHRLNQWGHRPRDALAGPVTAVEARSLTRSSRGSGGRRVRAPPTRRRRARGLAGGGHVVVDTRDSTSMGGVGDDSLGDVAGGGALMQGSGSRELEQGGGGSGRRWEGREAEGRAGASHGGWRTGEVEVPVTATGGRGKPS

SEQ ID NO: 68041 - protein, 153 aa, Zea mays
  Coding DNA Sequence Number=SeqID_26262
  Subcellular localization annotation: CTP_CleavageSite=80; ConfidenceScore=5.59e-01
MANWAYDMGKQAGPSMGVRGPFKGWQLGFPTLTALTSRRLPAAGRPRRAAAPVCVLPRRGRVLPRRASRRAGLAATSGPRAAGARQGATALRAPEAGRARAAWSGRAAAPRVCRGVRAARGKPAPRLASRGRAWQAAAQGGRVAAPRALSRLG

SEQ ID NO: 68042 - protein, 369 aa, Zea mays
  Coding DNA Sequence Number=SeqID_26263
  Subcellular localization annotation: CTP_CleavageSite=53; ConfidenceScore=5.03e-01
MGFPVLGRLLQLGMGAAGSVHIPDGARFCPRHHPRPSLRSRPRLYPRPRPSPVAALALPRDSRHAPYLRRLPPPTPPARDPPCCPPPFLAPAQPPVAAAPSPNSTAPRAPLPRPHSPSPNSTAPHRWLPRLAGDPVRRSGSWWVGETGRSGGGGQAQHAAFPTDTDDSLHNPDLGPFLLKPWYWARVAPPRVLEFAERAARVLERRGEGTELELAMNLHIAAGIHQARPSLAETSLSPCAPAHPRITPGRHAAPRIPTLLPTPIRPFLLSVRCARRVTLAPAPSVSLRPLSVQLRPASAPSMAELQAMPSRVRSPSARRSARITAQLRPASAPSMAATPDLRAPASMEALSAQNLPTAPRVHAVHGSRP

SEQ ID NO: 68043 - protein, 55 aa, Zea mays
  Coding DNA Sequence Number=SeqID_26264
MEAVANLDPTAKYGVSHPDLRAPNYDHPGRTYKMSSVYAPTTQRCGSTLSIVWYT

SEQ ID NO: 68044 - protein, 239 aa, Zea mays
  Coding DNA Sequence Number=SeqID_26265
  Gene Ontology: Mol. function=zinc ion binding
  Homolog annotation: Hit_ID=Q6I648; Match level="QueryCoverage=74%, HitCoverage=72%, E-value=3e-50, Identity=59%"; Hit description =Putative zinc finger protein
  Pfam annotation: Domain name=zf-C3HC4; Domain location=128-178; Score= 45.3; E_value=2.1e-10; Accession=PF00097.15; Description=Zinc finger, C3HC4 type (RING finger)
MVGGGGHSSMDHPGAKDLERGELRRGAPEFADGDDGDGEESQYFSDAEDRSWPSHSRHDSTAYEDYVSLCVSARASSVDADADADGEAVRQHCRKSSCVSEGSLDDVDLEAGLSEIIKASPEKAEQNCRICHLGLESTAVESGAGITLGCSCKGDLSYAHKQCADTWFKIRGNKCSTCKYVISSDDPEDWDYRQLDNPRHLLHGIVHDNGFGHLVRINQIRTFIQMRTNLKVVDNSGAK

SEQ ID NO: 68045 - protein, 113 aa, Zea mays
  Coding DNA Sequence Number=SeqID_26266
  Homolog annotation: Hit_ID=O24591; Match level="QueryCoverage=31%, HitCoverage=11%, E-value=6e-08, Identity=80%"; Hit description =Histone deacetylase 2a
MANLMGRNRKVKKRQFLEFFKKKDLFNNDLGGPYAFLEACVGLNGMMLGGRVHTAVHVFPNSPVEHEAGKKRAAESSVLKTPLSDKKAKVATPSAQKIVVPLNRLTKLSSKIV

SEQ ID NO: 68046 - protein, 101 aa, Zea mays
  Coding DNA Sequence Number=SeqID_26267
MCWRTTWCPPDTDTDTAPPLRADGVDDDGYEELPVSLPPHVPSGLSRDDALNAGGEATPFTVEPQVVAPPPCNGGFDIGGPWLIFVCASSVYAKVAGPFRS

SEQ ID NO: 68047 - protein, 75 aa, Zea mays
  Coding DNA Sequence Number=SeqID_26268
MAGRLQLLGSLVAAGRAGEADARLGKAGRQHQSDVHGWGGCGNAAAMGMVGPQGLRAGLAGGSPEKERAGSTDAL

SEQ ID NO: 68048 - protein, 202 aa, Zea mays
  Coding DNA Sequence Number=SeqID_26269
MALGDDAVGSDRKDISDDFASKVSHSVDDFTAEIGELNVALASHDKLLRFDARERKEFESNLQTELAEKNARIASLEKKPSTIPKIVKLTPPKSATPIVIDVVPLEPMRAPPQKQVWCPKPNHLRNILGTLPDISSDHPPRAPQPPKKLESNKQTPPNIEDGDLENMWLMDSSRLRHVNRSSKWFSNLDSMIDKEYITFGDK

SEQ ID NO: 68049 - protein, 78 aa, Zea mays
  Coding DNA Sequence Number=SeqID_26270
MELRQGLDVVKKRTLPRARWKRGYFKGWYKINIKVRYRGGKDQSYNDEKHNPWTELRQDSQSDEVEKTIKDKISEVST

SEQ ID NO: 68050 - protein, 249 aa, Zea mays
  Coding DNA Sequence Number=SeqID_26271
  Subcellular localization annotation: CTP_CleavageSite=25; ConfidenceScore=5.62e-01
MAPPTPATSHLLHPGAPTLPNPTPVSSADPTATPLAGHLGRPGLSLPPASGASLLPSREGRSKAQRWNDVGSPASSIGAASATTGRRASYKEALVSVKAPVISAEAVVVNHDVNVSALQGLLTGRFPLTFVANVSIVPRPPTALQSAVDGFSPAEQAPPPPPPDSPADDDRDHDLHRRQRCRLPDHPSSSTPVASGSNAAVVAFRGPVHTRLGSCQTNVVVPVAGVEPVVGVTPDATTPSASVESTRPQ

SEQ ID NO: 68051 - protein, 388 aa, Zea mays
  Coding DNA Sequence Number=SeqID_26272
MRQGPHPVGNEFLDQVAPRYSGGPHIEEPLRLRLLLPLRIVETPHNNVSTKWQGQTRQAFDIPGSHIKPKVPPIAPLIPSIGDYLDNFSRGLPSPWRDGCSSTTAKSLNVSSDDGVADDALATDEEEDIVTYRRRWRTARSDASGNPQSHSNTSNQRSHFKNPRGTTSSEGSVFTISRQSSTPADLVELDPWGEGEHATHRSMTSTSTFCRTKAPPVRLRTSSMRRPKRPPSPHQVETKTPNDFKDRTAEAAKTIRFCLPQREEGPMYNLAHVVGPRPRMPCGQSGLGRVCNKVSSWQLCCLYRERLATSGPGRAHVIFRRSGGAGGRRLRLLRQRAVPAGEMADSRTLSPPRQRKLLRVARTRRPACPPGARPNAAAPPGIQSLYEG

SEQ ID NO: 68052 - protein, 193 aa, Zea mays
  Coding DNA Sequence Number=SeqID_26273
MKIVGKYALKTETLRSWDIRGYNARLNHVYKLNHLSYGGYPKGDCADIADRRGKQAMPLADEGPSWDKAPAPGETISSPRAPGNICANAEAVMEKDRQDAQRKKRRAHVRLADPRHEVKMARPSAKPAAPDAGAESGQLAIAPAAMSAGPVDATTGAKGDTGASEDPWSKFCASGEIVSTAAAMAWPPQSHSS

SEQ ID NO: 68053 - protein, 273 aa, Zea mays
  Coding DNA Sequence Number=SeqID_26274
MRWLEGRIEHLQTQHAEAVRDKSAAENKSRNLVEKLSAEKEKEDLSCRFAEEKEGAEKARAVAQAARAEADAARAEAGLALKCATDAESELKSLLSYTEKTEASTRAGVECAHTLFVDAYRELGAQTAPFDRSGEEVGLRFLGWLREELESLPSMATGLMSYASLVTCEGQRMPCPPRDMMNEEDVEDLAGLESSMTRMGGAKAGAEGHSAPQAGSSEDPVAAPKILGPACGFDFHFGDRRFEEIGTLSPAYALEVSILSFGVKDSLGVATEL

SEQ ID NO: 68054 - protein, 48 aa, Zea mays
  Coding DNA Sequence Number=SeqID_26275
MASALVLLLPPVGCRSQFVLRNLVITFEQATAAPFLGTTSGSGRYRLP

SEQ ID NO: 68055 - protein, 59 aa, Zea mays
  Coding DNA Sequence Number=SeqID_26276
MRRRCSWLSSLFRPRRADRSLPQPDPQGPDSEPKVYQWPLHSSLAVDVCLIVSGNDGNH

SEQ ID NO: 68056 - protein, 337 aa, Zea mays
  Coding DNA Sequence Number=SeqID_26277
  Gene Ontology: Mol. function=transporter activity; Cellular component= intracellular; Biological process=transport
  Homolog annotation: Hit_ID=Q2A9T2; Match level="QueryCoverage=84%, HitCoverage=68%, E-value=1e-90, Identity=56%"; Hit description =CRAL/TRIO domain containing protein
  Pfam annotation: Domain name=CRAL_TRIO; Domain location=108-293; Score=140.5; E_value=4.6e-39; Accession=PF00650.10; Description =CRALTRIO domain
  Pfam annotation: Domain name=CRAL_TRIO_N; Domain location=20-91; Score=31.2; E_value=3.6e-06; Accession=PF03765.5; Description =CRALTRIO, N-terminus
  Pfam module annotation: Pfam domain module=CRAL_TRIO::CRAL_TRIO_N; Domain location=108-293::20-91
MSFRSIEQLLRRNSKTKISRNIVDRNHDQKEEQLVQSLRELLLASKQLPDKFDDYYVLLRFLKMRGFNILKAKEMFLNMLKWREDCSVDAIANDFKFEEYDAVKRCYPHGFHGVDRFGRPLYIERVGSVDLSKLMQVTTIDRYVKYHISEQEKTISLRYPVCSLVAKKHIASTTAIFDVKGLGLNNFSKSAREMFAEIQKIDSNYYPETLNQLYIINAGTGFRALWKVLKTFMEARTLAKIQVLGTNYLNTVLEAVDPSNLPEFLGGTCTCPTGGCLLQDKGPWTDPEMIRASKEAFGKGQKSFNELAATIACESFTGCQTFTVTPGFRGTKTRART

SEQ ID NO: 68057 - protein, 157 aa, Zea mays
  Coding DNA Sequence Number=SeqID_26278
MASSKEEALIGKEARPWRELRGWLLRSAREPDPWRLGSGRTTEGKGAGQSGRGRLGLITQWSGIRTEPGRSRRWLSSRPRSPRLRGDGHTSCARDARAVARKKEILTAQDPPASEHKGARSDCPQGPAVGTPRTIGIGPHGSKEELGRMGGCRPISK

SEQ ID NO: 68058 - protein, 111 aa, Zea mays
  Coding DNA Sequence Number=SeqID_26279
EPSAKQVDSTSRKRRTLGMLFKDDQVGFDTGENILRKQVDEQILEKIRELEHCAAKSGEVSKGTQIQEIAAKKICYIATECSFFVVQTLQILICKQQELTGHIEQLRKILQ

SEQ ID NO: 68059 - protein, 76 aa, Zea mays
  Coding DNA Sequence Number=SeqID_26280
MALFRKFFYRKPPDGLLEITERVYGECSLRGGLICVPLSNAVVNVSGQCGVTGKCFGVLFFPLIGLSCKRLLLSFW

SEQ ID NO: 68060 - protein, 291 aa, Zea mays
  Coding DNA Sequence Number=SeqID_26281
  Gene Ontology: Mol. function=hydrolase activity; Cellular component =extracellular space; Biological process=biological_process
  Homolog annotation: Hit_ID=Q6ZCX8; Match level="QueryCoverage=96%, HitCoverage=46%, E-value=1e-154, Identity=85%"; Hit description =Putative phytase
MEPITSKIPLMVIEGNHEIEPQGHGGEVTFASYLARFAVPSKESGSNTKFYYSFNAGGIHFIMLGAYIDYNRTGVQYSWLEKDLQRVDRRATPWVVAAWHPPWYNSYSSHYQEFECMRQEMEELLYEYQVDIVFSGHVHAYERMDRVFNYTLDPCGPIYIGIGDGGNIEKIDMDHADDPGKCPSPSDNHPEFGGLCHLNFTSGPAKGKFCWDRQPEWSAYRESSFGHGILEVLNSTYALWTWHRNQDAYAENSVGDQIYIVRQPDKCLLQPANSPIGGCPSLSGRMQDAPY

SEQ ID NO: 68061 - protein, 65 aa, Zea mays
  Coding DNA Sequence Number=SeqID_26282
MARCTRQSGAPVDKEGWELPNEAPTAPRPFGAIKGTPRRMKQHTKPPLNILRRLDPASTHPDHCV

SEQ ID NO: 68062 - protein, 124 aa, Zea mays
  Coding DNA Sequence Number=SeqID_26283
MAHYAAARKQGNGAWAPRGVATAMEALAAGGAPWESSASAMGKKGKGGRGASCPAWKRNREGAGQRRWEQGARWPPWLGYGARRGERQRCPARDEEEANRELCGERQLGEMEIRVGVAGKLAAG

SEQ ID NO: 68063 - protein, 84 aa, Zea mays
  Coding DNA Sequence Number=SeqID_26284
MAGDFSAPCTGKERAVRVGERTKKVVAAGKKWRVGVKNCQFARERGAIYRRGTRSEKANRGNLNFLSIQGFEIRLDTEILSRIE

SEQ ID NO: 68064 - protein, 551 aa, Zea mays
  Coding DNA Sequence Number=SeqID_26285
  Gene Ontology: Mol. function=actin binding; Biological process=actin cytoskeleton organization and biogenesis
  Homolog annotation: Hit_ID=Q1SZ88; Match level="QueryCoverage=78%, HitCoverage=24%, E-value=1e-134, Identity=57%"; Hit description=IMP dehydrogenase/GMP reductase
MDYPRQYEGCPLLTIEMIHHYLRSGESWLSLGQQNVLIMHCERGGWAVLAFMLAGLLLYRKQFIGEQRTLEMIYRQAPHELVQLWSPLNPMPSQIRYLHYISRRNVSSEWPPQDRALTLDCVILRNIPGFNEEGGCRPIFRIYGQDPLPATNNTPKVLFATPKRSKYVRLYKKADCELIKIDIHCHIQGDVVLECISIDVDQEREEMMFRVMFNTAFIRSNILMLNRDEIDILWDAKDRFPKEFRAEVLLSEMDTANQLGPMEVAGIGEKGGLPVEAFAKVQEMFSNVDWLDPTGDAAVQLFQRLTSSENIQLRQGFLSPSKKEAESLELGSISPIDKHFDNVQQEPSKVEHPTVYVNKLENVGQERLVLLEQTTNSEVKTGISVVQENPGSLVHKVDSNAKQSISLEKAVPSTMKSIDPVLKDQNAKLDEQHGSGQHSFPTIIMSQRFPISSSCPALSGYSSPRLLSACPRFNSAPSALGITALLEDHAGSAENRCGSTTLTFDTTGTPVVTKGMPLLRPPPSPLDLLVSDSTMMSEAKGSSQPTLNNSG

SEQ ID NO: 68065 - protein, 150 aa, Zea mays
  Coding DNA Sequence Number=SeqID_26286
MGKSNKRKREPTPPSEDFGDSEYSEEEFSSESEGSSAPVSPPASSDDSDDSQGLAAEVWTYIRSIERSELEGSDETEYSSYEEDSSDSSEEGGGGDGGDDDDDGGDGDDDDDGGDGGSRGGNVGGKGGHGGSSRGSNGGGSSKGSNKASG

SEQ ID NO: 68066 - protein, 118 aa, Zea mays
  Coding DNA Sequence Number=SeqID_26287
  Homolog annotation: Hit_ID=Q1T3W6; Match level="QueryCoverage=29%, HitCoverage=55%, E-value=4e-09, Identity=84%"; Hit description =Photosystem ii core complex proteins psby, chloroplast (L-arginine metabolising enzyme) ...
  Homolog annotation: Hit description=(L-ame) [contains: photosystem iiprotein psby-1 (Psby-a1); photosystem ii protein psby-2 (Psby-a2)]
  Pfam annotation: Domain name=PsbY; Domain location=83-117; Score =14.6; E_value=0.00087; Accession=PF06298.2; Description=Photosystem II protein Y (PsbY)
  Subcellular localization annotation: CTP_CleavageSite=65; ConfidenceScore=5.70e-01
MALLKPAAKAAARSAPSTSSGSVSLRVRTGQAAKKAALSVSQAVAAGLGLGAAAAAGMAAPPEASAAVVQDLAAIAAAAPADDSRGLLLLIVVAPAIGWVLFNILQPALNQLNRMRSD

SEQ ID NO: 68067 - protein, 148 aa, Zea mays
  Coding DNA Sequence Number=SeqID_26288
  Subcellular localization annotation: CTP_CleavageSite=48; ConfidenceScore=5.11e-01
MARRVPSVGIQCAQRTSSLLSPVTQQSWLTPAAAAASLPCLLLLLAAVAAALQAAGAALCGGQRLHPQILTRHRTRRYNPTPILDPGSVVGYSISNGYPYIYRVELSLFDLLSLERIVTVEGEHSASLSSMHLSDAVIPRLGHLDCIV

SEQ ID NO: 68068 - protein, 251 aa, Zea mays
  Coding DNA Sequence Number=SeqID_26289
MASAGGRRRSKAKPRARAGGKAKKRTKYLSLTELLVKAHAQVGASPRSPWEDEEAVAAEVKPEDDACGDDDDDHHHHHHEASTLFEAVPAPSLSDILGPSPPESPAGSGSGALPGAEEEDLPRRALRGRARERWVYCTGGPSPPPPATATGTATATASPCSSAASTGASPRSLLLKLDYDEILAAWAGCGPLYIGAAVSPRPVLADAEVAVGRAERVRRYREKRRRRRLFFARRVRYEVRRLNAVKRPRFK

SEQ ID NO: 68069 - protein, 720 aa, Zea mays
  Coding DNA Sequence Number=SeqID_26290
  Gene Ontology: Mol. function=isomerase activity; Cellular component =cytoplasm; Biological process=negative regulation of transcription
  Homolog annotation: Hit_ID=Q6YPF2; Match level="QueryCoverage=99%, HitCoverage=100%, E-value=0.0, Identity=81%"; Hit description =Putative MA3 domain-containing protein
  Pfam annotation: Domain name=K_channel_TID; Domain location=19-93; Score=7.6; E_value=0.065; Accession=PF07941.2; Description=Potassium channel Kv1.4 tandem inacti
  Pfam annotation: Domain name=MA3; Domain location=141-252; Score =153.8; E_value=4.4e-43; Accession=PF02847.7; Description=MA3 domain
  Pfam annotation: Domain name=MA3; Domain location=305-416; Score =151.5; E_value=2.3e-42; Accession=PF02847.7; Description=MA3 domain
  Pfam annotation: Domain name=MA3; Domain location=439-550; Score =142.7; E_value=9.8e-40; Accession=PF02847.7; Description=MA3 domain
  Pfam annotation: Domain name=MA3; Domain location=602-711; Score =159.7; E_value=7.6e-45; Accession=PF02847.7; Description=MA3 domain
  Pfam module annotation: Pfam domain module=K_channel_TID::MA3::MA3::MA 3::MA3; Domain location=19-93::141-252::305-416::439-550::602-711
MTSPRKDAGFLTQDQREKLRIAVQNAETQSLASPRSPTGGTTSALLQQYELQMLEQKRAAAAAAAARGGGGGGGGPRHVRRSHSGKAIKVKKDGAGGKGTWGKLIETDAEACLDRNDPNYDSGEEPYELVEAPVSTPLEDYKKSVVPLIEEYFSNGDVKLAASDLKELGHDGFHCYFVKKLVSTAMDRHDKEKEMASVLLSYLYGNVVSSTQIRLGFVLLLEAVDDLAVDIPDVVDVLALFIARAVVDDILPPAFLSNAKVSLSGSSKGMQVVQIAEKSYLSAPHHAELIERRWGGSTHITVEEVKRRIADLLKEYIRNGDTAEACRCIRELAVPFFHHEVVKRALTLGMESPAAEALIVKLLKEASEECLVSSSQMMKGFHRVAESLDDLILDIPSAKSEFQLLVSKAISEGWLDSSYVNSGVNGSVEDDEHEKLARYKREAVSIIHEYFFSDDTTEVIRSVKELGYPEYNPIFVKKLITIAMDRKNREKEMASVLLPSLSMELFSSEDIAKGFVMLLESAEDTALDILDASDELGLFLARAVIDDVLAPLNLDEISSKLPPNCSGAETLNMARSLASARHAGERLLRCWGGGTGWAVEDAKDKITKLLEEYESGGDVGEACNCIRELGMSFFNHEVVKKALVMAMEKKNERTLNLLQECFGEGIITINQMTKGFSRVRDGLDDLALDIPDAREKFLSYVQRAKKSGWLLPGFGVASSA

SEQ ID NO: 68070 - protein, 107 aa, Zea mays
  Coding DNA Sequence Number=SeqID_26291
MGLSAAKRAYIRSIERAGLGGLDDSEGEESLGDSEEEEEDSEEDGGGSGDEDDGNSGACGGGDDTGGDRGGCDGGNTGESDLLHLVQIGVLPPRSNALGGCGRGSLS

SEQ ID NO: 68071 - protein, 47 aa, Zea mays
  Coding DNA Sequence Number=SeqID_26292
MGRWNKPSITGGVFMHHKGVEHRYNVDDEGEGHAGSCRWTESDEGRA

SEQ ID NO: 68072 - protein, 65 aa, Zea mays
  Coding DNA Sequence Number=SeqID_26293
MAPPCVAYAAWLGRRRREEVRSRGDSKPNSVKYLETQDHFVNWNMERPPEITVLPQGWNGTPLAD

SEQ ID NO: 68073 - protein, 134 aa, Zea mays
  Coding DNA Sequence Number=SeqID_26294
MPSTSPLAAQQEQREVGELGRGRRVVEASRRGRQWSVEQKRQTAVVGEWHFYGGSSGASSRGRSVGGGGGRRQGERRSVGELGVAKNGSTAVQTSIFRKWERRKGAGDKERRGGGTIKAMLMTMVDEVGERESR

SEQ ID NO: 68074 - protein, 136 aa, Zea mays
  Coding DNA Sequence Number=SeqID_26295
MKMKNREIKTTTMNLTNITIKMMKFDGMWPISKHYTSMFETGYFPNPLQNLLHELGNYVCPLYNNRMVSEPRRVMRDKPSWQGLNSDMNSATLEILKMHEKLEEAHERIAELEAQLEGMEPPEVEAPILALSPPRK

SEQ ID NO: 68075 - protein, 67 aa, Zea mays
  Coding DNA Sequence Number=SeqID_26296
MAWNEIGTEIREVGARDLGAILEARDLDTDPPPRQHHIVLQGKVGAIIIGAKPGDPFIEMKHERVYL

SEQ ID NO: 68076 - protein, 220 aa, Zea mays
  Coding DNA Sequence Number=SeqID_26297
  Subcellular localization annotation: CTP_CleavageSite=61; ConfidenceScore=5.64e-01
MSFLITAASGKPGSSEPVTLSRGSTGSMLSSPPPSVSCGGMVSLSGTGDLDKVGGEFCCISADVSTGLAEKRGRQLRLDSWGGWIKGNSSARTEVCEELSEGNLCDQLDPAGHKLPSPYTCTATVAVVRAPAVGVGGGGAEEHHAARQVITEGGGTGSSRPGGNGVGREEVEDAGMRGVDGSAEVPRLKRRMVVVMGEEVEVVGRVRRAVVEWRAPPHRR

SEQ ID NO: 68077 - protein, 141 aa, Zea mays
  Coding DNA Sequence Number=SeqID_26298
  Gene Ontology: Mol. function=cellulose synthase (UDP-forming) activity; Cellular component=membrane; Biological process=cellulose biosynthetic process
  Homolog annotation: Hit_ID=Q9LLI9; Match level="QueryCoverage=83%, HitCoverage=10%, E-value=6e-37, Identity=63%"; Hit description =Cellulose synthase-1
MANQGIVTHRGFSKCYSSGSLLAKQLKNVNEHKCQIYGDTVGFLATGDIFVACNECAFPVCRSRYEYERKEGNQCCPQCKTRYKRHKGSPQVRGDEEDGVDLDNELNYTVYTRQCPRACVAAVGIRGDVDISSYSRHEPHH

SEQ ID NO: 68078 - protein, 122 aa, Zea mays
  Coding DNA Sequence Number=SeqID_26299
MDYYNCDELSHLSHQCFKPKKNKFKVLKDDTSDDEKNKAFKRRKGKKRQFHKKGGKNYIVGNWIINIDSSNGSSSCKSGNREDKVVVLAIGFSSPHHHHQHHLHTYALWPKVVERYKVMMIE

SEQ ID NO: 68079 - protein, 501 aa, Zea mays
  Coding DNA Sequence Number=SeqID_26300
  Gene Ontology: Mol. function=DNA binding; Biological process =regulation of transcription
  Homolog annotation: Hit_ID=Q10AK2; Match level="QueryCoverage=74%, HitCoverage=95%, E-value=2e-88, Identity=45%"; Hit description =Regulatory protein, putative, expressed
MVGDGMRTRRGRRSTCRTEEEAHQEDDTQQQVEQQAVVDDDAQRDAIGYGASGGHDRNPMASSTFCAGNTSLDWLNLDAMIHGAELGHVDAASTRCRQRSAHLAPRSAPADTGVVGSAEAAFRSEMGGQQNALHQLVSFILGASAAAVLLFFLTTATSGARFTGISSWANGTTGFDDDAPVQAAPATRANHADAKFLDTVVCGSCPARSRVVKQGAAAEQEDELQRLLRAVADEDRTVIMTSVNEAWAAQDSLLDLFLESFRSGERIAHFVDHLLVVALDGGALERCRAVHPHCYLLPTAAARNLSGEKVFMSKDYIDLVWSKVRLQQRILELGYNFLFTDVDILWFRNPFERMSVAAHMVTSSDFYFGDPYSPMNLPNTGFLYAKSSRRTVGAFEAWHAAREAFPGKHEQQVLNEIKVELLATRGLRIQFLDTEHNAGFCNNTRDFNTLYTMHANCCVGLGAKLHDLGNLLQEWRAYRQMDDEERARGPVRWKVPGICIH

SEQ ID NO: 68080 - protein, 367 aa, Zea mays
  Coding DNA Sequence Number=SeqID_26301
  Gene Ontology: Mol. function=DNA binding; Biological process =regulation of transcription
  Homolog annotation: Hit_ID=Q8S051; Match level="QueryCoverage=94%, HitCoverage=98%, E-value=1e-115, Identity=59%"; Hit description =Regulatory protein-like
MGLQKAYLRRIAFFVFEMWLATVFALLILFALASIGRSSRMLEKSYYTETEVASRGDSVTSQDPAEMSDLARLLPKVATDDRTVIITSVNEAFARPDSLLGLFRESFQAGEGIGHLLNNVLVVAVDAKAFSHCRAVHPHCYLLEVKTIDLSSANNYMSEAYIELVWTKLSLLQRILELGYNFLFTDVDIVWFRNPFRHISVFADMTTSSDVFYGDADGLDNWPNTGFFYVKATSRTVEMLRRWRAARARFPANHEQAIFNDIKHELARDLGARVQFLDTARFGSFCRIFHIDMAAACTMHANCCVGLGNKLHDLRDVLRQWKNYTGLTPQAKKSQKFIWKDPAKCGTPDKRKRTHESEKCTTSASIV

SEQ ID NO: 68081 - protein, 160 aa, Zea mays
  Coding DNA Sequence Number=SeqID_26302
MLATRERLTTVTAFPEFGLGRNRELCLVRPQASASALASGEGLRLDQPRPRPQPRPREKDSASPDLSLGRKTPPRPTSASDRLRYRGYIITLPLASRLRLRRNKTRVTSRLLRPQKFLNVKCIIKLDHLLCNNSKEGNSRFISSNVYLKSAANLERKIGQ

SEQ ID NO: 68082 - protein, 560 aa, Zea mays
  Coding DNA Sequence Number=SeqID_26303
  Gene Ontology: Mol. function=nucleic acid binding; Biological process= DNA integration
  Homolog annotation: Hit_ID=Q7XBC6; Match level="QueryCoverage=95%, HitCoverage=33%, E-value=0.0, Identity=78%"; Hit description =Putative copia-type pol polyprotein
  Pfam annotation: Domain name=rve; Domain location=284-434; Score =113.8; E_value=5.1e-31; Accession=PF00665.16; Description=Integrase core domain
NDNVDLLARIDELNVSIASLRNENEKLIAKAKELDVCNVTISDLRTKNDMLHAKVVELKSCKPSTSTVEHTSICTRCRVVDINAIHDHMALIKQQNDHIALLDAKIAEHNLENEKFKFARSMLYNGRRPGIKDGIGFQRGDNVKLNAPPKNLSNFVKGKAPMPQDNEGYILYPAGYPESKIRRTHSRKSHSGPNHAFMYKGETSRSRQPTRAKLPRKKTPNASNDHVISFKTFDASYVLTNKSGKVYASGGSSWILDSGCTNHMTGEKKMFSSYEKNQDPQRAITSGDGNQGVTVFRRSDDSIAFKGVLEGQLYLEKSHTQETLKGFLRRAQNEFGLRIKKIRSDNGTEFKNSQIEGFLEEEGIKHEFSSPYTPQQNGVVERKNRTLLDMARTMLDEYKTPDRFWAEAVNTACYAINRLYLHRILKKTSYELLTGKKPNISYFRVFGSKCFILVKRGRKSKFAPKTVEGFLLGYDSNTRVYRVFNKSSGLVEVSCDVVFDETNGSQVEQVDLDEIGEEQAPCIALRNMSIGDVCPKGIRRASTCTRSTILFHASISTNPK

SEQ ID NO: 68083 - protein, 57 aa, Zea mays
  Coding DNA Sequence Number=SeqID_26304
MNVCELTLAVSHPPPQVKNRIFRLEVWSNHVKKTLIVTEFTNKTKVPLMKQSKVFSW

SEQ ID NO: 68084 - protein, 403 aa, Zea mays
  Coding DNA Sequence Number=SeqID_26305
  Gene Ontology: Mol. function=chorismate synthase activity; Cellular component=chloroplast; Biological process=aromatic amino acid family biosynthetic process
  Homolog annotation: Hit_ID=Q10NY1; Match level="QueryCoverage=99%, HitCoverage=86%, E-value=1e-157, Identity=71%"; Hit description =Chorismate synthase 2, chloroplast, putative, expressed
  Pfam annotation: Domain name=Chorismate_synt; Domain location=15-384; Score=672.7; E_value=2.7e-199; Accession=PF01264.11; Description =Chorismate synthase
MTEVKASGNTFGNYFQVATYGESHGGGVGCVISGCPPRIPLTEADLQVELDRRRPGQSRITSTRKETDTCKILSGTHEGVTTGTPILVIVPNTDQIGSDHREIANVYRPSHADATYDFKYGVRAVQGGGRSSGRETVGRVAAGALAKKILKLKCGLEVRFYSIGNPLPYMLAMVVIGLGQCVTEEHHHIESNIVRCPDPEYAEKMIDAIDRVRVRGDSVGGVITCVARNVPRGLGSPVFDKLESELAKAMLSIPASNGFEIGSGFAGTDLTGSEHNDEFYMDKAGSVRTRTNRSGGVQGGISNGEIVHFKVAFKPTPSIGVKQNTVSRERQNVELLARGRHDPCVAPRGCDCDTRFALDVAFAAVPVVESMAALVLMDQLMAHVAQCEMFALNTALQEPVGSF

SEQ ID NO: 68085 - protein, 495 aa, Zea mays
  Coding DNA Sequence Number=SeqID_26306
  Gene Ontology: Mol. function=RNA polymerase II transcription factor activity; Cellular component=nucleus; Biological process=regulation of transcription factor activity
  Homolog annotation: Hit_ID=Q8LRG9; Match level="QueryCoverage=99%, HitCoverage=100%, E-value=0.0, Identity=74%"; Hit description =Putative TAF6
  Pfam annotation: Domain name=CBFD_NFYB_HMF; Domain location=2-65; Score=2.1; E_value=0.097; Accession=PF00808.13; Description=Histone -like transcription factor (CBFNF-Y) and archaeal histone
  Pfam annotation: Domain name=DUF1546; Domain location=236-333; Score =205.0; E_value=1.8e-58; Accession=PF07571.4; Description=Protein of unknown function (DUF1546)
  Pfam annotation: Domain name=Histone; Domain location=3-68; Score =8.1; E_value=0.02; Accession=PF00125.14; Description=Core histone H2AH2BH3H4
  Pfam annotation: Domain name=TAF; Domain location=2-68; Score=145.3; E_value=1.6e-40; Accession=PF02969.8; Description=TATA box binding protein associated factor (TAF)
  Pfam module annotation: Pfam domain module=CBFD_NFYB_HMF::DUF1546::His tone::TAF; Domain location=2-65::236-333::3-68::2-68
MSIVPKETIEVIAQSVGIPSLGADVAVALAPDVEYRLREIMQESIKCMRHAKRTVLTADDVDSALGLRNVEPVYGFASGDPLRFKRAVGHKDLFYLDDREVDFKEIIDCPLPKAPLDTSVVAHWLAIEGVQPAIPENPAIDAIVPPTENKRSEHGKDDGLPADVKLPVKHVLSRELQMYFDKIAELTMSRSDTSLFKEALVTRSLGDLPVLLALMRVVQSLLRNPHIHIEPYLHQLMPSMITCIVAKRLGHRLSDNHWELRDFSANLVALVCQRFGHVYHNLQNRLTKTLIHAFLDPAKSLTQHYGAVQGISALGPSAIRLLLLPNLVTYMQLLEPELQLEKQKNEMKRKEAWRVYGALLSNKRVLTNNPNKRKSSTDLSATQPPLKKMATDATANSMASASMGGNMQGAMDGFPNQLGNPGMMQASSSGQTVESIPSAAVRRDQGSDLAQRVSAVLRQAWKEDQDTGHLLGSLYEVFGEAIFSFVQPPEISLFV

SEQ ID NO: 68086 - protein, 63 aa, Zea mays
  Coding DNA Sequence Number=SeqID_26307
MGDGVAGGNDGGCAAKGVWAVVVRCKGSVGDGSAHGGGIRVQGAQLITGFKGKFPGIFLENIS

SEQ ID NO: 68087 - protein, 74 aa, Zea mays
  Coding DNA Sequence Number=SeqID_26308
  Homolog annotation: Hit_ID=Q10NZ0; Match level="QueryCoverage=61%, HitCoverage=5%, E-value=2e-07, Identity=59%"; Hit description=NB-ARC domain containing protein, expressed
MTCGNCRGELDLDRRPSGSRGECAFPELRLLETRGCPRLKRIQMRPARGQQVGGRSCNFWGQLIFDDHWSCNLL

SEQ ID NO: 68088 - protein, 73 aa, Zea mays
  Coding DNA Sequence Number=SeqID_26309
MEQVTRMMGDGVAGGNGGGCAAKGAWAAVVRCKGSVCGGSAHEGGIRVQGARGQCFGSYGRSFLTKRLDRFLL

SEQ ID NO: 68089 - protein, 61 aa, Zea mays
  Coding DNA Sequence Number=SeqID_26310
MATDHRTEAQSRGTPILLSPLSLSGEPPQPRGSAGIGAATGSKHGEVRRWHAHHDTVARLS

SEQ ID NO: 68090 - protein, 180 aa, Zea mays
  Coding DNA Sequence Number=SeqID_26311
  Gene Ontology: Mol. function=kinase activity; Cellular component =ornithine carbamoyltransferase complex; Biological process=amino acid metabolic process
  Homolog annotation: Hit_ID=Q6QP54; Match level="QueryCoverage=58%, HitCoverage=37%, E-value=3e-14, Identity=58%"; Hit description =Putative kinase
MTPPVDVAGLRPRLGDVEAPPRPRSSLSSVVEAESEPCVGRSGVRRLPGLSPSPSPGSGGAEFAVFRDLARVRALGRAERSSPSSRAEPKSEPWVGRSGVRRLLGLSPSPSPGSGGAEWRRSRSGTGSAVLLPDRSVERQSDGGHFGSAGWGAHVRIKLYADGGYQLRIRSLEGTPNYGP

SEQ ID NO: 68091 - protein, 135 aa, Zea mays
  Coding DNA Sequence Number=SeqID_26312
MGKNKKGRSSSHHTGDKRKREPSPPWKTLGIAAEVWTYIRAIERSGLEGSDESEISSDKENSSDSSEEKSGGDGDDKDDGGDGGGDGDDGDGDGKGDGDGGYGDGKGDGDGGKGDDGSGKGDSGSSKASGKAPLV

SEQ ID NO: 68092 - protein, 537 aa, Zea mays
  Coding DNA Sequence Number=SeqID_26313
  Gene Ontology: Mol. function=RNA-directed DNA polymerase activity; Biological process=RNA-dependent DNA replication
  Homolog annotation: Hit_ID=UPI00004C1733; Match level="QueryCoverage =90%, HitCoverage=38%, E-value=1e-117, Identity=49%"; Hit description= UPI00004C1733 related cluster
MSGQGRHRLPVGSANLAAAAILLRAMPEPSTTEGRRIQGELKNLLEDVVVRRAERSTSRRQGYPSKHRAATSRFMREALVHTGRTRNTVPAAPGRLGNEHRHGNRRTHLDERVRRGYHPRRGGRYDSGEDRSPSPEPRGPQDFSRGIRRAPFPIRFRTPEYYHKVLGGDESRNCGSRTTGWPANWVERTMTTSSSATSPCSSPTPLEPGWSICLRGESLRDYIRRFSKQRTELPNVTDSDVIGAFLAGTTCRDLRGTKKKGKKKSQAKRDAADADLVAAAEYKNPRKPPGGANLFDKMLKEPAHNNDKKEDHKAGEFPEVHDCFMIYGGKWQTPQLGTASKSVGRLTKVLMDGGSSLNIIYAETLGLLRIDLSSVRASATPFHGIIPGKRVQPLGQLDLPVCFGTPSNFRRETLTFEVVGFRGTYHAVLGRPCYVKFMAVPNYTNLKLKMPGPNRVITVGPTYRHAYECDVECVEYAEALTESEALIADLESLSKEAPDVKCHAGNFELAETVKSVPLDPSNDASKQIRIGSKLDPK

SEQ ID NO: 68093 - protein, 91 aa, Zea mays
  Coding DNA Sequence Number=SeqID_26314
MGQRCAEGVGALATGSQIEGSGSMYSANRYSCIRTLRSKIGQLGLGARGFISMDTEAQLLEVRQAGVVWVARVVGEDSTSTIVRSGWRERD

SEQ ID NO: 68094 - protein, 73 aa, Zea mays
  Coding DNA Sequence Number=SeqID_26315
  Subcellular localization annotation: CTP_CleavageSite=45; ConfidenceScore=5.45e-01
MAHSRSSLPLLGAPSFPSHGVLAPARIADSTACFPARRAPLLSVCARAVLDVFPWRSTVGRAVEPARSVLPIS

SEQ ID NO: 68095 - protein, 64 aa, Zea mays
  Coding DNA Sequence Number=SeqID_26316
MKTKLAAIFPKRLTNCLNRKIATDLVDSCQLWKRCSINCASHETLVDFAVLAIIEPDSVIVREV

SEQ ID NO: 68096 - protein, 68 aa, Zea mays
  Coding DNA Sequence Number=SeqID_26317
MCGPLQRSEGTPDSVRCANRRQSCNGRPRQIRKEIRTEHATVPVRITYSPLSRCSQKYGKSVLLRMIG

SEQ ID NO: 68097 - protein, 108 aa, Zea mays
  Coding DNA Sequence Number=SeqID_26318
MARLCAEGERFGRRNSINARTTWGGGARGVGSVDSGYSARTSRQSGREARGPRRGCFGRSWSRAAWIAAARVAEGRRLGIGRVAAWHPFLAGGCRGGAPGAVCAAPGG

SEQ ID NO: 68098 - protein, 76 aa, Zea mays
  Coding DNA Sequence Number=SeqID_26319
MAAAAGHSVEFRMSVRAYRARAWCCFARVIVVMRRMVMIMTMVMVAFGAIYAQVKKKENIVEADLREFQDFDEFED

SEQ ID NO: 68099 - protein, 78 aa, Zea mays
  Coding DNA Sequence Number=SeqID_26320
MGLRASGGVAGVYREEDDGGVPLDLLFMAGCGDCVAFRIGVTGTVRSGSDDEEPVTENPGDQQKEVAEQELIEGKLCP

SEQ ID NO: 68100 - protein, 218 aa, Zea mays
  Coding DNA Sequence Number=SeqID_26321
MEESEQRGGTAGQGRNPSRDRGTRVGSMSLGWGERATQRKTGKSLGRTESDAQGAEAADRARPGKLVGTTGHGGIGKSELGTEEEIRERQPGNCAGQQGAARAKGERQGAQRLARREPEPEQKSERHGSSRPLAGQYGSRDTGMEELDEALGVCREQTGELQGAAAMAGDAERHGSFSEERERWALGEKIRKTENVRWIYTTDKRRWLEEYQGRTAIG

SEQ ID NO: 68101 - protein, 129 aa, Zea mays
  Coding DNA Sequence Number=SeqID_26322
MGPESFATPSSLLVDLGISVPHRYQNTCLTGVLSFEEVSPYNRSSFTCRLRMKHCCPRKMKKLFELDFQPRQLEDKRLLKGRRMSETYQRYHKVKGAREERSQKKVFKWWSGRRIRKPNLRVKGAEWIE

SEQ ID NO: 68102 - protein, 150 aa, Zea mays
  Coding DNA Sequence Number=SeqID_26323
MPRQAKHVPTPALAHIKSTEASTVRPRSLSTSPERKARNQALPRWRHWIDVVGLHPIASVRGLSSTAGAHAANEPAHLRTWTNRSRPSQSMSRTSTSPQGLPGANPTLRRTSLATGSLEDMVVGVTWSSILPPGWTVKWDPTSVEEEDEE

SEQ ID NO: 68103 - protein, 154 aa, Zea mays
  Coding DNA Sequence Number=SeqID_26324
MGKNKKGRSSSHHSGDKRKREPSPPLEDFSDFEYSEEEFSSESEGSLVYASPLMSSDDSNGSQGIAAEVWMYIRVIERSELEGSDESEISSNEENYSDSSEEGSGGDGDDEGDGGDGGDGGGGGDGDGDGGKGNGGSDKGDSSSSKASGKVPLA

SEQ ID NO: 68104 - protein, 145 aa, Zea mays
  Coding DNA Sequence Number=SeqID_26325
  Subcellular localization annotation: CTP_CleavageSite=57; ConfidenceScore=5.40e-01
MADRPPPPGAFPPRPSSSLELAPRLLVIRCPWRPSGFSLVATGAPVAGNLCTGVTVTSAAPSPLDMAPPQSVAANLGADTPYPLDVAPPSTVVVPSGMPAPSIASSHLDARRSGVGGLGAGPLAPDACNLGSGRIWPCQHCHTQI

SEQ ID NO: 68105 - protein, 60 aa, Zea mays
  Coding DNA Sequence Number=SeqID_26326
MTRQLVNRAHETQREGANGRRKLAPTALLSFVVALAFGRQPLDRFQPVQDLEDSFLFVVA

SEQ ID NO: 68106 - protein, 91 aa, Zea mays
  Coding DNA Sequence Number=SeqID_26327
MAVGPVGMDTHGFRTHRIWIRVQKLTRGSYRVGYPKYIRSVNCNVIETNETLDIDNVITVNCHELIKLLFSVLKFKFIGCDNYELRYCIDV

SEQ ID NO: 68107 - protein, 100 aa, Zea mays
  Coding DNA Sequence Number=SeqID_26328
MVTTASGATIMTVERLNLGLLVDEEPVMERVESRESPPREGVRTAQQRKRRAQRHRRLRQRRGRAWERRPCRRSKTGVKMTGDLLLGDDIFNTDGELWRK

SEQ ID NO: 68108 - protein, 104 aa, Zea mays
  Coding DNA Sequence Number=SeqID_26329
  Gene Ontology: Mol. function=RNA-directed DNA polymerase activity; Cellular component=chromatin; Biological process=RNA-dependent DNA replication
  Homolog annotation: Hit_ID=UPI00004C1730; Match level="QueryCoverage =57%, HitCoverage=10%, E-value=2e-21, Identity=80%"; Hit description =UPI00004C1730 related cluster
  Subcellular localization annotation: CTP_CleavageSite=14; ConfidenceScore=5.25e-01
MKLWKETSRSFKTTTSSRRGLAATPSRLPVKAAFIYVSFPHFDLLISSIKTTTNLSNSGMNAEFIKYVKWDGAFVNPKDITKYLNNPYRVVKAILGISSGRILI

SEQ ID NO: 68109 - protein, 48 aa, Zea mays
  Coding DNA Sequence Number=SeqID_26330
MARIACTLYGKRLDGTRFVLLLMVLSAGGLGLLIGLSSSSIFLIEDCL

SEQ ID NO: 68110 - protein, 225 aa, Zea mays
  Coding DNA Sequence Number=SeqID_26331
MAMMGSTSEKMYLCQDLLDVGLLIKDPLTGHMPCHGRHNTLRLCDGFGIGMKLQAIDYENGGMRGLPEEKKQTYFRMQAISNDTEMNAVLSALAGESFGSAQAESENSVPGRSCDGEEGICSPELGGVRASIVTKEEEDDGDEEDVPSLVHRDHRSKASIDITDLGLSWLVSLQGMTMSTIDSALEKVTLEDLLLDLSEAMGTDVRVGCLYGAPSSSFLARQEAT

SEQ ID NO: 68111 - protein, 56 aa, Zea mays
  Coding DNA Sequence Number=SeqID_26332
MKLVYLTEPFGVGALSLASKSPDIYVEPNNCVRGAKGSTQQQQQQQQSLFVPSTLG

SEQ ID NO: 68112 - protein, 104 aa, Zea mays
  Coding DNA Sequence Number=SeqID_26333
  Homolog annotation: Hit_ID=Q42601; Match level="QueryCoverage=41%, HitCoverage=3%, E-value=3e-08, Identity=63%"; Hit description =Carbamoyl phosphate synthetase large chain
MVPPLIEHIIDAELPDALLPTMGGQTALNLVVLLTDSGAARRDGSPGAATLGAHAATVRDQGEKVTWGASDWNEGPGFDQMKRFVRGRGSLIQRHILHRLKCCT

SEQ ID NO: 68113 - protein, 72 aa, Zea mays
  Coding DNA Sequence Number=SeqID_26334
MGAQLTASRRAGKGGGRTAERARSDAGGEGHRDQTDDSEWRGVQDVNFSEQTDNELHARTEATATRRADALL

SEQ ID NO: 68114 - protein, 135 aa, Zea mays
  Coding DNA Sequence Number=SeqID_26335
  Subcellular localization annotation: CTP_CleavageSite=13; ConfidenceScore=5.49e-01
MAASLSVLPVAHVASVVTGRWALAFRSVPNPASQQPPLRTLFRYGSPPDQRVARLHADRWLGQGCSDSPACPCGIRDTMNPEHREPQQNDRNNRELRNKLRTPLRDPLWPDSAATLEITRIMTPQPAEAVYSLVP

SEQ ID NO: 68115 - protein, 118 aa, Zea mays
  Coding DNA Sequence Number=SeqID_26336
MGAAEGAEHGEAAYDGADQLPVKNFAGTGAVLGAIKVWVGCSPRVQATERLGNGRDAMEPQVDGGGLRLHGEDSGERGPNKLEGLGANRGVSQATGGAAELTEETGATRAQRRPWNGR

SEQ ID NO: 68116 - protein, 69 aa, Zea mays
  Coding DNA Sequence Number=SeqID_26337
MKLRARWPVFLCPTMAAAILALRAAALRGRAGKTLGLPLIQPLTARIGPGVRVRLYGIATVGPAVNARD

SEQ ID NO: 68117 - protein, 826 aa, Zea mays
  Coding DNA Sequence Number=SeqID_26338
  Homolog annotation: Hit_ID=Q84ZW7; Match level="QueryCoverage=29%, HitCoverage=53%, E-value=1e-74, Identity=65%"; Hit description =Putative drought-induced protein
MAGTFREGAGPGDAHAPPPTPTPPLSQFLALDALPSWGSDPKQPHWRHPELRRALASDDQADELRRIRASVQDSAGKAKEKVRSLHEAIQKLDKYKNIVTRKRQRATEASAAPDKLGPAGASSSGALRMGAQNNSAVLSKRVRSSLADARVEGRGSVPTRQGPLISTEKNSPLEKEKSSARISATVSGLSDDKLRGLSTGSEGWEKKMKRKRSVGTMLSRGSDVDRDVKSAGQHRPANEVRPRSSDGLGYRANSSDDMQNVSLNPLPKAKACRAPRTSSLAMNSSSNFQRSTGGSDEWEETPYPNKASPLGGMTNRKRSTHSNASSPPIAWVGQRPQKMSRTRRANVVSPVSNFDEALSEGSPLDTATRSAPIESGSVLLTKNTSTTKMDNISSPAGLSESEGSAVNESKSKEKAMHSGEVGNEGANAAHNAMGLIFSSNKNRIPLKEELEDGSIRRQGRSGRGAMHVKGCSPIPKEKLDTAETRKPTKGGRPGSEKNESKLGRPPMKKASDRKASSWHSQALNSDITDITGEPEDDQEELLAAVNAARSAIVCGQINLVEELEVSMSCMSDGEHDIIASVGHRRMSKMEEHSSQGLVPSNFSPSSQQSKTNGVGEKGLVGCFSHGDESRTGPQKLEADKWFNEMAPMTHRLLSALIMEDDLPDSNGVQRDILVEFPNSHNPYTVNRYLENELQASAITSNFGLSVDFVHSNSTSVVHQSMCNGFTASSNFINSNSENSVHSENLSDGLNFTVYPESGPLHDLIPLTPRQCQNPGKDFPLSPYEYQYGQMSMEDKILIELQSIGICPETVFFNGSLYALPTRKHDK

SEQ ID NO: 68118 - protein, 291 aa, Zea mays
  Coding DNA Sequence Number=SeqID_26339
  Homolog annotation: Hit_ID=Q84ZW7; Match level="QueryCoverage=56%, HitCoverage=35%, E-value=1e-31, Identity=52%"; Hit description =Putative drought-induced protein
VNQKKCRLHKLDKSIQDTKNIEERSLEQHAMNKLVERAYRKLKGGRIGSSHKAGVSKSANKAAKQLALAFAKRTLVRCHKFDETGKSCFSEPSLWSILSAPLPSSDSKCTEGVERLKHQKLDRTPFDQGGAKWKKVDRERDHNRDASAKGSGLKSGRHSSGGSGRSGERKNKTKPKQKLAQLSTSGNVLGRVVEPFSSPTVQEPPEPASEKKTQHPTRGASSSAAQRLTVDAGLPVLPGLDDILDVPEGLDGQGNDISSWFTDGLDDSLQDIDLSGALEIPDDDLTQLGFM

SEQ ID NO: 68119 - protein, 87 aa, Zea mays
  Coding DNA Sequence Number=SeqID_26340
MSRPEHLPPTNSPACARGPADSDHLRRRPVPQRDRRNLPQPPWTPHRSYLTAGTLHDMVDGVTWPSTLPPGWTVKWDAASTGEDQEE

SEQ ID NO: 68120 - protein, 183 aa, Zea mays
  Coding DNA Sequence Number=SeqID_26341
MKWAESQCIGGAPDSEQYLSIVHRIVCVERLYSVMGSLAGTDAELDNNPPQKALCRTIRFALRDWSSFVSLTLGVAAVGGSEARSVALYRMTLLFLSTLKLARNFAFASLISYSWCSSNSRYSSSGKVSQVGSMMLLGEMSELAIEGRFDRSLREVLGGVAKSVLATIWAPITVMITGGDALC

SEQ ID NO: 68121 - protein, 125 aa, Zea mays
  Coding DNA Sequence Number=SeqID_26342
MAATHFLSPLLERRDLQGERLHSPSRLGDARINGRGRRKEISPTDGAHMYVTEAEAGARVDNSGLRGSRRGPKLLKHENLCWQGGFSKLSKTCSKEQSTIYSKQQKAVPKGAQCKFSEPTAKNKR

SEQ ID NO: 68122 - protein, 105 aa, Zea mays
  Coding DNA Sequence Number=SeqID_26343
MTYDYGINFSLIPYLPRILLFGTLLPDYKRYVTTRKDQALSNVQRDGLRSDYQLSRNLLRSSRTQPFHHLQQHGFENLEYGVYFRKSYLSKEKTLKDMLTVGNQG

SEQ ID NO: 68123 - protein, 112 aa, Zea mays
  Coding DNA Sequence Number=SeqID_26344
MAASAAFGAKASQTMSSSKAMLDHQRNDDIKKKGKSELYQDVVLSSGSYCWWGLLIQGDVGLQEEKAQPGQRSSCLSFQKLVDGVLDVNIISMLRSNFLYEIQKALGDYAFV

SEQ ID NO: 68124 - protein, 96 aa, Zea mays
  Coding DNA Sequence Number=SeqID_26345
MARLFMPDYHPPRKSCLDEIGQFGGKSLGRKLTGAALGRTPTAPPSRRELFSPWLAVGRMMTAGGRWIKMNGCDQLLRHDSAGSFGTMDHRIEGRD

SEQ ID NO: 68125 - protein, 80 aa, Zea mays
  Coding DNA Sequence Number=SeqID_26346
MGNQKFAKPIVRVDALSKRQEKGIKGGYLSQAFERTKHMPGKMVTGTIQEMVDGVTWPTTLPPGWTVEWDVAPAGEEHEE

SEQ ID NO: 68126 - protein, 144 aa, Zea mays
  Coding DNA Sequence Number=SeqID_26347
MEACRPIAYKLKIPSRLSAIRNVFHISQGRDPTRDPRRDMHVREAKQAFGQGQKRSSTGSTAADTRERSMTAPMHAMSSSRLDRVPSTKPVPKPSLIRIPNPTSLPSHTPHTLCRRLDAVNRQNNERGTAHKLTKALGTVSRPL

SEQ ID NO: 68127 - protein, 80 aa, Zea mays
  Coding DNA Sequence Number=SeqID_26348
MAPAPRTYLISISLHSSDPGGELRHPRAKAPGHEYINTEKQRTGGQVDGFWRDADSVDKMILSSLAYRTTTGMEASSCTM

SEQ ID NO: 68128 - protein, 89 aa, Zea mays
  Coding DNA Sequence Number=SeqID_26349
MYNNRDPNRDNNDAAVGENDSLLKDIGASCREYGGVVRYSDKGQGGTGPHDGAIEGNVNLWGDYDAGRDAGKAAIVTAKAIAVNSRVEQ

SEQ ID NO: 68129 - protein, 65 aa, Zea mays
  Coding DNA Sequence Number=SeqID_26350
MKDAKAAKTPMGTDGHLDLNKGDAKYVLIQEQGTEQEEAQEPAPELVVEEFPAVPVPEGKPRLYA

SEQ ID NO: 68130 - protein, 172 aa, Zea mays
  Coding DNA Sequence Number=SeqID_26351
MWCDRVSHGKDVWAMHLDQVGRITVQCMSVLCRQHALHNDAMAHLTRLAQTTNTTLDDREVFVVDLSFELVEKDLQIEQMGNHTRELEQQVEIQNHTIEVLKNQLHDVQVELDKANAHLEMHHQEMQQDTEGDEDSKEEEDPEEIEPASSLDIAHSGGPLHLRLVLPLLRVR

SEQ ID NO: 68131 - protein, 401 aa, Zea mays
  Coding DNA Sequence Number=SeqID_26352
  Gene Ontology: Mol. function=RNA-directed DNA polymerase activity; Cellular component=chromatin; Biological process=chromatin assembly or disassembly
  Homolog annotation: Hit_ID=UPI00004C1730; Match level="QueryCoverage =70%, HitCoverage=52%, E-value=1e-128, Identity=75%"; Hit description= UPI00004C1730 related cluster
MHLVGMDTLLILLSLGLAYHHLRGHDITDLHSGYHQIKIQTSEIPKTIFSTRYGLYEFLVMSFGLTNAPAYFMYLMNSVFMPKLDKFMVVFIDDILVYTRSEEEHVGHLHMVKEIKFLGDTVSQEGIVDDPNKVHEVMNWKAPTVVRQIQSFLGLVGYYRRFILNFSRITKPMTELFKKGIKFEWCQKCEEAFHTLRQHRTTAPVLAQSDNAKPFEVYYDASGTRLGCVYMQDNRVIAYASQALRPHKQNYPTHDLELVAIVHALKIWRHYLLGAHCNIYTDHKSLKYIFTQTDLNMRHRRWLELIKYNLEVHYHLRKANVVADALSRKAQCNCFTMDSRVNTLCDELNKLKIEVVPFATLDFISIEPTLLDQIVMAQLSDKGVLIIKEIERELGLHLVPI

SEQ ID NO: 68132 - protein, 107 aa, Zea mays
  Coding DNA Sequence Number=SeqID_26353
MWCRKPSSTAADDPNSGWCSRREACAHGSTLLMTKPHSGWGEVVAEHKYKLHGSVSDDRRWSGPTTDDGHLLGKEEMEDADVRAMEMRGSAEGKPRCAGAGDMGARA

SEQ ID NO: 68133 - protein, 142 aa, Zea mays
  Coding DNA Sequence Number=SeqID_26354
  Subcellular localization annotation: CTP_CleavageSite=46; ConfidenceScore=5.07e-01
MADEDSALPSAMKNGARAGDGKARAGNQAPTSWSAAGTEHRPSWATAVTLGNRKLSSTAADDPNSDWCSRREACAHSSTLLMTKPHSGWGEVVVEHKYKLHGSKIVDILDPDLKSQIFQTVGLLAMYTGSTRYPNTHFILQI

SEQ ID NO: 68134 - protein, 499 aa, Zea mays
  Coding DNA Sequence Number=SeqID_26355
LVRSPVFAVDLRGRNAAVFVREVEAMKIVGKYALKTETLRSWDIRGYNARLNHVYKLNHLSYGGYPKGDCADIADRRGKQAMPLADEGPSWDKAPGATARKRKLGTAAEYLGLRGSNHFVRDLLETCVAPGETISSPRAPGNICANAEAVMEKDRQDAQRKKRRAHVRLADPRHEVKMARPSAKPAAPDAGAESGQLAIAPAAMSAGPVDATTGAKGALTLEFVAKMRWLEGRIEHLQTQHAEAVRDKSAAENKSRNLVEKLSAEKEKEDLSCRFAEEKEGAEKARAVAQAARAEADAARAEAGLALKCATDAESELKSLLSYTEKTEASTRAGVECAHTLFVDAYRELGAQTAPFDRSGEEVGLRFLGWLREELESLPSMATGLMSYASLVTCEGQRMPCPPRDMMNEEDVEDLAGLESSMTRMGGAKAGAEGHSAPQAGSSEDPVAAPKILGPACGFDFHFGDRRFEEIGTLSPAYALEVSILSFGVKDSLGVATEL

SEQ ID NO: 68135 - protein, 145 aa, Zea mays
  Coding DNA Sequence Number=SeqID_26356
MSCRDLMGTPVQSGAGREKILAAAWASHRRRSSRIGMRLGRVFGIGPMGLIMLLGIPSWPHRGWSSWNRLPWIRRRRRSACFRGQPAMSVTNAARGYEPPDDHPGTWNLKSQASCALDHFFLPSYVLINHNDLHRLILMGPNRLP

SEQ ID NO: 68136 - protein, 143 aa, Zea mays
  Coding DNA Sequence Number=SeqID_26357
  Subcellular localization annotation: CTP_CleavageSite=33; ConfidenceScore=5.18e-01
MPMTSPSSMVSSPSGGAKPGGGARGAPSELQVPHSVVGGGVILALSLAVDGVIFEGLLKDAAQPALPIRHPRARPYNMGRIVHGPLLALRGTKPYGLRGLGCPILEVVGGLRLGLTRRRGRFDLRMDDVRSLTDGAFVLRNVE

SEQ ID NO: 68137 - protein, 66 aa, Zea mays
  Coding DNA Sequence Number=SeqID_26358
MAPSAFPESDKFVAEDLGAGVDDSPDSLVIYSHIAPPIPESGHFAVEPAWGTGQSGVPGWCWFWLS

SEQ ID NO: 68138 - protein, 100 aa, Zea mays
  Coding DNA Sequence Number=SeqID_26359
MEFAQLKGGCDSRTTVVGLGQQGRPVALSAVVKSRRGWLDNGRGEVSERGARFIGEGVQSMLRCPTMVQGTNVGAGWRAWNSQWRALWLRSAGRTIGSLR

SEQ ID NO: 68139 - protein, 127 aa, Zea mays
  Coding DNA Sequence Number=SeqID_26360
  Gene Ontology: Mol. function=binding
MYNISLYYSYGEGLAQDPVHAKRWLPLAADCGHKKALYECDIKLCAAGDKVKCLMYLELATRHGEAAAAHMRDVILESFSVVNAQRAMSDADKWKPRTLHPRPRSVTINSNELFYVRAVTAVDHLLY

SEQ ID NO: 68140 - protein, 56 aa, Zea mays
  Coding DNA Sequence Number=SeqID_26361
MESRERRKGEVPDDLGPPGNDSRKNGTRLQRPKSGPQMFFGFSFYFHMVDLTPIDG

SEQ ID NO: 68141 - protein, 64 aa, Zea mays
  Coding DNA Sequence Number=SeqID_26362
MAVMGSTSEKMYLSQVSFASIGPILEMPPCNGSGEMARVACTLRGKRLDDGVSMLSVGVNLFWS

SEQ ID NO: 68142 - protein, 41 aa, Zea mays
  Coding DNA Sequence Number=SeqID_26363
MEGVSAAAFHGGNTTFRGSGYGRVQSGGSMSITTYDVMPKF

SEQ ID NO: 68143 - protein, 693 aa, Zea mays
  Coding DNA Sequence Number=SeqID_26364
  Gene Ontology: Mol. function=protein-tyrosine kinase activity; Cellular component=integral to membrane; Biological process=protein amino acid phosphorylation
  Homolog annotation: Hit_ID=Q2R2M3; Match level="QueryCoverage=95%, HitCoverage=95%, E-value=0.0, Identity=55%"; Hit description=Protein kinase domain containing protein, expressed
  Pfam annotation: Domain name=LysM; Domain location=136-183; Score =6.5; E_value=0.12; Accession=PF01476.10; Description=LysM domain
  Pfam annotation: Domain name=LysM; Domain location=204-247; Score =13.4; E_value=0.022; Accession=PF01476.10; Description=LysM domain
  Pfam annotation: Domain name=Pkinase; Domain location=383-666; Score =57.0; E_value=6.3e-14; Accession=PF00069.15; Description=Protein kinase domain
  Pfam annotation: Domain name=Pkinase_Tyr; Domain location=383-666; Score=22.1; E_value=7.9e-14; Accession=PF07714.7; Description =Protein tyrosine kinase
  Pfam module annotation: Pfam domain module=LysM::LysM::Pkinase::Pkinas e_Tyr; Domain location=136-183::204-247::383-666::383-666
MASFHDLTATAVLLLLFSILSGGLAPLQVQAQQPYGSQIADCTNQHNSSSLLGYFCGAAGSAPSCPTFLTFTARAQYSSLATIGALLGADPASVLAPNEATGADAPLPAGTRVLVPATCACTATPGGRFYQRNATYVAVAGDTLLIIANNTFQGLTSCQALEAQALRGAPPQSLDVGQSLPVPLRCACPSAAQAAAGARYLVSYLVDVFDDLTTVAARFGVDMGTVAASNQLQPPFTIDPYTTLLIPVSAQPNVSRIQTPPSPPPPPPVVARAPAPGKKSSNHVGVYIGVAVAVVVVAAIVSAGAFLAVRARRRRAGAVLATGEVAKKESKAGNDRAATSSGFTGGEFSLSTSEAFSSISVTDIKSSLKVYTYAELKAATDDFSPEHRIGGSVYRAAFNGDAAAVEVVDRNVSTEVEIMRKINHLNLIRLIGLCHHRGRWYLVTEYAEHGALRDRLLASATGTAAPLTWAQRVHIALDVAEGLRYLHEYARPAWVHMDVSSGSVLLAGDGPRAKLRGFGAARAITGATAGVDGEEGAEEALFTMTSRIAGTRGYIAPEYLEHGVVSPKADVYSLGVVLLELVTGRDAEELVGDGVGDPFVALRELAEELDGGGDAVLQRLEELVDPALPAGSCPQDAVVMVVRLIERCVRQDPARRPTTGEVAQRLLKLSGVSVVSWRNSPESPRSSGSGKGL

SEQ ID NO: 68144 - protein, 293 aa, Zea mays
  Coding DNA Sequence Number=SeqID_26365
  Gene Ontology: Mol. function=protein serine/threonine kinase activity; Cellular component=membrane; Biological process=protein amino acid phosphorylation
  Homolog annotation: Hit_ID=Q2R2N4; Match level="QueryCoverage=57%, HitCoverage=44%, E-value=3e-58, Identity=65%"; Hit description =Protein kinase domain containing protein, expressed
  Pfam annotation: Domain name=Pkinase; Domain location=146-290; Score=- 58.0; E_value=4.1e-05; Accession=PF00069.15; Description=Protein kinase domain
  Pfam annotation: Domain name=Pkinase_Tyr; Domain location=147-290; Score=-42.2; E_value=7e-10; Accession=PF07714.7; Description=Protein tyrosine kinase
  Pfam module annotation: Pfam domain module=Pkinase::Pkinase_Tyr; Domain location=146-290::147-290
TDRSTNERLPGRPSKPVDWFCHVGLLPVAVQHHRLHMGSLVAWPEKSLLAAVAGAEERESLTLTCARSKNQRTSMALRPRVRTLLYELAMLEDSVHNCAQHCGECALVNKIMTGNLIHRHDKIKREADISGNIKIFTEDEIERITNNFSTLIGKGGFGEVYRGTLDDDNEPVAVKKYINEDSREVFMEEVRIHSKIGHKNVVKLIGYCIGESTLMIVMEYMSKGNLNDLLHSEISIPLDVRLGIAIGCAEALSYMHSMHVSSGNLVCHGDIKPATLLLDDNLTAKLRKHLKAS

SEQ ID NO: 68145 - protein, 272 aa, Zea mays
  Coding DNA Sequence Number=SeqID_26366
MALPTRIFSPGSWGDLMQGNQEYSRCPCGWKMLPVLKEELGLCVSFGRVLPSWFCIHLRPLMSRIGACGPDDLGGLSHSVDWLADSLVSLGCSAGRLVGSLVSLGCLADIRSMGHPWVAFWAFSCELLDGRFVFGRSWKPSLGALLPGMLDPSKSYVFIMVCQKATKRRIETPSSDSGGGSIRRRWPDALQLFRLAYVLQDRRCQNGGHRRLGMGHIEGIGGKSPTLGTMMGIRCKAPTFDTIADIGGCITFGMTADYCAIGRDIFMVISVH

SEQ ID NO: 68146 - protein, 58 aa, Zea mays
  Coding DNA Sequence Number=SeqID_26367
MTSSSPEQWLQCGQPRGFGVVKQGTRIYDYARKETITIEATTERHSNFVKKLWVKILI

SEQ ID NO: 68147 - protein, 349 aa, Zea mays
  Coding DNA Sequence Number=SeqID_26368
  Gene Ontology: Mol. function=thioredoxin-disulfide reductase activity; Cellular component=cytoplasm; Biological process=removal of superoxide radicals
  Homolog annotation: Hit_ID=Q6ZFU6; Match level="QueryCoverage=97%, HitCoverage=99%, E-value=1e-133, Identity=73%"; Hit description =Putative NADPH-thioredoxin reductase
  Pfam annotation: Domain name=DAO; Domain location=13-251; Score= -54.0; E_value=0.023; Accession=PF01266.14; Description=FAD dependent oxidoreductase
  Pfam annotation: Domain name=Pyr_redox; Domain location=162-261; Score=83.4; E_value=7e-22; Accession=PF00070.17; Description =Pyridine nucleotide-disulphide oxidor
  Pfam annotation: Domain name=Pyr_redox_2; Domain location=13-307; Score=153.9; E_value=4.2e-43; Accession=PF07992.4; Description =Pyridine nucleotide-disulphide oxidore
  Pfam module annotation: Pfam domain module=DAO::Pyr_redox::Pyr_redox _2; Domain location=13-251::162-261::13-307
MEGSAADGPLRTRVCIIGSGPAAHTAAMYAARADLKPVLFEGWMANGVAAGGQLTTTTVVENFPGFPAGIMGRDLMKRCRDQSQRFGTRILTETVTAVDLSARPFRVVASDKSTTVLADAVIVATGAVARRLDFPGSDTYWNHGISACAVCDGPAPIFRDRPLAVVGGGDSAMEESSFLTKYGSRVYIVHRRSTFRASKIMQDMVLKNPKIQVVWNSVVVGAFGGADGDGGRPLLAGVKVENLVSGEVKDLQVAGLFFAIGHTPATEFLGGQLQLDSPSGYVVTKPDSTHTSVKGVFAAGDVQDKKYRQAITAAGSGCMAALDVEHYLQEVAVVGAQEGKSVQPLTMLE

SEQ ID NO: 68148 - protein, 96 aa, Zea mays
  Coding DNA Sequence Number=SeqID_26369
  Gene Ontology: Mol. function=nucleic acid binding; Cellular component= cytoplasm; Biological process=RNA processing
  Homolog annotation: Hit_ID=Q6ATR0; Match level="QueryCoverage=79%, HitCoverage=42%, E-value=3e-14, Identity=56%"; Hit description =Putative RNA binding motif protein
MGRAAEEEGDVEFADYDLDDEDAMEEDGRAARALPVPRIVSPAVVRTRGRFVGRSPSVLTSSRYRFDFTTNNGDHGPIPLPQRCEDPLLDHFLDDL

SEQ ID NO: 68149 - protein, 67 aa, Zea mays
  Coding DNA Sequence Number=SeqID_26370
MTPRQCKFHYVILKENLSLKDCNLADGEYILVPEQGAAQEVAPDPAPEPVPEDLPATALEGKPRFYA

SEQ ID NO: 68150 - protein, 247 aa, Zea mays
  Coding DNA Sequence Number=SeqID_26371
  Subcellular localization annotation: CTP_CleavageSite=43; ConfidenceScore=5.07e-01
MGPHLKLWKHLFSPQVNLGRGNQSFVSSFNIQLYGSRNVSYLRISLLSSIHKYERKWFYVWNLEGSAPVFTGRILVAKPEWTYNVEKRLKLKIDYMLDAITKQRGWGLSGERFTDDNDYDRHSTVNLEKEELVARVLAIMMGVTSDSLDESGPLSFNQVWLSDLAERKRKREADEAAHKKHRLERKREKKKARLARTGLGSISPSTDMEDMTSTAFGGVELPTCTSTIWLYTSGRLFTSQAVRIKTA

SEQ ID NO: 68151 - protein, 529 aa, Zea mays
  Coding DNA Sequence Number=SeqID_26372
  Subcellular localization annotation: CTP_CleavageSite=63; ConfidenceScore=5.44e-01
MDTEPFDEAELLALPPSPVASPPRRLKRLKKSSSQATATTATTTSPHVGSPPPPLSPPPPPLLAEATPGEETLAFPSRDTSPHPPTPPDADAPTPLPHPSPAPVSPPLQPTVTPDNDSDEEDDGLDPLFSGAAGVAQWDPLGAPAEGDGEGDDDDDGLGGGGLIEELRREQRSAKKRLDMDEADGEVASGAGARAEAKGKRSKRKRKEEAPTMESAREKKRSEKERRAQLDSIHAESQRLLRETRKASFKPTVQPVHKPISSVLEKIRLRKMEVLKKYRFFSLRSNTSIEDSDDNDAVPEPVVDLAEQLDVPQSKEVALDKDLRIDGAEKELGANGHSLDRCDSVQEDEDGLSCKEKYLYNCGTKASDEEFSDRLQENHENTQPSNNHNDSVDQSQLPPSSSPTESTDEISSEDEENNDKENMDPSAQNNDVHTLEHLQQAIGGNSRPDDAILKDFLDDEAEEEDDSDNDMTRFKDNEEDDGSDENEVFNDLIAAGYEEKEVDHEKRNELHQKWLQQQDAAETFWLSLR

SEQ ID NO: 68152 - protein, 723 aa, Zea mays
  Coding DNA Sequence Number=SeqID_26373
  Gene Ontology: Mol. function=RNA-directed DNA polymerase activity; Cellular component=mitochondrion; Biological process=RNA-dependent DNA replication
  Homolog annotation: Hit_ID=Q8S463; Match level="QueryCoverage=96%, HitCoverage=41%, E-value=0.0, Identity=86%"; Hit description =Putative prpol
  Pfam annotation: Domain name=RnaseH; Domain location=164-292; Score =4.6; E_value=2.2e-05; Accession=PF00075.14; Description=RNase H
  Pfam annotation: Domain name=rve; Domain location=475-634; Score =91.8; E_value=2.1e-24; Accession=PF00665.16; Description=Integrase core domain
  Pfam module annotation: Pfam domain module=RnaseH::rve; Domain location=164-292::475-634
MLLGFIVSKRDIEANPEKITAITNMGPIKDLKGVQRVVSAAIVVERREEGHALPVQRPVYLISEVLFETKIRYPQIQKVLYAVILTRRKLRHYFESHPVTVVSYFPLGEIIPCQEASGRIAKWVVEIMGETISFAPRKAIKSQVLADFVAEWVDTQLPAAPIQPELWTMFFDGSLMKTGAGTGLLFISPLGKHLRYVLRLHFLTSNNVAEYEALVNGLRIAIELGVRRLDARGDSQLVIDQVMKNSHCCDPKMEAYCDEVRRLEDKFYGLEVNHIARQYNETVDELAKIASARTTVPPNVFSRDLHQPSVKTNNTPEPEKVSALPEAPSATEGEALRIEEERSGVPPNRDWQTPYLQYLHRGELPLDTAEARRLARCAKSFVLLGDGKELYHHSPSGILQRCISIAEGQELLQEVHSGACGHHAAPRALVGNAFQQGFYWPTAVADATRIVRTCQGCQFYARQTHLPAQALQTISITWPFVVWGLDLVSPFQKAPGGYMHLLVAIDKFSKWIEVRPLNSIRSEQAVALFANIIHRFGVPNSIITNNSTQFTGRKFLDFCEDCHIRVDWAVVAHPMMNGQVECANGMILQGLKPRIYNDFNKFGKRWMKELPSVVWSLRTTPSRATGFTPFFLVYGAEAILPTDLEYGSPRTRAYDDRCNQTNREDSLDQLEEARDMALLHSARYQQSLRRYHARGVRSRDLQVGDLVLRLRQDARGCHKLTPL

SEQ ID NO: 68153 - protein, 211 aa, Zea mays
  Coding DNA Sequence Number=SeqID_26374
MGKGARRRSRASGADGGGRGSKRPWRAEEEEQEEEEMEPLVGEDYCFGCKDGDDLRVCDFSMLWVLGIYKSGGCLCDGECCGIARAGLGTVWNAAILLELEAVQFHMAKNPRNRKKNPAFQTGLQNSGGPRDVPDPVVSGGALASGVWLFARCPLVLAIGIRCIWILAYGHLADWLGGTCSCQLVGPSRIVEFDYNSTNDADESWFENVVV

SEQ ID NO: 68154 - protein, 63 aa, Zea mays
  Coding DNA Sequence Number=SeqID_26375
MTHEGNVGPMPASMDGEDVAATGHADGRRRPRPEKSPLGEDDRGDVRWIWPTRSHQLRRLGCV

SEQ ID NO: 68155 - protein, 142 aa, Zea mays
  Coding DNA Sequence Number=SeqID_26376
MKVGVNKRSLGRGDPCAGADTEQEELVSSEVEHKAKHDDQRHQALEIDDMHGEGGCSYQSALTKVLGDVGRCSRRLGSGTAMLGARGRQRSASGSGTTALDLGLGDGGAQRSGSGTAAQLISLAAQLCQLGRELARVPAGSS

SEQ ID NO: 68156 - protein, 92 aa, Zea mays
  Coding DNA Sequence Number=SeqID_26377
MTGDARAIAAAGCHRGLAWPGHLELPPAQPTPWLCARSTRDGSAGPAALGRRRRAPTRKGRSPFPVRSKEEDDGPICKFQNSRGARLFQGPG

SEQ ID NO: 68157 - protein, 182 aa, Zea mays
  Coding DNA Sequence Number=SeqID_26378
MKTGMLRSWNLCSSNVRLNRVFELNGLRYGPYPEEGSIDVEDAEERKKKGGFKRCGVDERCSKGKDVVLLVWKTRKVETKMKALARAAGVAEASNKFAEELAETCTELREVMSSPVLREASAWMLEVTRGEWCRDDCIPMASGEDDSTSFLAWYFKVFPYKRNVGAVVTAVLDKDYQESPKK

SEQ ID NO: 68158 - protein, 140 aa, Zea mays
  Coding DNA Sequence Number=SeqID_26379
MAGAVRWLHWVYSSNLPVVCLSLQHGFISPEPPAWCAGVIWGWTYPSEDLSVPSGSWAIGFRDLIPDSSPEAPEGSVFPLSGSLFLWVRWCLTLLSLDYRTSGDMSKEVLEDLEDDFDDVVDTVVDFFPLEEIVFGPRMD

SEQ ID NO: 68159 - protein, 446 aa, Zea mays
  Coding DNA Sequence Number=SeqID_26380
  Gene Ontology: Mol. function=ATP-dependent DNA helicase activity; Cellular component=DNA-dependent protein kinase complex; Biological process=double-strand break repair via nonhomologous end joining
  Homolog annotation: Hit_ID=Q8S563; Match level="QueryCoverage=88%, HitCoverage=64%, E-value=1e-108, Identity=48%"; Hit description=KAP-2
  Pfam annotation: Domain name=Ku; Domain location=39-201; Score=27.6; E_value=6.9e-07; Accession=PF02735.6; Description=Ku70Ku80 beta -barrel domain
  Pfam annotation: Domain name=Ku_C; Domain location=210-303; Score =25.8; E_value=0.00016; Accession=PF03730.4; Description=Ku70Ku80 C -terminal arm
  Pfam annotation: Domain name=Ku_PK_bind; Domain location=321-442; Score=178.0; E_value=2.3e-50; Accession=PF08785.1; Description=Ku C terminal domain like
  Pfam module annotation: Pfam domain module=Ku::Ku_C::Ku_PK_bind; Domain location=39-201::210-303::321-442
MYSGTCNELAKDIGGYKHVTVIHDIKVVDEGTAQALQNLPLGSAPAEEKFPTLKKYSDKAPPNDKFASHEVKVDYEYKSVVEPDKVVPPDQRIKGYLYGPQVIPVSNAEWEAVKFKPEKGVKLLGFTDRSSVPRQGQGNVAIGVLTPNISSVNNIQDSFYFNVLPFAEDIREFQFRSFSSLPSSSQPTEEQQEAADNLVKMLDLAPPGIEVLKPEFTPNPILERFYSYLDLKSKQPDANVPPLERSLRRITEPDPDVVGQQTQLIQNLSKAFVLKDNPKKKKARTQDMLAYTGAGDQAKSVEDRVLENTHPSTENVVAIRDSNPVQDFEAMLAKRSSSTWTQKAIGDMQNYIAALLQNSSDGGNYQKALECFASLRKACIIEQEPQEFNQFLTKIYERLKEGDAAKFFQLLSSKNISLINKEEAPDSDVTEEMARSFYLKREKASQ

SEQ ID NO: 68160 - protein, 79 aa, Zea mays
  Coding DNA Sequence Number=SeqID_26381
  Subcellular localization annotation: CTP_CleavageSite=33; ConfidenceScore=5.46e-01
MQAACNRAKWVHLSDFQRAQHGSLGPRVMQPVRRMLRASNCTAARATVTPPRLRDRDRERGIPRKGSFSVKEPGSEPPY

SEQ ID NO: 68161 - protein, 232 aa, Zea mays
  Coding DNA Sequence Number=SeqID_26382
MGEEDGTDEWALAASERNLREREGCMHMRRGSKGRVKGKAKLLYELMRWTLLPRMGYREATTHIQLWLLGALVSHSEFDVVDFLICEIEDTILDGLRARRQLPYAHYLCHIFVQLIRPPQFHGTLEASRLQFGSYRPAREDPVPVPDPVLDVRAEDETFIQFDTQGAEDDTSLDVDEGLGISPPPPMPPRSHDHEAGSSSAAPAAPPAIDPTLAMILQSLTQQQARLATEQA

SEQ ID NO: 68162 - protein, 150 aa, Zea mays
  Coding DNA Sequence Number=SeqID_26383
  Subcellular localization annotation: CTP_CleavageSite=46; ConfidenceScore=5.16e-01
MAKVSKSQRQQDFDLRMESLKYQQRGAKTARRRGPTRQARLSDCVPAYLESSSPSRLSYRRMPSPSGVCNCIIQHIQASTTLSSDIGLHQLGSGSPELAISCWSILQGDSTDSPSVKGAFDRALTTSLTARITPAKPNDKNLNCFMVGVE

SEQ ID NO: 68163 - protein, 651 aa, Zea mays
  Coding DNA Sequence Number=SeqID_26384
  Gene Ontology: Mol. function=protein serine/threonine kinase activity; Cellular component=ubiquitin ligase complex; Biological process=protein amino acid phosphorylation
  Homolog annotation: Hit_ID=Q5Z7K5; Match level="QueryCoverage=96%, HitCoverage=79%, E-value=0.0, Identity=69%"; Hit description=S -receptor kinase-like
  Pfam annotation: Domain name=Pkinase; Domain location=301-560; Score =133.9; E_value=4.4e-37; Accession=PF00069.15; Description=Protein kinase domain
  Pfam annotation: Domain name=Pkinase_Tyr; Domain location=301-563; Score=59.5; E_value=4e-16; Accession=PF07714.7; Description=Protein tyrosine kinase
  Pfam annotation: Domain name=U-box; Domain location=581-651; Score =51.4; E_value=3e-12; Accession=PF04564.6; Description=U-box domain
  Pfam module annotation: Pfam domain module=Pkinase::Pkinase_Tyr::U -box; Domain location=301-560::301-563::581-651
MNRLETCTFCTYMPIEVSYRKLLTNRILRLQDVPFTILKTVPSSCNIFVVSRRRLTIKIANQARSSKPNASIRIQSISHKAFDQIQRDWLQDKQALNNLADDEIPKYSENSISGSFSQVCSSISTSSIAVKSSESHRRGFLGSLGRRTPGRERNKDFDAIGQLKEVHYVALSSVEEYQHIDEEEKLRKELKDTLMMYDRACGNLAHASKKIQLFSSDCCEDVNKVQDALQREEVLKQTVPDEKNKHLEAIGAVEMAKNAFTHETYSKHQAENAKAVDALLSTGKSCRRYSKHEIELATDYFSDAKKIGEGGYGNVYRCTLDHTEVAVKVVEQDSINKIDEFLREVEILGQLHHPNLVLLLGFCPEIGCLVYEYMENGSLEDLLINDKGQPLHWFLRFQIIFDVACGLAFLHGTKPEPIVHRDLKPGNILLDKNYVSKIGDVGFAKPISDLVPEGLTEYRDTVIAGTLYYMDPEYQLTGTVRPKSDLYALGIIILQLLTGKRPPGLVNSVEEGIKRGILSDILDKSQPDWPIAEAEMLAKLGLWCTALKCRDRPNLESVVLPELENILSRVTVSLKLENILAPSHFFCPILQEVMENPYVAADGHTYEHRAIKAWLEKHKISPMTNQRLPHLSIIPNHSLHAAIQQWKLRAS

SEQ ID NO: 68164 - protein, 143 aa, Zea mays
  Coding DNA Sequence Number=SeqID_26385
  Gene Ontology: Mol. function=protein serine/threonine kinase activity; Cellular component=ubiquitin ligase complex; Biological process=protein amino acid phosphorylation
  Homolog annotation: Hit_ID=Q5Z7K5; Match level="QueryCoverage=68%, HitCoverage=12%, E-value=1e-22, Identity=60%"; Hit description=S -receptor kinase-like
  Pfam annotation: Domain name=Usp; Domain location=14-142; Score=17.1; E_value=0.021; Accession=PF00582.16; Description=Universal stress protein family
  Subcellular localization annotation: CTP_CleavageSite=23; ConfidenceScore=5.10e-01
MEEGASSPGDGGGMQFQVAVAVRGDGRASRRAARWAAASLVPPGGRVALVHVIPPVSFVPSPSGERVPVDKMEPEVVEMYAQDNRALAQEIFLPFRRLVGRGKSVETVVLEGDSVAEALVRYAAESGVRSLVLGSASLSWFRR

SEQ ID NO: 68165 - protein, 511 aa, Zea mays
  Coding DNA Sequence Number=SeqID_26386
  Gene Ontology: Mol. function=DNA-directed DNA polymerase activity; Cellular component=intracellular; Biological process=DNA replication
  Homolog annotation: Hit_ID=Q6L9M0; Match level="QueryCoverage=99%, HitCoverage=92%, E-value=0.0, Identity=75%"; Hit description=DNA polymerase lambda
  Pfam annotation: Domain name=NTP_transf_2; Domain location=324-424; Score=15.5; E_value=0.0032; Accession=PF01909.13; Description =Nucleotidyltransferase domain
MQVWKQRLVQMGGRVVEKPTKGELAGVNHVLAMDAKALLRELDAAWLHRFRGSVVSFEWIEECLKSGERLPIHNFAINYEKEFKPKNAVCTGNLVASRPSKRTKMSSEYPGDHQIISGGDREKELAAGGPPGASAHVVEGSSAGKQPNQYASSQSSSADSKDTIGSHGTFGIEEASSGGPSIYAPADLNKNITKIFGRLIDIYRALGDDRRSFSYYKAIPVIEKLPFKIESADQVKGLPTIGKSLKDHINEIVTTGKLSKLEHFENDEKFGGVGPATALKLYEKGHRTLDDLQRDESLTNAQRIGLKFFDDIKQRIPRHDVSEMEKLLQDVGTDILPGVTIVCGGSYRRGKASCGDMDIIITHPDGESHVGFLSKFVQRLKEINFLREDLIFSIHSVDGTDSGVDTYFGLCTYPGRELRHRIDLKVYPRNRYACGLLAWTGNDVLNRRSCRFRLLAESKGYVLDDTGLYLATRGSGGKHAGRSDAIVNCHTEKDVFETLGFPWLEPHERNL

SEQ ID NO: 68166 - protein, 72 aa, Zea mays
  Coding DNA Sequence Number=SeqID_26387
MYFKQNLQGVKEGGAANDEIDEALSSNRDGKEKASKDRFKVMVIANKNTAKDGIKTKLVMRQGVKRNQGRVR

SEQ ID NO: 68167 - protein, 266 aa, Zea mays
  Coding DNA Sequence Number=SeqID_26388
  Gene Ontology: Mol. function=hydrolase activity, hydrolyzing O -glycosyl compounds; Cellular component=cell wall; Biological process= carbohydrate metabolic process
  Homolog annotation: Hit_ID=Q9SV60; Match level="QueryCoverage=95%, HitCoverage=86%, E-value=8e-69, Identity=50%"; Hit description =Xyloglucan endotransglucosylase/hydrolase protein 2 precursor
  Pfam annotation: Domain name=Glyco_hydro_16; Domain location=12-195; Score=251.2; E_value=2.1e-72; Accession=PF00722.11; Description =Glycosyl hydrolases family 16
  Pfam annotation: Domain name=XET_C; Domain location=219-263; Score =25.2; E_value=3.1e-05; Accession=PF06955.3; Description=Xyloglucan endo-transglycosylase (XET
  Pfam module annotation: Pfam domain module=Glyco_hydro_16::XET_C; Domain location=12-195::219-263
MASGAGAAPALFDVNYVKDWGRLVDHGTEVNLILDQSSAARGGGFKSKSTYGSGFFHLRMKLPSGYTAGVVTTFYLISQPEDGTRDEVDFEFLGDKDGVPVTLQTNFFVNGKGGREQRLHLWFDPAAGFHDYKILWNPYQLVMFVDETPIRVVRNLRGSVPGYEFPTKPMLIRGSIWDGSTWATDGGRTKVDWSRAPFTAGYQGFDVSGCATASATPRCGSPGLWWNGVGYRNITAAQRAAYEGVVKKYMTYDYCKSSRKIECAYI

SEQ ID NO: 68168 - protein, 335 aa, Zea mays
  Coding DNA Sequence Number=SeqID_26389
  Gene Ontology: Mol. function=transcription regulator activity; Cellular component=nucleus; Biological process=regulation of transcription
  Homolog annotation: Hit_ID=Q4SHG6; Match level="QueryCoverage=60%, HitCoverage=38%, E-value=3e-15, Identity=29%"; Hit description =Chromosome 5 SCAF14581, whole genome shotgun sequence
  Pfam annotation: Domain name=zf-C2HC5; Domain location=133-185; Score= 71.2; E_value=3.3e-18; Accession=PF06221.3; Description=Putative zinc finger motif, C2HC5-typ
MNSTKKVVQLWQGTGIAEEADEDTSTEDDFSGEPPGLDNIIIFGEAEFDSDSVPLVFKENQTVAAPATKKVKPLVDLAINAEHEEGPKELAATKKSVKEVDNSVQSLDEFIFKKGAPAIFLAEAAEGSIVFKQGKLCSCLAQRHNPVSNYLSCGTIVCEQEREGSYSFCGALVLKEGSSYAGLSVVGLPFSKVAAEAYAKRLVDYDRNAATRTEVCDGQSDYYKMEGNNCLSAKEGSVLKQQQEEADEAAISYQGKVIIIIDLGGCKRILHKDGATEMDELVGYEMFIHDFACSNKRGGTIDGEGMQEWIVLIGLRLQQPHLLLAVSVLSSLFSN

SEQ ID NO: 68169 - protein, 254 aa, Zea mays
  Coding DNA Sequence Number=SeqID_26390
  Subcellular localization annotation: CTP_CleavageSite=50; ConfidenceScore=5.20e-01
MSQPRGTSWPSTLPRLQYPRSVAWRSPDPVAARGSSTGGVVPSGILGVVKASHGERAYGSSFLHGGSGIKGAAASGAFGGCSKRGDHPKRSSRYAESFSLFLSLVFVLASNFSLISLVSVYVSSRAEALLATQREVEQVRTKAACFEAKERELAELHFEAERLQGEASCLCSECHNAHGNVDRLWEEGSRLQGNLRETSLRAEEVESSLKEPNCRLEKADLKLLKEHNTTRGQYFPRPYVLFIWLKHDLEDYWS

SEQ ID NO: 68170 - protein, 137 aa, Zea mays
  Coding DNA Sequence Number=SeqID_26391
MEDITNMLWRVNIRFRNPRSAATDKGESGGGETAHGLTRRRIRESWRDSKAAEDPGETDRREIAASVSVGKMLLTKGAHKQRNMSLRAWKGLSDERAHVAVTEGSASMRLGIGQWGLDGSGRGARVEREKLGSGSRP

SEQ ID NO: 68171 - protein, 99 aa, Zea mays
  Coding DNA Sequence Number=SeqID_26392
MDGNLNVWKLRHELPFAWEEKGLNELCGMLKIVDGDIKKCADNCGHVMAVQNKPNFKKDKSQKKNDKAKDTISKPNQKPKAGPVVDAECFYCKAVLGLY

SEQ ID NO: 68172 - protein, 127 aa, Zea mays
  Coding DNA Sequence Number=SeqID_26393
  Gene Ontology: Mol. function=protein phosphatase type 2C activity
  Homolog annotation: Hit_ID=Q2HW33; Match level="QueryCoverage=53%, HitCoverage=20%, E-value=5e-12, Identity=52%"; Hit description =Protein phosphatase 2C-like
  Subcellular localization annotation: CTP_CleavageSite=32; ConfidenceScore=5.68e-01
MPFASPMKRPRSSPVAPTGRSAPRWTAARSTSASATTTTAATRIQNQRLILIPRLAKGPGYYLADEPGVHFVWQPNQESSVLVMSRAFDDFYIEDCGVILAPEVTQRRIDNSDQFSNVGDLFSNAMN

SEQ ID NO: 68173 - protein, 79 aa, Zea mays
  Coding DNA Sequence Number=SeqID_26394
MTRSKRDCTRVGDFEKARREGRPLVGIIKAEAMLGRGGSLPEAVAEPALWLAAVQNTVEEVAFCGIRGGSWPRPSSGEA

SEQ ID NO: 68174 - protein, 369 aa, Zea mays
  Coding DNA Sequence Number=SeqID_26395
  Gene Ontology: Mol. function=oxidoreductase activity; Cellular component=chloroplast thylakoid membrane; Biological process=visual perception
  Homolog annotation: Hit_ID=Q56D13; Match level="QueryCoverage=96%, HitCoverage=97%, E-value=1e-128, Identity=67%"; Hit description =Quinone reductase
  Pfam annotation: Domain name=ADH_N; Domain location=72-158; Score =49.8; E_value=9.4e-12; Accession=PF08240.2; Description=Alcohol dehydrogenase GroES-like domain
  Pfam annotation: Domain name=ADH_zinc_N; Domain location=193-330; Score=37.8; E_value=3.7e-08; Accession=PF00107.16; Description=Zinc -binding dehydrogenase
  Pfam module annotation: Pfam domain module=ADH_N::ADH_zinc_N; Domain location=72-158::193-330
MAAASTKTANIPATMRAVQYDSCGGGAAGLKAEKYSLCFENRSFVFLQRNQSTEFQIPLMQHVEVPVPSAKKNELLLKLEAASINPVDWKVQKGMLRPFLPRKLPFIPVTDVAGVVADVGPGINGFQAGDQVVAMLNSFNGGGLAEYAVASENLTVKRPPEVSAAEGAGLPIAAGTALQALRTIGAKFDGTGKPMNVLVTAASGGVGLYAVQLAKRAGLHVTATCGARNVELVKSLGADEVLDYRTPEGATLQSPSGKKYDGVVHCTVGTSWSTFEPVLAATGKVIDITPNLTAILKSALHSVTFARKRLVPLLLSPNKADLEFLVGLLKDGKLETLIDSRFPLSEVSKAWEKSIEGHATGKIIVEMGD

SEQ ID NO: 68175 - protein, 120 aa, Zea mays
  Coding DNA Sequence Number=SeqID_26396
MWWSHPWTEYDEECVRSGMMKEEDGSSREEGDGSQTCAGSRMTTSRGEKDESHWGSRRTSGSDLSVGEGRVIVGDHWGSRRRLQYFSLHARGEHEASWVLGLAARGESGQSAAGSRLDRV

SEQ ID NO: 68176 - protein, 118 aa, Zea mays
  Coding DNA Sequence Number=SeqID_26397
  Subcellular localization annotation: CTP_CleavageSite=72; ConfidenceScore=5.05e-01
MLLSACLPVMEPSGFASRDLGWADVGNTVASSRLVLSSSRNKVKPWQGKIAVATPLAEVRCWRCTIKGAQLRCSSGQCRDHRLTKTRSLPRSGDPLAVNSKRTYLRHIVHILNHHHSF

SEQ ID NO: 68177 - protein, 127 aa, Zea mays
  Coding DNA Sequence Number=SeqID_26398
MAYTAEGVFLRSNPSCTYTIRRCITPSPCPTGTRCGAWGSTTDAIAGIPWALYGGIYRYPSVQRPKARTLMPSGTRTILRIFPQWEVTDRHYEKAITDETRNMLVRAGPVTVGRIPRGPPGEMRTRD

SEQ ID NO: 68178 - protein, 301 aa, Zea mays
  Coding DNA Sequence Number=SeqID_26399
  Gene Ontology: Cellular component=nucleus; Biological process =regulation of progression through cell cycle
  Homolog annotation: Hit_ID=Q75KP1; Match level="QueryCoverage=54%, HitCoverage=51%, E-value=4e-34, Identity=45%"; Hit description =Putative cyclin
  Pfam annotation: Domain name=Cyclin_N; Domain location=17-126; Score=- 27.0; E_value=0.034; Accession=PF00134.13; Description=Cyclin, N -terminal domain
  Subcellular localization annotation: CTP_CleavageSite=8; ConfidenceScore=5.08e-01
MRKPASTAAATLSSHPLALRRLARLLALLARPPQPCGYLLPILRRGLHISRSRSLLPAADADQQPWMPQLLSVACLTITAKMEETVVLRRLDIHQNQVPSEKYNFDLDAIQRMEIYVLDSLNWRMEVVTPFSYINYFVDKFTGGKPLSCGFISRCTGSLEATKLLQFRPFEMAAVVLSAAAESQENVRRCHEALQEVGLVKKKIDYTASPSRVLDASCFSFKTDDNQTTGSALTVLFASDIRTVFVMRLSFNRDAQFGLFDGDGKPAKALDARPLTNVVNDLEAKMKRWTVKLKGLGLSCR

SEQ ID NO: 68179 - protein, 786 aa, Zea mays
  Coding DNA Sequence Number=SeqID_26400
  Homolog annotation: Hit_ID=Q2QYN0; Match level="QueryCoverage=99%, HitCoverage=97%, E-value=0.0, Identity=56%"; Hit description =Expressed protein
  Pfam annotation: Domain name=TFIIB_Zn_Ribbon; Domain location=84-126; Score=13.2; E_value=0.011; Accession=PF08271.2; Description=TFIIB zinc-binding
  Pfam annotation: Domain name=TolA; Domain location=144-494; Score= -155.4; E_value=0.09; Accession=PF06519.2; Description=TolA protein
  Pfam module annotation: Pfam domain module=TFIIB_Zn_Ribbon::TolA; Domain location=84-126::144-494
MLPWLVVPLIAIWAATQLLLPAAYRLEVTSPRLACVSVLLLTLFWYEILLPRLSLWRARRSARLREERRAHALELHKLRKIATRRCRNCSNPYREQNPGGGKFMCSYCGHVSKRPVLDLNSTGKASSRWPCAQDCGDWLDLRCSASPSTSFWGFSWHLLLSFFTTTVRWLLRKTFRFTSSGDGEGLGPDGKRLAKAGDNGGKAEESRVEKARRKAEEKRLARLEREMLEEEERKQREEMTKLVEERRRLRDEKAAAEERSKSATPVGEKDARKEAERRRQERRKKEDKGPSKSNSDCEDIDRRLGREGDMKRAFDRKIESDRREGYKPHYFEANNRSNKTVESRAKYFGRMTGGFLSSSRGFGGGSFFGRSIQAPAPQVNKVSRPIVPATDQGNAAKRDVQHASTQAAAKSTSAGETRNSWTNFNRPVSPNVQPAPTSFKKSWHQLFSRSASVSPCPDATTSARDTNQKPEPNGAQLSNAYTFLFQYPPLDSKPSSSQSMQFPGFPPLNGAPPNKPLPHFPAGHMPFYDDAESVVFEDPEQFEDPCYDPDAIALLGPVSESLDNFPPDLDCGFISSDVVKESHGRPSPIESPLSRSRMVEENPIKPLHLLVAKRPGGPIQPEASSEQRTWQMWSTPLVHESLGLQGHQSQWLQQTNQLNYSANVFNGRTNAPLGTGLNDSDPWLQKAPFKQLPPDTPSLFLPHEIPGKLHNDLVFGSPNKSAREHPFGSPGPSWPKEELSLSGAQEGGGHFSLLSGAHVGGSGDLFCSTSPDVQSLVWSFNEKETA

SEQ ID NO: 68180 - protein, 245 aa, Zea mays
  Coding DNA Sequence Number=SeqID_26401
  Homolog annotation: Hit_ID=Q2QYN9; Match level="QueryCoverage=90%, HitCoverage=98%, E-value=4e-14, Identity=34%"; Hit description =Expressed protein
  Subcellular localization annotation: CTP_CleavageSite=12; ConfidenceScore=5.34e-01
MRRSTSDATPTVAAALTSPKPGATKRQREAAPLGDVTNILPETPAPSKPRRNARRRPFSAPSDASTASSTCSSSASFTPALKTSSSASATPAPKPPPSFTASVTPAPKPSFAAVTDEEGSAFKSPTICTVYARRRTTEAEAEGRSNPTITNRGKQPIGAAASCPPLGKSTRNIRKKDARPISSSATCGEAKKKLRPLARTPKLPEEFVKKQKAYFADVDAFELAEEERSTTRLQACGMDGGDIRI

SEQ ID NO: 68181 - protein, 189 aa, Zea mays
  Coding DNA Sequence Number=SeqID_26402
  Homolog annotation: Hit_ID=Q6QP54; Match level="QueryCoverage=32%, HitCoverage=21%, E-value=1e-08, Identity=63%"; Hit description =Putative kinase
MRSSSSSGAEPESEPWGRAKRSSSSSGAEPESEPWGRAKRSLSSSRVEPESEPWGRAMRSSSSSGAEPESKPWGRAMRSLSSSGAEPEYEPRGRAKRSSSSSGAEPESEPFGRCGVSYGARGRTWLLSASLCRVAQQSKWRRRRCPLVRPSVGVATWPRLLLGEDWASGEPKLAYTKEYIDGQFSGNLG

SEQ ID NO: 68182 - protein, 167 aa, Zea mays
  Coding DNA Sequence Number=SeqID_26403
MGSNARRVARACVQQGRRRGAADGVVHAAKLAAAAAAAEPHQGHTQTTRRSKVADSGAYAQAAAAARRSCFALAKPVDDDLYGVPPDMLYGKPPPPGARFLIRGIEKVIQFPHFFQRWLPLSYQVKIYFPTEDDIQHHMYHGIVIVLVYPLGHVAPTRHVHATVLGS

SEQ ID NO: 68183 - protein, 103 aa, Zea mays
  Coding DNA Sequence Number=SeqID_26404
MEIMEALHSQDIAPVFSLCAKYIVNLLPGSVAKVLALFLSNVVRSSFLAALGYVPLRLVEAKLQVVQLDANLLSIRRALLEQGIEAVLSRAVRFFGHCILCYL

SEQ ID NO: 68184 - protein, 95 aa, Zea mays
  Coding DNA Sequence Number=SeqID_26405
  Subcellular localization annotation: CTP_CleavageSite=22; ConfidenceScore=5.06e-01
MVAGFRRTILFPMPRSPLPPTRGAGPSGANKYGAYRARLASLPCRFHLLVLQLDDDVADLRELVGRLASKASAEAMAEGAAQLGRVVLSLSELLH

SEQ ID NO: 68185 - protein, 414 aa, Zea mays
  Coding DNA Sequence Number=SeqID_26406
  Gene Ontology: Mol. function=acyltransferase activity; Cellular component=chloroplast stroma; Biological process=metabolic process
  Homolog annotation: Hit_ID=Q9SQI8; Match level="QueryCoverage=87%, HitCoverage=77%, E-value=5e-59, Identity=60%"; Hit description =Dihydrolipoamide S-acetyltransferase
  Pfam annotation: Domain name=2-oxoacid_dh; Domain location=233-396; Score=66.0; E_value=2.7e-19; Accession=PF00198.13; Description=2 -oxoacid dehydrogenases acyltransferase (catalytic domain)
  Pfam annotation: Domain name=Biotin_lipoyl; Domain location=41-114; Score=65.3; E_value=2e-16; Accession=PF00364.12; Description=Biotin -requiring enzyme
  Pfam annotation: Domain name=E3_binding; Domain location=181-217; Score=69.1; E_value=1.4e-17; Accession=PF02817.7; Description=e3 binding domain
  Pfam module annotation: Pfam domain module=2-oxoacid_dh::Biotin _lipoyl::E3_binding; Domain location=233-396::41-114::181-217
  Subcellular localization annotation: CTP_CleavageSite=27; ConfidenceScore=5.45e-01
MAGLLHLQSTLLPSASALRRRAGAPVPCSSRRRCRVEAKIREIFMPALSSTMTEGKIVSWTAAEGDRLSKGDPVVVVESDKADMDVETFHDGFLAAVLVPAGESAPVGSAIALLAESEEEIPVAQSQAASFSSSSPSPPPPQETAQEASPSPPPPPPSAPVAVSAPALPSPATQGGGRVVASPYAKKLAKDLGVDLFSVTGSGPGGRIVAKDVEAALAAPKKAAPVTAARPDVPLGSTVPFTTMQGAVSKNMVESLAVPTFRVGYTITTDALDQLYKKIKSKGVTMTALLAKATAMALVQHPVVNCSCRDGKSFTYNKSINIAVAVAIDGGLITPVLQDADKLDIYSLSRKWKELVDKARAKQLQPHEYNSEQNMVIGIDVKDVAVYYNYNFPIILKSQHLAPEVHMKILVSLL

SEQ ID NO: 68186 - protein, 106 aa, Zea mays
  Coding DNA Sequence Number=SeqID_26407
  Homolog annotation: Hit_ID=Q337K5; Match level="QueryCoverage=35%, HitCoverage=3%, E-value=4e-09, Identity=73%"; Hit description =Expressed protein
  Subcellular localization annotation: CTP_CleavageSite=34; ConfidenceScore=5.06e-01
MAPRSGTGSLEDSMSYGFCPPLPPNLSLKWYEARAFTAARHLSTTSLSCTRQMRWGSLVSPKSGEWSYVLQTDSVTLHCILDYKNTCDEKNKQQAEMSGGISIALY

SEQ ID NO: 68187 - protein, 66 aa, Zea mays
  Coding DNA Sequence Number=SeqID_26408
MPWAIASLSPPASSTSTTARLHLAGELESSSAPDSDVVERLPVPDLGAMDLDPEGIFRDDSDEDED

SEQ ID NO: 68188 - protein, 205 aa, Zea mays
  Coding DNA Sequence Number=SeqID_26409
MNARHWGGVGRQATVGRRGTEPAAGASAMRRSEWEDRCKRHPEHRTSKGVCPYCLRDRLAHLSASSSATTTTRASSSSAPTSPCSSGGSSPPPQYRAALSADVSSVHVVVAGSSFADVAAFSQPLMPTSANKKPPPASQDEPARGKGEAKRRKSGKKKKIGRFLSRLVGAERRRHTGDGGGDGDGAELFHSRTMKEKTASKWVFF

SEQ ID NO: 68189 - protein, 57 aa, Zea mays
  Coding DNA Sequence Number=SeqID_26410
MDDKMSRPKYIQNTILRVATNFVTTSSELASRCWLLEPGLVPSMICGKKKAVPDRQR

SEQ ID NO: 68190 - protein, 88 aa, Zea mays
  Coding DNA Sequence Number=SeqID_26411
MDAYFTADSPARCRICGATVVGLGADTVCLGAAHYVLAGERVGLGGNDGHTFLQLGRGTEDAGLLPTSPIEVEEPHSRAEPEPIQVEE

SEQ ID NO: 68191 - protein, 49 aa, Zea mays
  Coding DNA Sequence Number=SeqID_26412
MWLPRLLLLKSSRLCNSCSLLISEGIKPDRPEIWLCARFNMLRTPSCRV

SEQ ID NO: 68192 - protein, 360 aa, Zea mays
  Coding DNA Sequence Number=SeqID_26413
  Gene Ontology: Mol. function=oxidoreductase activity; Cellular component=mitochondrion; Biological process=retinoid metabolic process
  Homolog annotation: Hit_ID=Q10QN9; Match level="QueryCoverage=98%, HitCoverage=99%, E-value=1e-141, Identity=65%"; Hit description =Oxidoreductase, zinc-binding dehydrogenase family protein, expressed
  Pfam annotation: Domain name=ADH_N; Domain location=36-164; Score =102.9; E_value=9.2e-28; Accession=PF08240.2; Description=Alcohol dehydrogenase GroES-like domain
  Pfam annotation: Domain name=ADH_zinc_N; Domain location=195-315; Score=80.8; E_value=4.3e-21; Accession=PF00107.16; Description=Zinc -binding dehydrogenase
  Pfam module annotation: Pfam domain module=ADH_N::ADH_zinc_N; Domain location=36-164::195-315
MAEDRSPKPIHCKAAVCRAAGEPLTIEEIVVDPPKAYEIRIRVICTSLCHTDITFWKAKVAPVFPRILGHEAYGVVESVGEHVEGFAAGDTVVPTFLGQCERCASCASEHSNVCDAVPFVIGPGMRRDGTTRFRDARGSPLHDLLAVSSFSEYTVVDVNQVVKVDPAVPPKLACLLSCGAGTGVGAAWRSAKVEPGSTVAIFGLGSVGLAVVQGAKMCGASKIIGVDLNPDKEEVIVEMTGGGVDYSFECIGVPSVMTDAFRCTKMGKGKTIVLGLGRDSDEVCLPSLELLFGRCVMGSLFGGLKPKTHIPVLAKKCMDKELQLDALVTHELGLQDINKAFDLLLQGKSLRCILWMDKDK

SEQ ID NO: 68193 - protein, 106 aa, Zea mays
  Coding DNA Sequence Number=SeqID_26414
MVYVDDFVIKMKKFDDFITDFITDLEETFANLQRFWIKLNLEKCVFRVPKLKWGSMTLGQGRFQVGRRPGHEGDGATQPIDKPVPDGIFASDLYEPSMKIKQTKEE

SEQ ID NO: 68194 - protein, 513 aa, Zea mays
  Coding DNA Sequence Number=SeqID_26415
  Gene Ontology: Mol. function=oxidoreductase activity; Cellular component=mitochondrion; Biological process=retinoid metabolic process
  Homolog annotation: Hit_ID=Q10QP0; Match level="QueryCoverage=99%, HitCoverage=100%, E-value=1e-114, Identity=68%"; Hit description =Oxidoreductase, zinc-binding dehydrogenase family protein, expressed
  Pfam annotation: Domain name=ADH_N; Domain location=35-348; Score =36.1; E_value=1.2e-07; Accession=PF08240.2; Description=Alcohol dehydrogenase GroES-like domain
  Pfam annotation: Domain name=ADH_zinc_N; Domain location=350-470; Score=19.0; E_value=0.00035; Accession=PF00107.16; Description=Zinc -binding dehydrogenase
  Pfam module annotation: Pfam domain module=ADH_N::ADH_zinc_N; Domain location=35-348::350-470
MENQGPKPIRCKAAVCRAAGEPLAIEEVVVDTPKAHEVRIRIICTSLCHSDVTFWRMKDLPDNIPRIFGPRSLRRHKLTTLSTAERMEFEDYMKKWDKEFKQQQAKEREKMESWYLSHFRIDHHQKVQEREVKLASLMALLQPAAALNHHLAPYAGQFGAAQSPPHGSQEKPSTTGQSSYSTEPFGIGPSWTVWSLRGPFGYPDVIVRLILGMAGQSEHDLKPYRHLVDHPTPFVGLSGEGRHEDNRSPKPYVPKTGGVVESVGEQVDEFAAGDAVVPTFLGQCSECVDCRSARSNMCSKYRFAVRPGMPRDGTTRFTDGQGRPLHHFFGVSSFAEYTVVDVNQVVKLNPAVPPALACLLSCGASTGKKFGVTHFINPKELGEEKPVHQAIAEMTDGGADYCFECIGLAALMNDAFRSSRDGWGKTIILGVEMHGAPLCISPHEILHGKSVIGSMFGGVKPKQDIPILADKYMNKELELDKFITHEVGLKDINQAFDLLLQGKSLRCTIWMDK

SEQ ID NO: 68195 - protein, 127 aa, Zea mays
  Coding DNA Sequence Number=SeqID_26416
MEESTTHGRDWNSTSPAIYVLRWRLLNLAAVPRPNETLAPYVHDPSSLDWMNEGREGLYPCGHAPPQEAAGRELAADFDVTVMGLGSGPVPIGSRPDSTRRLRRCLLRCKIGDEACQRGPTLQRHRK

SEQ ID NO: 68196 - protein, 90 aa, Zea mays
  Coding DNA Sequence Number=SeqID_26417
MRLRIVISSRLYSESINIETVPCIKPSFGKGGGPRFNPFFNIPLVITCEKLKVPDLDGPTLRDLDAYFLTYQFKSTQFPGVSNSPQTDDS

SEQ ID NO: 68197 - protein, 165 aa, Zea mays
  Coding DNA Sequence Number=SeqID_26418
MGRGRRGRGLPRHAGDKRKRAPSPPLEVFGNSEYSEEVSSGSERSSAPASPPRARLGGSDESGVSSDEADSSDSSKEWSGGDDDDKGDGSSGDDDGDDGSGDDDGDGGDGSSGDDDGGGDGGKGDDSKGGGGDNNNSGKGDSGDGGGKGSGSGSKTSGAMPLVKY

SEQ ID NO: 68198 - protein, 140 aa, Zea mays
  Coding DNA Sequence Number=SeqID_26419
MDPSEQLDVKWYKCEDSEQCIVRCTGHHLQRLSPWVGVFCQRLANVAAVQWRTRLSSAMTEKETSKSDHRAAIARRKSNGAPDYPVSPQTKKFSIFLVEKATTPMPLMLKKEPLDALSWYSSIISAHYNSDTPRPHCSVI

SEQ ID NO: 68199 - protein, 55 aa, Zea mays
  Coding DNA Sequence Number=SeqID_26420
MDAHGDAGHDFPSVGVATHSAKPGRHDGLRGCEIFGGGYGGQLMQGEGETTGLAD

SEQ ID NO: 68200 - protein, 95 aa, Zea mays
  Coding DNA Sequence Number=SeqID_26421
MESHDLRAERESRLVGGNEIDGCGYDSGTGKWYSFRLERVVSIATTAQEKMKPWKETSRSFKNTTSSRRGLAATPSRLPVKAAFIYVSFSHFDLL

SEQ ID NO: 68201 - protein, 124 aa, Zea mays
  Coding DNA Sequence Number=SeqID_26422
MCSSWRRHPGPTGRSPFGRDAGAALVDLVAIWQLGPHVGHSCARSESTTATWDQSVGQVLSSAEPVSTERDIGGSSAGIRLGVLGEIKFDPVATLNRAPSLHLLSSLAQVEIAEQEIIEGKLCP

SEQ ID NO: 68202 - protein, 342 aa, Zea mays
  Coding DNA Sequence Number=SeqID_26423
  Homolog annotation: Hit_ID=Q6QP51; Match level="QueryCoverage=43%, HitCoverage=52%, E-value=1e-14, Identity=44%"; Hit description =Putative growth-regulating factor 1
MAPCDVVGPSPGSGEAEAPPRSRSSLSSEVEVESEPRVGRGGDGRLRPGLSPSPRVGRGGVRRLPESRPSPSPGVGRGGVHHLPESRPSPSPRVGRGGVRRLPESRPSPSPRVRRGGVRRLPESRPSLSPRSGEAEFVVRGRDEGRALGSGEAELPMAPEAGLGCCQPHSVEWHSSRSGAGGAVLSSGRSVERRSDCGHFGSVDWRARIRIRCQAILALNASTVRSVGVAIWPRLLLGEDWASGEPKGEILQTQLEEERRQREEFEVRMMAEQTTHLADQQRMVEIFEYMQSLGTTSCFAPPPSLFPPADPAQFSTPGQSAASNNPDGSPSPSLNQSNHPPH

SEQ ID NO: 68203 - protein, 135 aa, Zea mays
  Coding DNA Sequence Number=SeqID_26424
  Gene Ontology: Mol. function=kinase activity; Cellular component =ornithine carbamoyltransferase complex; Biological process=amino acid metabolic process
  Homolog annotation: Hit_ID=Q6QP54; Match level="QueryCoverage=70%, HitCoverage=34%, E-value=2e-22, Identity=70%"; Hit description =Putative kinase
  Subcellular localization annotation: CTP_CleavageSite=38; ConfidenceScore=5.13e-01
MAPRILCDDGGSQPPYRSKRTDPPVLKRQQNPSSLFVVLMKGSDSGSAPKDDELRFARPQGSDSALASADGLRLARPRGSDSTSALEDRLDLGGASTSPNPGLGPTTSQEAPSLPYPKLTQATGNKTGVPSGSLR

SEQ ID NO: 68204 - protein, 387 aa, Zea mays
  Coding DNA Sequence Number=SeqID_26425
  Homolog annotation: Hit_ID=Q6QP54; Match level="QueryCoverage=36%, HitCoverage=49%, E-value=5e-18, Identity=49%"; Hit description =Putative kinase
MAVAGERKQRSRRQPSSRPLMGQRENPLPRREDGAPVFHSSNGSRTRNGCPGPGKGDTPKGILLREGNGPRAPLLIRGSKAGPSEGFNSRLRTLGLRAHYWSEVRGPAPRKGSTVASGHSGSAPTTDQGFIGWPSKAKSGLERHRKLRLARPRARTRAQPRKTTNSASLDPGLGLGLSPGRRRTPPRPTQGSDSGSAPEDDELRLARPRARTRAQPLKTTNSASPDPGLRLGLSPGRRRTPLRPTPGLGLSPGLSRRSPPRPTQGLGLDLGLGRQTRPRPRRSLHLAQPRARTDHVTGGTIITLPQADSGYGEQDRRPIWLAPGPLTEVGRAGKDGTALAQGCSLPPAWTLVTPYCKRTRPGRGTNTKAAGTPRVPNTDNFNFTSLN

SEQ ID NO: 68205 - protein, 71 aa, Zea mays
  Coding DNA Sequence Number=SeqID_26426
  Subcellular localization annotation: CTP_CleavageSite=46; ConfidenceScore=5.05e-01
MWSFGASLEISRARESARRKEDQRPRPPRTSSRCGVQWNRSLRVVSLGAKSGFTGVGAVCGQRGHRRSVSG

SEQ ID NO: 68206 - protein, 106 aa, Zea mays
  Coding DNA Sequence Number=SeqID_26427
  Homolog annotation: Hit_ID=Q2R1U4; Match level="QueryCoverage=29%, HitCoverage=5%, E-value=2e-08, Identity=81%"; Hit description =CDK5RAP1-like protein
  Pfam annotation: Domain name=UPF0004; Domain location=17-82; Score= -17.0; E_value=0.0013; Accession=PF00919.10; Description =Uncharacterized protein family UPF0004
MVFLVSGSTTSTSTKGRIYHKMYGCQMNISDMEIVLSIMKNEGMQETCHCSPIREYFVVLRNLKLYGVPLFELCNNVQVTASILQGIASMMIEIHNLLIFRLNIFL

SEQ ID NO: 68207 - protein, 259 aa, Zea mays
  Coding DNA Sequence Number=SeqID_26428
  Gene Ontology: Mol. function=DNA binding; Biological process=DNA integration
  Homolog annotation: Hit_ID=O24587; Match level="QueryCoverage=53%, HitCoverage=13%, E-value=5e-75, Identity=94%"; Hit description=Pol
MKDAKPAKTPMGTDGHTDLNKGVATPCFGIWYPKGSNFDLIGYSDSDYAGCKVDRKSTSRTCQFLGRSLVSWNSKKQTSVALSIAEAEYVAAGQCCAQLLWMRQTLRDFGYNLSKVPLLCDNESAIRIAKNPVEHSRTKHIDIRHHFLRDHQQKGDIEVFHSQRRFERETVDLDHERLPLHSDERVLSKTMTEEKMTEEKKLYEVKKALDPFIAGFYESMANMNTEKITKEIMEGLSEDSDDSDSYDVESGDEDSEDRH

SEQ ID NO: 68208 - protein, 110 aa, Zea mays
  Coding DNA Sequence Number=SeqID_26429
MVVAVEAEARKLVNGLPKQQKLQVDCTHILPQHPKWPLGMAAVVWRTRQSGAPLDTVRCASHVTQSLGFDRWSSDKWGHRTVRWCTRQSLFTVRCASAPALTSARAVRAL

SEQ ID NO: 68209 - protein, 157 aa, Zea mays
  Coding DNA Sequence Number=SeqID_26430
MVGGKSIKGKHGKSNKASKRKHPSTPPLEDIKDYEFPEEQLSSKGEESPPLTPRSPSFEDLEDSMGISFAKRSYIRSIEWAKLEGSDDLEDDFKESSEEQEDDNDEDDSSKGEGGGDSGARGDGGEGSGSKGGGGGGGDDDDDGGNGGNGGGKAPPT

SEQ ID NO: 68210 - protein, 142 aa, Zea mays
  Coding DNA Sequence Number=SeqID_26431
MSCTFDDYYIKDYGIILAPEVTQRRTDNNDHSPSLGLPQQSLFDTTPIRGAPGGLLTGSHALELSPSTGSLPGRVLGFFAKKKTLGAITDHSALGMDRSEACRGGSAPASRSRTVRPCAADHLRPVVDPEIGQDPGRSDYKL

SEQ ID NO: 68211 - protein, 188 aa, Zea mays
  Coding DNA Sequence Number=SeqID_26432
  Gene Ontology: Mol. function=carboxyl- and carbamoyltransferase activity; Cellular component=ornithine carbamoyltransferase complex; Biological process=amino acid metabolic process
  Homolog annotation: Hit_ID=Q8SA97; Match level="QueryCoverage=99%, HitCoverage=24%, E-value=4e-21, Identity=40%"; Hit description =Ornithine carbamoyltransferase
MALPVDVVGPCPRLGEVEAPPRSRSSLSSEVEVESEPPGRMRRRPSAKARAESEPWGRAKRSSSSFGAEPESKTWGWAKRSSSSSGAEPKSEPWVGRSGRSSPSSGAEPESEPWVRRSEPHSVEWLSSRSGAGGTVLLSDQSVERRSDCGHFGSVEWRACVRIKLCADGGYQLRFRSLEGTPNYGPRQ

SEQ ID NO: 68212 - protein, 167 aa, Zea mays
  Coding DNA Sequence Number=SeqID_26433
MVPEKDTIDAEAKTVDAEANSDDEDDSILSPSKPSHIEFGKSTVKPEDPVLMKKLGYFGKNDDGFDKGPRTARPTPSLIFSLPVRTVRWVANNFTVGRADLTIAVRNLAAHLGSLNRMHSNRWGKVGTDPGYKIGPAAPPGTQSAHRGLLASCREKTGVDPPPLPNR

SEQ ID NO: 68213 - protein, 80 aa, Zea mays
  Coding DNA Sequence Number=SeqID_26434
  Homolog annotation: Hit_ID=Q7XDA5; Match level="QueryCoverage=41%, HitCoverage=10%, E-value=5e-09, Identity=85%"; Hit description=Zinc finger, C3HC4 type family protein, expressed
MISILAQERLLGFALGSVSIGGFVLHQRRAIYRSIAEADGSPYFYQLDNRQTIISAGFISWGQLQIVSLKNYLGLFMTVQ

SEQ ID NO: 68214 - protein, 57 aa, Zea mays
  Coding DNA Sequence Number=SeqID_26435
  Pfam annotation: Domain name=E3_binding; Domain location=7-40; Score =0.6; E_value=0.081; Accession=PF02817.7; Description=e3 binding domain
MGRKDIANPHAKKLAKQHRVDLAKVTGTRTYDQITLAERISIVFRKMGATKHLFGFV

SEQ ID NO: 68215 - protein, 135 aa, Zea mays
  Coding DNA Sequence Number=SeqID_26436
MSSGADGSDPITGLGPSTIPEPPDREPPHLQSPSPAAQQEVAASQAETPVPAVTIVISRPGEEVQTPDAMGGSPACSTQAGDGKATATSVSLTASAAAKEAELARSDSFDDYEQCRLTGSYELQVKNNTRKNAGN

SEQ ID NO: 68216 - protein, 150 aa, Zea mays
  Coding DNA Sequence Number=SeqID_26437
MESRKVEYKECREQRGDCWVCPLQPVNRDWIGLNPTIVPLIGPLIGRAHANLGWSPQTHDAIYRTKGSQERLTLVPRPKTLVLRGPHRLGVGVFGNATTYSGSDPNACCFSAGRRYEDSNSNKDLERVMDDKGVHPPEIFWKYVGLAETQ

SEQ ID NO: 68217 - protein, 739 aa, Zea mays
  Coding DNA Sequence Number=SeqID_26438
  Gene Ontology: Mol. function=protein disulfide oxidoreductase activity; Biological process=intracellular signaling cascade
  Homolog annotation: Hit_ID=Q67UI1; Match level="QueryCoverage=63%, HitCoverage=66%, E-value=1e-103, Identity=40%"; Hit description =Glutaredoxin-related-like protein
  Pfam annotation: Domain name=DEP; Domain location=391-463; Score =81.6; E_value=2.4e-21; Accession=PF00610.11; Description=Domain found in Dishevelled, Egl-10, and Pleckstrin
  Pfam annotation: Domain name=DUF547; Domain location=529-667; Score =167.4; E_value=3.6e-47; Accession=PF04784.5; Description=Protein of unknown function, DUF547
  Pfam annotation: Domain name=Glutaredoxin; Domain location=270-330; Score=54.2; E_value=4.3e-13; Accession=PF00462.14; Description =Glutaredoxin
  Pfam module annotation: Pfam domain module=DEP::DUF547::Glutaredoxin; Domain location=391-463::529-667::270-330
MAWPRKISQHLGGPDLSLAPLAGILRPTLLLRAGRFKGVVELTRGRQPWLQSPARTSEYPVDVNEWHGAARQQRRKKPPSPSAMTDLQEGVAGPPQVQPRSVTPHGLGGEEGDVYYARKMLQGAVLRPPPHLPQPEAPPGLARARSTPAAPHEYAAQGDGEDEERESKRPVERSASANSASTAVVDVESIGRFFRDRRDVLSSAITRRISSLKESTSAAKAGAYGVQEIHLPNVKVTVRLKDAIAAADDTDTDTYDVGYTFSGGRIKGRVSFFSRSGCRDCAAVRAFFRQSGLPYVEVNLDVFPEREAELGSRAGAAARVPQIFLNEKLLGGLVVLNSLRNGGEFERRVRDLAGRRCPDSAPRVPVYGFDDDAGKADEEAEDAMVGIVRVLRHRLPIQDRFVRVKLVKNCFSGTDMVDGIVNHLDCSRKKAVEIGKELARKHFIHHVFRENDFEDGNQNLYRFLEHDPAVPKYYNFRGSTNDGEPRPAAAIGQRMTRIMLAILEAYASDDRRHLDYGRIAASEEFRRYANLVQELQRADMTQLPAEERLPFFLNLHNAMAIHAVVRVGQPGAVDRRPFFSDFQYVVGGHPYSLAAIRNGILRGNRRQPYTLAKPFGSSDRRLELAQRRANPLVHFALCDATRSSPTVRFYTAQGVEPELRHAAREFFLHGGVEIDLESRTVHLTRIIKWYSADFGQDRDILRWLLNYLDPTKAGLLSHLLNEGGPISISYMNYDWSLNV

SEQ ID NO: 68218 - protein, 110 aa, Zea mays
  Coding DNA Sequence Number=SeqID_26439
  Gene Ontology: Mol. function=threonine-tRNA ligase activity; Cellular component=mitochondrion; Biological process=tRNA aminoacylation for protein translation
  Homolog annotation: Hit_ID=Q8LPC9; Match level="QueryCoverage=88%, HitCoverage=18%, E-value=7e-28, Identity=66%"; Hit description =Threonyl-tRNA synthetase
  Pfam annotation: Domain name=HGTP_anticodon; Domain location=13-105; Score=70.2; E_value=6.8e-18; Accession=PF03129.10; Description =Anticodon binding domain
MAQMALIGKALPKTIVCPVSSGSREKGKQENVLAMLHEADFHVDIDVSDRTIQKKVREAQVAQFNYILVVGAQEAETGNVCVRVRDNADLATMSVDGLITRLREEIVAFK

SEQ ID NO: 68219 - protein, 190 aa, Zea mays
  Coding DNA Sequence Number=SeqID_26440
  Gene Ontology: Mol. function=threonine-tRNA ligase activity; Cellular component=mitochondrion; Biological process=tRNA aminoacylation for protein translation
  Homolog annotation: Hit_ID=Q8LPC9; Match level="QueryCoverage=86%, HitCoverage=30%, E-value=4e-81, Identity=88%"; Hit description =Threonyl-tRNA synthetase
  Pfam annotation: Domain name=tRNA-synt_2b; Domain location=3-104; Score=-21.7; E_value=0.00051; Accession=PF00587.15; Description=tRNA synthetase class II core domain (G, H, P, S and T)
MGWEIHWAMPRATCIGPQIFNVELPLRMADFGVLHRNELSGALTGLTRDDAHIFCREDQIKDEVKAVLEFINYVYEIFGFKYELELSTRPEKYLGEIETWNKAEQQLTEALNEFGKPWKKTYIDAFMQINEGDGAFYGPKIDIGVFDALKRKFQCATLQLDFQLPIRFKLTYSAEDEAKIERPVMIHRQS

SEQ ID NO: 68220 - protein, 194 aa, Zea mays
  Coding DNA Sequence Number=SeqID_26441
MEARCLLPLQPRVADFTRWAETFGTEKADAAKAAPNLPPTHLGHLICLRGGFCFLQGRVLRICGRLRPHPRRQGDGRPNSPRVGRSRHHFLKAKTSLSYSQEELEWFKTEYSAHEQIVFGKIKGPRSYLIQRVRHMFVSKETLLSGVQAEVNHMRQTVNLVSNERQKLLVIFYLKIIEPFVTFLSILTLDAIHD

SEQ ID NO: 68221 - protein, 312 aa, Zea mays
  Coding DNA Sequence Number=SeqID_26442
  Gene Ontology: Mol. function=carboxypeptidase activity; Cellular component=membrane; Biological process=auxin mediated signaling pathway
  Homolog annotation: Hit_ID=Q9LX06; Match level="QueryCoverage=92%, HitCoverage=96%, E-value=4e-57, Identity=38%"; Hit description =Putative MtN21
  Pfam annotation: Domain name=DUF6; Domain location=149-262; Score =6.8; E_value=0.027; Accession=PF00892.11; Description=Integral membrane protein DUF6
  Subcellular localization annotation: CTP_CleavageSite=17; ConfidenceScore=5.22e-01
MGWGDCKPTATMVSVVVVFAVLNTLTKMAFNQGMHTTVLITLRQLTAFLFLAPIAYYRERKTRPKMTLEIFVYLFFSAVLGMEKLDLKTGAGIAKVIGTAVGFTGAIVLALYQGPSLTKPSPAQAAAAHHVLAHHQWAIGSVALLAGAACWSFWFILQSRLGKKYPALYSGNALMFLLSFLQMAAVGLATERKDLSVWILRTKLQIITVLFVQRGPVFTTAFTPLIQLIAGAINVVALHEQLHVGSALGSALVIAGLYFVLWAKTKEAASDAPPTTNIVKSKQATTEQGEMIDEVTRIYKEISLDVCFSLTM

SEQ ID NO: 68222 - protein, 36 aa, Zea mays
  Coding DNA Sequence Number=SeqID_26443
MGVDLAFHRRGCLPWKVALCRAVASEFGSFWPPEAA

SEQ ID NO: 68223 - protein, 125 aa, Zea mays
  Coding DNA Sequence Number=SeqID_26444
  Subcellular localization annotation: CTP_CleavageSite=26; ConfidenceScore=5.35e-01
MAAAPTSSGDSPPPAQPEYGSISSMVASSASSAAAAVADFTRWAETFGTEKADAAKAALTSATTLATSSASEAASASSKAASSAYAAASDLTSSPREAPQSSFGVSHFSSQNVLSIQIRETSSCD

SEQ ID NO: 68224 - protein, 521 aa, Zea mays
  Coding DNA Sequence Number=SeqID_26445
  Gene Ontology: Mol. function=DNA binding; Cellular component=nucleus
  Homolog annotation: Hit_ID=Q6YPG7; Match level="QueryCoverage=59%, HitCoverage=87%, E-value=7e-82, Identity=55%"; Hit description =Putative GT-2 factor
MNFKLAVDAGGGSGATGGTDDALNDGGGGVGSGMMLHVGGGGGNDDDEAATESRLRRWTGDEETSIKEPTWRPLDIDYLHSSSSSKRTGKEKVATPESPAPPAAAANYFKKGDDNAAAAVAAGGGNYKLFSELEAIYKPGSGGAGGAQTGSGSGLTGDDNAILEPAMPDLPGITAEDAGPQLITSETSAGEEAAAVVQPQPSADAARRKRKRRRQQEQLSASASFFERLVQRLMEHQESLHRQFLEAMERRERDRAARDEAWRRQEADKFAREAAARAQDRASAAAREAAIIAYLEKISGESITLPPPASGDEDAAAAGKELVPYEGGDAAAAPEGGGSLHLSSSRWPKHEVEALIRVRTGLEGRFQEPGLKGPLWEEVSARMAAAGYGRSAKRCKEKWENINKYFRKAKESGKKRPAHAKTCPYFDELDRLYSRLGQAKQASSELLDAVVKYPDVRYGPPGFGMDREQASGGGGNNNNTNNEGGQDGGAEDFDGEEDGIGKGRAGDGQDDEVESHGHEDE

SEQ ID NO: 68225 - protein, 54 aa, Zea mays
  Coding DNA Sequence Number=SeqID_26446
MTKVDALPKVVEVSTSELGGAAGGGGGVPAFGWQPLDQFQPVEDLEDSFLFAVA

SEQ ID NO: 68226 - protein, 158 aa, Zea mays
  Coding DNA Sequence Number=SeqID_26447
MVHVLLSPTVPPIRLPLPLITCPLPRHCIDRSKPQRIHPLKASVLASPISNVQTPKNHPQITQQPYKSPLAMDVVASSRNTVALAAPAAVPLEAHAQNPSIAVANPPSPEMEATAEALTQEEVLCRCRRRAVWLAGVYRRLYWAMVEEVHARHWQVRL

SEQ ID NO: 68227 - protein, 287 aa, Zea mays
  Coding DNA Sequence Number=SeqID_26448
  Homolog annotation: Hit_ID=Q6Z856; Match level="QueryCoverage=93%, HitCoverage=62%, E-value=1e-84, Identity=65%"; Hit description=Kelch repeat containing F-box protein family-like
MQAEVKSGRSLHYASRSKKWKIKLQWDQDASSPLPPTCLPITLHLPLHSPNATASRQYTSFGTTPSQRGVSIIAAHHPELILTTIPCSACQEPNTPSPITRHRGTKVPRVRGGIIPLGAAGAAAVGGEHGVSGPATGDEEPASTGRVGTREASPRELHVGKAFPAMSRVGKVKPVDRRRGGGLPQRVAAGVEARPAEDVEVAANGEGGKVGEAVKLRRTGERREGPPGGRCGGVEQDRGGEGWVGGEEAEKVAARETEATAEREERSRREEQAPSARGGAEAGLVGE

SEQ ID NO: 68228 - protein, 57 aa, Zea mays
  Coding DNA Sequence Number=SeqID_26449
MVHPCTTRGLAHGVTVSETGCLVVDVKRSGAPPVSVDNYTGASKTIPTIDLAAGDPD

SEQ ID NO: 68229 - protein, 127 aa, Zea mays
  Coding DNA Sequence Number=SeqID_26450
MVDVRMRGDDSGRMAERVRRRLGLATQVWQGGEGAGGQQACKQPNLQVASSKASSNTANANATTQATKPTCQASRQAAEALSRLTSRKLSKASNLQPSSGGAVEHGQRATGQAARQEATGQTVTPGF

SEQ ID NO: 68230 - protein, 95 aa, Zea mays
  Coding DNA Sequence Number=SeqID_26451
METLHRDSLLVQVNRPVLALLFSTQSLVPGRVRMIGWINMFRTIDDMDDQIEAWRSFTGSPEVVHMLEFGVGKSRKVGRQRGCRSGVLRSRWVFR

SEQ ID NO: 68231 - protein, 510 aa, Zea mays
  Coding DNA Sequence Number=SeqID_26452
  Gene Ontology: Mol. function=monooxygenase activity; Cellular component=integral to membrane; Biological process=electron transport
  Homolog annotation: Hit_ID=Q5VRI5; Match level="QueryCoverage=86%, HitCoverage=89%, E-value=1e-122, Identity=49%"; Hit description =Putative cytochrome P450
  Pfam annotation: Domain name=p450; Domain location=53-498; Score =216.3; E_value=6.7e-62; Accession=PF00067.12; Description=Cytochrome P450
MEEQQPRPRPSIMFVLSSLAKNNPESVLALIAVLTVVALRHLISSWRQQARLPPSPTSLPVIGHLHLLRPPVHRTFQELASRIGPLMHIRLGSTHCVVASTPEVASELIRGHEGSISERPLTAVARQFACAPSAAPAPCPCSPTCWRRPARGETVDLTRHLIRLSNTSIIRMVASTVPGSVTDEAQEVVKDVAELVGAFNVDDYISLVRGWDLQGLRRRAAGVHRRFDALLEDILRHKEEARAARRLDQDDDGRGSSKQDKKQATHSKDLLDILMDKADDPAAEIKLTRENIKAFIIDVVTAGSDTSAAMVEWMLAELMNHPETLRKVAEEIDAVVGGDRIASEADLPQLPYLMAAYKETLRLHPAAPIAHRQSSEEMVVRGFTVPPQTAVFINVWAIGRDPAYWEEPLAFRPERFMPGGAAESLEPRGQHFQYMPFGSGRRGCPGMGLALQSVPAVLAALVQCFHWATVDGDGGVNKIDMSESDGLVCARKKPLLLRPTPRLTPFPAVV

SEQ ID NO: 68232 - protein, 259 aa, Zea mays
  Coding DNA Sequence Number=SeqID_26453
  Gene Ontology: Mol. function=RNA-directed DNA polymerase activity; Cellular component=nucleus; Biological process=RNA-dependent DNA replication
  Homolog annotation: Hit_ID=Q8S461; Match level="QueryCoverage=99%, HitCoverage=14%, E-value=1e-116, Identity=77%"; Hit description =Putative prpol
AIFRKDKQPQGRQPEDVPEASTQRGTKKKGKKKSQAKRDAADADLVAAAEYKNPRKPPGGANLFDKMLNESCPYHQGPVKHTLEECVMLRRHFHKTGPPAEGGRAHNNDKKEDHEAEEFPEVRDCFMIYGGQVANALARHRKQERREVCSVKVAAPVYLDWSNKPITFDQGDHPDRVPNPGKYPLVVDPIIGNVRLTKVLMDGGSSLNIIYAETLRLLRIDLSSVRAGATPFHGIIPGKRVQPLGQLDLPVCFGTPSNF

SEQ ID NO: 68233 - protein, 73 aa, Zea mays
  Coding DNA Sequence Number=SeqID_26454
MWQEKMIHPRMYQLDRTPMREHRTPVRITRTPRLRPGTPKAGALRHPAREFPLQQLLRGIFGNTLRNHELLVV

SEQ ID NO: 68234 - protein, 93 aa, Zea mays
  Coding DNA Sequence Number=SeqID_26455
MQAACKRAKWAHLSDFQRAQHGSPGPRVMQPGPGKGDTPKRILLCEGTRLRASLLIRGSKVGPSKDSTAASERVGSTPTTGQRFEGRPLGRVQ

SEQ ID NO: 68235 - protein, 136 aa, Zea mays
  Coding DNA Sequence Number=SeqID_26456
MAMRDGEAHARGFAGRRGTVRQGQRRLLAEEEDRRPAMVGSRKGTGGRAVGEGSQGRAWARGFHRGMGVSRGKRKKGRKVVNERVTPEFGEYEKRKIIPPNSGCYRSNPLNRNLAPEIQEEASQNDEMLETDRCNS

SEQ ID NO: 68236 - protein, 108 aa, Zea mays
  Coding DNA Sequence Number=SeqID_26457
MAARMAGKHGLDGRKGRGPGSYGGGGAMMAARMAEGSRFTGESQTRGGRGHGTRARTGTYPRASGRAERGMQIGRHRRAGWTGWGHAAGREHERRRWKEVPRLEGVTT

SEQ ID NO: 68237 - protein, 160 aa, Zea mays
  Coding DNA Sequence Number=SeqID_26458
  Homolog annotation: Hit_ID=Q6QP51; Match level="QueryCoverage=27%, HitCoverage=20%, E-value=2e-14, Identity=81%"; Hit description =Putative growth-regulating factor 1
MTVVYAMLVKVSVHYFHGNFKEEEDRQLLLLLTFVTPTSRTERFVCSVLFHSLFDAVDDDWLVKFGRWEIEVVATPSVEYMKENNAAHPTPTAVSTTGVRLTTAEFSLERNRELRLARPPASGGVTSLPDPGLGLRKNLCLARPWARTNRAAGDTSLPYS

SEQ ID NO: 68238 - protein, 155 aa, Zea mays
  Coding DNA Sequence Number=SeqID_26459
MWAGHLPTMDTTTRLILANGGFLPVVGWRHAARWYDVATHSVKPSNPFLRYLVTPLDTTPKLRRLRMRGQRRRLSTTLCSCDHGGPRRSGHQRSASIYGWGKANRSKRSSSQFIWPEGWQQPSRDQWIPLGVLVMEKQTRRAGAPGVWPRGPTLH

SEQ ID NO: 68239 - protein, 45 aa, Zea mays
  Coding DNA Sequence Number=SeqID_26460
MASTSVGEHYYTLADFPRPHSAPPPGLGQSPHNPKLWITNSQPRQ

SEQ ID NO: 68240 - protein, 78 aa, Zea mays
  Coding DNA Sequence Number=SeqID_26461
MAGRETLHFMIVLCSNGVANKRWLLRTFEIPVLICLPPVESLIGLSATASQLTTASSWWKWWLGRLQRHGGARDSRSR

SEQ ID NO: 68241 - protein, 219 aa, Zea mays
  Coding DNA Sequence Number=SeqID_26462
  Gene Ontology: Mol. function=heat shock protein binding; Cellular component=membrane; Biological process=protein folding
  Homolog annotation: Hit_ID=Q67VC3; Match level="QueryCoverage=90%, HitCoverage=45%, E-value=1e-83, Identity=82%"; Hit description=ARG1 -like protein
  Pfam annotation: Domain name=DnaJ; Domain location=31-93; Score =128.9; E_value=1.4e-35; Accession=PF00226.21; Description=DnaJ domain
MAGSRFGSFKSEKGDSASAAAAAGGAAQRRDPYEVLGVGRTATDQEIKSAFRRMALKYHPDKNGDDPVASDRFQEVTFSYNILSDPDKRRQYDTSGFDAIESDSQELELDLSSLNTVNTVFAALFSKLGVPIKTTVSATVLEEALNGSVMVSQLQLGNSVQRKVEKQSAHFYSVDITEKQAKMGLVCRVHSNDKSKFKVSRRVLGPPGILVDAFEIEGF

SEQ ID NO: 68242 - protein, 270 aa, Zea mays
  Coding DNA Sequence Number=SeqID_26463
  Subcellular localization annotation: CTP_CleavageSite=61; ConfidenceScore=5.54e-01
MACLGLGGPDAAHPPRSAMARSSAPHPVSARLPLPRPPVPARRACLVWPRRSRPWRGYGTRAHLGGTLPRGALARPDARGPTSPRSGLTSAWPNFASPAADKFPRLGGAVPGPPPCAGPGQTRRWNAWPLAPRAPGRARPPPRGCPPLPGATTACPPRRGLELGQRAAQGEAPEDAPLRSVCATRPRRVRGSSATRQCGLARACSRGARSALVRLAVPLTRRIAPYRGRRVCLPLDVPVYPLATRLPLPVYSMRIGHVVYINEMETQLRN

SEQ ID NO: 68243 - protein, 85 aa, Zea mays
  Coding DNA Sequence Number=SeqID_26464
MTVEQMFFMQTQVVQAIMQTLATMQQAQEQPHPQPQMQIPQIEREMCPWAIYIFGTNHVCPSAMYHMKTNQKGAHKFGYVWPSLC

SEQ ID NO: 68244 - protein, 64 aa, Zea mays
  Coding DNA Sequence Number=SeqID_26465
MPWRLQADVTVNYGVDSHLLISRRGPRLLTECVSVLAWDDVEIPCYAYRDQSPCLVEAEVFLWH

SEQ ID NO: 68245 - protein, 96 aa, Zea mays
  Coding DNA Sequence Number=SeqID_26466
MAEFVSGSALFFCVWSKEQGRSGSVQPRFLAATTHFAELARFLREMEKTHLTSGSHTSNTQRPGGFRFNGEEDPTGGVQFYFKLFVTKIISDDIVP

SEQ ID NO: 68246 - protein, 156 aa, Zea mays
  Coding DNA Sequence Number=SeqID_26467
MQSFRPHLRSRGGAPLRGSGVAVLPGLTELELARAEAEVGFAFSSDLRAVLAAGLLSRPGFPDWRSRVGLWSTFDLPIAAASLQIARGALWPRCWGTRTADPDRALRLACSAIRRAGEASIWRLWVPRSPPMKGGRLHRLEPVPASTIIPRLRSVL

SEQ ID NO: 68247 - protein, 78 aa, Zea mays
  Coding DNA Sequence Number=SeqID_26468
MAAVVASDRATQVEVGQKSEVGVVSRLLVKNRKLSRFFRTLGLGRWEVLKVETSMDFVGNLLETAILKRQHSWNLLHN

SEQ ID NO: 68248 - protein, 91 aa, Zea mays
  Coding DNA Sequence Number=SeqID_26469
  Subcellular localization annotation: CTP_CleavageSite=25; ConfidenceScore=5.04e-01
MPQQAPTAAADPQRTKVRESISRVRGGKIQVPMGRISPGTPPTPLLGPPQREREERKEAEEERGTDPHCHLPCGRADFLRSLGRRQGEVEA

SEQ ID NO: 68249 - protein, 463 aa, Zea mays
  Coding DNA Sequence Number=SeqID_26470
  Homolog annotation: Hit_ID=P17571; Match level="QueryCoverage=27%, HitCoverage=20%, E-value=2e-22, Identity=50%"; Hit description =Nitrate reductase [NADH]
  Pfam annotation: Domain name=FAD_binding_6; Domain location=94-193; Score=16.8; E_value=9.2e-06; Accession=PF00970.14; Description =Oxidoreductase FAD-binding domain
MGSSAASASTSGASWTRSNTRPQGWHFDLIIKARIKHLDPLPPLVPNTDAEEEEVLTTTSTSAVHGGDDYELSHSEAGSVLATAALPNPREKIRCQLVNRTRLARDVRLIFSLTSSNQVLSLHMSTHDFDCASVDRKSCLRAYTLTSMEDEVGHFGLDAKEYILDEHSKFLNGELMNQLLDLLPLDPYIEAALSPISSIVQLVVLAEEEVITNSPNRCLMICFNLLQRCFSWDAAPHRQLWPPPHIHVEFWCGSAALRSIPWPPPTSLDSLYTKEFYCRVQFPGFGRTFVFNAEILKRVGRTSEAKDSSRVALKSSWGTLGCSHEEAAELASLVDGYQLMRAASASDRVSSLKNYHHTLGLCDHWAEKRFNGHKCVQFHAIEEERMRLLHFVFEIRFSSKTYWYWVIRHRLSRKSRQSFVELVQELLGDKLYFKRWGMSASQTGAMSIQREQVTGHESPSSKR

SEQ ID NO: 68250 - protein, 923 aa, Zea mays
  Coding DNA Sequence Number=SeqID_26471
  Gene Ontology: Mol. function=protein serine/threonine kinase activity; Cellular component=integral to membrane; Biological process=protein amino acid phosphorylation
  Homolog annotation: Hit_ID=P93425; Match level="QueryCoverage=97%, HitCoverage=97%, E-value=0.0, Identity=67%"; Hit description=TMK protein precursor
  Pfam annotation: Domain name=LRRNT_2; Domain location=340-378; Score =9.9; E_value=0.08; Accession=PF08263.3; Description=Leucine rich repeat N-terminal domain
  Pfam annotation: Domain name=LRRNT_2; Domain location=41-81; Score =31.6; E_value=2.7e-06; Accession=PF08263.3; Description=Leucine rich repeat N-terminal domain
  Pfam annotation: Domain name=LRR_1; Domain location=109-130; Score =10.8; E_value=2.7; Accession=PF00560.23; Description=Leucine Rich Repeat
  Pfam annotation: Domain name=LRR_1; Domain location=132-154; Score =12.6; E_value=1.2; Accession=PF00560.23; Description=Leucine Rich Repeat
  Pfam annotation: Domain name=LRR_1; Domain location=156-179; Score =0.4; E_value=2.4e+02; Accession=PF00560.23; Description=Leucine Rich Repeat
  Pfam annotation: Domain name=LRR_1; Domain location=205-227; Score =12.0; E_value=1.6; Accession=PF00560.23; Description=Leucine Rich Repeat
  Pfam annotation: Domain name=LRR_1; Domain location=228-249; Score =1.1; E_value=1.8e+02; Accession=PF00560.23; Description=Leucine Rich Repeat
  Pfam annotation: Domain name=LRR_1; Domain location=251-272; Score =12.7; E_value=1.2; Accession=PF00560.23; Description=Leucine Rich Repeat
  Pfam annotation: Domain name=LRR_1; Domain location=274-296; Score =8.6; E_value=7; Accession=PF00560.23; Description=Leucine Rich Repeat
  Pfam annotation: Domain name=LRR_1; Domain location=298-320; Score =3.9; E_value=53; Accession=PF00560.23; Description=Leucine Rich Repeat
  Pfam annotation: Domain name=LRR_1; Domain location=405-427; Score =17.2; E_value=0.058; Accession=PF00560.23; Description=Leucine Rich Repeat
  Pfam annotation: Domain name=LRR_1; Domain location=429-452; Score =6.5; E_value=17; Accession=PF00560.23; Description=Leucine Rich Repeat
  Pfam annotation: Domain name=Pkinase; Domain location=607-846; Score =70.3; E_value=6.1e-18; Accession=PF00069.15; Description=Protein kinase domain
  Pfam annotation: Domain name=Pkinase_Tyr; Domain location=607-846; Score=30.0; E_value=2.6e-14; Accession=PF07714.7; Description =Protein tyrosine kinase
  Pfam module annotation: Pfam domain module=LRRNT_2::LRRNT_2::LRR _1::LRR_1::LRR_1::LRR_1::LRR_1::LRR_1::LRR_1::LRR_1::LRR_1::LRR _1::Pkinase::Pkinase_Tyr; Domain location=340-378::41-81::109 -130::132-154::156-179::205-227:...
  Pfam module annotation: Domain location=:228-249::251-272::274 -296::298-320::405-427::429-452::607-846::607-846
MPFPTAFTARRRRHEGAAGRWCGLVVLVLMALEAGAAAETSPSDVAAMRAVAKALGADKTLGWDVAGDPCSPKRWDGVSCDSSGRVTAIQVGARGLTGTLPPEVGDLTELTRLEVFDNKLSGPLPLLPGLSSLQVLLAHNNSFASIPADFFKGLTGLTAVAIDYNPFASWTLPASLAACASLANFSAISANVSGTLPDFLGAMPALQRLSLSFNQLSGPVPASLAGAPLVQLWLNGAHLNGSISFVSNMTSLEQLWLHSNEFTGPLPDFAGFDDLWDLQLRDNMLTGPVPESLFKLKALKNVTLTNNLLQGPMPQIPNGLHADIEADTERFCVQEAGKPCNPLVSLLLEVAAGFMYPKALAEDWRGNDPCMFPGVTCIQGNITGLTFANKGLSGSISPAIGKISSLKVLDLANNNITGTVPEEVAVLPLLTKIDLSNNNLYGKLPTFASKNVAVNTAGNPNIGKDAPAPTAGPGSSNNSPSGGSSSGSSGNNGNGGSSSSSVGVIAGSVAGTVAGLGLVAALGFYCYKRKQKPFGRVQSPHAMVIHPRHSGSDDMVKITVAGGNANGGARASETYSQASSGPRDIHVVESGNMVISIQVLRNVTNNFSEDNILGRGGFGTVYKGELHDGTKIAVKRMEAGVMGNKGLNEFKSEIAVLTKRTICDHWNGKKRLSIALDVARGVEYLHSLAQQTFIHRDLKPSNILLGDDMKAKVADFGLVRLAPDDGKCVSIETRLAGTFGYLAPEYAVTGRVTTKADVFSFGVILMELITGRKALDETRPEDSMHLVTWFRRMQLNKETFRKAIDPVIDLDEETYASVSTVSELAGHCCAREAHQRPDMGHAVNVLSTLSEVWKPTDPDSDDSYGIDLNMTLPQALKRWQAFEDSSHFDGATSSFVASLDNTQTSIPTRPPGFAESFTSADGR

SEQ ID NO: 68251 - protein, 210 aa, Zea mays
  Coding DNA Sequence Number=SeqID_26472
  Gene Ontology: Mol. function=metal ion binding; Cellular component =integral to membrane; Biological process=electron transport
  Homolog annotation: Hit_ID=Q9ZSR3; Match level="QueryCoverage=81%, HitCoverage=92%, E-value=2e-28, Identity=41%"; Hit description =Cytochrome
  Pfam annotation: Domain name=Cytochrom_B561; Domain location=5-210; Score=48.4; E_value=2.4e-11; Accession=PF03188.6; Description =Cytochrome b561
MAHGIIGSHYHSMLASRVGMVAHVLFPDHRRAHARLAAALPRRHQHTVRGPRADFQSILAYSTIPSHIDHRTQKMAHMLIHLVGLILAIFGVYAAFKFHDAAVAPDLTSLHSWLGIAAVALFGLQWLFGFVTFWLPAAHADTRAAAAPAHVMAGLAIFMLAVCAAQTGLVEKSAAAASAAELKLINVTGIFILLYGLTVASAVALRKAFL

SEQ ID NO: 68252 - protein, 69 aa, Zea mays
  Coding DNA Sequence Number=SeqID_26473
MASLFLRHPACMVLKPYTININAVRVDAVTSSTQKLKLLREAKGLDKHEVTPIIKIEGSHSDAARSKNW

SEQ ID NO: 68253 - protein, 76 aa, Zea mays
  Coding DNA Sequence Number=SeqID_26474
MASILEKAGCDHVKAVGETNFRMAIDDIKAPLKTILNAAKRFCLDLWDKGGRQLAALEAEEYTTKNKELKKTKKAK

SEQ ID NO: 68254 - protein, 140 aa, Zea mays
  Coding DNA Sequence Number=SeqID_26475
MRLSTAARAYWCSIERVGLGGLDESGVSSDKVDSSESSEEWSNNDGDDKGDGNSSCDDDGGDGGKGDNGKGDGDGRSGDDKGDGDGSSGNSDGGGDGNSGSSNDGGDGGNGGGDGGRGDGGSDGKGNGGSGKASGIMPLV

SEQ ID NO: 68255 - protein, 248 aa, Zea mays
  Coding DNA Sequence Number=SeqID_26476
IYSSGNPTNIANPIVDVSVKIDIKALGGRLNLFKTTACEKIPWKYLKAYDDVDPLDYLGAYNVDDIQLICCQPDASTMWLIPPPVQNRFIQSLEEREMLFGKMELILNWDFLRARPKGKELVRYESPIEHCPSVDDVKRVLNGTANSFSIIDAYPRYFRVTGSGEVRRLEAAIDSVSGELLLNNGTPWWSFYDTNPSDLAGCQGLNGPMAIVVSEETPRISDICENGQKLEFSQASCAITIRSNYQKS

SEQ ID NO: 68256 - protein, 283 aa, Zea mays
  Coding DNA Sequence Number=SeqID_26477
  Homolog annotation: Hit_ID=Q6QP54; Match level="QueryCoverage=49%, HitCoverage=45%, E-value=2e-23, Identity=50%"; Hit description =Putative kinase
MEGQRRLRHSDCGATRQSESDRQSGLAKGATANSAPPDPRARTRAKTRKTANSAPPDSRARTRAKTRKTANSAPPDPRARTRAKTRKTANSAPPDPRARTRAKTRKTANSAPPDPRARTRAKTRKTANSAPPDPRARTRAKTRKTANSAPPDPRARTRAKTRKTANFAPPDPRARTRAKTRKTTKLRLARPQGSNSASSDPRARTPPWPRTNDFRLARPQGSGSASATEDRLNLGFGGAPTSPCLGHRPATSTGSAIIILPQIDSGHGEQDRHPIRPAPPDGQ

SEQ ID NO: 68257 - protein, 331 aa, Zea mays
  Coding DNA Sequence Number=SeqID_26478
  Gene Ontology: Mol. function=DNA binding
  Homolog annotation: Hit_ID=Q09LL3; Match level="QueryCoverage=99%, HitCoverage=100%, E-value=1e-103, Identity=64%"; Hit description=DNA- binding protein DSP1
  Pfam annotation: Domain name=DUF151; Domain location=133-267; Score =6.7; E_value=3.3e-05; Accession=PF02577.5; Description =Uncharacterised ACR, COG1259
  Pfam annotation: Domain name=UVR; Domain location=291-326; Score=7.5; E_value=0.071; Accession=PF02151.9; Description=UvrBuvrC motif
  Pfam module annotation: Pfam domain module=DUF151::UVR; Domain location=133-267::291-326
  Subcellular localization annotation: CTP_CleavageSite=59; ConfidenceScore=5.19e-01
MDIINGAVLPRCHAAPVTGAAAASVADARVSGHLQLLRRVRCRGSGSASAGLLHATTPRAGVAARRFFSPPLGNGNGNGRTIGWRPARCTHGGSSSDGDGAAAADFDAREEEFVDSSVMEAVELRSVSDGGFVIKMRDGRNLRCVQNNPRVLRLRDSAPHHAIVLKMEDGSDLLLPIIPRPTIYNVVLEMTTRMGYEVRLVRITEMVHDAYYSRLYLAKVGNDQDTISFDLKPSDAINIAFRCKVPIQVNRRIAYNNGLKVLQPKAAGSYLGSDDIQITRLDRPDDQHCSEAQEFDLVRNMLIAAVEERYKDAAQYRDQLSMLRSKKKNAI

SEQ ID NO: 68258 - protein, 106 aa, Zea mays
  Coding DNA Sequence Number=SeqID_26479
MKTPAAHVDRAIPAIPVVEPYIAMTARASPSQPRPLPDLSRRRFCHLIYNMLKVKKNRKDCNLADGEYVLVPEQGAAQEVAPDPAPEPAPEDLPATALEGKPRFYA

SEQ ID NO: 68259 - protein, 131 aa, Zea mays
  Coding DNA Sequence Number=SeqID_26480
MQRGLGSTAPELRLHVEKAGERGPGETEGLGANQRVSHVADEEAELTEATDATEARRWPQNGRWITIKVHGYTHRARERRGCSAEGATERGERVSGCELQKRARARGGVARKRAIVGASTAESAGGRLGKG

SEQ ID NO: 68260 - protein, 67 aa, Zea mays
  Coding DNA Sequence Number=SeqID_26481
MGDELEESGQLKRQKKKVQSALMQRVPGQGLSLSTIPGEEVEQLEPERSARQRRPAGFGLSDVESNV

SEQ ID NO: 68261 - protein, 49 aa, Zea mays
  Coding DNA Sequence Number=SeqID_26482
MVDSDSPWPGTRCIKADCTCQAKPKPRKLSFPLRRCLEIAGWTAVDEVP

SEQ ID NO: 68262 - protein, 114 aa, Zea mays
  Coding DNA Sequence Number=SeqID_26483
MDMTWEPVLDKISQLTNLCRPPQNLMAHFSLRRIVILLEQSRSMWTYSRIEGPMRVEKGPNSKLARVAALEEELVGRTKEEKLLASLQAHVFSGQLYKGNSTLPKGASSRRKAA

SEQ ID NO: 68263 - protein, 152 aa, Zea mays
  Coding DNA Sequence Number=SeqID_26484
MTPTQGEAESNEGFPNGVGVLGQRGSGGRHSDHIARPVDEKIEASEANGRFGGAVDAVAAAGPYDRVETPQWKGRANSIKLIILSQKVNKDKTNEQYTNIYKQVSTSQKNNINSRGTFGLGMELYMMRSVVWEKVKPVPKLRVEKLRLTGGK

SEQ ID NO: 68264 - protein, 85 aa, Zea mays
  Coding DNA Sequence Number=SeqID_26485
  Homolog annotation: Hit_ID=Q8LNU6; Match level="QueryCoverage=75%, HitCoverage=7%, E-value=1e-14, Identity=59%"; Hit description =Putative DNA-directed RNA polymerase I subunit, 5'-partial
MAGVSSFYNSEGVIKNFGEMKKLLSAVRVGMNPVLPKIEQTGPEEVLHVHLDGCILGTIASAMIEKAVNYLRTLKLLAQSLAITD

SEQ ID NO: 68265 - protein, 99 aa, Zea mays
  Coding DNA Sequence Number=SeqID_26486
  Subcellular localization annotation: CTP_CleavageSite=45; ConfidenceScore=5.06e-01
MAWRGTHEIKCTPSPSPGWWILDTKALQTFTTCSVAIAVTYLAVTSNMVAASFDLNPTEPSTCLFWEICEQASCPRTVGSSQWVLDASLIPATDLGKAQ

SEQ ID NO: 68266 - protein, 251 aa, Zea mays
  Coding DNA Sequence Number=SeqID_26487
  Gene Ontology: Mol. function=nucleic acid binding; Cellular component= intracellular; Biological process=DNA integration
  Homolog annotation: Hit_ID=Q7XBD2; Match level="QueryCoverage=99%, HitCoverage=21%, E-value=3e-96, Identity=88%"; Hit description =Retrotransposon Opie-2
MDPKGKGIVINDKEKESFVNEPRDDKSNDSGSGHRRKDGKKKKTRRIKEIVYYDSDESTSSQKDDDHNEYERKKPIHKNAQATTVLLASLCRDEYHKVSGLDNAKQIWDTLKISHEGNDVTLLTKMELVEGELGRFAMIRGEEPTQTYNRLKTLINKIRSYGSTRWTDHDVVRLMLRSFTVLDPHLVNNIRENPRYTKMSPEEVLGKFVSGRMMIKEARYVDDALNGPINEPQPLALKATRSKEALPSKVA

SEQ ID NO: 68267 - protein, 187 aa, Zea mays
  Coding DNA Sequence Number=SeqID_26488
MGENLQGRSMLASRIRDEGAEATRGKESRRCMKESKGSTARQRHRKLRLAQPRARTRAWPRKTTNSASPDPGLGLGLSPGRRRTLPRPTQGSDSGSAPEDDELRLARPRAQTRAQPQKTMNSASPDPGLGLGLSPGRRRTPPRPTQGSDPGSAPEDRLDLDLGGASASPYPGLGPTTSQEGPSLPYP

SEQ ID NO: 68268 - protein, 197 aa, Zea mays
  Coding DNA Sequence Number=SeqID_26489
MGSEVKERRRGCSGRVEMIPTRNPGRGEGRSGTLTLGLAPVEDGESYGPQSGHRARLNWPDSTRVWRAGMAKLRRGRIGHSTVELKETKHWSEFLTSGQCLGRPSAAPGGLDGRHDRRGSPAGSGGLDGRHDRRGSPAGSGGDGRAYERVDVDEMRQGRERVRAVLKRELGRMGRLRGQSSRCAYALVNGGLQRRRS

SEQ ID NO: 68269 - protein, 79 aa, Zea mays
  Coding DNA Sequence Number=SeqID_26490
MGDSQLSNWVERKGRLLKDKFKAITDKGVREEVKSAGEPKGTSTVKNEAKGTKGMSTTKNEAKARLARGKYEVTTKRRD

SEQ ID NO: 68270 - protein, 74 aa, Zea mays
  Coding DNA Sequence Number=SeqID_26491
  Subcellular localization annotation: CTP_CleavageSite=46; ConfidenceScore=5.37e-01
MGPNSCCHSEHELDPVSFTTPPSFSFGSSRAKRCKGARRTARRIFRAVAHRGQEIPLLRSRSRDALTVDPRSKG

SEQ ID NO: 68271 - protein, 132 aa, Zea mays
  Coding DNA Sequence Number=SeqID_26492
MCQVTIQKQKEIAEVEARQNQPKKVGLQPHGLCPKSQLDADLPPVDSVVIDPRSDSTSAYKTMLYGPSPIPSCLGLAPSSVLCGGKPAAMCASLGTGDLPPPQSSTHRCSVAGQGPEGCSWARTDDDHAFAI

SEQ ID NO: 68272 - protein, 103 aa, Zea mays
  Coding DNA Sequence Number=SeqID_26493
MTKGLIYENSLDPEGNPSGLRVDFLKRGGLLSKNDRAKGYAFENKSPTLAPTSDVLTSTIFGKASTFFMPPKKITAPGAALQPQDTNQETLSPRGSKPEEKGH

SEQ ID NO: 68273 - protein, 93 aa, Zea mays
  Coding DNA Sequence Number=SeqID_26494
MAQVGPRAGESAPTCARAGGFAQWSPEVWISKEESCALLNWVTDIYEKVPELLFLHSLKPTTRSGGESSSGELVPARILDDWCSTLAETEFKP

SEQ ID NO: 68274 - protein, 209 aa, Zea mays
  Coding DNA Sequence Number=SeqID_26495
MGAGDELTWGWGVRQEGEDRGWPRQPGGLALCCWSVGYRAGELGCRTATARGWAVTPGRISHGPRWRRLAQGKTQRGCGRGRAIGARSGRFWRRYTRAQLRKRRQLQEMTGGAKKLRHQAGSVRLGVAHTGASRWGAWRGRLECAGTRHRGPSQLGRMEAGGGLGPVQGRSKGSRHVGHAGPTRRPAKGGGRARPARRDVPPGPSRAAG

SEQ ID NO: 68275 - protein, 384 aa, Zea mays
  Coding DNA Sequence Number=SeqID_26496
  Gene Ontology: Mol. function=DNA binding
  Homolog annotation: Hit_ID=Q9AYM0; Match level="QueryCoverage=61%, HitCoverage=58%, E-value=5e-39, Identity=43%"; Hit description =Putative AT-Hook DNA-binding protein
  Pfam annotation: Domain name=AT_hook; Domain location=152-164; Score =10.0; E_value=0.44; Accession=PF02178.9; Description=AT hook motif
  Pfam annotation: Domain name=AT_hook; Domain location=94-106; Score =16.7; E_value=0.03; Accession=PF02178.9; Description=AT hook motif
  Pfam annotation: Domain name=DUF296; Domain location=177-297; Score =184.6; E_value=2.4e-52; Accession=PF03479.5; Description=Domain of unknown function (DUF296)
  Pfam module annotation: Pfam domain module=AT_hook::AT_hook::DUF296; Domain location=152-164::94-106::177-297
  Subcellular localization annotation: CTP_CleavageSite=72; ConfidenceScore=5.29e-01
MEVRSEQGLMAGRDLFGLTKSPPAPAPPSSAAMQSVRMAYTADGTAVFAPVSSSPATPSYQPQGAAHGASMSAATVVGGNGAPAAPSMGEPLAKKKRGRPRKYGPDGSMALAMVPASAASGSPATGQGFSGPFSPPALNPASSLVVASPDGFKKRGRPKGSTNKPRVDAAGSSGAGFTPHVITVQAGEDVASKIMSFSQHGTHGVCVLSANGSISNVTLRQTATSGRTVTYEGQFEILSLSGSFFLAEDGVQRSRNGSLSVSLAGPDGRLLGGGVAGLLVAASPVQFLPPYFVGSATDASRTPKTRMLIISAYALFSADSTGKLQFWRRKGATKAGSFRTHIGSTEGCSDSRDGRTQQPFFKRHIERVIRWRWKPTATASSHGC

SEQ ID NO: 68276 - protein, 110 aa, Zea mays
  Coding DNA Sequence Number=SeqID_26497
MGNDEKQHLQSPEVRVVDVDCIICGSGFSFNLFGWMRADSQARQPNINSDKVNAHGGVGRDGTANQSHRLCLPRAKLGQACKRPPVESAVFHYRLVLNELVPETHEPVLL

SEQ ID NO: 68277 - protein, 86 aa, Zea mays
  Coding DNA Sequence Number=SeqID_26498
MVSAYLLDTCLLWREFIKLQEKEGTKDCNTSGRSGHGKEFLWLISVVRCLPWNDGSAIKEIKNGKKGRRYKDDFTVDLTSMKLGSG

SEQ ID NO: 68278 - protein, 750 aa, Zea mays
  Coding DNA Sequence Number=SeqID_26499
  Gene Ontology: Mol. function=RNA-directed DNA polymerase activity; Cellular component=intracellular; Biological process=RNA-dependent DNA replication
  Homolog annotation: Hit_ID=UPI00004C1731; Match level="QueryCoverage =99%, HitCoverage=52%, E-value=0.0, Identity=76%"; Hit description =UPI00004C1731 related cluster
  Pfam annotation: Domain name=RnaseH; Domain location=294-421; Score =5.8; E_value=1.7e-05; Accession=PF00075.14; Description=RNase H
  Pfam annotation: Domain name=rve; Domain location=500-674; Score =93.7; E_value=5.8e-25; Accession=PF00665.16; Description=Integrase core domain
  Pfam module annotation: Pfam domain module=RnaseH::rve; Domain location=294-421::500-674
MKESDQLATSFITPFGMYCYVTMPFGLRNAGATYQRCMNHVLGEQIGRTVEAYVDDIVVKTRRASDLLSDLEVTFRCLKAKGMKLNPEKCVFRVPRGMLLGFIISERGIEANPEKIAAITSMGPIKDLKGVQGVMGCLAALSRFISRLGERGLPLYRLLRKAECFTWTPEAEEALRNLKALLTKAPILVPPAAGEALLVYVAATTQVVSAAIVVERQEEGHALPVQRPVYFVSEVLSETKIRYPQVQKLLYTVILTRRKLRHYFESHSAIKSQVLADFMAEWVDTQLPTAPIQPELWTMFFDGSLMKTGASAGLLFISPLEKHLRYVLRLHFPASNNVAEYEALVNGLRIAIELGVRRLDARGDSQLIIDQVMKNSHCRDPKMEAYCDEVRRLEDKFYGLELNHIARRYNETADELAKIASGRTTVPPDVFSRDLRQPSVKIDDTPEPKAPSAQPYLPSAQSEAPSARPEAPSVQPETPYLQYLHQGELPLDRAEARRLARRAKSFVLLGDGKELYYRSPSGILQQCISITEEGTRGYTHLLVAIDKFSKWIEVRPLNSIRSEQAVAFFTNIIHRFGVPNSIITDNGTQFTGRKFLDFCEDHHIRVDWATVAHPMTNGQVERANGMILQGLKPRIYNDLNKFGKRWMKELPSVVWSLRTTPSRATGFTSFFLVYGAEAILPTDLEYSSPRTRAYADQSNQASREDSLDQLEEARDKALLHSARYQQSMRRYHARGVRSRDLQVGDLVLRL

SEQ ID NO: 68279 - protein, 48 aa, Zea mays
  Coding DNA Sequence Number=SeqID_26500
MRAYDYHWLTSTAQSDVVNRLRRGTTEGNGGNHDDDRAATSPGKWVRR

SEQ ID NO: 68280 - protein, 84 aa, Zea mays
  Coding DNA Sequence Number=SeqID_26501
MEVMRGSRHRDDMVGSRAESTSRGREAADLEGGGIGGKHGGATGLDEGDYGPWWRAFNDSAWSGTPSRTRTRRSMPCRRPSPFV

SEQ ID NO: 68281 - protein, 86 aa, Zea mays
  Coding DNA Sequence Number=SeqID_26502
  Gene Ontology: Cellular component=membrane; Biological process =cytochrome complex assembly
  Homolog annotation: Hit_ID=Q8LBH9; Match level="QueryCoverage=75%, HitCoverage=18%, E-value=7e-22, Identity=80%"; Hit description =Cytochrome c biogenesis protein
MHRNAHGVLVSVACNGVQAYLDGLTFVLSALPCSTPILATLLGYVATSRDPIIGGSLLLTYTTGYVARLPTIASFARALQKDEARV

SEQ ID NO: 68282 - protein, 241 aa, Zea mays
  Coding DNA Sequence Number=SeqID_26503
  Subcellular localization annotation: CTP_CleavageSite=43; ConfidenceScore=5.40e-01
PAPYALPRPRPVTPPRPPHARPRLSPASPCARALLAAQQALPRATPAPPASPSPGRFGPPPPPGESLPTRSRPPASPPHVLATLASPPQPRARPRRAPPRSRPPRRLPFPTVLAPGEPLPGREPLGPASRPGRAPPHALGCAPARARASATRVPRACTVHPSCRQWGSVYAARSAKVDLSLGEECVINESHDLRAEREITACGDVQITGGNENDGFGIDYGNGEDKFVEGDFQEFQDYDEF

SEQ ID NO: 68283 - protein, 89 aa, Zea mays
  Coding DNA Sequence Number=SeqID_26504
MGSASQGPFFPIPQPWVVHSKIHGNRIFFLPAHQTAAPGYSAVAPPRQALALAHEPIDDIGSLTCTVAPSALENLGGSHERLGDGEATA

SEQ ID NO: 68284 - protein, 72 aa, Zea mays
  Coding DNA Sequence Number=SeqID_26505
  Subcellular localization annotation: CTP_CleavageSite=34; ConfidenceScore=5.21e-01
MAWPGAPALQRGGPMACQRGTLGGSAARQPPASRCDSPTQRPGCLWCNLCSSKEEGVEADLQEFQDFDEFED

SEQ ID NO: 68285 - protein, 124 aa, Zea mays
  Coding DNA Sequence Number=SeqID_26506
  Gene Ontology: Biological process=amino acid biosynthetic process
MRVEQCKNKIDNLNKHYKMECQGLTSSGGGPSATGPGSKRWTNSVSPASSKPLAAAEDEKPRQQRGKKVIMLIARGVQVACHHGVEGTLVKLILLPILSGGNRGAGIRNNDEHATKVCGWVLDY

SEQ ID NO: 68286 - protein, 78 aa, Zea mays
  Coding DNA Sequence Number=SeqID_26507
MGRESSPTPWTAEGNTGSSTQEVVGRPWRHPAAERYGSAGIEGAAALCSLELGEGGVHGSFCSCAREAKEEGAMEGST

SEQ ID NO: 68287 - protein, 204 aa, Zea mays
  Coding DNA Sequence Number=SeqID_26508
  Gene Ontology: Mol. function=zinc ion binding; Cellular component =nucleus; Biological process=regulation of transcription
  Homolog annotation: Hit_ID=Q5VRR4; Match level="QueryCoverage=79%, HitCoverage=20%, E-value=5e-73, Identity=81%"; Hit description =Putative far-red impaired response protein
  Pfam annotation: Domain name=SWIM; Domain location=45-81; Score=31.4; E_value=3.1e-06; Accession=PF04434.8; Description=SWIM zinc finger
MIQGGTRYHVEFLDGCGATSCHETSSGGNLLMFGITMQGRGSKVWDVVLDTSTIEISCGCRKFERMGLLCSHALKVFTLQNVNTIPEKYVLKRSTKDARRSMYTLAQDDSTQQECTEAELAYRNRAMHYAYNLIIKSQELEESRKIFWDSLETGEKALEVFFEMRNMRTQAAKDADKSVKKKKKHQKEQTQKKLNKPQEFPQLV

SEQ ID NO: 68288 - protein, 51 aa, Zea mays
  Coding DNA Sequence Number=SeqID_26509
  Gene Ontology: Mol. function=transferase activity, transferring glycosyl groups; Biological process=nucleoside metabolic process
  Homolog annotation: Hit_ID=Q6ZIA3; Match level="QueryCoverage=94%, HitCoverage=9%, E-value=1e-12, Identity=73%"; Hit description =Putative uridine kinase/uracil phosphoribosyltransferase
MGVDFCKKLCGVSIVRSGESMENALRACCKGIKIGKILIHRVGDNGQQVNA

SEQ ID NO: 68289 - protein, 133 aa, Zea mays
  Coding DNA Sequence Number=SeqID_26510
  Subcellular localization annotation: CTP_CleavageSite=41; ConfidenceScore=5.59e-01
MAWGPFSLQNPSDSPFRSSAFAKGETFAPWSCITFRTLSFFATAAGELSLVVPNMPDTMGTQPTCPHQEQGREITPKKARRRPKAVPQYAHQDKGGGSPVLDPSGSYRSLADVHSQPAQGRFEPQFDWGQLRC

SEQ ID NO: 68290 - protein, 201 aa, Zea mays
  Coding DNA Sequence Number=SeqID_26511
MGLFRFFHALRLEPLLTCGSLQAAIGHWSGVARTADRWVRHVGLVLSVEIFVSTVEPANNSSSISDHCECPTGIYANPLDPLCTLSNYQSLAPNTTAMACAMVGIAEGVRSRHIGASSPRILAWGASSVGRAAQRPYVWLRPLAYVTGSGPRDSIGSPLERGVVAHAVGVLGPTAHPGDDDSLGAPEVHPMGVAPELRVDF

SEQ ID NO: 68291 - protein, 74 aa, Zea mays
  Coding DNA Sequence Number=SeqID_26512
MDSPCKNHGFPVRRKLRECELLKCFISNPHAKKARSEEPTKPAEQEVPTEDSPETTGCLMIFGGVVEPTRLFQL

SEQ ID NO: 68292 - protein, 82 aa, Zea mays
  Coding DNA Sequence Number=SeqID_26513
MTTPPTRAAKEGRRATVHGARASPTSAAEGRVGATIDWARRSISHHRGASGSALPDSIKDPAASITGYPFGSGILLKSPWTI

SEQ ID NO: 68293 - protein, 329 aa, Zea mays
  Coding DNA Sequence Number=SeqID_26514
  Gene Ontology: Cellular component=chloroplast inner membrane
  Homolog annotation: Hit_ID=Q9SIY5; Match level="QueryCoverage=100%, HitCoverage=44%, E-value=1e-122, Identity=65%"; Hit description =Chloroplast lumen common protein family
VKRTVQADGIRALKKAEREAYAPPAGSGFISSFMFGSGRSLIDKISSIDDSMFGSTSYLSEQARVVDDYTISQVITRELSDGDVSRLLIVVTGASHVMYGPRGSGVPGRISKKVPKKDQVVVLLDPERQVIRREGEVPIADFLWYSAAKPCTRNCFDRAEIARVMNAAGRRPEALPQDLQKGLDLGVVSPEILQNFFDLEKYPVMTELIHRFQGFRERLLADPKFLQRLAIEEVISITTTLLAQYERRKGRFFEEIDYVLTDTIRGSVVDFFTVWLPAPTISVLQYADDGSGSSLEFVKGLLGSLPDNAFQKNILGQDWSIKQRIAAVL

SEQ ID NO: 68294 - protein, 205 aa, Zea mays
  Coding DNA Sequence Number=SeqID_26515
  Homolog annotation: Hit_ID=Q1S124; Match level="QueryCoverage=43%, HitCoverage=12%, E-value=3e-12, Identity=45%"; Hit description =Trimeric LpxA-like
MRLLSSTASNSEHDDVDPRDLAGAGGQLRHGLDVAELVKGSTLYRLLAVGRAHGGGCRWQLASWGGEAARSGQSSAVPISDGCARCWCAAKSAEALGSAIAALPFGRPGIIAGLVEYRLGESLVTYYNQPLIAGLLSFVARTLNSYWGTQQWVDLARYTGLQRSEEKPPAEATMPPDSAHLEGCTTEGHDFDDSSNNTNKSTGPS

SEQ ID NO: 68295 - protein, 80 aa, Zea mays
  Coding DNA Sequence Number=SeqID_26516
MEQGGRGHGHRHQENLVREPRKKQDHAADFERLGVEVHIDLARVLRWRRGVGIGLRLEGDQREKQEGSAATSTGAPRRGI

SEQ ID NO: 68296 - protein, 101 aa, Zea mays
  Coding DNA Sequence Number=SeqID_26517
MRLGCTLSKVSELSATVETGKTNPRVSGQLSSMASTKRSGPPLSGEDDEQEPFRPPRPNKGKVVVEQERQKRQHLDKAQEEVTVVAVIVECGEKGGRGGTA

SEQ ID NO: 68297 - protein, 91 aa, Zea mays
  Coding DNA Sequence Number=SeqID_26518
MAAHPAALPSPCPRISLSRGWTRISPTPAGSQPPPCPCPGPELADYDAVTDHFAGTTAFHLSSSGASRHGMVLMCSYAILNPRQILTANEI

SEQ ID NO: 68298 - protein, 105 aa, Zea mays
  Coding DNA Sequence Number=SeqID_26519
MAEVAARRAVGVPAGGGGDQANLAAVAAAMRGRGEVDTSSPFQSVRQAVDLFGGGAAAVSQWRHPQAPPRVHLRPEGGGGGGGGMIASAPLSQPIPPFSKRLGIS

SEQ ID NO: 68299 - protein, 69 aa, Zea mays
  Coding DNA Sequence Number=SeqID_26520
MKKATGQELDMLSSKRSIDYSSGAALKEVRLDSPAPLESTCPRGKFRFRVAFCQPQEARPEATDLAENL

SEQ ID NO: 68300 - protein, 544 aa, Zea mays
  Coding DNA Sequence Number=SeqID_26521
  Gene Ontology: Mol. function=nucleotidyltransferase activity
  Homolog annotation: Hit_ID=Q1S118; Match level="QueryCoverage=78%, HitCoverage=86%, E-value=1e-109, Identity=45%"; Hit description =Uncharacterized Cys-rich domain
  Pfam annotation: Domain name=PLAC8; Domain location=309-441; Score =129.8; E_value=7.7e-36; Accession=PF04749.7; Description=PLAC8 family
  Subcellular localization annotation: CTP_CleavageSite=25; ConfidenceScore=5.00e-01
MASNGNGNLKADIQQVESTASDNVQGATGVNTLATQGVSRNEKRWSGFRDFWNRLCTGPKLKKLGPSTSFKFQQIALQRDEFSRSIHSDNHVSHEHFQFIRKINWEQLWVMARNWIKEPMNMALFVWIACVAVSGAILFLVMTGMLNRVLPSKSKRDTWFEVNNQILNALFTLMCLYQHPQRIYNFVLLCRWEQQDILRLRKIYCKNGTYKPNEWMHMMGTADLNAPLSVLVSLFLLQLGLQHSLGLYNIISPLGKDYDTEHPDIDQEAQIHATSTESGRPTSRLQSFERRYSFIQSDERRFVERRPQWVGGLMDFWDQISIAYLSLFCSCCVFGWNMQRLGFGNMYVHIATFLLFCLAPFFIFVLAAGNVDNGSVQVALVLTGLFLCFFGLLYGGFWRIQMRKRFNLPENSFCCHNPDASDCFHWLFCCSCSLAQEVRTADYYDITEDRSHTGQVVGESHRIMSPLQREDGLPLFKSSPSSPYRSGNVSPSIFILESPSPSAPRRSSGSSPQGGGSPTMGHRAMKAPVPSVLQRESGPDHAQG

SEQ ID NO: 68301 - protein, 118 aa, Zea mays
  Coding DNA Sequence Number=SeqID_26522
MVSMTAYTQVPPTRRARARSGRELREAATQEEAGWTGARRSHREMLGAQRERERAQPAEEGSASRARHRSLRGHGEPGAARGHGTRAGTGRRHEKDVGERKKKMQLLPGAQSPAESDG

SEQ ID NO: 68302 - protein, 91 aa, Zea mays
  Coding DNA Sequence Number=SeqID_26523
  Subcellular localization annotation: CTP_CleavageSite=41; ConfidenceScore=5.37e-01
MALLGVVQAGDDASSATPGHASSAGSPAPRVPQAPLGVQVEAGTRQRAVARSIPAWKEAGLSGRDCVGSYSEEKLDHHAGEKEEYLPLEDL

SEQ ID NO: 68303 - protein, 128 aa, Zea mays
  Coding DNA Sequence Number=SeqID_26524
  Subcellular localization annotation: CTP_CleavageSite=62; ConfidenceScore=5.53e-01
MEASRSAYEPSLSLSFSASLSGLTYLSFPVVSYPPRPSNSVVPRAPRSSSSSPAQEPGRYPVASLAFPAKSFFGAPLATIATSVAPTPAGRLQLARGCRSREEGAFPTKSFFGTPLAATAASVASLLP

SEQ ID NO: 68304 - protein, 59 aa, Zea mays
  Coding DNA Sequence Number=SeqID_26525
MGESLEWGDLARRDYHLTASMVVNTMRWPASMGQSLCVFACSLQFQTIPQMLPKYRDNY

SEQ ID NO: 68305 - protein, 124 aa, Zea mays
  Coding DNA Sequence Number=SeqID_26526
MGARQVEGVPEAGSLVEKLDALNRVAAAASRLGRRCVAPALVGFGHVYADLLAGRADAGALAVVASRSDAAPLVRRRDRVAAATVALYAELDALAELEQSARRPPTDQARRALEQRAWGSTCWP

SEQ ID NO: 68306 - protein, 342 aa, Zea mays
  Coding DNA Sequence Number=SeqID_26527
  Gene Ontology: Mol. function=transcription regulator activity; Cellular component=nucleus; Biological process=regulation of transcription
  Homolog annotation: Hit_ID=Q8L5G8; Match level="QueryCoverage=99%, HitCoverage=77%, E-value=1e-169, Identity=80%"; Hit description =Hexokinase
  Pfam annotation: Domain name=Hexokinase_1; Domain location=1-86; Score=-98.1; E_value=0.00086; Accession=PF00349.11; Description =Hexokinase
  Pfam annotation: Domain name=Hexokinase_2; Domain location=93-337; Score=254.1; E_value=2.9e-73; Accession=PF03727.6; Description =Hexokinase
  Pfam module annotation: Pfam domain module=Hexokinase_1::Hexokinase _2; Domain location=1-86::93-337
DNFRVLRVQVGGREKRVVKQQYEEELFDFIAAALAKFVDTEGEDFHLPEDVVSELSRAMERQGLDMKVTALVNDTVGTLAGGRYMDNDVVAAVILGTGTNAAYVEHANAIPKWTGLLPKSGNMVINTEWGSFKSGKLPLSEYDKAMDFESLNPGEQIYEKMISGMYLGEIVRRILLKLAHDASLFGDVVPTKLEQPFILRTPDMSAMHHDSSHDLKTLGSKLKDIVGVADTSLEVRYITRHICDLVAERGARLAAAGIYSILKKIGRDKVPSSGSKMPRTVIALDGGLYEHYKKFSSCVEATLTDLLGEEASSSVVAKLANDGSGIGAALLAASHSQYGESD

SEQ ID NO: 68307 - protein, 400 aa, Zea mays
  Coding DNA Sequence Number=SeqID_26528
  Gene Ontology: Mol. function=pectinesterase activity; Cellular component=cell wall; Biological process=cell wall modification
  Homolog annotation: Hit_ID=Q53WM8; Match level="QueryCoverage=90%, HitCoverage=91%, E-value=1e-150, Identity=73%"; Hit description =Putative pectin methylesterase
  Pfam annotation: Domain name=Pectinesterase; Domain location=111-395; Score=214.1; E_value=3.2e-61; Accession=PF01095.10; Description =Pectinesterase
MALPSRARLLLLLCFVAAAALLVAPGEVSATAAAADAGGHGKRRGHSTHTRRLRPGKGAAAAKPYPANAARVEAIERQFARWVRSMGGHGHNSSSTAYSRALSRASLPARTLVVDKNPGAGNFTSIQAAVELAPAHQPRPRRHQGQRRHVHGEVSISSMRAFVTVEGAGADKTVVQWGDTADTAGAWGRPMGTFGSATFAVNSMFFVAKNITFKNTAPVPRPGALGKQGVALRISADSAAFVGCNFLGAQDTLYDHLGRHYYRDCYIEGSVDFIFGNALSLYEGCHVHAIARNYGALTAQSRQSLLEDTGFSFVSCRVTGSGALYLGRAWGTFSRVVFAYTYMDNIIIPRGWTVFYGQYKCTGPGANYAGRVQWSRELTDDEAKPFISLDFIDGFEWLRL

SEQ ID NO: 68308 - protein, 380 aa, Zea mays
  Coding DNA Sequence Number=SeqID_26529
  Homolog annotation: Hit_ID=Q5JKU0; Match level="QueryCoverage=99%, HitCoverage=100%, E-value=9e-44, Identity=37%"; Hit description =Calmodulin-binding protein-like
  Pfam annotation: Domain name=IQ; Domain location=112-132; Score=20.2; E_value=0.0073; Accession=PF00612.17; Description=IQ calmodulin -binding motif
  Pfam annotation: Domain name=IQ; Domain location=90-110; Score=29.7; E_value=1e-05; Accession=PF00612.17; Description=IQ calmodulin -binding motif
  Pfam module annotation: Pfam domain module=IQ::IQ; Domain location =112-132::90-110
MGRAMRWLKKVLTGSSKKEASDGVRKARDAACAGAGGGGDHGLGPPASEKRRWSFAKPRSSVSGSARRPSVAAGELSQVRPCSCGLEREVEAAAVIQKAFRGYLARKALRALKSLVKLQALVRGYLVRKQTAMTLRRLQALMRLQANTAASRRSTEQERIVARVRPLAVPAAAVHRRRLSDGGDAAGGFDRSPRIVEMDTCELRCRSSRITSRSAGGDPAGDSPLLLRCHEPAWCLQGRELEPPPPPPPPHPKTTHNTPRLGAFAGYLGSPAKRAAACRDSGSCPRYMAGTASSVARARWQSAPRQRRGEQQQQAPAGDADGARPSPSVGRGGSRMHARPQELQAPDSFSLKSSEASRVEVEGSELSDEVTRDYYLDRLW

SEQ ID NO: 68309 - protein, 235 aa, Zea mays
  Coding DNA Sequence Number=SeqID_26530
  Homolog annotation: Hit_ID=Q67VQ4; Match level="QueryCoverage=20%, HitCoverage=29%, E-value=8e-08, Identity=65%"; Hit description=BolA -like
  Subcellular localization annotation: CTP_CleavageSite=53; ConfidenceScore=5.22e-01
MALVPSQPLPSLAHKTLGSVAPPRSRRPGFLYKVELCLIHCNLPTLPSIVAPFASPPSAHPLDLATASSLAAVEDGDCKSTTRPRPTSDGRHSHKSPDAKPVNETQSRLTRGQPRLSDGKTMLPPRSAAAAPCSVAGLLFHRFSSYSSSSVYSVRHHASSALSSQPSTRPTTTWSSSPHSSSRRIRGFAAWASAPGPAGSADSLATKALEAKIKEQLEADTVTVVDTSGDGRHVW

SEQ ID NO: 68310 - protein, 81 aa, Zea mays
  Coding DNA Sequence Number=SeqID_26531
  Subcellular localization annotation: CTP_CleavageSite=38; ConfidenceScore=5.33e-01
METAKVLPPPPPTTQMVVLPTLLAPREGSRDPPLLLLRAQRQRSRGFLVRVSLLVVASPNRVVDTERHTIGGVVGGGAPMH

SEQ ID NO: 68311 - protein, 106 aa, Zea mays
  Coding DNA Sequence Number=SeqID_26532
MAEFVSGSALFFCVWSKEQGRSGSVQPRFLAATTHFAELARFLREMEKTHLTSGSHTSNTQRPGGFRFNGEEDPTGGPHPALSAQAGRRPGPSCRRTDRGGLRGWC

SEQ ID NO: 68312 - protein, 53 aa, Zea mays
  Coding DNA Sequence Number=SeqID_26533
MSLAAIHLVVIVPEEKTSSMKPATTYDKGKGPTEIEDTKKTIENDTLLGPDFK

SEQ ID NO: 68313 - protein, 113 aa, Zea mays
  Coding DNA Sequence Number=SeqID_26534
MATTRSSQGYSKHLRPKVEAALAPLVEGERTVEHKVLVVWHLSSPHNKQNGFLIGALNLPLKLQPPRPLLGPTSRPCSENAAAENLLAVGLTALEIGPFFLRSMLGCECFGHI

SEQ ID NO: 68314 - protein, 136 aa, Zea mays
  Coding DNA Sequence Number=SeqID_26535
  Subcellular localization annotation: CTP_CleavageSite=13; ConfidenceScore=5.24e-01
MTVTPEVVAPAVTAALVSSSRACPILSASSLSPSPHLLPLSDSSPLPPSDGDLPRITSQSFDCDDFGDATADGATPSAPPPQGIWVHLCRGARHRGVLARPAHYLKTHYAAIVSLVVASWVTVLLHSLVSHNDSQQ

SEQ ID NO: 68315 - protein, 105 aa, Zea mays
  Coding DNA Sequence Number=SeqID_26536
  Gene Ontology: Mol. function=protein phosphatase type 2A regulator activity; Cellular component=protein phosphatase type 2A complex; Biological process=signal transduction
  Homolog annotation: Hit_ID=O04375; Match level="QueryCoverage=77%, HitCoverage=18%, E-value=1e-22, Identity=56%"; Hit description =Serine/threonine protein phosphatase 2A 57 kDa regulatory subunit B' alpha isoform
MNWAKESKSSPSCTNCDSFIFETQRHNGIRELCPANGEHKLIRARALIPLHEPNSVAINHQGLSYCIIQFIEKDYKLADTMIWGLLKHWPVRNCQEVIGFDQIIN

SEQ ID NO: 68316 - protein, 112 aa, Zea mays
  Coding DNA Sequence Number=SeqID_26537
MRDCNESRDLVGEEGQVHHDTDGAKGSTQTNKKIKLEFKKKGAKEKEENPGLAHRTVRCTRVDRLQTCHLRVSEASFRYNSPDCSVCHQTVRCTSGATASQRNGRLQRSPAT

SEQ ID NO: 68317 - protein, 73 aa, Zea mays
  Coding DNA Sequence Number=SeqID_26538
MQQADRERGLALTSWRWRPSPAGKIRPSGDGDDAGGARVPSESSAKRLVLQAASVAKGQTASIDQGGDLGQHY

SEQ ID NO: 68318 - protein, 148 aa, Zea mays
  Coding DNA Sequence Number=SeqID_26539
  Homolog annotation: Hit_ID=Q84NC2; Match level="QueryCoverage=33%, HitCoverage=28%, E-value=8e-15, Identity=78%"; Hit description=MADS -box transcription factor 31
MAQYMAEDLASFSVQDLSNLEQQIEFSLYKVRLRKHELLDQQLLEIHQRVRRRCTGTGSSHGSPTCSRTPTSMAGCGKLPPPVPGHSFAVDCCGRGVRSQISTLTDDGDGVDACRFALVVGVRPQQDDAERAALFILESLIMSHELPP

SEQ ID NO: 68319 - protein, 175 aa, Zea mays
  Coding DNA Sequence Number=SeqID_26540
MDRVDSSAFASMGPIEGYDNEKDPCRGRPLRLCASHLCPASSTLTLDLSVPSSVSGHVARIASVVGRTALSTSSRHQQRTATLAWRCTCACSPLLLERAPSSSINPVVISPHHTTQDAAEDETQLAALKRLSRSHPRLERDDDLAFIAFQKRFDEFPEPTEKGEHQRKERGSLLV

SEQ ID NO: 68320 - protein, 144 aa, Zea mays
  Coding DNA Sequence Number=SeqID_26541
MQTPLLECLLARSWVTCYVVVWTLLASGSTSFSPRCVACMWGHPVNPVTHLGTTSRAHGNNPCVARGIRGPLPRIRGVDPIKPRPMASQFSQPNRPRESSSSLRQRERCEFTGKSAVAIYPCLRAHDAPWLRTREISFARGLLP

SEQ ID NO: 68321 - protein, 271 aa, Zea mays
  Coding DNA Sequence Number=SeqID_26542
  Gene Ontology: Mol. function=nucleoside-triphosphatase activity; Cellular component=protein complex; Biological process=protein catabolic process
  Homolog annotation: Hit_ID=Q9SEI3; Match level="QueryCoverage=34%, HitCoverage=23%, E-value=9e-46, Identity=98%"; Hit description=26S proteasome AAA-ATPase subunit RPT4a
  Pfam annotation: Domain name=AAA; Domain location=115-258; Score =19.0; E_value=7.7e-06; Accession=PF00004.19; Description=ATPase family associated with various cellular activities (AAA)
  Subcellular localization annotation: CTP_CleavageSite=47; ConfidenceScore=5.30e-01
MAGLEVVAAAAGSHCISARLFLWVKSACSSSFHRQPSIAATRRPQCRTGHRRASAPHLPARFESLLLSPVPIWLSTCYSAVGGLSDQIRELRESIELPLMNPELFLRVGIKPPKGVLLYGPPGTGKTLLARAIASNIDANFLKVVSSAIIDKYIGESARLIREMFNYAREHQALKRSWIALGHKTSTAAECRRIDALGASGGEKGTVAWRAGHVLGGVRGLLPASLSGSGGAAERAGHGGAGRPAGRKRRAAGREECYGEGEGGDGEGTGG

SEQ ID NO: 68322 - protein, 319 aa, Zea mays
  Coding DNA Sequence Number=SeqID_26543
MEEDDIGLTTIVHEGLANFPACYIVADDHGIDVAIGSLAGIVGSDCMPLADVETMVGSKTCIHEVDLIHAPFPLGTYHLLSAGSFGSSCDGCLRVDVAVVVAKYCGFGAAAKAVAFAPKFWSFLCVKAPLACIVLRPCDNGGPRTRDNSVRMSACGMYPWMLRRNFSRRRSHYDLVAEREIRGVLHYNSLECLVSQRSNGSLAPTIDSAKSNIDEQCRAEVRKHQTVRCGTGLSGVAPDYSVQLEDKVLQWSTALNPNGYADVACTGQCTVPVRWRTGLSDHAKREIATGEKPVESGRTLSRESNNKYKEESSSSIKSH

SEQ ID NO: 68323 - protein, 1032 aa, Zea mays
  Coding DNA Sequence Number=SeqID_26544
  Gene Ontology: Biological process=pollen maturation
  Homolog annotation: Hit_ID=Q66VB0; Match level="QueryCoverage=98%, HitCoverage=99%, E-value=0.0, Identity=67%"; Hit description=No pollen
  Pfam annotation: Domain name=C2; Domain location=32-112; Score=99.5; E_value=1e-26; Accession=PF00168.20; Description=C2 domain
  Pfam annotation: Domain name=C2; Domain location=624-702; Score=51.4; E_value=3e-12; Accession=PF00168.20; Description=C2 domain
  Pfam annotation: Domain name=GRAM; Domain location=732-798; Score =27.3; E_value=5.3e-05; Accession=PF02893.10; Description=GRAM domain
  Pfam module annotation: Pfam domain module=C2::C2::GRAM; Domain location=32-112::624-702::732-798
  Subcellular localization annotation: CTP_CleavageSite=63; ConfidenceScore=5.08e-01
MSLPSMTKPGRNSTTSVEAATESALRVTPMKLLVRVVEARGLPAVHLNGSSDPFVKLKLGKRRAKTAVVKRSLSPAWDEEFSFLVGNVAEELVVSVLNEDKYFSNDLLGQVRLPLSQVMETDDLSLGTQWYQLQPKSKKSKKKCRGEVCLHVSLSTRTHVSEESQSVPHPASDDLASSSDSTIEHKTLSTTYSCIDLSAVPSIERASRSSFERFPSSILEQPDRSSVEDLAAPDPGGPAAAADTDAMPTPSSVVEVLSRYFFRKPENATVQQVQHSVASDTTDHPVVDRQLQEPNASSSEDREIPERVTVPEPSLDELLKVMESKDQGSEMPAALPGGTLVDESYVAAPTELNSLLFSASSDFWPAVAELQGTSGFQIEPWKLDSSESFVQRTLSYTKAASKLVKAVKATEEQKYLKAAGNSYAVFSVVSTPDVPCGNCFKVEILYCVTPGPQLPSEEQTCHLTVSWRVNFVQSTMIKGMIESGAKQGMAEGFAQFSEVLSQKLKTAELDDANSNKEKILASLHAQKESCWRLVVRFLGNFTFIFSVAIALYVIAHLHLSKPDVMHGLEYFGLDLPDSIGEVVVCAVLILQGQNIVKVTRRFLSAWKQRGSDHGVKAHGDGWLLTVALIEGTGIIATGSSDLFDIYVVFTCNAKRKTSSIKFQTSDPKWNEIFEFDAMDDPPSRMDVAIYDSSGQCVIGHTEVNFLKNNLSELTDIWLPVSGKCDQASNPRLHLRIFLNNSRGTEVVMNYLAKMGKEVGKKGRLFFSPRIVGFYSNIFGHKTKFFFLWEDVDDIQVIPATLSIGSPSLMIILRKDRGLEAKHGAKGTDHHGRLKFVFQSFVSFNDAYRIITAIWKIRALSPEQKGEATEKDEVKELLPEEAGTLFTNADVKMSEIFSSVLSVDQRQTSYKLDKNLSRHGGEAATTEQKYSLVNQDGWAIEKVMTLQGVLLADHFNLQMKYCITNVPSKPNTCSVLVLLGIAWLKSTKQQKKVTKSIISNTSNGLKELFAEVEKELTSSSSSHPNVAAGPTTA

SEQ ID NO: 68324 - protein, 531 aa, Zea mays
  Coding DNA Sequence Number=SeqID_26545
  Gene Ontology: Mol. function=RNA-directed DNA polymerase activity; Cellular component=mitochondrion; Biological process=RNA-dependent DNA replication
  Homolog annotation: Hit_ID=UPI00004C1733; Match level="QueryCoverage =99%, HitCoverage=38%, E-value=0.0, Identity=86%"; Hit description =UPI00004C1733 related cluster
  Pfam annotation: Domain name=RnaseH; Domain location=213-340; Score =4.3; E_value=2.3e-05; Accession=PF00075.14; Description=RNase H
  Pfam annotation: Domain name=rve; Domain location=439-531; Score= -5.9; E_value=0.018; Accession=PF00665.16; Description=Integrase core domain
  Pfam module annotation: Pfam domain module=RnaseH::rve; Domain location=213-340::439-531
MGHIKDLKGVQRVMGCLAALSRFISRLGKKGLPLYRLLRKTERFTWTPKAEEALGNLKALLTNAPILVPSAAGEALLIYVAATTQVVSAAIVVERREEGHALLVQRPVYFISEVLSETKIRYPQILKLLYAVILTRRKLRHYFESHLMTVVSSFPLGEIIQCREASSRIAKWAVEIMGETISFAPRKAIKSQVLTDFVAEWVDTQLPTAPIQPELWTMYFDGLLMKTGAGAGLLFISPLGKHLRYVLRLHFPASNNVAEYEALVNGLRIAIDLGVRCLDACGDSQLVIDQVMNNSHCRDPKMEAYCDEVRRLKDKFYGLELNHIARRYNETADELAKIASGRTKVPPDVFSRDIHQPSVKIDDTPEPEEASAHPEEASSQPEVSSAAEAPRALVGNAFRQGFYWPTTVADATRIVRSCQGCQFYARQTHLPAQALQTIPITWSFAVWGLDLVGPLQKAPGGFSHLLVAIDKFSKWIEVRPLTSIRSEQAVAFFTNIIHRFGVPNSIITDNGTQFTRKKFLDFCEDHHIRVD

SEQ ID NO: 68325 - protein, 247 aa, Zea mays
  Coding DNA Sequence Number=SeqID_26546
  Gene Ontology: Mol. function=protein serine/threonine kinase activity; Biological process=protein amino acid phosphorylation
  Homolog annotation: Hit_ID=Q6Z0A7; Match level="QueryCoverage=68%, HitCoverage=58%, E-value=1e-19, Identity=35%"; Hit description=PPR protein-like
  Pfam annotation: Domain name=PPR; Domain location=100-132; Score=7.7; E_value=0.91; Accession=PF01535.11; Description=PPR repeat
  Pfam annotation: Domain name=PPR; Domain location=30-64; Score=16.0; E_value=0.095; Accession=PF01535.11; Description=PPR repeat
  Pfam annotation: Domain name=PPR; Domain location=65-99; Score=30.1; E_value=7.8e-06; Accession=PF01535.11; Description=PPR repeat
  Pfam module annotation: Pfam domain module=PPR::PPR::PPR; Domain location=100-132::30-64::65-99
MEKASRAGRTVPAKVKFHEMTESGITMDKWTYNIGLSEHFKNRCSVEAILLFEELRAMNVKINIKTLNTMIAGMFQTRRVEEAKDLFASISRSGLVPSVVTYSIMMTNLIKGLVEEADDMFSSMENAGRGSLMFDCKQQSVIQQLLWRKGAPDSDVFEGDASAVCPSGSCRVIQVLEFVDCLQPVINIIPLQVKFIIGNHIHLTSFQLFFPPYKIYDIFKFLPSKIQRIAGASTNDEALFGYRIEMY

SEQ ID NO: 68326 - protein, 217 aa, Zea mays
  Coding DNA Sequence Number=SeqID_26547
  Gene Ontology: Mol. function=glutamine-fructose-6-phosphate transaminase (isomerizing) activity; Cellular component=cytoplasm; Biological process=carbohydrate biosynthetic process
  Homolog annotation: Hit_ID=Q2RAY0; Match level="QueryCoverage=40%, HitCoverage=12%, E-value=2e-29, Identity=86%"; Hit description =Glucosamine-fructose-6-phosphate aminotransferase, isomerizing family protein, expressed
MTAINIQNPRLLIKEMEVGGEVLDTPRGAYGTSPWPICCDRMKDGGVLVGGLKEYLKTIRRCRKGWVLFYWLWNKLQCCLSCKTLFVEELTGIYKSNSSNGDDGVGYRIRPIIYLLELEGKLSSVDLTTFQQAAVGDPAAPLAQGDAADSDVLEGGRHRAAVCPSGSCRVIEVPEVACCLQPVINIIPLQLLAYNLTVLQGFDVDQPRNLEKSVTTQ

SEQ ID NO: 68327 - protein, 69 aa, Zea mays
  Coding DNA Sequence Number=SeqID_26548
MAPGGDCCLFGNTNTGTPRAESEEQQRRDELTCGTAAPVRRSTPGRLAQRGDLGAIARGGSSSGAVGGE

SEQ ID NO: 68328 - protein, 1054 aa, Zea mays
  Coding DNA Sequence Number=SeqID_26549
  Gene Ontology: Mol. function=protein binding; Cellular component =membrane; Biological process=defense response
  Homolog annotation: Hit_ID=Q6YYL2; Match level="QueryCoverage=96%, HitCoverage=98%, E-value=1e-148, Identity=34%"; Hit description =Putative RGH1A
  Pfam annotation: Domain name=LRR_1; Domain location=555-575; Score =2.1; E_value=1.2e+02; Accession=PF00560.23; Description=Leucine Rich Repeat
  Pfam annotation: Domain name=LRR_1; Domain location=600-621; Score =9.9; E_value=4; Accession=PF00560.23; Description=Leucine Rich Repeat
  Pfam annotation: Domain name=LRR_1; Domain location=623-644; Score =8.6; E_value=7.1; Accession=PF00560.23; Description=Leucine Rich Repeat
  Pfam annotation: Domain name=LRR_1; Domain location=695-719; Score =0.7; E_value=2.1e+02; Accession=PF00560.23; Description=Leucine Rich Repeat
  Pfam annotation: Domain name=NB-ARC; Domain location=149-450; Score =156.4; E_value=7.6e-44; Accession=PF00931.13; Description=NB-ARC domain
  Pfam module annotation: Pfam domain module=LRR_1::LRR_1::LRR_1::LRR _1::NB-ARC; Domain location=555-575::600-621::623-644::695-719::149 -450
MTSLALKLGDLLMEEYVVQKGLKPDIESLSRELVMMNAALIDASRVPPDQLTEVEKLWARKVRDLSYDMEDAVDDFILRVAGGDDSAADSKFFKKTLAMVKDVMSMKKFKDRRQISDKVKDIKKLSNELAELRAKYTVRGVGADLAASTGIDPRVINLYKKETDLVGIKKSRNKVIRMLSMETKDDDALESHQALKIVSIVGVGGLGKTTLAKTVHDMLKKQFDCSAFISIGRTPNLNRTFEKMLLKLDREYKQVDMARWDLEQFKNELDEFLKDKRYLIVVDDIWDVDSWEAIRYALKDNNCGSRIIMTTRNFGIVTKLEEVYRLKPLSNANSKKLFYKRIESQEGESLDGELSSKIIHKCGGIPLAIIAIASLLVERSREEWSEVYDKIGLGNEDNTTKIMSYSYYDLPPYLKPCLLQLSIYPEDCIIDTNSTIWKWIGEGLVHLEKEEGSLFKVGERYFKELVNRSMIQPTEDKNDRFVEGFRIHDIVFDLICKLSKDEDFITISGQHSSRDSLRREKKTCVPRSDCKLRRLAVRNQRVQRFPEETIDMPEVLRSLSIIDCNIEVMAPIDSFRVCRVLHLGKSYVPISLKHLGKLLHLKFLEIVYTPIDELPKEIGHLRSLQTLILDRTGLDELPPVVCSLTRLMCLIAQGFERLPADRMGNLTSLEELRLRRVVGRSATQALVAELGKLTRLRVVDITFSEQLEESLQEALVQSLSNLRGLQELTLLFKMTRWGSDMWGDWEPPRQLRRLIIEGIIVFSRQPRWINRSCLPRLCYLSLMVHTLEAQDLDNLARLPELQYLTLDGLSWPPRYTVGPDDFRNLRFCKVGTTFEFRKGAMPRLEVLQFRVFAGYYCWAYNGVPFEQFPTKDLDLDLDNVLLLQQVIVKVNCVGATVTQVEEVEAVVMRAVENHANRPTIKMNRAYEIAILSDEGREALLRRHIEKDCCVRTMKDKSDAFFISQLRRYRHLQKAIIFIDCSGASMCEVQKVEAAFRHAAEVHPNHPSIELIRTNTDGMASSSSDHPNTEGLPPCHVILPFLASSIKRDLIESSI

SEQ ID NO: 68329 - protein, 1047 aa, Zea mays
  Coding DNA Sequence Number=SeqID_26550
  Gene Ontology: Mol. function=protein binding; Cellular component =membrane; Biological process=defense response
  Homolog annotation: Hit_ID=Q6YYL2; Match level="QueryCoverage=85%, HitCoverage=88%, E-value=1e-133, Identity=35%"; Hit description =Putative RGH1A
  Pfam annotation: Domain name=LRR_1; Domain location=448-468; Score =2.1; E_value=1.2e+02; Accession=PF00560.23; Description=Leucine Rich Repeat
  Pfam annotation: Domain name=LRR_1; Domain location=493-514; Score =8.2; E_value=8.5; Accession=PF00560.23; Description=Leucine Rich Repeat
  Pfam annotation: Domain name=LRR_1; Domain location=516-537; Score =6.9; E_value=15; Accession=PF00560.23; Description=Leucine Rich Repeat
  Pfam annotation: Domain name=NACHT; Domain location=93-242; Score= -39.0; E_value=0.063; Accession=PF05729.3; Description=NACHT domain
  Pfam annotation: Domain name=NB-ARC; Domain location=46-347; Score =178.9; E_value=1.3e-50; Accession=PF00931.13; Description=NB-ARC domain
  Pfam module annotation: Pfam domain module=LRR_1::LRR_1::LRR _1::NACHT::NB-ARC; Domain location=448-468::493-514::516-537::93 -242::46-347
MSMKKFKDRRQISDKVKDIKKLSNELAELRAKYTVRGVGADLAASTGIDPRVINLYKKETDLVGIEESRDKVIRMLSMGTKDDDAHESHQDLKIVSIVGVGGLGKTTLAKTVHDMLKKQFDCSAFISIGRTPNLNRTFEKMLLELDREHKQVDMARWDLEQFKNELDEFLKDKRYLIVVDDIWDVDSWEAIRYVLKDNNCGSRIIMTTRNSGVVTKVEEVYRLKPLSTENSEKLFYKRIESQEGESLDGELSSKIIHKCGGIPLAIIAIASLLVERSREEWPEVYDKIGLGNEDNTTKIMLYSYYDLPPYLKPCLLQLSIFPEDCFIDTKAVIWMWIGEGLVHLEKEEGSLFEVGERYFKELVNRSMIQPIEEKYHWFVERFCIHDIMFDLICKLSKDEDFITLSGQHSSQSLQSLFNLRSDCKLRRLAVRNQRVQRFPEETMDMPEVLRSLSIIDCNIEVMAPIDSFRVCRVLHIENNYVPISLKHLGKLLHLKFLEIFDTTIDELPREIGHLRSLQTLVLVSTGLDELPVAVCSLTRLMCLIAYGFERLPADRIGNLTSLEELQLHRVVGRSATQDLVAELGKLTRLRVVRITFSEQLEESSQEALVQSLSNLRLLQELVLFSEMPERGSDMWGDWELPRQLRRLIIEGIVFSRQPRWINRSCLPRLYSLYLMVHAVEAQDLDNLARLPELQYLMLFGFSWPPRYTVGPDDFRNLRFCEVGTTFEFRKGAMPRLEVLRFGVCVPFEQFPTKDVIEDLDFDLDNVILLQQVRVKVNCAGATVTQVEEVEAVVMRAVENHANRPTIKMDRVYEQNILSDEEREALLQRHIEKDCCVRTMKDKSDAFFISQLRRYRHLQKAIIFIDCSGASMCEVQKVEAAYRHAAEVHPNHPSIELIRTNTDGMASSSSDHPNTEVNIRMILSLYLNSRCLNEVIILDGDKYGQQRVAWRSIWVSGLFFYRSGARRPALCICRKAVTTDQWTESGGAAECTGLWRLKQIVSVFEILSRRMRLKQIGEAKELPSNILDNKEKTLYKNWHKKGANTKKH

SEQ ID NO: 68330 - protein, 63 aa, Zea mays
  Coding DNA Sequence Number=SeqID_26551
MAGKDGGAVITHMAGNDEAAVNQVRDLIKCAGVTLQPALFRDWGKSKNKQRRSENQPGPGVFT

SEQ ID NO: 68331 - protein, 118 aa, Zea mays
  Coding DNA Sequence Number=SeqID_26552
MRFILTRAINSSYAATVGSWLLPGYHKGETGLIKRVIRSQNRVIVEGKNLVICRPYMFFPSLTFGIRAADNNKSLDTSRLQTQANGLATAKDHFYNVLIELVLKRSYDDKAGIGMPDL

SEQ ID NO: 68332 - protein, 145 aa, Zea mays
  Coding DNA Sequence Number=SeqID_26553
  Subcellular localization annotation: CTP_CleavageSite=73; ConfidenceScore=5.45e-01
MPGRLLRARGIKSRSSWASRLLSLLSPPSPIASYPNAVALRYRHTRRSRSSRRCLGFLPPALPGVRTEEIEVRQRVVVACARTPTLGGHRSLVNFSPEFSGAVKPPIGVNRIPHGTIDDEQATVETEVQQVEVAEQELVEGKLCP

SEQ ID NO: 68333 - protein, 74 aa, Zea mays
  Coding DNA Sequence Number=SeqID_26554
MGVIGDPGRSSSIELVEELEEDLRMLEQKSREYEQTWNTLIADANAGELICAGRKTRGYGGQPPELSPSEDLFT

SEQ ID NO: 68334 - protein, 63 aa, Zea mays
  Coding DNA Sequence Number=SeqID_26555
MGQDRLAPAYGAPDYRTVSGAQAGAPNELAALGKTQRPRLKFIGLPDHGDKQIQRTTAANPNG

SEQ ID NO: 68335 - protein, 89 aa, Zea mays
  Coding DNA Sequence Number=SeqID_26556
MGSAGIGKGVLWGNCSSEFNNRAEPQFVTDRAPKHAILVLHVATGRLEVSAVEWVIAVVHKWRRRADEWGESHRAGVCIEEDKFWAAGS

SEQ ID NO: 68336 - protein, 409 aa, Zea mays
  Coding DNA Sequence Number=SeqID_26557
  Gene Ontology: Mol. function=oxidoreductase activity; Cellular component=cytoplasm; Biological process=lignin biosynthetic process
  Homolog annotation: Hit_ID=Q6ERW5; Match level="QueryCoverage=87%, HitCoverage=98%, E-value=1e-136, Identity=68%"; Hit description =Putative cinnamyl alcohol dehydrogenase
  Pfam annotation: Domain name=ADH_N; Domain location=83-200; Score =114.5; E_value=3e-31; Accession=PF08240.2; Description=Alcohol dehydrogenase GroES-like domain
  Pfam annotation: Domain name=ADH_zinc_N; Domain location=231-366; Score=91.9; E_value=1.9e-24; Accession=PF00107.16; Description=Zinc -binding dehydrogenase
  Pfam module annotation: Pfam domain module=ADH_N::ADH_zinc_N; Domain location=83-200::231-366
MDYMLTHCHIGPSTILPPQISPGRQQQLCHIIVASSSPFHFIIPPELVAAMEEQGGQAALGWAARDDSGVLSPYSFSRRVPKDDDVTIKVLYCGICHTDLHVIKNDWRNAMYPVVPGHEIVGVVTGVGGGVTRFKAGDTVGVGYFVGSCRSCDSCGKGDDNYCAGIVLTSNGVDHAHGGAPTRGGFSDVLVASEHYVVRVPDGLALDRTAPLLCAGVTVYSPMMRHGLNEPGKHLGVVGLGGLGHVAVKFGKAFGMKVTVISTSASKRQEAIENLGADEFLISRDEDQMKAATGTMDGIIDTVSAWHPITPLLALLKPLGQMVVVGAPSKPLELPAYAIVPGGKGVAGNNVGSVRDCQAMLEFAGKHGIGAEVEVIKMDYVNTAMERLEKNDVRYRFVIDVAGSLGSAA

SEQ ID NO: 68337 - protein, 101 aa, Zea mays
  Coding DNA Sequence Number=SeqID_26558
  Subcellular localization annotation: CTP_CleavageSite=55; ConfidenceScore=5.08e-01
MGALDNHRSLSDNVMKASGQPMSIKLTSLAKTSRNSTEDIFQAQMLLNYSLQAPPSSQDWAGALHHPVGVFSPTLGAPGYRFNGILENKNDTIRSEKLSGG

SEQ ID NO: 68338 - protein, 79 aa, Zea mays
  Coding DNA Sequence Number=SeqID_26559
MAGGSGHGVLLAGGELSHGKRREGEGDAAAVFGLKNWAQGTQTPWTGKCAGLGAMAEGAIHGKWSSRPRRRGQGADASR

SEQ ID NO: 68339 - protein, 161 aa, Zea mays
  Coding DNA Sequence Number=SeqID_26560
MSGSALRVPGAREAAKAEVGPHEPRWGTALPRAGAARQGQDGRAQGTGTATQGPREPHAWGGAGWPRAGGAEGAAPRVTGDCIGVGGQGGRAAGVKGATPVGPKGPRHWGRGAALGGEGAAPLGGASGGEEEGARREGKGRKRKRERERGGELTLGIQIRR

SEQ ID NO: 68340 - protein, 265 aa, Zea mays
  Coding DNA Sequence Number=SeqID_26561
  Gene Ontology: Mol. function=pseudouridine synthase activity; Biological process=RNA processing
  Homolog annotation: Hit_ID=Q69K07; Match level="QueryCoverage=78%, HitCoverage=34%, E-value=3e-39, Identity=51%"; Hit description =Ribosomal large subunit pseudouridine synthase C-like
MPPRWRVGRKGALVPALTVGGVQRGIHGEERVRPRDGRSREAGGGKVVLQDGRSERLTVCAGSNTASVQDALTEYRVIESFPQDIKSDVDRNKFVQVMGVGIGSVSSKICGAVKLLLVKSTTICLLMILGYTWLELFPRTGRKHQLRVHCAEVLGTPIVGDYKYGRQAHQNWMPLPMPQTIDKEMLKKRKLPFGLTLGGGSVAEQQPQLHLHCKQMILPDISAAMQQLRSSDADHDFSDLEKLSFVAPLPLHMQLSWKILLSVGK

SEQ ID NO: 68341 - protein, 271 aa, Zea mays
  Coding DNA Sequence Number=SeqID_26562
ARVRPFGPRATAGACLPAVAIGTAADLFPASDQRAASGVCHPAFFAFAASTAGGLLPTTADLRAGTSSPPVHSCFRPPCSSTHAWDAPPPSPGLGTLSGAPPAALAVAQHAAASYDYVAPCSGPYADMTPYGTPLLLTPSPGSSVVSSSLHRATLPLVDVVTSCAATQPHSLLGTAPSGWGPFTSHPPAMGPFPSPERRLCWPLVARPPHLRALLHPRSRLCIRYLLPAPRGLPLPWPSVPPLFDVAGQDFVYLVPFFIRAMDGGDRAFIE

SEQ ID NO: 68342 - protein, 158 aa, Zea mays
  Coding DNA Sequence Number=SeqID_26563
  Gene Ontology: Mol. function=porin activity; Cellular component =integral to membrane; Biological process=transport
  Homolog annotation: Hit_ID=Q10LH9; Match level="QueryCoverage=97%, HitCoverage=24%, E-value=4e-50, Identity=55%"; Hit description =Nucleoporin interacting component, putative, expressed
MEILLRDGGIQLLLGPSGMGEGELKKYIMDWRSRQQFLLEAAHRCQEVGLYDKHSREDLISEQQTVLRHLEAILHIYRLARAGQTVDALRETIRLPFLHLDPKAPNVTVDIFRNLSPHVQACVPDLLMVALNCIDNVRDTDGTLRAVKTKVVQLMSFS

SEQ ID NO: 68343 - protein, 76 aa, Zea mays
  Coding DNA Sequence Number=SeqID_26564
  Subcellular localization annotation: CTP_CleavageSite=49; ConfidenceScore=5.07e-01
MGWRRFASEGQGQRAPDPPSLPTTTMVARWWSSLKRRKASGGLKTMLVPAMPSWGLHRGVGEREMCLWAISKYFGD

SEQ ID NO: 68344 - protein, 316 aa, Zea mays
  Coding DNA Sequence Number=SeqID_26565
  Gene Ontology: Mol. function=RNA-directed DNA polymerase activity; Cellular component=intracellular; Biological process=RNA-dependent DNA replication
  Homolog annotation: Hit_ID=UPI00004C1734; Match level="QueryCoverage =98%, HitCoverage=79%, E-value=1e-114, Identity=72%"; Hit description= UPI00004C1734 related cluster
  Pfam annotation: Domain name=RnaseH; Domain location=203-316; Score= -34.4; E_value=0.093; Accession=PF00075.14; Description=RNase H
MYCYVTMPFGLRNAGATYQRCMNHVFDEHIGRTVEAYVDGIVVKTRKASDLLSDLETTFRCLKAKGVKLNPEKCVFGVPRGMLLGFIVSEQGIEANPEKIASITNMGPIKDLKGVQRVMGCLAALSRFISRLGERSLPLYHLLRKVECFTWTPKAEEALGNLKALLTNAPILVPPAAGEALLIYVAATTQVVDTQLPAAPIQPELWTMFFDGSLMKIGAGAGLLFISPLGKHLRYVLRLHFPASNNVAEYEALVNGLHIAIELGVRCLDARGDSQLVIDQVMKNSHCRDPKMEAYCDEVRRLEDKFYGLELSHIAR

SEQ ID NO: 68345 - protein, 549 aa, Zea mays
  Coding DNA Sequence Number=SeqID_26566
  Gene Ontology: Mol. function=binding; Biological process=protein amino acid phosphorylation
  Homolog annotation: Hit_ID=Q6Z4H7; Match level="QueryCoverage=45%, HitCoverage=57%, E-value=1e-113, Identity=59%"; Hit description =Putative pentatricopeptide (PPR) repeat-containing protein
  Pfam annotation: Domain name=PPR; Domain location=315-349; Score =20.0; E_value=0.0085; Accession=PF01535.11; Description=PPR repeat
  Pfam annotation: Domain name=PPR; Domain location=423-457; Score =22.9; E_value=0.0011; Accession=PF01535.11; Description=PPR repeat
  Pfam annotation: Domain name=PPR; Domain location=459-493; Score=9.4; E_value=0.57; Accession=PF01535.11; Description=PPR repeat
  Pfam annotation: Domain name=PPR; Domain location=495-529; Score =11.1; E_value=0.36; Accession=PF01535.11; Description=PPR repeat
  Pfam module annotation: Pfam domain module=PPR::PPR::PPR::PPR; Domain location=315-349::423-457::459-493::495-529
MGDESSKDDLDYFVALDLSVAECSLRVTPTMVVGTLPRVALGEPRGQRRIGVSKRNVGMLGESSQDIAVPRRRRQMGMKRSHLRNGMRLEEGTRRIILAPTVGSCFGEGGLRDLFGSEELKLMLFNFREADLILKEEQIMASAARFLVVVVVACALLASNNCHAARHLADTAAAPAAAGAVPGLPAVPTLPTVQPVPQVALPPMPAVPAVTVPQMTLPPMPAAPKVAVPLPPNARHPIRAAKADPAPDAPLSFHPSSPRAEVVVTGAGVPDYRFCRSPADRSPPLHSKDIINTLSCGRPGAALAVFRRIPDRSLVSWNTAVDALAGNGDHLAALDLFQEMQRNMPDLAPDAYTVQSVLGACAATGALSLGFYAHALLLRVLGGASPVSRDVLINNSLVDLYGKCGAVELAREVFDRMSERDLASWNTMVLALANHGRIQDSLDLFDRMMRVEGLVPNAITFVAVLSACNHGGLVDEGRRYFAAMVSEHGIRPRIEHYGCMVDILARAGFIEEALDVVARMNCRPDSIIWRSMLDACCKRNAGLELIYVL

SEQ ID NO: 68346 - protein, 160 aa, Zea mays
  Coding DNA Sequence Number=SeqID_26567
MCAYREKTESATRVEVDRAHTLFVDAYRDLSAQTAPFDKSGEEVGTRFLGWLQEELESLTSIVMGLMSYPSLVSCEGSANALSREGYRHFETFDRSNEDFNAGVFQVEDDMLKRSAGALYDRMSGPHGSDVIQERADRELAQAMRDEEVEDLTGLESSVA

SEQ ID NO: 68347 - protein, 130 aa, Zea mays
  Coding DNA Sequence Number=SeqID_26568
MGLMSYASLVSCEGAANALCRERCRHFETFDRSNEDFDAGVFQVEDDMLKRSAGALYDRMWGPHGNDVIRERADRALAKAMRDEEVEDLAGLESSVARKDADLETGAEEQSSLKEGDAEGPATAGTSAWV

SEQ ID NO: 68348 - protein, 188 aa, Zea mays
  Coding DNA Sequence Number=SeqID_26569
  Homolog annotation: Hit_ID=Q6QP54; Match level="QueryCoverage=26%, HitCoverage=18%, E-value=3e-09, Identity=73%"; Hit description =Putative kinase
MGSRHSACSVEAECRDGSRYNDYVYGFGSTMMMVFLDEEMEKAKPWKETSRSSKITTNSRARTRPRLQKTTNSASPDPRVRTQPWPQTMVSASPDPGLGLDLRPRKTDSTSTSEEPPPRPFQGSDRPRHTGAIITLPLASLGYGEQDRRPIWLAPGPPGVKTPTVFNFNLLGFGLGFEASFIFFDFIN

SEQ ID NO: 68349 - protein, 102 aa, Zea mays
  Coding DNA Sequence Number=SeqID_26570
MAPKRAITKATTSIDDAAKAALLAKKKGKAAHADDIPHEAFEDEAVNSNRHRQDNRPTPEGTVRTDSSDGVPRSSGTPASLHPPEVDNIIEDGKILGISAED

SEQ ID NO: 68350 - protein, 45 aa, Zea mays
  Coding DNA Sequence Number=SeqID_26571
MAGKKLWTGPQFLDRSGASAEDSLDSVHTTPGRRVLFQKDAGVLL

SEQ ID NO: 68351 - protein, 137 aa, Zea mays
  Coding DNA Sequence Number=SeqID_26572
  Subcellular localization annotation: CTP_CleavageSite=61; ConfidenceScore=5.46e-01
MDCHPSKLTHDPDSMGKSTGGRTSFIARPKPNGWVRRLVMPTAASADPRRMFDFYLPPMARRSTRTGWKERYRRLGFIGPPAKPGFRLLQRYSGFRGGLWRPRMEERDDELGPYVKGTREAERLGHGSRTSGTDTDK

SEQ ID NO: 68352 - protein, 99 aa, Zea mays
  Coding DNA Sequence Number=SeqID_26573
MGKDKKGRAAKVWTYIRSVEHAGLEGSDESEVSSDEEDSSGSSEEGSDGDDEGDDSSGSGGGDDGNDGGKGGGGGSGGGRGDDDGKGSSSKADGKAPLA

SEQ ID NO: 68353 - protein, 341 aa, Zea mays
  Coding DNA Sequence Number=SeqID_26574
MTKSRAREDGFNSSTANTSTREARWTKSERTDGLGLGQEDDKRAELQNHAREIERRVTRDLSIHAGNLDESELVATTPDQATMHRHECRGIAAPQQQASCEAKLTAGQSDQSARSNRRDPNTTKPRRGSSTRRLGELGTRQKKRSSARREREKQGRAGEKGARNRAGASARGDGRPGAVEGEAERKEPSAGSRGAGGAERELQQGLSAMGTPRAAGAQHWELGEDHGALGRAGPSQRAQPPWEGATRAGAEGARRGTLGRSGWARHGSRHGREPPRWPTSRERERVSMGIEEERDELEMPWRGAREESPASREVRKGELGHGRCERRGGKLWEIGQGDGGA

SEQ ID NO: 68354 - protein, 166 aa, Zea mays
  Coding DNA Sequence Number=SeqID_26575
  Gene Ontology: Mol. function=peroxidase activity
  Homolog annotation: Hit_ID=Q01FV5; Match level="QueryCoverage=61%, HitCoverage=25%, E-value=1e-15, Identity=41%"; Hit description=[C] KOG2873 Ubiquinol cytochrome c reductase assembly protein CBP3
  Pfam annotation: Domain name=Ubiq_cyt_C_chap; Domain location=1-125; Score=-16.0; E_value=5e-05; Accession=PF03981.3; Description =Ubiquinol-cytochrome C chaperone
MWLVLRRLKEEGKDGVKFGQYIYEMYNHDVELRVSKAGVNLLLTKWMKELEKIFYGNIVKYDAAISPEAHQDDLVNVIWRNIYAEEGSEAMDVAAAPAVQRFYVLWKLQIHNPGAGNSQPQPKEAWAMNCRDYSAQHFLEHHDFHAEVIEEHEHQELGVAIGRQAS

SEQ ID NO: 68355 - protein, 97 aa, Zea mays
  Coding DNA Sequence Number=SeqID_26576
MPDAVVEFSRDLDVVDVPKGESPTEPSILSGVCKGYVLPDEPDLADAEMQRLVDTVKGLGSLLAHHYEHEVVLPISSPTAVVPSSDSKGGILPPPTS

SEQ ID NO: 68356 - protein, 346 aa, Zea mays
  Coding DNA Sequence Number=SeqID_26577
  Gene Ontology: Mol. function=protein serine/threonine kinase activity
  Homolog annotation: Hit_ID=Q67YV2; Match level="QueryCoverage=93%, HitCoverage=36%, E-value=1e-43, Identity=33%"; Hit description=MRNA, complete cds, clone: RAFL24-07-B09
MNLFAGVGGGAADGGGTGTALLELTPHKMAVCHLVQVFAPAAQARGRRRAALPLRVPHSPQPPRTLPVYAQPGWPSRIAQSVNVAVDIVSCDDFLEPPLEEFLKQLRAVDDLTNGWFCEQLTSALSALNSPDDLFNFFDKLRGVFTAPEGASAEDVFLDPNSQLGVFLRCCILAFNSMTFEGVCHLLADLVMYCNSADASYDLAEHEDFNSEMGNLMDADIGSHAGIFDKFHQGYASEHHMGESSSTLTRASMSPYDFDNANTFKADDNPTCLRSRWQLEAYLNQQADILEKDPGSVPLNLFNATMTQLQTLAPELHRVQFLQYLNALYHDDYVASLDNLHRYFDY

SEQ ID NO: 68357 - protein, 194 aa, Zea mays
  Coding DNA Sequence Number=SeqID_26578
MRSWGFYGFFSCAHLTPPVHCEDLCHADEAFCFAFGVSGGRMRMALLRKAVTLKSRQKAILSFLKQDKETDLMSIVYETCKAGSAANSLLSGIGEGVVAKNHRTVRWRTGLSGEPATPMPIVGNAISERAWPEPTVTRPHRNVRCAPDSVHCAKGTKDSTVSFARRGKKLGTVHVRWCTGLSGAPTDRRQELPT

SEQ ID NO: 68358 - protein, 189 aa, Zea mays
  Coding DNA Sequence Number=SeqID_26579
  Subcellular localization annotation: CTP_CleavageSite=44; ConfidenceScore=5.30e-01
MAPRMPCDDDGSQPPYGSKRTSARTRQPRQLSFRQAPALLRRPRDHAKWVPRPLRLPRWHVHPEKPFDGDDAEHMQWIYSKIGNDASQFVGPLVLNLLIKRLWTTMLLYITILSNLCVIATDSHCTIFYLVHVDSVAMHGHTPSIPRKTKTTLQFEKWEQFLEVRKGGVVSKRHRDEKLTKLELFYRNS

SEQ ID NO: 68359 - protein, 125 aa, Zea mays
  Coding DNA Sequence Number=SeqID_26580
MRTELGRGTDTGAAHHTAAASTPRSTVRIHARGRERDRDPWFVDRVGRLRLNHVTLDGWPSGQTPRRRYAGLTVERTRQDSSPLFIERLLPFRISGAGKSGLASLDLTRTALRAGAGGLEEEEEQ

SEQ ID NO: 68360 - protein, 744 aa, Zea mays
  Coding DNA Sequence Number=SeqID_26581
  Homolog annotation: Hit_ID=Q2QYH0; Match level="QueryCoverage=71%, HitCoverage=76%, E-value=7e-25, Identity=24%"; Hit description =Expressed protein
  Pfam annotation: Domain name=DUF936; Domain location=1-729; Score =585.1; E_value=6.8e-173; Accession=PF06075.3; Description=Plant protein of unknown function (DUF936)
MASLVPGVLVKLLQHMNTDVKVAGEHRSSLLQVVSIVPALAGSDLFTNKGFYLKVSDSSHATYVSLPEEQHDLILSDKIQLGQFIHVDRLEAATPVPILRGVRPVPGRHACVGTPEDLVVTSSSSFHGSKKAQPSNGTNDASILSLEKETSKLEKINASRKLTGTENKKPMLTKSNSSLSRQALNVIGDKKEAVKSKVKPAITRSTPSSPTSVYSLPASFDRFSNDLKQRNRVKGAEKASSSRLSLLEKAASVLKATSAGRKPSAANSISSSVLSIGSGPKALRRSWEGNTDIKGKGNSESKTAKPDKKSDNKMPMTPRRKSPVDQKVPPKDDSQKAARKSTASAPSDDADKAAKKHIPTVKRTSGVLGNSNVTNLVKIPPNRKKLTDISTSWTSLPPSLAKLGKELLKYRESAQIAAAEAMQEASAAESLLRCLSSYAEVSSTAEEHNPQPAVEKFFTLHAALSRATVITDTLTKSATSAASPDCSAASDAGTVGSATDEETAAVTAERRRRATSWVSAALATDLSAFGIYNLKPVPATVSSPLAVVVVDESAKPATAAATATKSSPSPKSRMSPAKGKARTGAATAAAAALTKTSAPTEWERGEGAEERGELAKRLGEESRGWFLGFVERFLDSDVAASAPWDRERAARMLPQLKRVNDWLGEIAKRSETQSLPPADADGEATTTSTAPVPPNDGCGVPEETIERLRKKIYEYLLTNVDSAAAMLGGGGGSAAAALTNGKKG

SEQ ID NO: 68361 - protein, 276 aa, Zea mays
  Coding DNA Sequence Number=SeqID_26582
  Gene Ontology: Mol. function=phospholipase A1 activity; Cellular component=spliceosome; Biological process=lipid metabolic process
  Homolog annotation: Hit_ID=Q6BTJ4; Match level="QueryCoverage=67%, HitCoverage=26%, E-value=3e-14, Identity=39%"; Hit description =Similar to CA1621|CaIFF6 Candida albicans CaIFF6 unknown function
MVRCAVAAAHEQLPPARKDGSGDNEVGVGLVLNFSSTHAVPSARHLATVFSRFGPVKESGQTTLPLWWSSTVETPLRPTPGLGLGLSPGRRRTPTPPDPRARTWAQPWKTANSAPPDPRARTRAQPRKTANSAPPDPRARARAQPRKTVNSAPPDPRARTWAQPRKTANSAPPDPRARTRTQPRKTANSAPPDPRARTRAQPRKTTNSASPDPRARTRARPWKTTNSASPDPRARAQAQPQRTTNSASSDPGARTRPRPRKTDSTSTSEEPPPRPT

SEQ ID NO: 68362 - protein, 161 aa, Zea mays
  Coding DNA Sequence Number=SeqID_26583
MDGLDLGFNVTTGDLIFTVQQAINAFDSGIDGRIVFFFLHTSRKGPSRQCHWVFASGSTARTPFGPAQRGHGEPRQRGREWDEPARVSCARWECAEQHAETEARARHGDSIIAVDARQRQLAEDPRTTGGRTCRDPADLGFVFTTVGKRDDKRDPTLAWTI

SEQ ID NO: 68363 - protein, 412 aa, Zea mays
  Coding DNA Sequence Number=SeqID_26584
  Gene Ontology: Mol. function=calcium ion binding; Cellular component =endomembrane system; Biological process=endosome transport
  Homolog annotation: Hit_ID=Q653F5; Match level="QueryCoverage=92%, HitCoverage=82%, E-value=0.0, Identity=80%"; Hit description =Putative receptor-mediated endocytosis 1 isoform I
  Pfam annotation: Domain name=Dynamin_N; Domain location=130-275; Score=79.1; E_value=1.4e-20; Accession=PF00350.13; Description =Dynamin family
  Pfam annotation: Domain name=MMR_HSR1; Domain location=128-276; Score= -10.9; E_value=0.0099; Accession=PF01926.13; Description=GTPase of unknown function
  Pfam module annotation: Pfam domain module=Dynamin_N::MMR_HSR1; Domain location=130-275::128-276
MEIGQYPASGCSKEHQKIYQEWFALADADLSSLNPPVMEGLDALLAKSKHLVKRVDPEMDGYPQEQSPLTNKWFSSKSSKKIPLTAVTSVIDGLKKLYIEKLKPLEVTYKFNDFVSPLLTSSDFDAKPMVMLLGQYSTGAHIGPEPTTDRFVVVMSGSDERTIPGNTIAVQADMPFSGLTTFGTAFLSKFECSQMRHPLLEHITFVDTPGVLSGEKQRTQRSYDFTGVTSWFAAKCDLILLLFDPHKLDISDEFKRVIGSLRGHDDKIRVVLNKADQVDTQQLMRVYGALMWSLGKVLNTPEVSRVYIGSFNDKPVNESAVGPLGKELFEREQDDLLSDLKDIPKKACDRRVQREYHLPSGDFPYVEHFKEVLSGYSFDKFEKVKPKMVQAVDDMLGYDIPELLKNFRNPYE

SEQ ID NO: 68364 - protein, 525 aa, Zea mays
  Coding DNA Sequence Number=SeqID_26585
  Gene Ontology: Mol. function=nucleoside-triphosphatase activity; Cellular component=membrane
  Homolog annotation: Hit_ID=Q69XZ5; Match level="QueryCoverage=75%, HitCoverage=62%, E-value=1e-117, Identity=53%"; Hit description =Putative transcriptional regulator
  Pfam annotation: Domain name=UPF0261; Domain location=128-485; Score =322.3; E_value=8.7e-94; Accession=PF06792.2; Description =Uncharacterised protein family (UPF0261)
MKSLRLVLSGRVHLTESPLNRHSYRLQSYVQPSGPEFSTTAAGHLLRPPPASPAPITSPARLRPSPRPPTATAAREGVSGSGHLLRPACLPDTSATRQALPDARVGRRRPPADARGDLARSAPSRCEVMEVLCIGTADTKFEELLFLAAQLRSALAASGSDSKVQVSIVDVSTTEKTTANDFKDIIFIPRNTILSCHLGVDQHNLPDNRGEAIALMSKALQSFLKKRYDSGMLVGAVGLGGSGGTALIAPALRLLPLGVPKLIVSTVASGHTTPYVETSDLVLFPSVVDICGINSVSRVILSNAAAAFAGMVHGILSASNESDETSTKPTVGITMFGVTTPCVNAVKDRLNKEGYETLIFHATGVGGKAMEDLVRGGFIQGVLDVTTTEVADHIVGGIMACDETRFDAIIENKIPLVLSVGALDMKGISAIDAPGMPFYDPEATSTLLGERSLLASRQVKLFPYHINDPEFANALVDAFLSMDVQASSSAQPKQDLNIGKSCSGQKISDSSIIWRTPVDFPDAKP

SEQ ID NO: 68365 - protein, 70 aa, Zea mays
  Coding DNA Sequence Number=SeqID_26586
MAELRWHRKNSRRDRERECSTEAANEQGEVDERGTGSKGARACGGGRRTRGRGREVRDGLTGGVRKAQRG

SEQ ID NO: 68366 - protein, 92 aa, Zea mays
  Coding DNA Sequence Number=SeqID_26587
  Gene Ontology: Mol. function=monooxygenase activity; Biological process=electron transport
  Homolog annotation: Hit_ID=Q09J79; Match level="QueryCoverage=66%, HitCoverage=13%, E-value=1e-12, Identity=76%"; Hit description=(+) -abscisic acid 8'-hydroxylase
MTQRTTPWAVGRGFYRLKRKALQHKRTNSIWKHMLGPQAIFFQQGDYHARLRRLVSRAFSPRPSAPPCRPSGPSRCARSAPGTASSSTPSKR

SEQ ID NO: 68367 - protein, 196 aa, Zea mays
  Coding DNA Sequence Number=SeqID_26588
MANVARPTWQRVMCMAKGWSTVQRGRRDALECSPTKDSKTVENRRLKQAIYTQLVVISGQQNYKLDTKHAIDGVVEDAQPPVEIDFHCGPQLPACKNDDFYWPLALAVTKNATVNRFTTATIELLCTSAYGWTSTSMAGGSDVWRLTVLQGRCRANLVVQWSSNLRVVFRAQSGASRSVEGKRGTVWRGVEIERAF

SEQ ID NO: 68368 - protein, 71 aa, Zea mays
  Coding DNA Sequence Number=SeqID_26589
MKLTRELGMTARGTSEGKTVAHTAREALRDEARQCGRWGRCGRPEQHDIREEKSGLMISQKGRDPKRRSTR

SEQ ID NO: 68369 - protein, 46 aa, Zea mays
  Coding DNA Sequence Number=SeqID_26590
MVLLLFLRLGLLFLRVTLGSQKEMPVGVAEELQEVPAEEVESEAEA

SEQ ID NO: 68370 - protein, 62 aa, Zea mays
  Coding DNA Sequence Number=SeqID_26591
MGGGGTKLERMNRAKAGKTNETSDDGENDVLILLLLLLLLLLLLVEMIFLCDRVSLILIEGC

SEQ ID NO: 68371 - protein, 150 aa, Zea mays
  Coding DNA Sequence Number=SeqID_26592
  Subcellular localization annotation: CTP_CleavageSite=48; ConfidenceScore=5.19e-01
MAGFLGSSSYAVDPKQMKHLIAGDGDASRRDRRRGSGRRGGSGELLSRSAARERSFFPYRRRDWKQSGLLAQLGRGGGFGEGGEGGAVLWREWGESYSYNYNKEEGNMRFGGGARWRSGGGGRVGWRWRCGGAGTGSARVSRIEEKRVGR

SEQ ID NO: 68372 - protein, 188 aa, Zea mays
  Coding DNA Sequence Number=SeqID_26593
  Homolog annotation: Hit_ID=Q6IEK9; Match level="QueryCoverage=23%, HitCoverage=18%, E-value=8e-13, Identity=73%"; Hit description=WRKY transcription factor 72
  Pfam annotation: Domain name=WRKY; Domain location=128-185; Score =23.6; E_value=9.1e-07; Accession=PF03106.6; Description=WRKY DNA -binding domain
  Subcellular localization annotation: CTP_CleavageSite=52; ConfidenceScore=5.17e-01
MENYHMLFGTTATHAQPSSAAGTPSSYNFIATSSASGLRRDHDRGQHSGHVHAAGGSSSPSSFFVAERLSHNDDSSKDGGGGPGPAAAGSGEKEAEADDRPAAARRKGEKKERRPRFAFQTRSQVDILDDGYRWRKYGQKAVKNNNFPRCFLPLAQSKCSIFSRQRDNDYYAMHVWRSILHGWIGLWF

SEQ ID NO: 68373 - protein, 88 aa, Zea mays
  Coding DNA Sequence Number=SeqID_26594
  Homolog annotation: Hit_ID=Q1SJY8; Match level="QueryCoverage=38%, HitCoverage=10%, E-value=2e-11, Identity=76%"; Hit description =BTB/POZ; TRAF-like
MSGGGPGGACGPDSRVETISRLAQWRIDTFGPCSYRRSDPFKLGIWNWSALLPPVPPDPDSCCSCNSTNPPVAIVPGGNIFYFPPLQG

SEQ ID NO: 68374 - protein, 315 aa, Zea mays
  Coding DNA Sequence Number=SeqID_26595
  Gene Ontology: Mol. function=zinc ion binding
  Homolog annotation: Hit_ID=Q5N959; Match level="QueryCoverage=79%, HitCoverage=81%, E-value=2e-45, Identity=57%"; Hit description =Putative NEW1 domain containing protein isoform
MAKHKQRRVYQVWKGKNIILCGGRLIFGPDAKATLISFALIAIPVLVFCVFVARHLIHIFPAYNAGYAILAATIGLTIYRNYRYFFCFVASAAVLCIYVCAMCGLYIRLLMNRGHYSVGKAIKESPASLAVKAYCFICFWFVGGLTGFHSYLIVTNKTTYENIKYKYSNQPNVYDHGCVLNCHEVLCKKRKPSKINLRAIVQEEQEVARPQTSSSNIREDEAPHRPRAKVEDDLEMGLDILKTTGRRTDKFSDEELEPATGSNGIEYRMPDSETEIPVTRTKTEIFNEVRDLDLSVSNGAQSSSPEQEQHPDKLC

SEQ ID NO: 68375 - protein, 82 aa, Zea mays
  Coding DNA Sequence Number=SeqID_26596
MALSSQWSFLLGLASLLLLSRSCECYEDYATTHLFSKSLGRNQPKPMAIFRGTYWLRYSVLLQHEDVTKENTRILEIFARYG

SEQ ID NO: 68376 - protein, 126 aa, Zea mays
  Coding DNA Sequence Number=SeqID_26597
  Gene Ontology: Mol. function=protein disulfide oxidoreductase activity; Cellular component=cytoplasm; Biological process=glycerol ether metabolic process
  Homolog annotation: Hit_ID=Q39362; Match level="QueryCoverage=66%, HitCoverage=70%, E-value=6e-13, Identity=44%"; Hit description =Thioredoxin H-type 2
  Pfam annotation: Domain name=Thioredoxin; Domain location=23-125; Score=27.2; E_value=1e-06; Accession=PF00085.10; Description =Thioredoxin
MSLTTQGNSVWASPATGRWWIYYIVNDTDQLSKALNRHDHLVVFMFSAEWNEPCKAMKKPFRDMARARKMQAVFCLVDIDKLKDAVAQQFQVEALPTFVLYKNGIQKERVVGAKVDDLRAAIDRNI

SEQ ID NO: 68377 - protein, 125 aa, Zea mays
  Coding DNA Sequence Number=SeqID_26598
MARRKGGKGKRVKKDEGEKRKHPLTSPLKDFSDSEFSEEQFSFEGEESPSLREGLEGSDDLEEDSLGEDDSEEEEGGGSEDGSGYEGGDEGGNSDSGWGSSSGSSSYDSGDEGNSSGGKWQWQGQ

SEQ ID NO: 68378 - protein, 395 aa, Zea mays
  Coding DNA Sequence Number=SeqID_26599
  Gene Ontology: Mol. function=protein binding; Cellular component =nucleotide-excision repair complex; Biological process=transcription- coupled nucleotide-excision repair
  Homolog annotation: Hit_ID=Q6Z0X1; Match level="QueryCoverage=91%, HitCoverage=92%, E-value=1e-158, Identity=70%"; Hit description =Putative cockayne syndrome 1 homolog
  Pfam annotation: Domain name=WD40; Domain location=136-193; Score =14.5; E_value=0.4; Accession=PF00400.22; Description=WD domain, G -beta repeat
  Pfam annotation: Domain name=WD40; Domain location=268-306; Score =23.8; E_value=0.0006; Accession=PF00400.22; Description=WD domain, G- beta repeat
  Pfam annotation: Domain name=WD40; Domain location=34-73; Score=18.7; E_value=0.022; Accession=PF00400.22; Description=WD domain, G-beta repeat
  Pfam annotation: Domain name=WD40; Domain location=355-394; Score =1.4; E_value=25; Accession=PF00400.22; Description=WD domain, G-beta repeat
  Pfam annotation: Domain name=WD40; Domain location=93-132; Score =28.3; E_value=2.7e-05; Accession=PF00400.22; Description=WD domain, G-beta repeat
  Pfam module annotation: Pfam domain module=WD40::WD40::WD40::WD40::WD4 0; Domain location=136-193::268-306::34-73::355-394::93-132
MWLEEVRRRERGELRARRFEAAARACRTASLALSNRKEFVTPHHGAVNSLQVDLTEGRYLLSGASDGSAAVFDVWNATEYETGFIAKHRNILLVDKQHQNGHKFAISAAVWYPVDTGLFVTASFDQFVKVWDTNSTQVVMEFKMPGKVYTAAMSPIATTHVLIATGSADVQWSASSEWILMSGGCDGAIRFWDIRRAGCFRVLDQSRSQLGKRPLVKSALYKDHTDSLGPSPSARRRTGISKKSSSALRKIQNPTHGHMQQRLHPGLSSSQNRATAHYGAVTGLRTTADGMYLLSSGSDSRLRLWDIDSGCNTLVNFEAMRLQTGKPLQLAVTEDPSLVFVPCMASIKAYNLWSGKTFQTFRGHYELVSCCYYSEQDQEDDDKILSAADEDNWSD

SEQ ID NO: 68379 - protein, 116 aa, Zea mays
  Coding DNA Sequence Number=SeqID_26600
MGRAAGAPGPAVAPAGRSAEAPRLGAPRSQGCRRLPPQEGAAIGRAPPAPGQNDAQGLHGEFSDGLGCPLHRRAPQGLRGYRTTLPLVLEDVTGRMARRLAVEEQKNKDTEKKRAR

SEQ ID NO: 68380 - protein, 90 aa, Zea mays
  Coding DNA Sequence Number=SeqID_26601
  Subcellular localization annotation: CTP_CleavageSite=37; ConfidenceScore=5.38e-01
MAPPSPTPHCCLSRGRSALAPSPHLAAAPRAQPNIVVASTSASGPPQEFRAPPGFEIMSDQQSSILSTMLDNPLHLGTGVFALGLSALFS

SEQ ID NO: 68381 - protein, 857 aa, Zea mays
  Coding DNA Sequence Number=SeqID_26602
  Gene Ontology: Mol. function=potassium ion transporter activity; Cellular component=membrane; Biological process=potassium ion transport
  Homolog annotation: Hit_ID=Q1T6Z3; Match level="QueryCoverage=99%, HitCoverage=100%, E-value=0.0, Identity=81%"; Hit description =Potassium transporter
  Pfam annotation: Domain name=K_trans; Domain location=130-857; Score =1393.4; E_value=0; Accession=PF02705.7; Description=K+ potassium transporter
MDDGGIQEEPPSTRFLTPTRSGGTRWVDGSEVDSSESTPSWSLEDERSAGGVSSNGGAAAASRVSSGAFRRRFGKRPRRVDSLDVESMNVRGAHGHSSKILIFYSRIMNPMAKNSETHFAQEISMLSTLAMAFQTLGVVYGDMGTSPLYVFSDVFSKVPIKSEVEILGALSLVMYTIALIPFAKYVFIVLKANDNGEGGTFALYSLICRYAKVSLLPNQQRVDEDISSFRLKLPTPELERAISVKDCLEKKPLFKNILLFLVLMGTSMVIGDGILTPSMSDAVVIVSIVVLLLLFSVQRFGTGKVGFMFAPILALWFINLGSIGIYNLVKYDISVVRAFNPVYIYLFFETNGIKAWSALGGCVLCITGAEAMFADLGHFSVKSIQVAFTAVVFPCLLIAYMGQAAFLMKNPLVVERIFYDSVPGVLFWPVFVIATLAAMIASQAMISATFSCIKQAMALGCFPRIKIIHTSKKVMGQIYIPVMNWFLMVMCIIIVATFRSTNDIANAYGIAEVGVMMVSTALVTLVMLLIWQTNLFLVLCFPILFGAVEFVYLTAVLSKIQEGGWLPLAFSSLFLCIMYTWNYGSVLKYQSEMRGKISLDFILDLGATLGTVRVPGIGLVYNELVQGIPSIFGQLLVTLPAMHSTIVFVCIKYVPVPYVPLEERFLFRRVGQKDYHMFRSVARYGYKDVRKEDHGFFEQLLVESLEKFLRREAQEIALEASTMEAERDDISVVSEVPQTPAGDGDLQTPLLSDQRSGDNNRMAATDGSDPVLPSSSMSLEEDPGLEYELSALREAMASGFTYLLAHGDVRARKESVFTKKFVINYFYAFLRRNCRAGTATLKVPHSNIMRVGMTYMV

SEQ ID NO: 68382 - protein, 149 aa, Zea mays
  Coding DNA Sequence Number=SeqID_26603
MGKKRKREPTPPSEDFGDSEYSEEEFSSESEGSPAPIPLRESSDDSDDSQGLAVEVWTYIRAVERSGLEGSDESEYSSDEEDSDGGGEDEDGDDDDDDDDEGGGGGGGDGSGGSKDGDGGGSRGGSGGGGSSRGSTRGGSGGGSNRASG

SEQ ID NO: 68383 - protein, 109 aa, Zea mays
  Coding DNA Sequence Number=SeqID_26604
MEGHHRATAVESGEDGGGANGRGWQGARKGWQGRSLASVDGQWGEDGGVVANPAWLRIAGADRRLGTYRVAENTINIVGVISQDLQPQLSTTSVKEYNGVRKHQGSKGV

SEQ ID NO: 68384 - protein, 115 aa, Zea mays
  Coding DNA Sequence Number=SeqID_26605
MASSARLGEMATSFAIACSLLSCFVRQNGVAATELGLGIKGEVEKKRVPATINLLLGAEGKEPERRKETMELFPQSAKVGIKDATWLCHLSPPVAAITFCDLVLYTTKKNGKYSF

SEQ ID NO: 68385 - protein, 127 aa, Zea mays
  Coding DNA Sequence Number=SeqID_26606
MLSAQSPPPIFADPAARVAQNSELSVVEAYLGYIPDLGRVFPRLLKRETQEPPSLCAPHCEKRKQREKRVAAGDLRPHWQTILGTLAQSFTVTRGSTHEVVRFGELIARKQLLVRRFASAVDPPRRG

SEQ ID NO: 68386 - protein, 244 aa, Zea mays
  Coding DNA Sequence Number=SeqID_26607
  Gene Ontology: Cellular component=chloroplast thylakoid membrane
  Homolog annotation: Hit_ID=Q00XT9; Match level="QueryCoverage=70%, HitCoverage=80%, E-value=2e-33, Identity=44%"; Hit description =Homology to unknown gene
  Pfam annotation: Domain name=DUF477; Domain location=71-189; Score =30.9; E_value=4.4e-06; Accession=PF04536.5; Description=Protein of unknown function (DUF477)
MTVGNLIADSRRRPTVSCSSALKRPQAGAVAASSHGDGVGRNWMSFLHHGLAAAALSLAIGLTPGARAGGGVGVRRAERRGPRGLLRGGRRRRAEPRHQSKADAFEYADQVLEKWYPTIEEGNNKGIVVLVTSQKEGAVTGGPAFIQAVGDQILDATVSENLPVLATDEKYNEAILSTAKRLAAAIDGLPDTGGPSFKENKRESNFKTKEETEEKRGQFTLVVGGLLVIAVVVPMAQYYAYVSK

SEQ ID NO: 68387 - protein, 102 aa, Zea mays
  Coding DNA Sequence Number=SeqID_26608
MAGWRLDPGAAADEGGERNERLGEERSGLERETKVNARPRRGLVLVRAAWKCVIPYVLGCSAGKSDLLLRSLAQRCGVIRVCAHPALCRSALLVVSPRPMKE

SEQ ID NO: 68388 - protein, 772 aa, Zea mays
  Coding DNA Sequence Number=SeqID_26609
  Gene Ontology: Mol. function=RNA-directed DNA polymerase activity; Cellular component=intracellular; Biological process=RNA-dependent DNA replication
  Homolog annotation: Hit_ID=UPI00004C1731; Match level="QueryCoverage =99%, HitCoverage=57%, E-value=0.0, Identity=85%"; Hit description =UPI00004C1731 related cluster
  Pfam annotation: Domain name=RVT_1; Domain location=12-181; Score =137.2; E_value=4.3e-38; Accession=PF00078.17; Description=Reverse transcriptase (RNA-dependent
  Pfam annotation: Domain name=RnaseH; Domain location=411-538; Score =5.9; E_value=1.6e-05; Accession=PF00075.14; Description=RNase H
  Pfam annotation: Domain name=rve; Domain location=551-708; Score =101.1; E_value=3.4e-27; Accession=PF00665.16; Description=Integrase core domain
  Pfam module annotation: Pfam domain module=RVT_1::RnaseH::rve; Domain location=12-181::411-538::551-708
MAAGFIKEVFHPEWLANPVLVRKKGGKWWMCVDYTGLNKACPKVPYPLPRIDQIVDSTAGCETLSFLDAYSGYHQIRMKESDQLATSFITPFGMYCYVTMPFGLRNAGATYQRCMNHVFGEHISRTVEAYVDDIVVKTRKASNLLSDLEVTFRCLKAKGVKLNPEKCVFGVPRGMLLGFIVSERGIEANPEKIAAITSMGPIKDLKGVQRVMGCLAALSRFISRLGERGLPLYRLLRKAECFAWTPEAEEALGNLKALLTKAPVLVPPADGEALLVYVAATTQVVSAAIVVERQEEGHALPVQRPVYFISEVLSETKIRYPQVQKLLYAVILTRRKLRHYFESHPVTVVSSFPLGEIIQCREASGRIAKWAVEIMGETISFAPWKAIKSQVLADFVAEWVDTQLPTTPIQPELWTMFFDGSLMKTGAGAGLLFISPLGKHLRYVLRLHFPASNNVAEYEALVNGLRIAIELGVRRLDARGDSQLVIDQVMKNSHCRDPKMEAYCDEVRRLEDKYFGLELNHIARRYNETADELAKIASGRTTVPPDVFSRELHQPSVKLDDAPEPEKAPGGYTHLLVAIDKFSKWIEVRPLNSIRSEQAVAFFTNIIHRFGVPNSIITDNGTQFTGKKFLDFCEDHHIRVDWAAVAHPMSNGQVERANGMILQGLKPRIYNDLNKFGKRWMKELPSVVWSLRTTPSRATGFTPFFLVYGAEAILPTDLEYGSPRARAYTEQSNQASREESLDQLEEARDRALLHSARYQQSLRRYHARGVRS

SEQ ID NO: 68389 - protein, 61 aa, Zea mays
  Coding DNA Sequence Number=SeqID_26610
MAVNSADTEASNRPGLANDDGKAFPMGKLGDAELVALHKPREREVGGPKPCRRQAQGDALQ

SEQ ID NO: 68390 - protein, 403 aa, Zea mays
  Coding DNA Sequence Number=SeqID_26611
  Gene Ontology: Mol. function=RNA-directed DNA polymerase activity; Cellular component=intracellular; Biological process=RNA-dependent DNA replication
  Homolog annotation: Hit_ID=Q8S461; Match level="QueryCoverage=100%, HitCoverage=22%, E-value=0.0, Identity=96%"; Hit description =Putative prpol
MPFGLRNAGATYQRCMNHVFGEHIGRTVEAYVDDIVVKTRKASDLEVTFRCLKAKGVKLNPEKCVFGVPRGMLLGFIVSERGIEANPEKIAAITSMGPIKDLKGVQRVMGCLAALSRFISRLGERGLPLYRVLRKAECFTWTPEAEEALGNLKALLTKAPILVPPATGEALLVYVAATTQVVSAAIVVERQEEGHALPVQRPVYFVSEVLSETKIRYPQVQKLLYAVILTRRKLRHYFESHPVTVVSSFPLGEIIQCREASGRIAKWAVEIMGETISFAPRKAIKSQVLADFVAEWVDTQLPTASIQPELWTMFFDGSLMKTGAGAGLLFISPLGEHLRYVLRLHFPASNNVAEYEALVNGLRIAIELGVRRLDARGDSQLVIDQVMKNSHCRDPKMEAYCDE

SEQ ID NO: 68391 - protein, 51 aa, Zea mays
  Coding DNA Sequence Number=SeqID_26612
MAHLPPAMHSAVELETEAEIWSPSPTHRRTRLNIQRHEKFKKVSKNPKSLS

SEQ ID NO: 68392 - protein, 65 aa, Zea mays
  Coding DNA Sequence Number=SeqID_26613
MVKNFGRKTVQIAMNAVVTSHLLVCLYSAAEREKLQRLTQRRSCEARKLRHVRRKGNRLKDEKAI

SEQ ID NO: 68393 - protein, 211 aa, Zea mays
  Coding DNA Sequence Number=SeqID_26614
MTIEQMFLMQTQAGQAIDQTLAAMQQCNDREKVLYGPRQLREAAQSLWESYLGTHSKGNAGSAANLLLSRIGKGAETKITELFGEPTASALTVGSAISGRHVARTNGHQAALDCLVCTGQCPVRQGDQRLNCWLRQKKERNRALFMSGGAPNCPVRQPAKGKNCLPNGDPTTPTCLGAIKGTPRRMEQDTKPPLNILRCLDSANTHPDYRD

SEQ ID NO: 68394 - protein, 131 aa, Zea mays
  Coding DNA Sequence Number=SeqID_26615
  Pfam annotation: Domain name=4F5; Domain location=57-115; Score=6.8; E_value=0.0053; Accession=PF04419.5; Description=4F5 protein family
  Subcellular localization annotation: CTP_CleavageSite=40; ConfidenceScore=5.17e-01
MAPQRYGQGRQSASIPTANCPYLSLPTNRNKERKNREDARADSLRDLGRRRRVFSGRGRRDRTTSRDRDRERAAARKPNAKNSQDGLTPEQRRERDKKALEEKAAKKAQQAAAGGTGTSTDNNKNKAGGKK

SEQ ID NO: 68395 - protein, 105 aa, Zea mays
  Coding DNA Sequence Number=SeqID_26616
MGRRHEHGKTRKKWFGKMNRALAAAEQPAHACGDMHDVLLGRGSVGAWAGGTGPSGLACGGHGCCMRAWESKSTRGSNHLNRNLAPEIQEEASKKTRLVLRFEST

SEQ ID NO: 68396 - protein, 95 aa, Zea mays
  Coding DNA Sequence Number=SeqID_26617
  Gene Ontology: Mol. function=chitinase activity; Biological process =cell wall catabolic process
  Homolog annotation: Hit_ID=Q84QQ7; Match level="QueryCoverage=59%, HitCoverage=18%, E-value=7e-09, Identity=49%"; Hit description =Putative chitinase
MALAAATILVGGMIALVLTAGTWKAKIKKSQEKICNKGWECSGSKYCCNDTVTDFFKASNCSPPPPLDFAVPGLASSNITSRVMHHRWRRNQLID

SEQ ID NO: 68397 - protein, 38 aa, Zea mays
  Coding DNA Sequence Number=SeqID_26618
MAQMVFFASDLDFASREGSLRGGEILGPTPMAMGGLSG

SEQ ID NO: 68398 - protein, 484 aa, Zea mays
  Coding DNA Sequence Number=SeqID_26619
  Gene Ontology: Cellular component=peroxisome
  Homolog annotation: Hit_ID=Q657X8; Match level="QueryCoverage=92%, HitCoverage=93%, E-value=2e-56, Identity=36%"; Hit description=PEX14- like
  Pfam annotation: Domain name=Pex14_N; Domain location=37-160; Score =40.3; E_value=6.7e-09; Accession=PF04695.4; Description=Peroxisomal membrane anchor protein (Pex14p) conserved region
MASGIGSGQQQPPAPAADADPGAVGDKLVFEAPPQPVREDYVQNAVKFLSHPKVRGSPVVYRRSFLEKKGLSTEEIDEAFRRVPPCLVSVCLLTVNSQNQSVGVQAYAPAQPVHPANAGPVVLPTQPRFSWYQAFLAAGLLLGFGASAAVFIKKLFLPRLKSWIRNVVAEGNGTEGNQLKPRIDDETADAVKASASAVSAIAKTNQQLLASKDEGFNLYRPFRCFFLANGSTHSNNVILFLLAEKKILVTLTQALDSQAKELKSLTDSIGHTREPINITRDDRFSQYRPLEDHAPTVIRNAVRSSFAPAPAEPTAGSFSRSYGEQPMSTAQRSDRSSGSKPWEMHSYSQQRPGYGSNSQLSDDGSYSDAQDSYAPSYHQNGKAPDFQADEPRPLTYNTGVEERPPPQRRWVPPQPPGVAMPEAAAAIRQPKALPKQPSSDASEAAGEMQVNGSSASDAVTEVPVNGATASDAGRSEIQEQSVAA

SEQ ID NO: 68399 - protein, 316 aa, Zea mays
  Coding DNA Sequence Number=SeqID_26620
  Homolog annotation: Hit_ID=Q10QL7; Match level="QueryCoverage=96%, HitCoverage=79%, E-value=1e-60, Identity=50%"; Hit description =Expressed protein
  Pfam annotation: Domain name=DUF966; Domain location=1-303; Score =48.7; E_value=5.5e-15; Accession=PF06136.4; Description=Domain of unknown function (DUF966)
MDRLTLLRGKGMPALFSWSCKRNYKNGYVWNDLSENDVIYPSDGVEYVLKGSEIFPGCSSSDRFQHLRVTDRSPTKPPLALPHMSHNKQYPVDGYGDYDAVEDRDDDELGHSYHHRRTASGRPEKAAAAAVSARAATQPGPPRGAPCRGDLAAVPPRPRDKAPAASGAADAAAAAAGEEGHVGSGGGGPGKCRAEPRRSCGLVSRLSARGGADADEDEDGVGAGTDLGRRFGRLAAEDKEYFSGSIVEGGGGRGTPLPASSLKRSNSYNEERSCRPGGVAGGAAIGEEAMDEGDGGVRGRCIPGRKKPPPQQQQQK

SEQ ID NO: 68400 - protein, 279 aa, Zea mays
  Coding DNA Sequence Number=SeqID_26621
  Gene Ontology: Mol. function=protein binding; Cellular component =integral to membrane; Biological process=protein amino acid phosphorylation
  Homolog annotation: Hit_ID=Q10Q29; Match level="QueryCoverage=92%, HitCoverage=92%, E-value=1e-132, Identity=77%"; Hit description =Leucine-rich repeat resistance protein, putative, expressed
  Pfam annotation: Domain name=LRRNT_2; Domain location=29-71; Score =25.9; E_value=0.00014; Accession=PF08263.3; Description=Leucine rich repeat N-terminal domain
  Pfam annotation: Domain name=LRR_1; Domain location=102-124; Score =17.5; E_value=0.048; Accession=PF00560.23; Description=Leucine Rich Repeat
  Pfam annotation: Domain name=LRR_1; Domain location=126-148; Score =14.6; E_value=0.35; Accession=PF00560.23; Description=Leucine Rich Repeat
  Pfam annotation: Domain name=LRR_1; Domain location=150-172; Score =17.3; E_value=0.057; Accession=PF00560.23; Description=Leucine Rich Repeat
  Pfam annotation: Domain name=LRR_1; Domain location=174-196; Score =16.4; E_value=0.11; Accession=PF00560.23; Description=Leucine Rich Repeat
  Pfam annotation: Domain name=LRR_1; Domain location=198-220; Score =18.9; E_value=0.018; Accession=PF00560.23; Description=Leucine Rich Repeat
  Pfam annotation: Domain name=LRR_1; Domain location=222-244; Score =13.8; E_value=0.62; Accession=PF00560.23; Description=Leucine Rich Repeat
  Pfam annotation: Domain name=LRR_1; Domain location=246-270; Score =2.5; E_value=96; Accession=PF00560.23; Description=Leucine Rich Repeat
  Pfam module annotation: Pfam domain module=LRRNT_2::LRR_1::LRR_1::LRR_ 1::LRR_1::LRR_1::LRR_1::LRR_1; Domain location=29-71::102-124::126 -148::150-172::174-196::198-220::222-244::246-270
MAAASFARALCLHMLLLFLVVGSARCKTVKRDVKALNEIKSSLGWRVVYSWVGDDPCGHGDLPPWSGVTCSQQGDYRVVTELEVYAVSIVGPFPTAVTNLLDLRRLDLHNNKLTGPIPPQIGRLKHLRILNLRWNKLQDVLPPEIGELKKLTHLYLSFNNFKGEIPVELANLPELRYLYLHENRFTGRIPPELGTLKNLRHLYLNNNELTGVLPDQIANLTNLEILYLDNNNFIGRIPEGLYRHPFLKELYIEGNHFRPGTRSKGTHKVLELPDADILV

SEQ ID NO: 68401 - protein, 71 aa, Zea mays
  Coding DNA Sequence Number=SeqID_26622
MSKNTRDTRFILRFGHSIKVPYFLVEAPTKSQGQLNRPKGRFNRLVVRLIVSLLVRLADCRLDWSAGPDTG

SEQ ID NO: 68402 - protein, 581 aa, Zea mays
  Coding DNA Sequence Number=SeqID_26623
  Gene Ontology: Mol. function=binding; Cellular component =mitochondrion; Biological process=protein amino acid phosphorylation
  Homolog annotation: Hit_ID=Q10Q32; Match level="QueryCoverage=99%, HitCoverage=99%, E-value=0.0, Identity=69%"; Hit description =Expressed protein
  Pfam annotation: Domain name=PPR; Domain location=151-185; Score =14.4; E_value=0.15; Accession=PF01535.11; Description=PPR repeat
  Pfam annotation: Domain name=PPR; Domain location=186-219; Score =11.9; E_value=0.29; Accession=PF01535.11; Description=PPR repeat
  Pfam annotation: Domain name=PPR; Domain location=220-254; Score=5.4; E_value=1.7; Accession=PF01535.11; Description=PPR repeat
  Pfam annotation: Domain name=PPR; Domain location=258-292; Score =18.4; E_value=0.025; Accession=PF01535.11; Description=PPR repeat
  Pfam annotation: Domain name=PPR; Domain location=293-327; Score =25.4; E_value=0.00021; Accession=PF01535.11; Description=PPR repeat
  Pfam annotation: Domain name=PPR; Domain location=328-362; Score =26.1; E_value=0.00012; Accession=PF01535.11; Description=PPR repeat
  Pfam annotation: Domain name=PPR; Domain location=363-397; Score =32.0; E_value=2.1e-06; Accession=PF01535.11; Description=PPR repeat
  Pfam annotation: Domain name=PPR; Domain location=398-432; Score =12.1; E_value=0.28; Accession=PF01535.11; Description=PPR repeat
  Pfam annotation: Domain name=PPR; Domain location=434-468; Score =23.7; E_value=0.00065; Accession=PF01535.11; Description=PPR repeat
  Pfam annotation: Domain name=PPR; Domain location=469-503; Score =29.4; E_value=1.3e-05; Accession=PF01535.11; Description=PPR repeat
  Pfam annotation: Domain name=PPR; Domain location=534-568; Score =34.5; E_value=3.6e-07; Accession=PF01535.11; Description=PPR repeat
  Pfam module annotation: Pfam domain module=PPR::PPR::PPR::PPR::PPR::PP R::PPR::PPR::PPR::PPR::PPR; Domain location=151-185::186-219::220 -254::258-292::293-327::328-362::363-397::398-432::434-468::469
  Subcellular localization annotation: CTP_CleavageSite=52; ConfidenceScore=5.15e-01
MATVWSGCSTSCGSFGQELPPRGKRGGGEGTRFLPRRRGRIRGDARQTQALSAAMVTVGACVCRAAPCLLDSVVDGTEDVSVGFGGIDGEPLADGYDGGKRRGPRRRPTRPTVFQKEVGARTAPPAMASEPDSKSEHGVSRLHFLEERDEETLSRRLIKLSQNNKVRSATELFDSMRASGLQPSAHACNSLLACYVRRSPLADAMRMFEFMKAKGMATGHTYTMILKAVASNQGYVSALEMFDKIEEEEGSKKIIDVIVYNTMISVCGRAKEWMLVERLWRRLEQHSLNGTLLTYDLLVSIFVQCGQSELAIAAYQEMLQKGLDPSEDIMKAIIASCTKEGKWEFAMSTFSRMLRAGMKPSLILFNSIINSLGKAGQDELAFRMYHLLEKSGLKPDQYTWSALLLALYRSGRCWDCLKLFHGIKGKHPTLLNDHLYNTALMSCEKLGQWEHGLQLLWLMEKRGLKLSVVSYNHVIGACEVASKPKVALKVYQRMINQRCSPDTFTHLSVIRACIWGSLWTEVEDILEEVAPDSSIYNAVIHGLCLRGKTGLANKVYAKMRSMGLVPDGKTRAFMLQHIATD

SEQ ID NO: 68403 - protein, 117 aa, Zea mays
  Coding DNA Sequence Number=SeqID_26624
MGLDPTSSRRDEDTQGGNTRETRLLARTGRNARVTQGRREKTHAQGRATGGGTAGAGRAGSRPWNRAQQGSRRAPKSSRARGDKGSRAQRGQGAPTDGRQRKIQPELEHVRREPAGE

SEQ ID NO: 68404 - protein, 119 aa, Zea mays
  Coding DNA Sequence Number=SeqID_26625
MVMGLGSKRRVAEGGTEPEEESSEEYEVEEVCDHIASSRGSRLALFGSDLRLGRFRPRRRRRRPLAGEGAAEGFLHDLVIHPDNRSLCDIQLTVNRLCVSIPAANFSLLDDEPARYASY

SEQ ID NO: 68405 - protein, 857 aa, Zea mays
  Coding DNA Sequence Number=SeqID_26626
  Gene Ontology: Mol. function=voltage-gated potassium channel activity; Cellular component=integral to membrane; Biological process=potassium ion transport
  Homolog annotation: Hit_ID=Q5EEQ2; Match level="QueryCoverage=89%, HitCoverage=98%, E-value=0.0, Identity=91%"; Hit description =Potassium outward rectifying channel
  Pfam annotation: Domain name=Ank; Domain location=562-594; Score =38.9; E_value=1.7e-08; Accession=PF00023.20; Description=Ankyrin repeat
  Pfam annotation: Domain name=Ank; Domain location=595-627; Score =23.7; E_value=0.00067; Accession=PF00023.20; Description=Ankyrin repeat
  Pfam annotation: Domain name=Ank; Domain location=630-658; Score=0.1; E_value=31; Accession=PF00023.20; Description=Ankyrin repeat
  Pfam annotation: Domain name=Ank; Domain location=659-691; Score =34.0; E_value=5.2e-07; Accession=PF00023.20; Description=Ankyrin repeat
  Pfam annotation: Domain name=Ion_trans; Domain location=99-306; Score= 67.8; E_value=3.5e-17; Accession=PF00520.21; Description=Ion transport protein
  Pfam annotation: Domain name=Ion_trans_2; Domain location=234-312; Score=28.5; E_value=2.4e-05; Accession=PF07885.6; Description=Ion channel
  Pfam annotation: Domain name=cNMP_binding; Domain location=404-494; Score=80.7; E_value=4.7e-21; Accession=PF00027.19; Description =Cyclic nucleotide-binding domain
  Pfam module annotation: Pfam domain module=Ank::Ank::Ank::Ank::Ion _trans::Ion_trans_2::cNMP_binding; Domain location=562-594::595 -627::630-658::659-691::99-306::234-312::404-494
MAYSRKVPSEEHGIFLIPDYNIDNIGAINIGLHDAVLDSYREAGSLSIAEASGVAIMMHRLLLWYQLWTKFILGWAVYSSFFTPLEFGFFRGLPENLFFLDTVGQAAFLIDIVVKFFVAYRDPDTYRIVYSPTAIALRYCKSSFIFDLLGCFPWDAIYRACGSKEEVRYLLWIRLTRVTKVTEFFWRLEKDIRINYLFTRIVKLIVVELYCTHTAACIFYYLATTLPESMEGYTWIGSLQLGDYKFTHFREIDLAKRYITSLYFAIVTMATVGYGDIHAVNIREMIFIMIYVSFDMILGAYLIGNMTALIVKGSRTERFRDKMKEVIRYMNRNKLGKEIREQIKGHLRLQYESSYTEASVLQDIPISIRAKISQTLYKPYVESIPLFKGCSAEFIQQIVIRLQEEFFLPGEVILEQGSAVDQLYFVCHGALEGVGIGEDGQEETLLMLEPESSFGEISILCNIPQPYTVRVCELCRLLRLDKQSFTNILEIYFVDGRRILSNLSESEYGGRVKQLESDITFHIGKQEAELTLRVNSAAFYGDLHQLKSLIRAGADPKNTDYDGRSPLHLAASRGYEDVVQFLVNEGVDMDLTDQFGNTPLLEAVKQGQERVAALLFAKGAKLSLKNAGSHLCTAVAKGDSDFIRRTLAYGADPNCRDYDHRTPLHIAAAEGLYLIAKMLVEAGASVFTTDRWGTTPLDEARKCGGRVLGALLEEARANELAMFPERGEEVRDKMHPRRCSVFPYHPWRAATGEERRIEGVVLWIPHTIESLVALAQEKLGLPGPASRLRLLREDGARVLDVDMVNDGQKLYLVGGEDGDQKYVEENGIKSIVPAGHCTELQIRNYVRCEMEMQCEAN

SEQ ID NO: 68406 - protein, 102 aa, Zea mays
  Coding DNA Sequence Number=SeqID_26627
MELAAISVCVDELPLRMSRLPPPSTRVIVTVVASDLGAVCSGTQGLGLSFSGGRLRRGGERAAAWLGRARGECDVVTVDLAMDDQDYSVPCLLRRTVVSARS

SEQ ID NO: 68407 - protein, 85 aa, Zea mays
  Coding DNA Sequence Number=SeqID_26628
MGFWAWMRHGDGEVSRLGEVRARPLWPPRVRAEVGALGASATMAGAKPRNPRTLAEFVGEKQMNPTCGPHAAVSARRWSRSGPAG

SEQ ID NO: 68408 - protein, 63 aa, Zea mays
  Coding DNA Sequence Number=SeqID_26629
MEETPTSALTTFPTRAFPSILYHPLEMMMHPLGLFPAEKRDDPMWCNKVGRITVQCMRALYRL

SEQ ID NO: 68409 - protein, 82 aa, Zea mays
  Coding DNA Sequence Number=SeqID_26630
MSILLGAAQIGWGIPFRHSRYLRTRVKSIYDVKSMAVTKVGVAPKLRIRELRLNGGKRNRLKGYFGNLKSPSGLEGIEVEMN

SEQ ID NO: 68410 - protein, 105 aa, Zea mays
  Coding DNA Sequence Number=SeqID_26631
MAEERVVGLTGGDLAPAKCPRWSGRSWRTRRWADGGQRWSESLWPRAGAEELIASEESGLSTTVEFNWSVREALPGDAEAVRMRNLKMVQWLTRSTLFGGRRKSS

SEQ ID NO: 68411 - protein, 402 aa, Zea mays
  Coding DNA Sequence Number=SeqID_26632
  Gene Ontology: Mol. function=nucleic acid binding
  Homolog annotation: Hit_ID=Q1RV31; Match level="QueryCoverage=81%, HitCoverage=38%, E-value=5e-11, Identity=23%"; Hit description=HMG-I and HMG-Y, DNA-binding; Putative plant transposon protein
  Pfam annotation: Domain name=Transposase_24; Domain location=186-319; Score=-24.4; E_value=0.075; Accession=PF03004.5; Description=Plant transposase (PttaEnSpm family)
MTNEGHVAPFDGKNPTGNEDNVDVLADNNMTIGGQVDDTNQMSNGDLELGQNDRWERGINMGHGLHRINRGLRGKLQVVIPEGKIRPMAPLVAAKFATECNIVVRNHVPVFKHWKDYKNHSGLFNLFTGKLSAKFDINTSDAPVQKACSQMMKSAVRQQRYRLKKKYFDPFPLHLVAKKSPIRSMTDEEWNELVEYWKSPKKWYETSQKNKENRSKVKFHQTTGSRSYMVHVENLGDKYIDQEPDALDLFKECHYSKIKKCYSSSVQQVITEIENKWSTPTEGEQEMFVTEVVADVLAQNTKKNLFLQNVGIQSAYPRSSVRNIEAQLEVEKRANSALRSVVNTQREELEVLSKQMHEAEESRIKEQEELKKRQVEMEAEMKKRQAAMDAKLQLLFSKFQPR

SEQ ID NO: 68412 - protein, 113 aa, Zea mays
  Coding DNA Sequence Number=SeqID_26633
  Subcellular localization annotation: CTP_CleavageSite=40; ConfidenceScore=5.46e-01
MTTVVLSPLRKQGDVSKIPAAPTAVLLQGSGTPPMATNPPGSKRRQLARQVGACCVLTNNSPIALLRFGSLEFMSLNGSYDMLKLGAGLGAIWPMRELAGALRSAVRRQGFIW

SEQ ID NO: 68413 - protein, 76 aa, Zea mays
  Coding DNA Sequence Number=SeqID_26634
MTYLGDQMVRSPAFAIDLRGWDAAAFVWEVGDSADAGDDRGKWCNRRTEGLCCQNNAIAHAFITNMDPVGHPDAVQ

SEQ ID NO: 68414 - protein, 390 aa, Zea mays
  Coding DNA Sequence Number=SeqID_26635
  Gene Ontology: Mol. function=cysteine-type peptidase activity; Cellular component=endoplasmic reticulum; Biological process =proteolysis
  Homolog annotation: Hit_ID=Q41522; Match level="QueryCoverage=96%, HitCoverage=98%, E-value=5e-74, Identity=43%"; Hit description=Thiol protease
  Pfam annotation: Domain name=Inhibitor_I29; Domain location=59-116; Score=79.7; E_value=8.9e-21; Accession=PF08246.2; Description =Cathepsin propeptide inhibitor domain (
  Pfam annotation: Domain name=Peptidase_C1; Domain location=163-389; Score=268.0; E_value=1.9e-77; Accession=PF00112.13; Description =Papain family cysteine protease
  Pfam module annotation: Pfam domain module=Inhibitor_I29::Peptidase _C1; Domain location=59-116::163-389
MNGPPSPSSSSRLSVALLLMITVLACGFVLASSGRSYAHADYADGSDQELLMSTEWFRFHAWMAAHGRSYPTAEEKLRRFHIYRANVELIEATNRDTSKTFTCGENQFTDLSHHEFLAMYTMAGHSAPPLLNLSSVITTRAGDITESDRGTTQVEEDEEVEALPENIDWREQNAVTPVQDQRRGCNACWVFASVATMESAHKIKTNHGHGELLKLSEQEIVDCTSQHCGGGYPDDAFSWVKRNGIATESEYGGYEATVDSCRADMVRPPAVRVKDYSFVPKNSEKKLAMRVAQQPVAVLFDATDPCFQCYTNGIYSGRPAAAADRYNILNHAMAIVGYGEDKTTGRKYWIAKNSWGTRWGQNGYVYIRKDMADRPEGVGGLATHPRYPIV

SEQ ID NO: 68415 - protein, 60 aa, Zea mays
  Coding DNA Sequence Number=SeqID_26636
MDGGIGVEKLTEKLSVWQSGTIFGDQKLRKSETNKDGQDQIRRIVDRDSYHAVKDRKTPN

SEQ ID NO: 68416 - protein, 153 aa, Zea mays
  Coding DNA Sequence Number=SeqID_26637
MGATGRYIDEDVVVEGLALEREEHLIALAGVVGGRRVKDNNDKRTTVLDTGRLIVEDGDGNSIELGGPSTEELWRWCSASTNWEARDPPWKGFAPVPVYGGAGEGCGSYVDNGEVEEDSGCCTNIWEDKHVAPGGDVGGDTLGGVDTEVGWVA

SEQ ID NO: 68417 - protein, 367 aa, Zea mays
  Coding DNA Sequence Number=SeqID_26638
  Gene Ontology: Mol. function=nucleoside-triphosphatase activity; Biological process=small GTPase mediated signal transduction
  Homolog annotation: Hit_ID=Q76B91; Match level="QueryCoverage=69%, HitCoverage=38%, E-value=9e-38, Identity=41%"; Hit description=RadA -like protein
  Subcellular localization annotation: CTP_CleavageSite=61; ConfidenceScore=5.68e-01
MLRSPSSLRLLLHLSRRLLSRNPLLPSSALSARPRFLSSSSSSTPGGAGWATYDPLSDSLSASAALSSASISDSEPPAVSDAWGVYDPVLGRIVKQGSPPPSSSITVEEDDEEGEEAGKLEEEKAGVKEKGKRRVTAVGVNDHVRWSSVAAARRPAGKGGKERSSYVCSNCGEGDSQWWGKCRHCNAMGTVDKYVGVAGPESGGVDVEWSHHIGRSWMPQKAKEVVPQSLQEVGEFRDGDISSAWWWYCSWLLDFSRWGSRCWQKFIDVTAASNIWEGFQGQGVFSLFVYVSGEENFRTLFANFVALLQSIEQIGNRADRMSITSSNLYLYSGTDIECQKYMKLFVHLKSRFPHVSFPRERASSRVG

SEQ ID NO: 68418 - protein, 115 aa, Zea mays
  Coding DNA Sequence Number=SeqID_26639
MVTIAKSNAQQEKIHSMMVWPVRPAGLGQYLSKLYITGGASGWKKCEEGDCYSMCSNGMGAHIAAGWKTTPNTEGTQICEVTVKKIVRTYGNRRDDDKANGGGADTEEWLPPWSL

SEQ ID NO: 68419 - protein, 58 aa, Zea mays
  Coding DNA Sequence Number=SeqID_26640
  Gene Ontology: Mol. function=nucleoside-triphosphatase activity; Cellular component=membrane; Biological process=DNA metabolic process
  Homolog annotation: Hit_ID=Q76B91; Match level="QueryCoverage=83%, HitCoverage=7%, E-value=7e-20, Identity=95%"; Hit description=RadA -like protein
IGHVTKTGDIAGPRLLEHIVDVVLYMEGERCSSHRLLRSVKNRFGSADETLFPDSYVN

SEQ ID NO: 68420 - protein, 63 aa, Zea mays
  Coding DNA Sequence Number=SeqID_26641
  Gene Ontology: Mol. function=nucleoside-triphosphatase activity; Biological process=DNA metabolic process
  Homolog annotation: Hit_ID=Q76B91; Match level="QueryCoverage=79%, HitCoverage=8%, E-value=5e-20, Identity=94%"; Hit description=RadA -like protein
MPLHTHVLIVFLNVVSGFKLTETAGDLAIAASICSSFLEFPIPNDVAFIGEVGLGGELRTSIW

SEQ ID NO: 68421 - protein, 166 aa, Zea mays
  Coding DNA Sequence Number=SeqID_26642
  Homolog annotation: Hit_ID=Q76B91; Match level="QueryCoverage=43%, HitCoverage=11%, E-value=3e-25, Identity=76%"; Hit description=RadA -like protein
MAEFGLQAVLNPSQMFLTEHDSDSEIMAGLAVAVILDGSRTFALEVQALCVSGYHRSGQVVGIPQSRADVIISGRYIRSGSRALHKVKEYGGSSLGGGSTLGWAATLSWGDGGSFTRVRRQGAATVCAGCSWSPFVGSCATLEGRCAPMRTGGRLCAVQTETGVVA

SEQ ID NO: 68422 - protein, 68 aa, Zea mays
  Coding DNA Sequence Number=SeqID_26643
  Gene Ontology: Mol. function=nucleoside-triphosphatase activity; Biological process=small GTPase mediated signal transduction
  Homolog annotation: Hit_ID=Q76B91; Match level="QueryCoverage=94%, HitCoverage=10%, E-value=1e-22, Identity=76%"; Hit description=RadA -like protein
MEFVAYSGHRLQVPRMDKRVIAISKLGYKKCVVPKTSEKLLRPLDIDIEILPCSNLKQLINTVFRPQG

SEQ ID NO: 68423 - protein, 129 aa, Zea mays
  Coding DNA Sequence Number=SeqID_26644
  Subcellular localization annotation: CTP_CleavageSite=45; ConfidenceScore=5.64e-01
MVGNDSSAALAISPLPTFPYRAQTNVNRTRRVQLCAPAPATVVVRCAAVRGLQSGSGVIAKLRKCRTYLDMDRTAEESYVHALHRHRTFPRRGPTLFAATITDEQAIVESEVQQVEIAEQELVEGKLCP

SEQ ID NO: 68424 - protein, 113 aa, Zea mays
  Coding DNA Sequence Number=SeqID_26645
MYCDRKFYTSQALGGNQNQNAHNYERTLAKRRREIATAVTRTHEDRLGRRYRHEDRLRWACQRRCWRWPCQREAAGSAASRSGAARTIVSPAAARHEEHVVGVRRRAPPTSWT

SEQ ID NO: 68425 - protein, 67 aa, Zea mays
  Coding DNA Sequence Number=SeqID_26646
MEVNFQMLRVWDAVDIGIDEDPDEGESVTEFGIRITTLSTNLRTLGDNISDTEVVKKMLQVVPKRLS

SEQ ID NO: 68426 - protein, 216 aa, Zea mays
  Coding DNA Sequence Number=SeqID_26647
  Homolog annotation: Hit_ID=Q5JMX2; Match level="QueryCoverage=38%, HitCoverage=14%, E-value=3e-13, Identity=51%"; Hit description =Putative vascular plant one zinc finger protein
  Subcellular localization annotation: CTP_CleavageSite=6; ConfidenceScore=5.06e-01
MALSVRSMLLMPSPCTILSTGPYSLKRSAKSKLSISPLNDIQQQVDKLTADSPMENKRTARSKPKANQKDTSANIHQHVNAHNQGHLKVIAGVDKSINVTSKGGDDEFSELYTFKWTTLLIPPTTSLLLNFIGVVVGILGDCITSRGTEVVLSLFGSVDLILGGNPWNAMIHEYACDNAEAQEWALELFSAMQAEGRKFARKVIACAYELYAMDWI

SEQ ID NO: 68427 - protein, 606 aa, Zea mays
  Coding DNA Sequence Number=SeqID_26648
  Gene Ontology: Mol. function=protein binding; Biological process =defense response
  Homolog annotation: Hit_ID=Q6Z632; Match level="QueryCoverage=97%, HitCoverage=74%, E-value=1e-61, Identity=39%"; Hit description =Putative Pi-b protein
  Pfam annotation: Domain name=LRR_1; Domain location=549-571; Score =14.5; E_value=0.38; Accession=PF00560.23; Description=Leucine Rich Repeat
  Pfam annotation: Domain name=LRR_1; Domain location=573-594; Score =7.9; E_value=9.6; Accession=PF00560.23; Description=Leucine Rich Repeat
  Pfam module annotation: Pfam domain module=LRR_1::LRR_1; Domain location=549-571::573-594
MADLVLGLAMSAVEGTLTAAKSAIEEKKLEKNIQRDLMLISDEFEMMHSFLNVSKERGSDEMVRTLVRQVRNMALDVEDCIVLVDMKFHRWWSPLLGWFPSCCSKLAAPPPMDLIDDEAVTAIELLKSRVEAMGQRNERYMQIGDCGAPKLSEKTHQQTGADATAGKTCPARLTGRLSEYTYPTTRPQSTQGALIEFVKEVMSNQRYLVFLENLTSMDDWEAVRELLPDGHNSSCIVVHTTTLNLAKSCVVAHHQELEPQQFSTDRSVRIFYEYCESMDGNNAEMALKTKAAKQWIHRFKFVGRQEDIWSLAGISRMGPVMELALGFALGLPPAHVSSSMLRIKDPIQHCRELLRRHRYFIVIDAHFVAQGLGRLEDFDDNFMGLLETHPAFGSLRGLFDWVHSYFNSCPDWLKPCIFYLSIFPLDHKIRRRRLVGRWMAEGYSRDTKERTAEDNGEEFIVHLRKLNTNELAAHGTTPHLTIGETWDRDRIVYESTGLGRLRSLTVFGRWKPFFVSDKMSVLRVLDLEDASSDSVRNADLEQMVKLLPRLKFLSLRGCKEITRLPDSLGGLRQLQTLDIRHTSVLALPRSVTSLLSTEATAYSCRH

SEQ ID NO: 68428 - protein, 71 aa, Zea mays
  Coding DNA Sequence Number=SeqID_26649
MGSAHAVFVSLWKERNLVDVGTFQPSLGFRDFHQAARLHPPADASRIFIILVGAEGELSQSSTSRTGQQAT

SEQ ID NO: 68429 - protein, 61 aa, Zea mays
  Coding DNA Sequence Number=SeqID_26650
MADLCQHGRRLVRRCSRPTDATLENLLDLWVRSHTRFRYATLILLVDVDRIVFIGTKGHNT

SEQ ID NO: 68430 - protein, 104 aa, Zea mays
  Coding DNA Sequence Number=SeqID_26651
MGGATRCGGAAAGWLAEPPPPPTRARPLPHGDDPRRKEAYFAKKSLSFSEFDRNSFSSFEESTIKLRRSSGQGARAVSRVPLRCLWCNLCSGKEEGVKADLQKF

SEQ ID NO: 68431 - protein, 103 aa, Zea mays
  Coding DNA Sequence Number=SeqID_26652
MSYQCKVKTGEKQKKKATSKIFNTYINKVEGGQTHLGAKGDYLNHEKHQECLDPERKVRSLKDIGEFGDLGNFGCISWDASHRIKNIAKWVSENFGPKFPSHD

SEQ ID NO: 68432 - protein, 615 aa, Zea mays
  Coding DNA Sequence Number=SeqID_26653
  Gene Ontology: Mol. function=oxidoreductase activity; Cellular component=glyoxysome; Biological process=fatty acid metabolic process
  Homolog annotation: Hit_ID=Q94CN1; Match level="QueryCoverage=97%, HitCoverage=97%, E-value=0.0, Identity=72%"; Hit description =Putative tetrafunctional protein of glyoxysomal fatty acid beta- oxidation
  Pfam annotation: Domain name=3HCDH; Domain location=401-476; Score =55.3; E_value=2e-13; Accession=PF00725.12; Description=3-hydroxyacyl- CoA dehydrogenase, C-terminal domain
  Pfam annotation: Domain name=3HCDH_N; Domain location=302-430; Score =25.3; E_value=1.9e-13; Accession=PF02737.8; Description=3 -hydroxyacyl-CoA dehydrogenase, NAD binding domain
  Pfam annotation: Domain name=ECH; Domain location=17-179; Score =167.2; E_value=4e-47; Accession=PF00378.10; Description=Enoyl-CoA hydrataseisomerase family
  Pfam module annotation: Pfam domain module=3HCDH::3HCDH_N::ECH; Domain location=401-476::302-430::17-179
MAAKVRTELDVGADGVAVITIYNPPVNSLSIDVLHSLKESYEEALRRNDVKAIVVTGKGGKFSGGFDISSFGGVQGGQTMQPKVGYIAIDILTDTVEAIDGLALGGGLEVAMACHARIATPTAQLGLPELQLGIIPGFGGTQRLPRLVGLTKSLEMMLLSKPIKGGEAHQLGLVDALVSPNDLVNTARQWALDIYECRRPWIKSLYKTDKLEPLGEAREILKFARAQAQKQAANLHHPLVCIDVIEEGIVAGPRAGLWKEATSFQELLFSDTCKSLVHVFFSQRATSKIPGATDLGLMPRKITKVAILGGGLMGSGIATAMSRVKKGKMTEERYEKAMSLVTGVLDYERFKDAVIENVKLKQQIFSDLEKYCPSHCILATNTSTIDLNLIGEKTKAQDRIAVNRMFFPYTQSALFYVDLGMDVYKIDRACTKFGMPMGPFRLADLVGFGVAVATGMQYLENFPERGEATQKGFYKYEGKRKATPDPEIMKYIEKSRSMAGVTPDPELMKLSEKDIVEMVFFPVINEACRVLDEGIAVKASDLDIASIFGMGFPPYRGGVMHWADSIGAKYIHGKLEEWTKRYGGFFKPCSYLAERAAKGIPLGLKGLNLFVVKIE

SEQ ID NO: 68433 - protein, 33 aa, Zea mays
  Coding DNA Sequence Number=SeqID_26654
MGYTEIDIRPSGSGKILNWVYHGLFADLKMEKR

SEQ ID NO: 68434 - protein, 487 aa, Zea mays
  Coding DNA Sequence Number=SeqID_26655
  Homolog annotation: Hit_ID=UPI00005459F6; Match level="QueryCoverage =65%, HitCoverage=42%, E-value=6e-43, Identity=32%"; Hit description =PREDICTED: similar to Kruppel-like factor 7 (ubiquitous)
MSTSYTEAQFGSLLDLPAGDDLTSWFTHLCGEEQAAALPAFQAPVAMADPRKRSAEYQLLEGEASGVKRQRSPTSSSRENSAGSNDGDYEHTRSRSRRAVAEAGGGGRRLWVKERDHEWWDRMSSPACPDDEFRRAFRMSRATFEAVCEELGAAVAKEDTMLRAAIPVRQRVAVCIWRLATGEPLRLVSKRFGLGISTCHKLVLEVCAAIKAVLMPKAVQWPEAPDAAAAESARFEAASGIPGVVGAMYTTHIPIIAPKANVAAYYNRRHTERNQKTSYSITVQGVVDAGGAFTDVCIGWPGSMSDADVLDRSALYLQRGAAGLLQGQRLVGGAGYPLMDWLLVPYTHHNMTWAQHVFNERVDGVRAVARDAFQRLKSRWGCLQKRTEVKLQDLPVVLGACCVLHNICERAGDAVDPDIAFQLFDDDMVAENPVRSTAAVAARDNIAHNLLHRSSSSSAAAGPRLSISGTGTEHALFVNLEMISWAR

SEQ ID NO: 68435 - protein, 102 aa, Zea mays
  Coding DNA Sequence Number=SeqID_26656
MARHATVVSLVAACSFSGGILLLFRPVLCMAVPSKATTPLLDFACDLLLDASQPLEDLLRPYHTETTGRISAAFGSASPKRRASLWPPEISIDTAQQSVEKR

SEQ ID NO: 68436 - protein, 528 aa, Zea mays
  Coding DNA Sequence Number=SeqID_26657
  Homolog annotation: Hit_ID=Q2R276; Match level="QueryCoverage=14%, HitCoverage=19%, E-value=5e-09, Identity=45%"; Hit description =Expressed protein
  Pfam annotation: Domain name=DUF593; Domain location=58-151; Score =87.9; E_value=3.1e-23; Accession=PF04576.6; Description=Protein of unknown function, DUF593
MEMEKNCDVRCRNCEERKGPRCVVAGRAVAAVREAEAGPRRRGTRRAPAARVEAEDERATLREAAAAPQSTASALRVEVEEERLAAASAASEAMAMMLRLQRDKAEVQMELRQFRRFADEKMALDAAEIDQLRALLAQRARRLLRLRSRLREYRLQCLHLGIPLPEGEDLVAQNAAEEEEEDLLLLEGEEGYIVGDGGYYYPELRCNDGEYYYEDGREEEDVVALDLERRICLLEHDQEPRLLEPPHEKEEGTHLYTDEVLPDMSEHELGGLYADEMLSKEDVETMNNLHNDDEELPESPTAGNDDGEEASEADGADSVSGSGSDRVYTIDKVHQGAAMPIARVVDKYQGEAVEPDIKKLYMRLEALEADRESMRQALVAMRTEKAQLVLLREIAQQLAKDGVPVGPGAGAGPGVHHLPRKHAVGIVERRFTEDKKAILVKTFSMAALFKHNLVQQCQRIALSEFCLGKFLANLYVYGIVVVLVWILALLGKKKKLSQSRRNQYRQPARMTLIMLTCDWKSGPDIQYR

SEQ ID NO: 68437 - protein, 1019 aa, Zea mays
  Coding DNA Sequence Number=SeqID_26658
  Gene Ontology: Mol. function=transferase activity, transferring glycosyl groups; Biological process=response to oxidative stress
  Homolog annotation: Hit_ID=Q7XZZ4; Match level="QueryCoverage=98%, HitCoverage=98%, E-value=0.0, Identity=83%"; Hit description =Putative phosphoribosyltransferase
  Pfam annotation: Domain name=C2; Domain location=10-102; Score=71.4; E_value=3e-18; Accession=PF00168.20; Description=C2 domain
  Pfam annotation: Domain name=C2; Domain location=439-532; Score=25.2; E_value=0.00023; Accession=PF00168.20; Description=C2 domain
  Pfam annotation: Domain name=C2; Domain location=605-701; Score=79.5; E_value=1e-20; Accession=PF00168.20; Description=C2 domain
  Pfam annotation: Domain name=PRT_C; Domain location=864-1019; Score =370.0; E_value=3.6e-108; Accession=PF08372.1; Description=Plant phosphoribosyltransferase C-ter
  Pfam module annotation: Pfam domain module=C2::C2::C2::PRT_C; Domain location=10-102::439-532::605-701::864-1019
MVAEGARRRVVVEVCNARNLMPKDGQGTACAYAVVDFDGQRRRTATRPRDLNPQWGERLEFLVHDPGAMASETLELNLYNDKKAITAAGSGRRGGTFLGKVKVAGASFAKAGDETLVYYPLEKRSVFSQIKGEIGLKIWFVDDPPPPPAPAAAEEKEAAAAAAGEGKDVKDKAPDAAAAPAAEEKKPETAPSEEKKPAEAKAEEKKPESAEKKDDKKKSPEKGKKDGDKPKEEGKAEKDKKDAAAPPPSPSKLAPPRSPSKKDLAIAGVAGDLEIRPQSAAEKEHGRVGAPAPRTICCPSAPTPCARAPATAAGEWDLVFAFHKDSLTDTSLEVTVLEEAKKPAKEGDPVPPEANLGFVSFDLQEVPKRSPPDSALAPQWYTLEGHGSEDGAAVCDVMLSVWVGTQVDEAFQEAWQSDSGGYLVHTRSKAYLSPKLWYLRLSVIQAQDLRLPSPPDAKAKQCGPIFPELYVKAQLGAQVFKTGRVQLGSAAAGTANPSWNEDLLFVAAEPFDPFLTVVVEDVFSGQAVGQSRVPLSTVHRRSDDRVEPPSRWLNLCGGEARPYAGRVHVRVCLEGGYHVLDEAANVASDVRAASKQLSKPPVGMLEVGVRGAANLVPMKIAKDGASGSTDAYVVLKYGPKWARTRTILDQFNPRWNEQYAWDVFDPCTVLTIAVFDNVRYKAAAADDPGKLPRDSRIGKLRIRLSTLDTNRVYANTFALTAVHPVGVRKMGELELAIRFTCPSWLTLMQAYGSPLLPRMHYVKPLGAAQQDVLRHTAMRTVSGRLARSEPPLGPEVVQYLLDTDTQSWSMRRSKANWFRVVGCLSHVATAVRWAHRVRTWAHPPTTVLVHLLLVAVVLCPEMILPTVCLYLFLVLLWRYRARARQPAGMDPRLSHVDSVSPDELDEEFDGLPSGRPADVVRMRYDRLRAVAARAQTLLGDVAAQGERVEALLSWRDPRATAVFAVVCLLAALVLYAVPFKVLLLGMGFYYLRHPRFRGDMPSAGFNFFRRLPSLSDRVF

SEQ ID NO: 68438 - protein, 151 aa, Zea mays
  Coding DNA Sequence Number=SeqID_26659
MVFKVTEGTMPTLRVRCTMELKRSRSASHLPFVSLWRPLWPSLVGVDLANPNLLEISIQGFMHPKKEERFFSQSSSKYTGSIIISSAKVHKVHIHIQRKRPWDNSTSLEQTDLLQPMAHQTVSGERAGALRELAVLRFSQRPSTKNHRTIW

SEQ ID NO: 68439 - protein, 237 aa, Zea mays
  Coding DNA Sequence Number=SeqID_26660
MSSRKHHELPEGGAGGSGAGRVAVWDTGSSLYDSYELAAVRRLLDKRLLALRDAEETRGKGRQLVVVPVVSSRGVHHRRKATLRALFRAVATCAARPRQAPPLACACAAGMVHDHQGGSAVEPEDLPSHATTPLLAQPLRTSWVLAGGVGGAQLPEDDPKAVSGWGTGLSGVHRTVSGAPDQRGANQPLSGFSPATSAKIHRTVWCAPDCPVSQRSAGPTVGRAIGARHVAEPTVRK

SEQ ID NO: 68440 - protein, 1712 aa, Zea mays
  Coding DNA Sequence Number=SeqID_26661
  Gene Ontology: Mol. function=methyltransferase activity
  Homolog annotation: Hit_ID=Q1SPB6; Match level="QueryCoverage=60%, HitCoverage=85%, E-value=6e-73, Identity=31%"; Hit description=N-6 Adenine-specific DNA methylase
  Pfam annotation: Domain name=Extensin_2; Domain location=1262-1586; Score=-140.2; E_value=0.08; Accession=PF04554.4; Description =Extensin-like region
MASDFDETDEAFFDKLVNSDDDDDPPAAAAVGGLAALSLTDQPDAPPPRESEPRDQPAAAAAAAAAPTEDAEREPSPEVYPAAVLLHPPPDLAATVGADPAGDLLPEDGEPFSGAAAVPEDHQGLEPSLSSSLSAGTGDGSAPDRTVSGHTESNASSQLDSSTAAEGSGHQSAKSQLEYTDPRYLESLYPGWKYDDATQQWYQVDTLSAQSYAAQNTGAAVADHRSDGDLQQKFGGSYLQNTSHAGTGLEHRQTASQPETEAGNQPAVAPQKEGEAQCEPKPMHTEVGYGESNATSQFDSRATAEGYGDRSADAQVEYTDPRYLESLYPGWKYDEATHQWYQVDTLNTQTYAARDTGGAVADLASGGSVQQHQQFSGSYIQNTSHPEPALELTEPTSESKPQLEPAAAPPQTDAYPAVASHKEEQKEHGSVPVHTKPEAQEIPANAGDTATVTEGGSPGSEKGIHTAVKQVQWNDFGASTGGADLFGDLLPDGAEDDFFEGTVPVSQDVSSLVGATNVSAPDHSFSAGVYNTAMISAGHSFSDGVDKNANSHFGPSGSSAGYGDQSTNAQLGSTDPKYLESLYPGWKYDEATQQWYQVDTHSAQSYVADNTGAVVAVGSDNTQQHQQQFSASYLQNNLHAALETIAEESSTNAMSWVQGGTNTGPPEYPPNMLFYAEYPGWYFDTNTQQWQTLESYQQSVAHVATTAAASDGFAGTCHNVAHYTEDSYASSYNQQSQWQPDSFGNTMQADVLGGKSLLGSSYGSNQQAGNQIGQQANVDSLNHEPHSWYSGLEHSTSKELRYKGFEPSTGFQTSRKEFQPPKDHQAGHMADEPLTRYGYGSSNGVVNTQNFVPKEGMHKTQMHDDSTAHTYAASNYWGTQTSMGSAQQQLTGTNGPSQQFGFSPHEQRSSAGRPPHTVVSFGFGGKLVVLKETSSMAANFDSGNQGNSGRTVSVLNIPEIVADKIDHSSIANGGAFSYFHALCRHPIPGPLVGGSAASKDLNKWLDDMSGVYESSQTEFQGGDVQKTTAQEVQSLLVSGRRKEALHQAQEGHLWGPALILALQLGDKFYADTVKKMAHCHFVSGSPLRTLCLLIAGQPADVFSFENPVNSGLSSPQQPVEAAPKGMLDDWQENLAIITANRTKGDDLVITRLGDCLWEEKNEGGYATNLAPGKIVGKLFTSLDKSLSRMMGTQSAPLPQLPQGAANEREQSMSEIGGNSVYGREVAHNRSISEPDFGKTPQQQGAAVSSKAQSTSGSGSSRFGWLVQKTIGLVSKSHRQAKLGEQNKFYYDEKLKRWVEEGAEIPAEEPPLPPPPTKVPFQNSVPDPNSNAPPTGGGYSSNPPEPSSGMPPMPPTQNQFSARGRMGVRSRYVDTFNKGGGGGGANAFGVATSYSKPAAPSMSGAKFLVPTPVNVASEQMAELGAHSETARQDESSSSPAMETSFSSPPSLIQMQSSIPRYPSGDNIPRYPSGDNIPRYPSGDNIPRYPSMDNVSSPTGSINSSMSRSRASSWSGTYPEQLSSTAASRSPDGQMTQSPSMPGRRPPHSRSNSASSSAQLNGLGEDLHELSPPLPGHGRPSPPPGPGFQEIKGSLSVTRADPCQLLAHSRHNLLQTSAATAATSSDLVAVVVWQVYECSRLGVRVGVLAAWPQWCSQTPLPQNLSYLAGVHRRVGVRQGGVAVAAIHWGKKRARGPSDPSRSTAIRSQDNLSLR

SEQ ID NO: 68441 - protein, 135 aa, Zea mays
  Coding DNA Sequence Number=SeqID_26662
MDVEAIVEELRLDGMMKTKYDDDRKGIKTIQSLMFRVIIIDECQGYKSSRGFVGGLYISGASTTPHRHRLRGRAMGVHVVLSLLKLSPTTSESSGSKNSYWGYLIEEKGSWQELFSHLSHLFHTSCGDYKSQAIL

SEQ ID NO: 68442 - protein, 61 aa, Zea mays
  Coding DNA Sequence Number=SeqID_26663
MAPGKAVELGGLRSNSLAVDNAPPGAAPDGALDDCAGVCCCAACIAAAPGAGRNTRTLNGL

SEQ ID NO: 68443 - protein, 413 aa, Zea mays
  Coding DNA Sequence Number=SeqID_26664
  Gene Ontology: Mol. function=GTPase activator activity; Cellular component=intracellular; Biological process=signal transduction
  Homolog annotation: Hit_ID=Q10NV4; Match level="QueryCoverage=99%, HitCoverage=50%, E-value=5e-69, Identity=63%"; Hit description=PH domain containing protein, expressed
  Pfam annotation: Domain name=PH; Domain location=200-293; Score=8.5; E_value=0.35; Accession=PF00169.19; Description=PH domain
  Pfam annotation: Domain name=PH; Domain location=54-138; Score=22.6; E_value=0.0014; Accession=PF00169.19; Description=PH domain
  Pfam module annotation: Pfam domain module=PH::PH; Domain location =200-293::54-138
MSASEFRIPYQQVSPSQPAENVNQFKTCRCGEGDPNSTSETGDSPPASCPNCQVLKSGHLLLSSKGIGWTSWKKRWFVLTRASLVFFRSDPARRCRYLPVLLGARRLRSVSGYLPCSALVLATPVLQLVVPSRCPIAAHARHCLPLLLLPLPLLSSFSPSLLICSHSPLILVMMMKQQTIVLAMVMNKTKTRMMVSLTTAYKFGILIIPRVEISVLLYNPSHYQNVPPPRGAEPIVTLGGIDLNNSGSVVIKEERKLLTVFFPDGHGERTFTLKAETTGDLNEWRNALESAIAQAPSIANTMGQNPIFSTDVEAESAESPAEHSEDRSVIGRPAKFALVDADGSPSFLEKALKFIEDHGKNEFSPEEDAHVIGDCIKDSEEGSCSSDAYTESEDDVDKEYSTDNDTHDDDGSL

SEQ ID NO: 68444 - protein, 49 aa, Zea mays
  Coding DNA Sequence Number=SeqID_26665
MAESKRLPIPPSGPSTKWNYEANHEKPSSSESGSGRRRLGWWCRKKPNY

SEQ ID NO: 68445 - protein, 57 aa, Zea mays
  Coding DNA Sequence Number=SeqID_26666
MAKRSHGVGGGAGVEQESAKSLPCGPEKVISSKASTVGQDPHRRAPDPWICSLDLQG

SEQ ID NO: 68446 - protein, 159 aa, Zea mays
  Coding DNA Sequence Number=SeqID_26667
MSKLGRSRMMLYFPIPLPSLVWGYEGEWFYVRNLGGSAPTFTSNVAVVQLHWSYGAEKKFRPKIDYMLAAIAKRRGQGLSGKRKVLLKGKYALGPFLSILVIKCPTQVPKCKIVPRTQEVQIKIKGEIKIGKEMALFSQRLLGLGAPDSVRCARPVSVN

SEQ ID NO: 68447 - protein, 194 aa, Zea mays
  Coding DNA Sequence Number=SeqID_26668
MAALIRGGKDEHLVVPRGRGTTLFLKAPPQDFMGRETISSLGNRHIRQSTKESMRWEAIMGRMFPAYACHARTMQQQGYFASRQITHVERRNDDPMYYRASEGATPIRRKPLYNIEQLRKGSGVAVGHSRMGHPKKSLRNSIRTAHSTKSPAKQVYEARQATKPPPSEAERTTKSPAEQVGEAGRATKSLAEKV

SEQ ID NO: 68448 - protein, 56 aa, Zea mays
  Coding DNA Sequence Number=SeqID_26669
MAVRRGIPTLLFLETVAGYNLCRVQNWSFGIKYLQNRMRTETKIFRLHHNTIWEMK

SEQ ID NO: 68449 - protein, 73 aa, Zea mays
  Coding DNA Sequence Number=SeqID_26670
MRRLGAIKMKNKSGEFDHEEELRKLDGMAPRGRSTAGSRGRARLRPLSPRRHGREEEDVESEAEVSKQARELI

SEQ ID NO: 68450 - protein, 638 aa, Zea mays
  Coding DNA Sequence Number=SeqID_26671
  Gene Ontology: Mol. function=DNA binding; Cellular component=nucleus
  Homolog annotation: Hit_ID=Q84YJ6; Match level="QueryCoverage=96%, HitCoverage=97%, E-value=1e-88, Identity=46%"; Hit description=DNA -binding protein family-like
  Pfam annotation: Domain name=Bromodomain; Domain location=333-413; Score=18.3; E_value=4.3e-05; Accession=PF00439.15; Description =Bromodomain
  Pfam annotation: Domain name=Myb_DNA-binding; Domain location=20-75; Score=26.0; E_value=0.00014; Accession=PF00249.21; Description=Myb -like DNA-binding domain
  Pfam module annotation: Pfam domain module=Bromodomain::Myb_DNA -binding; Domain location=333-413::20-75
MTARSDDPGVSPGTSAAAGGEIWGTWEELLLACAVRKHGTASWDSVAMEMLSRCPPAAADSLTPAGCRLRYRLLHRRFTAAAAVNGDEEPDAASADCCVEELRKLRVAELRREVERYDLSIGSLQSRVERLKEERARSISGEANPVPAVKEDGEEEPAEGRKESLEEEGDDAGGGEEDRVSGGESGRSCKESNSSDLKRPRPARDAGDGDAAARREDEGAGDAARESSAVKREQVSGESVVGSKDTVAAADTEKESSDVQSSASPSRRREREIGAGEDADVASAPPPPAPAAAVLPAAEAEALRAFLEVVRTSKPGSVFERRLESQDIFSFPLCRFFRCSTDRWAQKCRSQDDAKYRCTIRRHVDLETVRSRLDGGSGSYASATEFYRDLLLLCANALVFYPRGSPERSAAARTRALVAKHMSKDQPGPSGKAVAGPAASKKAKAEADVGSLLEKTAPIIVCRKRSSIAKAAAAATAKEERSEKAESDKEGEKQQEAASAQSHKGASAAADNGSDSDAPPEEAKKQPAADKKGGGGGGVAKKRNAVNFLNRMKQGGSAPSTERVSLLETLKLSAAAEQKKAGKGEGKEPAGGSGSKKATPGRRNVGRPPKRAAAPSIPATVPRGQRAAAAAGNAGGRK

SEQ ID NO: 68451 - protein, 113 aa, Zea mays
  Coding DNA Sequence Number=SeqID_26672
  Subcellular localization annotation: CTP_CleavageSite=82; ConfidenceScore=5.20e-01
MANDLAPGPRVQVRGGGDAVSSLVSVWDPASAKRGLLGRPLPRPTAVGNRPEAARRLLLRPRSRRSPTVFPFSIDVTGWVTVAVAFSYPEAAGTSQGGSRRRTSDGRLKNLRT

SEQ ID NO: 68452 - protein, 126 aa, Zea mays
  Coding DNA Sequence Number=SeqID_26673
MEAATWPAVGVMPGSELEKPAMQWELSASWEERKKSRSVWASSARLSSGAWLGPGSQVQQQGEPNNMAIIVGPIVRWCLKVESSVGLLSNDALIVVSDLTDGVARDLPHARVKAGFHGFGQTECTP

SEQ ID NO: 68453 - protein, 444 aa, Zea mays
  Coding DNA Sequence Number=SeqID_26674
  Homolog annotation: Hit_ID=Q5ZDR4; Match level="QueryCoverage=11%, HitCoverage=14%, E-value=5e-09, Identity=61%"; Hit description =Putative mitochondrial carrier protein
MAPRARSALYFFLSVSTRFLHWMSRRRNERVNRCGGGDGGDEAGVVNRRRERGWSARGEERRAVGHDDRDAARGGAVQMHGCCLDPRVGRGRFDRDTKPARDYRISDSLAQARASIVRACTVAVTPSELGAPNCTPNPYPFILTVNRRRHGRHDRAHGGVVEDFCGKGKLPVDGDGSDWLSFQLSDVKVLVNEITSVLLKRILHEVPMDIVTRLLDVLKVFSALESSHTTMAIMTHHDNKQLANRRMRGPWPPPSGHRLPQRRAWQLVEWVLRRCRRCLPHEAEETCHTFPFQNQTSQASSSVPGNNITAMTSLVSCAILETGTDDQVIDNYGKGRPSVMKTTRLLLDDYGWRGFYRGMYTTGIGCFAECLKHSTNPEKHSAKYLPSVALGKVFVECRTRQRELGEQCIGKGFFAEYFLSGTRQRLCQVPDGTQQRKATVIALG

SEQ ID NO: 68454 - protein, 215 aa, Zea mays
  Coding DNA Sequence Number=SeqID_26675
  Subcellular localization annotation: CTP_CleavageSite=46; ConfidenceScore=5.40e-01
MGPTDSRLRAGSDTAFAGPRISFSTARLRFPSHCANSTGVPPVIPLGSTEFHVGARSVQWIRHAPGTVRPLVHSRLCCRHRGALLAAIIVLRARHRLAATGGSWMRPCAITRRACAPASMSWWPPRCEAFGGRSWGTAGDTRALLGWFSARCFPQWRVNCSSEIQIVVKSLFAVESSSSTDFLADHRGGCAPSRPGVRQGGRWLLAVDDRLDGSD

SEQ ID NO: 68455 - protein, 92 aa, Zea mays
  Coding DNA Sequence Number=SeqID_26676
MSWWPPRCEAFGGRSWGTAGDTRALLGWFSARCFPQWRVNCSSEIQIVVKSLFAVESSSSTDLLAEEPVTEDPGEQQVEVAEQELIEGKLCP

SEQ ID NO: 68456 - protein, 146 aa, Zea mays
  Coding DNA Sequence Number=SeqID_26677
  Homolog annotation: Hit_ID=Q656B0; Match level="QueryCoverage=82%, HitCoverage=14%, E-value=5e-24, Identity=51%"; Hit description =Putative Noc3p
MGKRSGSSRKDKNKVILPPELPPEIHDDEVDVSEEDIEFYATDSSNVTPFRHFDKKSIDRYVGRVAGRDEGEVERLYEERQKRKATESSGRPREDDDYLEVDPVDALPTKTLQGELVYNRGKPFVVPVDTQCQWLIITIKSEFLVT

SEQ ID NO: 68457 - protein, 158 aa, Zea mays
  Coding DNA Sequence Number=SeqID_26678
MVAVAQLGRSSCSLARSPMPRAPPWPLGLAAVAQSAADLDRPRTGGVWEAAGAGALAVLPTAVAMAAVPLSLAMELPCTRAPWWFSLLSLFPSLSSLSTCRRVVHRRASLPITEFPAVSLRTRPRPSFTVSTTCYPRAHASSNATPVLTRRRSLTVDY

SEQ ID NO: 68458 - protein, 221 aa, Zea mays
  Coding DNA Sequence Number=SeqID_26679
  Gene Ontology: Mol. function=DNA binding; Cellular component=nucleus; Biological process=RNA-dependent DNA replication
  Homolog annotation: Hit_ID=Q651V3; Match level="QueryCoverage=65%, HitCoverage=25%, E-value=1e-40, Identity=58%"; Hit description=NAM -like protein
MASFDQSSQMYEHDSDSNIDMENVDAPSKKSQKGTKKSQKGGKQKVVSRRGGSFTKEEDIVICSAFLNVSKDPITGVNQNSGGYYKRMHEYFNKRKPEGSNRSQISIQHRWGAIQKAVNKFCALKSSVDRRNESGKSEQDRIDDAVFMYEKGEPFVFMHCWKLLRNEAKWNNRFLETISKPPSSQVPPEAECMPTHTICSSQQRRSRANKQADYSSRKEVT

SEQ ID NO: 68459 - protein, 653 aa, Zea mays
  Coding DNA Sequence Number=SeqID_26680
  Homolog annotation: Hit_ID=Q5VPS3; Match level="QueryCoverage=38%, HitCoverage=64%, E-value=5e-75, Identity=52%"; Hit description =Ribosomal protein-like
  Pfam annotation: Domain name=SWIB; Domain location=258-333; Score =133.6; E_value=5.3e-37; Accession=PF02201.9; Description=SWIBMDM2 domain
  Pfam annotation: Domain name=SWIB; Domain location=353-407; Score =13.2; E_value=0.0011; Accession=PF02201.9; Description=SWIBMDM2 domain
  Pfam module annotation: Pfam domain module=SWIB::SWIB; Domain location=258-333::353-407
  Subcellular localization annotation: CTP_CleavageSite=77; ConfidenceScore=5.46e-01
ANRSDRTVAPLAFTNYDDSHSCTTATVPPRRPPTSYGTHIRQSVGWPSGRNSASPEADLSLGKTPSRSSSTSATCPPANPAGGHSFDCVLHGSKPHIGLGHDLGETSASPEHGFGLDITNERAPNVTKSNRVDVLPGAFRHTHHCSNHYDLDNFPIRRARVRDGALGSLRSQRCKYRNRTSSSRHKSNNEYKGHTGYRGSTMPPHRARQTPAHLKALLEAINRDIQDFKQGGKHFTVFSSTTILALASINPRDLGSFPLPTSFLSPALQEFVGASELARTEVVKKLWAYIRENNLQDQNNRRKILPDERLKKIFNVNSIDMFQMNKALTKHIWPLNSEGKKQKGGSSGAGSGLLVPLQLSDDLMKFIGTGESMLSRSDVVKRMWDYIKENNLQVAAAVVCMAWRYLKTSMLGAAAASSNDDDDLVAAAAAVVIQELGRKRRWGGSVPGHRTYRRDRLAAHRQLHMDYFVDRPLYNNEMFRRRFRMRPELFHDIVRKIAAKKKYFQLSRDAAGVLSFSPDHKCAVGIKMLAYGGPADSMDEYLKMGESTVLETLKEFALAVVDVFGDEFLRPPTSAEIERILKRNEERGFPGMIGSIDCMHWEWANCPTALAGSHNDINVLHRSNVFDDLANGIAPPVEFNVNGNTYSLGYYPS

SEQ ID NO: 68460 - protein, 317 aa, Zea mays
  Coding DNA Sequence Number=SeqID_26681
  Gene Ontology: Mol. function=protein serine/threonine kinase activity; Cellular component=spindle pole body; Biological process =protein amino acid phosphorylation
  Homolog annotation: Hit_ID=Q7Y0B9; Match level="QueryCoverage=84%, HitCoverage=87%, E-value=1e-140, Identity=79%"; Hit description =Serine/threonine-protein kinase SAPK8
  Pfam annotation: Domain name=Pkinase; Domain location=28-226; Score =177.8; E_value=2.6e-50; Accession=PF00069.15; Description=Protein kinase domain
  Pfam annotation: Domain name=Pkinase_Tyr; Domain location=28-227; Score=-50.5; E_value=2.2e-09; Accession=PF07714.7; Description =Protein tyrosine kinase
  Pfam module annotation: Pfam domain module=Pkinase::Pkinase_Tyr; Domain location=28-226::28-227
MAGPAPDRAALTVGPGMDMPIMHDSDRYELVRDIGSGNFGVARLMRDRRTTELVAVKYIERGEKVILTPTHLAIVMEYASGGELFERICKNVRFSEDEARYFFQQLISGVSYCHSMQVCHRDLKLENTLLDGSDAPRLKICDFGYSKSSVLHSQPKSTVGTPAYIAPEVLLKKEYDGKIADVWSCGVTLYVMAVGAYPFEDPEEPKNFRKTIQRITITEIRNHSWFLKNLPADLMDDDSMSNQYEEPDQPMQTMDQIMQILTEATIPPACSRSINVLADGLDMDDDMDDLDSDSDLDVDSSGEIKRKPNLFWGTRML

SEQ ID NO: 68461 - protein, 343 aa, Zea mays
  Coding DNA Sequence Number=SeqID_26682
  Gene Ontology: Mol. function=zinc ion binding; Biological process =regulation of transcription
  Homolog annotation: Hit_ID=Q10EQ1; Match level="QueryCoverage=86%, HitCoverage=80%, E-value=6e-72, Identity=50%"; Hit description=Dof domain, zinc finger family protein, expressed
  Pfam annotation: Domain name=zf-Dof; Domain location=23-85; Score =127.5; E_value=3.8e-35; Accession=PF02701.6; Description=Dof domain, zinc finger
MMQEMLVEADMDQLKRENDGQRAEQTPLRCPRCDSSNTKFCYYNNDNLTQPRHFCKTCRRYWTKGGALRNVPIGGGCRRPRPMPTPVATKPAVSCKAVGGAPSLGLGVGLGMGMGTGAGLDGPWASSQQAAAAQAQLMALLNSARGVQGGGSMHRVLGLDAIAHLPLHVLPDAGGSNASGTVPSLWPPRMDSQLGMGPLGQHDVLSSLGRLKLPPPSSAAAASCYSDQLHAVVSSAAGRGHEYEAAAPGVTPLPCTTALASLPPAASSVSAALASATVGLDLPPVSLPASEMQYWAGPAAMSVAWPDLPTPNGVLPRETNPNLMWSYRRRELPEKKETRKEKI

SEQ ID NO: 68462 - protein, 545 aa, Zea mays
  Coding DNA Sequence Number=SeqID_26683
  Gene Ontology: Mol. function=nucleic acid binding; Cellular component= beta-galactosidase complex; Biological process=DNA integration
  Homolog annotation: Hit_ID=Q7XBC6; Match level="QueryCoverage=99%, HitCoverage=35%, E-value=0.0, Identity=66%"; Hit description =Putative copia-type pol polyprotein
  Pfam annotation: Domain name=RVT_2; Domain location=119-374; Score =529.1; E_value=4.9e-156; Accession=PF07727.4; Description=Reverse transcriptase (RNA-dependent
MAIGDVRPQEQLDQDQLSSSTMVHPPTQDDEQVPQVEAHDQGGAQDVQIEEEEAPQAPPTQVRATIQRDHPVDQILGDISKGVTTRSRLVNFCEHYSFVSSIEPFRVEEALLDPDWVLAMQEELNNFKRNEVWTLVPRPKQNVVGTKWVFRNKQDEHGVVTRNKARLVAKGYAQVAGLDFEETFAPVARLESIRILLAYAAHHSFRLYQMDVKSASLNGPIKEEVYVEQPPGFEDERYPDHVCKLSKALYGLKQAPRAWYECLRDFLIANAFKVGKADPTLFTKTCDGDLFVCQIYVDDIIFGSTNQKSCEEFSRVMTQKFEMSMMGELNYFLGFQVKQLKDGTFISQTKYTQDLLKRFGMKDAKPAKTPMGTDGHTDLNKGVATPCFGIWYPKGSNFDLIGYSDSDYAGCKVDRKSTSGTCQFLGRSLVSWNSKKQTSVALSTAEAEYVAAGQCCAQLLWMRQTLRDFGYNLSKVPLLCDNESAIRIAENPVEHNRTKHIDIRHHFLRDHQQKGDIEVFHVSTENQLADIFTKPLDEKTFCRLR

SEQ ID NO: 68463 - protein, 723 aa, Zea mays
  Coding DNA Sequence Number=SeqID_26684
  Gene Ontology: Mol. function=zinc ion binding; Cellular component =cellulose and pectin-containing cell wall
  Homolog annotation: Hit_ID=Q109J5; Match level="QueryCoverage=95%, HitCoverage=93%, E-value=0.0, Identity=80%"; Hit description =Dehydration-responsive protein, putative, expressed
  Pfam annotation: Domain name=DUF248; Domain location=81-709; Score =1045.9; E_value=0; Accession=PF03141.7; Description=Putative methyltransferase
  Pfam annotation: Domain name=Methyltransf_11; Domain location=208 -303; Score=35.6; E_value=1.7e-07; Accession=PF08241.2; Description =Methyltransferase domain
  Pfam annotation: Domain name=Methyltransf_12; Domain location=208 -301; Score=9.6; E_value=0.06; Accession=PF08242.2; Description =Methyltransferase domain
  Pfam module annotation: Pfam domain module=DUF248::Methyltransf _11::Methyltransf_12; Domain location=81-709::208-303::208-301
MVTFPLRDLSPTSLLLLLFLFHPWALKAGSAAFEYGTKFSRSLGWGSDDGEDGSEESIFGTGDADDVKPKSFPVCDDRHSELIPCLDRNLIYQMRLKLDLNLMEHYERHCPPPERRFNCLIPPPHGYKVPIKWPKSRDVVWKANIPHTHLAKEKSDQNWMVEAGEKIKFPGGGTHFHHGADKYISNIANMLNFKDNNINNDGMLRTVLDVGCGVASFGGYLLSSNVIAMSLAPNDVHQNQIQFALERGIPAYLGVLGTKRLPYPSRSFELAHCSRCRIDWLQRDGILLLELDRLLRPGGYFAYSSPEAYAQDEEDLRIWKEMSALVERMCWKIAEKRNQTVIWVKPLDNDCYKRRAHGTKPPLCKSGNDPDSVWGVPMEACITPYPELHLLIRGLMVFSAYVKKCTEMGGTGLAPWPARLTAPPPRLADLYITADTFEKDTEMWQQRVENYWSLLGPKVKPDTIRNIMDMKANFGSFAAALKEKDVWVMNVVPHDGPSTLKIIYDRGLIGSNHDWKSVLVAAMLLKKFCAVPCIVKINMKFSSTIMSLKVSSLKGLFGCDPGKGVWARQLPKPSISDAWWPGTPVWPVFPGQVSVEAGTSCFHIYNSLKSNNAFCRCEAFSTYPRTYDLLHAWAVFSDLDKRGCSAEDLLLEMDRILRPTGFAIVRDKGTVIEFIKKYLHALHWEALTVVDAEPSPESEESEMILIIRKKLWLPKAGPQDSGT

SEQ ID NO: 68464 - protein, 88 aa, Zea mays
  Coding DNA Sequence Number=SeqID_26685
MMKMMVFGGRVSLLPILLRAQINPCPLMLLRLLLLLLIMLLQMIKTSLQPSPSNSSHHLQVAILIVGYEVSLAFLLLGAKRGRCFGEK

SEQ ID NO: 68465 - protein, 89 aa, Zea mays
  Coding DNA Sequence Number=SeqID_26686
  Subcellular localization annotation: CTP_CleavageSite=39; ConfidenceScore=5.43e-01
MSKELFGYFVAPSSSPYYGRHTTVPTAPGGRPANRNVVVCNIDVVVPFYSTGVIFFGPLGHGFFSSPPGSSCASVTCPLVSSRRVVIFL

SEQ ID NO: 68466 - protein, 211 aa, Zea mays
  Coding DNA Sequence Number=SeqID_26687
  Homolog annotation: Hit_ID=Q69IU6; Match level="QueryCoverage=28%, HitCoverage=10%, E-value=1e-08, Identity=53%"; Hit description =Ankyrin-like protein
MGIGAAIMLTTLGSMCYCIVAHRLEEKNTRKIRRASASQSRGSWSRSVDSDKEILNSEYKTKIGCGTTSVFFNQRTEGPSCGTKFRSLDRRYDDLVHEDLIGERPPPPCDARPRAAARPKLDRVVFVKLDVGHTPPVVAPPRISGMLHVPRRQSDEARRLQAVCRLQPLAPATARMASSPSAALTATLGSSSAVMTSLLLPSLSPIRLLHP

SEQ ID NO: 68467 - protein, 66 aa, Zea mays
  Coding DNA Sequence Number=SeqID_26688
  Gene Ontology: Cellular component=microtubule organizing center; Biological process=microtubule cytoskeleton organization and biogenesis
  Homolog annotation: Hit_ID=Q60F24; Match level="QueryCoverage=94%, HitCoverage=11%, E-value=7e-18, Identity=82%"; Hit description =Putative gamma-tubulin complex component 4
FCWSIEQYETRPNISEIDHITEEFNKKSNSLYTILRSSRLADHRKGSDEFRKAATNHCRCSAVTVM

SEQ ID NO: 68468 - protein, 165 aa, Zea mays
  Coding DNA Sequence Number=SeqID_26689
  Gene Ontology: Mol. function=protein binding; Biological process =defense response
  Homolog annotation: Hit_ID=Q2QMY3; Match level="QueryCoverage=81%, HitCoverage=15%, E-value=2e-42, Identity=65%"; Hit description =Leucine Rich Repeat family protein, expressed
MDRMLLDQLAGEALREVLHAVQGTLFCRSTAERLRRSVEPLLPLVQGLGPHSTQRSAGELGELAARVREALDLARRAAASPRWNVYRAAQLSRRMEAADRGIARWLERHAPAHVIGGVRRLRDEADARIGRLERRVEEIAAATAQPPPPALSSRRAAAAQGRAMR

SEQ ID NO: 68469 - protein, 133 aa, Zea mays
  Coding DNA Sequence Number=SeqID_26690
MEAACNCTKGMHPFDFDASSMEAQAHTSCNRRAGYYVGETAPPLAPVLRLLDCETGAVTRGDPAHGPTVPTEHIGHGSVSRGRRDRERGYSERDPSPRRKRAPSPPTDQRFEGWPLEGFDSRLRALGLRAHYW

SEQ ID NO: 68470 - protein, 87 aa, Zea mays
  Coding DNA Sequence Number=SeqID_26691
MATGHDHRGSAVAGIRATGDLYSYFPIRPMVQTEEDCAEFDKGVLTAVYARDLATTAVGGSAATISNFEFKFVCELAHISNVQIQIL

SEQ ID NO: 68471 - protein, 104 aa, Zea mays
  Coding DNA Sequence Number=SeqID_26692
  Gene Ontology: Mol. function=protein serine/threonine kinase activity; Biological process=response to abscisic acid stimulus
  Homolog annotation: Hit_ID=Q940H6; Match level="QueryCoverage=70%, HitCoverage=27%, E-value=2e-09, Identity=45%"; Hit description =Protein kinase-like protein
MGIADDRIIYWVFGTRFLTTPAYLQNAKRITTMPEIKSHPWFVRNLPADLMGDGTVNYEESESMAETTVPADGARWTTQFLCIDDVLDDDMDLDLESSTSGAVE

SEQ ID NO: 68472 - protein, 112 aa, Zea mays
  Coding DNA Sequence Number=SeqID_26693
  Subcellular localization annotation: CTP_CleavageSite=49; ConfidenceScore=5.34e-01
STVQGGATVLPLIWEIRALTPTVAARRGLSSVSRCGLRGPLRKGRGRRSASAAVSLNNCTNGLHKERLEADAELIAGNKIDEVEAGAHDNKKLRRGDRRRKLNSKYYGANWL

SEQ ID NO: 68473 - protein, 381 aa, Zea mays
  Coding DNA Sequence Number=SeqID_26694
  Gene Ontology: Mol. function=diacylglycerol kinase activity; Biological process=protein kinase C activation
  Homolog annotation: Hit_ID=Q94HY9; Match level="QueryCoverage=85%, HitCoverage=43%, E-value=1e-137, Identity=73%"; Hit description =Putative sphingosine kinase
LELSEKYQKHFGPLRYFVAGFLKFLCLPKYSFELEYLPVSDVNGAEHKILVGQEKVDASDLYDDVIRRSRAECLPRASSLSSIDSIMSTGIMSGAELEVCSPRANNEPSEVVRGLDPKSKRLSLGRASTFKEPEEVLHPHSHGTSTPSWRRSKSKSRTEKAKPGLSATHDAKSSKVNADKEDTSSTISDPGPVAVWDSGPKWDDEPKWDNQPNWEPETSIELHSPREDIELGLTKELVPSLDERWTVRKGRYLGVLVCNHSCKTVQSLSSQVVAPKAEYDDNCLDLLLVGGSGRLRLLRFLVLLQFGKHISLPNVEYVKGRKHTAVQGPREQAYTVSTLQTDTTDLWKVSRIPTKAVAALANNQCMSILLAHWQQPEHAIC

SEQ ID NO: 68474 - protein, 131 aa, Zea mays
  Coding DNA Sequence Number=SeqID_26695
  Homolog annotation: Hit_ID=Q94HY9; Match level="QueryCoverage=21%, HitCoverage=3%, E-value=3e-08, Identity=89%"; Hit description =Putative sphingosine kinase
MARSLVLVATLTAVLLAAAPPPTRAAWVESDYPSSVPCGVTIPVEQCDPAVTAANAACRDMCHYGGRRGGRRKSMVRRLYTPQVQDSGLTSELQTVRIVYLQLLYRVFHWPAHQLTLLRQQTTANLPLDME

SEQ ID NO: 68475 - protein, 89 aa, Zea mays
  Coding DNA Sequence Number=SeqID_26696
MALTARVLLVLAATLTVAVAILPATARAAWVDYPSGVPCGVTIPVEQCDPGDAAANSACMDVCHYGGCRRGGQCVSLGLARGRGCHCKC

SEQ ID NO: 68476 - protein, 84 aa, Zea mays
  Coding DNA Sequence Number=SeqID_26697
MEDEQVMRQSFPCVTAWGQAEFLGGEYVNNCTNGLHKERLEADAELITGNKIDEAEAGAHDNKKLRRDDRTRKLNPKYYGANWL

SEQ ID NO: 68477 - protein, 120 aa, Zea mays
  Coding DNA Sequence Number=SeqID_26698
MADRLLQGATFSGGGGSSSSSVVGAAADPSLQAYAQYYYSARADNDASVVAFALAHVIRASPDHLPPQPQQAAALYGAGALRQGQGQGQGDHPQADAHHYPGGHHAAAAVEEEQEDTLHT

SEQ ID NO: 68478 - protein, 95 aa, Zea mays
  Coding DNA Sequence Number=SeqID_26699
MAALNPHRVLAGFIAETTTRARCCSLQAAAVSKAGSRMQPCHGGPHELEQGHTRGDVGVGGGSPLPDMGSGRRYPTAQQKHRGLKGMESIDSDSD

SEQ ID NO: 68479 - protein, 416 aa, Zea mays
  Coding DNA Sequence Number=SeqID_26700
  Pfam annotation: Domain name=DUF1639; Domain location=383-416; Score =31.7; E_value=2.1e-06; Accession=PF07797.4; Description=Protein of unknown function (DUF1639)
MIKPRPFRLALLLLLLAIAVRSPPHQISQQNLRSLPSLVERNAEPGEEGGRTGDCRSRTGGGVEEGAESMRGSADAVVVARDVVASSSPSKAASALDMTRYPRLSPDGLPLPNGSGSGASKKPAAPVSPAPRSSKDDVAPAVATDSSRIAAFLASTSLEPKPRARAPQPQPTAPNSAPTAAVAANRSPARDHGHGHCSDHSDPASPSSTGARELLLRWGQNKRMRCRRDCASASPQRRQAGGKIPRRSSSPAADNLMPPPSAAPYARGSNLRYATPRPPRSGASDAHHGRGALPNPLRSAEDCAGACAGAGEKFLAVAEAAARAQKQRAVSPHKVGLGVPDPKQQQNQWGSSGSGHQQQAGAAAGASSKPAAKLEVPRIYTTLSRKEKEEDFMAMKGTKLPQRPKRRPKIIEKTVS

SEQ ID NO: 68480 - protein, 255 aa, Zea mays
  Coding DNA Sequence Number=SeqID_26701
  Pfam annotation: Domain name=Metallothio_2; Domain location=97-164; Score=-19.9; E_value=0.082; Accession=PF01439.8; Description =Metallothionein
  Pfam annotation: Domain name=zf-C2HC_plant; Domain location=143-196; Score=29.5; E_value=1.2e-05; Accession=PF07567.3; Description =Protein of unknown function, DUF1544
  Pfam module annotation: Pfam domain module=Metallothio_2::zf-C2HC _plant; Domain location=97-164::143-196
MARGHPRQATAVRCIWVSSSVCDGAASANGEAASASGGSNNTARQEERQQLHVYSHFSVSSNRQLRHRRLRHPSGDSPRTCRLQQPPPSIDGFWPRHSGSSGAGGSGRDKGKEPCIGESSSAAAREWVVTADGTRKQLQGSIDDPWSQGDKWKKQGFKCAYCGCAKESGDKTRLRCHLASLSGDGKSCLNVPKRVRETIMDLAYSDARREQIPRDEAGQMAWALRESLLDQRTSGNSLPVGRSSIGTSDSRLEGG

SEQ ID NO: 68481 - protein, 222 aa, Zea mays
  Coding DNA Sequence Number=SeqID_26702
  Gene Ontology: Mol. function=transcription regulator activity; Cellular component=nucleus; Biological process=regulation of transcription
  Homolog annotation: Hit_ID=Q6EPZ6; Match level="QueryCoverage=86%, HitCoverage=47%, E-value=9e-37, Identity=45%"; Hit description=BHLH transcription factor PTF1-like protein
  Pfam annotation: Domain name=HLH; Domain location=28-77; Score=39.8; E_value=9.3e-09; Accession=PF00010.16; Description=Helix-loop-helix DNA-binding domain
  Subcellular localization annotation: CTP_CleavageSite=22; ConfidenceScore=5.06e-01
MSQPQAGAAVGGAAAPPRQRVRARRGQATDPHSIAERLRRERIAERMKALQELVSNANKTDKASMLDEIIDYVKFLQLQVLSMSRLGGAARSRQGRDGAAAAAGSDGLAVTEQQVAKLMEEDMGTAMQYLQGKGLCLMPVSLAAAISSATCHMRPPVGGPGVAAGHHMAAMRLPHVTNGGAGADDVSASPSMSMLTTPSAMPNGAGAGVDGKDARVRVEAVI

SEQ ID NO: 68482 - protein, 404 aa, Zea mays
  Coding DNA Sequence Number=SeqID_26703
MGKTIGIQVQFDFEQNLFVQNIQFKVQSIDQIMDTPPKLVALISGSSARLVLYRLFTLRNALPPLDYDDNKSISKFKMLLPHCIGGREACWLGEAAISGDGGGVLEGTTKKTKRPDRRLTPEPQPLLHSSSGGKPRGGHMGSSGTNGAVDRWRKWGGRGSPGTAPLLSAPTWCLAGQWSHSEAPRRAGCAGRLGPVSPPTHVAALPCPHPVMCRCACTTAALRGVACVLLSGVSALRLSTLLRLRAASPRRPACLKAGLRSQFGTASDVATCSAGPGSGTSCHQGRLIRTRRPQTIARRASPTVSTTPPRFTTDMRAWNGTERKADENTGVSIIIVPRVPFLFLRRRAGADPVGNGLPPGMLGPRRGVVANDAGAGKQPRRPGCVDAGWTAGGGMGMCRLTDHP

SEQ ID NO: 68483 - protein, 111 aa, Zea mays
  Coding DNA Sequence Number=SeqID_26704
MEPKEPISNPPPSPTKNPPFSSKNKDAQQPKCPKAKWKEQIMPKWLYDSYMRASSVGIDAVNAIVLGDDFLSAQKCNMKPKRCGLFNIHMLKMIIWEEEHTFTIGPSANEF

SEQ ID NO: 68484 - protein, 150 aa, Zea mays
  Coding DNA Sequence Number=SeqID_26705
  Pfam annotation: Domain name=zf-CCHC; Domain location=15-32; Score =17.1; E_value=0.0015; Accession=PF00098.13; Description=Zinc knuckle
FHNNRLNRWRGGCKDECFNCSDSDHFNTNCPNMNGKLEASKCDHHSGWCKGKHEYTSYKHTSKGSDEELKRWVEDKLNGLCFFANAVEGLYAMALSEDVVSGDNKDISDDSTFEVSLSADDLTIETKLAEKNARIALLEKASSVSAPVPS

SEQ ID NO: 68485 - protein, 638 aa, Zea mays
  Coding DNA Sequence Number=SeqID_26706
  Gene Ontology: Mol. function=RNA-directed DNA polymerase activity; Cellular component=mitochondrion; Biological process=RNA-dependent DNA replication
  Homolog annotation: Hit_ID=UPI00004C1733; Match level="QueryCoverage =99%, HitCoverage=56%, E-value=0.0, Identity=87%"; Hit description =UPI00004C1733 related cluster
  Pfam annotation: Domain name=RnaseH; Domain location=297-424; Score =1.7; E_value=4e-05; Accession=PF00075.14; Description=RNase H
  Pfam annotation: Domain name=rve; Domain location=546-638; Score= -5.4; E_value=0.017; Accession=PF00665.16; Description=Integrase core domain
  Pfam module annotation: Pfam domain module=RnaseH::rve; Domain location=297-424::546-638
MPGILRDVAEHSLDIRAGARPVKQPLRRFDEEKRRAIGEEIHKLMVAGFIKECVFGVPRGMLLGFIVSERGIEANPEKIAAITSMGPIKDLKGVQRVMGCLAALSCFISRLGERGLPLYRLLRKAECFTWTPKGEEALGNLKALLTNAPILVPPAAGEALLIYVAATTQVVSTAILVERREEGHALPVQRPVYFISEVLSETKIRYPQIQKLLYAVILTRRKLRHYFESHPVTVVSSFPLGEIIQCREASGRIAKWAVEIMGDTISFAPRKAIKSQVLADFVAEWVDTQLPTAPIQPELWTMFFDGSLMKTGAGASLLFISPLGKHLCYVLRLHFPASNNVAEYEALVNGLHIAIELGVRRLDARGDSQLVIDQVMKNSHCRDPKMEAYCDEVRRLEDKFYGLELNHITRRHNETADELAKIASGRTTVPPDVFSRDLHQPSIKTDDTPEPEKASAQPEAPSAQSEVPSAPSEVPSTRSEAPSAQPEAPSVRPEAPSVRPEVPSAPEGFYWPTAVADATRIVRTCEGCQFYARQTHLPAQALQTIPITWPFAVWGLDLVDPLQKAPGGYTHLLVAIDKFSKWIEVRPLNSIRSKQAVAFFTNIIHRFGVPNSIITDNGTQFTGRKFLDFCEDHHIRVD

SEQ ID NO: 68486 - protein, 199 aa, Zea mays
  Coding DNA Sequence Number=SeqID_26707
  Homolog annotation: Hit_ID=Q53M14; Match level="QueryCoverage=66%, HitCoverage=74%, E-value=1e-25, Identity=46%"; Hit description =Expressed protein
  Pfam annotation: Domain name=DUF538; Domain location=29-177; Score =147.6; E_value=3.2e-41; Accession=PF04398.3; Description=Protein of unknown function, DUF538
MVISRRMGEVGERGAFLRRRGIKSMLAHRFLLLVVVAAAAASGIASAKPTAYEALADYDFPPGILPKGVVAYTVDNATGAFTATLDASASGAGSSICEFSIEGSYSLRYQTKITGKISPDHLTDLQGVSVKVLFFWLNIVEVTRHGDNLEFSVGIASADFGIDNFLECPTCGCGFDCNDLLMLQKAGAATARLRLRGAF

SEQ ID NO: 68487 - protein, 53 aa, Zea mays
  Coding DNA Sequence Number=SeqID_26708
MDAKCGCPTGGDIGGGASSRSWTDASIPCSSIGSHAYTPSVFSPRTVSTPFLW

SEQ ID NO: 68488 - protein, 103 aa, Zea mays
  Coding DNA Sequence Number=SeqID_26709
MAISLPWVTERKKMSLMRRRLLRIKNKEIDVSHTMTDNVGYSKLEQGLSMMSKGELVDCLAYTSLKVGYPKHFLFSCLNLLNDFKILDLLIEVIMWWRIHVTP

SEQ ID NO: 68489 - protein, 119 aa, Zea mays
  Coding DNA Sequence Number=SeqID_26710
MEKKDIKCEVMEVPIEDVIPLAKIGLEPKLDSRKDSEEVVLEMPKKASWMTLVMDALFSIPPIDESNDREPSPLEEIIVHCWSLVLKCYELRTRQHKMLNVNALRPSQHYFPLDIMIFR

SEQ ID NO: 68490 - protein, 74 aa, Zea mays
  Coding DNA Sequence Number=SeqID_26711
  Homolog annotation: Hit_ID=Q6Z6L6; Match level="QueryCoverage=86%, HitCoverage=13%, E-value=7e-12, Identity=58%"; Hit description =Putative Williams Beuren syndrome critical region 20A isoform 1
MASLVCFAAEHLLRTDPEDGLEGFFIALFVRKAGPTSEEPSEDATVEVRTKQVRGRRNGVRAFSSLRLSRMILW

SEQ ID NO: 68491 - protein, 245 aa, Zea mays
  Coding DNA Sequence Number=SeqID_26712
  Gene Ontology: Cellular component=nucleolus
  Homolog annotation: Hit_ID=Q6Z6L6; Match level="QueryCoverage=95%, HitCoverage=44%, E-value=7e-66, Identity=58%"; Hit description =Putative Williams Beuren syndrome critical region 20A isoform 1
  Subcellular localization annotation: CTP_CleavageSite=34; ConfidenceScore=5.38e-01
MPPAPPPQQPKNRSRVPTPTGENRRPQRRMESRNASERAAFFARREAAAVLRRVLRGDATRRAAGSIKSLVYSPTVRNKRATFALVCQTLKYLPILKEVLASSEILSSKWKKQEELVYVTTYDILFGQGIAVSGSVEQLIMLQKDSLRTTLDKVCARKRVRCVEDLLSNKSAVLKVQALEWFKHNATKLNFSTLHNHGVKPKPRFLRVNTLKVTTESVIEELNKMHMGRASCMVAVALCPKPGWK

SEQ ID NO: 68492 - protein, 34 aa, Zea mays
  Coding DNA Sequence Number=SeqID_26713
IDPIFENQDSILKKNLKIPLRKAITPVYDINVPN

SEQ ID NO: 68493 - protein, 151 aa, Zea mays
  Coding DNA Sequence Number=SeqID_26714
MAPPPSTRDPRFYRSGELDAAHSFDREPSSDSNVDRPWHVGFVDPTAPLLAAHGMVTATRRSVACAPTAASNTFSAIGISVLGTTWGFTMFTHAEYLKYKSGGRIASDGVNAKLDEASRALLMKVLEDATQDAVRRQAKWVGGFITNQADS

SEQ ID NO: 68494 - protein, 76 aa, Zea mays
  Coding DNA Sequence Number=SeqID_26715
  Subcellular localization annotation: CTP_CleavageSite=37; ConfidenceScore=5.44e-01
MTTAALSPLRKQGDVSKDLTAPTAVLPQGSSSPPTATTSHEQGAKTSPTAMTILVIKARDTKLWWSLVRGLSDPFD

SEQ ID NO: 68495 - protein, 129 aa, Zea mays
  Coding DNA Sequence Number=SeqID_26716
  Gene Ontology: Mol. function=GTP binding; Cellular component =intracellular; Biological process=ATP catabolic process
  Homolog annotation: Hit_ID=Q9M7P3; Match level="QueryCoverage=80%, HitCoverage=26%, E-value=7e-51, Identity=92%"; Hit description=GTP -binding protein
  Pfam annotation: Domain name=DUF933; Domain location=39-122; Score =200.1; E_value=5.4e-57; Accession=PF06071.3; Description=Protein of unknown function (DUF933)
MPALFLLSKINIRGPWLHLLKGLCMIPKIIKTGFAAIHLIYFFTAGPDEVKCWQIRRQTKAPQAAGAIHTDFERGFICAEVMKFEDLKELGSESAVKAAGKYKQEGKTYVVQDGDIIFFKFNVSGGGKK

SEQ ID NO: 68496 - protein, 109 aa, Zea mays
  Coding DNA Sequence Number=SeqID_26717
MGVGERVRAWGGWSHGLLVYGRAQVVHLISGLPRGNPKFLELGYYEMTSAKSRFSSKTILNISREDYAPIEDMNLSKEYEWCQAICDDLKSKAEKFRTTRLGKSSTSTI

SEQ ID NO: 68497 - protein, 321 aa, Zea mays
  Coding DNA Sequence Number=SeqID_26718
  Gene Ontology: Cellular component=cytoplasm; Biological process =intracellular protein transport
  Homolog annotation: Hit_ID=Q8RZ91; Match level="QueryCoverage=38%, HitCoverage=14%, E-value=1e-47, Identity=72%"; Hit description =Vacuolar protein sorting-associated protein VPS16-like
  Pfam annotation: Domain name=Vps16_N; Domain location=6-320; Score= -138.9; E_value=4.8e-05; Accession=PF04841.4; Description=Vps16, N -terminal region
MEEIPPASAGNVLEDNPKKEQNVVVVDEVEDIGTKVGNIDATSAGSILSPELAPESINEINGADDENEVGDDSKDDDDEGEEKGSNYVALTVLLKVAVDGSSDGDNTVVSQDGSRIFTMERHLGSPVPYVRPTAPCQPARSNLFSPSKLAATTYPTEEMTNGSFIQGKLLAAFAYDGRFFEISNDFSSTIFQYECDSALPPEQIVWCGLASVTIYWHEVLLMIGPNGDSVEYNYNEPLKLIPKCDGVRILSNLSMEFLHHVSDFTTSFVGIGSIFPATLLYDVRDHYDIQSKGSVRYGMTELTQWLLNAFSLGNSGMAVQS

SEQ ID NO: 68498 - protein, 652 aa, Zea mays
  Coding DNA Sequence Number=SeqID_26719
  Gene Ontology: Mol. function=protein-methionine-S-oxide reductase activity; Cellular component=nucleus; Biological process=regulation of transcription
  Homolog annotation: Hit_ID=Q53MB0; Match level="QueryCoverage=97%, HitCoverage=96%, E-value=1e-120, Identity=41%"; Hit description=GRAS family transcription factor, putative
  Pfam annotation: Domain name=GRAS; Domain location=259-559; Score =279.8; E_value=5.2e-81; Accession=PF03514.5; Description=GRAS family transcription factor
MAAEPADVGDSEPEPFSPSDFLNLGPPTPRLDSPALQLHDDDDDLVLLFISRMLMEEETDGFFEQYHPDHPALLQAQQPFADILAGAAAADGSRGTSVAGSPAFAANAIWPYDPVQLSQLLLSRTYPADTAAYPSAAADSMASSAGSGAGTVNMDMLNLAFLKGMEEASKFLPATSNNHDHRRQATETCDKRVDESSPLLQQSASKGRKNHRHAPYWGEDEEAETGRRSCKVMAVETEESEMVEEFVQSGYDSLHEQMMAMTLSTAGSRKGKGKGKGSANEAVDLRTLLIHCAQAVAAGNRPSAADLLGKIRARSSPRGDATQRLAHCFAGGLEARLAGTGTQQLTAATKRASAVEILRAYQLYLAACSFTAMAYKFSNLAICKAVGGGGREEVASLLGYWGSLEAGPPEVRITAIDFPEPGFRPDARLQATGRRLTCFARRHGVPLRFHGIEARWDAVSVDELSIERDEVLVVNGLFSLGRMQEQEQDDVDRDSRPSPRDTVLGNVRKMRPDVFVLCVENSSYGAPLFVTRFREALFYYSALFDMMDAVAARDDDDRVLVEQHLFGQRALNAIACEGSDRVERPETYRQWQVRNERAGLRQLPLDPDAVRAIRRKVKDKYHRDLFIDEDQQWLLQGWKGRVLYAMSAWAAK

SEQ ID NO: 68499 - protein, 761 aa, Zea mays
  Coding DNA Sequence Number=SeqID_26720
  Gene Ontology: Mol. function=protein-methionine-S-oxide reductase activity; Cellular component=nucleus; Biological process=regulation of transcription
  Homolog annotation: Hit_ID=Q53MB0; Match level="QueryCoverage=97%, HitCoverage=97%, E-value=0.0, Identity=56%"; Hit description=GRAS family transcription factor, putative
  Pfam annotation: Domain name=GRAS; Domain location=354-662; Score =380.2; E_value=3.2e-111; Accession=PF03514.5; Description=GRAS family transcription factor
MSATPEDFLGAPYLAAPEPFSPSVFLDLPPTPERPDNSDDLVLPYIAQMLMEEDIDDNSPDHPALLTAQQPYAQILSDSATATATSSSSDSANATSSSSASGTGGNSTLSPSSDAPAGWPYDDALDISHLLRSPTYPATHMMGVGLDDFAELLTPPQGQGEAQRQQSSLAALSDGAEEEDGSTKAEATTTFPVGDADHAALASAFFGAQNGGDTDMLNMAFLKGMEEAKKFLPTNNSLLIGLDETSCKSLPKDRYIKPYTAFAATQVKEEEEHVVVHGNGMPMFGGSRSTNGRVRKNHRAEGDDLEAETGRSSKLMMPEQEETGANELYDEIMNCTYEGFMKRMEDLRIAMDSESEKSARKVSRKGARGRQQLVNEVVDLRTMLIHCAQSVATGDRRSAAEVLKQIKHHSSPKGDATQRLAHCFAMGLEARLAGTGSQAYQSLMAQHTSVVEFLKAYSLYMAASCFMKVRFIFSNMTICNAVAGRSKLHIVEYGVQHGFQYPGLFHLLARREGGPPEVRVTAIAVPQPGFRPAHQIEETGRRLSNIAREMGVPFKFRGIAAKWEAVRAKDLNIDPDEVLAVNSECYIGNLMDESVLVDSPSPRDTVLNNIREMRPNVFVHTVVNGTYGAPFFLTRFREALFFFSAQFDMIDATIPRDNNERLLIERDIFGTFALNVIACEGADRVERPETYKQWQVRNHRAGLRQLPLNPEVVKASRDKVKNYYHRDFLIDEDNRWLLLGWKGRVLYAMSTWVAEDNKPIF

SEQ ID NO: 68500 - protein, 165 aa, Zea mays
  Coding DNA Sequence Number=SeqID_26721
  Gene Ontology: Biological process=regulation of transcription
  Homolog annotation: Hit_ID=Q53MB0; Match level="QueryCoverage=95%, HitCoverage=33%, E-value=1e-35, Identity=43%"; Hit description=GRAS family transcription factor, putative
MDMLNVAFLKGMEEAKKFLPTNNSLLVDLDDTYGQSLPTDRDTKPCTAFAATQVKEEEVVVDDLRIAMDSESEKSVRRAMATGDRRSATEMLKQIKQHSSLRGDATQRLAYCFAEGLEVRLAGTGSQVYQSLMAKRTSVVEFLKAYKLFLAAISLNKVEKVGLQR

SEQ ID NO: 68501 - protein, 221 aa, Zea mays
  Coding DNA Sequence Number=SeqID_26722
  Gene Ontology: Mol. function=serine-type endopeptidase activity; Cellular component=integral to membrane
  Homolog annotation: Hit_ID=Q53MA5; Match level="QueryCoverage=99%, HitCoverage=56%, E-value=1e-44, Identity=50%"; Hit description =Rhomboid family, putative
  Pfam annotation: Domain name=Rhomboid; Domain location=23-139; Score =62.6; E_value=1.2e-15; Accession=PF01694.12; Description=Rhomboid family
  Subcellular localization annotation: CTP_CleavageSite=89; ConfidenceScore=5.16e-01
MASDHLHVAPRRSCSPAHQHAVPPSRGAYAWSKKFGVRIGLVYLISGFGGSLMSALFIQSSSVSVGASGALFGLIGSMLSELITNWSLYANKVAALLTLLLVILSNLALGLLPRVDNFAHIGGLVSGFLLGFVVFVRPHLDWLTQQQRSGGGGQGQQQAPPPVAAARKRKHRTYQYVLWLAAAALLVAGLTAATVLLFRGYDANQHCPWCHYLSCVPTRRW

SEQ ID NO: 68502 - protein, 118 aa, Zea mays
  Coding DNA Sequence Number=SeqID_26723
MVMVEKTGCTKPVMVEDKGKGPAKIEERKKAIEDDTPLGEGPFDQELGARNIEIAMQLGSKALKNKRNVKGEAVQKEIVNLRFKVFGLRFDCKEREKSFKILENILLKVELKLWLYPK

SEQ ID NO: 68503 - protein, 205 aa, Zea mays
  Coding DNA Sequence Number=SeqID_26724
MGATLAVLPLVSGDNGTRCTELAGEDELPVLEHHGSSSGPGAPSRTNVVGGGTPSRPGDVKFGRLAITLTISAAPSCGPGDFISGACPRPQWKRNNQSSRDLRSTTPCSVSRIRERRVEENQSRWAMTCGPHVEVAQGRTSERAVKQRCGWQWVPRDRGSGARGRVLGRAGGFSGWAELVTEAQNSNLHSNLVPKFIFKLYCDLK

SEQ ID NO: 68504 - protein, 180 aa, Zea mays
  Coding DNA Sequence Number=SeqID_26725
MAATLAVLPLVSGDNGTRCTELAGEDELPALEHHGSSSGPGAPSRTNVVGGGTPSRPAMLIWRLAITLTISAAPSCGPGDFISGACPRPQWKRNNQPSRDLRRTAPCSVSRIRERRVEENQSSGSRETEGVARVEGFWAAREVSLGGPNLVTEAQNSNLHSNLVPKFIFKLYCDLKVMFS

SEQ ID NO: 68505 - protein, 151 aa, Zea mays
  Coding DNA Sequence Number=SeqID_26726
  Homolog annotation: Hit_ID=Q6QP51; Match level="QueryCoverage=34%, HitCoverage=30%, E-value=5e-16, Identity=80%"; Hit description =Putative growth-regulating factor 1
MQVACNRTMRAHPFDFDASSMEAQTHTSCNWRAGYYVRETAPPIAPMSCLLDCGTSAATRGNPARGPTVPVEHIDHGDRERGYSERDPSPRRKRAPSPPTDQGFEGWPLGRVRQPPQSTRASGSLLIRGSKAGPSKGFDSRPRALGLRAHY

SEQ ID NO: 68506 - protein, 102 aa, Zea mays
  Coding DNA Sequence Number=SeqID_26727
  Subcellular localization annotation: CTP_CleavageSite=42; ConfidenceScore=5.81e-01
MAPAFNHVATSRTSSPITVVAPQPVSATVSPAPVTFFLSGCRASPLNSLATAQACYKLSAPAALLENEEEIEVEEARTSPPPLEEHQAKNCFYFDICGAEPN

SEQ ID NO: 68507 - protein, 96 aa, Zea mays
  Coding DNA Sequence Number=SeqID_26728
MSRGGSPAVMAGIGLATCAGCRAHWRYVLRPAHGGIVQLNGTGSVTGGQGCRRHKETTNGLPSGSVYLRRQTAEVWRRRSGISGEVVSNPRLGKLH

SEQ ID NO: 68508 - protein, 66 aa, Zea mays
  Coding DNA Sequence Number=SeqID_26729
MSSTAVGSSAPQSGAARKEKIVLDIDMTVKISSYPPSAETDCKWALGFCWNQPAIQSWSETISTKP

SEQ ID NO: 68509 - protein, 109 aa, Zea mays
  Coding DNA Sequence Number=SeqID_26730
  Subcellular localization annotation: CTP_CleavageSite=47; ConfidenceScore=5.10e-01
MAYQMLSVWVHIYTLSALQFGGPHLSVTIVILAKGKVFFRTFGLRPSFMLQSEFVDYNKLMLNLRTRNEAVHNMESMIETKVDAVPKLRARELRLNSRKRNRLKGEKVF

SEQ ID NO: 68510 - protein, 58 aa, Zea mays
  Coding DNA Sequence Number=SeqID_26731
MDRLTAMVHCDVLKLLGMWHTVVTIIKYFLVPTQNHFQSSSQATVSKNSDSKLTDSPT

SEQ ID NO: 68511 - protein, 178 aa, Zea mays
  Coding DNA Sequence Number=SeqID_26732
MALPVDVVGPRPRLGDVEAPPRSRSSLSSVAVVESEPLGRRGGDRRLRPGLSPSPGVGRSGPKSEPWVGRSRVHRLQGLSPSPSPGSSGAEFAVFRGLARVRALGRAGTEFAVFRGVSPSPSPGSGGAEFPNVPEGRGLTACQPHSVKWHCSRQAALSFCQVGSVERRSDCGHFASVD

SEQ ID NO: 68512 - protein, 720 aa, Zea mays
  Coding DNA Sequence Number=SeqID_26733
  Homolog annotation: Hit_ID=Q10ML5; Match level="QueryCoverage=29%, HitCoverage=16%, E-value=2e-75, Identity=58%"; Hit description=BRCA1 C Terminus domain containing protein, expressed
  Pfam annotation: Domain name=Ion_trans_2; Domain location=615-689; Score=50.4; E_value=6.1e-12; Accession=PF07885.6; Description=Ion channel
  Pfam annotation: Domain name=PHD; Domain location=286-337; Score =16.2; E_value=0.0014; Accession=PF00628.19; Description=PHD-finger
  Pfam module annotation: Pfam domain module=Ion_trans_2::PHD; Domain location=615-689::286-337
  Subcellular localization annotation: CTP_CleavageSite=31; ConfidenceScore=5.49e-01
APLSSPLWSPTPSAAPAPAMVAALPAQNSPVVQLAEGYSVNHMVSPQRAEESTLRGYSNLSTLETRQQKVIQPADVQSIAGNENPKREDGLDGACAQKRFFLKASFTKSECSKLLSPIRWILKREYLTSCIEAGKFVDEEPFEWFGTGFNDGRTISFDAPRKWRNIRQQMGHGAFYGMQIVAYGQFILPTLDTVKRAVKAGNGAVLATSPPYTRNSSATAHGIPCVSADYLVEYVCKPGQPLDRHVLFETNCVASMSLEKLTKKQLEMATAEKSEPSEDDDPEDLSCSACGRRDRGDVMLICGDEAGGGIGMHIDCCDPPLDAVPDDDWMCPRGSRELKGAEPNQGRAQDECARRRLRRRTRHSVPTVPRNRWNPTSPTAVSSLCFPEPESEKSPFDMDTEPLLPAHLLHSLPEHSEVFHFSPPPSPSCPSPASSYKDRIIFGAHPPPPQPPPPPPLPPSHSHRAHRRRSSVDGLYDFDLPSCSSSPPSPPSDPEDPSSAAAAGASSLFEFIANAASARTNLHRSRTAPAMAPLSAVTLAAAAAAGDQAPAPPERPSIVLHTFLFLLAYLALGEHLLITALKNPTSARKHRHNYIFDVKKGRMRIRMKVALALGVVAVCVGVGAAVLRRVESLGWLDAVYLAVMSVTTVGYGDQAFRTLAGRLFASAWLLVSTLAVARAFLYLAEMRIDKRHRAMANWVLSRDMTVSEFLAADIDNNGYV

SEQ ID NO: 68513 - protein, 70 aa, Zea mays
  Coding DNA Sequence Number=SeqID_26734
METLSAEDQKEFEEHKEQLIKCIRFIYTYKENDRETILQVWSKTDLLQPVAYWIVWVHRTVSSALARALR

SEQ ID NO: 68514 - protein, 99 aa, Zea mays
  Coding DNA Sequence Number=SeqID_26735
MDCLVHHEDIRLQRSTAPNPNGQLTWHTLDSEQYCVWCTTELSVMLGEHAKREMVTGENPGSSRKKNEERTPSKEAGDKHKEESVSSIKSHKKGDKKKK

SEQ ID NO: 68515 - protein, 105 aa, Zea mays
  Coding DNA Sequence Number=SeqID_26736
  Homolog annotation: Hit_ID=Q6QP51; Match level="QueryCoverage=99%, HitCoverage=79%, E-value=8e-15, Identity=47%"; Hit description =Putative growth-regulating factor 1
MMTASKKAGPSEGFDSRPRARRVRDDPGYVHYMAKARATLPRDRLTPYPDTRVSVGKVEASASASASGGVTSSPDLGLGLKRSLRLARPQPHTDYATGDTSLPYS

SEQ ID NO: 68516 - protein, 102 aa, Zea mays
  Coding DNA Sequence Number=SeqID_26737
  Gene Ontology: Mol. function=metal ion binding
  Homolog annotation: Hit_ID=Q6K2E0; Match level="QueryCoverage=95%, HitCoverage=28%, E-value=1e-36, Identity=82%"; Hit description =Putative RING zinc finger protein
MCGFLVGAVFHQMLRTLPICTAICCCFPCLISVLRLQEDLGQNRGATQELIDALPTYKFKPKRVKNWGIDHASSSEHLDEGGILGPGTKKERVVSAEDAGLL

SEQ ID NO: 68517 - protein, 517 aa, Zea mays
  Coding DNA Sequence Number=SeqID_26738
  Gene Ontology: Cellular component=cytosol
  Homolog annotation: Hit_ID=Q6AK87; Match level="QueryCoverage=27%, HitCoverage=55%, E-value=2e-15, Identity=38%"; Hit description =Related to transcriptional regulator
  Pfam annotation: Domain name=Hydrolase; Domain location=210-456; Score=-3.5; E_value=0.093; Accession=PF00702.16; Description =haloacid dehalogenase-like hydrolase
  Pfam annotation: Domain name=TENA_THI-4; Domain location=5-195; Score= -27.7; E_value=0.014; Accession=PF03070.6; Description=TENATHI-4 family
  Pfam module annotation: Pfam domain module=Hydrolase::TENA_THI-4; Domain location=210-456::5-195
MRTLWEGKKDRRKNHFAHDFILKQRELERTLLIYPDHAFLYGSMLLCCIQLIKEWGVDPTKEIPPSAATTKYTDFLLATAAGKVDGTKGSDKMVTPFEKTKIAAYTVGAMTPCMRLYAYLGKELMVFLKQDENHPYKKWINTYASSDFEDTTLQIEELLDKLSVSLTGEELEIIGKLYQQAMKLEVEFFSSQLIDQPVVAPLSRYCDPKYKLLIFSDFDLTCTIVDSSAILAEIAILSFQKANQSGIDNNLDRAKSGDLRSSWNMLSKQYMEEYEKCMERLLPPEESKSLDYDKLYKGLEVLAEFEKLANSRVVDSGVLRGMNLEDIRKAGERLILQGGCKNFFQKIVKTRENLNLDVHILSYCWCAELIRSAFSSAGCLDGLNIHSNEFAFEDSVSTGEIDRKMQSPLDKVEKFKSIRSDVDSTVPFLSVYIGDSVGDLLCLLEADIGIVIGSTTSLRRVGKQFGVSFVPLFPGLVEKQRQLAEEDASVFKARSGVLYTVSSWSEIHAFVLGSDFS

SEQ ID NO: 68518 - protein, 78 aa, Zea mays
  Coding DNA Sequence Number=SeqID_26739
MGPGASSGARGHARCGAGIRNRLVIGEFLTVVRGPPWIRPRPWSGYLDVLTMDHYVNWNMERPPGKTVLPQGFMDALG

SEQ ID NO: 68519 - protein, 95 aa, Zea mays
  Coding DNA Sequence Number=SeqID_26740
MSAKAFAVVLAVGGGGISGCFMKLSSLDIYDTRLIGSRMRGKHVGGCTEVPHGKIDSATSSFLHSSVSALRQRSFALAFERPVVAIRLSQRYIFF

SEQ ID NO: 68520 - protein, 145 aa, Zea mays
  Coding DNA Sequence Number=SeqID_26741
MASVMLCLSKVFHPQTDGQSEEFNKWHHPQKSLIDMKNHWVTLLLSHEEKENDRLYSKNDVGNNYQKITTLQIMRLSKNTSIAKLMVTKKKIKCNYEHVGYYNWLAKWRMRGKEPETKTVYEIHTRSMKHSAQLPHIHFKQGKNW

SEQ ID NO: 68521 - protein, 87 aa, Zea mays
  Coding DNA Sequence Number=SeqID_26742
MARIQWFSISLIHGRSTTYISMEMQCRYLSSEYIKRLKVPLLKLQPEVAATQDTNSDINGFISDDTTTEIFCFDNIAKHILGKPYEP

SEQ ID NO: 68522 - protein, 133 aa, Zea mays
  Coding DNA Sequence Number=SeqID_26743
MSGAHRTVFGAPEESDSELASFGFPLRYNSPDMSGAHRTVRVGEEGDYYNSGMRHGSPTLGVVEALDATRATAVTAEEARTATREMEKAATTAKLAAIAMNKVGFVVVVVASAVVEEANALDSVAHLYLAVNL

SEQ ID NO: 68523 - protein, 207 aa, Zea mays
  Coding DNA Sequence Number=SeqID_26744
MEKTKKRNMGVGTPRDMGGHIKEKDRGGKTTILYGIEFWFNLIRNPISKRRATRFSASIRTATSAPVTFGFFTLGFLGFLTSLLARGSGLVRVIIVGVGGTRGSGDPRVVEVGRPRRELLLQRAVALLGALLGGIEDAARLVIGLRHQIGHRGVGRLRLGYNMAMEAAAAMEEEEEAPARSSIAIATTHAQRVRRGSSWLSRGDEQE

SEQ ID NO: 68524 - protein, 99 aa, Zea mays
  Coding DNA Sequence Number=SeqID_26745
  Gene Ontology: Mol. function=dihydrolipoyl dehydrogenase activity; Cellular component=cytoplasm; Biological process=cell redox homeostasis
  Homolog annotation: Hit_ID=Q93WQ1; Match level="QueryCoverage=87%, HitCoverage=17%, E-value=9e-36, Identity=86%"; Hit description =Dihydrolipoamide dehydrogenase
  Pfam annotation: Domain name=Pyr_redox; Domain location=27-97; Score =40.6; E_value=5.4e-09; Accession=PF00070.17; Description=Pyridine nucleotide-disulphide oxidor
MLPGVHIDEKKIVSSTAALALKEIPKKLVVVGAGYIGLEMGSVWNRLGSEVTVVEFAPGVVPSMDGEIRKQFQRMLEKQKMKFMLKQKRFFVVLFVRKL

SEQ ID NO: 68525 - protein, 121 aa, Zea mays
  Coding DNA Sequence Number=SeqID_26746
MRSPGLRYWTTNARSVAVVDICYGVGGAAHLMNFDLQQWNLIFKFARYDFAYSNSTNEINEERFMNSPIHSLVSNSFAGCLSARAVSACMTNGLARAMLNTAGVDALNSWCIKLHRLHREG

SEQ ID NO: 68526 - protein, 435 aa, Zea mays
  Coding DNA Sequence Number=SeqID_26747
  Gene Ontology: Mol. function=actin binding; Cellular component =cytoskeleton; Biological process=erythrocyte maturation
  Homolog annotation: Hit_ID=Q1SCR2; Match level="QueryCoverage=92%, HitCoverage=90%, E-value=1e-119, Identity=55%"; Hit description =Lissencephaly type-1-like homology motif; CTLH, C-terminal to LisH motif
  Subcellular localization annotation: CTP_CleavageSite=19; ConfidenceScore=5.22e-01
MDMAIDTPSPAPPTPPAPSAAAGRQTRAAEAVRLEHQLVRVPLESLRATVRSNHRLAEKEIAAVLSSASAAPAESSAAAVDHLTSLVSRLHGLKRKMEEGARAEELQVQRCRARLDRLATASTGDDAEWEDMRLKRILVDYMLRMSYYNSPTKLAETSGIQTDTYHSIHIYVSMASLLLRTDLRQVDLDLVDIDVFLDAKRVIDSLQNNEVSPALAWCAENKSRLKKSKSKLEFLLRLQEFVEFVKVKNFIQAIAYARKHLAPWGSVHMKELQRVTATLVFRSNTNCTPYKILFEQDRWDYLVDIFKQDFCKLYGMTLEPLLNIYLQAGLTALKTPYPRMFCSEGSCPKEDPLSLEGFRKLAEPLPFSKQHHSKLVCYITKELMDTENPPQVLPNGYVYSEKALQEMSKKNDGKITCPRTGDVYDVSECVRAFIS

SEQ ID NO: 68527 - protein, 477 aa, Zea mays
  Coding DNA Sequence Number=SeqID_26748
MENRPLKPRRLTLAPGWEAALSGLDIQVSASNTSSNNCKGPWGKFWVLDSDDSDVESCGEDETSRDDFTSPCSTSIMSSQASNSIAPGELLSSSPPSVNGSSGVGVPGKCGGAMTRPWIGSLPKPRRSPKLTLGDALLMAKAGKIQGGRGAVSASKSCPAMIAESRLCPSMAMDRTRQRSGTTAGETKRGSRTERNRSGRTIASVPSSQLVATAACNGEVDSSAKCMTVGPTGNGLWRCSVRKEPYRPPIGLLALFDRAHAPQHHFHRAPKTKHRALGFHSYAASVRARPATTMENRGDAQQGAQGGRPGAAGAGRAAPRQDFQYTGSGQFRPGYGGGRGYAHRGRTWARPGHGRGAYGQAGGRGEVRPIPAGPDMSTPIPGVEGTLGTRTISGGSVGTAGDQAGMAAAILQQALSALQGMNAAKGGSDAPPPAAHQATANQSQPPNIEGKKTPPAPATEGEKKVPGKEKEGSWTNL

SEQ ID NO: 68528 - protein, 154 aa, Zea mays
  Coding DNA Sequence Number=SeqID_26749
MGRGRRGSGWPRRADGKRKHAPSPPLKDFGDSEYSEETSSEADRSPAPASPPSSSEDSDDSMGLSTTARAYWRSIERTRARWVGMSRGSPRTRRTPSEEWSGGDGDDEGDNSSSDDDDGSDDSKGDGGEGDSDGSNDDGDGGDNSKGDGDNGHS

SEQ ID NO: 68529 - protein, 429 aa, Zea mays
  Coding DNA Sequence Number=SeqID_26750
MNGESSQGDDPPPSSRLDNHRRDDEDGNDYDSERRGHRSCKEDTWSARIFRSLSRAPSERYCSSSCHGLHCDVEYSGRRRVREGRCGAATSTQAVKCSTCRVRGRSLVRRFWRRVEPRTQLSPRASRAARSGPGSNEDMGGSYHPSPQPPRMRADPKLCTKLVSATQLQETSAQHVDNNLGMHLSANAFSDVHSNPSMKENCYNDPAARCLIPIQDVFRSIWSSLSTYSRSMERGAEVLQQQHLDAHPPSLILDATTYRGVHRSVDLAADRLVECLFRPPARTILLSMTTAEIQETRKTVTTKIEASKATPTLCHRLHTVNTTTVRRSVRLAKSCPMHVIQRAQRNLCRKLGLLNNESNNFEAALQKFLTMFQRTQSLETLAALTSAFNLKGSIEKSFKAAMIAMMGAGVADRQEGIGSLRVEELQSIA

SEQ ID NO: 68530 - protein, 129 aa, Zea mays
  Coding DNA Sequence Number=SeqID_26751
MVLEVIVVTMYWQLPLPDSDVEIVVLEISTRHCCISVATMDEGDEEVFWVVSGHYDVNRQYNKPRAECFLDDIDADRRSVSPQSCPDSMGGQAIVQLPRGGKLEWSKGGGVYGFTEGGCGVVVLEALEF

SEQ ID NO: 68531 - protein, 58 aa, Zea mays
  Coding DNA Sequence Number=SeqID_26752
MAALDIGGGTDDRPVISKRDSLPGEQISSEEGDSLLQAFTPHHRPNPASDLDDKMFLK

SEQ ID NO: 68532 - protein, 142 aa, Zea mays
  Coding DNA Sequence Number=SeqID_26753
  Subcellular localization annotation: CTP_CleavageSite=71; ConfidenceScore=5.53e-01
MAPMSLTDEAVGSACHGHRSAQAGVAQREGRFTSTRPSRPASASKSSTSFAFVPPRLLGHVPPLPPHTTLYLTMVPSPGVVLPKRRRLTTSPTTALTTWWSLYQMDLDHTLFLLRSYLCLHLQMVSRSSEPTRVCSCAALPS

SEQ ID NO: 68533 - protein, 96 aa, Zea mays
  Coding DNA Sequence Number=SeqID_26754
MAPMSGTTKVRSFMAVLGLVLLIVCASSQSCQDDLLSRLHTSLSTDCLYTTTALAAITTRDSNYHQDPSQAMQQVEIKLKELREHQSKKKKNPYVS

SEQ ID NO: 68534 - protein, 127 aa, Zea mays
  Coding DNA Sequence Number=SeqID_26755
MDKKVATPYLIKKKKNGKVIAIKANNQANKGKGAKRIWVPKEIISTMKSTKKRLWLADPVARCRFLDPEAQRQRLPNPKARHRWLPGGGSPEACAGFTIRTTGPVTSSNPAHFEYPPATVSSNPTTL

SEQ ID NO: 68535 - protein, 90 aa, Zea mays
  Coding DNA Sequence Number=SeqID_26756
  Homolog annotation: Hit_ID=Q2R2T5; Match level="QueryCoverage=38%, HitCoverage=10%, E-value=2e-08, Identity=80%"; Hit description =Ser/Thr protein phosphatase family protein, expressed
MAPAHDRLRRLVLLLVVATAAAALLLAPTTADAALPRVQHTPTKADGSLAILVVGDWGRRGQFNQTLVAQQYPYNQTRLKGYFRNSSLLR

SEQ ID NO: 68536 - protein, 65 aa, Zea mays
  Coding DNA Sequence Number=SeqID_26757
MGAMVQVELNFEESTFTDCLVLLPTICLEEVLRGFRSVFSGANKIGDGGFGSVFSDTNNDFVLLC

SEQ ID NO: 68537 - protein, 212 aa, Zea mays
  Coding DNA Sequence Number=SeqID_26758
MDGNRRDWGSGARLPWIGEILVSRKERRSGARGQPWMEVGTAGGAGGGCHGSARFSRRARKGGAGRAGSHGWKPDAAGGAGHDCHGSARFSRRARKGGAGRAGSHGWKPDAAGGAGRSCHGSAIFSRRARKGGAGRAGSHGWKSTLLGERGAAAMDRRDSRVAQGKGSGMRFRQNRAPSASVDAYIRHLSSSRDYNKKNLISQTFYIGKWIA

SEQ ID NO: 68538 - protein, 144 aa, Zea mays
  Coding DNA Sequence Number=SeqID_26759
  Homolog annotation: Hit_ID=Q6Z7B3; Match level="QueryCoverage=33%, HitCoverage=6%, E-value=2e-15, Identity=83%"; Hit description=Heat shock factor protein hsf8-like
MTDNDGAAARIRKESLKVGDHIYSWKVTSWKRLLALIRQWEVPWDDTLDTVVSYKISQVVDAKVIHLDYNNSRIFLSLKDVKVMLETTLGKEELKETILMCTNRDWNSIQTEGKDRRWSCQVKWFVQLTETKSINSHSTTWNKK

SEQ ID NO: 68539 - protein, 514 aa, Zea mays
  Coding DNA Sequence Number=SeqID_26760
  Gene Ontology: Mol. function=oxidoreductase activity; Cellular component=integral to membrane; Biological process=electron transport
  Homolog annotation: Hit_ID=Q6YUY8; Match level="QueryCoverage=97%, HitCoverage=99%, E-value=0.0, Identity=66%"; Hit description =Putative cytochrome P450
  Pfam annotation: Domain name=p450; Domain location=38-499; Score =317.2; E_value=3e-92; Accession=PF00067.12; Description=Cytochrome P450
MDRHSLLYQSLIFSVVTIALIRVLKLFLTTRAPKVRLPPGPGKLPVIGSMHHLMNALPHRALRDLARVHGPLMMLQLGGTPLVVVSSKEMARKVLKTHDANFANRARLLGGDIVLYGWSDIVFSPTGEYWRKLRQLCIAEILGPKRVLTFRHIREQEMAAEVARIRAAGPSTPVELNAMFINLANTIVARASFGNVQGNAENFLSAISAGVVLTSGFTVPDLFPTWRPVLAAVTGMRHALEQVHRTVDTTLQGMIKERRRIRGTKRQGEQDENLVDVLLGLQERGGLGFNLTENSIKAVLFDMFSAGSGTLAASLSWGMSELMLNKRAMSKLQGEIRQAFHGKATVTEADIQASSLPYLKLVIKETLRLHPPAPLLVPRESIEACEIEGYTVPARSRVVVNVWAIGRDPKCWDDADEFKPERFEDGMVDFNGTCYEYLPFGAGRRMCPGIAYALPVMETMLVQLLYHFDWLLPDGVSELDMAEMRGLGARRKSPLLLCATPFAIPESTTSEVPR

SEQ ID NO: 68540 - protein, 180 aa, Zea mays
  Coding DNA Sequence Number=SeqID_26761
MGHRNDEINAADGIDRGEGVDHDDDETDAEVGGDCGERVQETHAPSEPDLALYELRPILAQSRPRSTFPSDTSPDTDPRSGYCASTRTFHNMHAPSFLSSSDIPFVIPAFALFFLPNLLPPPTVVTASRPMLVDTGLRYWTTKARSAAAFGICYEVGGGVVSPWRIQGWEGTHILSHFSD

SEQ ID NO: 68541 - protein, 213 aa, Zea mays
  Coding DNA Sequence Number=SeqID_26762
  Subcellular localization annotation: CTP_CleavageSite=74; ConfidenceScore=5.31e-01
MEVVAPSMNKGWRGDSNIVIVGRWRPASWCGVRSNGNSVVAHRARRSLRAPPFCRVCAPTTRLQSPDHWGPFLRAGSLQSPRISFPRRQLTITVRNHFDVIRGFYGPSAQLQSTQAAVDLWPLRAAAVHAGSCRSMAHPRRQSAITSPQSPPRRQSAISITPPRRQSTICAHNLHCADERFMARLQELLYKVVGDTKVVSDISLSPCSTRGYL

SEQ ID NO: 68542 - protein, 154 aa, Zea mays
  Coding DNA Sequence Number=SeqID_26763
  Subcellular localization annotation: CTP_CleavageSite=45; ConfidenceScore=5.48e-01
MAAREASAPAPASPHAGDGPGRPPRPTLALPPRSAVESLFATGASSSAGAAETSPGPLTLAAALFPDASSPAFHGSFTQLLVGAIGSPAVPSPPSPFAVPPGLSPATLFGSPGLFSPTCLRICEGITAWRLEGSTLLDPPWEIYIRGGKEQLRK

SEQ ID NO: 68543 - protein, 322 aa, Zea mays
  Coding DNA Sequence Number=SeqID_26764
  Gene Ontology: Mol. function=sequence-specific DNA binding; Cellular component=nucleus; Biological process=regulation of transcription
  Homolog annotation: Hit_ID=Q10IU8; Match level="QueryCoverage=89%, HitCoverage=69%, E-value=1e-111, Identity=69%"; Hit description=WRKY DNA binding domain containing protein, expressed
  Pfam annotation: Domain name=WRKY; Domain location=203-262; Score =151.7; E_value=2e-42; Accession=PF03106.6; Description=WRKY DNA -binding domain
  Pfam annotation: Domain name=WRKY; Domain location=34-92; Score =139.1; E_value=1.2e-38; Accession=PF03106.6; Description=WRKY DNA -binding domain
  Pfam module annotation: Pfam domain module=WRKY::WRKY; Domain location=203-262::34-92
EKPALPKHAGNSNIESNEVSQGLKTSAPTFDKPADDGYNWRKYGQKAVKGGEYPRSYYKCTHTSCPVKKKVERSAEGHITQIIYRGQHNHQRPPKRRSKDGGGPLNEADVLHENEDISTRSEPGSQEHSGKHEGSNDGILGPSVSRRGGGDEQLSGSSDSDEEQDDEQRAGDEDPGYANANKRHVPTPAQRIIVQTNSEVDLLDDGYRWRKYGQKVVKGNPYPRSYYRCTYQGCDVKKHIERSSQDPKAVITTYEGKHSHDVPAVRNGSHAAANANGSSSTSLPVPHRGKLYLFSDPFPPRCAASRSAPQQKLGTASPHHWF

SEQ ID NO: 68544 - protein, 69 aa, Zea mays
  Coding DNA Sequence Number=SeqID_26765
MAVNWELQGCCHRDQRIFITGVSTIVILLLRTFLLKPFKLITVFLHETSHTLVCKLTCSDAASSELEWC

SEQ ID NO: 68545 - protein, 177 aa, Zea mays
  Coding DNA Sequence Number=SeqID_26766
  Homolog annotation: Hit_ID=Q9SQZ0; Match level="QueryCoverage=28%, HitCoverage=8%, E-value=1e-16, Identity=78%"; Hit description =Putative amino acid transporter; 33388-30195
  Subcellular localization annotation: CTP_CleavageSite=67; ConfidenceScore=5.56e-01
MPPPPSRSSDCRINPASIPTVRLPLSHTRSHSHTRRHGHPAMRAAASVSRSHAPQQPPASRPNPAAMCAAWWNLVGLGLGDMVGAGVFVTTGCAARLYVGPDLVVSYAIAGLCALLSAFCAVVDELRRMLDPGKPSFTPSKGKPNVVMFVGLQVPKIISSVEGVVGLGDHGWAVKDS

SEQ ID NO: 68546 - protein, 115 aa, Zea mays
  Coding DNA Sequence Number=SeqID_26767
MATEDRAMPGKSVLGGAVGVASLVEAAAMASACFSTPDDRGGKSMTMASREDYAVHEDSVPDAVVALPGAWTAVVGVVALMASLAVLDDSKQSPLVIRLRCVQETNKNSDISAIE

SEQ ID NO: 68547 - protein, 47 aa, Zea mays
  Coding DNA Sequence Number=SeqID_26768
MEAHNLETPTSDSRLHTAALASDEPVKLNKGALKLFLHCIPLAGGQA

SEQ ID NO: 68548 - protein, 92 aa, Zea mays
  Coding DNA Sequence Number=SeqID_26769
MELAPGSMRMYGGGGIAAHRPRSAGGNELKRKPRRLGSRWLGRTAALAGVVAAMADEGGSRVLVRVPETEQWAPLRSGGTKNGSGATWAARQ

SEQ ID NO: 68549 - protein, 108 aa, Zea mays
  Coding DNA Sequence Number=SeqID_26770
MPPCDVVGSSPGSGEAEAPPRSRSSLSSEVEVESEPWGRTRRSSSSEAETGAEPWGRARRSFLWRPRPDFGCCQPHSVEWHSSRSDADGAVFLSDLKIKPAASELATI

SEQ ID NO: 68550 - protein, 84 aa, Zea mays
  Coding DNA Sequence Number=SeqID_26771
MAASRWLWPFPIHICWLEGLVEDVVAAVEGSCSRQIKGEGAAWPMDVVAVLDSSTSSLNLGFSDPTTINGTEVPEIDWGHQVIV

SEQ ID NO: 68551 - protein, 44 aa, Zea mays
  Coding DNA Sequence Number=SeqID_26772
  Homolog annotation: Hit_ID=O04075; Match level="QueryCoverage=60%, HitCoverage=27%, E-value=3e-07, Identity=96%"; Hit description=Root abundant protein
MEEADVKTKWENSSWGKKLIVQKRRASLTQRALHGCNDVLYKTL

SEQ ID NO: 68552 - protein, 285 aa, Zea mays
  Coding DNA Sequence Number=SeqID_26773
  Homolog annotation: Hit_ID=Q8H4K2; Match level="QueryCoverage=33%, HitCoverage=59%, E-value=6e-08, Identity=47%"; Hit description=Early nodulin 75-like protein
MGFASPDLIVRVRRAGGIAGTAARGQIWEEDGEWKEAINNGEGRVAAQSQGGGGRGTAGVRWWGGGEGGETTGVERSGGSCASPWLEPPARIRSNATTRSAARWDARWDGGLHDGTMGLRSTRKSLGRTNRCHRRADVWWGMCPTAWLGEWVQWTRRAGPDRRGGHQRLGTGHTEGIGGKSPTLGMMTGIGDKAPTFDMMEGIGGSVTFGMTAGTTASIGVNAAVFGTTWICGTSPTMGTVSMASISGRVATSTIARLQHNRNARDDDRSDGAREHEQDVAWNDT

SEQ ID NO: 68553 - protein, 154 aa, Zea mays
  Coding DNA Sequence Number=SeqID_26774
MVGLRGGSTNSVKLWSATSRRGAARHSGEEATAEVTNVRRSALARDDERRPTMDSKEQRCSRKTSDKTVELERMEVASNGEWRKGRARQHNDVANFDDDDEADWRGPYQARWRKTTCGEARREQHARRPDEIYGVREELGARWGWDQRAGRYLL

SEQ ID NO: 68554 - protein, 221 aa, Zea mays
  Coding DNA Sequence Number=SeqID_26775
  Gene Ontology: Mol. function=oxidoreductase activity, acting on paired donors, with oxidation of a pair of donors resulting in the reduction of molecular oxygen to two molecules of water; Cellular component=membrane; ...
  Gene Ontology: Cellular component=Biological process=fatty acid biosynthetic process
  Homolog annotation: Hit_ID=O64907; Match level="QueryCoverage=97%, HitCoverage=73%, E-value=6e-35, Identity=36%"; Hit description=Omega- 3 desaturase
  Pfam annotation: Domain name=FA_desaturase; Domain location=26-217; Score=-44.9; E_value=0.0025; Accession=PF00487.14; Description=Fatty acid desaturase
MRRVDDDVAFDAGKPPPFRIGDVRAAVPEQCWRKSPWRSLCGHGSFSDSATLNSVVGHLLHPRPLPWMVYYCCGSALGLRAPAVQRSGSGLQASSAACCGGGPTAVLRGSGRPAVWLRPPGEQRCVLQRRALGDGCLGGSSTAGGRRRLVFVMWLDLVTYLHHHGHQQLPLPWYRGQEWSYLRGGLTTVDRDYMAGSTTSTTTSAPMSFTTSSRTTISSKR

SEQ ID NO: 68555 - protein, 89 aa, Zea mays
  Coding DNA Sequence Number=SeqID_26776
MGQRKEFGMSFCQGRITILLSQSPLDIWESLAATYIALEAADDEGVGLCDRLLQADHRVMELESKVVGLHEGVDEVVAFVRAQGADRGE

SEQ ID NO: 68556 - protein, 224 aa, Zea mays
  Coding DNA Sequence Number=SeqID_26777
  Subcellular localization annotation: CTP_CleavageSite=13; ConfidenceScore=5.01e-01
MVRRPSLRSPTARCTSLPQHRNPPLPVSGELPIPPCSCPLRAVTLAEHLAPFKLARPSFPLAAPCAPAYATAKSRLRSPAVRARRLVARRQAIPQLRRSGKATPPQPAPCHNSPRSEPLASLSPASSLRPVVHPAASICTALPCGHGQAPAPTSSQSLALAACPNPGEPPPPALATGESAQPVPLWSMPPSVVVGRLKEKTRRGKEEGVEANLQEFQDFDEFED

SEQ ID NO: 68557 - protein, 240 aa, Zea mays
  Coding DNA Sequence Number=SeqID_26778
LAARKPVEVPGLQEQRRFAVEELCSEGHRAHGEEELCAGNPGRHGRWSSVARKRIALRTHRKSRGEEKKLLPCMKGRGVERPGGRGEELSSLLAVEQGTHRAAAVCHRLERKCGLGEGMGRDVVDLECREADGDGGLGELGRGAPARTSGRLLLPAQWQWPSWEREAAAPCYWGRRAPLLACKGMPSARGKKGVRIQVPKEKIRCRGIHGGGSVRPPWERAGAQGRKKGVDWRREKGSGG

SEQ ID NO: 68558 - protein, 53 aa, Zea mays
  Coding DNA Sequence Number=SeqID_26779
MAAMGRDAPLLGSVGRMMGRGPPIHRWTSKIKGEGKLTPRSLSLPKNEAQSRD

SEQ ID NO: 68559 - protein, 74 aa, Zea mays
  Coding DNA Sequence Number=SeqID_26780
MVLVVTTARLSSSVERGEKKVYRLEKSEPYNQDLVNVVQSRRIESGLLIVNLTDGSGQARGKYTIMDRGSNGSE

SEQ ID NO: 68560 - protein, 163 aa, Zea mays
  Coding DNA Sequence Number=SeqID_26781
MAHRIASPAVRASRRSDKPAPLVGEFAPELGARSVCPRARDGLDCKNQDGGFYYSEAEGLFNKRTTRSGEGSVRIQGDMANAVVGTTSVQRHRRVAVYGEVAWRQRKPTHASNCASTMVGNGKSGAWGGGLPREMALGSLSDGENIAEPWVNGGGDMAVRWRV

SEQ ID NO: 68561 - protein, 316 aa, Zea mays
  Coding DNA Sequence Number=SeqID_26782
  Homolog annotation: Hit_ID=Q4JL76; Match level="QueryCoverage=31%, HitCoverage=40%, E-value=6e-45, Identity=82%"; Hit description=Myb -related protein MYBAS2
  Pfam annotation: Domain name=Myb_DNA-binding; Domain location=44-91; Score=47.6; E_value=4.2e-11; Accession=PF00249.21; Description=Myb -like DNA-binding domain
  Pfam annotation: Domain name=Myb_DNA-binding; Domain location=97-142; Score=47.5; E_value=4.6e-11; Accession=PF00249.21; Description=Myb -like DNA-binding domain
  Pfam module annotation: Pfam domain module=Myb_DNA-binding::Myb_DNA -binding; Domain location=44-91::97-142
  Subcellular localization annotation: CTP_CleavageSite=39; ConfidenceScore=5.46e-01
MATPAAASKMSKKLQGGGDRSSGSSSRGSGNSDKQQVPAAAMRKGPWTEEEDAQLVWFVRLFGERRWDFLAKVSGLRRTGKSCRLRWVNYLHPGLRRGRITADEERLILQLHAQWGSRWSRIARSLPGRTDNEIKNFWRTRARKQKAAAQQQQQQQDSRSSKTATASAFSGSASSVTTTTSSCSGSPSPTSRGCGTATSSSALTESALRQSGGEDEDAELDEASTTTTTTASQRQHQDDDHQQQHQECYASDHFWNDIAAAEAAIYMLIDGGWTGSGPGHPAADPPSSPAWEYCSDYSLWRIDDDEYYEKMLDSSS

SEQ ID NO: 68562 - protein, 337 aa, Zea mays
  Coding DNA Sequence Number=SeqID_26783
  Gene Ontology: Mol. function=RNA-directed DNA polymerase activity; Cellular component=intracellular; Biological process=RNA-dependent DNA replication
  Homolog annotation: Hit_ID=UPI00004C1733; Match level="QueryCoverage =99%, HitCoverage=24%, E-value=1e-176, Identity=91%"; Hit description= UPI00004C1733 related cluster
  Pfam annotation: Domain name=RVT_1; Domain location=56-225; Score =142.5; E_value=1.1e-39; Accession=PF00078.17; Description=Reverse transcriptase (RNA-dependent
MPGILRDVAEHSLDIRAGSQPMKQPLRRFDEEKSRAIGEETHKLMAAGFIKEVFHPEWLANPVLVRKKGGKWRMCVDYTGLNKACPKVSHPLPRIDQIVDSTARCETLSFLDAYSGYHQIRMKEFDQLATSFITPFGMYYYVTMPFGLRNASATYQRCMNHVFGEHIGRTVEAYVDDIVVKTRKASDLLSDLETTFWCLKAKGVKLNPEKCVFGVPQGMLLGFIVSERGIEANPEKIAAITNMGPIKDLKGVQRVTGCLAALSRFISRLGERGLPLYHLLRKAECFTSTPEAEEALGNLKALLTNAPILVPPAAGEALLIYVAATTQVVSAAIVVER

SEQ ID NO: 68563 - protein, 131 aa, Zea mays
  Coding DNA Sequence Number=SeqID_26784
MARIRSGGANVCAQTRADQRARGVSGLGRDGLTRRPQLQGAGERESGERVGQTGCAPGDFVSAKKPAAVLPAGMAAPSPEARRARSPRAREKCSGERGQDEPEGERTNQRVSRAEGDATELTEGTGATRAQ

SEQ ID NO: 68564 - protein, 140 aa, Zea mays
  Coding DNA Sequence Number=SeqID_26785
MRGIQLRKKLTTPAHRLVGEKTERQNDDGVAEGGWQRGPARQCIPLSAHPIGNIKWRLPHYIRKPQGLSFVTLTVFFLSPFLKNPIPLTKNTLVGGGKKEEEPSWDSLDDEGSSAYISSNSESLSKDVPLEDLSLTDVTP

SEQ ID NO: 68565 - protein, 303 aa, Zea mays
  Coding DNA Sequence Number=SeqID_26786
  Gene Ontology: Mol. function=calcium-dependent phospholipid binding; Cellular component=plasma membrane; Biological process=cell differentiation
  Homolog annotation: Hit_ID=Q6H450; Match level="QueryCoverage=98%, HitCoverage=99%, E-value=1e-133, Identity=78%"; Hit description =Putative annexin
  Pfam annotation: Domain name=Annexin; Domain location=157-223; Score =98.6; E_value=1.9e-26; Accession=PF00191.10; Description=Annexin
  Pfam annotation: Domain name=Annexin; Domain location=233-298; Score =124.1; E_value=3.9e-34; Accession=PF00191.10; Description=Annexin
  Pfam annotation: Domain name=Annexin; Domain location=74-139; Score =62.3; E_value=1.6e-15; Accession=PF00191.10; Description=Annexin
  Pfam module annotation: Pfam domain module=Annexin::Annexin::Annexin; Domain location=157-223::233-298::74-139
MASLTLPPAPPNPRQDAIDLQKAFKDTVAEWTGDYSMGPETVVAIWLPGGYLDFLRMRVWGKAMLLWILDPAGRDATVLREALSVDTMDLRAATDIICSRTPSQLQIMKQTYYARFGTYLEHDIGHHTSGDHQKLLLAYVGIPRYEGPEVDPTIVTHDAKDLYKAGEKRLGTDEKTFIRVFTERSWAHLASVSSAYHHMYDRKLEKVIKSETSGNFEFALLAILRCAENPAKYFAKLLRKAMKGLGTDDKTLIRVVVTRTEIDMQYIKAEYFKKYKKPLAEAIHSETSGNYRTFLLSLVGPGH

SEQ ID NO: 68566 - protein, 184 aa, Zea mays
  Coding DNA Sequence Number=SeqID_26787
  Homolog annotation: Hit_ID=O49147; Match level="QueryCoverage=16%, HitCoverage=10%, E-value=7e-07, Identity=87%"; Hit description =Lysophospholipase homolog
  Subcellular localization annotation: CTP_CleavageSite=57; ConfidenceScore=5.58e-01
MWAPPAASPTGAFPSLRPSRTAVVRVLVTLPAAARPQDQPRRRLCLAVPRPAPEMASAAAEGEGEEEDVVVVEGDTGKKTAVEMDATVRRELAIRRLREEAEEEANEAGTRRRSSRRDFAVFETARGDALFTQSWTPAADDRLKYSHLPYPTNPRLPFFESYKCELCWNVMKSSGWVFKPDMLR

SEQ ID NO: 68567 - protein, 157 aa, Zea mays
  Coding DNA Sequence Number=SeqID_26788
MTIKLKEKGAILTWGPGPSSDPGSEIAALAAAAVAAGGAPGEITPKWWWWRRDRWWWRWRRDQWWWWRQTDASLRAVGLGARLLDPASGPLALLGRLRNEQPISATQPASPLLLRPSELPGVGAPVEVPLAAPLPLSKGLGATAGVALRAHRRAGDL

SEQ ID NO: 68568 - protein, 46 aa, Zea mays
  Coding DNA Sequence Number=SeqID_26789
MAVIPAHKNSWPASSDLRGRLDFRWMMSWTVRNMDSSLALIYENDL

SEQ ID NO: 68569 - protein, 56 aa, Zea mays
  Coding DNA Sequence Number=SeqID_26790
MSRAFDDYYIKDCGVISAPEGKLHVMEMIQKLARKKHSHDFFVRATFARVGKGACC

SEQ ID NO: 68570 - protein, 88 aa, Zea mays
  Coding DNA Sequence Number=SeqID_26791
MQLHILRDISFLEFCIKQSTTKAKMLLQGNIGNANDAFYPPLSHVVVQPDAIALNDNDFIEAKDKKNKNKAAKNKIFYCESSITYWFL

SEQ ID NO: 68571 - protein, 137 aa, Zea mays
  Coding DNA Sequence Number=SeqID_26792
MLVDYTTGASLAEVQGKATSQTPPPAEARGRVLLLLLLVLLLASALLLLVQAMMQSLQGDMANSTVGFTPAREHQRARDKERLEDGGEAVKSWVDGGGLRLRKKCSGRERGRESSTEDANEWGKVGERGTGSKGTRA

SEQ ID NO: 68572 - protein, 188 aa, Zea mays
  Coding DNA Sequence Number=SeqID_26793
MGAKNDGAEEPRGQSWKQGQARSSGWGCGTSEQSARARRGHTRRGRARRDNREMGGHDAGEDAGDGRAMEVTVGRWGEVKGATMGELAEHLGDGVRRASSAARGMGERARELRPASTRRGAGAWARHGDRVRHREQAGHRAEKRVGNSRARQQGDGGRRAAMDRGSRPASRGAGHGWGREEQGAPGRR

SEQ ID NO: 68573 - protein, 102 aa, Zea mays
  Coding DNA Sequence Number=SeqID_26794
MREVLLYQLGLATAGATSTLFLPEGNPTGAPRPLCTVGKAVGVLVSIGTYLVTARLLDEGLLQHVLDHPTALWFVGPMFIALKQERQRGCPLARPCPSSSLP

SEQ ID NO: 68574 - protein, 100 aa, Zea mays
  Coding DNA Sequence Number=SeqID_26795
  Subcellular localization annotation: CTP_CleavageSite=21; ConfidenceScore=5.38e-01
MGRFETTTLGSSFGSPQRTPCAGTRRARRVAQISTVTLDYSVAMKPLSCSIILARSVLDGSAMGELEDATEGGEGGGLCGGTVGLSGALAADSTSAEVDE

SEQ ID NO: 68575 - protein, 80 aa, Zea mays
  Coding DNA Sequence Number=SeqID_26796
MARGAEVVCFMFSLSPWRALWIDGGALRDEPITMAPVFMGRHDPTVILLRHGRADLSEFVAARVRFGGEDIADKWSLLMF

SEQ ID NO: 68576 - protein, 105 aa, Zea mays
  Coding DNA Sequence Number=SeqID_26797
AKPLAADDLIHHCSWPARLRPPPTKPKRGRVGLAGGPHQATNLLGRVSLWWFHSYARSSAFEEEEDEEMMMRIMLVSIVLMIMVSSKEGVEVDLQEFPDFDEFED

SEQ ID NO: 68577 - protein, 139 aa, Zea mays
  Coding DNA Sequence Number=SeqID_26798
MAKRPRGFTDNSQSCSWHILAGLSNGALQNFSSEQGVLVRPHLAAGPRLHAAIVALVYCGVRPCIGQSLCAGDMRSHGVPLRCRVRGQTGEDGRGPLDQARVDQIRSQITIRPWRIAIVGLESSGGEWIHGSLDLNHRI

SEQ ID NO: 68578 - protein, 131 aa, Zea mays
  Coding DNA Sequence Number=SeqID_26799
MEPGRRLRKSKELSNLSGMQSDILALKVEPQPLMVRVNPNGGIEHSDPLLNVSATRGRQPRLHGYMSEPTYPGSSGSLKVKQMRINSQWSHLSLVTLPKARWKNGRSGSGSASSGSWSSGSGGHSGSGGWL

SEQ ID NO: 68579 - protein, 132 aa, Zea mays
  Coding DNA Sequence Number=SeqID_26800
MGKKGLAVLCWPSSKEQGARTKRRTGRALGCLPWTTERGRKRWAPWWPRGGVELPALAAAVVSSEEEGREYGWWRLGKMEDDDQPVVPEHVAEDLPEQQSGDLGHFPEYLSCLGGDTGNMDDFEEFQDYDKF

SEQ ID NO: 68580 - protein, 81 aa, Zea mays
  Coding DNA Sequence Number=SeqID_26801
MAWLTGNGRGPAKGQVRSGGLWRSRRGADHRQWWSEMGWPRAQAVGLAGGMADGGELAGVGVFARGMRRSEEQTATHQRYL

SEQ ID NO: 68581 - protein, 268 aa, Zea mays
  Coding DNA Sequence Number=SeqID_26802
MAGCKYLSLIFVPIGLISTPPSDGIFSSALSSSCLHLPADGSLEASSAHDTSLCAQLPTNLASLRNRLLELLSAPLPGVESLTLGLFSTFLSSPNRAPGVGSPTSSPTARPHLPWPRARLLCLAALSAGSRSVELLPELRPAMALAAAPLPVLCSAMEIATPSFLCRVRPELPPALLVGRASSPACSCSSLNARACSLCPATLAPPLSFAGALPSLHHGRACSLVHSVLCSPVAAPGCCELQLGFSPARRLCSLAMVAVFPACDARSH

SEQ ID NO: 68582 - protein, 260 aa, Zea mays
  Coding DNA Sequence Number=SeqID_26803
MSGGCRVQRRSPSLKAKNDDLPGLPLAILCSHCYVAFPQFEVAEDDEDEGGLWYAARLSSGRDLVEEFIGYGVWPLAHGWVLGEVCPQWMPTLGDRLVRSPAFAVDLRGRNSAAFVREVEAEAVKIVGKYVPRMETLRSWDIHCSNVQLNRVFELNSLPYAGYPGDDDANDAVSRGKKAMATVDEGPLRGAAPSAAAKKRKLGTTAEGLGASECFAAELLDTCAVPGETMSSPELWESSARMLKGWPTRFVILVVRDEYW

SEQ ID NO: 68583 - protein, 112 aa, Zea mays
  Coding DNA Sequence Number=SeqID_26804
  Subcellular localization annotation: CTP_CleavageSite=72; ConfidenceScore=5.02e-01
MAMCGEKLRRAPTAYRSRLRRAGATALTGSVVVLPWPPLPRNGRENGGSTAARRNHRGVSVREWAPRRRGLLAVAKGSPSGSPPSVHDRYDQEPLDLSPESLTRGGAAPHRG

SEQ ID NO: 68584 - protein, 93 aa, Zea mays
  Coding DNA Sequence Number=SeqID_26805
MMSRELPANVGSSVTGMTMAPSIACYEVGEGSNDPGPFARETKGVHAAQERTRLEWPAISGTEQPTSAAGVEKMTDEGPHASVTVVIIVGYTW

SEQ ID NO: 68585 - protein, 228 aa, Zea mays
  Coding DNA Sequence Number=SeqID_26806
  Gene Ontology: Mol. function=phosphotransferase activity, alcohol group as acceptor
  Homolog annotation: Hit_ID=Q2R903; Match level="QueryCoverage=68%, HitCoverage=13%, E-value=4e-64, Identity=75%"; Hit description =Phosphatidylinositol 4-kinase, putative, expressed
MVRLLGLRSLSFGPKDSPREIPSTADVAPPVGSSAWHVRFFNSAFFCGWIFVSYLYKHDHAGVHDYICNRMYTLPLPGLEAYLFQVCYMLVHKPSPSLDCFVIDTCAKSLRIALKVHWFLAAELELEDDDDLDGIDMVQEQCQDAATVQGEWPPLPRAQQGAPPRPTPGLGLSLGLGRRSPPRPSSASASGGVTTSPDLSLGLRRIHRLARPRPRTDYATGDTSLPYL

SEQ ID NO: 68586 - protein, 755 aa, Zea mays
  Coding DNA Sequence Number=SeqID_26807
  Gene Ontology: Mol. function=identical protein binding; Cellular component=cytoplasm; Biological process=negative regulation of enzyme activity
  Homolog annotation: Hit_ID=O65836; Match level="QueryCoverage=96%, HitCoverage=96%, E-value=1e-166, Identity=44%"; Hit description=P69F protein
  Pfam annotation: Domain name=PA; Domain location=346-449; Score=77.7; E_value=3.6e-20; Accession=PF02225.12; Description=PA domain
  Pfam annotation: Domain name=Peptidase_S8; Domain location=113-582; Score=60.9; E_value=4.2e-15; Accession=PF00082.12; Description =Subtilase family
  Pfam annotation: Domain name=Subtilisin_N; Domain location=24-99; Score=58.8; E_value=1.8e-14; Accession=PF05922.7; Description =Subtilisin N-terminal Region
  Pfam module annotation: Pfam domain module=PA::Peptidase _S8::Subtilisin_N; Domain location=346-449::113-582::24-99
MGSSKLSLLCLVPFLLLAGGDTLTTFIVHVQRPEPEENQTTGDREVWYRLFLPEDGRLVHAYHHVASGFAARLTQEEVDALSAMPGFVAAVPDEMYELHTTHTPLFLGLDARQGDSPSHGSERGAGVIVCMLDTGISPTHPSFNDDGMPPPPPEKWKGRCDFGVPVCNNKLIGARSFMSIPTAGGNSSSPVDDAGHGTHTASTAAGAVVPGAQVLGQAAGVAVGMAPRAHVAMYKVCNDTICASADILAGVDAAVGDGCDVISMSIGGVSKPYYRDTIAVGTFGAVEKGIFVALSAGNHGPNASSVANEAPWMLTVAASTMDRSIRSTVHLGNGRSFYGESVYQPDAPASIFHPLIYAGASGRPYAELCGNGSLDGVDVWGKIVLCDYGSGPDGKITRIQKGVVVRSAGGVGMILINAFPQGYTTLADAHVIPASHVDYAAASAIMSYVQNTANPTAKILFGGTILGTSPAPSIAAFSSRGPSLQNPGILKPDITGPGVNVLAAWPSQLQVGPPPTASAALPGPRGPTFNIISGTSMSTPHLSGIAAFVKSKHPDWSPAAIRSALMTTADVTDRAGNAILNEQRVASDMFATGAGHVNPEKAVDPGLVYDIAPSDYVGYLCGLYSSQNVSLIARRPVDCSAATVIPESLLNYPSVSVVFQPTWNRSTPVVVERTVKNVGEEVSTVYYAAVDIFDDDAAVAVFPSELVFTKVNREQSFKVMVWRSHNNKGAKVVQGAFRWVSDTYTVRSPMSISFT

SEQ ID NO: 68587 - protein, 266 aa, Zea mays
  Coding DNA Sequence Number=SeqID_26808
MDWVRWRVRVGSGGSLHRFGPEGVQAAVKGAVWEQAKWSSEARPARATAYTGDKHIGDRSPSAATAPERDGGRTGTGGPSSLPATPLPCTGSSHTPTNGTTAHQAQAQWQPRHSSADLSVAPPRVLLDARVRFPDTTPTPRRPGPLVRPADPPYCVPCPRRRGPLRGSIINHAACPQSNLSSVFVHRPLRGQLIRPGAASPSLSLLLRPLARLRVRPLLRLLPLFHVSVSALRLSPFPIPYAPFLLLPPLLRPSINHDATAAPREP

SEQ ID NO: 68588 - protein, 89 aa, Zea mays
  Coding DNA Sequence Number=SeqID_26809
MNKVQITSKANRLFRSEAPDCPVVHRTVSGAPGCLDLKTPLSGICGQVKPKDCFGLGHRTVRWCTGQCPVRQAASGKDAALGNLPTAYG

SEQ ID NO: 68589 - protein, 51 aa, Zea mays
  Coding DNA Sequence Number=SeqID_26810
MTVWGWARSGLVGVFGLSRSPHFSPNDRKRGEADLVIVCSPVALVSQARLK

SEQ ID NO: 68590 - protein, 145 aa, Zea mays
  Coding DNA Sequence Number=SeqID_26811
MATAPMNPCLRAIPASQGDFPDRDVHAKITKDPDEAPSPWVRVQPTVLPDSAITALPLLSCSTAEGLLLPTELVTLKSRHGLGSNGGGSAFIARQPSLLRIQLRFGGGGNRSEVRALCVAAGKTVGSVSPVRANRREPTLTQRSH

SEQ ID NO: 68591 - protein, 51 aa, Zea mays
  Coding DNA Sequence Number=SeqID_26812
MATCLDLTYSRAVSTALVVEAKYAGPGKSQGYEGDRPNQGPEKRQRKEKYL

SEQ ID NO: 68592 - protein, 141 aa, Zea mays
  Coding DNA Sequence Number=SeqID_26813
  Gene Ontology: Mol. function=nucleotidyltransferase activity; Cellular component=endoplasmic reticulum membrane; Biological process=biosynthetic process
  Homolog annotation: Hit_ID=Q7EYE4; Match level="QueryCoverage=70%, HitCoverage=48%, E-value=2e-30, Identity=56%"; Hit description =Putative CTP:phosphorylcholine cytidylyltransferase
MTVDEHYESLQHCKNADTIGPANDVYELVRTSEPKRTKGISTSDIITTILKDYNQYIMCNLTWGYNHKDLGISYVKENQLMVNMGISKLREKVKEQQEKFCTMDEGIVCNKVSIEVLLHSPFVLTLLCKMRYIDLDNYPNN

SEQ ID NO: 68593 - protein, 550 aa, Zea mays
  Coding DNA Sequence Number=SeqID_26814
  Homolog annotation: Hit_ID=Q5VPC4; Match level="QueryCoverage=75%, HitCoverage=69%, E-value=2e-49, Identity=62%"; Hit description =Pherophorin-like protein
  Subcellular localization annotation: CTP_CleavageSite=77; ConfidenceScore=5.86e-01
MVAGRVKAAMGFQRSPATPKPGASSSSSSSRKAPPPLQLPGSAALPETPRRRSSGSPAPPGSGSKGGGGPFSRYFPRSSAQVQPARASGQPEPPPPPPPPPSCPGPAAAADLARLVEELRERESRLRTELLEHKILKETVAIVPFLETELAAKSSDLGRCRDALSRLEAENASLRAELHAARGSQQRVVQLEKELAEVKRHRRRDSGPDADRHDDDCSSSVSSHNSDSDRSNAPTNAVVPGLLIVPPPAPPPPPPPPPPPSYKSRSYFSASSRASPANSSSSSSTSSAPSTPTYSSDTAASRNRVPELSQLPPIPAPPPPPPPPPPPAMPARGRRSACSSPSTSSGSSGGGCGRGSGPPAPPPPPPPAARRSSRASSPAASGTAPAPAPCVRRVPEVVEFYHSLMRRDSRSRDAAAAAEAGASGGAAAARDMIGEIENRSSHLLAIKSDVERQGDFIRFLIKEVQGAAFVDIEDVVTFVKWLDVELSRLVDERAVLKHFDWPEGKADALREAAFGYRDLKKVESEASSFCDDPRQPCSSALKKMQAVFEK

SEQ ID NO: 68594 - protein, 61 aa, Zea mays
  Coding DNA Sequence Number=SeqID_26815
MAHRKVRCPLPRHHCRWILTVGASDLWARQGVRCTPDSLVALCCYYLIDECCCDPSVIFVS

SEQ ID NO: 68595 - protein, 375 aa, Zea mays
  Coding DNA Sequence Number=SeqID_26816
  Gene Ontology: Mol. function=binding
  Homolog annotation: Hit_ID=Q6EQ04; Match level="QueryCoverage=72%, HitCoverage=56%, E-value=3e-07, Identity=25%"; Hit description=Arm repeat-containing protein-like
  Pfam annotation: Domain name=Arm; Domain location=126-166; Score=6.5; E_value=1.9; Accession=PF00514.13; Description=Armadillobeta-catenin -like repeat
  Pfam annotation: Domain name=Arm; Domain location=167-205; Score=7.0; E_value=1.6; Accession=PF00514.13; Description=Armadillobeta-catenin -like repeat
  Pfam annotation: Domain name=Arm; Domain location=41-81; Score=25.7; E_value=0.00016; Accession=PF00514.13; Description=Armadillobeta -catenin-like repeat
  Pfam module annotation: Pfam domain module=Arm::Arm::Arm; Domain location=126-166::167-205::41-81
MGAAADDAASVRAAVMRLSFGAAAEERRDAAGEVARLARADERTKRLLPELGVLPPLLDMLGGAGPGARLAAAGALLELARGTHRNKVRIVQAGLLKKLPVVADDRDVCRSQELALLLLSISSLANTDFPLRTTELLPFLVATLGATDVPPDAKLPCLAALRNLSAKLEHARDVASSGAVRALLPLSLEPKTSEPALAVLGELAAAAGREAMEAEGEAVPRALLEAMTRHGSARCQERATYLAMVLAHGSRALRRAMRRLGVVQALLEVSLLSSSPLAQRRAAIILRWFKEDGPQSRTTRAHSGPRVEGVAEATSCRDDDVAGEAKGCRDTTVDEIVRRSLDRNMKSILRRATASVDLTNVKLLVTSSSSKSLPC

SEQ ID NO: 68596 - protein, 682 aa, Zea mays
  Coding DNA Sequence Number=SeqID_26817
  Gene Ontology: Mol. function=binding; Cellular component =intracellular; Biological process=metabolic process
  Homolog annotation: Hit_ID=Q1SLN3; Match level="QueryCoverage=96%, HitCoverage=96%, E-value=0.0, Identity=48%"; Hit description =Tetratricopeptide-like helical
  Pfam annotation: Domain name=PPR; Domain location=175-209; Score =14.2; E_value=0.16; Accession=PF01535.11; Description=PPR repeat
  Pfam annotation: Domain name=PPR; Domain location=210-244; Score=1.1; E_value=5.6; Accession=PF01535.11; Description=PPR repeat
  Pfam annotation: Domain name=PPR; Domain location=276-310; Score =41.0; E_value=4.1e-09; Accession=PF01535.11; Description=PPR repeat
  Pfam annotation: Domain name=PPR; Domain location=377-411; Score =29.0; E_value=1.6e-05; Accession=PF01535.11; Description=PPR repeat
  Pfam annotation: Domain name=PPR; Domain location=412-446; Score=8.9; E_value=0.67; Accession=PF01535.11; Description=PPR repeat
  Pfam annotation: Domain name=PPR; Domain location=46-79; Score=11.3; E_value=0.34; Accession=PF01535.11; Description=PPR repeat
  Pfam annotation: Domain name=PPR; Domain location=514-548; Score =11.3; E_value=0.34; Accession=PF01535.11; Description=PPR repeat
  Pfam module annotation: Pfam domain module=PPR::PPR::PPR::PPR::PPR::PP R::PPR; Domain location=175-209::210-244::276-310::377-411::412 -446::46-79::514-548
MARPCGAALQRHAAVAVLRAAAAAGDLSKGKALHARLITAAHFDVVLHNNLISFYAKCGRVGLARTVFDAMPFRNAVSANLLMSGYASSGRHKESLQLLRVVDFGMNEYVLSAAVSATANVRSYDMGRQCHGYAVKAGFAEQRYVFNAVLYMYCQCAHMEDASKVFESVSGFDAFAFNSMINGYLDRGQLDGSLGIVRNMTGEAEKWDYVSYVAVLGHCASMKDSVLGAQVHAQALKKRLELNVYVGSALVDMYGKCDHVHDANRAFEVLPEKNVVSWTAVMTAYTQNELYEDALQLFLDMEMEGVQPNEFTYAVALNSCAGLAALRTGNALGACVMKTGHWDHLLVSNALMNMYSKSGSIEDAHRVFISMPLRDVVSWNLIITGYAHHGLAREGMEAFHSMLSAAVIPSYVTFVGVLSACAQLGLVDEAFYYLNTMMKEVGITPGKEHYTCMVGLLCRVGRLDEAERFIVNNCIGTDVVAWRSLLNSCQVYKNYGLGHRVAEQILQLEPSDVGTYVLLSNMYAKANRWDGVVKVRKHMRERAVRKSPGVSWIHVGSDVHVFTSEEKVHPQMDQIAKKLEELIDQIKAIGYVPNFAVVLHDIDDERKEEHLMYHSEKLALAFGLIHTPKGATIHIMKNLRICDDCHVAIKLISVVTSRKIVVRDAVRFHCIEGGICSCNDYW

SEQ ID NO: 68597 - protein, 150 aa, Zea mays
  Coding DNA Sequence Number=SeqID_26818
  Subcellular localization annotation: CTP_CleavageSite=43; ConfidenceScore=5.41e-01
MAPFRRNSAALSAIAEGVASARGTAATEGARRRRRSSDVQRVRDQVAPPMSPSFATQLVVVKVKFRLYKYRLFIKTTIPLFVYLSGTDAAFTPHIDHAGADEAACSSQQGPPAGRQVRAPPGTGVYRVLGDRITHSSARPVAHGGGPGAG

SEQ ID NO: 68598 - protein, 178 aa, Zea mays
  Coding DNA Sequence Number=SeqID_26819
  Gene Ontology: Mol. function=transcription factor activity; Cellular component=nucleus; Biological process=regulation of transcription, DNA-dependent
  Homolog annotation: Hit_ID=Q9C7W2; Match level="QueryCoverage=36%, HitCoverage=19%, E-value=2e-25, Identity=80%"; Hit description=AP2 -containing DNA-binding protein; 51686-52693
  Pfam annotation: Domain name=AP2; Domain location=4-68; Score=127.9; E_value=2.8e-35; Accession=PF00847.10; Description=AP2 domain
MLRQKLYRGVRQRQWGKWVAEIRLPQNRVRVWLGTYDSPETAAHAYDRAAHRLRGEYARLNFPGAMDGPDPDCPEHLRHLRAAVDAKIQAIRARMARKRARARRQREERVSARSGLQAASEGAATTTTTTTTSETSAATPCGSPDGVLSVSAASGVADCPLERMPSFDPELIWEMLNF

SEQ ID NO: 68599 - protein, 231 aa, Zea mays
  Coding DNA Sequence Number=SeqID_26820
  Homolog annotation: Hit_ID=Q2JI67; Match level="QueryCoverage=37%, HitCoverage=93%, E-value=1e-10, Identity=39%"; Hit description =Putative membrane protein
MENGSAISHQVGVEDAGAVQRRDASSKTSCSGLPQSHGRRTVHQPPQHEERRLQFASPDVPQMLATTCSRPPCPCPCARSRRLPAATFGGTSSAKRRAPRRAAAAVRCGLLPVDPWAPTMDSQSVASQLFAVSLFPYLGFLYFMTRSKTAPGLTLFGFYFLLVFVGATTKVHYGTSLSNVDWLHGGAESLLTLTNLFIVLGLRGALRKLEEEGTDEIVSEASQDSAEKSSV

SEQ ID NO: 68600 - protein, 132 aa, Zea mays
  Coding DNA Sequence Number=SeqID_26821
  Subcellular localization annotation: CTP_CleavageSite=8; ConfidenceScore=5.59e-01
MRTFRIMRAPSFSSSSDVPFVFPAFALFFLPNLLPPPTVAVTSRPTLVDPDAQVFVVSFSDNEQDRQTGNSLPNGRCEAGLYPIKSSDVAALNQALLKREKLQRLTQRRSCEAGKLRHVRRKGNRLKDEKAI

SEQ ID NO: 68601 - protein, 124 aa, Zea mays
  Coding DNA Sequence Number=SeqID_26822
MGGSSGPITYRIAPSPETGKRHLWQEKRAPFCLHHDHRVKKGTGKGDISKKDPSPPTDQGFEGFALRGLATAIEHSGSEPFTDQGDDPGYFRYMAEARATLPRGSGAALAPSYGQTVDHVNKPA

SEQ ID NO: 68602 - protein, 793 aa, Zea mays
  Coding DNA Sequence Number=SeqID_26823
  Homolog annotation: Hit_ID=Q1RVB7; Match level="QueryCoverage=93%, HitCoverage=92%, E-value=1e-168, Identity=54%"; Hit description=Zinc finger, BED-type predicted
MSTATAKEEEAAAAAAPAMVGEEAAARAALKRYEALLTVRAKAVKGKGAWYWAHLEPVLVPPAETGMPPKAVKLRCALCSAVFSASNPSRTASEHLKRGTCPNFASPPSLFAGASALQPAPTPTQQLALPSNSTASSPVPISSIAPSSSHHHSNPHHHHHQQQQSGSRKRHSMPPAYTPAEPVSHHHHLVVVDPSLVYPSALPALPAPPPPHQSELVLSGGKGDFSALAMLEDSVKRLKSPKASPVTMMPKPQADAALALLSDWFLESSPGVSLSAASHPKLRAFLRHVGLPDLQRADLAGPRLDARFAEARADATARVRDALFFQLAADGWREQVVTLCVNLPNGTSVFHRAVPVPAMAPSDYAEELMLEAVASVSASGSSSDLHRCAGIISDRFKSKALRDLEKKNYWMVNLSCQIHSFTRLVWDFARELSLFRSATAKSAKLAAFFNAEQTARSLLHKHQIQQLGHASLLRVAHVPFNGNGRNYRAAFEMLEDILNSAHPLHRAVQEDSYKLVCIDDSAAREIAEMVHSEAFWIEVDAVHSLVKLIFDMVREMEADRPLVGQCLPLWEELRSKVRDWCEKFNTDEGAALNVLEKRFRKSYHPAWSAAFILDPLYLVKDASGRYLPPFKCLTPDQEKDVDRLITRMVSREEAHLVLMELMKWRSDGLDPLYAQAVQVRQPDPSTGRMKVANKQSSRLVWETCLSELKSLGKVAVRLIFLHATSRGFRCTPSMVRWLCAPGTMASGNDRAHRLVFVAANSKLERRDFSSDEDKDAELLAEGDDDDVPGTVEP

SEQ ID NO: 68603 - protein, 126 aa, Zea mays
  Coding DNA Sequence Number=SeqID_26824
  Gene Ontology: Mol. function=nucleic acid binding
  Homolog annotation: Hit_ID=Q3LRV2; Match level="QueryCoverage=77%, HitCoverage=38%, E-value=2e-23, Identity=53%"; Hit description=Gag
MESLEPSPAVLPGARPPWLEILKPSQPQPLTHSPEPHEAFMLTPPLATTRQWRATTRRSKPPYFDGEDYSMWSDKMRYHLTSLHESIWDIVEFGAQAPQMGNEDYDSDEAAQVRHFNSQEIASLCR

SEQ ID NO: 68604 - protein, 94 aa, Zea mays
  Coding DNA Sequence Number=SeqID_26825
MEFGMAVVDDRPDMMGPQAQRDRTVLWGPNSSPALFTVAGSTFRRGQGGDANLGHGSAMARRRGWAGAITVLGHGKVIDVESNLAIRSDFCGHD

SEQ ID NO: 68605 - protein, 39 aa, Zea mays
  Coding DNA Sequence Number=SeqID_26826
MPYGPALWLDDPMGLGKVRLDRSYNLLCMLVCCSLPELG

SEQ ID NO: 68606 - protein, 102 aa, Zea mays
  Coding DNA Sequence Number=SeqID_26827
MAPKKATSKATTSLDNTAQVALVEKKGKTALVYDIPQEAPKNDGAVNSKCPRTENPPTPEGTVRTYNFDGLPWNPSPGFTPRRLIAKPGDHDFPFISTEEMR

SEQ ID NO: 68607 - protein, 79 aa, Zea mays
  Coding DNA Sequence Number=SeqID_26828
MGMATTQRPRKVAAHGGMARRRRNLALVRICAHPRAGKGKLGAGEGWLPRETNPGPLRQGHDEASDRRSRHSGYTMKVQ

SEQ ID NO: 68608 - protein, 90 aa, Zea mays
  Coding DNA Sequence Number=SeqID_26829
MSIAEPDPGVHTNRGGGSLIRGNGDSWHGGGYRCKLTWLRGEVKVVVLVLICARGSTWAAGQISTSPPSLMEFGIAAVDDGPDMVGPQAQ

SEQ ID NO: 68609 - protein, 69 aa, Zea mays
  Coding DNA Sequence Number=SeqID_26830
  Subcellular localization annotation: CTP_CleavageSite=30; ConfidenceScore=5.37e-01
MAEANFVGRIPVSTTVGSDRAMSAMVREVMTLTGWSHTPATPRTRISNMNSNFVMSFTFRLNAPIEILG

SEQ ID NO: 68610 - protein, 218 aa, Zea mays
  Coding DNA Sequence Number=SeqID_26831
MHQYSGVNDLDLHSFVPLALTEIEARVRVITMLPSRFFMDEDSPLPLSKDVMRTLLSSFFLGIKPLAPCLPPLPEVVIIEAEQERKRDAGGNLGGALEAPLSKEGEEGLPTHLRKTRADFPSRPRGPYGIDSWHLPHCGDFPHAAPREVLAIKVAPLDAASSVEEAALVSMSLSPAPGAVGVGVQSEVARPPGATDFLAQPSSVIASGHGACAARRVP

SEQ ID NO: 68611 - protein, 108 aa, Zea mays
  Coding DNA Sequence Number=SeqID_26832
MGKTRGTTWQGKIILPKEDMLGPSNKLQAPPSKDRVLARSRDEEDPGMGDAPPATTLTGDLPSRHLMRPVPSTGRRCQTHPANDTSDQSTGKRAGALHHPADDLLSNI

SEQ ID NO: 68612 - protein, 256 aa, Zea mays
  Coding DNA Sequence Number=SeqID_26833
MAAQRGSRGGSEQRMRSPGLTAAVREVDWQRRDGGYEPAPGCAWLAELVPEVGREGEGPRPGRHAHVCARVVGGRCARCRGAHPSHLAAMCLLAWQRRAWSMAARGIGPARGQGWHGWGLRGCGLGSAAGGGTIASGGEWKQGRRPWGAWAPSTMEVVEVKGSCTTPDLAPWSPRLDVPALDRAWPEAASPRQGRERRSTNWAPWGATGGGELGWEEEGRPQEGRMSLLGAVPGPRAGGGCGVGSNSYRVVPIHVG

SEQ ID NO: 68613 - protein, 104 aa, Zea mays
  Coding DNA Sequence Number=SeqID_26834
MTVSATTSTTIEGNPLVPPRLVGRMLHHTNHGEEASPEFALSFFAYYLNESRFGALGGALVRSGEPCHRGQGASGVVLGRGEKKIPRPLIRYHAAVNRIHVSLA

SEQ ID NO: 68614 - protein, 98 aa, Zea mays
  Coding DNA Sequence Number=SeqID_26835
MGRLLERWLLRKIAEEGTEAPQGFIPTVGLSQRQFRGARASSPMSKSSGPVARESVGGGGSDAPGPLEREAHAVTDAEVLSCRRASQRQGSAYFFLHC

SEQ ID NO: 68615 - protein, 197 aa, Zea mays
  Coding DNA Sequence Number=SeqID_26836
MVARLMAACSAVAGGVVVVRLLAAERCIKFTFTYNEIELGNSTKEHTRFGAACGAPDTVWCPRLQPSRTDRSRVFLELICYNSPDCPRAIFWGVNPDLWVRRQRRHTSHPSLEVSLWRIASADLLGDVFCGEVGAAMLMRKSQLLCFGAKLDNDDLSQAIGTTDEVLLLAPDARRCGSKLVGKESEFPSVGCVEAGQ

SEQ ID NO: 68616 - protein, 255 aa, Zea mays
  Coding DNA Sequence Number=SeqID_26837
  Subcellular localization annotation: CTP_CleavageSite=18; ConfidenceScore=5.54e-01
MDLTHNPPGRPPSPSSHSASTPRARCYRHQGSYSRDPPPLVGTPQNLAVTRTTTNHYTWRAAILPPRFVVHQICTVALLHWALPHRADYRKHLGSSSWTSVQGFVLEDSTGLSPNGDLNVHPVIAGSLPLHNQSVDVKEHPVVIYTKGYPDAPRCRFSALAVKTGTGKANTIEGEMRQKCRYPETGCTHPYPRSSTRKLQFEVSPKALKNSARFALAVASLLRVSSSALIVCSSIPKSSSSFTAPLIELDRPGLP

SEQ ID NO: 68617 - protein, 103 aa, Zea mays
  Coding DNA Sequence Number=SeqID_26838
MALTKAAIASAKVGDGLAPIAATSGGTFGCSRSYKLTLCAMDVLMIRNLVENHQGLEKCQDVKEEKLGCSQQEKAKSDSTSSPPRIQDQTALKWTPRMHPNYD

SEQ ID NO: 68618 - protein, 338 aa, Zea mays
  Coding DNA Sequence Number=SeqID_26839
  Gene Ontology: Biological process=regulation of GTPase activity
  Homolog annotation: Hit_ID=Q2HV28; Match level="QueryCoverage=48%, HitCoverage=93%, E-value=7e-39, Identity=49%"; Hit description=C2
  Pfam annotation: Domain name=C2; Domain location=167-253; Score=76.3; E_value=9.9e-20; Accession=PF00168.20; Description=C2 domain
MDLHRSDGQQIGLCIGWAKLLDHTWRTALSLSSQAARDYRLITLVAASCPCSAAVPAAEYDRLTCCHERAHGQLAILAGPHAFSPLPPDLFESLLPPGGSGQRRRADQVACRVQTADTVRALTEQQEKQSEPRRSRQASGSTDRLPCRKRTAWCLIMEEAGRGCGLLKVVVTHGRNLAVRDFTSSDPYVIVHVADKTTKTKVINSCLNPVWNEEMTFSMKEPVGIIKFNDHHLWQEVFDWDRFKYDDKMGQAFLDLQPVAAATKLRRALRLTAGETNLRKVNPDADNCLLSDSFVTYANGEVAIDARLRLREVESGELFVTIKWIEPDSANTGKQADH

SEQ ID NO: 68619 - protein, 56 aa, Zea mays
  Coding DNA Sequence Number=SeqID_26840
MGRGAAAVGAGRRGVGPAADECPSGQGVMLHKIVTAIGSGVSVSKAHRLWKAVVGP

SEQ ID NO: 68620 - protein, 452 aa, Zea mays
  Coding DNA Sequence Number=SeqID_26841
  Homolog annotation: Hit_ID=Q6H5V0; Match level="QueryCoverage=75%, HitCoverage=72%, E-value=3e-83, Identity=50%"; Hit description=WD-40 repeat protein-like
  Pfam annotation: Domain name=WD40; Domain location=321-359; Score =41.2; E_value=3.5e-09; Accession=PF00400.22; Description=WD domain, G-beta repeat
  Subcellular localization annotation: CTP_CleavageSite=52; ConfidenceScore=5.82e-01
MAPAPVPPTPVTLVRSSSFPAVSDPSGFTKSTPPHATATDHVRRPTSPPGVRVARRPGRDASRRGKAVPPPAPAQPPRRSTCGRPSPAPVQERRRKLLQMLGLAGDPALARLEMGRSVSYDDEPIRRWRRAGLGNPSPPLGGRSPGLLRRPRPKGEEEEEADPRCLIRNVDDGSEFVVKEGSELREVGTGRQLTMEEFVDLCVGRSPIVQELMRRENVASSGSSTPVQRSNSDSSNEATRHRRRRRHSSWLRGIRNVAGSVVASSRDRRSSDDKDTCSEKGGRRSSSTTDDSQDSAGAVRHGPVRVKVRQYGKSYKEFSGLFMNQEIQAHDGSIWSIRFSPDGRYLASAGEDCVIHVWEVSEFDRKHEENGACNPFVAMVCNGSPEPTLAVASSVDGSNREKKRRARFLEGRRSVSSDRLMLLEHVFALSEKPIRTFMGHSEDVPHDQFSLL

SEQ ID NO: 68621 - protein, 165 aa, Zea mays
  Coding DNA Sequence Number=SeqID_26842
MEGESDASDRRPSLHGRGVLSIRVRAVHGRNLAVSASPLGLYRSQSYISKPYFAHSPLSTPTTILYEPTVDVHSTHHAPALPTTHHILPRASVILNFVYLAIGIELASTHRYKMIERRHAPPPAGSDLAQATSTATPSHQTAHRAVEAAVHKQQRPPQLDRCTLF

SEQ ID NO: 68622 - protein, 79 aa, Zea mays
  Coding DNA Sequence Number=SeqID_26843
MEVSVVEPQNHPMQQFAVFVRFVPQNPMVRFQRELDAAHGIITKGASSTILKVSPKRLGGGPTLRHLVHLPHLGIETVV

SEQ ID NO: 68623 - protein, 301 aa, Zea mays
  Coding DNA Sequence Number=SeqID_26844
  Gene Ontology: Mol. function=hydroxyethylthiazole kinase activity; Cellular component=cytoplasm; Biological process=thiamin biosynthetic process
  Homolog annotation: Hit_ID=Q9LIQ4; Match level="QueryCoverage=88%, HitCoverage=97%, E-value=2e-69, Identity=52%"; Hit description =Hydoxyethylthiazole kinase-like protein
  Pfam annotation: Domain name=HK; Domain location=23-268; Score=273.8; E_value=3.3e-79; Accession=PF02110.6; Description=Hydroxyethylthiazole kinase family
MDVGAKEEEMGQVWWGHRAWSLLSAVRARAPLVQCITNLVSMDIAANVLLAAGASPAMVHSLREVPDFTPRCDAVYVNVGTLSEDWLPSMRAAASAGRPWVLDPVAAAASGFRMKACLELLSLCPAVVRGNASEILALASRSTAASSNFKGVDSSHCSVDAIEAAKALALSSSAVVAVSGAVDFVTDGKQVISVSNGVPMMQKITATGCAVTALIAAFVAMEPSDAIVAAACALAIFGLVGEIGMESAKGPASLRMHLIDALYCLNEETVTSRSKLKTWRHDGIMHAANAAGEEVVREVGA

SEQ ID NO: 68624 - protein, 90 aa, Zea mays
  Coding DNA Sequence Number=SeqID_26845
MSLKKRSKFRSSKVIPKGMESQKLRSEASKVVPKGAQPWLKNRYLQTQNKSIYDEKSMIMTKVAIAPKLHARKLRLNRRKRNRLKGEKAI

SEQ ID NO: 68625 - protein, 108 aa, Zea mays
  Coding DNA Sequence Number=SeqID_26846
MKNLGTKEEEEEGDKSQKALGSPRIGLGAAAGADWKKESSNSSASSSGVTNGTPYSCWCHSIRVSGPDLYLYRYGPSNVRQRQQEMRSHEAEAEELAHQKKQGLLTLL

SEQ ID NO: 68626 - protein, 399 aa, Zea mays
  Coding DNA Sequence Number=SeqID_26847
  Gene Ontology: Mol. function=zinc ion binding; Cellular component =COPII vesicle coat; Biological process=ER to Golgi vesicle-mediated transport
  Homolog annotation: Hit_ID=Q9LUG1; Match level="QueryCoverage=99%, HitCoverage=41%, E-value=1e-102, Identity=70%"; Hit description =Protein transport protein Sec23
  Pfam annotation: Domain name=Gelsolin; Domain location=265-355; Score= 88.6; E_value=1.9e-23; Accession=PF00626.12; Description=Gelsolin repeat
  Pfam annotation: Domain name=Sec23_BS; Domain location=1-59; Score =34.4; E_value=4e-07; Accession=PF08033.2; Description=Sec23Sec24 beta-sandwich domain
  Pfam annotation: Domain name=Sec23_helical; Domain location=156-256; Score=154.4; E_value=3e-43; Accession=PF04815.5; Description =Sec23Sec24 helical domain
  Pfam module annotation: Pfam domain module=Gelsolin::Sec23_BS::Sec23 _helical; Domain location=265-355::1-59::156-256
MCGLDRNTSLTVFFDVSPSERSSQPGNQNPHLYIQFVTSYQHPEGQMRIRVTTICRKWVDGSTNTEGTKAKAKSQTKHTLSSTPQVLGLTPRGSKFQAVVKPPLVRPILPCQSTGLRPGPDRGRFSHGLRCHCVWVGQAFEGFLDLREELVEGFDQETAAVVLARYISLKMEMEEEFDATRWLDRSLIRLCSRFGDYRKDDPSSFSLHSNFSLFPQFMFNLRRSQFVQVFNNSPDETAYFRMLLNRESITNSVAMIQPSLISFSFDSPPSPVFLDVASIAADRILLLDAYFSVVIFHGMTIAQWRNMGYQNQPEHEQFAQLLQAPHEEAQMIIKGRFPVPRLVVCDQHGSQARFLLAKLNPSATYNSAHDVAPGSDIIFTDDVSFQVFCEHLQRLAVQS

SEQ ID NO: 68627 - protein, 98 aa, Zea mays
  Coding DNA Sequence Number=SeqID_26848
MGSFREEPKAEHHLRVEKAHDSLRSYSTEFSNIGRASPVIEQPSIIRMSEEGDATVTDTITRHASQTRLKRPGTALNEENEKYNMVTPRVKYNIAKEI

SEQ ID NO: 68628 - protein, 110 aa, Zea mays
  Coding DNA Sequence Number=SeqID_26849
  Subcellular localization annotation: CTP_CleavageSite=50; ConfidenceScore=5.30e-01
MGYELHRRGLDVLGVEALDNLVSVSRRSSSFRPAVSITPTTPSPSVAPPMANLTTNDRANLITKLTTTVETLKNKLDTLEQHTTDSSTSDAKGTFSGWRSNGEANEENFL

SEQ ID NO: 68629 - protein, 113 aa, Zea mays
  Coding DNA Sequence Number=SeqID_26850
  Subcellular localization annotation: CTP_CleavageSite=76; ConfidenceScore=5.22e-01
MHEMRFLSTTPHSLCRSLSPFHVNVPDRPRFLTNSQCPWEYSRFPACATLVVDSSSPTFSVAGGQSGTAYLRTRIRKGEAQKIRRLTQRRSCEAVKLRHVRRRGNRLKDEKAI

SEQ ID NO: 68630 - protein, 234 aa, Zea mays
  Coding DNA Sequence Number=SeqID_26851
  Gene Ontology: Mol. function=tryptophan synthase activity; Cellular component=chloroplast; Biological process=aromatic amino acid family biosynthetic process
  Homolog annotation: Hit_ID=P0A879; Match level="QueryCoverage=67%, HitCoverage=40%, E-value=5e-71, Identity=88%"; Hit description =Tryptophan synthase beta chain
  Pfam annotation: Domain name=PALP; Domain location=107-234; Score= -104.0; E_value=0.038; Accession=PF00291.15; Description=Pyridoxal -phosphate dependent enzyme
MEQMDMSVLSGVPPDSVRGAMALCVNGRLCQVNSDEQYHGRSQSNEVLKVHTQPIKRSNLDSTQEQRANRRHLWFGILMPALRQLEEAFVSAQKDPEFQAQFNDLLKNYAGRPTALTKCQNITAGTNTTLYLKREDLLHGGAHKTNQVLGQALLAKRMGKTEIIAETGAGQHGVASALASALLGLKCRIYMGAKDVERQSPNVFRMRLMGGGSDPVHSGSATLKMLYEALRDWS

SEQ ID NO: 68631 - protein, 320 aa, Zea mays
  Coding DNA Sequence Number=SeqID_26852
  Gene Ontology: Mol. function=catalytic activity; Cellular component =cytoplasm; Biological process=metabolic process
  Homolog annotation: Hit_ID=Q6ZG49; Match level="QueryCoverage=72%, HitCoverage=75%, E-value=6e-77, Identity=57%"; Hit description =Phosphoglycerate mutase-like protein
  Pfam annotation: Domain name=PGAM; Domain location=90-261; Score =157.7; E_value=3.1e-44; Accession=PF00300.12; Description =Phosphoglycerate mutase family
  Subcellular localization annotation: CTP_CleavageSite=76; ConfidenceScore=5.78e-01
MPYTGYPLAPSHNRASAVLPPTSAPPTSAPASLAALPSPPSAITAAASFCTGSVAATTPQIRWVDVHGAAPGMSSSASSVEGDAAGEFTEVVIVRHGETSWNASRIIQGHLDAELNDIGRQQAVAIFLVVFLMRSFISKVAHRLSKEVKPVAIYSSDLKRAAETAQTIARICNVPNVVFDPALRERHIGDLQGMTLQDAATERPEAYKAFMSHKRNQQVPGGGESLDQLSERCVSFLYDIVGKHKGERVILVSHGGTIRELYRHVSPTKPLHGKIHNTSVSVILVSDATGRCIVKMCGDVSHLQETGVLENAFGGDKTSA

SEQ ID NO: 68632 - protein, 110 aa, Zea mays
  Coding DNA Sequence Number=SeqID_26853
MAFMLAQGHQRARTTAGRANGDAGLLQRAIARVTELKRPNQGHMQIAHLEGKRWRHEATTEAQRLDGATTVGLRLRKDCFGERGLDATEREKAHRRVSRAADSMAELTEA

SEQ ID NO: 68633 - protein, 67 aa, Zea mays
  Coding DNA Sequence Number=SeqID_26854
MAVGVSEALYAKATQLVLLATQTPKPNSCMSRGSLEDMVAGVTWPSILPLGWTVEWDPTSAEEEHEE

SEQ ID NO: 68634 - protein, 72 aa, Zea mays
  Coding DNA Sequence Number=SeqID_26855
MAGNDAYKSFLVTVVKHYTRGALLLVRSSMAGLGIWGSAAMALCVGAMGTDTERCREEEGRRAIGSVMDACD

SEQ ID NO: 68635 - protein, 147 aa, Zea mays
  Coding DNA Sequence Number=SeqID_26856
MIQGQYGGTSDYRKATRARQGGRVNDGGGSRRVQRTRLRAEAVAGDFGIVVTGAKTECAVPHDRGTRRVQATKRRAQAVRVGCGRAKRARCRARARSDCRDLRSVRRRGIVEADKVAPNGSDTGRQVHALGKSRQGGPPISGWRKVG

SEQ ID NO: 68636 - protein, 76 aa, Zea mays
  Coding DNA Sequence Number=SeqID_26857
MSGQSTIPMLMKKEPTMLRAVITAHSLQACNKLFTDHQLREEEEGEASMEEASHSQASWAQLPPPPPLAPAPSHDQ

SEQ ID NO: 68637 - protein, 169 aa, Zea mays
  Coding DNA Sequence Number=SeqID_26858
METDRQEAARKKWKAPVRLVDPRRDTKVPHPTAKGPTVTAAMPPPAVPAMKFCGQGRPGAMVPEGFTPQASGGVKRSGGFRGRPSELHVRTVPSGVGGFSMSGRLLLTAPSSGASWGISLIMVPCISFGEGRLRCVVQRGGGRHNHFLGSHHGISLSKHPRWASNVGTD

SEQ ID NO: 68638 - protein, 304 aa, Zea mays
  Coding DNA Sequence Number=SeqID_26859
MSGLAFLEGTGAVVRTLLSFSFGFTLFHENLWQLLDNSHWKTEKPLCMLAPRVPTIRKRLPQGPRSLFTESMTVYRKTLGFGLFTREIPSSTSEQRERERRVHGSGDSLPAVKLARQGGGQVRSMKANLTVVLARWVADGDVRSTRAGRDQGTAASTVVLGAFSELEQGLRICELDDKAVATWFVDYGGQWRREHELARDGHGDRRRVEEETRARASDSKARAERESEAQWSARPNEARRGCGLPTRADKARHGAGRVVHASGRAPLGGCRLLGLQTRVRQNGSMKHHPPPANLLTSLPASTLL

SEQ ID NO: 68639 - protein, 123 aa, Zea mays
  Coding DNA Sequence Number=SeqID_26860
MTKMVRTFQTTRVNTTYVPPPKQAPFYSVVVEVDPEEMHHLVGGNGVIVEDSFEEVLATPTLSPALHAIVARASSSAPPALVAQAPTPRGDDLDDSGDDEGDEENKEDNQDNKGNNNNEPDQD

SEQ ID NO: 68640 - protein, 412 aa, Zea mays
  Coding DNA Sequence Number=SeqID_26861
MELIALGALTLEFATERRRLEGRIERLRTQHTEAVRDKSTAENKSRNLLEKLSVAEKEREDLICRLAEEKEGAEKTRAEAQAARAEAEAMRAEAELSLKRATNKESELKSLRKYCEKTEASTRAGVERAHTLFVEACRELGALIAPFDKFGEEVGLCFLGWLQEELESLPSIMMGLMSYASLVTCEGRRMPCPAKDMTNEEEVDDFSGIESSMTRMGGMEEVGVEGHSAPQDGSSEDPAAVSVAAQVPMSGPVQANPDDVDTNDVLMAGNATFLSGNVSKGSELGSWSSDEEEFGSPFSWVEESFEEDLDYFATLESPLRAVPHEALATSTDARADSQRQRVVVSKQSTGESSRSGRRHRMGMERSRLWGGLRLDRGGQRELLSSTFGTCIGEGDLRDLFEGEELRMMLFNF

SEQ ID NO: 68641 - protein, 57 aa, Zea mays
  Coding DNA Sequence Number=SeqID_26862
MAVPQLDSERADPDATHLRLQRRRTTRLLSQVSLPNQIVILSASNMVGEDYRWMYEV

SEQ ID NO: 68642 - protein, 151 aa, Zea mays
  Coding DNA Sequence Number=SeqID_26863
MLATWRTLRSSRTTTSSSYVSGKPLPVKALSSTFRIPHFDYVNDYVIDSVDVLDILIWPIIDALHEHVGVVSSSVVCVNRALEWRSDQIGDSQWSARGRIRCRPKSSADYWVLWPVQARRSNCSAVRGRGPDLVKKRKGKGLGANVRDIDE

SEQ ID NO: 68643 - protein, 107 aa, Zea mays
  Coding DNA Sequence Number=SeqID_26864
MQYKGSSSLISCEKQTIRIDFLNLARAHRLGIQCSTDPGYRYAVTALVPTIASMGDPVSGKFAPSFTQGFDPCLEKLHGSPEKLSKGSVEAKGLWKWLAAVAGTRVA

SEQ ID NO: 68644 - protein, 176 aa, Zea mays
  Coding DNA Sequence Number=SeqID_26865
MALIGHTARPSKASKPLEWRGNLRSRWDNGDLRHSHSDSSHSERLGDRFLSKCRLGSPSPRPTAPREYAQRMPGITCGQRRGPRELTTTAHLLGAAMHMGLTTAAAARWSSPAMENRRSAHGSERGWVHGGANSGEPRRRSRSGYRYTRPGISVAGSLDGTPDEHVDRSWDGPWSR

SEQ ID NO: 68645 - protein, 79 aa, Zea mays
  Coding DNA Sequence Number=SeqID_26866
  Subcellular localization annotation: CTP_CleavageSite=48; ConfidenceScore=5.65e-01
MDGSDSSSSCSHPKKWVPTSSPNLSKGTVCISRSHYASNGSRRGKFVSAISGGAKFQPWVQRSPCVTLCRTHQAGGHCS

SEQ ID NO: 68646 - protein, 162 aa, Zea mays
  Coding DNA Sequence Number=SeqID_26867
MGVGTSRPSIESTRTSTLAMREEEVEDLAGLECSVAQKDAAVKAGVEEQSLLQEGGAEGPTAVPASGPAQANRDDNVNDDILVDRNVVILSSDAFGESDVGLWSSDGEKLGSPFAWIDNESLEDDLDYFATLDLAAAESPLRVAPLEAPTTSLGVVPSESWG

SEQ ID NO: 68647 - protein, 81 aa, Zea mays
  Coding DNA Sequence Number=SeqID_26868
MASGHYCRSSSAHLQRRDDATILDIVVVEPGLPNEVHPGLISEVDDELDGVMALSSVAVPQNNARVVGIGDDYEVPLFDNG

SEQ ID NO: 68648 - protein, 91 aa, Zea mays
  Coding DNA Sequence Number=SeqID_26869
MASTVQRSPAPLHHTCASQKTDEIRDSLEIMKHTFEEDDKLETVIKKFDDEMQEKGNQFYKKDDEGSTWEVDKHGCLVIEKNCVEVNVYHH

SEQ ID NO: 68649 - protein, 95 aa, Zea mays
  Coding DNA Sequence Number=SeqID_26870
MPSSEKTISDPAAVVELQHGHTVEFGTSRIYLGRVLEMQRLGYFGNGVGRAPGAENVPKLEGELVVFEAFFAAGLRLPVHRFVVEVLQKFEVQIQ

SEQ ID NO: 68650 - protein, 65 aa, Zea mays
  Coding DNA Sequence Number=SeqID_26871
MELKEGVFRTFGIPKPLRFFADRACYEKRSSTAKGLLLGAFFFFAEGPLSKDTSDRTICQKLIRT

SEQ ID NO: 68651 - protein, 145 aa, Zea mays
  Coding DNA Sequence Number=SeqID_26872
MELCEQERRARRGAKRERHGGVAAGRGASTTGLCAASESSNQGAEHREIGGRAPGRRKRAPGEKGSSRRLEISKGALRKKWRGEGIRRGIRWKNLQEMDTSARRWKKSDARWASSWAMEGPGAYDGWDGCRREEIFFAGDRAWMD

SEQ ID NO: 68652 - protein, 257 aa, Zea mays
  Coding DNA Sequence Number=SeqID_26873
MPRRLLQSRGQSERGPLPGRCAGLLPGGVVVRVCAEGRRAHGEEELGFLLLREEEKKEQGCCPDGADIEMNRGKRCSARKLREEEEEGLLAKGERSRAAAGRGIGEDGEDCRGAMDRDAMGCWRNQGAIHGKKKRVYSPWKRGRGGREQGGQGEEPELAGGWRPWLLAEQRLQPWGQQASMEQKGRWGGDELGAGWEMRRPGEEEAPWEEGRKFPALAAAAVSSEEEGREYGWWRLGKKWRVGVQNSPSAREGHPYL

SEQ ID NO: 68653 - protein, 138 aa, Zea mays
  Coding DNA Sequence Number=SeqID_26874
MGYNTLHLLSRSGYCPNGYFPGRALAQAFGSLMWSRVWWFWAQVGLGATRNGWPRRSAPVDNGSERGVRRSGVLARGVGQQMEGLTEGSGSLYRCEHERGMAVADCGAGGACSRFPADVEHVATLGVVIFQSFISSIS

SEQ ID NO: 68654 - protein, 97 aa, Zea mays
  Coding DNA Sequence Number=SeqID_26875
MACGFSDSGFKWALLPYLIVNAAAPLVNAAGIGLAVADLVWGQSRVGSWVRFLRSGSLMPSTPWLGALRRRCLGLTPSELGAAGARRGSVGACGAGA

SEQ ID NO: 68655 - protein, 67 aa, Zea mays
  Coding DNA Sequence Number=SeqID_26876
MEAKGSPTGGKSSQIEPLVEAIFGASSLEEDEGKSKDAEGRRAKQSFENAARKGRCWLRSNHFRPSR

SEQ ID NO: 68656 - protein, 97 aa, Zea mays
  Coding DNA Sequence Number=SeqID_26877
ALNLAEHEGRGGVGTFSLSGNSLIIDILLEQVHLDRDTLFVSIHMDIRWSVRKTVADLRLGINREQRDRDITNSSPDFNSHGRTAALRRQASSEFNR

SEQ ID NO: 68657 - protein, 383 aa, Zea mays
  Coding DNA Sequence Number=SeqID_26878
  Gene Ontology: Mol. function=acyltransferase activity; Cellular component=chloroplast stroma; Biological process=metabolic process
  Homolog annotation: Hit_ID=Q6ZKB1; Match level="QueryCoverage=67%, HitCoverage=63%, E-value=3e-68, Identity=50%"; Hit description =Putative dihydrolipoamide acetyltransferase
  Pfam annotation: Domain name=2-oxoacid_dh; Domain location=124-313; Score=90.3; E_value=5.9e-24; Accession=PF00198.13; Description=2 -oxoacid dehydrogenases acyltransferase (catalytic domain)
  Pfam annotation: Domain name=E3_binding; Domain location=57-93; Score= 64.6; E_value=3.1e-16; Accession=PF02817.7; Description=e3 binding domain
  Pfam module annotation: Pfam domain module=2-oxoacid_dh::E3_binding; Domain location=124-313::57-93
APIARLGESEEEVALARARAQALSQGQSQAPSPPHAAAALGPPPPAPVAPPATKGIATPYAKKLAKQHRVDIAGVVGTGPHGRVTAADVEAAAGIKHKRPPPPPPPASVDAAPLVPASAVLPPVPGGTVVPFTTMQAAVSKNMVESLRVPTFRVSYSMITDKLDALYEKVKSKGVTKTVLLVKAAAVALTQHPVVNASCRDGKSFSYNNDVNIGVAVALEGGLLTPVLEDADKGAIMAVGASRPTVVADKDGFFSIKSEMLLNLKAQIICDPSACSLEHVNVTADHRIIYGADLAAFLQTFAKIVEDPECLTLKFNRSFFPVLSKVKANEHSLSGRIRWTFRTVPRFFFWLLQQAFTVTEQNDAGFLNYKKVKDARQAYGYVL

SEQ ID NO: 68658 - protein, 1271 aa, Zea mays
  Coding DNA Sequence Number=SeqID_26879
  Gene Ontology: Mol. function=mismatched DNA binding; Cellular component=MutSalpha complex; Biological process=mismatch repair
  Homolog annotation: Hit_ID=Q6DQL6; Match level="QueryCoverage=87%, HitCoverage=92%, E-value=0.0, Identity=47%"; Hit description=DNA mismatch repair protein
  Pfam annotation: Domain name=MutS_I; Domain location=356-447; Score =95.1; E_value=2.2e-25; Accession=PF01624.10; Description=MutS domain I
  Pfam annotation: Domain name=MutS_II; Domain location=456-623; Score =22.2; E_value=0.0003; Accession=PF05188.8; Description=MutS domain II
  Pfam annotation: Domain name=MutS_III; Domain location=637-932; Score= 83.2; E_value=7.9e-22; Accession=PF05192.9; Description=MutS domain III
  Pfam annotation: Domain name=MutS_IV; Domain location=796-887; Score =114.3; E_value=3.6e-31; Accession=PF05190.8; Description=MutS family domain IV
  Pfam annotation: Domain name=MutS_V; Domain location=938-1160; Score =258.0; E_value=2e-74; Accession=PF00488.12; Description=MutS domain V
  Pfam module annotation: Pfam domain module=MutS_I::MutS_II::MutS _III::MutS_IV::MutS_V; Domain location=356-447::456-623::637-932::796- 887::938-1160
  Subcellular localization annotation: CTP_CleavageSite=51; ConfidenceScore=5.87e-01
MASRRASNGRSPLVRKQSQITAFFSSPTPSPSPSGPSPGASKPSPSPLNPSARTRSPLAAVSPSSPKLPQPQQKQKEVKKVKEEHDAALVPAPAAAEVVGRCLRVYWPLDDAWYKGKVEAYDAASRRHRVKYDDGDEEEVDLRKEKFEWAAVVEESTLLPARKLRRLRRMSDISVAKSPAEAEDGAGDSTEDEDWKRDTVVEDASEEVELDEEDEEEVVAVRSRKRNPKNSLMSGSTPSTLGSGLTSESEPRISKRRKNVDVASLDFAKRFTFEAVNTNRKVDPEVPMSCGQKGQTTGNDYTAPTGDAAERFGQRDAEKFKFLGEGRKDAKGRRPGNPGFDPRTLLLPPQFLKNLTGGQRQWWEFKSQHMDKVLFFKGEQPHCGFPEKNLSVNLEKLAEKGYRVLVVEQTETPDQLELRRKEMGIKDKVVRREICAVVTKGTLIEGEHLLANPDPSYLLSVTESYQRSPNKSQDTCTIGVSIVDVSTSKFIVGQFQDDPERHGLCSILSEMRPVEIIKPSKMLSPETEKALNNNTRKPLINELVPSTEFWDAEKTIDEIKQYYSSANKQKKADDIQDCVDCLPNLLRELIGAGDKTYALSALGGSLFYLRQTLLDEKILPCAEFEPLACSGFINNIRKHMILDTAALENLELLENTRTGGLSGTLYAQLNHCVTGFGKRLLKRWIAKPLYDRREILRRQSAVATFKGVGQDCAAQFRKDLSRLPDMERLLARLFLKLMFHACSSISTLICSEGSQLIDLLSPGKGLSNISSILDRFRDAFDWSEADRNGRIIPSEGCDPEYDATCNAIEEIKSSLKEYLKEQRKLLRPASVNYVNVGKDMYLIEVPESLGGSVPRNYELQSTKKGFYRYWTPELKELILELSKAESEKESKLKAILQNLIQLFVEHHTEWRQLVSVVAELDVLTSLAIASGYFEGPSCCPTIKESNGTDDTPTFHARNLGHPILRSDSLGKGSFVPNDVKIGGPGNASFIVLTGPNMGGKSTLLRQVCLTIILAQIGADVPAEKLELSLVDRIFVRMGARDHIMAGQSTFLVELEETASVLSSATKNSLVVLDELGRGTSTSDGQAIALAMEHNDTKVSLCHMACEVVEGVGGLEEVTFLYRLTPGACPKSYGVNVARLAGIPTKLLQRANEKSSEFEANYGKRHKMTNDKHVSAQSDDKFSAIRDLFRIVKTWPRPEDQEASISMLRKLQKRAKLYYPFQQFCALTNSPTRPGAPRSEHRPSDPTNLLEKKLINANLINAMYGYMLVFDQ

SEQ ID NO: 68659 - protein, 622 aa, Zea mays
  Coding DNA Sequence Number=SeqID_26880
  Gene Ontology: Mol. function=RNA-directed DNA polymerase activity; Cellular component=mitochondrion; Biological process=RNA-dependent DNA replication
  Homolog annotation: Hit_ID=UPI00004C1731; Match level="QueryCoverage =93%, HitCoverage=44%, E-value=0.0, Identity=79%"; Hit description =UPI00004C1731 related cluster
  Pfam annotation: Domain name=RnaseH; Domain location=200-327; Score =6.8; E_value=1.3e-05; Accession=PF00075.14; Description=RNase H
  Pfam annotation: Domain name=rve; Domain location=329-493; Score =72.2; E_value=1.7e-18; Accession=PF00665.16; Description=Integrase core domain
  Pfam module annotation: Pfam domain module=RnaseH::rve; Domain location=200-327::329-493
MGCLAALSRFISRLGERGLPLYRLLRKAECFTWTPEAEEALGNLKALLTNAPILVPPAAGEALLIYVAATTQVVSAAIVVERREEGHALPVQRPVYFISEVLFETKIRYPQVQKLLYAVILTRRKLRHYFESHPVTLVSSFPLGEIIQCREASGRITKWAVEIMGETISFAPRKAIKSQVLADFVAEWVDTQLPTVPIQPELWTMFFDGSLMKTGASAGLLFISPLGKHLRYVLRLHFPASNNVAEYEALVNGLRIAIELGVRRLDARGDSQLVIDQVMKNSHCRDPKMEAYCDEVRRLEDKFYGLELNHIARRYNETVDELAKIASGRTTVPPDVFSRDLHQPSVKIDDTPEPEAPSAQPEKAPGGYTHLLVAIDKFSKWIEAVAFFTNIIHRFGVPNSIITDNGTQLTGRKFLDFCEDHHIRVDWAVVAHPMTNGQVERANGMILQGLKPRIYNDLNKFGKRWMKELPSVVWSLRTTPSRATGFTPFFLVYGAEAILPTDLEYGSLRTRAYADQSNQASREDSLDQLEEARDMALLHSARYQQSLRRYHARGVWSRDLQVGDLVLRLRQDARGRHKLTPPWEGPFVIAKVLKPGTYKLANSQGEVYSNAWNIQQLRRFYP

SEQ ID NO: 68660 - protein, 61 aa, Zea mays
  Coding DNA Sequence Number=SeqID_26881
MTTSQPWEKTSPSSVICVFPVMGQGLGQDYTNVVPSYPSKLKGRETTAGDVLVLAVPQPNT

SEQ ID NO: 68661 - protein, 155 aa, Zea mays
  Coding DNA Sequence Number=SeqID_26882
MPAVPPSAAIFVPGVGHADACTCLIVLKFDPSDLVTSNRPSASRIRWLRYSETTGICSTRDRGGRGADSPAAAVNVRQQRRRFSRGLELSPVQDLEQIRVGYKKRFPGDRALTRQQQARTSRARSKAEPIGSGASVQLDPAAGNVAKCANGFGDS

SEQ ID NO: 68662 - protein, 408 aa, Zea mays
  Coding DNA Sequence Number=SeqID_26883
  Gene Ontology: Mol. function=nucleoside-triphosphatase activity; Cellular component=membrane; Biological process=regulation of transcription, DNA-dependent
  Homolog annotation: Hit_ID=Q5N897; Match level="QueryCoverage=90%, HitCoverage=70%, E-value=1e-135, Identity=65%"; Hit description =Putative cell division control protein 6
  Pfam annotation: Domain name=AAA; Domain location=177-384; Score= -18.7; E_value=0.0055; Accession=PF00004.19; Description=ATPase family associated with various cellular activities (AAA)
  Subcellular localization annotation: CTP_CleavageSite=54; ConfidenceScore=5.53e-01
MPTLRSATANASPMGTPLPAETSTPRSVKRRLTPGRAGESPGASRHTSPHRHPHASTGPTGMGSTNPYLYPSTQRAKDLAHYITVGREIISYSPSYRVHVPKMLSASPKSSRKRLYGDFVAAEKPKWNPRDAAQMRAVKEALHVATVPSSELVCRDNELRRVLEFCEACVEQEKAGSLYVCGCPGTGKTLSINKIKDSLVCWGNETPDALTINCTNLANTSDIFGKMLETFQNRKKGRNKLSPLHQLQSMFSNKDSAPRRMMLVIVDEIDYLITRDRAVLHDLFMLTTCPFSRCILIGIANAIDLADRFLPKLESLNCKPLVVTFRAYSKDQISDIVKHRLKVLEYDVFEPLALEFCARKVAAASGDMRKSPRRLQVALMLVIQDLRLHASTMSTTSLFEFQECCGGS

SEQ ID NO: 68663 - protein, 170 aa, Zea mays
  Coding DNA Sequence Number=SeqID_26884
MWYGGFCREADAELTLAGHAAVTASRRHAGTKEAARRKQLGHAIVRRREFNNELVDDEYSRTEIVYKKKAKTSLLQIGLTFTVTTRTQKKKRENKKRLVKYFQIFQAEYIKMPAFVFFFLRQAPDIPSLRRHDFSHQILRGLHTLIDVQNSFSNPFFNEHPDFICKRTVQ

SEQ ID NO: 68664 - protein, 69 aa, Zea mays
  Coding DNA Sequence Number=SeqID_26885
MALLSYRMQYCYSTTRPVCCLGSAQIFSFWASRAGQSESGHCLCLQILQDRPTHKMFSFGEQRIKALLI

SEQ ID NO: 68665 - protein, 93 aa, Zea mays
  Coding DNA Sequence Number=SeqID_26886
MEEQRPSQWSAPVHERTEEEGKGARGMGKNWSAHRGKNRRPDRHGRERKMVVEEERLGWRGVRRAPQPAARAPRRGRVGTSTGEEEVPTGESG

SEQ ID NO: 68666 - protein, 203 aa, Zea mays
  Coding DNA Sequence Number=SeqID_26887
MNEMFGHQRGSMPSGENTQGAYELSDDRTDRSTPWARSKEATATARELRELGDSTSSARDELTAESDSAGHAGRGKREAGRRAEVRHAQGPSELEAGEHSREKTPRGGDEGAPAMEAARRAQKTGKLPHGGKTWGAPVMEKKLRGSRRRKLGSSTARTRLEGTQLVMAAGNGSHEGRREIEETRCLQKIRKRLEKKSRGARRQ

SEQ ID NO: 68667 - protein, 191 aa, Zea mays
  Coding DNA Sequence Number=SeqID_26888
MPGELQTRTLAPQTLNPTVLHVAEREPRRMGMPRTTTTGVDAPPQPNPEGRQPRVIRFTGGGELSVWVVAAQELAWSGGGRKTRGARADEFVGSMLIGEAGYRAIERLRSFRAVRGFAGVRCGVRVVKEALSWWSHVKDAGATASRVPRVIGETAITRTNEHGSGKWVPRASETVETTRRDDGKKKSGPRG

SEQ ID NO: 68668 - protein, 162 aa, Zea mays
  Coding DNA Sequence Number=SeqID_26889
MAVQLAGTKIADNKVNCNLVFGVCTRTIGLRSTVGHLFSNVVNQEQGNTIVKDKGPSSSEALPPLGLIDHRSKLMKDMPSSCCVDAGVITIQHEQYGATVHLFIGTGRSPEGTHPRRLLMWGAFLLISTSSISSCGWCSRGTNPSGVGGNMLLVIFDHILAW

SEQ ID NO: 68669 - protein, 160 aa, Zea mays
  Coding DNA Sequence Number=SeqID_26890
MAGRRPRIRGQRGENGGEKVSGGFFVTPVRNPGCPRGAIGRDRAQASSSGGEGTPWAKAQALDEVGMARHRSGAVSRCDRTPAKPNWLKADANKLVRKLRTNRETEDWMFKGIARDDPRAPAFNPLSAEEADPVPRHHDTRLLQQLVCKLGTNLTRRAHT

SEQ ID NO: 68670 - protein, 166 aa, Zea mays
  Coding DNA Sequence Number=SeqID_26891
  Subcellular localization annotation: CTP_CleavageSite=40; ConfidenceScore=5.12e-01
MGCSFHGGATAVVRVQVVPGDDQRSERGSATKRSTPRPRRAETTAKATARERDPHRRPISIHLPSSFTIPDEPPCSLSLGFVRAWRRLVSPGPRIGYLYRRPCLHWRQILLRPELHAAEKTDPPRAVDEYGWVTQGQRRRGADEEETGSWKVDRPLSPRVTESEFS

SEQ ID NO: 68671 - protein, 166 aa, Zea mays
  Coding DNA Sequence Number=SeqID_26892
  Subcellular localization annotation: CTP_CleavageSite=40; ConfidenceScore=5.15e-01
MGCSFHGGATAVVRVQVVPGDDQRSERGSATKRSTPRPRRAETTAKATARERDPHRRPISVHLPSSFTIPDEPPCSLSLGFVRAWRRLVSPGPRIGYLYRRPCLHWRQILLRPELHAAEKTDPPRAVDEYGWVTQGQRRRGADEEETGSWKVDRPLSPRVTESEFS

SEQ ID NO: 68672 - protein, 66 aa, Zea mays
  Coding DNA Sequence Number=SeqID_26893
MSNPQLEVQTHVWDGSRNFVAACHPFRKRDECPSGQGVTLHKIVTAIGGGVSVAKAQRLWKAVVGP

SEQ ID NO: 68673 - protein, 124 aa, Zea mays
  Coding DNA Sequence Number=SeqID_26894
MAGVQHECDPRAKSPNRRQRRVAGTIGYLWGGCLSEIRDCMEPPTGRSRIRTPARNSDARRCCICANQPPPPILKLCNAPRPPQGVNLAMVGKVSVGGALNSQFATALAQAIDTERSGKVPHDG

SEQ ID NO: 68674 - protein, 134 aa, Zea mays
  Coding DNA Sequence Number=SeqID_26895
MNVVVTSHQLVSLYSPTGEEGEPPRRTYWLIGGPVNSTPYCSRWTVIALASTPWNKPKDLRRSESLASLTQVDGSLNFNGIKREEETHTGAKSQHQKIEERKRKTEAELSYAILVLGSLWCVSIMLGMKALALE

SEQ ID NO: 68675 - protein, 173 aa, Zea mays
  Coding DNA Sequence Number=SeqID_26896
MSWTVWYLMPNHLDMSWTIRPGPFGPIADRPALYDRWSRYETTQATPYIAGQFGYTFGPFGPVTDRPTPYVVPSGTYPANRCPSSDRTSIESDATAPTNTTVTLPLLTLRNVPRLPALSGGGPETHLVSRPTSMVSRHHANTTLELLADWFHKSSRSVSLAAIEHPKLKDLLC

SEQ ID NO: 68676 - protein, 61 aa, Zea mays
  Coding DNA Sequence Number=SeqID_26897
MAAEFLRSPSILPFRSMEVRQAPEVSVFAPNGHNGARTRCNYGHYSITHHTQSKIQMRQIS

SEQ ID NO: 68677 - protein, 168 aa, Zea mays
  Coding DNA Sequence Number=SeqID_26898
MAVREQETATRELSAQTGRAPRRSELGRREEEAPRLGDSRDWGETSAERWNELQPTAMGELDGGPDARKKLQGEGRVRTAAIGAHTRKQGQPAMADRERERSRDSEARRGEAPCRLGFSVKLGNDGEVDAEVSTGSGGLESSGMQSTMVDNLHGELSDSIGVSRAEPS

SEQ ID NO: 68678 - protein, 109 aa, Zea mays
  Coding DNA Sequence Number=SeqID_26899
MACHGREQRAHRGRRPWKSKGKRGARPRLEKGRGGAGQRRLAGRCGAMDLMGEGAAALGELGSGAAQWGRRLIELHGGYTNLAADKRTPCGLASRASARARYWQTAARA

SEQ ID NO: 68679 - protein, 135 aa, Zea mays
  Coding DNA Sequence Number=SeqID_26900
MGRACTGAPRRGRGTRGSTGEVGWRQDTASSSGRAGLIRSRRILAMLPGCYSRDSRESDKESRRGRKRKQGKRAASAAKEERQQGVLVRKRSLRIARVRAGHLVAARWEMAIPSSASGDISMRVGEEEDGGENIP

SEQ ID NO: 68680 - protein, 150 aa, Zea mays
  Coding DNA Sequence Number=SeqID_26901
MSAESCSWSPRPNVGAHPNYPGPLDSHHDDRIPPTHCTAHGSGSRGLCVCPEWTQRRADQVTALCALYIVMAAAKYGPVGKKKEMPRPPLYGGEEVGSASIVDRTLVRRGTPNSAKPLQRAVMAGTTSVECKTGILAVLVVMSSSGLSHD

SEQ ID NO: 68681 - protein, 109 aa, Zea mays
  Coding DNA Sequence Number=SeqID_26902
MERIFYVFSKLSIKSGIVHSSTHPRAHLPLAQGRYSFSLLPAREQQGGARPEAACGCGCCSSGPRREVQGAWRSGSRAAEVEEGKLKGLSAMETARPSKRRRCCNAYEA

SEQ ID NO: 68682 - protein, 119 aa, Zea mays
  Coding DNA Sequence Number=SeqID_26903
MGLSVTAQAYWRSIERARLGGSDSSEEASEEEVEDSSDSVEGSSSEGNDDGGDDSNGGGDGSDDDDSEGSCDDGGDSSGEGDSGSSGGDGDGKGDDKGGGGSDDKDDSDGKAGGLMLPA

SEQ ID NO: 68683 - protein, 61 aa, Zea mays
  Coding DNA Sequence Number=SeqID_26904
  Homolog annotation: Hit_ID=UPI00004C1733; Match level="QueryCoverage =54%, HitCoverage=2%, E-value=2e-07, Identity=79%"; Hit description =UPI00004C1733 related cluster
MNDVCEECYCLFGFDASERLDLNPFGEFFNGKQQQYESLRPLSQASGLGLAKREFSSKDKL

SEQ ID NO: 68684 - protein, 182 aa, Zea mays
  Coding DNA Sequence Number=SeqID_26905
  Subcellular localization annotation: CTP_CleavageSite=61; ConfidenceScore=5.19e-01
MAAQLPPASAVKQDSLPPSLTRLSLGSSSPLIYVQQKPLSKLAHACLPAGSLLGDRDELPSSMHLPRRDFLWSELEQSQLGACDALCSSHTSYSSHVCRPHVIPFLAKFSLNRHSQTHARHSSIAQGDLAQVTVTAFPPRRALGMLDVLQQQQRRPSLRRARQNGPHIVDLRSVCASSSKPA

SEQ ID NO: 68685 - protein, 68 aa, Zea mays
  Coding DNA Sequence Number=SeqID_26906
MPAQPPRGRDNTGGGTSRTLKPSTAGKQTPIGRVDDYFDSELSVDEDDLGFFRAMDDKSSKEDFDFFS

SEQ ID NO: 68686 - protein, 150 aa, Zea mays
  Coding DNA Sequence Number=SeqID_26907
MRDLEGVPDLLGIVQAAHLMERVRKRLEVFPARIYAHASHHTLPTPTAHKACRPATAHQPHVVRSVATSQPVAKPKRLNRKYRQETVAAAALLCACARRLGYRLLQFSFRRTVIQAFSATLPSLAPRPGVAHRVSAFSATLPSLAESQVS

SEQ ID NO: 68687 - protein, 321 aa, Zea mays
  Coding DNA Sequence Number=SeqID_26908
  Subcellular localization annotation: CTP_CleavageSite=37; ConfidenceScore=5.14e-01
MRLGVPFIAPRQLGAVGSPFAKPTVEPSVPLAHRTVRCDLVTVGSGHASSTDRAADRWRGCCWLTGQSDEVAHDWMKEWFYAEVDSENREKFKDYTDPAANTKAGEKWKRATKTTSKASKKAIDDEIGSDESKNDEEPPSGPEKKAKIAVRKTPATQDQGKGSATTTSSLGYTRILKVITQLGSTLTRLMTTTKGTDEGGQTLASSKGKYILSKEEVDNPRIQNIGGAAFGYSSSLGEEDEKKAVEGGGSSGHEKAEEEAKEPSFALGIDTVDPTQSSGEEIDGHGFFVRHLGEGELSDKEASELENKSEAMGYGPGAMLF

SEQ ID NO: 68688 - protein, 94 aa, Zea mays
  Coding DNA Sequence Number=SeqID_26909
MAAKALVADDRFEAFVVLVSCYGRPLDRRSLQLCTCVTSQHETKGGSLNKSLGGKVASESCCVAFTATSRAFAPWSPLLSSDRWLIVEGSSAIP

SEQ ID NO: 68689 - protein, 470 aa, Zea mays
  Coding DNA Sequence Number=SeqID_26910
  Gene Ontology: Mol. function=DNA binding; Cellular component =mitochondrion; Biological process=DNA integration
  Homolog annotation: Hit_ID=UPI00004C1731; Match level="QueryCoverage =91%, HitCoverage=33%, E-value=0.0, Identity=74%"; Hit description =UPI00004C1731 related cluster
  Pfam annotation: Domain name=RnaseH; Domain location=37-165; Score= -15.4; E_value=0.0016; Accession=PF00075.14; Description=RNase H
  Pfam annotation: Domain name=rve; Domain location=166-341; Score =81.3; E_value=3e-21; Accession=PF00665.16; Description=Integrase core domain
  Pfam module annotation: Pfam domain module=RnaseH::rve; Domain location=37-165::166-341
MGKTISFAPRKAIKSQVLADFVAEWVDTQLQTAPIQLELWTMFFDRSLMKTGAGVGLLFISPLEKHLRYVLRLHFLASNNVAEYEALVNWLRIAIELGVRRLDARDDSQLVIDQVMKNSHCHNPKMEAYCEEVRRLKDKFYGLELNHIARRYNETADELAKIALGRTTVPPDVFSRDLHQPSVKINDTPEPEAPSAQPEKAPGGYTHLLVAIDKFSKWIEVRPLNSIRSEQAVAFFTNIIHRFGVPNSIITDNGTQFTGRKFLDFCEDHHIRVDWATVAHPMTNGQVQRANDMILQGFKPRIYNNLNKFGKRWMKELPSVVWSLRTTPSRATGFTPFFLVYGSEAILPTDLEYGSPRTRAYADQSNQANREDSLDLLEEARDMALLHSARYQQSLRRYHARGVRSRDLQVGDLVLRLRQDARGRHKLTPPWEGPFVIAKVLKPGTYKLANSQGEVYSNAWNIQQLRRFYP

SEQ ID NO: 68690 - protein, 47 aa, Zea mays
  Coding DNA Sequence Number=SeqID_26911
MDQLRRNPIEPSPKGAKEVQLKQPVKFLMWVHQTVRITYSPPLGALS

SEQ ID NO: 68691 - protein, 125 aa, Zea mays
  Coding DNA Sequence Number=SeqID_26912
MTGKRPRIHGQRGENGNGKTSGGPEQLRLGSPAASGGEGRARERTRVCEMRRGASAGYWQGSKKGVGHVGGHRGRETRRLARMRTRQSSMGAGKADLTGRVHDADREKGARGDNGSALANRARET

SEQ ID NO: 68692 - protein, 61 aa, Zea mays
  Coding DNA Sequence Number=SeqID_26913
MAGAPTVLNGELVSTEAQSSSDDPPSSVWWFKEVLTTQVHASESEVWREVSAVRAHKPAKG

SEQ ID NO: 68693 - protein, 196 aa, Zea mays
  Coding DNA Sequence Number=SeqID_26914
  Gene Ontology: Mol. function=nucleotide binding; Cellular component =nucleus; Biological process=small GTPase mediated signal transduction
  Homolog annotation: Hit_ID=P41916; Match level="QueryCoverage=85%, HitCoverage=76%, E-value=7e-93, Identity=93%"; Hit description=GTP -binding nuclear protein Ran-1
  Pfam annotation: Domain name=Miro; Domain location=1-103; Score=6.7; E_value=0.0012; Accession=PF08477.3; Description=Miro-like protein
  Pfam annotation: Domain name=Ras; Domain location=1-148; Score=157.2; E_value=4.3e-44; Accession=PF00071.12; Description=Ras family
  Pfam module annotation: Pfam domain module=Miro::Ras; Domain location= 1-103::1-148
KTTFVKRHLTGEFEKKYEPTIGVEVHPLDFHTNCGKIRFYCWDTAGQEKFGGLRDGYYIHGQCGIIMFDVTSRLTYKNVPTWHRDLCRVCENIPIVLCGNKVDVKNMQVKAKQVTFYRKKSLQYYEVSAKSNYNFEKPFLYLARKLAGDSNLHFVETPALAPPDVTIDMAAQQQHEAELAAAAAQPLLDDDDGMIE

SEQ ID NO: 68694 - protein, 104 aa, Zea mays
  Coding DNA Sequence Number=SeqID_26915
MAQTSPTVINKIFRVVILPKSGDKNKIRDKFWNIIHHITNDETRFEGRCEITHTPFRPFKNETGFLTRPLTPFLDDEEVAGDDEATNPEVDSTQKMPPPQHEQF

SEQ ID NO: 68695 - protein, 176 aa, Zea mays
  Coding DNA Sequence Number=SeqID_26916
MAAPRTTRPVALTLRQKRRHLWRQKQATLRFRHNDRVKKEDSAACAASTAVPLDRVRLTAAKSGLGRYRKLRLARPQGSDSASAPEDDELRLARPQGSDSASAPEDDELCLARPQGSDSALASADGLRLARPKGSGLTSTLEDRLDLDLDLGGASASPYPGLGPTTSQEGPSLPYP

SEQ ID NO: 68696 - protein, 477 aa, Zea mays
  Coding DNA Sequence Number=SeqID_26917
  Gene Ontology: Mol. function=RNA-directed DNA polymerase activity; Cellular component=mitochondrion; Biological process=RNA-dependent DNA replication
  Homolog annotation: Hit_ID=Q8S463; Match level="QueryCoverage=85%, HitCoverage=24%, E-value=0.0, Identity=80%"; Hit description =Putative prpol
  Pfam annotation: Domain name=rve; Domain location=189-348; Score =122.0; E_value=1.6e-33; Accession=PF00665.16; Description=Integrase core domain
MEAYCDEVRRLEDKFYGLELNHIARRCNETADELAKIASGRTTVPPDVFSQDLHQPSVKINDTPEPEATSVQPEVPSAQPEASSVQPEVPSAPEGEALHVEEEQNGATPDRNWQTPYLQYLRQGELPLDQAEARWVARRAKSFVLLGDEEELYHRSPSGILQRCISIAEGCRFYAKQTHLPAQALQTIPITWPFAVWGLDLIGPLQKAPGGYTHLLVAIDKFSKWIEVRPLNSIRSEQAVAFFTNIVHRFGVPNSIITDNGTQFTGRKFLDFCEDHHIRVDWAAVAHPMSNGQVERANGMILQGLKPRIYNDLNKFGKRWMKELPSVFWSLRTTPSRATGFTPFFLVYGAEAILPTDLEYGSPRMRAYNDQSNQASREESLDQLEEARDKALLHSARYQQSLRRYHARGVRPRDLQVGDLVLRLRQDARGRYKLTPPWEGPFVIAKVLKPGTYKLANNQGEIYGNAWNIQQLRRFYP

SEQ ID NO: 68697 - protein, 84 aa, Zea mays
  Coding DNA Sequence Number=SeqID_26918
MAGCAIRGRCVARSNGRLGTLDCPVRQLPPRTNGRMRQKRKEIVHPDSYSDCPVVHRTVRCTTRQKASLAFQVGLQRLLAALGL

SEQ ID NO: 68698 - protein, 80 aa, Zea mays
  Coding DNA Sequence Number=SeqID_26919
MRIRKGDQVEVWTQEAVTPVGAWRGGEVTWGQRATHTPCGGTAAAKVSGRISRKLLPPASAGPRQCPRHLDAGDLVEVFE

SEQ ID NO: 68699 - protein, 396 aa, Zea mays
  Coding DNA Sequence Number=SeqID_26920
  Gene Ontology: Mol. function=RNA binding
  Homolog annotation: Hit_ID=Q6F393; Match level="QueryCoverage=17%, HitCoverage=22%, E-value=1e-08, Identity=48%"; Hit description =Expressed protein
  Pfam annotation: Domain name=Agenet; Domain location=3-65; Score =23.3; E_value=0.00087; Accession=PF05641.3; Description=Agenet domain
  Pfam annotation: Domain name=ENT; Domain location=333-396; Score =48.2; E_value=2.8e-11; Accession=PF03735.5; Description=ENT domain
  Pfam module annotation: Pfam domain module=Agenet::ENT; Domain location=3-65::333-396
MRIRRGDQVEVWTQRAGSPVGAWRGGEVTWGNGHSYTLRWNDCGEVSGRICRKSVRPRPPPAPVPHDLDAGDVVEVFDDCDCLWKCAEVQGSAAADVRHFDVKIVGAAKILTVPLQRLRGRQVLRHDDVWVPIHKQDNHIAVPSATPHRAIVAAMDIGSKPMEPGFTPHVQKRSFGMLPSDTSTRAKRFQDDAKRLKQEPGRGVQVRVPNVCLSNKQDETSKDCDNDVRVGFNPDDDSDHWQQQHEHDEEEEENGDDDDHSDSDSSSDDCSSGSESRTRSIETGKDWSAAPAPTSRPCKDDDQQEPVKKEAPPVKKEPHCDGEPPKDEMGATAREQIHRLELEAYAALMKAFHASGNPLSWEKEGLLSDLRVHLHISNDEHLKAINVILNRKGRTR

SEQ ID NO: 68700 - protein, 177 aa, Zea mays
  Coding DNA Sequence Number=SeqID_26921
MEATLRGDWYLAMLVKINGKAHGVVKGSPTGGEAGSQGQQEGDDAKEVGYRVSQPEPQGLLMNGAKFPNLDVIKEVVKRWSICLRKEFRVLKSRSNEYEFQCGYLEPRKVLTNLHWCPDAKGSPREGQAPRQSNGPGSIFLTINPFLVIDDNITKSTNFSPFESNTEKEDMLNHKTT

SEQ ID NO: 68701 - protein, 157 aa, Zea mays
  Coding DNA Sequence Number=SeqID_26922
  Subcellular localization annotation: CTP_CleavageSite=63; ConfidenceScore=5.24e-01
MVVLAPSFLSPYCSSKCSLLPSIVFNLQLGPSPALAMAELALAAAMPGLLSLIPAPSALLPTSARPGRPSAWRPSREQALTLPTAPLHGGCPSPCSSPSFALHGHAPARIKVSASSSSPAPPVVSSSAELAASRPYAELASSLPSLRECQVFGKMSR

SEQ ID NO: 68702 - protein, 136 aa, Zea mays
  Coding DNA Sequence Number=SeqID_26923
  Subcellular localization annotation: CTP_CleavageSite=70; ConfidenceScore=5.35e-01
MGLRSQLCLPRVHHGPAHAHSRTSPGTSAMSSAHASQLFFEHRPPERSPTLTSALPTPSDLSGDPRSPPRSASSPKATLSDPVPRPEVRHPSTRLFSPIHAYLEPIWPRWRAATLARRARTVSSQPDPVQCPGSGP

SEQ ID NO: 68703 - protein, 64 aa, Zea mays
  Coding DNA Sequence Number=SeqID_26924
MAHTCSDQIMKREAIKNAYEQKKKSTQVMLENSRSRMQMGESCLHGSKRPEKSLCTEVEEMGSW

SEQ ID NO: 68704 - protein, 102 aa, Zea mays
  Coding DNA Sequence Number=SeqID_26925
MEFLPVLALGAGHVLLVRLGRDLAIVPQLVTRLGCLPALSPTARHEAPMRKLSVGRAPSWRPSPASAQPSSLFLFPTTELLCARILLVDARWPCSISSIAAL

SEQ ID NO: 68705 - protein, 60 aa, Zea mays
  Coding DNA Sequence Number=SeqID_26926
MGDSVGSTAEQRDELKGERASCREERAGKKHAPRRRAPGRAARLRGDTHESNQMRSGLRF

SEQ ID NO: 68706 - protein, 79 aa, Zea mays
  Coding DNA Sequence Number=SeqID_26927
MSLSLKLYPKGRHEAWRTREADGEAQQGLQGEKGKARVTDPALWSEIAIICTAERRLGTHFDLFEWKLVKSQLILFSGS

SEQ ID NO: 68707 - protein, 192 aa, Zea mays
  Coding DNA Sequence Number=SeqID_26928
MAGSKDRTDVSPSNIMKRTLESLPAEHQHRFKDYMSHQPIPSCYPLSATRERFALLARTIWPYTSTVEIVKGSFGWPADPGAPPRSLLRDGVPWGSSRVLREQEDPLRMRRLCNPERGIFLRKGKKTYNSNSLICITGILTGRHGWPTLDPVRQARGAAHGPLIMASCLLLSTHQGSIPFDIHPSIIMLRCR

SEQ ID NO: 68708 - protein, 256 aa, Zea mays
  Coding DNA Sequence Number=SeqID_26929
  Gene Ontology: Mol. function=zinc ion binding
  Homolog annotation: Hit_ID=Q6Z542; Match level="QueryCoverage=100%, HitCoverage=65%, E-value=9e-48, Identity=61%"; Hit description=Zinc finger protein-like
  Pfam annotation: Domain name=zf-C3HC4; Domain location=152-182; Score= 6.5; E_value=0.033; Accession=PF00097.15; Description=Zinc finger, C3HC4 type (RING finger)
  Pfam annotation: Domain name=zf-C3HC4; Domain location=63-100; Score =1.6; E_value=0.11; Accession=PF00097.15; Description=Zinc finger, C3HC4 type (RING finger)
  Pfam module annotation: Pfam domain module=zf-C3HC4::zf-C3HC4; Domain location=152-182::63-100
MKEHLMLNIDDLSILEPNEVIGTVKNKSSGETIAHPPSMAHAILAVGESMVSEAEPLLQVVECRICQEEDSIKNLESPCACTGSLKVVEWEVTSDLSQLTTNGRVAPKVVKRVAISSVESSGHLTSLHTLIFMDAGWGPEEMINCQAISVAGGGEENPRQYAHRTCVQRWCNEKGDVTCEICHEPYEHGYTAPPRGHPDETTIDISGGWTITGTAFDLRDPRILAVAQNHIMEAEYDDYSATNASTAAFCRSAALV

SEQ ID NO: 68709 - protein, 105 aa, Zea mays
  Coding DNA Sequence Number=SeqID_26930
MAFTVASSPAMIEWAKVTHCGVVKAPRHVAQGREVANSGESIRSGRDTGGYDDWSRLVIGVHRRTTELQSQPCSLIFRLSHMRCVEWLFANKPKSHGLICKSSNM

SEQ ID NO: 68710 - protein, 148 aa, Zea mays
  Coding DNA Sequence Number=SeqID_26931
  Pfam annotation: Domain name=zf-CCHC; Domain location=67-84; Score =17.4; E_value=0.0013; Accession=PF00098.13; Description=Zinc knuckle
MNVCELTLTVLTSPQVKDMYHKTIMVSHFRILCLKRPLRIGHLILGTKAKLFLLRRSSYPSNREACQSCFKCGHAGHYANYYPNRAAYTTAAPMKQGQASGGKSQALSVNQGQVNHVEAETEPEGPENPVEVPVEGEEASEDVNEQQD

SEQ ID NO: 68711 - protein, 81 aa, Zea mays
  Coding DNA Sequence Number=SeqID_26932
  Subcellular localization annotation: CTP_CleavageSite=23; ConfidenceScore=5.45e-01
MAPLMTINGGETTPLKRWRTGLRAARAGSARTTQCASRVCGRASGRGGRLRGFFGSKVAVCAGGDERTGLLGWAARCPRAR

SEQ ID NO: 68712 - protein, 185 aa, Zea mays
  Coding DNA Sequence Number=SeqID_26933
  Gene Ontology: Mol. function=N-acetyltransferase activity; Biological process=metabolic process
  Homolog annotation: Hit_ID=Q75GC2; Match level="QueryCoverage=87%, HitCoverage=91%, E-value=1e-44, Identity=57%"; Hit description =Putative acetyltransferase
  Pfam annotation: Domain name=Acetyltransf_1; Domain location=67-150; Score=17.8; E_value=0.027; Accession=PF00583.14; Description =Acetyltransferase (GNAT) family
MQVQVQVQQRGSPAPTAELEVSLREFALSDADTRAFMSWASDPRVARRYITDHVLPHPWYHAICAGAGAPLPVVGSISVKAGPAEDGGPFRASVGYRLARAHWGRGMATRAVRAEAAAMFAARPWLLRLEAVADVDNPASQRVLEKAGFAREGVLRKYVLLKGRPRDMVMFSIVVETEQDKPDGP

SEQ ID NO: 68713 - protein, 127 aa, Zea mays
  Coding DNA Sequence Number=SeqID_26934
MRYSVRALFTVRCAPESPVHSRTEGSSASPDPRPQPRPQPRPQGKVSTSTDPRPRPREKDSASPDPKPQPQPRPRKKDSASPDLNLGLGGVAASLDLSLGLGGVTASLDLGLVSAALLGIHHYPTFS

SEQ ID NO: 68714 - protein, 135 aa, Zea mays
  Coding DNA Sequence Number=SeqID_26935
  Subcellular localization annotation: CTP_CleavageSite=44; ConfidenceScore=5.01e-01
MNEQRYMKQIELGRGHSANLYGPSKKPVPAINHRTVHAERRTVRSASRQRLATTSAEGQQSSGASNSPVPPGKGNQPITRFSDRALFIVRCESDSLVHPQTEGNQSLPNGAPTAPRSLEVIKETLGAWSTTPRTH

SEQ ID NO: 68715 - protein, 371 aa, Zea mays
  Coding DNA Sequence Number=SeqID_26936
  Gene Ontology: Mol. function=methyltransferase activity; Cellular component=cytoplasm; Biological process=regulation of transcription, DNA-dependent
  Homolog annotation: Hit_ID=Q6YXZ7; Match level="QueryCoverage=73%, HitCoverage=41%, E-value=1e-146, Identity=91%"; Hit description =Putative kinase-binding protein 1
  Pfam annotation: Domain name=Aha1_N; Domain location=247-369; Score= -39.5; E_value=0.032; Accession=PF09229.1; Description=Activator of Hsp90 ATPase, N-terminal
  Pfam annotation: Domain name=PRMT5; Domain location=1-257; Score =307.0; E_value=3.4e-89; Accession=PF05185.6; Description=PRMT5 arginine-N-methyltransferase
  Pfam module annotation: Pfam domain module=Aha1_N::PRMT5; Domain location=247-369::1-257
MVVGAGRGPLVRASLQAAEETGRKLKVYAVEKNPNAVITLHSLIKLEGWESLVTVISSDMRCWDAPEKADVLVSELLGSFGDNELSPECLDGAQRFLKPDGISIPSSYTSFIQPITASKLHNDIKAHKDIAHFETAYVVKLHRIATLAPPQQVFTFTHPNFSPNASNQRYTKLQFEMLPDMGSCLVHGFAGYFDSVLYKDVHLGIEPNTATPNMFSWFPIFFPLRKPIYVPEGSPIEVHFWRCCAPTKVWYEWAVTTPTLSPIHNSNGRSYWAFQVIVRNKKRVGYNYELSLRFSGEWLIKEENKKIKGHLDIPEFSFGEIDDLEVQVRLGDDKGLASDDRTRICKDLKSFLAPIQEKMRMFEEELKVKEF

SEQ ID NO: 68716 - protein, 149 aa, Zea mays
  Coding DNA Sequence Number=SeqID_26937
  Gene Ontology: Mol. function=methyltransferase activity; Cellular component=cytoplasm
  Homolog annotation: Hit_ID=Q6YXZ7; Match level="QueryCoverage=94%, HitCoverage=26%, E-value=2e-50, Identity=59%"; Hit description =Putative kinase-binding protein 1
MPLGQRPGDKSDARYCGVEVLDFPAGEDLPAVLNHSLASAFDFILVPLVDPNYRPAPGSVLPVSASDLILGPAQWSNHVVGKISEWIDLDSEDERLRLDSELTLKQEIAWASHVSLQLWLRLPLEKSELMDDDLHNIKNNSRGVFFFDN

SEQ ID NO: 68717 - protein, 153 aa, Zea mays
  Coding DNA Sequence Number=SeqID_26938
MADSDWCFAGTMSSPWSPLSIEEDEEIQELGAEEQQVGEQLRQGDGQQQELTADARAQETGMKRARSVSSSSTNPSNSRKSESLKILPIVLPELVSPQIIGNQIVTLSEVQLFCINAHYIDAKWKLHKRTIWFNKLHPPLDMVSIADEVHMCL

SEQ ID NO: 68718 - protein, 69 aa, Zea mays
  Coding DNA Sequence Number=SeqID_26939
MVTKQEKSSQRINVQGELERGSEVAGPRFWGWNLELLGCVLHCCRLTPGPDRRLAALTLGLGVREKDNE

SEQ ID NO: 68719 - protein, 233 aa, Zea mays
  Coding DNA Sequence Number=SeqID_26940
  Subcellular localization annotation: CTP_CleavageSite=32; ConfidenceScore=5.17e-01
KQSSSARPFFSAAGRKMENHRNFRDFLSQGCSSSTSRGRTGHEAPEDDDFGTFSQSPFALPPRINVPAPRSRIEALDLNSQSQGTDFPYLSSYQDVLQSGDGGSDLGLPPLGRGRSARTLFQSTRTISAPISHARGPIRGCRGVRGRGTSSRGGGRSAISAPIDPVLIEDFGDEPTNEMDSRASVKRKECRKFQHAIPTYMEQLAEMFHGIVVDGSSSCIPGDRKEELYQYST

SEQ ID NO: 68720 - protein, 517 aa, Zea mays
  Coding DNA Sequence Number=SeqID_26941
  Gene Ontology: Mol. function=carboxypeptidase A activity; Biological process=proteolysis
  Homolog annotation: Hit_ID=Q9FGZ7; Match level="QueryCoverage=72%, HitCoverage=80%, E-value=1e-109, Identity=53%"; Hit description =Arabidopsis thaliana genomic DNA, chromosome 5, TAC clone:K5J14
  Pfam annotation: Domain name=Peptidase_M14; Domain location=94-374; Score=97.4; E_value=4.3e-26; Accession=PF00246.14; Description=Zinc carboxypeptidase
  Subcellular localization annotation: CTP_CleavageSite=72; ConfidenceScore=5.20e-01
NLTKSIHSCLCLLNVKTGRAGTKRRDQPASGSPATTLSPPHPAHGSTEKMSAAYPRLLLCLLTLALALAGVAAGKISAPRTPISRDIYHSSDSLLREIKALVARHSSKLSMDTIKTSNKGYSAELFVVTFNHVKERMDNGSKVHILLSFGQHGRELITSEVALRLLYVLTEKPKIAGVDISSFEKLLENLVIKVVPMENMNGRKRVEEGELCDRRNGRGVDLNRNWSVDWGKKEKDYDPYEENPGIAPFSEPEAQIMRELSRSFKPHIWVNVHSGMEALFMPYDHKNTTPNGASAHSMRSVLENLNRRHFQDSCLVGSGGGSVGYLAHGTTTDYMYDIAKVPMPFTFEIYGDEKASSDDCFKMFNPVDKKTFDRVVNKWCMAFLILFEEGLRNLRDAQIVSQGTLENWVPIGGDIVEINVERKSSIRERRKLEGLDLGMQELRTYFRLFLLSTFLLMFMFCARISKNRNRDSELEYSSAFAPWYSELDVPYTLDTKDGGRQCLFRLQQRRQTMWLTV

SEQ ID NO: 68721 - protein, 470 aa, Zea mays
  Coding DNA Sequence Number=SeqID_26942
  Subcellular localization annotation: CTP_CleavageSite=100; ConfidenceScore=5.23e-01
MKPGGGGGGGNGVTATTTAIPPDDLRSRRRLAALLAPLLLFLAAALSFPSTLHLAAVPLPTPPMTTVPRRTTPPRVAVCLVGGARRFELTGPSIARHVLRGGAFAVPADRRDAGQAAATTSVDVDVFLHAPLDADAYKLPLLLAPAAGAGGGSGTTSRNSNNVVSLAAVRVFRPVYLDETTPAARAQVLTADNSPNGIQGLLQYFRLVEGCLDMIRDRESRGNFTYAAVLRTRLDGFWTAPFRLDDDDQLLSGSAYVVPEGSRFGGLNDRLGYGGRRATEAALARLSALPRLAAAGHAGLNSEAAFAAQLELSGVAARERRLPFCVLSDRAYAFPPAPGYGVPVAALGSAGPLSGAKCRPCRPACAGACAQRSVARLEPAWSWTGGALELCDASGPWEPGWEALFDAAAGRDAARARRAVARMGAGECVARMEAFRALADRWDAPSPAEMCRIGLRSRSSASSAPPATTR

SEQ ID NO: 68722 - protein, 68 aa, Zea mays
  Coding DNA Sequence Number=SeqID_26943
MNVGHAAHLSGQTAHMNQVPGSGVGIGVGGSDGLPQHQPMQEMAALSGMDQQFVMLRTAMRDKMHSMH

SEQ ID NO: 68723 - protein, 1171 aa, Zea mays
  Coding DNA Sequence Number=SeqID_26944
  Gene Ontology: Mol. function=histone acetyltransferase activity; Cellular component=nucleus; Biological process=regulation of transcription, DNA-dependent
  Homolog annotation: Hit_ID=Q6YXY2; Match level="QueryCoverage=91%, HitCoverage=63%, E-value=0.0, Identity=64%"; Hit description =Putative HAC5
  Pfam annotation: Domain name=DUF902; Domain location=891-948; Score =91.1; E_value=3.3e-24; Accession=PF06001.3; Description=Domain of Unknown Function (DUF902)
  Pfam annotation: Domain name=DUF906; Domain location=1025-1158; Score= -118.9; E_value=0.074; Accession=PF06010.2; Description=Domain of Unknown Function (DUF906)
  Pfam annotation: Domain name=PHD; Domain location=972-1023; Score =18.8; E_value=0.00074; Accession=PF00628.19; Description=PHD-finger
  Pfam annotation: Domain name=zf-TAZ; Domain location=590-669; Score =64.4; E_value=3.7e-16; Accession=PF02135.6; Description=TAZ zinc finger
  Pfam module annotation: Pfam domain module=DUF902::DUF906::PHD::zf -TAZ; Domain location=891-948::1025-1158::972-1023::590-669
ERKQSPGDWRKRLPELAKRLEEILYRKFPNKHEYYNMMKGPVEPQLQFAIKTLSAQNQHNQQNPQMTRQISSSSSYGAMIPTPGMTQGTSAGSRTPYVTETNALSSSGACMVPQNANMGTSMQGPMSNGYQHLNTNISQNSTTNNVESTMGSVGVQRQLSHMIPTPGFSNQQNVPSNPDYSNGTGYFNGESAVAPHMQHQKQFPSNHNSNQIQHIGGHNNSGIHSSLLDNSSAYGLSDGHMNGGIGVHGSNMQLTNRTTAPEAYMNISSYGNSPKPMQQQFNQHPQQRIPTSVDMAGSGSFYAIGSTPLTTANSQSMNVANLQSRSSMNQMLVSNQLNIQSVQQQSQIKNGPLDQTEKVNFQSTQLTHDQLLHQHPMSQHQVQPNSQFIQNQYHINQQQPNSQHQQAMLRNNSLKQSQMASNHSMQLPEQGTLPHTELVSSQASDPADLPNFQGQYQQRNALDNVKGGQMLGHLSSSQNFLPSASHGSQQLLPSNPQLDNGSNAVSYVLKGSQTEQMLLSQWQPQTMEKAPVATNSSLEKQVQEDCCQRIMSQDGVQQPFSSDWCLSNGTLASVDPAVPKPTAGGFGQVKRNIHYLRQIKWLLLLFHAKTCTYPVGSCKFNGCVQVQELLNHFQNCQRKDCSYRSCTKSKAMSHHYKTCVDEQCPVCSVVRKFLRQSTEQASKQKTLESRKLAQQNVPQRIMNGIEGDRMDVDPMSAEAFEDQPSVPKRLKMHLPSLSGPENDISVVSNHHVNPGFLLQEAQPEQLEHNNRTTYLKREVDAKADIRAPQKPIKISYDIDENVTTSRHNVIPGVPSEMDSHIKQENLSVNKETSETALEVKNETNDLTDATVTKSGKPKIKGVSMIELFYPDEVDVHIDSLKLWVGQSKAKAEKNQAIGHSENENSCQLCRVEKLTFEPPPMYCSPCGARIKRNAPYYAVGTGDTRHYLCIPCYNESRGETIEVEGQTFPKAKLEKKRNEEETEEWWVQCDKCQCWQHQICALFNGRRNGGGQAEYTCPHCYVEEVKCGLRKPLPQSAVLGAKDLPRTVLSDHIEDRLFKRLKQEKQDRAAAAGKSIDELAQIAQTRFQITQLRVIQTAGDFLTITCDKRHGIPFVKQANGSVNLFRARLNFTRNNAAERIIHHGLSSSFRIKNQGIVIRTGWQKCQPSAGG

SEQ ID NO: 68724 - protein, 93 aa, Zea mays
  Coding DNA Sequence Number=SeqID_26945
MAEEAASLEAPPPLHNPSLRKSSLDDETRALVVPDAAALPASPPSAVEANFARYFVAAPAHVVFKEEGVISTVDFNVGKSDRSEMKVTGKRKR

SEQ ID NO: 68725 - protein, 134 aa, Zea mays
  Coding DNA Sequence Number=SeqID_26946
MAGECTDVGVSMAGDRGRRLGMTDRVFNSNSNQVSNSNQIKHVQQFKEYLGCYILLALMENDRKTKSKKRKEVICIVDPRCSAKALAMKTTKAKDSVDVAEAAKATSLGLMPIEAVMATGDLQGAVIGAHFSGG

SEQ ID NO: 68726 - protein, 123 aa, Zea mays
  Coding DNA Sequence Number=SeqID_26947
MLFGLSHRPPIVTRSVGTFHLKLRDMMRAMCDALNMNIERLKRVLGLVEQVETRRPQPTTSSASDSIRAFPSYDDTDAEIILEWETKIDVFLQNICVNRKRSKRETSVLTHYALSLWESFNSI

SEQ ID NO: 68727 - protein, 32 aa, Zea mays
  Coding DNA Sequence Number=SeqID_26948
MGSLNKSPRYEEAWKQYEGWSRAEAVCKGASA

SEQ ID NO: 68728 - protein, 293 aa, Zea mays
  Coding DNA Sequence Number=SeqID_26949
  Gene Ontology: Mol. function=DNA binding; Cellular component =mitochondrion; Biological process=DNA integration
  Homolog annotation: Hit_ID=UPI00004C1731; Match level="QueryCoverage =99%, HitCoverage=23%, E-value=1e-113, Identity=65%"; Hit description= UPI00004C1731 related cluster
  Pfam annotation: Domain name=rve; Domain location=41-216; Score=89.5; E_value=1e-23; Accession=PF00665.16; Description=Integrase core domain
MEAYCDEVWCLEDKFYGLELNHIARWYNETADELAKIASRRTTVPPDVFSRDIHQPSIKTDDTPEPEEASTQPEKAPGGFSHLLVAINKFSKWIEVRPLTSIRSEQAVAFFTNIIHRFGVPNSIITDNGTQFTRKKFLDFYEDHHIHVDWAAVAHPMTNGQVERANGMLLQGLKPRIYNDLNKFGKRWMKELPSVVWSLRTTPSRATGFSPFFLVYGVEAILPIDLEYGSPRTRAYDDQSNQTSREDSLDQLEEARDMALLRSARYQQSLRRYHARGVRPRDFQVGDLVLRLR

SEQ ID NO: 68729 - protein, 110 aa, Zea mays
  Coding DNA Sequence Number=SeqID_26950
  Subcellular localization annotation: CTP_CleavageSite=22; ConfidenceScore=5.26e-01
MGCSASSYSVISLRPAPRHATNSAMYSKMACGGSVAACGISIDGKLLRITSRRVADSRRRRYPGLDSGTAKYPEGTAVSVSCGNRPVKVLRSKLSGRFDPWARTLRVPRQ

SEQ ID NO: 68730 - protein, 238 aa, Zea mays
  Coding DNA Sequence Number=SeqID_26951
  Gene Ontology: Mol. function=sequence-specific DNA binding; Cellular component=nucleus; Biological process=regulation of transcription
  Homolog annotation: Hit_ID=Q20DP5; Match level="QueryCoverage=89%, HitCoverage=67%, E-value=3e-64, Identity=62%"; Hit description=WRKY transcription factor 76
  Pfam annotation: Domain name=FLYWCH; Domain location=67-136; Score =1.1; E_value=0.053; Accession=PF04500.7; Description=FLYWCH zinc finger domain
  Pfam annotation: Domain name=WRKY; Domain location=78-138; Score =126.6; E_value=6.8e-35; Accession=PF03106.6; Description=WRKY DNA -binding domain
  Pfam module annotation: Pfam domain module=FLYWCH::WRKY; Domain location=67-136::78-138
MLSVTGEDPGGQAHPAPRHHHHASGRKKSRDSLEAPSNSSDGGKTTDHADEATCRRVKVARARVCTRIDPSDATTLAVKDGYQWRKYGQKVTRDNPSPRAYFRCAYGPSCPVKKKVQRSAEDSSVLVATYEGEHNHPCPTRAGDLPSSATASGSVPRSISNSINSSGPAITLDLTMNGAGGVRVLEGAEAPDLRKLCQEIASPDFRTALVEQMARSLTKDCKFTDALAAAILQQLPGY

SEQ ID NO: 68731 - protein, 329 aa, Zea mays
  Coding DNA Sequence Number=SeqID_26952
  Gene Ontology: Mol. function=nucleic acid binding; Cellular component= intracellular; Biological process=DNA integration
  Homolog annotation: Hit_ID=Q8H6I0; Match level="QueryCoverage=99%, HitCoverage=19%, E-value=1e-103, Identity=60%"; Hit description =Putative gag-pol polyprotein
  Pfam annotation: Domain name=zf-CCHC; Domain location=26-43; Score =12.6; E_value=0.0081; Accession=PF00098.13; Description=Zinc knuckle
MTLIIKSFRQILKQRKGRDYKPRSKKVCYKCGNPGNFIAKCPLSSDSVRGDDKKGRRKEKNKYYKKKGGDAHVCREWDSDESSIDSSSDEDAANITVNKGLLFPNVGHKCLMAKDDKKKVKSRASTKYATSSDEDNSSDDEDNLLALFANLNMQQKEKLNELIGAIHEKDELLNSQEDFLIKENKKHVKVKNAYAQEVEKCEKLTSELSICHDTISNLRNENAKLIAKVEKLNVCDDSLVKLKNDNANLIAKIDKLNESIASLKIENDKLITKSKNLNVYNDIVSNLRNENVMLHAKIEELNVCKPSTSTIEHVTICTRCRDMMLSMIT

SEQ ID NO: 68732 - protein, 927 aa, Zea mays
  Coding DNA Sequence Number=SeqID_26953
  Gene Ontology: Mol. function=transferase activity, transferring phosphorus-containing groups; Cellular component=membrane; Biological process=two-component signal transduction system (phosphorelay)
  Homolog annotation: Hit_ID=Q76H00; Match level="QueryCoverage=99%, HitCoverage=98%, E-value=0.0, Identity=87%"; Hit description =Histidine kinase 2
  Pfam annotation: Domain name=CHASE; Domain location=110-334; Score =237.2; E_value=3.4e-68; Accession=PF03924.4; Description=CHASE domain
  Pfam annotation: Domain name=HATPase_c; Domain location=507-618; Score=100.2; E_value=6.2e-27; Accession=PF02518.16; Description =Histidine kinase-, DNA gyrase B-, and HSP90-like ATPase
  Pfam annotation: Domain name=HisKA; Domain location=395-460; Score =92.3; E_value=1.5e-24; Accession=PF00512.15; Description=His Kinase A (phosphoacceptor) domain
  Pfam annotation: Domain name=Response_reg; Domain location=783-917; Score=95.9; E_value=1.2e-25; Accession=PF00072.14; Description =Response regulator receiver domain
  Pfam module annotation: Pfam domain module=CHASE::HATPase _c::HisKA::Response_reg; Domain location=110-334::507-618::395 -460::783-917
MGEKGGAPGLGFLSLDRMRVLLPPLRLPEKLSARTLRTHLFTNYRMRKVRDSSSWLIPLWVSSWVLVASLIYLCMSYQAVGKRRETNLNVSMNHLQALAILVSTFHHSKTPSAIDQKTFARYAERTAFERPLTSGVAYGVRVTHAEREQFERQQGWSIKKMYSSKTKNQSQGPGNAEDAEVREPAEEYAPVIFAQDAYKHVISFDLLSGADDRDNVLRARESGKGVLTAPFKLLNNRLGVIFTYAVYKYELPANARPQERIQAAIGYLGGIFDIEALVDKLLHQLAGKQSIMVNVYDTTNERPISMYGSNDTGSGMCQVSTLNFGDPSRKHVMHCRFIQSPPWPWMAITTSIGTLVIALLIGYIVHATAKRIARVEDDFQEMSLLKKRAEDADIAKSQFLATVSHEIRTPMNGVLGMLQMLMDTDLDTTQQDYVRTAQASGKTLVSLINEVLDQAKIESGKLELEVVPFDLRTVCDDILSLFCGKAQEKGLELAVFVSDQVPQTLIGDPGRIRQIITNLVGNSIKGTELIRDAFCTHCIRLNKLMISVEDTGAGIPFDAQSRVFTPFMQVGPSIARIHGGTGIGLSISKCLVGLMKGEIGFSSKPQVGSTFTFTAVLTRVHSSRNENKSSEFKEINALVVDHRPVRAKVTKYHLQRLGVQTELTTDLDQYISKNNCGSQIAKLVLIDKETWLKESHSMPLLVTKLRNKDQPDSTKLFLLENPKSSVKSNSHIFREYNLNVIMKPLRASMLQVSLQRALGGIDKLHCRNGVVGNSTLGSLLHKKRIIVVDDNIVNLKVAAGALKKYGAEVTCADSGKEAITLLKPPHNFDACFMDIQMPEMDGFEATKRIRVMERDLNEQIERGEAPPECVGVRQWRTPILAMTADVIQATHEQCLKSEMDGYVSKPFEGEQLYREVARFFLNQDQVQ

SEQ ID NO: 68733 - protein, 89 aa, Zea mays
  Coding DNA Sequence Number=SeqID_26954
  Subcellular localization annotation: CTP_CleavageSite=52; ConfidenceScore=5.49e-01
MAHPLPSVHFTDTRQRSSLWAPLPGPSPSVLGDTRQRDRQRAPLSVPLSSVKATTLGKEALPVPSFYVSSDLKFKSELSKKNSIKQTKI

SEQ ID NO: 68734 - protein, 332 aa, Zea mays
  Coding DNA Sequence Number=SeqID_26955
  Gene Ontology: Mol. function=pyridoxal phosphate binding; Cellular component=vesicle membrane; Biological process=carboxylic acid metabolic process
  Homolog annotation: Hit_ID=Q6ESZ9; Match level="QueryCoverage=92%, HitCoverage=63%, E-value=1e-165, Identity=92%"; Hit description =Putative serine decarboxylase
  Pfam annotation: Domain name=Pyridoxal_deC; Domain location=5-261; Score=-25.1; E_value=1.2e-12; Accession=PF00282.9; Description =Pyridoxal-dependent decarboxylase cons
MPVCHMMCLLYNRTKTDSNIIKLAHKGNLHGILVGREVFPKGILYASRESHYSVFKAARMYRMDCVKVDTLMSGEIDCADFQRKLLQNRDKPAIINVNIGTTVKGAVDDLDLVIKTLEENGFKGRFYIHCDGALFGLMIPFVKKAPQVTFKKPIGSVSVSGHKFVGCPMPCGVQITRLEYINALSSNVEYLASRDATIMGSRNGHAPIFLWYTLNRKGYRGFQKEVQKCLRNAHYLKDRLKEAGIGAMLNELSSTVVFERPKDEVFVRRWQLACEGNICHVVVMPSVNIDKLDYFLNELVEKRATWYQDGISQPPCIARVVGFENCLCGRHK

SEQ ID NO: 68735 - protein, 163 aa, Zea mays
  Coding DNA Sequence Number=SeqID_26956
  Subcellular localization annotation: CTP_CleavageSite=48; ConfidenceScore=5.34e-01
MARKKPHLSHPTVRKITTLFFPKPTARARWRTSGTAERPPEHPQHTPRCSKTQSETRQRCKGNGEFNGRVLTKITPAETLRPRRSDDEEPQQEITGGTALLRSPRDPEQLHHASAMHHGPFTQPDWQGSKIFFPCGGADGLFSPFHSTTVVHELQVKCAKRLG

SEQ ID NO: 68736 - protein, 128 aa, Zea mays
  Coding DNA Sequence Number=SeqID_26957
  Gene Ontology: Mol. function=pyridoxal phosphate binding; Biological process=carboxylic acid metabolic process
  Homolog annotation: Hit_ID=Q6ESZ9; Match level="QueryCoverage=89%, HitCoverage=22%, E-value=2e-26, Identity=56%"; Hit description =Putative serine decarboxylase
MVGSVGNGLADLDAGAISMNGVGKALYPAKAAAAAAAETLPVELEPPEAVVAPTGEEAANGKREIVMGRNVHTSCFAVKEPDADDEETGEREATMASILALYRRSLVERTKHHLGTSLFCFIDGQILL

SEQ ID NO: 68737 - protein, 324 aa, Zea mays
  Coding DNA Sequence Number=SeqID_26958
  Homolog annotation: Hit_ID=Q1T0C4; Match level="QueryCoverage=25%, HitCoverage=17%, E-value=2e-13, Identity=39%"; Hit description =Polynucleotidyl transferase, Ribonuclease H fold
MKDSTAQSVHYQIDAPDLLSRNGTPRSNLHHREAMQRPTLPLQPPADHTHGTGHLRQRRSPAPADPHLNALLNESEELYLRPTEGETIREVITVLRDGEVAAHAPRQSTTKNERHRGITESLVALLPYRSHDFPHTPSRIALATNQRARHDDGTHSPTREVRLQEIWPGRPCASREVLGGGCNGPPEMESRERLTGGSHMAETRETSSAGREYDVWGPREQREGRTGREWEPLASLPTSYWVEALNTATYLLNRLPSKAVSHPTPFFTLFSTTPSFEHLRVFGYSSNHKGYRCLDLLTHNVIIFRHVVFDQDIFPLFSSSPTPS

SEQ ID NO: 68738 - protein, 78 aa, Zea mays
  Coding DNA Sequence Number=SeqID_26959
MASGWPSSRGPATITKAKFLDILRRVWTGRQLRQGAKAPTSASEDHTSVRYLPIRDDDFIGPPVSVGFVVLFYGIFIL

SEQ ID NO: 68739 - protein, 122 aa, Zea mays
  Coding DNA Sequence Number=SeqID_26960
MSAFQFEAFPRFAVEEREHNDRAFSFAVVASNCQDLVEESLASGHFAGFDRSILSPIFAIELGHQSRHTFVADWEAKELFGPVTEQEIEKAVEIRGDHVRVNHVFNQMGLAYEEHTTHPKRR

SEQ ID NO: 68740 - protein, 169 aa, Zea mays
  Coding DNA Sequence Number=SeqID_26961
  Subcellular localization annotation: CTP_CleavageSite=51; ConfidenceScore=5.13e-01
MWGWGERWIALLGAPTVGMATGRVRLTAAKSSLGRHRKLRLARPQGSAPVSASEDGLRLARPQGSDSTTTRKTTDSASPDPRARTQPRLRKTVSASPDPRARAQPRRWTTNSASPDPRARTQPRPQKTVSASPDPRLGLDLDLGGASASSDLGLGPTTSQGGHHYPTPS

SEQ ID NO: 68741 - protein, 236 aa, Zea mays
  Coding DNA Sequence Number=SeqID_26962
  Gene Ontology: Mol. function=nucleic acid binding; Cellular component= intracellular; Biological process=DNA integration
  Homolog annotation: Hit_ID=Q8H6I0; Match level="QueryCoverage=92%, HitCoverage=14%, E-value=9e-71, Identity=59%"; Hit description =Putative gag-pol polyprotein
MSGAHAKKEMVTGDKPAISHGKAPSGESGNKKREESPPRVKSHRSGDKKKKMKKVVYYEIDSSSPSTSDSDTPSTTSKRHERKKFSKILLRYPRISKHTPLLSVPLGKPPIFYGEDYCMWSDKMRHHLTSLHTSIWDIVEFGAQEPSVGDEGYDSDEVAQIRHFNSQASTILLASLSREDYNKVQGLKSAKEIWDVLKTAHEGDEVTRSPSGKRSRGSLVDLCSTKERSHKPCTTG

SEQ ID NO: 68742 - protein, 54 aa, Zea mays
  Coding DNA Sequence Number=SeqID_26963
MGKPVPSLLMLLLSRGRGRSGLEGRTVRTHLFESALTCFNGHYSRYGVRRTVRP

SEQ ID NO: 68743 - protein, 214 aa, Zea mays
  Coding DNA Sequence Number=SeqID_26964
  Gene Ontology: Mol. function=nutrient reservoir activity
  Homolog annotation: Hit_ID=Q2QR54; Match level="QueryCoverage=55%, HitCoverage=53%, E-value=5e-46, Identity=73%"; Hit description =Expressed protein
MRMRAPSSTGLKAIVASAWLAVLLGSASLAACDQDAGFSPPPTAVPAVPPRPALRAAAAAVPVPVPAPLPRKILRSPGVVAGGSGEGAAAAGPVRPSRMDEGCAGAEDIAIYQRHASSLPNGVPAYKVDVMNQCLGDPGGGDCAIAGIHVRCGWFSSVNLVDPLKFRRLRHDDCLLNDGRPLLGGDTISFEYANSFPYELSVRVATCVDPTTAP

SEQ ID NO: 68744 - protein, 100 aa, Zea mays
  Coding DNA Sequence Number=SeqID_26965
MAQWVRVLSRGELTGDDLTAVSSHGDATGVFGYVAQGHATAVLRRAYLLKPQSRGYGGNHQSVVQRTGGNDLFTPRRYPTIQAQIPTPGDTNRGRGSRRR

SEQ ID NO: 68745 - protein, 260 aa, Zea mays
  Coding DNA Sequence Number=SeqID_26966
MGPTTARLLPLLPFVAVFLLASPVDADSALDAATRCAATIVSISPCLPHVAAVAPPLASCPPAPTDACCVAFLRAVSPLAAGGGEEGCLCHLLRNPLLLGFPIDAARLAALLPACAAGNAFAAANVEAATLFADACRAAVPELMSKPKEAVPLPPAGSMVRSGTEKQVKDLLSLDEIEVETRRYIRSCGSGPRDRLVLDRGDIMRYSGQQMMNSTFMPSGALICIGSTPLVERHSAKELPLPSVGLTALGKESARGGPHV

SEQ ID NO: 68746 - protein, 122 aa, Zea mays
  Coding DNA Sequence Number=SeqID_26967
MGKSKKGGSSSHHSGDKRKREPTPPSEDFGDSEYSEEEFSSESEGSPVHASPPTSSDNSDDSQGIAAEDSSEEGGGDGDGDDDDRGDDDGDGDGGEGGGKDDSGDGKDGTKGSSKGSNKASG

SEQ ID NO: 68747 - protein, 72 aa, Zea mays
  Coding DNA Sequence Number=SeqID_26968
MSAHSSHWATRGLMVEWAERMQISGCGQGGSRPECRMKYIFKAYIVLGKKEMGVRKDSIQDCGSWTTFEDLA

SEQ ID NO: 68748 - protein, 105 aa, Zea mays
  Coding DNA Sequence Number=SeqID_26969
MISRERPVHAGTFTTDEITGRRRRTERIHTKPPSSRTKLLPPGPPESNPTRRRTSITADCNLADGEYVLVPEQGVAQKVAPDPAREPALEDLPAPTLEGKPRFYA

SEQ ID NO: 68749 - protein, 86 aa, Zea mays
  Coding DNA Sequence Number=SeqID_26970
MGQGASPEIKEDIFGKLHVPLAKLTEGQAQHGRGWSELARVAEARAVMVGGGKLAGAKDGCLASEGSANWIKRYGGVKLGLSHYRT

SEQ ID NO: 68750 - protein, 255 aa, Zea mays
  Coding DNA Sequence Number=SeqID_26971
  Homolog annotation: Hit_ID=Q6H878; Match level="QueryCoverage=48%, HitCoverage=57%, E-value=6e-28, Identity=56%"; Hit description=TCP family transcription factor-like
  Pfam annotation: Domain name=TCP; Domain location=37-214; Score =126.1; E_value=9.6e-35; Accession=PF03634.4; Description=TCP family transcription factor
  Subcellular localization annotation: CTP_CleavageSite=73; ConfidenceScore=5.28e-01
MATTREVSSSAAAMFHVYQTIPMPTPSTAAAGGGGAMVSVSAPAKPGKKEGGGKDRHSKVNGRGRRVRMPIVCAARVFQLTRELGLKSDGQTIEWLLRQAEPSIVAATGSGTTPAVFVSSSAPSTSSSSSHYHHQQQATVVLGKRPREEGDAAGSVFWAALPAAPRATEAWGFSPLEAQAAAAAAAAAYVPMAQAQAQHHHLNLLAALSGAARRAEEETRLLLTPPPAAAARESMASEKRSDVPCPSSVQAYSCR

SEQ ID NO: 68751 - protein, 133 aa, Zea mays
  Coding DNA Sequence Number=SeqID_26972
  Subcellular localization annotation: CTP_CleavageSite=33; ConfidenceScore=5.50e-01
MQAACNRAKWVHLSDFQRAQHGSPSPRVMQPVRRMLRVSNCTATRATATPPRLWNQYRGPEQRSRRQPSLRPIRGQRENPLSRRENDAPVFRSSNGSRTRNGCPANRMPRRINSAAGQAAPLAREASDASPSP

SEQ ID NO: 68752 - protein, 108 aa, Zea mays
  Coding DNA Sequence Number=SeqID_26973
  Subcellular localization annotation: CTP_CleavageSite=34; ConfidenceScore=5.73e-01
VNASAATSKAAKRPRSPGPRPSSKRTAYRAASRRAAEPPPNTGRRRAAEPPPSAESSLLLSTTSLFTFGAGLLTFGIHLSYVHIEPQRARTLARDQFVRDYLRKKHDK

SEQ ID NO: 68753 - protein, 591 aa, Zea mays
  Coding DNA Sequence Number=SeqID_26974
  Gene Ontology: Mol. function=ATP-dependent helicase activity; Cellular component=membrane; Biological process=regulation of transcription, DNA-dependent
  Homolog annotation: Hit_ID=Q10PV9; Match level="QueryCoverage=94%, HitCoverage=100%, E-value=0.0, Identity=81%"; Hit description =DEAD/DEAH box helicase family protein, putative, expressed
  Pfam annotation: Domain name=DEAD; Domain location=186-370; Score =140.2; E_value=5.7e-39; Accession=PF00270.19; Description=DEADDEAH box helicase
  Pfam annotation: Domain name=Helicase_C; Domain location=468-544; Score=95.6; E_value=1.5e-25; Accession=PF00271.21; Description =Helicase conserved C-terminal domain
  Pfam annotation: Domain name=MobB; Domain location=194-322; Score= -34.5; E_value=0.025; Accession=PF03205.4; Description=Molybdopterin guanine dinucleotide synthesis protein B
  Pfam annotation: Domain name=ResIII; Domain location=182-303; Score= -23.4; E_value=0.0043; Accession=PF04851.6; Description=Type III restriction enzyme, res subunit
  Pfam module annotation: Pfam domain module=DEAD::Helicase _C::MobB::ResIII; Domain location=186-370::468-544::194-322::182-303
TRAPCCELVTGLNFEGKDNFGAVIDFTVRSEMRLSIGQVHRNVLALASSRSCFVLGDRVSFRMLSQPRVAGFHQTAWRGSQILEDNRGGPLTLASLEVQSRVEYGKKGKMERTGGPKPSSRASSLYVKPKVSSNVKPAKSALMKPAGIKKTLKVDEALFSAKSFEELGLPPLLVDQLNKEGLTAPTEVQSAAIPIIAQKHDVVIQSYTGSGKTLAYLLPILSDIGPLKRTMEQDHSEKRSGIEAVIVAPSRELGMQIVREVEKILGPNDKRLVQQLVGGANRSRQEEALKKNKPIIVVGTPGRISEISAADEVDQLLSFNYREDMHRILEHVGRRPGGTSRDILGPLARRSERQTILVSATIPFSVIRAARSWGHDPVLIRAKSVVPLDSITVPRPALSQSDANPSSSSQSVNQAAVGSLPPSLEHYYCTAKAQHKVDTLRRCIHALEAQTVIAFMNNTKPLKDVVFKLEARGIKATELHGDLGKLARSTVLKKFKDGEFRVLVTNELSARGLDVPECDLVVNLDLPTDSTHYAHRAGRTGRLGRKGIVVTICEESEGFVVRKMRKQLDVAIKPCEFTEGELVVHKEEDVE

SEQ ID NO: 68754 - protein, 162 aa, Zea mays
  Coding DNA Sequence Number=SeqID_26975
MEPDKAGEAAKEPTETEAGDSVDPRELVSSDDEIDYSVEPDFYDPDLDDVDERWVSRQRKGRTSDAVLSCPACFTTLCLDCQSFRFLLWYITYGYSHQEPGTINSQIGVLNGCINKSSIHGTFSSLPCYGIIGLAHALICQDKNENPRNGKKASSVMVKAFE

SEQ ID NO: 68755 - protein, 234 aa, Zea mays
  Coding DNA Sequence Number=SeqID_26976
MGSQPLPPAHAPTRQNDNAVTEGGGEGSKIGRNAGPNSEMSSGVPAFTWDAGHDGSDTSEAWYEYGPAWALGAAKSTIDGEIGRSGRCNTRLTCQLPLPPTLFNDAVSVSLFGHYILAVDRRGATAAPGDSWIVSSRIPEQKKRRKKLARHESDSLHPSITVKSADRQILVQRVRQYSGREARVPAFPVLQGKGTRHASHDEWKYSQPVQAMLPLFHTGHSNQCSTSIRSSPAT

SEQ ID NO: 68756 - protein, 225 aa, Zea mays
  Coding DNA Sequence Number=SeqID_26977
MAEQSARDQPPPPNKARPQWGSSAFYKHCLKGKSEEEGRTLVVLDKNNNSNLQINSKVWSIPFPCAYVVCTKFYTLLMMRCWRRSPLGKPQRFHQCTVHEIPKRRVQVQNVHFCVLHGWAAVVPLPVVECGLPTASPSPPVLVVDAGSSASAPMKVDLAAPPPPPPTAGAVERRSPLPPASVLVGTIASRRGQPPRVVDAPRGRVIFTGHRPNGVALSSYPNGRA

SEQ ID NO: 68757 - protein, 132 aa, Zea mays
  Coding DNA Sequence Number=SeqID_26978
MVPTSTDAGGKGERRSTAPAVGGGGGGAAKSTFMGADADDPASTTSTGGDGDAVGRPHSTTGSGTTAAHPCSTQKCTFCTCTRRLGISCTVHWWKRCGLPSGERLQHRIINNCCYCSCQEQQVFFLLPLISL

SEQ ID NO: 68758 - protein, 134 aa, Zea mays
  Coding DNA Sequence Number=SeqID_26979
  Subcellular localization annotation: CTP_CleavageSite=65; ConfidenceScore=5.32e-01
MVSFALLSAARDTVRCALSFLAASDPRSPEQLLRSRSPATVDQRLHRTPAVLQTSRSSHSRDSCVAAEPFPLRSAFSGAPVPVLRHGRVRRVALNVSNPFPKPPEPRHGQPSRLRRTLAAGPSGATAPKPAPGR

SEQ ID NO: 68759 - protein, 92 aa, Zea mays
  Coding DNA Sequence Number=SeqID_26980
MAGEAKSSPSELMCNRNNATRYGEVGEDVEKVLNDEGAMVGSVHEKRRIYGRGIRPATNRRGSGLPAPIDPRPKPSPTPAHPPGSPTSQIVG

SEQ ID NO: 68760 - protein, 168 aa, Zea mays
  Coding DNA Sequence Number=SeqID_26981
  Homolog annotation: Hit_ID=O80401; Match level="QueryCoverage=35%, HitCoverage=12%, E-value=1e-09, Identity=78%"; Hit description=SAR DNA binding protein
  Subcellular localization annotation: CTP_CleavageSite=67; ConfidenceScore=5.20e-01
MVDDDDGSRLVRIVFASQVRAIPTRALALTPYATYSSPRASPLRHLAIRRASSPPSRLPLVATCRPRSSGGGDVGALLIPHEVCPIQGAPRGEARQGRGYMEGVYGVVQRERWLSLAFNKFENTSVTLSAGAVAGNGSVLDLYLFVADGSGVPPRTVPKTCKHVKDLV

SEQ ID NO: 68761 - protein, 658 aa, Zea mays
  Coding DNA Sequence Number=SeqID_26982
  Homolog annotation: Hit_ID=Q6JAD1; Match level="QueryCoverage=36%, HitCoverage=78%, E-value=1e-26, Identity=56%"; Hit description =Putative lateral organ boundaries (LOB) domain family
  Pfam annotation: Domain name=DUF260; Domain location=399-587; Score =130.9; E_value=3.5e-36; Accession=PF03195.5; Description=Protein of unknown function DUF260
MNLRSAADRRPEARVWSMYAAQRVQYREPTGRLWLALDLSASCGFQWAVNEEQQQRLRADRRTGRGERRRRNTNHRARSWQCHTWAPPWLSSAASNAGAVPESEKNGQAAAAAGQGTVHCTATMIHRVAMTAVALPHCCAPAVQTKRGGLGFLEKARRGQAQALPLERCGGCRCPVLSAPVHSPPDQPSKRCPGPRLRLRLLHFIIVHGERRAPEIHRSKGEDERDLISVCLPALQLLTALLLHTHTLAFSLSLFSGEADRRLNCLSVHPFHCSSISDQSLAVSPEQSRSSGELCFPSFYLCPAQRLPTASTRKGSQSQFQHSTCPVRHPCACLPQSTHPSRPTGLGSSHILHSTGRCARLRPLQFPTLALMRDAVVVMAVPGGGGGGGGSASSAAAAPCAACKLLRRRCAAGCVFAPYFPPGEPHKFANVHKVFGASNVSKLLQVYSSLHHRHQLTVVCFAAEVTRLQHVATLRTTALPAATNSEPSATAHALRLPHRSEERTRSPAAERGSSAQLTYAHTVTQTQRLSASQEIPAQHRGDAVSSLVYEANARVRDPVYGCVGAISSLQEQVEALQAQLALAQAEMVRLRMTNDYIVHRLKAASRAGGGGSSYAGSPSSMSSPKTAEPEAHCKATPELLDMVVDQPGMDDAHFWSSY

SEQ ID NO: 68762 - protein, 95 aa, Zea mays
  Coding DNA Sequence Number=SeqID_26983
  Homolog annotation: Hit_ID=Q850T7; Match level="QueryCoverage=65%, HitCoverage=9%, E-value=8e-13, Identity=60%"; Hit description =Putative DNA-binding protein
  Pfam annotation: Domain name=DWNN; Domain location=4-74; Score=35.3; E_value=2.1e-07; Accession=PF08783.1; Description=DWNN domain
MGVVYYQYKSEKEICSMPVPHAFISVSELKQLIMTSGRHGRGRTRGRATEDIVISNAQTGEVYDCVKFHRSCLYSAPQQISQPNKIENISGAVDL

SEQ ID NO: 68763 - protein, 324 aa, Zea mays
  Coding DNA Sequence Number=SeqID_26984
  Homolog annotation: Hit_ID=Q6QP51; Match level="QueryCoverage=60%, HitCoverage=90%, E-value=3e-23, Identity=41%"; Hit description =Putative growth-regulating factor 1
MTASKKVRHVIRFRILFHFLFLSLATGTGKGDTSKGILLREGSGPRAPLLIRGSKAGPSEGFNNRLRALGLRAHYWSEVRRPAPWKGSTTASGHSGSAPTTNQGIVGWPPKGSDSRLRARRARDDPGYVRYIAKARATLPSHFAAPLTDLTRRQRRLRRSDCCATRQSEADSSQDRPRGAIGSSALPDPRARAQPRLRKTTNSASPDPRARTQPRLRKTTNSTSPDPRARTQPRLRKTTNSASPDPRARTQPRLRKTTNSASPDPRVRTQPWPRTTVSASPDPGLGLDLDLGRQTRPRPRRSLRLARPRARTDHVTGGPSLPYP

SEQ ID NO: 68764 - protein, 104 aa, Zea mays
  Coding DNA Sequence Number=SeqID_26985
  Gene Ontology: Mol. function=transferase activity, transferring phosphorus-containing groups; Cellular component=chloroplast; Biological process=phosphorylation
  Homolog annotation: Hit_ID=Q93YW0; Match level="QueryCoverage=84%, HitCoverage=13%, E-value=7e-27, Identity=62%"; Hit description =EXECUTER1 protein, chloroplast precursor
MAWLTVGVPFCRNWSSSSEYQNNVEVFFEYVEAVKLTGDLSVPAGQITFRAKIGKGKRLEHRGVYPEEFGVIASYKCQGRIAQPGFKNPRWVDGELLVLNGKVD

SEQ ID NO: 68765 - protein, 187 aa, Zea mays
  Coding DNA Sequence Number=SeqID_26986
  Gene Ontology: Mol. function=nucleic acid binding; Cellular component= ubiquitin ligase complex; Biological process=protein ubiquitination
  Homolog annotation: Hit_ID=Q850T7; Match level="QueryCoverage=96%, HitCoverage=26%, E-value=6e-70, Identity=67%"; Hit description =Putative DNA-binding protein
  Pfam annotation: Domain name=zf-CCHC; Domain location=73-90; Score =10.5; E_value=0.018; Accession=PF00098.13; Description=Zinc knuckle
  Pfam annotation: Domain name=zf-CCHC; Domain location=99-116; Score =11.1; E_value=0.015; Accession=PF00098.13; Description=Zinc knuckle
  Pfam module annotation: Pfam domain module=zf-CCHC::zf-CCHC; Domain location=73-90::99-116
MQGREMRTKRTNIISKSCSSTVVQDEDAVIAAVIDAAELKWEQLPSKRGQDSGRFTSRRNYGPLEGETPPPGYVCRSCGVPGHFIQHCSQENKMPPPGYICYRCRIPGHFIHHCPSIGDPKFDNNKMSRSLVPVVTPVDGILDSLVPSAPAGAVDDLPAELHCRLCKKVMRDAVLTSKCCFDSFCDR

SEQ ID NO: 68766 - protein, 82 aa, Zea mays
  Coding DNA Sequence Number=SeqID_26987
MKLRRTLLLTLLLVLSTAVTPILSLPADNVVACDCDKPKAPKPSQPRPPKTKPSHPSPKPENPKPPKGPACWNSLALKHSRT

SEQ ID NO: 68767 - protein, 141 aa, Zea mays
  Coding DNA Sequence Number=SeqID_26988
  Gene Ontology: Mol. function=catalytic activity; Biological process =metabolic process
  Homolog annotation: Hit_ID=Q9LJQ4; Match level="QueryCoverage=59%, HitCoverage=20%, E-value=1e-15, Identity=54%"; Hit description =Muconate cycloisomerase-like protein
  Subcellular localization annotation: CTP_CleavageSite=77; ConfidenceScore=5.58e-01
MIRPCSAPSPPPSQPLATTPPPPFGGVAHEGTRPIHRQQPATATTRLCAVLPSPSSPSRVGSFGFDALKETFSVDVSATGARPLRVPLVAPFTIASSRLAALSNVVVRVDLRSGAVGWGEAPVLPSVTAGDQPTALGAAGR

SEQ ID NO: 68768 - protein, 57 aa, Zea mays
  Coding DNA Sequence Number=SeqID_26989
MSDEKTEAAKAKVHRLLEAKFIEPIAYPTWLANVVMLGFSRRAERPHVAAAHYGPNL

SEQ ID NO: 68769 - protein, 159 aa, Zea mays
  Coding DNA Sequence Number=SeqID_26990
  Homolog annotation: Hit_ID=Q6QP51; Match level="QueryCoverage=26%, HitCoverage=19%, E-value=5e-13, Identity=80%"; Hit description =Putative growth-regulating factor 1
  Subcellular localization annotation: CTP_CleavageSite=39; ConfidenceScore=5.22e-01
MAVAGRQKQRSRRQSSLRPIRGQRENPLSRREDNAPVFRSSNGSRTRNGCPANHSPRRINSAAGQAAPLGPGKGDTPERILPCEGTRLRASLLIRGSKAGPSEGFNSRLRARGLHTHYWSEVQRPAPRKGSTAASGYSGSAPTTDQGFEGWPPKGSQPP

SEQ ID NO: 68770 - protein, 231 aa, Zea mays
  Coding DNA Sequence Number=SeqID_26991
  Gene Ontology: Mol. function=oxidized purine base lesion DNA N -glycosylase activity; Biological process=base-excision repair
  Homolog annotation: Hit_ID=Q67WP0; Match level="QueryCoverage=73%, HitCoverage=45%, E-value=2e-58, Identity=67%"; Hit description =Putative formamidopyrimidine-DNA glycosylase 1
  Pfam annotation: Domain name=Fapy_DNA_glyco; Domain location=2-115; Score=92.3; E_value=1.5e-24; Accession=PF01149.14; Description =Formamidopyrimidine-DNA glycosylase
  Pfam annotation: Domain name=H2TH; Domain location=138-207; Score= -23.9; E_value=0.058; Accession=PF06831.4; Description=Formamidopyrimi dine-DNA glycosylase H2
  Pfam module annotation: Pfam domain module=Fapy_DNA_glyco::H2TH; Domain location=2-115::138-207
MPELPEVEAARRALQAHCVGRRIARCAVADDAKVVVAAAGRAAFERAMVGRTIVAARRRGKNLWLQLDAPPFPSFQFGMAGAIYIKGIPVTNYKRQLDDGLEFSFTDKRRFARVRLFEDIFSPKLYLQPETLPPISELGPDALFEPMSVDSFLDSLGRKKIGIKALLLDQSRDPSHYKLLSNLPREEFVKPLPPKYPKGGVLMGTPLCTGIYFSTRILDKHSQPSWNQEIF

SEQ ID NO: 68771 - protein, 94 aa, Zea mays
  Coding DNA Sequence Number=SeqID_26992
MAYLVLQMVDLVAVFSGTASPEDDGNGDAAKALELAQMVVGLAAGVHYYARSSTMPRQGLRPAPTGACTRPASQIFDYLIPPMGMDKCSANGQV

SEQ ID NO: 68772 - protein, 980 aa, Zea mays
  Coding DNA Sequence Number=SeqID_26993
  Gene Ontology: Mol. function=nucleoside-triphosphatase activity; Cellular component=integral to membrane; Biological process=transport
  Homolog annotation: Hit_ID=Q76CU2; Match level="QueryCoverage=98%, HitCoverage=87%, E-value=0.0, Identity=43%"; Hit description =Pleiotropic drug resistance protein 1
  Pfam annotation: Domain name=ABC2_membrane; Domain location=3-176; Score=105.6; E_value=1.4e-28; Accession=PF01061.14; Description=ABC -2 type transporter
  Pfam annotation: Domain name=ABC2_membrane; Domain location=721-907; Score=172.8; E_value=8.7e-49; Accession=PF01061.14; Description=ABC -2 type transporter
  Pfam annotation: Domain name=ABC_tran; Domain location=434-624; Score= 106.8; E_value=6.3e-29; Accession=PF00005.17; Description=ABC transporter
  Pfam annotation: Domain name=PDR_assoc; Domain location=181-246; Score=134.3; E_value=3.4e-37; Accession=PF08370.2; Description=Plant PDR ABC transporter associated
  Pfam module annotation: Pfam domain module=ABC2_membrane::ABC2 _membrane::ABC_tran::PDR_assoc; Domain location=3-176::721-907::434 -624::181-246
MTVFLRTNMHRDSISDGRIYMGALFFGVLMVMFNGLAEVGLTIAKLPVFFKQRDLLFYPAWTYSLPSWIIKTPLSLLNVTIWVFITYYVIGFDPNVERQFLLLLLMNEASSGLFRFIAGLARHQVVASTLGSFGILICMLLGGFLLARENVKKWWIWGYWISPLMYAQNAISVNEFLGSSWNKQVIPGSAEPLGKLVLESRGLFPEAKWYWIGVGALLGYVLLFNILYTICLTFLKPFDSNQPTISEEALKIKHANLTGEVLEASSRGRVASTTTTGTLDESNDEAASNHATVNSSPVNKGMVLPFVPLSITFDDIRYSVDMPEDANVRRGVAAAWVVLVSDEHAVDVGARLRQQAAGRHGTSISAEDLGYRCTPELGWGGRPAQRSEGPLLLLWSYAGEDEDQHRRPQAIRAQGVTETRLELLKGISGSFRPGVLTALMGVSGAGKTTLMDVLAGRKTSGYIVGNITISGYPKKQETFARVSGYCEQNDIHSPNVTVYESLAFSAWLRLPADVDSSTRKMFIDEVMELVELLPLKDALVGLPGVSGLSTEQRKRLTIAVELVANPSIIFMDEPTSGLDARAAAIVMRAIRNTVDTGRTVVCTIHQPSIDIFESFDELFLMKRGGEEIYVGPLGMHSCELVKYFEGIEGVNKIKDGYNPSTWMLEVTSTMQEQITGINFSEVYKNSELHRRNKTLIKELSTPPEGSSDLSFPTEYSQAFLTQCLACLWKQSMSYWRNPPYTGVKYFYTTVIALLFGTMFWGVGRKRDSQQDLFNAIGSMERAAHMYSPLPYALGQVVIELPYIFVQSLIYGVLVYAMIGFEWTADKFFWYLFFMYFTLAYYTFYGMMVVGLTPNYNVSSVASTAFYAIWNLFSGFLIPRTRIPVWWRWFYWICPIAWTLNGLVTSQFGDVTETFSDGGVRISDFVEDYFGYHHDLLWVVAVVVVAFPVLFALLFGLSLKIFNFQKSVFVDQSFSSSRQIV

SEQ ID NO: 68773 - protein, 44 aa, Zea mays
  Coding DNA Sequence Number=SeqID_26994
MALNEERSTELGRGTIMAVREAARWLQRKRYSADKPGPRDNELS

SEQ ID NO: 68774 - protein, 526 aa, Zea mays
  Coding DNA Sequence Number=SeqID_26995
  Gene Ontology: Mol. function=ubiquitin thiolesterase activity; Cellular component=nucleus; Biological process=ubiquitin-dependent protein catabolic process
  Homolog annotation: Hit_ID=Q9FPS6; Match level="QueryCoverage=61%, HitCoverage=44%, E-value=9e-59, Identity=41%"; Hit description =Ubiquitin-specific protease 21
  Pfam annotation: Domain name=UCH; Domain location=5-292; Score=151.2; E_value=2.7e-42; Accession=PF00443.19; Description=Ubiquitin carboxyl- terminal hydrolase
  Subcellular localization annotation: CTP_CleavageSite=50; ConfidenceScore=5.34e-01
MVSGNATLQCITHTVPLFLKLCSNDHFTPCSFCMIRTTVNLQIMRMGSVLSVPLKNMLTNQFEELSLDFTPGQQEDAHEFLRCLLDNLHECTLDPKSKSKGSSFEEESIVKEIFGGQLKSHLSCCECGHSSETFEPFLDLSLEIDQVDHLVDALQSFTKVEQVGDSENKLTCESCNARVCKNKQLTLYRAPDVIAFHLKRFTTLDNSVKKIDKYVAYPLEVDLKPFHSNPETVGELKYDLYGVVEHSGLPNYGHYVCTIRSSPSTWYLMNDSNVDSITDSSALNQEAYILFYVRQGKFPWFSSLLEGKVVLQAENTCGTSPVSVLENIDVNCSTSSGGGSSSSSGDKLEKNEASQLEETKKDETSQYKTSFLPDEPSKSSFGASNSNNAMDEDNPPRVSFQNSVASCSRSVETTNLEKPSTPRCSQRLASHDEFSVFEFEDFDEEKETLLPKLKFPSKVKKANSASRAMKGRCIDQNAVRLMRSMTSTRRKGLIDCIAQQTAKHESNRCPASDPLDKKKRKLVLQY

SEQ ID NO: 68775 - protein, 302 aa, Zea mays
  Coding DNA Sequence Number=SeqID_26996
  Gene Ontology: Mol. function=hydrolase activity; Cellular component =integral to membrane
  Homolog annotation: Hit_ID=Q65A68; Match level="QueryCoverage=56%, HitCoverage=73%, E-value=6e-61, Identity=67%"; Hit description=Gtk16 protein
  Pfam annotation: Domain name=SNARE_assoc; Domain location=84-205; Score=91.7; E_value=2.2e-24; Accession=PF09335.1; Description=SNARE associated Golgi protein
MARDDGFPVWEAALLAGVAAVFAAGLAGVYISMPRSDYSFLKLPRNLQELQVLTVHLEGYSSDYTIQVLVGYCAVYIFMQTFMIPGTIFMSLLAGALFGQLGGLALVIFAATAGASSCYFLSKLVGKPLVFSLWPDKLTFFQKQVAKRREKLLNYMLFLRVTPTLPNTFINFSSPIVGVPYHTFFFATAIGLVPAAYVTVRVFQLLMYPFHQFSASGALRVVCGDFAFVRTRPEPRAGPRRLDAGCMCIVVLEGIEGHLISSVKLKPGVILNTSIRVKLRNESMKTQEINRHHCVLTGTNSS

SEQ ID NO: 68776 - protein, 57 aa, Zea mays
  Coding DNA Sequence Number=SeqID_26997
VLSIVKASHVPRKIIMVLNDNAGFREDAGCQVLEQRGPLQSEMDQMSGIKHPLGNTK

SEQ ID NO: 68777 - protein, 233 aa, Zea mays
  Coding DNA Sequence Number=SeqID_26998
MSFSARVPRSRSVEIFSMVREGQVGGLAPHGGMDVEPVLEECLHPGLSHTGLPIWYIKIGSLVNPGSATVDKDNDDEERGRHTSKMTKEEEDEEYLEEEEDALAGAGGNTFSFTTFMLLTPLILVRGRLDSDGEVTSEVDQVRALQEEVVIQVQLHQGQEFIDKNAVTISSVSNKGETAARKEPTFSESSPVISELVLVSAHNNEIMREVAKGENSSVQEVLVTDVSQDLEKQ

SEQ ID NO: 68778 - protein, 101 aa, Zea mays
  Coding DNA Sequence Number=SeqID_26999
  Gene Ontology: Mol. function=hydrolase activity; Cellular component =chloroplast; Biological process=isoprenoid biosynthetic process
  Homolog annotation: Hit_ID=P0C026; Match level="QueryCoverage=65%, HitCoverage=18%, E-value=3e-23, Identity=71%"; Hit description=Nudix hydrolase 24, chloroplast precursor
MLVWDIRLQHQSIDQIPDKQIFCNDRYRFRYKRDVLFCYDLQLPADFVPNNEDGEVDSFRLVPVIHAANIIRRTDFFKPNCNLVIIDFLFRHGYYMHIALR

SEQ ID NO: 68779 - protein, 41 aa, Zea mays
  Coding DNA Sequence Number=SeqID_27000
MVSHSGYGGYKCGHCTTAVGVSEALYAKAIMSLLDPLYCIE

SEQ ID NO: 68780 - protein, 569 aa, Zea mays
  Coding DNA Sequence Number=SeqID_27001
  Gene Ontology: Mol. function=protein serine/threonine kinase activity; Biological process=protein amino acid phosphorylation
  Homolog annotation: Hit_ID=Q10GB1; Match level="QueryCoverage=99%, HitCoverage=100%, E-value=0.0, Identity=59%"; Hit description=LSTK-1- like kinase, putative, expressed
  Pfam annotation: Domain name=Pkinase; Domain location=4-247; Score =174.4; E_value=2.9e-49; Accession=PF00069.15; Description=Protein kinase domain
  Pfam annotation: Domain name=Pkinase_Tyr; Domain location=4-225; Score=-5.7; E_value=4e-12; Accession=PF07714.7; Description=Protein tyrosine kinase
  Pfam module annotation: Pfam domain module=Pkinase::Pkinase_Tyr; Domain location=4-247::4-225
MDQYEVLEQIGKGAFGSALLVRHKLERKKYVLKKIRLARQTDRTRRSAHQEMQLIANVRNPFIVEHKDSWVDKGCYVCIVIGYCEGGDMAEAIKRANDTHFSEEKLCQWLVQLLMALDYLHAHHILHRDVKCSNIFLTRDQNIRLGDFGLAKILTADDLAFSIVGTPSYMCPELLADIPYGTKSDIWSLGCCMYEMAALKPAFRAFVSSENAFIDCLSAVCARYLIKWLSTKVTSRYAKPYQQDYQVDSITFANKIFWCIPYVLQLHLKSHLSRSIVPVHQSPSEKRMTFAAEPVCRSKGRRNSLGSERMIAAFSKPSPDRSSVSSIRSVKDDYTATQSVRELSVDESMVEVASKPVASRTSDVMRTPKATPWKMMTTLRNRLEAPQASYDRTSHTEFSRTPVDKRNSRVARRASLPLPVFETPKQRSSMSVLERLESPDVSVNSPRIDRIAEFPLASCEDPLFSTVKPPTPASASASATPPFRGPVHHQGQVHGPDAPPKGRFDTTSYQQRAEALEGLLEFSAQLLQQERYEELGVLLRPFGPDEMVSPRETAIWLTKSFKEAMATGL

SEQ ID NO: 68781 - protein, 87 aa, Zea mays
  Coding DNA Sequence Number=SeqID_27002
MAESRREEHDGLPSSRCGWESGLAANPLNRSVDIHLVKMLQTLILTDLEELEVTKWTGARRKNSEKRETALRPSKGKGNNKTYRIGA

SEQ ID NO: 68782 - protein, 91 aa, Zea mays
  Coding DNA Sequence Number=SeqID_27003
MARRRVIPCAPSRLGLGDSKAPLVGGSERNPPPWNRGEGSIGCRCWATLLRSRSEPWGCAMERELAGIVGRTEPLVGGHRSRRVATAALSR

SEQ ID NO: 68783 - protein, 115 aa, Zea mays
  Coding DNA Sequence Number=SeqID_27004
MEARRASRYQVHRRRSKRLRNPKPRVKKKTCKVKDLSKRWKELKQTPSPGHFETGSSIPLQPTRRVFTPLRSSLRVECLIFLDTGDPKNDSYPYGYGYEVKSIWVTYGVIFLKGN

SEQ ID NO: 68784 - protein, 98 aa, Zea mays
  Coding DNA Sequence Number=SeqID_27005
MAMEKMELLCHAMDMDLAEVDPRSSCAQGRNAPCRSRSLGGGAGGRGAPAAARWGRGRKKGSRLEQACGREKEERHHGRKVGSSLHVAMWEEECALLL

SEQ ID NO: 68785 - protein, 76 aa, Zea mays
  Coding DNA Sequence Number=SeqID_27006
MAQDAKVTIINVEDLVVDLSTELVEKYLQTEQMGTLIHELEEQVDEWSHTIEVLENQLQNTQQHLEEANEHLFMHH

SEQ ID NO: 68786 - protein, 59 aa, Zea mays
  Coding DNA Sequence Number=SeqID_27007
MERATSVTKLRNSIHPIATVHPRSNDNEQPVVPECIDKDLQEQQPGEGKCPLTYYVLLT

SEQ ID NO: 68787 - protein, 141 aa, Zea mays
  Coding DNA Sequence Number=SeqID_27008
  Subcellular localization annotation: CTP_CleavageSite=83; ConfidenceScore=5.21e-01
MGVPRACSHRTVGPTCQPYDLLVSVFSARTDRGRTARDSRTPSAMRQDLPGVYGFGRDRTSRRCGRDSCAGNPDHDRRHGPPSCTPLVATWERSSRGCSAPGRGCCVIRGSGQGRVGRHGALNWEEQRHTIDPSCLRYLGW

SEQ ID NO: 68788 - protein, 231 aa, Zea mays
  Coding DNA Sequence Number=SeqID_27009
MEVKFTGNNGLVKAVHGARRDRGVIGFRRGILLVPGSNSHRGGDDFTPGNTSKVSGLASRFNLLHRRRADVATLLLSLRSAGTVVWIGAVKGVQPYCNPLNLGRARVPPLHDRWVPPVSVNRVRALSLCPPCPHSLSLPSLISPTLALSRALSPMPKPAGDLRPSCQSSKPLGAIPASVFAESSSPVLANPGNPRPPEAALASPDPAVRISGYHFRHAPCPWAPPVSCLRP

SEQ ID NO: 68789 - protein, 62 aa, Zea mays
  Coding DNA Sequence Number=SeqID_27010
MPTGQGYHDLNKQGKVKKQAGLPEYEYGFVGSFYSMSIGSCISDSGSPVPSPFKVRKLEISN

SEQ ID NO: 68790 - protein, 110 aa, Zea mays
  Coding DNA Sequence Number=SeqID_27011
MGKSKKGGSSSHHSGDNGNGLAAEVWTYIRAVEHARLEGSDESEYSSNEEGGGDGDGEDDDGGDGDGGGDGGEGDGKGGDGGGKGGSGDGGDGSKGSSKGGSKGRNKASG

SEQ ID NO: 68791 - protein, 131 aa, Zea mays
  Coding DNA Sequence Number=SeqID_27012
MARDGAGENSLPVFGDPPLTLCTVARNFGAIHAGAYHHWIGDWSTRASWLDDAAMGWVTLLVGKMVPLPSIWGWTSGIKCRLFLRLSAERPSDAERTGEIRGVFATLLSYTCGGRFGRHICGLKVWRDVVV

SEQ ID NO: 68792 - protein, 59 aa, Zea mays
  Coding DNA Sequence Number=SeqID_27013
MARPLCLARSCRWEEDLTSSTPVSVKVNDEAGPRDSDTSKTVWKRMTGCVVEFQDGPIW

SEQ ID NO: 68793 - protein, 498 aa, Zea mays
  Coding DNA Sequence Number=SeqID_27014
  Gene Ontology: Mol. function=inositol or phosphatidylinositol phosphatase activity; Biological process=abscisic acid mediated signaling
  Homolog annotation: Hit_ID=Q65XB7; Match level="QueryCoverage=92%, HitCoverage=91%, E-value=1e-105, Identity=45%"; Hit description ='putative inositol-1,4,5-trisphosphate 5-phosphatase'
  Pfam annotation: Domain name=Exo_endo_phos; Domain location=65-457; Score=137.5; E_value=3.7e-38; Accession=PF03372.13; Description =EndonucleaseExonucleasephosphatase family
MHGRQSSWPKAKTAVKRWLNLKSHSDCIDRSFGLGLVESSADGYGGSPSPPGPTSSRRHPKELSIFVGTWNVGGRAAHGGLDLSDWLADDGLGGGSSSPHIYVLGFQEIVPLNAGNVLGAEDKGPARKWLDLIRRALNHHPAASPSSSSSRWRRSPSRDMHLLRKGGRVSFSDLLAAEEDGSRRPSTASSEPDDGSEASSPSSSSEEEPACAPAPAPLPRGGRHRHHDRYRLAASKQMVGILLCVWVRADLLPRVARVRASCVGRGVMGYMGNKGSVSVSLTLRPGVGGGRGASLCFVCTHLASGDRDSDGARRNGDVAEILRRTSNVIWLGDLNYRLVAPAGGGRGGTRTQELVERHDWAALLERDQLRAEQKAGRVFAGWEEGRIGFPPTYKFVAGSDAYAMTSLVDDGSLSRERKKRTPAWCDRILWRGEGVEQRWYARGESCFSDHRPVAAFFFARLGGGDYDGAERAVGAGRRDDDDYDILLGNSDPTRKLSF

SEQ ID NO: 68794 - protein, 139 aa, Zea mays
  Coding DNA Sequence Number=SeqID_27015
MSGGAPDTVRWYTGQSAQEAADVEAKLLRLQLAEAEGRVAALEVELKMMLHRSGQLLDYIGAHGASLIKCLDNASCHVRDIADFDTHRAHGRGLLGLQPSGSRWSLLDEGLEDLLHGYNDVASRVILRVSTQDVVRVAH

SEQ ID NO: 68795 - protein, 161 aa, Zea mays
  Coding DNA Sequence Number=SeqID_27016
  Homolog annotation: Hit_ID=Q6QP51; Match level="QueryCoverage=91%, HitCoverage=58%, E-value=2e-14, Identity=50%"; Hit description =Putative growth-regulating factor 1
  Subcellular localization annotation: CTP_CleavageSite=65; ConfidenceScore=5.63e-01
MAPPVTRSVRALGRARRRLLRGRGRVCLSRSRSSPSPGSGKVETVFRGRGRVRALGRARQRPSSEAEAVSEPWGRARRSPLSSVEVESEPWGRARRSFLWRPRLDLAAVSLTLSSGTAVGAMQATLFSCQVGQWSGKVTAVTLALSTEERVSGQGVRRSLH

SEQ ID NO: 68796 - protein, 78 aa, Zea mays
  Coding DNA Sequence Number=SeqID_27017
MGKVCNLCRVLETSISAELTVNSGLGSSLIKRTLVTFIMMVNNDGYNFDHWYFLLEECLGGDTGNMEDFEEFEDYDEF

SEQ ID NO: 68797 - protein, 55 aa, Zea mays
  Coding DNA Sequence Number=SeqID_27018
WMLGQEGEVPGCSDNDTDFLPTGCSDGTTAATAEKTVSGIAGAGSGEDAGAGDLV

SEQ ID NO: 68798 - protein, 53 aa, Zea mays
  Coding DNA Sequence Number=SeqID_27019
MGARWMRLALPRVDCPLGRSMVMTRMMVFDYDYGNGFWYSFRLEEYFWVNNLG

SEQ ID NO: 68799 - protein, 54 aa, Zea mays
  Coding DNA Sequence Number=SeqID_27020
MALLKVCVNLLYSILGEMVEFGKVEQLQSLPTGYWRDLSVAEKQIEASRSLYIE

SEQ ID NO: 68800 - protein, 319 aa, Zea mays
  Coding DNA Sequence Number=SeqID_27021
  Gene Ontology: Mol. function=sequence-specific DNA binding; Cellular component=nucleus; Biological process=regulation of transcription
  Homolog annotation: Hit_ID=Q2QMN5; Match level="QueryCoverage=93%, HitCoverage=82%, E-value=3e-67, Identity=51%"; Hit description=WRKY DNA binding domain containing protein, expressed
  Pfam annotation: Domain name=WRKY; Domain location=290-319; Score= -4.1; E_value=0.0023; Accession=PF03106.6; Description=WRKY DNA -binding domain
MEEVEEANREAVESCRRVLALLSHPHDPAQVRSIALGTDEACTKFRKVVSLLSNGEVGTGEAGPSGTSASASHPRAKLVSRRQNPGFLTQKGFLDSNTPVVVLNSAAHPSPTSAQVHPRAGALDTEGVHPLGVGGPPKLVQPLSAHFQFGNVSSRYQQLPSHHHRHQQQEKLQAAEMFKRSNSGINLKFESASGTGTMSSARSFLSSLSMDGSVVASLDGKLPSSSSSFRLIGAPAMSDPANAAQQAPRRRCTGRGKDGTGKCALAGSKKLRVKRSIKVPAVSNKIADIPPDEYSWRKYGQKPIKGSPHPRYGLNTEVV

SEQ ID NO: 68801 - protein, 268 aa, Zea mays
  Coding DNA Sequence Number=SeqID_27022
  Homolog annotation: Hit_ID=Q75GL2; Match level="QueryCoverage=93%, HitCoverage=48%, E-value=3e-73, Identity=61%"; Hit description =Expressed protein
  Pfam annotation: Domain name=DUF828; Domain location=1-82; Score= -109.4; E_value=0.033; Accession=PF05703.2; Description=Plant protein of unknown function (DUF828)
  Pfam annotation: Domain name=K_channel_TID; Domain location=28-107; Score=8.1; E_value=0.056; Accession=PF07941.2; Description=Potassium channel Kv1.4 tandem inacti
  Pfam annotation: Domain name=PH; Domain location=138-259; Score=16.0; E_value=0.069; Accession=PF00169.19; Description=PH domain
  Pfam annotation: Domain name=PH_2; Domain location=142-265; Score =205.7; E_value=1.1e-58; Accession=PF08458.1; Description=Plant pleckstrin homology-like region
  Pfam module annotation: Pfam domain module=DUF828::K_channel _TID::PH::PH_2; Domain location=1-82::28-107::138-259::142-265
MAVASAATLVAAQCVEAAEAMGAEREHLEAAVGSAVSVRTPGDIVTVTAAAATALRGAATLKARALKEVWNIAAVIPVEKGPGPVGGGGGGHHHQHHQKHGAPKQQLHRKMDSDGSSVSDLSLEEENSFLGICSQELLARGTELLKRTRKGALHWKVVSVYINRMGLVMLKTKSRHVAGTITKKKKTDERVRHCRCCRAGVVVEVCRDVPAWPGRHLLEDGGHRRYFGLRTAERRVVEFECRSQREYEMWTKGVARLLSVAAERKRLA

SEQ ID NO: 68802 - protein, 93 aa, Zea mays
  Coding DNA Sequence Number=SeqID_27023
MATNPSNGAGADVPAAPAAAKFSVEVPTSIIHECYQSTLQEYDKRVKVSLSAQTGCKHVDEHTHMKFRNALLVPLYDSEVGYVGNNSWHSNAF

SEQ ID NO: 68803 - protein, 40 aa, Zea mays
  Coding DNA Sequence Number=SeqID_27024
MGQPAIAGAHALSLLIDGRWKKHEGASRLRSSRYLKSQVQ

SEQ ID NO: 68804 - protein, 61 aa, Zea mays
  Coding DNA Sequence Number=SeqID_27025
MEKQAAAEASRGRGATLECSTDCPVSVVHVVNDGGPVISPNAHGVQAAEGLDVMSTLLHCY

SEQ ID NO: 68805 - protein, 68 aa, Zea mays
  Coding DNA Sequence Number=SeqID_27026
MAPSSHVLHLIVLSVDLTQWRQPDLRKLSLIVETQVRATNDLCSLGAPSSNHAPFRRRASRFARSTKC

SEQ ID NO: 68806 - protein, 73 aa, Zea mays
  Coding DNA Sequence Number=SeqID_27027
MDEANQAPAVESFYCAENRQLPAVSATMGQPATAGAHALSLLIDGRWKKVSLAVGSAAMVHIRGGMPVWVDGA

SEQ ID NO: 68807 - protein, 116 aa, Zea mays
  Coding DNA Sequence Number=SeqID_27028
MAWGQGDSPCSSGLGRDLVSGGDRSVLAESLIGAWSPSCARLSPWTGICIVLLPPRRLGGDSVELFKKYYEEVVEEIVRVGILDLTPSDIARKRVESKACLEWRTGPASATYGGAV

SEQ ID NO: 68808 - protein, 64 aa, Zea mays
  Coding DNA Sequence Number=SeqID_27029
MVTVACPPVTVDMDLHCLSSELERLGRGAMLASVAWPSAVARHRAMIVGVVRRGDDQGPFDLDQ

SEQ ID NO: 68809 - protein, 321 aa, Zea mays
  Coding DNA Sequence Number=SeqID_27030
  Gene Ontology: Mol. function=oxidoreductase activity; Cellular component=vacuole; Biological process=response to oxidative stress
  Homolog annotation: Hit_ID=Q5U1M3; Match level="QueryCoverage=89%, HitCoverage=92%, E-value=1e-112, Identity=75%"; Hit description =Class III peroxidase 70 precursor
  Pfam annotation: Domain name=peroxidase; Domain location=51-282; Score=268.3; E_value=1.6e-77; Accession=PF00141.13; Description =Peroxidase
MGSAAWLATTVVLAALAAAASSVAVAHAWPPPAELEVGFYKHSCPQAEEIVRNAVQRGLARDSGVGAGLVRMHFHDCFVRGCDGSILLDSMPGNVAEKDSVANNPSMRGFDVVDDAKAVLEAHCPRTVSCADVVAFAAHDGAHLAGGIDYAVPSGRRDGRVSRADEVLVDNVPAPTDDVAELVESFRRKGLSADDMVTLSGAHTIGRSQLLLLHVAPLQLQRPAGGGPTRPSTRPTPSTLGTAARGRPATARWTPPWVLFVSDSTLLHNPWTAGIVHFNAAVDKAWQVKFAQAMVKMGKVQVLTGDEGEIREKCFVVNPHY

SEQ ID NO: 68810 - protein, 142 aa, Zea mays
  Coding DNA Sequence Number=SeqID_27031
  Subcellular localization annotation: CTP_CleavageSite=78; ConfidenceScore=5.32e-01
MTAAQKSPLACTSRPGDDGGFELSTQPDMGSRISATASFSPSLRAANLPSRRLLPGAGHPAPMAHLPHTGANAATSPGASAATALPADAASLPATPFLATAHVVIPLSAAPSMPASLGAADPLAAVQTAGLTTVMAALGATL

SEQ ID NO: 68811 - protein, 76 aa, Zea mays
  Coding DNA Sequence Number=SeqID_27032
MANARDEILLTASSQRTRSTMVCGSAAAHQPRQAIPAVRITASHEKATVELRAVWRSSLAQIQGPNGYPGELPRRR

SEQ ID NO: 68812 - protein, 132 aa, Zea mays
  Coding DNA Sequence Number=SeqID_27033
  Homolog annotation: Hit_ID=Q5GAV3; Match level="QueryCoverage=93%, HitCoverage=9%, E-value=6e-24, Identity=46%"; Hit description =Putative integral membrane protein
MALPSTSDFALTLALENQTCSLLAELDKRIQSMDSKWELQVSVLENTVTNAARSVTKFSTTLRVDVEAHLIASDAAIEGRLHHFEAETGNRIVALESAMQMFDFWRPRVDSSIDSLQSNMDWMRAKIAKMDA

SEQ ID NO: 68813 - protein, 122 aa, Zea mays
  Coding DNA Sequence Number=SeqID_27034
  Subcellular localization annotation: CTP_CleavageSite=41; ConfidenceScore=5.71e-01
MARSLWPSCAVCVSAARSAPCAVGPRRGAAPRNLLGPARPRRGMVSPWRRPAACARRARHGLPTAWCPCARRDLSPARGTQRGGGEDDVYDYGNGCPHCNHYSGEDEAVEGDFQEFQDYDEF

SEQ ID NO: 68814 - protein, 71 aa, Zea mays
  Coding DNA Sequence Number=SeqID_27035
MAEQRNSGRASGRENARSTRGKVGSEQGASESSARGREEGGAGSLGAPAEVRTRCSRRWGVQRDGRKSEMA

SEQ ID NO: 68815 - protein, 51 aa, Zea mays
  Coding DNA Sequence Number=SeqID_27036
MQIIERKCEAQKGAGTREILCGRLGSWLLDFLLDRSFLGNEHVLSVSEVAI

SEQ ID NO: 68816 - protein, 202 aa, Zea mays
  Coding DNA Sequence Number=SeqID_27037
  Gene Ontology: Mol. function=metal ion binding; Cellular component =integral to membrane
  Homolog annotation: Hit_ID=Q941Y7; Match level="QueryCoverage=79%, HitCoverage=54%, E-value=1e-27, Identity=44%"; Hit description=RING finger-like protein
MVGGWLKIFSLHDYLFEESVCLLLRAAWFEPLIVEAHEEALEEEEFLHQQYQYDDDEDDLDEESYYMNRSPSIRIGNRRWGDNGYIRGGRKEARPVNTDVAAGPSRTPKKKEKAASSSASVSVSGSGSGSGSVSKDVAGRRAKRAQKREAADKAAAEKHLKHLQRLGLRKSPEPVVPEEVGPQLLLITGDAIGICVDYYGDK

SEQ ID NO: 68817 - protein, 74 aa, Zea mays
  Coding DNA Sequence Number=SeqID_27038
  Subcellular localization annotation: CTP_CleavageSite=25; ConfidenceScore=5.03e-01
MAAAAAAASSSSSSEVPIAARTCVSVGEVAVGAVATGSGDRVAADCGVCAICLDRKALQETALVKGCDPATMVR

SEQ ID NO: 68818 - protein, 191 aa, Zea mays
  Coding DNA Sequence Number=SeqID_27039
  Subcellular localization annotation: CTP_CleavageSite=81; ConfidenceScore=5.19e-01
GALGFGVEIAGIWIHGGEFSPSPSLSLSLLSLPFFSPARPPCPRSAPPSAPHPRSPLAPRPAPPPRPPHALAPPASPPRPCAAFGEPLPWRLPSPAAPLLGREPLGPMPWPCAPRRALGRARAPATRVPRAYTPSCRQWGSAYAARSAKVDLSLGEECGGNENGGFGIDYGNGEDEAVEGDFQEFQDYDKF

SEQ ID NO: 68819 - protein, 89 aa, Zea mays
  Coding DNA Sequence Number=SeqID_27040
MVYGSRIHTREIKPNPYPCPSGGDNKAMVVSVYDRWGTLCNIEDGRVVQRDSEGWGHNNEGWARCSMEDGGTGHNMEDGDTWWKMGAIA

SEQ ID NO: 68820 - protein, 68 aa, Zea mays
  Coding DNA Sequence Number=SeqID_27041
MGSRNSGECDELGQGHSTGTKALEGGGSQRGGSAVAQHYSGEQSFKTEGKQGKNRGCYNPSSELYHRR

SEQ ID NO: 68821 - protein, 121 aa, Zea mays
  Coding DNA Sequence Number=SeqID_27042
MTSDPPPANAIPHHSHIEPKDHSSLTYTTDAGLEGGGTSATRTLGAAACHQLAHQLEDTHGEIRVVAKVLGSHSEGEGTGAECSCRFGGYVQAAASDMEQESAPKNERVGQVRRVAFTGGG

SEQ ID NO: 68822 - protein, 272 aa, Zea mays
  Coding DNA Sequence Number=SeqID_27043
MDIFLQAYLIHWIFLGVVLIRSHRAGSGPDYSLFASHARLQATQAHSLLHSVTASCCHGGRLPSPDLPRKLRSLQLAHGCALHLPQPRVPLPAELHLWRARPAPVRRFSPFFNLQPWSFPAESMVLLGFRLGPRLPACAMSLSVGGAQTLSPPCFPARQIVPLLDAGDGRRGAPLRAPCALVLFPACAGSSSVAPTALCVHAHLLSPCSDFTWPLRSSFCHGRLLLPALDLLPCASLISGAQPACSMVFTVNVLESAVMPYRRSVCSGKALR

SEQ ID NO: 68823 - protein, 189 aa, Zea mays
  Coding DNA Sequence Number=SeqID_27044
MLGDVELHLCQVVARGYKLEAIATLPLGHLTAAYVGVRASHLSGRISREGEEVAATAGSCHHCRLCRVVWHGAAWIFWNGACGRVWVNEWWMTLELHTRAISSPRSYQPPWAGRDAMQSAMCPPSIRLLRYQYCEELHVCMIGLPGIRARIAGNGATVGACIAATIWVRWWARDLEEGCRPSDLIGWLG

SEQ ID NO: 68824 - protein, 70 aa, Zea mays
  Coding DNA Sequence Number=SeqID_27045
MAPPWGGGVAVHDSNRTKWLAPLDQVRTSFIKSGPYIRDPMVSDEQATVDSEVQQVEVAEQELIEGKLCP

SEQ ID NO: 68825 - protein, 683 aa, Zea mays
  Coding DNA Sequence Number=SeqID_27046
  Gene Ontology: Mol. function=protein serine/threonine kinase activity; Cellular component=cell surface; Biological process =protein amino acid phosphorylation
  Homolog annotation: Hit_ID=Q943Q1; Match level="QueryCoverage=96%, HitCoverage=77%, E-value=0.0, Identity=60%"; Hit description =Putative S-domain receptor-like protein kinase
  Pfam annotation: Domain name=PAN_2; Domain location=222-295; Score =80.8; E_value=4.3e-21; Accession=PF08276.2; Description=PAN-like domain
  Pfam annotation: Domain name=Pkinase; Domain location=386-671; Score =186.7; E_value=5.7e-53; Accession=PF00069.15; Description=Protein kinase domain
  Pfam annotation: Domain name=Pkinase_Tyr; Domain location=387-671; Score=72.9; E_value=1e-18; Accession=PF07714.7; Description=Protein tyrosine kinase
  Pfam annotation: Domain name=S_locus_glycop; Domain location=75-205; Score=85.0; E_value=2.2e-22; Accession=PF00954.11; Description=S -locus glycoprotein family
  Pfam module annotation: Pfam domain module=PAN_2::Pkinase::Pkinase _Tyr::S_locus_glycop; Domain location=222-295::386-671::387-671::75 -205
  Subcellular localization annotation: CTP_CleavageSite=66; ConfidenceScore=5.50e-01
MKTDDLRFVHSSSTAAAAPRRTLWQSFDHPTDTLLPSAKLGLNRATGASSRLVSRLSSATPSPGPYCFEVDPVAPQLVLRLCDSSPVTTYWATGAWNGRYFSNIPEMAGDVPNFHLAFVDDASEEYLQFNVTTEATVTRNFVDVTGQNKHQVWLGASKGWLTLYAGPKAQCDVYAACGPFTVCSYTAVQLCSCMKGFSVRSPMDWEQGDRTGGCVRDAPLDCSTGNNSNASAPSSTSDGFFSMPSIGLPDNGRTLQNARSSAECSTACLTNCSCTAYSYGGSQGCLVWQGGLLDAKQPQSNDADYVSDVETLHLRLAATEFQTSGRRKRGVTIGAVTGACAAALVLLALAVAVIIRRRKKTKNGRGAAAGGGLTAFSYRELRSATKNFSEKLGQGGFGSVFKGQLRDSTGVAVKRLDGSFQGEKQFRAEVSSIGVIQHVNLVRLVGFYCEGERRFLVYEHMPNRSLDIHLFQSGGGVFLDWSTRYQIAVGVARGLSYLHDGCRDRIIHCDVKPENILLGASLLPKIADFGMAKFVGRDFSRVLTTMRGTKGYLAPEWIGGTAITPKVDVYSYGMVLLELVSGRRNAGEQYCTASGSGDDDAAREELAFFPMEAARELVKGPGVVSVSSLLDGKLCGDADLVEVERACKVACWCIQDDEADRPTMGEVVQILEGVLDCDMPPLP

SEQ ID NO: 68826 - protein, 275 aa, Zea mays
  Coding DNA Sequence Number=SeqID_27047
  Homolog annotation: Hit_ID=UPI00005BC0AF; Match level="QueryCoverage =48%, HitCoverage=38%, E-value=3e-47, Identity=84%"; Hit description =PREDICTED: similar to H3 histone, family 2 isoform 2
  Pfam annotation: Domain name=CBFD_NFYB_HMF; Domain location=203-268; Score=5.1; E_value=0.051; Accession=PF00808.13; Description=Histone -like transcription factor (CBFNF-Y) and archaeal histone
  Pfam annotation: Domain name=Histone; Domain location=197-271; Score =142.9; E_value=8.5e-40; Accession=PF00125.14; Description=Core histone H2AH2BH3H4
  Pfam module annotation: Pfam domain module=CBFD_NFYB_HMF::Histone; Domain location=203-268::197-271
MGCVKPSRQPNIRRTGPGNWALGEAGDPHRSRPSQSPRRSLNTRIDPASRQQRHPRPPSQFPIQRPIVVRRPRQRPALPKIFAIPACPPKQASTPSATSINPKPPPTADRITQLARRPISQTIRTPLAAHSQANPRRQRWPARSRRRASRRGGKAPRKQLATKAARKSAPATGGVKKPHRFRPGTVALREIRKYQKSTELLIRKLPFQRLVREIAQDFKTDLRFQSSAVAALQEAAEAYLVGLFEDTNLCAIHAKRVTIMPKDIQLARRIRGERA

SEQ ID NO: 68827 - protein, 288 aa, Zea mays
  Coding DNA Sequence Number=SeqID_27048
  Homolog annotation: Hit_ID=Q10N63; Match level="QueryCoverage=95%, HitCoverage=46%, E-value=4e-48, Identity=37%"; Hit description =Expressed protein
DLTAEISELEKQKDELEAQLKKVNISLNAAICRLKQTREERDQFHEANNQMIFTLQAKENDLSKSIDSCNMEASVVKTWVNFLEDTWQLQLSYNEQKETKTKEESIEHEGDDEISVQTSPQKSLEEEYLETEKKIVIAFSIVDRMKKMFYSEQAANSRQDDAEVRTLFSEIEKLKEVFESVERPTLDFEVRKAKDPMKDKSGSNRSAKDKSESSHSPVQVPSSPKDVPVESPKSPVKPEQTMDPDSEFAKLELEFGKVNRDHEEIGGWDFDELEEELRADLSKSTNPK

SEQ ID NO: 68828 - protein, 198 aa, Zea mays
  Coding DNA Sequence Number=SeqID_27049
  Subcellular localization annotation: CTP_CleavageSite=55; ConfidenceScore=5.46e-01
MGSGEAEVVWPRPGRSPSPGVGQSGVRRLPGLSPSPSPGSGGAEFAVFRVLARVRALGSGGAEFAVFRVLARVRALGSGGAEFAVFRVLARVRALGSGGAEFAVAPLARPDCLSDSLFALNAPLFDAVPKIQLKTNKKNKTGFKRKEQRETEVLPGMAHRTVRCATGQCPVCHRTVSGAPGRIVFKLFTFGFLRRSPL

SEQ ID NO: 68829 - protein, 72 aa, Zea mays
  Coding DNA Sequence Number=SeqID_27050
MGKSKKGGSSLHHSGNKRKRELSPPSEDFGDSEYSEEEFSSESEGSPAYALSPQHRPMISNDLQGDRCRGVD

SEQ ID NO: 68830 - protein, 648 aa, Zea mays
  Coding DNA Sequence Number=SeqID_27051
  Homolog annotation: Hit_ID=Q84YP7; Match level="QueryCoverage=23%, HitCoverage=49%, E-value=2e-79, Identity=66%"; Hit description =Putative UVB-resistance protein UVR8
  Pfam annotation: Domain name=RCC1; Domain location=503-553; Score =47.2; E_value=5.7e-11; Accession=PF00415.9; Description=Regulator of chromosome condensation (RCC1)
  Pfam annotation: Domain name=RCC1; Domain location=556-607; Score =26.4; E_value=9.9e-05; Accession=PF00415.9; Description=Regulator of chromosome condensation (RCC1)
  Pfam annotation: Domain name=RCC1; Domain location=611-648; Score =3.8; E_value=0.28; Accession=PF00415.9; Description=Regulator of chromosome condensation (RCC1)
  Pfam module annotation: Pfam domain module=RCC1::RCC1::RCC1; Domain location=503-553::556-607::611-648
  Subcellular localization annotation: CTP_CleavageSite=52; ConfidenceScore=5.29e-01
MAPPVDVAGLCPSLGDVKLLRGRGRVCLPWSRSSPSPGSGEAKSSSSRAEPKSEAWVGRSGVRRLLGLSPSPSPGSGGAEFVVFLGLSPSPSPGSGGAEFAVFRDLARVRALGRAERSSPSSGTQPESEPWVGHGQPSAQLVVLGSSCKAEAIRRRPASLPGPEKPSIPFLCRWWPLTPRQATQPWLEATAAATSEASLSLPPRHVLLRLKSLTAPGTATHLHRNRDSFTDIRASRFPDPPCQSLLRPSPPLRCVLIPEPYHSTIPRRQMGPRRLGPSRRRPLPTRRPSGWVGGDGEGVGGSTHGTPLQQQQQQRPSLASLSFPLLHSVAPQHHPRSAAVAAAPLPADSGAISTRAAGSLDGSDRSGTKRPKASSPHPGPGAGGSMAGEKAPRAFSIEELPGHLIGEVLTSGGLAAADLARLEATCRALRPLAEYAASKLCAARAAFAAMGPAARGELLERCGGSWKRVLRFLQSVEQSSGTVETSSGSVATGLSFTVILTRDGQVYTCGSNTHGQLGHGDTIDRATPKLIELFEGPTQVVQIAAGASYTFAVTDDGTVHSFGSCTNFCLGHGDQHDELLPRAIQSFKRRNIHVVRVSAGDEHAVALDALGHVYTWGRGYCGALGHGDENDKTSPELIGSLKGQVAVQ

SEQ ID NO: 68831 - protein, 83 aa, Zea mays
  Coding DNA Sequence Number=SeqID_27052
MSAAAPLLPLGCAGWQLMPREGPAQAPAQLDPPCCAPPFFAAFVGSVAAVAFPVRSTLLWPSCLGFSCEFPECDHLDFDYLGI

SEQ ID NO: 68832 - protein, 116 aa, Zea mays
  Coding DNA Sequence Number=SeqID_27053
MEAASGKEAPGMVTTRAKARDTMLMPHVSMVRSTPKVSAPSGDFGNPDYKVFDFEWTTGGGGSMLGYLALVSVEPSLLDRLAPLAKAHNVLTRLCADKKSMNAKLKQLRSKVVERE

SEQ ID NO: 68833 - protein, 73 aa, Zea mays
  Coding DNA Sequence Number=SeqID_27054
MDTGYVVVYFSILYLRYRAGIVTDEMLSLPQKPFLAVGLLEAFGAAAGMAAGDNGNQVPALSSMKGGTALQTK

SEQ ID NO: 68834 - protein, 171 aa, Zea mays
  Coding DNA Sequence Number=SeqID_27055
MFDNFRRVYEELEATIHSLDLEGEGLFDRYIVWLGTETMRLPDVIRGLMTFLAFMTYESSFESLIHEGCNHVSRLSSSEFNYNENLYDEISEAAGMEVDEMLDRMWVPFDCEARKTYEGTGDGEKLVDAEAERPEIVEADFAAATRVQLPEMPAAVGGIVPPGPRLTLLML

SEQ ID NO: 68835 - protein, 182 aa, Zea mays
  Coding DNA Sequence Number=SeqID_27056
DERRRGRVVRRSWRVGNGHEVRSGCCVDGEAPAGNADSRADDDNVDRLRRRYGRAKSEREGGSSGEEESSVVGGRREGLGVQFICKKGEVEGRNGGRDFMAINGVGSWMRGAGAVGAVGLHGLGIGAGSWRASAAGVGRGSCRRAWQGKGQGAAPCHNVGVLEPTAERLEGDVSILEVMPSD

SEQ ID NO: 68836 - protein, 196 aa, Zea mays
  Coding DNA Sequence Number=SeqID_27057
  Homolog annotation: Hit_ID=Q8S9W7; Match level="QueryCoverage=42%, HitCoverage=14%, E-value=5e-25, Identity=72%"; Hit description=FAD binding domain containing protein-like
  Pfam annotation: Domain name=FAD_binding_4; Domain location=55-161; Score=12.1; E_value=0.00038; Accession=PF01565.13; Description=FAD binding domain
  Subcellular localization annotation: CTP_CleavageSite=27; ConfidenceScore=5.32e-01
MFATFLLLLWSHAPAPALSLPPRPPVRCSDGRDHGAACSPTPTARGSSDRADCPVSSVAYPASEQEVVAAVARASASGARVKGRVEVDVAARTVTADAGAPLRAVIDAAEASGLSLTAAPYWEGVSVAGLVSTGSHGSSWWGRGGAVHDHVVGLRLVVTAGEADGWARVLTLRRGDELFPAALVSLGLLGVVSKRN

SEQ ID NO: 68837 - protein, 199 aa, Zea mays
  Coding DNA Sequence Number=SeqID_27058
MQGARVRGIFDGVGAHWLCGARCGGTGCNPPGPAGTYKSGIESLVHEGCDHVAHLSSSDFGANENLLPEVGEVASVAADEMLIACGSPSALKLPASALWWSLSRPGPKECGRTILPRGSVSCPQIQTEDYISDAAIWVNAHSIEGMEEYNVGLDTIVHKGLQISQPAMLQLITIVSVCGALRRLTSLMSNISGICDHFV

SEQ ID NO: 68838 - protein, 296 aa, Zea mays
  Coding DNA Sequence Number=SeqID_27059
  Gene Ontology: Mol. function=protein binding
  Homolog annotation: Hit_ID=Q75KA7; Match level="QueryCoverage=59%, HitCoverage=37%, E-value=2e-34, Identity=47%"; Hit description =Expressed protein
MAYWPRARGSGGRRKAATLDELGTQQQGRDVSALGQGIVGRWTSGMREWIGSMRLMIGRSLQQLLGSMRRWERGSGAGAWAWWGTTWWLARSCKLLTRGRAALGGLRSMVCRGWATQRWVGARAVGLRKGSSWKLHGEDHRANPVLRRVTSDTLANPPNDTLAHIIELVLKSSEDRGRREMKSLNCQDSLLVLPREATGAYELAVEEELSSGSQVQAFRKIGKIDLEADTLLWLAEILSDRHAVDELASIWARQTELAAELHTRIPVMHRHLVSCVTARLLVVVGRGATLPSRETR

SEQ ID NO: 68839 - protein, 65 aa, Zea mays
  Coding DNA Sequence Number=SeqID_27060
MGEILEHLRARAEYDWLSLHIPSEVARCGEVYRISPRAVYEGWPEERCDVSGARSNSTMRTMRRV

SEQ ID NO: 68840 - protein, 356 aa, Zea mays
  Coding DNA Sequence Number=SeqID_27061
  Gene Ontology: Mol. function=DNA-directed DNA polymerase activity; Cellular component=nucleus; Biological process=DNA replication
  Homolog annotation: Hit_ID=Q9CAF8; Match level="QueryCoverage=93%, HitCoverage=62%, E-value=4e-62, Identity=39%"; Hit description =Putative DNA polymerase alpha subunit
MEEEIRKEFQSNGFSIGGAGPEDAAQILSTLLTYCINYKMSPADLVSNWEVYYLNRLLSNSHVDEAAFHDTPGYEQEKAPEGSSISELTPLASDRPSSSRVAKTNADRITPFATRVNKFTQQYVLNADNAVGVPSKSAEITEDEIIRRVQPSQRCYLQVQRSQPEPGCRFMYDRMEDRFNYLEDRIRKSASLFSASGFCGQPADATLASEEKMFAVGTVACDGEGHLNEKSILLQGRGQCVRLDLKDLDHFSLFPGQVVGIEGHNPSGHCFVASKLFDSIPVSVDAQLPSAKKQAIDNESNQNSDAGTLSRALSSEKVQTSSPINIKGYGRLRTPEHIPIEPITFFTFPALGVDVA

SEQ ID NO: 68841 - protein, 105 aa, Zea mays
  Coding DNA Sequence Number=SeqID_27062
  Homolog annotation: Hit_ID=Q6QP51; Match level="QueryCoverage=35%, HitCoverage=17%, E-value=9e-12, Identity=89%"; Hit description =Putative growth-regulating factor 1
  Subcellular localization annotation: CTP_CleavageSite=60; ConfidenceScore=5.17e-01
MEARAHMSCNRRNGYYVQGNCTATRANAMTSRLQNQCHDSRQPCVASDTSDRRSGRCFTSAMMTTSKRGSKAGPSEGFDSRPRARRVRDDPGYVRYMAEARATLP

SEQ ID NO: 68842 - protein, 143 aa, Zea mays
  Coding DNA Sequence Number=SeqID_27063
  Gene Ontology: Mol. function=DNA-directed DNA polymerase activity; Cellular component=nucleus; Biological process=DNA replication
  Homolog annotation: Hit_ID=Q9CAF8; Match level="QueryCoverage=62%, HitCoverage=14%, E-value=7e-31, Identity=63%"; Hit description =Putative DNA polymerase alpha subunit
MAEEDAYPMTHLCMLGPSGKGPDLLPYKYKGIIAAGPYTTTDNMLFEPLQELLSYACRKPPQLLILMGPFIDSDHPDIKKGTIDQSFHDIFHFEVLRKIQDFTQYVGTPVGAILIPSVRDALFFFFCVTLVVSSLKGDVTNLL

SEQ ID NO: 68843 - protein, 57 aa, Zea mays
  Coding DNA Sequence Number=SeqID_27064
METCLMIKVDPLIGSAKGDQASNHRYGRGQMIVVFPLVAAAGDHDSALEVAMVALGM

SEQ ID NO: 68844 - protein, 75 aa, Zea mays
  Coding DNA Sequence Number=SeqID_27065
MSGDHAKMEIVTDDKSASSGRTLSRESGNKHKEESSSSIKSLRKGDKKKKMKKVIYYETDSLSPFTSVGTCSQML

SEQ ID NO: 68845 - protein, 443 aa, Zea mays
  Coding DNA Sequence Number=SeqID_27066
  Gene Ontology: Mol. function=carboxypeptidase activity; Cellular component=proton-transporting two-sector ATPase complex; Biological process=ATP synthesis coupled proton transport
  Homolog annotation: Hit_ID=Q9LVN3; Match level="QueryCoverage=77%, HitCoverage=88%, E-value=1e-137, Identity=63%"; Hit description =Arabidopsis thaliana genomic DNA, chromosome 5, P1 clone:MBM17
  Pfam annotation: Domain name=DUF231; Domain location=294-443; Score =147.1; E_value=4.7e-41; Accession=PF03005.6; Description=Arabidopsis proteins of unknown function
  Subcellular localization annotation: CTP_CleavageSite=35; ConfidenceScore=5.05e-01
MRVLTPAIGGCLSIRGSDWSRKRPVSPSLADFVNRSAEERPVCLLSAPGFGVTIARNGRIFPFSAQCLLVASVFPMFPCFLHQQEQEHLGDDGATLAGSPDCNYAKGKWIEDDKRPLYSGNECKQWLSKMWACRMMRRTHFSYENYRWQPHDCEMPEFTGPKFLKRMRNRTLAFVGDSLGRQQFQSMMCIATGGKYSPEVEDVGWKYGLVKAPGALRPDGWAYRFSSTNTTILFYWSATLSELEPLNTEHTVTRYALHLDRPVTFLKEYLNDFDVLVLNTGHHWNRGKFNGNHWELHADGKPVGNGSRLADLNRAKNLTLYSIARWMDSELTRHPKMKVFLRTISPRHFVNGDWNTGGTCGNTVPFTNGSEVLQDHSIDIPAENAVKGTRVKLLDITAISKLRDEGHISNSSFKKASTGINDCLHWCLPGIPDMWNELLFVQI

SEQ ID NO: 68846 - protein, 113 aa, Zea mays
  Coding DNA Sequence Number=SeqID_27067
  Homolog annotation: Hit_ID=P35100; Match level="QueryCoverage=28%, HitCoverage=3%, E-value=3e-08, Identity=84%"; Hit description=ATP -dependent Clp protease ATP-binding subunit clpC homolog, chloroplast precursor
MGLLVAATKYRGEFEERLKKLMEQIKRNEDIILEDIQTSFATKETLEGHIIFEGGYYKLHSHFHAILSLMLRWRHRPTIFSRSRAQPLQHAHQVAMKHYLHKLILLVMIDSKS

SEQ ID NO: 68847 - protein, 392 aa, Zea mays
  Coding DNA Sequence Number=SeqID_27068
  Homolog annotation: Hit_ID=Q84T65; Match level="QueryCoverage=89%, HitCoverage=100%, E-value=8e-78, Identity=52%"; Hit description =Expressed protein
  Pfam annotation: Domain name=DZC; Domain location=148-183; Score =68.6; E_value=2e-17; Accession=PF08381.1; Description=Disease resistancezinc fingerchromosome co
  Pfam annotation: Domain name=DZC; Domain location=350-377; Score =17.8; E_value=0.0017; Accession=PF08381.1; Description=Disease resistancezinc fingerchromosome co
  Pfam module annotation: Pfam domain module=DZC::DZC; Domain location =148-183::350-377
MAMGDGNEDDDGMSAARACRHTESCPVGPPYTRMDWILVLKDMVLKLSGTHHRQHGAQHRRGGSPPPPRGRATSLYRSGYYRPGVVQDDMAVPPATYLGGGGAGASSASSTPAWDLPAAARADGEACREWVAQVEPGVQITFVSLPGGAGNDLKRIRFSREMYDKWQAQKWWGDNNERIMELYNVRRFSRQVLPTPPRSDDAERESFYSQSQVGSPSATPSPAPLTPERISWGAFARQVAAPPASSGATGAARQHSFRPMSPPPPSSSNPSERAWQQQQQRHIGGGGGGGAAGGKSPAASEAAAAATEAARTTTSSRDDVSVSNASELEVSEWIIQDQPGVYITVRELADGSRELRRVRFSRERFAELNAKAVVGGEQGEDTGSVPLKTELE

SEQ ID NO: 68848 - protein, 556 aa, Zea mays
  Coding DNA Sequence Number=SeqID_27069
  Homolog annotation: Hit_ID=Q84T58; Match level="QueryCoverage=52%, HitCoverage=51%, E-value=5e-95, Identity=67%"; Hit description =Expressed protein
  Subcellular localization annotation: CTP_CleavageSite=87; ConfidenceScore=5.54e-01
MAAESARPPSPPRDSGCPAGAGDSTSSQLTATYLGVSFALFLATLPSGTAARHVASLQSRGRLLASRLLAAEDQLRQLRARRREDARANARAAEIFAGHRAAWMEAERRLQARAAAAADEAASLRAHLADAEADAAALRARAERLEREAAERDELLTALLAATSRAGYSGGGPLPRVHDGEEQEEEERARHDARGEREPEHEQDPLPAPPLDHAADTTDAEALAAAAALYAQQRQKHDDDFYTAAMAASGMPPWMEMDRSKAWQGTFSVKFSQKGLGQFPVHVKSFAPVSITSFTIPMDSHLVALDISTNDLKYDTIESTYNTKHAVPRRESPWKVDVESSGVPAKLRLLEQELLNLEKVVNGDLSKIPLVMRKQVKRYQTLAGKIDDLCKRMKVKPNGYVFVQQTSDPCDSTLNSEFRTQRQTEFLLEAFHLQHRATETRQKLGTLQAETAKGSFGDELTAEAKMCTRRALSSIRNNFKEIQRSLEIWLARILGDLEGMLARDGASRIREYFLSPYTSAVRDCMRMNTLENPWIHGQQLLRTFAVAMPGCGFFFD

SEQ ID NO: 68849 - protein, 246 aa, Zea mays
  Coding DNA Sequence Number=SeqID_27070
  Subcellular localization annotation: CTP_CleavageSite=38; ConfidenceScore=5.14e-01
MSSNTSSGQDPGPKHAASVDTIALTSRTKPLQRGNDTLAAAAAKLRHPPAPSAGHTKPGNTMPRATHRLAPKPELGLHHDHRQTTHVTWASPPSPDTAVHVTGVSAMHVNSRPRTAAMPGTMTHHHEASLQPDHGGNDHWSRCRGKPRRAPLCPGHRRGHSSRPSPLPPTVGHAVAGGSHRHMEEGGPVVHRPRRTHDVGSRRHSRPQPPPQFPRPRRTMAAVIHPAQVGLAEAQQIRVAQSPTIH

SEQ ID NO: 68850 - protein, 64 aa, Zea mays
  Coding DNA Sequence Number=SeqID_27071
MYPLASISLFIVGTCLISIVLPIFSNSCFQPEDFKVLSGRTADAPYPVVSVQFMIYYPETCISP

SEQ ID NO: 68851 - protein, 64 aa, Zea mays
  Coding DNA Sequence Number=SeqID_27072
MKDIETRFMCIVEAGNKVSRMLETKKILLDICAKIPGTKYMVIQGEPRVVIRGKKFIAFASFVS

SEQ ID NO: 68852 - protein, 91 aa, Zea mays
  Coding DNA Sequence Number=SeqID_27073
  Gene Ontology: Mol. function=protein binding
  Homolog annotation: Hit_ID=Q6K7C2; Match level="QueryCoverage=65%, HitCoverage=27%, E-value=2e-26, Identity=88%"; Hit description =Putative OsCTTP
  Pfam annotation: Domain name=ChaC; Domain location=3-89; Score=1.1; E_ value=8.7e-09; Accession=PF04752.3; Description=ChaC-like protein
MVLWVFGYGSLIWNLGFDFDDKILGFIKGYNRTFNLACIDHRGTTEHPARTCTLETDGEATTRPYAIFACPPFYTVTQCYMGKIVPTHLNS

SEQ ID NO: 68853 - protein, 192 aa, Zea mays
  Coding DNA Sequence Number=SeqID_27074
MNQLDSFLLAGCNLLGLALEAGAGVQGQIPGGDAGENDEAAAAAATPNYNNRTVPVVHALFSFDLVEVVCRGTAVAFRYVIVSFLSGACVHVQLNLRDRSDGIRDVLLNNRRSPSDIDVLSWMLYQARHAALLDQSSTVVFVQMFSAALHHMGGRVESRSQDARRCQPVHERAYSGDALHAPHGIVVSTPSS

SEQ ID NO: 68854 - protein, 59 aa, Zea mays
  Coding DNA Sequence Number=SeqID_27075
MASIVSSAWYPKDPESNERQPDFLLFKKDDNYGLSIPLWWYKLRYQLWRNRPNYSNLSA

SEQ ID NO: 68855 - protein, 566 aa, Zea mays
  Coding DNA Sequence Number=SeqID_27076
  Homolog annotation: Hit_ID=Q9FMB4; Match level="QueryCoverage=93%, HitCoverage=72%, E-value=1e-117, Identity=58%"; Hit description =Arabidopsis thaliana genomic DNA, chromosome 5, TAC clone:K15E6
MPPSSVSGGSGPGGVSPDAIIEWLQDEMGYPTAPPAPEQLRKICRGNMIPVWSFLLRRVRSERTVATARRNILVHGVAARRAREGGVIGAGVGDAAAREAEARERDLAAEEAERLRGIVRRQRKELRARIAEVAREEAERKRVLGERSNASVGYISLSTKQRDVQRSSIGVAGTTGSVEDMQLQSNRDDLYSSTIKSNRLSEDLLETAGERSIRKACETLAADMIETIRSSFPAFEGSGINSSCQLTAAKLGIDLDGEIPTDVKAVALDSLKNPFLLLQSIITYTSRMKTLIHRETDKIDIRADAELLRYKYENEQVIDAASTDASSPLPYQVYGNGKIGSQLPTRGTYDQLLERQKEHVQQFLATEDALNKAAEAKALSQKLLQRLYGTIDMAGSKKLPTGNTTQNVTNSRHLELDVWAKEREVAGLKASLSTLTSEVQRLYKLCAEWKEAEDSLKKKWKKIEEFDARRTELECIYSALQRANMDASSFWEQQPLSARGYASSTIIPACHTVVDMSTNSRDLIERELAAFSQSLDNSLCRLPATPQHSDFFKIPVLIGVTTTDAF

SEQ ID NO: 68856 - protein, 93 aa, Zea mays
  Coding DNA Sequence Number=SeqID_27077
MAAGRCTSLCTSWLCTGCLGDGRWALHIVALHRLPGRWTLAVPGRWPLAAPGSGRWPLVAGRARARLGLWEMAARRWASGKSGRMEMAAGGVG

SEQ ID NO: 68857 - protein, 60 aa, Zea mays
  Coding DNA Sequence Number=SeqID_27078
MAAAGVSGALYAKALMRLLDPLYCIEYHSGNVDDVTWPTTLPPGWTIEWDVAPAGEEHEE

SEQ ID NO: 68858 - protein, 79 aa, Zea mays
  Coding DNA Sequence Number=SeqID_27079
MGNSSTPTQNKQLTPTSGKGFNIARVNQVSVEATTAGADIAIGKVARYKAYKANYQSQSHDSTRGCTVILGGHSMFQLI

SEQ ID NO: 68859 - protein, 114 aa, Zea mays
  Coding DNA Sequence Number=SeqID_27080
MAMLDPPSSFIFENIVRDIFIKNISDASLKITLCGDQASGQSYLSGTAATTWYFNPDIPEAQEYYINHRALSAPPLYHDSYKIANGGFHLAPNAKSLHLKPPLDTAVHHVVVQM

SEQ ID NO: 68860 - protein, 96 aa, Zea mays
  Coding DNA Sequence Number=SeqID_27081
MQLRASGAEICLGLLLLQVLVPPLRHKPMLETENDLEMQQLQLNTYVKKMTMLLLKMNNKNKRQQDTINDDEDEGEHESGGKGPAVDEFQLDEDLL

SEQ ID NO: 68861 - protein, 581 aa, Zea mays
  Coding DNA Sequence Number=SeqID_27082
  Gene Ontology: Mol. function=protein serine/threonine kinase activity; Cellular component=membrane; Biological process=protein amino acid phosphorylation
  Homolog annotation: Hit_ID=Q33AC4; Match level="QueryCoverage=50%, HitCoverage=37%, E-value=6e-75, Identity=51%"; Hit description =Protein kinase domain containing protein, expressed
  Pfam annotation: Domain name=Pkinase; Domain location=77-357; Score =159.7; E_value=7.6e-45; Accession=PF00069.15; Description=Protein kinase domain
  Pfam annotation: Domain name=Pkinase_Tyr; Domain location=77-357; Score=57.1; E_value=5.6e-16; Accession=PF07714.7; Description =Protein tyrosine kinase
  Pfam module annotation: Pfam domain module=Pkinase::Pkinase_Tyr; Domain location=77-357::77-357
MRLIERLIAPSRRLVGRPGRPEHLIGFFMMGNKTGKPVFSELKSTEFSLLESTLVQDHCAIPTCVPLDFLKAITSDFSKEQELGRGGFGVVYKGLLKNGKAIAVKKLSEMNLDDDQFHNEVTYLFGLKHKNIVQLKAYCAESRWEAIELRRKYVMAESRKRLLCFECINNKSLDKHLSAESHGVEWHIRYEIIKGICHGLHYLHTDCQIVHLDLKPENILLDDNMEPKITDFGMSRLFGLQQSKIITKTCGGTLGYMAPEYLLKGLISVKADIFSLGVIIIEVMTGGRNYPTCEKSCEQFAVDVVGRWRKRLLEEAGRYTPLEKYVEQVETCILIGLMCVDDDPNKRPTTLDIIERLTKVDVTNTDRGPPKTLEAATGLTGHPNLATRSFLDRFRRTIVIGMLKKALKIQDVSQLEQLLAKEVLLELHKIGTNATGNRSFLERLHASITMATLVQALHSLDLDPSAALRMEVLFLALENMRGKNNSRRRSEDVLELEERPEQIRSVLEAGTRARLSDEEHMPSVSVQAEDQAFPKPKLAKVRATAPVCVSAVWLAAGIGFLCGFTLGEMRGLRRTRVHERT

SEQ ID NO: 68862 - protein, 180 aa, Zea mays
  Coding DNA Sequence Number=SeqID_27083
MTLGVVVEGACGSVTAGDVERRNPMETCGRPPCVDSSSLHLVLPFAASFLTKASPCLTPYRLKGKKGSVALPRLTALTTMLHFVNFIMCAITAVPHMKMSQAKEVRYTARSITPPADRNGTSRSPPPKRRSPSRSPPPKSASRSPRPRSPKRRSTSRSPPRRRGRSRSRDRSRSRQVYHL

SEQ ID NO: 68863 - protein, 192 aa, Zea mays
  Coding DNA Sequence Number=SeqID_27084
MVLDLAQVAELDKVSTDKAKIIKLSDSWPLHSSIQLYSLKISKAFSGEDAARDLVAFELQVAKEMHLPEGSDQRSAVSSANESVQLQRPEFGHLEQWAVILIPFFFSSHHSCVQLANCSLISGHQLLNLASEDLSLIWQGHVAGIYMASVFPYYYTVPACNAYYTCLHIVIFVQVLQADGGGLLLETSSVLI

SEQ ID NO: 68864 - protein, 128 aa, Zea mays
  Coding DNA Sequence Number=SeqID_27085
MGQRREASLEARGRSSLHHRFKEKEGAVDLGLELDGVGLLPWMEGSEAWTAPNASCLVGVHGEASEGGRNGQPSAMGKLERPLASCCRRIGEDETAEGAGWGVQCSLRAKPEKHRGVAMGLLMSCAKG

SEQ ID NO: 68865 - protein, 36 aa, Zea mays
  Coding DNA Sequence Number=SeqID_27086
MQTLVPSTTASSARPMAPRSARSTHHRWPVCSNLGG

SEQ ID NO: 68866 - protein, 86 aa, Zea mays
  Coding DNA Sequence Number=SeqID_27087
  Subcellular localization annotation: CTP_CleavageSite=9; ConfidenceScore=5.18e-01
MKLWKETSRSSKITTSSRCGLAAIPSRLPVKAALSTFLFRTLIYLTALVPTITGMGDHVSGRVRGYVHFQVHSGFNNIMLREEKLS

SEQ ID NO: 68867 - protein, 104 aa, Zea mays
  Coding DNA Sequence Number=SeqID_27088
MGLSMAERAYIRPVKRVGLEGSDDSKEENSSEDSEGEDSEEEDSGSGDGSGYDGGSSSNGGGAGGCGASDYDDNGYDDGDESGGGKGDVGKGGGGNVGGGAPPA

SEQ ID NO: 68868 - protein, 465 aa, Zea mays
  Coding DNA Sequence Number=SeqID_27089
  Gene Ontology: Mol. function=transferase activity, transferring glycosyl groups; Cellular component=integral to membrane; Biological process=metabolic process
  Homolog annotation: Hit_ID=Q6K2Q2; Match level="QueryCoverage=96%, HitCoverage=95%, E-value=1e-158, Identity=60%"; Hit description =Betanidin-5-O-glucosyltransferase-like
  Pfam annotation: Domain name=UDPGT; Domain location=6-465; Score= -125.2; E_value=0.00026; Accession=PF00201.9; Description=UDP -glucoronosyl and UDP-glucosyl transferase
MEIEGFVEEAETHTLPHIAIFPFLAKGHTIPLIHLAHYLHRYGLATITFFTTAGNAGFVLEGLSGADAAVVELTFPTDIAGIPPGVESAEGLTSLVSFAVFADATSLLQPQLDASLAEMQPPASLLVTDPFLHWTKASAARLGIPKVSFFGISAFAQVMREVRVRHDPCATLRPDNVDADGHPATFTVPEFPHIKLTFEDFMAPFGDPASMAPMLKLDAKLGRAIVESQGLIINTLHGLEAPYLDFWNQHVGPRAWPIGPLCFAQPTSIGPKARPSWMEWLDDKATTAAILESQLKEVANGLEEAEVHFLWAVRPENVDLGPGFEERTKGRGLMVREWVDQLEILKHSNIKGFLSHCGWNSVLESVASGVPLAVWPMHADQPFNSKFLVDELKIAVRVHTSDRTIRGSVRSEEISKVVRMLMVGEEGVEAAKRMAQLSASAKEAMIEGGPSWKSLKEMISQLGLK

SEQ ID NO: 68869 - protein, 487 aa, Zea mays
  Coding DNA Sequence Number=SeqID_27090
  Gene Ontology: Mol. function=protein dimerization activity; Biological process=electron transport
  Homolog annotation: Hit_ID=Q2QPA8; Match level="QueryCoverage=98%, HitCoverage=66%, E-value=1e-165, Identity=56%"; Hit description=HAT family dimerisation domain containing protein
  Pfam annotation: Domain name=DUF659; Domain location=236-388; Score =183.4; E_value=5.5e-52; Accession=PF04937.6; Description=Protein of unknown function (DUF 659)
  Pfam annotation: Domain name=zf-C2HC_plant; Domain location=33-89; Score=80.9; E_value=3.9e-21; Accession=PF07567.3; Description =Protein of unknown function, DUF1544
  Pfam module annotation: Pfam domain module=DUF659::zf-C2HC_plant; Domain location=236-388::33-89
MEELVTRRRRGEPSSVNSASITQKISNAIKSDDPTWEHCFVPDMSKKQAIQCKYCDKVIHGGITRVKYHLANIGGFNVTKCKKVPAHVKQEMEAFLTKKTGEKEQRKKKKQRDRDEIDLDKSDGSNEEDNGHENDVIVLKSTRESNNCSSSRPPTNGGSGTIDNFYKPQSVEESDHKNKIQTKLSTHKREERRDRACEYICQFFYEAGIAHNTITLPSFGHMLEAIGAFGRGLRGPSAYEMSGPFLKRAKQKVLDIFKNHHESWQLTGCSVMTNAWTDRKGRGVMNLVVHSAHGVYFLDSVDCSTVKKDGKYVFDLVDRCIQEIRKENVVQVVTDNASVNTAAASLMAAKTPSIFWTGCAAHCLDLMLEDIGKLGPMEQTIASARQDNKKDIARLFRSDELNELGYLKKAKGKKANKVVALEGFWKNIDMAINFFEPLANVLRRMDSDVPAIGFFHGCMLEAKKEIATRFDNNESKYRVAWDIIDKT

SEQ ID NO: 68870 - protein, 83 aa, Zea mays
  Coding DNA Sequence Number=SeqID_27091
MEKSAGEVVRIRCQGEGVEGTERPIRGRKEGTSELTAMEEQRGPRLVLAGGELERERNGTRSLGKKGSAQGTERRELEINESS

SEQ ID NO: 68871 - protein, 118 aa, Zea mays
  Coding DNA Sequence Number=SeqID_27092
MADGKGRENSAVALKTSPSVPMARGLRGGSNPLEEWSGRVKAIEAGFRAWMAKQPIHIEAAVSTAVGAVQGGALGGLMGSLTADGGSPFPIPQPPSNANSDAMASFKQAQVVNQSCPG

SEQ ID NO: 68872 - protein, 425 aa, Zea mays
  Coding DNA Sequence Number=SeqID_27093
  Gene Ontology: Mol. function=sugar porter activity; Cellular component=integral to membrane; Biological process=carbohydrate transport
  Homolog annotation: Hit_ID=Q6K8S7; Match level="QueryCoverage=92%, HitCoverage=97%, E-value=0.0, Identity=87%"; Hit description =Putative PLRR-4 polymorphic leucine-rich repeat protein
  Pfam annotation: Domain name=Nuc_sug_transp; Domain location=105-341; Score=13.7; E_value=3.1e-14; Accession=PF04142.6; Description =Nucleotide-sugar transporter
  Pfam annotation: Domain name=UAA; Domain location=40-356; Score= -172.7; E_value=0.088; Accession=PF08449.2; Description=UAA transporter family
  Pfam module annotation: Pfam domain module=Nuc_sug_transp::UAA; Domain location=105-341::40-356
MQRNGVVECSVCRSRVVVPSPRSVSRAYDKHRNKMSSKFRALNVFLVVGDCILVGLQPILVFMSKVDGKFQFSPISVNFLTEVMKVIFAVVMLIIQSRKQKVGEKPLLARSTFIQAARNNVLLAVPALLYAINNYLKFIMQLYFNPATVKMLSNLKVLVIAFLLKFIMRRRFSVIQWEALALLLIGISINQLRTVPVGNTAFGLPVTAIAYIYTLIFVTVPSVASVYNEYALKSQYDTSIYLQNLFLYGYGAIFNLLGILGTVLFQGPESFNILRGHSRATIFFICNNAAQGILSSFFFKYADTILKKYSSTVATIFTGLASAAFLGHSLTINFLLGISVVFISMHQFFSPLAKVKDDKPADSIELEDTQNDRPSESSFVNMTAGAADDLDARSAVGVSAGDPSPSQQHRGVEGRGTGLPEPRRS

SEQ ID NO: 68873 - protein, 177 aa, Zea mays
  Coding DNA Sequence Number=SeqID_27094
  Gene Ontology: Mol. function=molecular_function; Cellular component =cellular_component; Biological process=meiosis
  Homolog annotation: Hit_ID=Q53PI1; Match level="QueryCoverage=64%, HitCoverage=21%, E-value=2e-45, Identity=77%"; Hit description =Expressed protein
  Pfam annotation: Domain name=WD40; Domain location=68-106; Score =34.0; E_value=5.2e-07; Accession=PF00400.22; Description=WD domain, G-beta repeat
MVSRSRWCTGWREEALGVTEREGIFVVSHADGNLYVYDKCKDGNTDWTFPTVKDQSQVLISHAKSSKSNPIARWHICQGAINDISFSPDGAYLATVGRDGHLRVFDFAKEQLIFGGKSYYGALLCCSWSWLPLSCASCCWRSLWSRCGADAGGATTPLLEEPLLEPPLASPTRLRCR

SEQ ID NO: 68874 - protein, 132 aa, Zea mays
  Coding DNA Sequence Number=SeqID_27095
  Subcellular localization annotation: CTP_CleavageSite=65; ConfidenceScore=5.19e-01
MDLDRFAGDGLFAALRHVPWHINLTAVTHLSSSGGRQGACHGNRPRITAPVTFFSRRRASLSNSPATAVGAYNLPTPPAPLSSVQPVKATRASQSSTKLPQFGFPPNHSRTPNGVGSPWSAYSSSNREFWGI

SEQ ID NO: 68875 - protein, 89 aa, Zea mays
  Coding DNA Sequence Number=SeqID_27096
MKHYSLEDNEPWTKEIVTGGDKSTSSGRTHSRESGHKHKEESASSIKSQRRGDKKKKMKKVVYYETDSLSPSTSGSESSSVTSKRHERK

SEQ ID NO: 68876 - protein, 104 aa, Zea mays
  Coding DNA Sequence Number=SeqID_27097
MKRSSHTKDYNRLIQMASPTLAGTTVPKVAPEQGRECKHECTSGGLRLLSLFARATVMALALAVFLLFATAFALLLLVLILATRAFNHHHNNHYCVPSLDPVPL

SEQ ID NO: 68877 - protein, 98 aa, Zea mays
  Coding DNA Sequence Number=SeqID_27098
MGIRGFGREANFRREIAAPPITNVQLAGLFRCGAHPRQPRARNRCLAMAYEHAHGGGRTTHDDEQVLDAPIREGEKGGKSTVRFIHRRRSPSGSRRDF

SEQ ID NO: 68878 - protein, 88 aa, Zea mays
  Coding DNA Sequence Number=SeqID_27099
MGIRGFGREANFRREIAAPPITNVQLAGLFRCGAHPRQPRARNRCLAMAYKHAHGGGRTAHDDEQVLDAPIRAGEKGGKSMVRFIHRR

SEQ ID NO: 68879 - protein, 324 aa, Zea mays
  Coding DNA Sequence Number=SeqID_27100
  Gene Ontology: Mol. function=nucleic acid binding; Cellular component= intracellular; Biological process=protein transport
  Homolog annotation: Hit_ID=Q1SDW9; Match level="QueryCoverage=99%, HitCoverage=74%, E-value=3e-68, Identity=44%"; Hit description=PUG; Zinc finger, C2H2-type; UBA-like
  Pfam annotation: Domain name=UBA; Domain location=6-46; Score=44.7; E_ value=3.1e-10; Accession=PF00627.21; Description=UBATS-N domain
MAVPQVDKKMLGELEAMGFPTARSVRALHFSGNSNLESAVNWLLEHESDPDIDRLPLIPREISIECGDTSDEVRNDVEGMRDTVQEQKPKEHTETGRQNETSQLEREPNADGQEEEDRKRILALYKQKRDEEGRARGRIRSQLQEDQRERIRAAKDLMEAKRSLEENQRKRVMESRVADQEEEKRARERIRQRIADDKVKPAGRAVVASEQLRDCLRTVKKNHRDDPAAVARAYQVLLKIVGNVAKNPGEEKFRRIRLSNPVFKDRVGSVRGGVEFLELCGFRRFSGIGYLVMPRDKVDVALLTAAGVEIASALENPYFGLLSK

SEQ ID NO: 68880 - protein, 95 aa, Zea mays
  Coding DNA Sequence Number=SeqID_27101
MDQMRLPPEDALKPPDRRRPSEEDVLRPVVRMENPARTSKEPPLLCHWEATDTTPLDRGVTIVASPDRGAVAPHASGSCRFVHQGGDIKNRTLVV

SEQ ID NO: 68881 - protein, 451 aa, Zea mays
  Coding DNA Sequence Number=SeqID_27102
  Gene Ontology: Mol. function=sequence-specific DNA binding; Cellular component=nucleus; Biological process=regulation of transcription
  Homolog annotation: Hit_ID=Q5IY47; Match level="QueryCoverage=93%, HitCoverage=88%, E-value=3e-69, Identity=41%"; Hit description=DNA binding protein WRKY2
  Pfam annotation: Domain name=WRKY; Domain location=263-321; Score =140.7; E_value=3.9e-39; Accession=PF03106.6; Description=WRKY DNA -binding domain
  Subcellular localization annotation: CTP_CleavageSite=38; ConfidenceScore=5.15e-01
MSARPPPPPRPRLALPPRSTAESLFTGAGDASPGPLTLASALFPSDADGGGGPGGASSSAAGAATFTQLLTGSLAPPPQQQQHEAQTGGGGVARAGPALSVAPPASSFAGASLFTVPPGPQPLRFARLPWAALLAGHGAKNSFLDVACGSWLISFGELILFVALLATNIILKKGGFGMSHQQALDQVTAQATHSPLRMFDHLEQPSFSTAATTSGALHHMNSAASMAGISDMTMATANNENPSFQSAEASQRYQVNAPVDKPADDGYNWRKYGQKVVKGSDCPRSYYKCTHPNCPVKKKVEHAEDGQISEIIYKGKHNHQRPPNKRAKDGNSSAFDQNEQSNDTTSGLSGAKRDQDNIYGMSEQAYGLSDGDDMDDGESRPHEVDDADNESKRRNIQISSQRTLSESKIIVQTTSEVDLLDDGYRWRKYGQKVVKGNSHPRYVWNVRGRQH

SEQ ID NO: 68882 - protein, 102 aa, Zea mays
  Coding DNA Sequence Number=SeqID_27103
  Gene Ontology: Mol. function=sequence-specific DNA binding; Cellular component=nucleus; Biological process=regulation of transcription
  Homolog annotation: Hit_ID=Q9ZPL6; Match level="QueryCoverage=87%, HitCoverage=17%, E-value=2e-19, Identity=51%"; Hit description=DNA -binding protein 2
  Pfam annotation: Domain name=WRKY; Domain location=7-51; Score=59.3; E_value=1.3e-14; Accession=PF03106.6; Description=WRKY DNA -binding domain
MECIPPKVPCSTRSYYKCTFAGCNVRKHIERASSDPRAVITTYEGKHDHEPPVGRGNNQNAGIPQQKEGQNNISSNQASLSRPDFSNANQMPIGILQFKSEQ

SEQ ID NO: 68883 - protein, 146 aa, Zea mays
  Coding DNA Sequence Number=SeqID_27104
  Gene Ontology: Mol. function=RNA-directed DNA polymerase activity; Cellular component=chromatin; Biological process=chromatin assembly or disassembly
  Homolog annotation: Hit_ID=Q5R1K7; Match level="QueryCoverage=98%, HitCoverage=46%, E-value=4e-57, Identity=61%"; Hit description =Integrase core domain, putative
  Pfam annotation: Domain name=rve; Domain location=4-137; Score=38.9; E_value=1.7e-08; Accession=PF00665.16; Description=Integrase core domain
MYQDLKKRFWWYSMKREIAEYGAICDNCQIIKVEHQRPAVCLHGVPKKIVSNRGTQFTSHFWQQLQEALGTHLKFSSAYHPQTDGQNERTNQILEDMLRACALQDKSGWDKRLPYAKFFNNNSYQASLKMSPFQALYGWNCRTPLH

SEQ ID NO: 68884 - protein, 444 aa, Zea mays
  Coding DNA Sequence Number=SeqID_27105
  Gene Ontology: Mol. function=monooxygenase activity; Cellular component=integral to membrane; Biological process=electron transport
  Homolog annotation: Hit_ID=Q6ZII0; Match level="QueryCoverage=92%, HitCoverage=87%, E-value=1e-109, Identity=47%"; Hit description =Putative cytochrome P450
  Pfam annotation: Domain name=p450; Domain location=40-426; Score =146.4; E_value=7.7e-41; Accession=PF00067.12; Description=Cytochrome P450
MDHSVYYCLVALLPLVYFLLKSSWKKAPFGSGSRHGLKLPPGPWQLPVIGSIHHLRGSLVHHALRDLSLRHGPLMFLKLGEVPVVVASTPEAAKEVMKTHDAIFSTRPLSSTIRTVSKDGLGIVWAPYGDHWRQLRKICTMQLLGARRVQSLRPAREEEAFRLVRAVMSSSTAAGGAAPPPLVDLGKLAAVYVAEASLRAILGRRFKVEDRDTLLRYVDDGVRLAGGFTPRDLFPSSWLVRALTHRAVREVDAYRDSLFAFMDVVDLIGGGIETATTTLQWAMAELMRNPGIMAKAQAEVRGLFMGQTKVTEDRLGELPYLQLVIKETLRLHVPGPLLIPRECQEQCRILGYDVPRGAMVLVNAWAIARSPDHWEEPDAFVPERFVGDARDFKGNDFGVHPVWRREEDLPWGCRSGWPVANVELGLASFALLLRLESPGGRPSC

SEQ ID NO: 68885 - protein, 101 aa, Zea mays
  Coding DNA Sequence Number=SeqID_27106
MTHPRETSMGDEVPIRLRPTSVGDAVSIRLRPTLMGDAVPILPEANLGGRHNLSSPEAICGRETQSRLARAHPRMGNTFRVRPSAITTRLSASPTRRAHLR

SEQ ID NO: 68886 - protein, 32 aa, Zea mays
  Coding DNA Sequence Number=SeqID_27107
MALLSWKAPVLLLPGRYTFPPGVWLLAPSSRL

SEQ ID NO: 68887 - protein, 445 aa, Zea mays
  Coding DNA Sequence Number=SeqID_27108
  Gene Ontology: Mol. function=zinc ion binding
  Subcellular localization annotation: CTP_CleavageSite=43; ConfidenceScore=5.15e-01
MGCTGTQTQQQRLRLRPPRGRGSSFVFVLRALTLILLILLAVFAQPASSRRPLPLVDDHHNNGVVKAAAAAAATDVILLLPPLHADAEKAMPTTLLNSFKASSRVRHQAMPRRPGAHIILGLKALVQLLNFPYDPDRVASADEAVASELDSVAALQCLCSSRRGIGPLVDDRWSLVQRLEAEARGRDADIAALGRELRRLQHDNARLSRRVVRSRNDDERRRTRLLLSVPKELATPAALVSRFVAASRSVGEFAGLLHGAGTCASSSDDAVAEQARSWRRYAIEAHLWRAMLLAGTGGGDAGSSFHGIMKPRDALDALMQFPRSGLSAFCRAAYLAAVQPEAEAAACRNLDHRAFVSRGGHPRTRLYRAFAAAARMFYASRGSLYRAEFMESVPALGAEEDRRVETGEEKLSVAFTVTPGVKVGDTVVPCRVLLCRRREGFVRIR

SEQ ID NO: 68888 - protein, 64 aa, Zea mays
  Coding DNA Sequence Number=SeqID_27109
  Subcellular localization annotation: CTP_CleavageSite=34; ConfidenceScore=5.14e-01
MELPNVLGVPPRPCHTHRTMMRLQGHGVRRPATRCGTTAMPRHRFIPISNSKFKFDSKFKVSKI

SEQ ID NO: 68889 - protein, 73 aa, Zea mays
  Coding DNA Sequence Number=SeqID_27110
MADEDADLGDGGEASTLHHIATSSCKESSCSSFSVIRKMLLGRVCTLASLRFRIKSIIEVNIFRGVLDIILHI

SEQ ID NO: 68890 - protein, 642 aa, Zea mays
  Coding DNA Sequence Number=SeqID_27111
  Gene Ontology: Mol. function=protein serine/threonine kinase activity; Cellular component=cytoplasm; Biological process=protein amino acid phosphorylation
  Homolog annotation: Hit_ID=O24180; Match level="QueryCoverage=68%, HitCoverage=100%, E-value=1e-174, Identity=70%"; Hit description =Protein kinase
  Pfam annotation: Domain name=NAF; Domain location=394-452; Score =98.4; E_value=2.1e-26; Accession=PF03822.5; Description=NAF domain
  Pfam annotation: Domain name=Pkinase; Domain location=96-351; Score =315.7; E_value=8.1e-92; Accession=PF00069.15; Description=Protein kinase domain
  Pfam annotation: Domain name=Pkinase_Tyr; Domain location=96-349; Score=107.5; E_value=3.8e-29; Accession=PF07714.7; Description =Protein tyrosine kinase
  Pfam module annotation: Pfam domain module=NAF::Pkinase::Pkinase_Tyr; Domain location=394-452::96-351::96-349
MIAAASACGDTMPLASPYMYIKSPNGRHGKRDRRDIVVIHTASQYLNSAKPSSAKTQAIGRRPKEQVQRNEASASSSSRRKIKDMKTRGKTLTERYEMGKLLGKGAFGKVHYARDLESNQGVAIKIMDKDRVLKAGLSEQVKREITTMRLVEHKNIVRLHEVMATRNKIYIIMEYAKGGELLDKVKRSGRLTEADTHRYFQQLIGALDHCHSRGVYHRDLKRENLLLDENGDLKVSDFGLSAFSESRRTDGLLHTVCGTPVYIAPEVIKKTGYDGAKSDIWSCGVVLFVLAAGYLPFQGPNMMEIYRKIHDSDFRCPSWFSHKLKRLLYKILNPNPSMRPSIQEIKESTWFRKGPREISAVKEKVLSENATATNAAPVLAARRKEIAHEDKTLVATKLNAFEIIAFSAGLDLSGLFIKECRKETRFTSDKPALAIISKLEDVAKALNLRIRKKDNNTVIIQGRKHGGNGVLQFDTQIFEITPSCHLVQMKQTSGDLLEYQKLLEEGIRPGLKDVVWAWHGDDLQQKKRKPRKNTTKNWIPKELRTATSPNIEAANEEEAPSGELVTRAPIVVAADEDEAPIVEAANDEAPNVVAANEDEAPIVVAANEDEHMTATSPPRSVKWVVKKITPRKKLKNRADHRQ

SEQ ID NO: 68891 - protein, 201 aa, Zea mays
  Coding DNA Sequence Number=SeqID_27112
MSMLNLRRLVKKLRRVVIREFIRACHVGVLDNDHVGFAIHSVIMQMSVDGFTVEATPTSNPYPPDYCPVHGYAACVLRDAGILENTIISTLRSMAVASTTLVEERPRWRPPTPALPGFGRRPTMAARTGCPPIYTNAVVDSPPPSALLMSSPALLPQRRHVGEAAARRPGLRPIKDEADLPNVSHDSGQFSSDEEKEDSIS

SEQ ID NO: 68892 - protein, 109 aa, Zea mays
  Coding DNA Sequence Number=SeqID_27113
  Homolog annotation: Hit_ID=Q2RAK5; Match level="QueryCoverage=36%, HitCoverage=10%, E-value=2e-08, Identity=85%"; Hit description =Expressed protein
MAGLAVAAAALLLLWAGGVSIAAAGSGGEEECDLFDGDWVWAGGGGGVPRRRLPMRRERPPRGILHQVASSSLPSLSSSSLPSSPVRHLQNVEIGYIIVVDKIDFYRSL

SEQ ID NO: 68893 - protein, 225 aa, Zea mays
  Coding DNA Sequence Number=SeqID_27114
  Gene Ontology: Mol. function=sequence-specific DNA binding; Cellular component=nucleus; Biological process=regulation of transcription
  Homolog annotation: Hit_ID=Q2L3S4; Match level="QueryCoverage=59%, HitCoverage=20%, E-value=4e-17, Identity=42%"; Hit description=WRKY DNA binding protein
MGWKDPNPGQESSMVFQSRAVRPDTVEGHSNEDVEAGFEKHGLSAALNSPQHEGRSLPLTPQFGQNSSPGSSLAERMQARAGFKVPKLNMPFSTVAGDDSSVPGAPSPYLTIPPGLSPATLLESPVFISNALGQASPTTGKLFLFGSTNDNDPIRPGGPPVGDGTDAFSFKPLDLKSSHYTAEVMKVIADNICSVLMIKVSRNLESICINMRFAVMFVSETLLQV

SEQ ID NO: 68894 - protein, 70 aa, Zea mays
  Coding DNA Sequence Number=SeqID_27115
MAATKEADHCIKYLDCSVLQVHLCYCIQLMLLVELWRWLDFVKLAFYTDTSLACIELVITVIRRNVKQNL

SEQ ID NO: 68895 - protein, 79 aa, Zea mays
  Coding DNA Sequence Number=SeqID_27116
MGDGEEDIAGMAGAQMVWIRQAVALVAGNLAARDERDQNPRANQFASSGDQKPPEAEPNSGRIKGLRGPVYKGQTSFRR

SEQ ID NO: 68896 - protein, 98 aa, Zea mays
  Coding DNA Sequence Number=SeqID_27117
  Subcellular localization annotation: CTP_CleavageSite=38; ConfidenceScore=5.69e-01
MPAHAPSSFLRAMPVPHARPRLISHSLTLSRTVPTPPVAARDPRPCSQPSRPPETMPGLPELRPKGTQAFFSEYLSVRGVTTRDNSATMRVNGTPLAN

SEQ ID NO: 68897 - protein, 173 aa, Zea mays
  Coding DNA Sequence Number=SeqID_27118
MADRLPVIVPEPPLASSTPIFIFLAVPVLHLQTAPAPRGPALQRDCTAVVPSDGGVLWRDSKIDDCRNVLAFDSLGATNRIIPREDAPRVPTAMFAATWPPIHRPDPHCQRAHRRRLRLTAQFGPGVRHPAPLLGGTSGGAVLVLAAAVIAAKPEEKAEEEQEFPLEVISNAG

SEQ ID NO: 68898 - protein, 110 aa, Zea mays
  Coding DNA Sequence Number=SeqID_27119
MAEPRQSPATARNPGRLGGPLSAILHVDDPHTPMNNPDTTLAPNRRYRPVSMVADLSLIADTALAATAVCFRGNELMREDSRGEERVTGAPIYPPGSRFEERGRSSTSRP

SEQ ID NO: 68899 - protein, 340 aa, Zea mays
  Coding DNA Sequence Number=SeqID_27120
  Subcellular localization annotation: CTP_CleavageSite=34; ConfidenceScore=5.11e-01
MEPLPIPHPPAPPPALTSALAHLRSLLSAASSALAALPSPLQPHPITPIACIPSPQSTTTKPPLPPPVTAINLPLPAAPAPYSDCPAVVRLRPSPTSTAISLPAFLAAVCADFSSSTTGPSPSHPPRILPSELSLLRRELDSWATGGHHLPGSYSYAVARVGASFCSDVMPRWEAELRQWVLENSPRYGVKVNVTDADHILVLLCLLLKAMALEARYLLEGMQNVDNEGLGFDPRAMRFECPRLVEGVSWLGAQLGVLYGESNGKLFMLASVKEAVLQMAYCLALCAGDGAASVGGSDAGDVVAGPVFLSQVAASIVALHERFYLEKTKALQAQRPSKYQ

SEQ ID NO: 68900 - protein, 116 aa, Zea mays
  Coding DNA Sequence Number=SeqID_27121
MATAALCVTDAGDFIGSWIVKILLARGYAVRAPPATQIARGGRGQDMEDLSGQREVDLGGAVCELRVSAGAHERRILDCELAEGRGGEADRGRRGERTAMASGWFIDRGVGGGIAR

SEQ ID NO: 68901 - protein, 102 aa, Zea mays
  Coding DNA Sequence Number=SeqID_27122
FALFTPPLGDYHSAPVEARTPAEGPELKKATEQPKALSLLRERRMASVLDAVMESVKVPTPASAPDTEGKALKKSGGAGMAQDISEAGPSVLAEAYSSGLLL

SEQ ID NO: 68902 - protein, 148 aa, Zea mays
  Coding DNA Sequence Number=SeqID_27123
ESARAKTKEELLAEERDYKRRRTSYRGKKVNRNPTEILRDIIDEHMEEIRQAGGIGCLVEAPADIAWNELKGNSHSGAYHGSYDFASSSSHDKTALASRSSNCDNSCAESLGRFSSRSSDTRDSYNNSGCETHRNHYQYISEKEMGGI

SEQ ID NO: 68903 - protein, 334 aa, Zea mays
  Coding DNA Sequence Number=SeqID_27124
  Pfam annotation: Domain name=FBD; Domain location=228-277; Score =11.2; E_value=0.016; Accession=PF08387.1; Description=FBD
  Pfam annotation: Domain name=LRR_2; Domain location=87-111; Score =19.5; E_value=0.012; Accession=PF07723.3; Description=Leucine Rich Repeat
  Pfam module annotation: Pfam domain module=FBD::LRR_2; Domain location=228-277::87-111
  Subcellular localization annotation: CTP_CleavageSite=81; ConfidenceScore=5.97e-01
MGSRASSTALNSGGLPSLSSTPSSHSTSSPTAPSDSTSPSAASSALLSSNSSPLAAFTQPARNSLERLALDRFSLRAIPLPAVGLAGLRSLSLSHVDVTDEALRGLVANCPALERLSLKRCSRLAMVSVASETLRVLELVGCQALKQLCVDAPALESWLDPFKDMPNLEELQLLMNYEGYCLEAVSAFFKLIPLPVLQRLFVRLHIDHKREGEGSSSAAVWSVENDDSEDMAPKEEIVLDQLTFVKFVNFSGTWCQLQLLSFFLDKSPVLHQLVLVTPEGEGALGDDRLKVIHERVAALEKASSEASITVCRPKEDDTPNHPHTRYFHEEYETM

SEQ ID NO: 68904 - protein, 84 aa, Zea mays
  Coding DNA Sequence Number=SeqID_27125
  Subcellular localization annotation: CTP_CleavageSite=55; ConfidenceScore=5.34e-01
MTQSVSPIVALGKGNNSSKVRSTLISRLNSLNVFLFHVPISGHQGLKDDMPGRLVAPAPGVGGHDGVLQCVPSSSGVFFATSFL

SEQ ID NO: 68905 - protein, 33 aa, Zea mays
  Coding DNA Sequence Number=SeqID_27126
MGDPVSGRMRGKVSAWLHSGLKVSLTGSRDIEG

SEQ ID NO: 68906 - protein, 51 aa, Zea mays
  Coding DNA Sequence Number=SeqID_27127
MTHCGVVKALRHVAQGRKVANSGEPIQSGRDSSEVQSSKVNPVLWFSDLVT

SEQ ID NO: 68907 - protein, 106 aa, Zea mays
  Coding DNA Sequence Number=SeqID_27128
  Gene Ontology: Mol. function=Rab GDP-dissociation inhibitor activity; Cellular component=cytoplasm; Biological process=regulation of GTPase activity
  Homolog annotation: Hit_ID=O22470; Match level="QueryCoverage=53%, HitCoverage=17%, E-value=5e-23, Identity=73%"; Hit description=GDP dissociation inhibitor protein OsGDI1
MDEEYDVIVLGTGLKECILSGLLSVDGLKLWKRFRGEDKPPAHLGASRDYNVDMVPKSSEPTTKLRCYKDIKLDFAMLQRMVHVDPSSLYASGGLKLALTFSPPFH

SEQ ID NO: 68908 - protein, 107 aa, Zea mays
  Coding DNA Sequence Number=SeqID_27129
MSKDKKGQGLPRRSGDKRKREPSPPSEDFGDSEYSEEEVSSESEGSPNDKGGGNDGDSGDRSDDGGKGGSSSNKFIHASNTSGIFRGNRRAIADDTSVLEVTPSHAR

SEQ ID NO: 68909 - protein, 75 aa, Zea mays
  Coding DNA Sequence Number=SeqID_27130
MAICILQYFALLEEGLSIITKFRCPLNSIPICQNNAPQYLVHYRAVYNIYAQYPQMMDKNNAYGLKMENLLFLND

SEQ ID NO: 68910 - protein, 165 aa, Zea mays
  Coding DNA Sequence Number=SeqID_27131
  Subcellular localization annotation: CTP_CleavageSite=51; ConfidenceScore=5.07e-01
MGQVKDFGMSFSQGGMSTLLSQTSSDLQESLTTTNTALEVADGKVANLRVRLEEDGVIDCDSMDFGDSEFSEEQFSSEGEESPPLRAGLEGTDDSNEDDSEEEFKEEGDGGEDRSGYDSGDESDNSGNGGGRGDGGDDSGYDDDKGGNGKGDGHGNGRGGRVPSR

SEQ ID NO: 68911 - protein, 246 aa, Zea mays
  Coding DNA Sequence Number=SeqID_27132
  Gene Ontology: Mol. function=hydrolase activity, acting on glycosyl bonds; Cellular component=cellular_component; Biological process =carbohydrate metabolic process
  Homolog annotation: Hit_ID=P00693; Match level="QueryCoverage=91%, HitCoverage=51%, E-value=1e-111, Identity=82%"; Hit description =Alpha-amylase type A isozyme precursor
  Pfam annotation: Domain name=Alpha-amyl_C2; Domain location=181-241; Score=141.4; E_value=2.5e-39; Accession=PF07821.3; Description=Alpha- amylase C-terminal beta-sheet do
  Pfam annotation: Domain name=Alpha-amylase; Domain location=3-180; Score=-104.8; E_value=0.05; Accession=PF00128.14; Description=Alpha amylase, catalytic domain
  Pfam module annotation: Pfam domain module=Alpha-amyl_C2::Alpha -amylase; Domain location=181-241::3-180
MVGPLRARKLYRFPATSSGKGYSPEVAKVYVDATAPTFAVAEVWNSMAYDGDNKPEYDQDPHRQALVDWVDRVGGAASPATVFDFTTKGILNAAVEGELWRLIDPQGKAPGVIGWWPAKAVTFVDNHDTGSTQAMWPFPSDKVMQGYAYILTHPGNPCIFYDHFFDWGFKDEIAALVAVRKRNGITPTSELTILEHDGDSYVAEIDGKVIVKIGSRYDVGHLIPAGFEVAAHGNDYAVWEKAGAEQ

SEQ ID NO: 68912 - protein, 46 aa, Zea mays
  Coding DNA Sequence Number=SeqID_27133
MSTCMIAKSSELALGPMDVLMIRNLGEDCQVLGKGQDVKEEKIGRS

SEQ ID NO: 68913 - protein, 101 aa, Zea mays
  Coding DNA Sequence Number=SeqID_27134
MQEGCKAYLLDDSAASLLMRCHTCSKGVLDFFPELPPCVVNMQLRPAGGSLYSTSLITASAHTPLLAALPGVRACRHPVLLSTPESLPHHQDIVVAPSYVI

SEQ ID NO: 68914 - protein, 83 aa, Zea mays
  Coding DNA Sequence Number=SeqID_27135
  Homolog annotation: Hit_ID=Q69LW6; Match level="QueryCoverage=58%, HitCoverage=29%, E-value=8e-13, Identity=75%"; Hit description =Ribosomal protein-like
METNREFQKSSMSKIFKTKGVSEVFYVEGLQDEGESTTIESLRRFIGAVVEVFGHEYLRSPNEDDIARLPATEESRGFPSMLG

SEQ ID NO: 68915 - protein, 181 aa, Zea mays
  Coding DNA Sequence Number=SeqID_27136
  Gene Ontology: Mol. function=protein serine/threonine kinase activity; Cellular component=membrane; Biological process=protein amino acid phosphorylation
  Homolog annotation: Hit_ID=Q2R1E0; Match level="QueryCoverage=68%, HitCoverage=14%, E-value=2e-23, Identity=47%"; Hit description =Jacalin-like lectin domain containing protein
  Pfam annotation: Domain name=Pkinase_Tyr; Domain location=39-181; Score=-118.1; E_value=3.2e-05; Accession=PF07714.7; Description =Protein tyrosine kinase
MDIIYQDSSCLALEQALHDEGVGPIDLPFMLLRAITKDFSDTQLIGRGGFGEVYKGVLPNGMVVAVKKLLDKIDVLEANFQSEVACLIEVKHRNIVRCLGYSSETQHVRAPYEGRFVWADLRQRLFCFEYLSKGSLADYLTGNIDQSPQTSHLLHIANVLSTTIYTFSWLVSVLRLPHPTF

SEQ ID NO: 68916 - protein, 658 aa, Zea mays
  Coding DNA Sequence Number=SeqID_27137
  Gene Ontology: Mol. function=signal transducer activity; Cellular component=membrane; Biological process=response to light stimulus
  Homolog annotation: Hit_ID=Q9C9Z0; Match level="QueryCoverage=89%, HitCoverage=91%, E-value=1e-144, Identity=49%"; Hit description =Putative non-phototropic hypocotyl; 42053-44089
  Pfam annotation: Domain name=BTB; Domain location=36-143; Score=0.2; E_value=0.0039; Accession=PF00651.21; Description=BTBPOZ domain
  Pfam annotation: Domain name=NPH3; Domain location=215-480; Score =357.5; E_value=2.2e-104; Accession=PF03000.5; Description=NPH3 family
  Pfam module annotation: Pfam domain module=BTB::NPH3; Domain location= 36-143::215-480
  Subcellular localization annotation: CTP_CleavageSite=26; ConfidenceScore=5.45e-01
MGMGSDAAALFPFSTSTTATSPRLCGATAVSHRRIFSDVAEDVTVSVDGQSFLLHKFPLVSRCGRIRKMLADSSSSNSKDADGHQKLELANVPGGAYAFELAAKFCYGTNFEITAANVAQLRCVAEYLEMTEDQHADNLVARAEAYLAEVALRSLDGALEVLRRCDDGGPVAEQVGLVARCVDAVAASAGKEQLVSGLAAHLETCDCAAAARCREDWWVEDLSLLRIDHYRRVIAAMRRSGVRPETIGASVAHYAQTWLKGVDVEQRRRQRACWDGSGPFVGDGQRMVVETLVDVLATENVAAVTLSFLFGMLRVAVEVDASLDCRIELERRVGMRLEMAALDDLLVPAAQTSDSMFDVDTVHRILLSFLQRIDEDSSGDLSSPPCGYDSDGLKSPSHGSVLKVGRLMDGYLAEVAPDPYLKLQKFMALIELLPDYARIVDDGLYRAIDIYLKAHPSLTESECKRLCKLIDCQKLSQDASSHAAQNDRLPIQMVVRVLYFEQLRLKSSFSGGGSGCVGLGGADGSFSQRFVCSSSGVPSSCVSPQRDNYASLRRENRELKLEISRMRVRLTELEREQGLMKQQGRMRGGDGGGGGGRGGGGEHGRAFLASLSRGIGRITMFGGGPAAADRRRKKSGGRSSQCSDGKARRRQKASFAYD

SEQ ID NO: 68917 - protein, 633 aa, Zea mays
  Coding DNA Sequence Number=SeqID_27138
  Gene Ontology: Mol. function=protein binding; Cellular component =membrane; Biological process=defense response
  Homolog annotation: Hit_ID=Q84YF1; Match level="QueryCoverage=99%, HitCoverage=55%, E-value=0.0, Identity=57%"; Hit description =Putative Xa1-like protein
MSLPNTVSRFYHLKFLDLEQWGSDRSLPKDISRLENLCHFVVSEKIDSNVPEVGKMIFLQELKEFHVNKESVGFELQELGKLDELGGKLNIYGLENVRTKKEAKEAKLMSKRNLVELGLIWNMKQESTEDDILDSIQPHSNVRSLFIVNHGGTLGPSWLCSSDTIYMKNLETLHLESVSWANLPPIGQFYHLRELRLSKIVGISQIGPGFFDSTTEKSVSHLKAVEFNDMPELVEWVGGANWNLFSGIERIKCTNCPRLTGLLLCLPPLPHTSKVSRIHMGDFSYEGRTMLKINNPSRFAFENLGDLETLVAWDALPLSFMDLKKLHSLRRINVTRCEETFLRGLDDGVVLPTVQSLYLGRFTPTKNYLSKLFKCFPALSSLHVMASPSDEDNEEVVLHFPPSSSLRDVNFTGCKNLILPMEEGAGFCGLSSLESVTIHKCDRNITMDGFNPHITSSLKYLCVYNERNDGTDPYSVAADLLVAVVRTKTMPDVSFKLVGLYVDNISGVLVAPICKLLSATLETLNFSNDWRTENFTKEQDEALQLLTSLQFLEFYNCRALQSLPQGLHRLPSLHGITIYGPQNIRSLPKEGLPDSLRILRITNCCAEIYEACQQLKGTRPDINVLASKARVQN

SEQ ID NO: 68918 - protein, 109 aa, Zea mays
  Coding DNA Sequence Number=SeqID_27139
  Gene Ontology: Mol. function=protein binding; Biological process =apoptosis
  Homolog annotation: Hit_ID=Q84YF1; Match level="QueryCoverage=99%, HitCoverage=9%, E-value=5e-28, Identity=57%"; Hit description =Putative Xa1-like protein
MDGFDPHITFNLKNLRVYNMRHGETELYYVAADLLVDVARTKAMHISSFQLMPLRNLQMLIFFHDWRTENFMEEKDMALQLLMSLQELQFEHYRALQSLPQGLYRLPSL

SEQ ID NO: 68919 - protein, 79 aa, Zea mays
  Coding DNA Sequence Number=SeqID_27140
MAGAEIAHSPLWHLDRVRVLKGSTSKLASPSLSPTAATYLPFVQFAIDTERKNEQATVDSEVQQVEIAEQELIEGKLCP

SEQ ID NO: 68920 - protein, 681 aa, Zea mays
  Coding DNA Sequence Number=SeqID_27141
  Gene Ontology: Mol. function=RNA-directed DNA polymerase activity; Cellular component=nucleus; Biological process=RNA-dependent DNA replication
  Homolog annotation: Hit_ID=Q8S472; Match level="QueryCoverage=99%, HitCoverage=63%, E-value=0.0, Identity=81%"; Hit description =Putative gypsy-type retrotransposon RIRE2
  Pfam annotation: Domain name=Retrotrans_gag; Domain location=170-261; Score=76.9; E_value=6.5e-20; Accession=PF03732.7; Description =Retrotransposon gag protein
MPEPSTTKGQRIQGELKNLLEDAAVRRAKSSASRRQGYPSEHRAATSRFMREASVHTGRTRNTAPAAPGRLDNEHHHRNRRAHLDEKVRRGYHPRRGGRYDSGEDWSPSPKPPGPQAFSRAIRRAPFPTLFRTPTTITKYSGETRPELWLTDYRLACHLGGTDDDNLIICNLPLFLSDTARAWLEHLPPGQISNWDDLVQAFARNFQGTYVRPGNSWDLRSCRQQPRESLRDYIRRFSKQRTELPNVTDSDVIGAFLAGTTCRDLVSKLGRKTPTRASELMDIATKFVSGQEAVEAIFRKDKKPQGRLPEDVPEASTQHGTKKKGKKSQAKRDAADADLVAAAEYKNPRKPLGGANLFDKMLKESCPYHQGPIKHTLKECAMLRRHFHKAGPPVEGGRARDDDKKEDHKAGEFPEVHDCFMIYGGQVANASARHRKQERREVCSVKVVAPVYLDWSDKPITFDQGDHPDRVPGPRKYPLVVDPVIGNVRLTKVLMDGGSSLNIIYTETLGLLQIDLSSVRAGAAPFHGIIPGKRVQPLGQLDLPVCFGTPSNFRRETLTFEVVGFRGTYHVVLGRPCYAKFMAVPNYTYLKLKMSGPNGVITVGPTYRHAYECDVECVEYTEALAESEALIADLESLSKEAPDVKCHVGNFEPAETVKSVPLDPSNNASKQIRIGSELDPK

SEQ ID NO: 68921 - protein, 178 aa, Zea mays
  Coding DNA Sequence Number=SeqID_27142
  Gene Ontology: Mol. function=histone-lysine N-methyltransferase activity; Cellular component=nucleus; Biological process =multicellular organismal development
  Homolog annotation: Hit_ID=Q5W6R0; Match level="QueryCoverage=56%, HitCoverage=51%, E-value=5e-32, Identity=62%"; Hit description =Putative LOB family protein
  Pfam annotation: Domain name=DUF260; Domain location=32-127; Score =193.5; E_value=5e-55; Accession=PF03195.5; Description=Protein of unknown function DUF260
MTRATGLPYRILSPVSMKRTLEVSQVLHQEGRMLRQQCTQECVFAPYFPAEEPHKFAIVHKVFGGSNVFKLLQELPAHQRGDAVSSMVYEANVRTRDPVYGCVGAISVLQQQISQLQMQFSMARAEILTLQQQMDVNDSLPSQNSFDRYGNGDLKPDSPPEILSSEDEVEEVSSPMSP

SEQ ID NO: 68922 - protein, 417 aa, Zea mays
  Coding DNA Sequence Number=SeqID_27143
  Gene Ontology: Mol. function=protein binding; Cellular component =signal recognition particle, endoplasmic reticulum targeting; Biological process=defense response
  Homolog annotation: Hit_ID=Q84YF1; Match level="QueryCoverage=64%, HitCoverage=20%, E-value=2e-99, Identity=70%"; Hit description =Putative Xa1-like protein
  Pfam annotation: Domain name=NB-ARC; Domain location=202-417; Score= -58.8; E_value=1.5e-06; Accession=PF00931.13; Description=NB-ARC domain
MEVALGTAKSLLGHVLNNLPDDWMKSYVSSAELGTNLNMIKEKMRYARALLDVAKGRDDVVAGNPNLLEQLETLGKKADEAEDAVDELHYFMIQDKHDGTRDAAPELGGGLAAQAHHARHAARHTAGNWLSCFSGCCPRPRDDAAATDAMSGDGGHVGKLSFNRVAMSNKIKLLIEELQSNSTPVSDLLKIVSDTSNPQDSSSSTKRSPTSSQITQDKLFGRDAIFQKTIEDIIIAKDSGKTLSVLPIFGLGGIGKTTFTQHLYNHTEFEKHFTVRVWICVSTNFDVLRLTKEILSCLPATENAGDKIANDTTNFDLLQKSIAERLKSKRFLIVLDDIWECSNNEEWEKLVAPFKKNDTTGNMILVTTRFQKIADLVKKETNPVDLHGLDPDEFWKFFQICAFGSIQDVEHGDQELI

SEQ ID NO: 68923 - protein, 879 aa, Zea mays
  Coding DNA Sequence Number=SeqID_27144
  Gene Ontology: Mol. function=nucleoside-triphosphatase activity; Cellular component=membrane; Biological process=transport
  Homolog annotation: Hit_ID=Q53KA2; Match level="QueryCoverage=97%, HitCoverage=81%, E-value=0.0, Identity=72%"; Hit description=ABC transporter-like protein
  Pfam annotation: Domain name=ABC2_membrane; Domain location=633-826; Score=-10.0; E_value=0.0054; Accession=PF01061.14; Description=ABC-2 type transporter
  Pfam annotation: Domain name=ABC_tran; Domain location=308-498; Score= 138.1; E_value=2.4e-38; Accession=PF00005.17; Description=ABC transporter
  Pfam module annotation: Pfam domain module=ABC2_membrane::ABC_tran; Domain location=633-826::308-498
MNQLDSLSRPEPLTAEVAVRDFCPHGLTCMIPCPLGAYCPQSTLNKTTGICDPFYCRKGSILKTKCFHKGSCKPNSTNQDITIFGALLVGALSLVLLIIYNFSGQLLMNREKKQAKSREAAVRHARETAVARERWKTAKDIAKKHAAGLQSSLSRTFSRKRSLRTHESSKGGTGAGLPSTSGDQTTTNEAGGKKEDSHTDMARSTEDNPEKGEGVSVQVGGGEKKKTKGKHAHTQSQIFKYAYGQIEKEKMMEQEAQNLTFSGVISMATDEDIKKRPTVEIAFKDLTLTLKGSKKKLLRSVTGKLMAGRVAAVMGPSGAGKTTFLSAIAGKATGCETTGMILINGKTEPIRAYKRIIGFVPQDDIVHGNLTVQENLWFNARCRLSADMLKADKVLVVERVIESLGLQAVRDSLVGTVEQRGISGGQRKRVNVGLEMVMEPSVLILDEPTSGLDSASSLLLLRALRREALEGVNISMVVHQPSYTLYRMFDDLILLAKGGMTVYHGPVKKVEEYFAGLSIVVPDRVNPPDYYIDILEGIVKPDAKEPVNVKDLPIRWMLHNGYEVPRDMLQSASDSESSLRGERGHASGSDAGQSIAGEVWGNVRDIVGQKKDEYDYNKTSENLSNRRTPGILRQYKYYLGRCGKQRLREARIQGVDYLILGLAGICLGTLAKVSDETFGALGYTYTVIAVSLLCKIGALRSFSLEKIHYWRERASGMSSLAYFLSKDTIDHFNTIIKPIVYLSMFYFFNNPRSSIWENYVVLLALVYCVTGIGYTFAIFFQPSSAQLWSALLPVVLTLIATQQKDTFFANLCYTKWALEAFVIANAQKYSGVWLITRCGSLLNSGYDINDRILCIVVLVANGVIFRCVAFFCMVIFQKD

SEQ ID NO: 68924 - protein, 62 aa, Zea mays
  Coding DNA Sequence Number=SeqID_27145
MHTGQGYHDVNKQGNVKKQAGLPEYEYGFVGSFYSMSIGSCISDSGSPVPSPFKVRKLEISN

SEQ ID NO: 68925 - protein, 106 aa, Zea mays
  Coding DNA Sequence Number=SeqID_27146
MASCEKPVEARGSVATVRREERGEPDVRDPRSSDGCNTTDKCGPPVSESRKIETHPRCEADLWAPPAREGAATRVREQAAWRLSPDGPNEAPEAQLWVGQAICGVG

SEQ ID NO: 68926 - protein, 188 aa, Zea mays
  Coding DNA Sequence Number=SeqID_27147
  Gene Ontology: Mol. function=nucleoside-triphosphatase activity; Cellular component=membrane; Biological process=transport
  Homolog annotation: Hit_ID=Q5Z410; Match level="QueryCoverage=84%, HitCoverage=15%, E-value=7e-73, Identity=77%"; Hit description=ABC transporter-like
  Subcellular localization annotation: CTP_CleavageSite=28; ConfidenceScore=5.45e-01
MASSLLVCLVFLSAAAAAGAVTPRRSLAAQARSGDIASLAAGSPMVAGLMNERLKALTTSFAQQMGREFHYCIKNMDREWNTAFNFSSDPAFLTACMKETDGDLPQRVCTAAEMKFYFESFLEGNGRKNYVRPNKNCNLTSWIDGCEPGWSCSAGKDQEVNLKDAVNIPSRTLDCRGCCAGFFANESS

SEQ ID NO: 68927 - protein, 91 aa, Zea mays
  Coding DNA Sequence Number=SeqID_27148
  Homolog annotation: Hit_ID=Q8W1X6; Match level="QueryCoverage=52%, HitCoverage=28%, E-value=9e-07, Identity=58%"; Hit description =HUELLENLOS-like protein
MGSIVLYIQVQKHLLLGHCKELRGSPLVRFIEAFGTAFSRTTFCVPISEQIRTFIQMRTNLKVVDNSGAKQNQQIPIRETSPKLEENQMYP

SEQ ID NO: 68928 - protein, 202 aa, Zea mays
  Coding DNA Sequence Number=SeqID_27149
MEVKFTGNNGLVKAVHGARRDRGVIGFRRGILLVPGSNSHRGGDDFTPGNTSKVSGLASRFNLLHRRRADVATLLLSLRSAGTVVWIGAVKGVQPYCNPLNLGRARVPPLHDRWVPPVSVNRVRALSLCPPCPHSLSLPSLISPTLALSRALSPMPKPAGDLRPSCQSSKPLGAIPASVFAESSSPVLANPGNPRPPEAALA

SEQ ID NO: 68929 - protein, 315 aa, Zea mays
  Coding DNA Sequence Number=SeqID_27150
MPLSTDPHLDVDQDINSIPRYQLIDNMLDHVSPPGLVALLESLATLLINAQSPRKQIKGKKDDESEDEKKEKKFFKKKDGKQKRFHKRKDGKAYIVGDWLNIESTNSSSSSEEDNEKVATIIVDLSSPPPSPSSTTHLCLMAKGEQKVQNDDTSDVDCGSDSDNEYASPTYDELTDLLKEYTQIIRKSKAKYGKLKDENKSLIAKYDIVVKASDEMKQENKTMSSTNNELKASLKDVKEKYEKLNEANRELNYRLVKIKEDYTKIKVDHDNLLVAYEFLSIDTHKAINPVVKLDVATSCDDLSTDDQSSHHDDLV

SEQ ID NO: 68930 - protein, 77 aa, Zea mays
  Coding DNA Sequence Number=SeqID_27151
MARLGLMVEEHGRGRRSSSTGDEFGRRGPGDGEAPASLKNGHAQLEHMPVDSWLPAQRDPVAGPLFSTLTYESFYRA

SEQ ID NO: 68931 - protein, 198 aa, Zea mays
  Coding DNA Sequence Number=SeqID_27152
  Homolog annotation: Hit_ID=P07951; Match level="QueryCoverage=84%, HitCoverage=63%, E-value=9e-08, Identity=26%"; Hit description =Tropomyosin beta chain
MAVEEEQNALQSELSTLENTIKNIKDDVSRAESRAQNAEIRCMELTVPNIELNGELNALKSEKSDKASLLEKKITESNTQLEHGKAAVDAIVEQQGMLKCTMSDMEHIIEDLKGKVSKTETRAECAESKCTLLTDTNLELSEELAFLRGRVESLENSLHEANHAKVSTAKDIVVKTKIITDLVRKLALEREQLHLQVL

SEQ ID NO: 68932 - protein, 61 aa, Zea mays
  Coding DNA Sequence Number=SeqID_27153
MTLSWATRRSAPQAHQRGGRWAGRRDDAVVGCGAQDNPRVTDVGDDDEVPCLTVDSVVEPF

SEQ ID NO: 68933 - protein, 124 aa, Zea mays
  Coding DNA Sequence Number=SeqID_27154
  Subcellular localization annotation: CTP_CleavageSite=22; ConfidenceScore=5.23e-01
MQAACNHAKWTHFSNSRHTSMEAQAHASRNWRAGSNRRRFAFAETTAPKKGPGKGDTPKGILPHEGTRLRASLLIRGSKAGPPKGSTAASDRVGPTPTTCQRFEGRPPEGFHGRLRLLGLHAHY

SEQ ID NO: 68934 - protein, 461 aa, Zea mays
  Coding DNA Sequence Number=SeqID_27155
  Gene Ontology: Mol. function=nucleic acid binding; Cellular component= intracellular; Biological process=DNA integration
  Homolog annotation: Hit_ID=Q7XBC6; Match level="QueryCoverage=90%, HitCoverage=23%, E-value=1e-165, Identity=72%"; Hit description =Putative copia-type pol polyprotein
  Pfam annotation: Domain name=zf-CCHC; Domain location=333-350; Score =30.3; E_value=6.6e-06; Accession=PF00098.13; Description=Zinc knuckle
MSGDHAKKEMETGEKPTTSQGSTSSEASRTKRKEKKKDSSKGKEKRSSSHHKEKKEKSSSHKPHQSGDKKKRMSKVVYYETDSSSASTSGSDAASVTSKRQERKKYRDENYDEDEVAQIEHFNSQATTILLASLSREEYNKVQGLKNAKEIWDLLKTAHEGDELTKITKRETIEGELGRFRLRQGEEPQDMYNQLKTLVNQVRNLGSKKWDDHEVVKVILRSLIFLNPTQVQLIRGNPRYTLMTPEEVIGNFVSFECMIKGSKKINELDDPSTSEAQPVAFKATEEKKEESTPSRQPIDASKLNNEEMALIIKSFRQILKQRKGKDYKSRSKKVCYKCGKPGHFIAKCPLSSDSDRDNDKKGKRREKKRYHKKRGGDAHVCREWDSDESSTDSSDDEDAANIAVTKGLLFPNVGHKCLMAKDGKRKKVKSKSSTRYESSSDDNASDEEDNLRILFANLNME

SEQ ID NO: 68935 - protein, 127 aa, Zea mays
  Coding DNA Sequence Number=SeqID_27156
MDALGALAARQGPTARHGCERAGHKPPRRLAARRLATPGRRDADWSCWPAAGHYVGGPHRAAATSHARAGGRTRAAPAPRPRPRRSHAAGTTRNGEERKVEGERGEPTTGTETARAASRGGGATLCG

SEQ ID NO: 68936 - protein, 126 aa, Zea mays
  Coding DNA Sequence Number=SeqID_27157
  Subcellular localization annotation: CTP_CleavageSite=46; ConfidenceScore=5.27e-01
MVLVEDRSQLLGVKKGGRPTTNSTVGAGRCATRQCLVRQPHHPTVRVLTVSTVGALSSGGTGQSGAAPDRLNPISLSVVLKQQGLVGEWLILMFVQRWLQPLKVRQNPMWEYAGVEDFDRTPSNPL

SEQ ID NO: 68937 - protein, 85 aa, Zea mays
  Coding DNA Sequence Number=SeqID_27158
MAMSRAKSVRSAGGETRPGYCSARRDPRGCGAPRARHGVLLRYTLVAGSRKRMTLVKWLYMAELIYITSLGLSELGVWSYPLYQY

SEQ ID NO: 68938 - protein, 97 aa, Zea mays
  Coding DNA Sequence Number=SeqID_27159
  Gene Ontology: Mol. function=lipid binding; Biological process=lipid transport
  Homolog annotation: Hit_ID=P19656; Match level="QueryCoverage=64%, HitCoverage=52%, E-value=1e-16, Identity=73%"; Hit description =Nonspecific lipid-transfer protein precursor
  Pfam annotation: Domain name=Tryp_alpha_amyl; Domain location=8-93; Score=63.4; E_value=7.3e-16; Accession=PF00234.12; Description =Protease inhibitorseed storageLTP f
  Subcellular localization annotation: CTP_CleavageSite=59; ConfidenceScore=5.54e-01
MARMQKLAVATAARGGLWCCWRRRRPRRRPSAAGSGVKSLNNAARTTADRRAACNCLKNAAAGVSGLNAGNAASIPSKCGVSIPYTISTSTDCSRVN

SEQ ID NO: 68939 - protein, 201 aa, Zea mays
  Coding DNA Sequence Number=SeqID_27160
VDDEKPDEFEKENGWGSLFMSDPQVLSMHDPQNLPRYIGRQKCDPISTQEFFALRHDWLQLLDGKKTYLRGTADSNYADSNFVTPKPLTVAVLCQESLSYLVLRGARKPITQQKFKACDQENLGKMQGSQAEVTRLMECVARSKVNFCRLEWNKAYFSNPKAFFSSVVSEFEHLVNSVANGLNADELYKCLRRIRHPGVRI

SEQ ID NO: 68940 - protein, 207 aa, Zea mays
  Coding DNA Sequence Number=SeqID_27161
  Gene Ontology: Mol. function=metal ion binding
  Homolog annotation: Hit_ID=Q2QYK7; Match level="QueryCoverage=37%, HitCoverage=42%, E-value=1e-20, Identity=60%"; Hit description=Zinc finger, C3HC4 type family protein, expressed
  Pfam annotation: Domain name=PHD; Domain location=138-183; Score=2.4; E_value=0.032; Accession=PF00628.19; Description=PHD-finger
  Pfam annotation: Domain name=zf-C3HC4; Domain location=139-180; Score= 33.6; E_value=7e-07; Accession=PF00097.15; Description=Zinc finger, C3HC4 type (RING finger)
  Pfam module annotation: Pfam domain module=PHD::zf-C3HC4; Domain location=138-183::139-180
MRVLNDSRPTVAPDASSAPPLLITPTAAAGMVGVVQLQPGAAGGSDAGFDADMVVILAALLCVLVCALGVNSLVHHFVLNCGRTVAAPAPPHAAAAAAPATDSDSTGLKKRELRRIPVVLYEANKQPSASSGTDDDDDCAICLGEFDDGEELRLLPGCHHGFHVQCIDVWLVMHASCPTCRNSLLVHQDRHAGAGDGEAATVAGEEA

SEQ ID NO: 68941 - protein, 190 aa, Zea mays
  Coding DNA Sequence Number=SeqID_27162
  Gene Ontology: Mol. function=translation elongation factor activity; Cellular component=cytoplasm; Biological process=translational elongation
  Homolog annotation: Hit_ID=Q2QYK4; Match level="QueryCoverage=74%, HitCoverage=82%, E-value=1e-64, Identity=68%"; Hit description =Elongation factor P, putative, expressed
  Pfam annotation: Domain name=EFP; Domain location=73-127; Score=87.8; E_value=3.4e-23; Accession=PF01132.10; Description=Elongation factor P (EF-P)
  Pfam annotation: Domain name=Elong-fact-P_C; Domain location=135-189; Score=99.4; E_value=1.1e-26; Accession=PF09285.1; Description =Elongation factor P, C-terminal
  Pfam module annotation: Pfam domain module=EFP::Elong-fact-P_C; Domain location=73-127::135-189
  Subcellular localization annotation: CTP_CleavageSite=59; ConfidenceScore=5.27e-01
MAALRHLAAGPTCHHHHHHGVAAATASLRLHRLPLPFRPLRSRSGSFTRVYAISSNDIRVGTNVELQEPSLSKETKQFTYKDGSQFVFMDLTTFEESRLNEADVGDKQKWLKEGMDCNLLYWNGKIIDFDLPITVRLTVTDTDPGASDSAQGGTKPATLETGAVVTVPSFVNVGDDILVDSRTGQYMNRA

SEQ ID NO: 68942 - protein, 150 aa, Zea mays
  Coding DNA Sequence Number=SeqID_27163
  Subcellular localization annotation: CTP_CleavageSite=26; ConfidenceScore=5.23e-01
MSLGLLCWLSVFVSRVAFNLAFKFLREDGKQRRGNPNPKFLRVFLSLPNTRPTLSFNPSDDVDNASPWPSLILLAEEALAKSSRSRPAGHSRVFLVSSTTTVGSGGGSTGDGRVQLADNLDLDVYVQSKCQTMNEKLMGSKEMHVLINLE

SEQ ID NO: 68943 - protein, 357 aa, Zea mays
  Coding DNA Sequence Number=SeqID_27164
  Gene Ontology: Mol. function=zinc ion binding
ASSRVRHQAMPRRPGAHIILGLKALVQLLNFPYDPDRVASADEAVASELDSVAALQCLCSSRRGIGPLVDDRWSLVQRLEAEARGRDADIAALGRELRRLQHDNARLSRRVVRSRNDDERRRTRLLLSVPKELATPAALVSRFVAASRSVGEFAGLLHGAGTCASSSDDAVAEQARSWRRYAIEAHLWRAMLLAGTGGGDAGSSFHGIMKPRDALDALMQFPRSGLSAFCRAAYLAAVQPEAEAAACRNLDHRAFVSRGGHPRTRLYRAFAAAARSVWALRVLMAGCSESEQSGGGGDGVRMFYASRGSLYRAEFMESVPALGAEEDRRVETGEEKLSVAFTVTPGVKVGDTVVPCR

SEQ ID NO: 68944 - protein, 87 aa, Zea mays
  Coding DNA Sequence Number=SeqID_27165
MVRADRTRDNGQDLQRSKFDGPVELNIKNVGTVELNIKNVGTVELNIKNLRGLHNKFDGTHVLNLKNVGTHVLNPACVCKDCTISST

SEQ ID NO: 68945 - protein, 83 aa, Zea mays
  Coding DNA Sequence Number=SeqID_27166
MSRWIPNHRARLNRAPDDTVCWDTEESVVSVESRIYMRSAEFVGGKQMNPTPWTHMEAREINQSVPPETAQRGPVISAVGKVE

SEQ ID NO: 68946 - protein, 73 aa, Zea mays
  Coding DNA Sequence Number=SeqID_27167
  Gene Ontology: Mol. function=chromatin binding; Cellular component =chromatin; Biological process=chromatin assembly or disassembly
  Homolog annotation: Hit_ID=Q8W1D1; Match level="QueryCoverage=98%, HitCoverage=4%, E-value=6e-24, Identity=73%"; Hit description=Gag-pol
MAYQLELPDHLSDEHNVFHVSQLKKCLRVLEEQLSMEELGVEGDLTYTEYPIKIIDTLTRITRNKVNKMCKVQ

SEQ ID NO: 68947 - protein, 272 aa, Zea mays
  Coding DNA Sequence Number=SeqID_27168
MALGKGSKGKRGKKDQGEKQERPPTPPLEGLQQLQVLGGAVLLQGTGVTIAGFALASIERAGLEGSDDSEEEDFLEGGSSKENSKEDDSKEEEGGSSEDGSGYDGGNEGDSGGGNGGRSRSNDSGNNGHRVKGKCAGHFYYVLVIRCSTHIVLSKHELRVKEKQKGKARVGGHNSRLRQIRKGIAYCSLPGGAPDYLVRPQTEGNQSLPNGTPTAPSYHGAIKGTPRCMEQKTKHPLNILQCLDFASTRSPIRDNGNDKSGSGNAGGKAPPA

SEQ ID NO: 68948 - protein, 117 aa, Zea mays
  Coding DNA Sequence Number=SeqID_27169
  Subcellular localization annotation: CTP_CleavageSite=66; ConfidenceScore=5.06e-01
MAHGPTTLNPAQFSFDSVQPDPWSSDADSLGPAAGLSCLTVHLATTAWTKSVAGDGRFPQLPCPGRCAAGRPMRTHRTIRHGHRLSPYPPAFVVHHSARNLPSPLLPWVDERETSPG

SEQ ID NO: 68949 - protein, 154 aa, Zea mays
  Coding DNA Sequence Number=SeqID_27170
MAGKLDQGTLRERDGDGLGTERCRKEISSVRKNLKDYVRVQGKKKQLGCARFLSRAWEEAKNLLGTAARVRQALDGRMRSWTTMPTTMRRRTPAAGAEVTWLSAASRRRAAIPCWRRLGFAGVLGRARGGGGGRVVVGADAEIRTFDVQLSSMF

SEQ ID NO: 68950 - protein, 328 aa, Zea mays
  Coding DNA Sequence Number=SeqID_27171
MTPYITTHVSSSSRIALGAPHQHGGFIIGDGRCFHSPLNEEYIQEERAFISLYQVICDHTLVGKVDNGVRCAEEAMIDRASVTKGIPGLALCGTTPLCSDGGVLVGVEIVPKQKTAPRLKVIMLLKDAFGQDGIVDRDSMVRAVDLVVSLPPFKGPGDSPQGNQPTPAPIFPLSALGCARLLTGVELCHGQATSPWTATLQCPCAGLCPWPRSPYSPKPPRALPDAPEPLACPPPHLRRSSTTDMGDATTGDQGALSQDGRSSLDVHLKSDGPDLNRSNLIITVRSDSSLTRTAATRLGLSAPLTPGRCPPWLTYQSCAFARVRALAC

SEQ ID NO: 68951 - protein, 87 aa, Zea mays
  Coding DNA Sequence Number=SeqID_27172
MAAAGEIFLPRPVTPQCHSGFFSNAKPRTIILCEPKIFNGQQEMLRKLSQNNSNKRQIKLLMWGLIGAHFRILKSDLAKDQESISNL

SEQ ID NO: 68952 - protein, 326 aa, Zea mays
  Coding DNA Sequence Number=SeqID_27173
  Gene Ontology: Mol. function=protein serine/threonine kinase activity; Cellular component=cytoplasm; Biological process=protein amino acid phosphorylation
  Homolog annotation: Hit_ID=Q336J4; Match level="QueryCoverage=84%, HitCoverage=48%, E-value=1e-136, Identity=86%"; Hit description =Protein kinase-like protein
  Pfam annotation: Domain name=efhand; Domain location=144-172; Score =33.7; E_value=6.5e-07; Accession=PF00036.22; Description=EF hand
  Pfam annotation: Domain name=efhand; Domain location=180-208; Score =23.5; E_value=0.00077; Accession=PF00036.22; Description=EF hand
  Pfam annotation: Domain name=efhand; Domain location=216-244; Score =28.7; E_value=2.1e-05; Accession=PF00036.22; Description=EF hand
  Pfam annotation: Domain name=efhand; Domain location=249-277; Score =31.0; E_value=4.1e-06; Accession=PF00036.22; Description=EF hand
  Pfam module annotation: Pfam domain module=efhand::efhand::efhand::efh and; Domain location=144-172::180-208::216-244::249-277
MANSISSPCHQINPKGLAVGGCDGGGLEWVAAAVDDWVERVETDEGIAQAIIRSNIDFRREPWSKVSENAKDLVRKMLDPSPYCRLTAQQVLEHPWIQNASAAPNIPLGEAVRSRLKQFTVMNKFKKKALLVVAEYLPAEELEAIRELFQLLDTNKDGHLTIEELRKGMRLIGHNVHDTDVDMLMEAADIDGNGTLDCKEFVTVSIHLKKIRSEDHLPKVFSYFDKNGSGYIEIEELKEALSPRGDQKAIEDIILDVDIDRDGKISYEEFELMMKAGVDWRNTSRQYSRAVYNTLSRKMFKDASLKLGSNNGPLAAAAVKEQQDVD

SEQ ID NO: 68953 - protein, 183 aa, Zea mays
  Coding DNA Sequence Number=SeqID_27174
MAHLMLRRHIACQWSGQVARLIRIKCRGRAAQRPYIRLRPRAYVTGNRPRGSIGPPTERGVGAHTAWSGHVSAPDPHLALIRAWVFLVSESWDPSRGSGLCLWRNRFFVLGLTIRRDDGTRLGKEKVADKHNEKEKIPIDDDLKGENSVDLGTKKEDKKKKSVGAEAEPDLDHHCIGFPPYLD

SEQ ID NO: 68954 - protein, 138 aa, Zea mays
  Coding DNA Sequence Number=SeqID_27175
MKDRAHGVIEGHEGASDKLALKEEDTHNDSSKKWWRPHFSCTTRGSVNLAYATLGSIDRPAPYVALDEHQRGHRQLDFPPQADLGWSLGRYKAHLGPSGLHPASGVDYDETFTPSSSSPPFEPFSSLCPLLGLGDPSA

SEQ ID NO: 68955 - protein, 150 aa, Zea mays
  Coding DNA Sequence Number=SeqID_27176
MVKNFGSKTVQIAMNAVVTSHLLVCLYSDAAFENKSPTTLNLVHNLLGWGAPAFTRRIRVSASTLGDLTVGEFVLFVSNLPYGLALPISSFFVLLLEELGLQPQHFMPCFILQAAIIAYPCGMSVGATLLPPAFGGMGVAQRPFRRWKAS

SEQ ID NO: 68956 - protein, 295 aa, Zea mays
  Coding DNA Sequence Number=SeqID_27177
MIASSLRHCSLTGGAGGRRRGGTRRRGAEGGGDTDGVTVELNSEVALPYHWEQCLDIRTAEMLLVKRKACAVMVEWSFLLSSPAPAAFLQPVPRYLHSACTPPPPPLMPLVRTGQVYYINWENGTRTTVDPRTASAFVSSPTPRSSTSRRTRRASTPSSGYTSVSSSVGAADVVTGAWRGVSNDSGYDNDDEQEDGEADDEDEAESSSSTTTSSSSSSSTGSSRGSAVSSTLSSFSPTDESGSGDNGGARLGAGHVLVAAGCRACFMYFMVPKRADVCPKCGSSGLLHLSRNGYA

SEQ ID NO: 68957 - protein, 167 aa, Zea mays
  Coding DNA Sequence Number=SeqID_27178
MPGGFVENGADEAGPLISGRETKRERGRQTSGPRFPASQTDVRDPRGSDRVVKSARVRADDLVPHVGAALLSWAAHAEKTWAAQGERGASGATGSSTTPDLRPRPQPRPREKVSASPDPRPRPQPRPREESHPGPTSASASGEGSRHFSDSHVSTRTGPKALLRQPR

SEQ ID NO: 68958 - protein, 46 aa, Zea mays
  Coding DNA Sequence Number=SeqID_27179
MALLDLPERLQPQVALNLAAIIAYLCGMSMEAMLLPASSSSIRGEG

SEQ ID NO: 68959 - protein, 132 aa, Zea mays
  Coding DNA Sequence Number=SeqID_27180
MEPKVQEQPKLTSAIIGTHRKGKRMANVLKVVLRLAKMASPITPKVTEDVINELKVAASVEASFDINKARSSKTDLITDVVIEKEQVKASKIEEIEVCCEMMVKMGYPKLELRLSVMPKDHLADYLAYNNLK

SEQ ID NO: 68960 - protein, 51 aa, Zea mays
  Coding DNA Sequence Number=SeqID_27181
MGVGGREYHWDFVMPVPPIVMRRRLEQLRIKNEIEFTQCGDTLSGIGYIGT

SEQ ID NO: 68961 - protein, 503 aa, Zea mays
  Coding DNA Sequence Number=SeqID_27182
  Gene Ontology: Mol. function=nucleoside-triphosphatase activity; Cellular component=membrane; Biological process=cell division
  Homolog annotation: Hit_ID=Q6Z7T4; Match level="QueryCoverage=95%, HitCoverage=78%, E-value=0.0, Identity=79%"; Hit description =Putative AAA family ATPase
  Pfam annotation: Domain name=AAA; Domain location=292-472; Score =212.2; E_value=1.1e-60; Accession=PF00004.19; Description=ATPase family associated with various cellular activities (AAA)
  Pfam annotation: Domain name=AAA_2; Domain location=289-417; Score= -39.1; E_value=0.0086; Accession=PF07724.4; Description=ATPase family associated with various
  Pfam annotation: Domain name=AAA_5; Domain location=292-422; Score =25.0; E_value=2.2e-05; Accession=PF07728.4; Description=ATPase family associated with various cel
  Pfam module annotation: Pfam domain module=AAA::AAA_2::AAA_5; Domain location=292-472::289-417::292-422
MGAAAALASLPVAYADSNEQGAVDTVASADPAVGEDLARKERKRILELVQSRGMQRGSYPKFDVAVKGQKVVVKFNMPSNCNVSHLIVDLVTHIGLEAEQHGGGSEVLVRAWDSPAARQITLNPPKKTSTGDHNEDGLCVLIFEPLIGSDYSEIEFIKPGSFSLKELEALISALKIASEKGSSGKNTPRKGNGQRSKHLPSLEKVVSDLEAMGVRVYGFDETSSVPMDGTVIWENLAGYEPQKRHVPPVCYSFPFLNQEIEDTVLLALQSPEVYDDIARGTRCKFETNRPRAVLFEGPPGTGKTSSARVIAKQAGIPLLYVPLEVVMSKYYGESERLLGSVFSLANDLPEGGIIFLDEVDSFAIARDSEIHEATRRILSVILRQIDGFEQDRRVVVIAATNRKEDLDPALISRFDSIICFGLPDQQTRVEIAAQYAKHLTRSELVQFSLATQEMSGRDIRDVCQQAERHWASKLIRGQVPKDEKGEPSLPPIDEYLSCAEQRR

SEQ ID NO: 68962 - protein, 169 aa, Zea mays
  Coding DNA Sequence Number=SeqID_27183
  Subcellular localization annotation: CTP_CleavageSite=51; ConfidenceScore=5.06e-01
MWTNPATGPTSKASPGQKPEARGSPPLNLKAGWSERLARMGGDAPGVLVIDAFVGTGDRRPCCVLLVFPVQRIGTMQRSNSFGTSWADQWDYGGDPSPRARGRQDGGAGGKKQQGGVEKTKAAAATGLRKVKEGTATGFQWIKDKCQKKGGKKQQGAHDGSGIAGYYCR

SEQ ID NO: 68963 - protein, 54 aa, Zea mays
  Coding DNA Sequence Number=SeqID_27184
MAASRFWSNASLKGDDGGGGGSELLWSRLKGGKRGCGLVSVASCCRTTAAIGVK

SEQ ID NO: 68964 - protein, 344 aa, Zea mays
  Coding DNA Sequence Number=SeqID_27185
  Gene Ontology: Mol. function=ATP binding; Cellular component =membrane; Biological process=electron transport
  Homolog annotation: Hit_ID=Q6Z7S5; Match level="QueryCoverage=93%, HitCoverage=74%, E-value=5e-93, Identity=63%"; Hit description =Transducin family protein / WD-40 repeat family protein-like
  Pfam annotation: Domain name=WD40; Domain location=134-171; Score =2.9; E_value=17; Accession=PF00400.22; Description=WD domain, G-beta repeat
  Pfam annotation: Domain name=WD40; Domain location=186-224; Score =27.7; E_value=4e-05; Accession=PF00400.22; Description=WD domain, G -beta repeat
  Pfam annotation: Domain name=WD40; Domain location=234-270; Score =39.9; E_value=8.7e-09; Accession=PF00400.22; Description=WD domain, G-beta repeat
  Pfam annotation: Domain name=WD40; Domain location=278-340; Score =26.5; E_value=9.1e-05; Accession=PF00400.22; Description=WD domain, G-beta repeat
  Pfam annotation: Domain name=WD40; Domain location=90-128; Score =24.7; E_value=0.00034; Accession=PF00400.22; Description=WD domain, G-beta repeat
  Pfam module annotation: Pfam domain module=WD40::WD40::WD40::WD40::WD4 0; Domain location=134-171::186-224::234-270::278-340::90-128
MGPPSCRCANKGNCVQLASWLREVSSRHGGQQRTRSPPQLPPGRQDHGVADRERQEGRDPEPRPARRPADLRGPATDVPAPLELRAGPAAPGGAPGCTHVDAVAALAVSPDGALLYSASWDRSLRVWAAAGVSGAWSPSRPRTTTPSTRWRCRPTGHVYTGSADNKIKAWRRHPERRHRHRHRHVLVLVQTMERHRSAVNALALGADGRVLYSGACDRSVVVWERADGAGGGRMEATGTLRGHTRAILCLAAAGDVVCSGSADRTVRVWRRGAENTGYTLLAVLEGHGAPVKSLALLYGRDRGLFSGWGDPEEGSSGGGGGTHCAIVCSGALDGEVKIWSTLVP

SEQ ID NO: 68965 - protein, 228 aa, Zea mays
  Coding DNA Sequence Number=SeqID_27186
  Homolog annotation: Hit_ID=Q9FRP5; Match level="QueryCoverage=58%, HitCoverage=42%, E-value=2e-07, Identity=33%"; Hit description =Putative DNA-binding protein
MCDFFWLSPADLGDPLGRRPGEPAASTATPPPTAGGPLLLPRPSARRAPHHLPEEEALLLLQARLNFGGDDHDEARSQLQSQQQLVHSSSGMVELMLGSNGSGGCACDHAAALCPHHHPEAEELIPRPTSGPQQQLCASTRSSFVERRDDDAPVLQEHVLDMAMAPHRPHSSAVKRRKSQTKKVVCIPAPVAAPPGVGGRPSTSGEVVPSDLWAWEEVTGRSRFKGSP

SEQ ID NO: 68966 - protein, 47 aa, Zea mays
  Coding DNA Sequence Number=SeqID_27187
MSAVLLEKLLFDRNEGVHTYGVPPPFDLVSMPHCHSLRPSPAVTTAP

SEQ ID NO: 68967 - protein, 268 aa, Zea mays
  Coding DNA Sequence Number=SeqID_27188
  Gene Ontology: Mol. function=ATP-dependent helicase activity; Cellular component=nucleus; Biological process=mRNA catabolic process, nonsense-mediated decay
  Homolog annotation: Hit_ID=Q5VQL1; Match level="QueryCoverage=89%, HitCoverage=39%, E-value=1e-110, Identity=75%"; Hit description =Putative p68 RNA helicase
  Pfam annotation: Domain name=DEAD; Domain location=38-171; Score =138.0; E_value=2.6e-38; Accession=PF00270.19; Description=DEADDEAH box helicase
MTVMKGNEAPAPFMTFQSTGFPLDILREVLQAGFSAPTPIQAQSWPIAPRGRDIVAMAKTGSGKILGYLLPGFILLKRLQHNSREGAPKGPQLRELERGADIVVAIPGRLNDILEMNRVSLHQVSYLVLDEADYMLDMGFEPQIRKIVKQIPPKRQTLMYTATWPREVRKIASDLLANPVQVNIGNTDQLVTNKSITQHVEVIPHMDKSRRLDQILRSQDPGSKSIIFCSTKRMCDQLARNLRGCYCVLIHETFIMTMYKILSLISTR

SEQ ID NO: 68968 - protein, 39 aa, Zea mays
  Coding DNA Sequence Number=SeqID_27189
  Homolog annotation: Hit_ID=Q9LTB9; Match level="QueryCoverage=90%, HitCoverage=11%, E-value=5e-08, Identity=66%"; Hit description =Arabidopsis thaliana genomic DNA, chromosome 5, TAC clone:K14A3
MQDQLEQFTYVMQQKFLSGEDMEHMDYSRIDNDEMLVVL

SEQ ID NO: 68969 - protein, 126 aa, Zea mays
  Coding DNA Sequence Number=SeqID_27190
  Subcellular localization annotation: CTP_CleavageSite=58; ConfidenceScore=5.49e-01
MGKSKKGGSSSHHSGDKRKREPDSSLEGLRRFSSTRRRTFSFRVQGGLDPTSGLSSVPGLEGSDESEVSLDEANSSDSFEEGGGDGDGDDDDRGDGDGDDDGSEGDRKGSKGDGKDDRKGSNKASG

SEQ ID NO: 68970 - protein, 219 aa, Zea mays
  Coding DNA Sequence Number=SeqID_27191
  Homolog annotation: Hit_ID=Q6IEL5; Match level="QueryCoverage=24%, HitCoverage=10%, E-value=1e-21, Identity=88%"; Hit description=WRKY transcription factor 66
  Pfam annotation: Domain name=WRKY; Domain location=4-49; Score=62.7; E_value=1.2e-15; Accession=PF03106.6; Description=WRKY DNA -binding domain
SRSKGSPYPRGDYRCSSSKACSARKQVERSRTDPSMLVVTYTSDHNHPWRTQRNALAGSTRPASSSSSSARGHHGHNHRHHPSAAAVPDTAPAAHRHASNVAVADNATTPGSIISASVHRQLLKQEVVDMDNSKPAEDAAADHDLGFGMFADMDGALDVLCAPDFHPKKQQQQATAQQLEKLPEEEGTQLLLGPDPFSFGFLDWVGASFGVGERAADDG

SEQ ID NO: 68971 - protein, 36 aa, Zea mays
  Coding DNA Sequence Number=SeqID_27192
MARRLGRLYLCEQPRPHELRAVTPSGVPARFSGGVH

SEQ ID NO: 68972 - protein, 220 aa, Zea mays
  Coding DNA Sequence Number=SeqID_27193
  Gene Ontology: Mol. function=transcription regulator activity; Cellular component=nucleus; Biological process=regulation of transcription
  Homolog annotation: Hit_ID=Q5N8U8; Match level="QueryCoverage=47%, HitCoverage=26%, E-value=2e-29, Identity=61%"; Hit description =Putative helix-loop-helix protein 1A
  Pfam annotation: Domain name=HLH; Domain location=166-214; Score =41.9; E_value=2.2e-09; Accession=PF00010.16; Description=Helix-loop -helix DNA-binding domain
MGINYAGYPRSNKAGGGGGVEGQQHDPSTAANASGSSARKMKTPEFNFTGAQQGQQLGAAAGHLSRISEDGAFPGGMMGDRAGRGSAGESSGAAAAARSYSAGGFSIVGPWEESRDIITTLGAYDPQFSGAMAGTALEMAGMDRYVQLQQDQVPFKVRAKRGCATHPRSIAERERRTRISEKLRKLQDLVPNMDKQTSTADMLDLAVEHIRGLQSELQAL

SEQ ID NO: 68973 - protein, 84 aa, Zea mays
  Coding DNA Sequence Number=SeqID_27194
MEVYTWAKKGNLSCRKEGGGRKVDGQSPAAAKRRWACAGDQWRAQPCRLQVKTVARCDIGGGLWAGRSRGGHRGTQPTSAMQTD

SEQ ID NO: 68974 - protein, 103 aa, Zea mays
  Coding DNA Sequence Number=SeqID_27195
MGTRWGGVVVLLLQVGVVGLKDRAGVRSQAGGRRDWFSGRVAWCRGGGGDRPRAMDWAGWEKGKGMTARLPPPTPPTGFDEEIVSPADDKIAIIKNHLLLSVV

SEQ ID NO: 68975 - protein, 413 aa, Zea mays
  Coding DNA Sequence Number=SeqID_27196
  Homolog annotation: Hit_ID=Q10CF6; Match level="QueryCoverage=99%, HitCoverage=70%, E-value=1e-106, Identity=55%"; Hit description =Expressed protein
MSRNWKEAITQFAAMREDLGALCKLLLPLAPEAHISNGKNESPGSKSNRWKYNFFGKKSRDDRSPRAEDNKSFRKQKSFGAKDVISEKSDFHHLNGMTREQVITYFKSEISKMKRMHKSALQEKTEELFRLKREKGSHSLKNDIEFEPLRKKIPELVLRMDQIISKNIKVPAICMTHDELDERCRLMSRIDALFYENQHFRGLLADRMKDIKALSSRLSEASIELSMQMLSEEELLRQIDKVREDCEDLRIECDIREGMYQTVTKHLLDDYKDNMDGAALNLSAKLSSLESAISEKDEALCLYNEENHSDQEVPEAIKQDSTEIVLRDIEVEPCMSPRRSNADDSRSEELSDHCNHMVRQAMVLTKIGLWYKQMIEARRSELQKAEAKLLDAFMKTCKLVADLRSKQNEGDAT

SEQ ID NO: 68976 - protein, 134 aa, Zea mays
  Coding DNA Sequence Number=SeqID_27197
  Gene Ontology: Mol. function=protein serine/threonine kinase activity; Cellular component=membrane; Biological process=protein amino acid phosphorylation
  Homolog annotation: Hit_ID=Q9LSF1; Match level="QueryCoverage=80%, HitCoverage=25%, E-value=2e-28, Identity=54%"; Hit description =Serine/threonine-protein kinase OXI1
MLYGCTPFRGRSRRETFHRVLTAPPELPGEATPLCDLITRLLEKDPGKRLGARGVKRHAFFRGVDWDRVLDVARPPFIPSPDENDANSGAVVEAEALDVEKVVHEVFGSSGAGETSLMDVCSDGGTDDDFSIFF

SEQ ID NO: 68977 - protein, 48 aa, Zea mays
  Coding DNA Sequence Number=SeqID_27198
MGPKPFTRSLLLSFDRSAYALEIITSFLEVKDSLGALKVHPMGVAPEL

SEQ ID NO: 68978 - protein, 105 aa, Zea mays
  Coding DNA Sequence Number=SeqID_27199
MPSSSSSAANTPSADSSSEDTLSNVEAAELHPGDTVEFSVSRISSVHVQDMQQLGYFGSGVGRVSGVEEVPEPEGELIVFEAFFTTGLRLPAHRFVAEVLQKFEV

SEQ ID NO: 68979 - protein, 224 aa, Zea mays
  Coding DNA Sequence Number=SeqID_27200
  Gene Ontology: Mol. function=receptor activity
  Homolog annotation: Hit_ID=P49027; Match level="QueryCoverage=26%, HitCoverage=17%, E-value=4e-17, Identity=73%"; Hit description =Guanine nucleotide-binding protein subunit beta-like protein
  Pfam annotation: Domain name=WD40; Domain location=44-82; Score=34.5; E_value=3.6e-07; Accession=PF00400.22; Description=WD domain, G-beta repeat
MPSPPPPHRSFHAAATATLAAPIPHDNHGRRVGVPLLLWDLSTVLTTRHFVDHEKNVLSVVFSVDNRQIVSASREKTIKLWNTLGERKFPVPHDLFNLASAPTAPYSHHVLGSPGQGYALPADVQYVDVQWEEENSSQDHTLLRIAWKLKPFSFNKFSANNYHDKGVIRTMESSTEVVSGSFLCSGKNALDDRRIRASDEAKYIKPSEAEESSRGEGQIFRFYD

SEQ ID NO: 68980 - protein, 269 aa, Zea mays
  Coding DNA Sequence Number=SeqID_27201
  Homolog annotation: Hit_ID=Q2RBE2; Match level="QueryCoverage=22%, HitCoverage=7%, E-value=8e-10, Identity=56%"; Hit description =Nucleotidyltransferase family protein, putative, expressed
  Subcellular localization annotation: CTP_CleavageSite=82; ConfidenceScore=5.67e-01
MDSASPDPRARAQPRPRKTDSASPDPRARTQPRPRKTDSASPDPRARTQPRPRTAVSASPDPQARTQPRPRRSLCLARPRARTDHVTGGAIITLPLASSGYGEQDRRSIWLASIAAPRPHRFAPRRPPSRPFCLGDGDSCIASPPSLAAASATAAVPASPASSSGCLAASPALGKKQAASGSLPAPMVDISECSPVPESVPAHPDPASVSPDAWRRFETAALAVVNKIQPTAASEHLRAAVVDYVQRLFWFQARYQSAIIASYHACDFI

SEQ ID NO: 68981 - protein, 418 aa, Zea mays
  Coding DNA Sequence Number=SeqID_27202
  Gene Ontology: Mol. function=protein serine/threonine kinase activity; Cellular component=cytoplasm; Biological process=protein amino acid phosphorylation
  Homolog annotation: Hit_ID=Q84XZ4; Match level="QueryCoverage=89%, HitCoverage=53%, E-value=2e-50, Identity=51%"; Hit description =Mitogen-activated protein kinase
KVTAGTPPDAFYRVDDDDARRFIGRCLVPAANRPSAAELLLDPFLLHHHHHAAAAAGTVPVPSPLPTTAVAAGAPPPSTCSSSAADDDVVSALDDDDEVDVPPRNDMTITGKLNAEEDTIFLKVQIADEASGHARNIYFPFDMASDTAAEVAQEMVKELDITDRHASEIAAMIQQEIGRLLPGRAQQHEYTYASRGGDYDDEERPPPFYYLSSSPASSHGSHCGVGPYAFGGFSGPCGSAWTKDHDWYALSDNDDDMSSVHSGKYSPVHYASGAGHEEAPASSSGSSKTRFGGGGSGSAAALARQLERQCSVSPQHAGRPRRREDDDDRAGRRRRMTRNRSMVDMRSQLLHRTLVEELNRRLFFNTVGAVENIGFRAPTTTAASSSSSARGGLDRGRRPGGGGKQRQLDDKEQQYFML

SEQ ID NO: 68982 - protein, 90 aa, Zea mays
  Coding DNA Sequence Number=SeqID_27203
  Gene Ontology: Mol. function=metal ion binding; Cellular component =integral to membrane; Biological process=ubiquitin cycle
  Homolog annotation: Hit_ID=Q8L900; Match level="QueryCoverage=83%, HitCoverage=41%, E-value=4e-10, Identity=36%"; Hit description =Putative RING zinc finger protein
  Pfam annotation: Domain name=zf-C3HC4; Domain location=34-75; Score =33.4; E_value=8.1e-07; Accession=PF00097.15; Description=Zinc finger, C3HC4 type (RING finger)
  Pfam annotation: Domain name=zf-RING-like; Domain location=34-75; Score=4.4; E_value=0.046; Accession=PF08746.1; Description=RING-like domain
  Pfam module annotation: Pfam domain module=zf-C3HC4::zf-RING-like; Domain location=34-75::34-75
EVLERIPDYDFPYQELPGGAAGDDYDDDDHRESCAICVAPYEPGEACGVLPGCGHVFHKLCVAEWLRQSTTCPLCRAAFDVTEGTRQGGR

SEQ ID NO: 68983 - protein, 110 aa, Zea mays
  Coding DNA Sequence Number=SeqID_27204
  Homolog annotation: Hit_ID=Q6K8R1; Match level="QueryCoverage=69%, HitCoverage=32%, E-value=9e-15, Identity=51%"; Hit description =Putative glycine-rich protein
  Subcellular localization annotation: CTP_CleavageSite=55; ConfidenceScore=5.13e-01
MMSYFQTTTCKPQSRVVVNKPIPGLGSTSQHPLYSHALRFHRLQQKVYPRLLLVAASHKRLTPVCVLSGKGNAGTADDVLSKPVVGRIVILLEVDYGPVWFVANCATLFL

SEQ ID NO: 68984 - protein, 63 aa, Zea mays
  Coding DNA Sequence Number=SeqID_27205
MARAEGLLRGPRNAAEARRRGRGREGEVSPAIPGGESTEERAVRASIGGRKKRPNGRSGSESE

SEQ ID NO: 68985 - protein, 707 aa, Zea mays
  Coding DNA Sequence Number=SeqID_27206
  Homolog annotation: Hit_ID=UPI00003C004D; Match level="QueryCoverage =71%, HitCoverage=25%, E-value=3e-10, Identity=17%"; Hit description =PREDICTED: similar to centromere protein E
MDHRGGGGGGGNKNRTDLLAAGRKKLQQFRKKKGKRGPGNKADADADAEAGEGAPKAAEESVPEPKSPVGLKLLAGEGGGGSTPFEVRFERFSVMAWVLSGLLLLLAVVVAGCVMHVCQCTKRRGLRRSSATVRGLVPAESSSVESSNAVQEQETVQEQETDDVSDAHHVGPSEQGISEHPESQTAGGRDLSLQATSGDSIGDDNVGRAQLGDVDSMELNASSEGNGADGDCNQLGEHQQVEMDAVERPTSSSFEEFTELPIHSQGIEADNIHGEGAQEMVMDVSGRPLDGDIQHDIEPTASAEIDAETALEESTVAASIVIPESTARGTEYERDTGYETDGVDKEALLEDPSMVHVSDEAVTIDDLSVQAKPTASADMPLCEQKGDPALSRSAVLQGIMPLHFEDIQNHMFSATLSRDFLQLQLDEAAGLYSDFTQQSSDNTTQLRVLLKETEESKLAVDRELHQCRHELSKVNIEKGQLELTMASLKEEINTSNTRCTYLESELHSSKESTEQIHSELANSRLLLEALQKENMELTASLAFEKEAKKEVEEQRDHLSSDNRKLLSELSGLELSLASVKEEMDASSSRCNVFECELRSSNENMNHTLTELANCQALLETLQKDNLELSANSASEREAKMKLQEDNLYLCNEKGKLSSNLRELNDKLEVSYAKHKQLESHVKDTETYFGQLTEQLIEERIQADSSEL

SEQ ID NO: 68986 - protein, 455 aa, Zea mays
  Coding DNA Sequence Number=SeqID_27207
  Gene Ontology: Mol. function=RNA-directed DNA polymerase activity; Cellular component=exocyst; Biological process=exocytosis
  Homolog annotation: Hit_ID=Q6Z421; Match level="QueryCoverage=84%, HitCoverage=77%, E-value=0.0, Identity=83%"; Hit description=Exocyst subunit EXO70-like protein
  Pfam annotation: Domain name=Exo70; Domain location=1-370; Score =88.4; E_value=2.2e-23; Accession=PF03081.6; Description=Exo70 exocyst complex subunit
DAQALGPALDLWRRHLEFVVRRLLDSERQLCAKVFGQHKDVASACFAEVAAQAGVLDFLRFGRAVADAKKDPIKLQRLLEVFDSLNKLRLDFNRLFGGKACAEIQSQTRDLVKLLIDGAVEIFEELIVQVELQRHMPPPVDGGVPRLVTFVVEYCNRLLGEQYRPVLGQALTIHRSWRKEAFNDRMLVDAVLNIVKALEANFDVWSKAYDNATLSYLFMMNTHWHFFRHLKATKLGEVLGDVWLREHEQYKEYYLSMFIRESWGALSALLNREGLILFSKGRATARDLVKQRLKTFNSSFDEMHRRQSSWVIPDKDLRERTCNLVVQTIVPTYRSYMQNYGPLVEQEGNASKYVRYTVDGLEKMLSALYMPRPRRAGSFQIKHSSGDLWALPFNVPRIELNRCNGLYGGGEKTRPLERQFKQQQQQQQQQQSLLSQTRWDESKGLNNLESLTLHC

SEQ ID NO: 68987 - protein, 114 aa, Zea mays
  Coding DNA Sequence Number=SeqID_27208
  Gene Ontology: Mol. function=calcium-dependent phospholipid binding; Cellular component=integral to membrane
  Homolog annotation: Hit_ID=Q9ZTM8; Match level="QueryCoverage=93%, HitCoverage=91%, E-value=4e-18, Identity=41%"; Hit description =PGPS/D12
  Pfam annotation: Domain name=PLAC8; Domain location=5-79; Score=77.6; E_value=3.9e-20; Accession=PF04749.7; Description=PLAC8 family
MPGEWSVGLCDCFGDLHTSCCMSGTLYYLLSTIGWQWLYGCAKRSSMRSQYSLRESPCMDCCVHFWCGPCALCQEYTELQKRGFHMAKGWEGSNKVVGCFHGMTTPPRKQSMCF

SEQ ID NO: 68988 - protein, 189 aa, Zea mays
  Coding DNA Sequence Number=SeqID_27209
  Homolog annotation: Hit_ID=Q6Z432; Match level="QueryCoverage=84%, HitCoverage=67%, E-value=1e-59, Identity=71%"; Hit description =Putative 4/1 protein
MAAATAAPPWASLGPDSLNICLWTIGHCDVKFRAEAQSLKEELDKANSRLLSMEEEHKRETEQLKHSSEMNINALENKLSHALVQQARDEAAMKQLKLELSAHKSHIDMLDKNEIQDLRDVVSVEQEEKKDIHRKLQNVENELRITRMKQAEQQRDSVSVQHVETLKQKVMRLRKENESLKRRLASSEV

SEQ ID NO: 68989 - protein, 60 aa, Zea mays
  Coding DNA Sequence Number=SeqID_27210
MAAGSGWSRLAQRREEGMDALAAGLLPAGRRGEPGRKKLTPAVLSWFRVRFGHEIFGRVE

SEQ ID NO: 68990 - protein, 36 aa, Zea mays
  Coding DNA Sequence Number=SeqID_27211
MEVASGDEDLESLLQNFHRVSQGYKDALMQVQIMSG

SEQ ID NO: 68991 - protein, 69 aa, Zea mays
  Coding DNA Sequence Number=SeqID_27212
MAAWWFCGAPCSLTRDWLGSGQRVGQVTTQIPARASRGSPSMANEASMPIDKKVHGGGIGFSPVSLFLR

SEQ ID NO: 68992 - protein, 147 aa, Zea mays
  Coding DNA Sequence Number=SeqID_27213
MTAIAAKSSQGPPYTDHSLLPLPLSGKVLQVLSCAHINREPEGEGVREALMQLSKAEGQTVFFLTTEQGVPRDPRWRHHARRSTTAQTRKYMNLASTRATHEEGESEPLGRGLASDRRVDSAVHGAKQPGEVGHGGLVVLWRPVQSD

SEQ ID NO: 68993 - protein, 218 aa, Zea mays
  Coding DNA Sequence Number=SeqID_27214
  Gene Ontology: Cellular component=exocyst; Biological process =exocytosis
  Homolog annotation: Hit_ID=Q5Z4V4; Match level="QueryCoverage=97%, HitCoverage=30%, E-value=3e-45, Identity=50%"; Hit description =Putative Exo70 exocyst complex subunit
MDHGGEGRVAAARRTLRAGVDKSRALGHSLARAGPRLEEIQAALLALEAAVRPIRAPHAELAAAGPHIDRAVSPAAAVLKVFDAVHGLEPPLLAPGAAGSGAAGDLPGYLAVLAQLEEAHRFLADNCGLAAQWLADIVEYLGDRDLADQRFLADLGVTLDELRTPPAGDLDGGLLAAALSMLEAEFRRLLADHSAPLAMPQTRRRRWIGHALPAGLPF

SEQ ID NO: 68994 - protein, 98 aa, Zea mays
  Coding DNA Sequence Number=SeqID_27215
MAVGSSSSSTAHTLVLLPVDRPRELILVTSDSSRELLHVSDDLPHVLLLVSDDSSSDEDYVVETLKHEDGLTLYIKRETCTLVLPKKNIAIAASLYDL

SEQ ID NO: 68995 - protein, 134 aa, Zea mays
  Coding DNA Sequence Number=SeqID_27216
  Subcellular localization annotation: CTP_CleavageSite=60; ConfidenceScore=5.35e-01
MGAPDSPVRHRTLSGVATKPRGGDASARLRGGGCVARSGGAVTKPRGGDASARLRGGGCVARSGGAPSMPSGGDARPDGDSSLEEDSIHLLGAERSGLVLAASGISIHDETGKKMEEIMKQEKDTGGEILAQGE

SEQ ID NO: 68996 - protein, 127 aa, Zea mays
  Coding DNA Sequence Number=SeqID_27217
MAAMERWRFGHGLAQGGWVRDGGSSGVLQFIHRGLGTSWPKIAQQHRGSRCICLNLPPSTRDSAELVASRVRVEEEDDLGSRSTGPTRKRLRECYGYLGRAGEREFGPANGEFGPVLQKSNITLMDI

SEQ ID NO: 68997 - protein, 126 aa, Zea mays
  Coding DNA Sequence Number=SeqID_27218
  Homolog annotation: Hit_ID=Q6QP51; Match level="QueryCoverage=100%, HitCoverage=50%, E-value=2e-14, Identity=66%"; Hit description =Putative growth-regulating factor 1
MMYPLWRGQPEPKVGRGGDSSEVEVEAEPWGRARRRPSSEVEVEAEPRGRARRRPSSEAEVEAEPWGQTRRRPSSETEAGAEVESEPWGRARRSFLWRLRLDSAAVSLTLAGGTAVGAGQAALFSC

SEQ ID NO: 68998 - protein, 107 aa, Zea mays
  Coding DNA Sequence Number=SeqID_27219
MLPGSRVPESDTRLLTRVGKEVVEAGIGGRRKLLRRRRRPNSQPPGLAICISVHCSAVLDAGADSDARQRYRVYQAEVSREGEVMDKIHNHHVACEICAKNVMTCDE

SEQ ID NO: 68999 - protein, 74 aa, Zea mays
  Coding DNA Sequence Number=SeqID_27220
MALTSGAHWQRLNAFPARERADGDDGPRGFGWVKPRSGYGPMQALLSFVVAPAFGRQPLDRFQPVEDSFMFAVA

SEQ ID NO: 69000 - protein, 315 aa, Zea mays
  Coding DNA Sequence Number=SeqID_27221
  Gene Ontology: Mol. function=sequence-specific DNA binding; Cellular component=nucleus; Biological process=regulation of transcription
  Homolog annotation: Hit_ID=Q10IU8; Match level="QueryCoverage=94%, HitCoverage=86%, E-value=2e-98, Identity=60%"; Hit description=WRKY DNA binding domain containing protein, expressed
  Pfam annotation: Domain name=WRKY; Domain location=127-185; Score =139.1; E_value=1.2e-38; Accession=PF03106.6; Description=WRKY DNA -binding domain
MAIWATIPAKGGAALLEFDTPMRSCPRIFERILPGSFEMSHQQALAQVTAQAVHSQYNMINHTDYSIPFSSTTAPALITAQHANSSANVASAQEKPALPSHAGNSNIESNEVSQGLKTSAPTFDKPADDGYNWRKYGQKAVKGGEYPRSYYKCTHTSCPVKKKVERSAEGHITQIIYRGQHNHQRPPKRRSKDGGGPLNEADVLHENEDISTRSEPGSQEHSGKHEGSNDGILGPSVSRRGGGDEQLSGSSDSDEEQDDEQRAGDEDPGYANANKRHVPTPAQRIIVQTNSEVDLLDDGYRWRKYGQKVIYSAAS

SEQ ID NO: 69001 - protein, 978 aa, Zea mays
  Coding DNA Sequence Number=SeqID_27222
  Gene Ontology: Mol. function=binding; Cellular component =mitochondrion; Biological process=translation
  Homolog annotation: Hit_ID=Q338A4; Match level="QueryCoverage=94%, HitCoverage=99%, E-value=0.0, Identity=38%"; Hit description =Pentatricopeptide, putative, expressed
  Pfam annotation: Domain name=PPR; Domain location=102-136; Score=9.6; E_value=0.54; Accession=PF01535.11; Description=PPR repeat
  Pfam annotation: Domain name=PPR; Domain location=172-206; Score =32.5; E_value=1.5e-06; Accession=PF01535.11; Description=PPR repeat
  Pfam annotation: Domain name=PPR; Domain location=207-241; Score =39.0; E_value=1.6e-08; Accession=PF01535.11; Description=PPR repeat
  Pfam annotation: Domain name=PPR; Domain location=242-276; Score =35.3; E_value=2.2e-07; Accession=PF01535.11; Description=PPR repeat
  Pfam annotation: Domain name=PPR; Domain location=277-311; Score =32.2; E_value=1.9e-06; Accession=PF01535.11; Description=PPR repeat
  Pfam annotation: Domain name=PPR; Domain location=312-346; Score =12.7; E_value=0.23; Accession=PF01535.11; Description=PPR repeat
  Pfam annotation: Domain name=PPR; Domain location=347-381; Score =49.8; E_value=9.3e-12; Accession=PF01535.11; Description=PPR repeat
  Pfam annotation: Domain name=PPR; Domain location=382-416; Score =40.0; E_value=8.3e-09; Accession=PF01535.11; Description=PPR repeat
  Pfam annotation: Domain name=PPR; Domain location=417-451; Score =25.7; E_value=0.00017; Accession=PF01535.11; Description=PPR repeat
  Pfam annotation: Domain name=PPR; Domain location=452-486; Score =21.0; E_value=0.0044; Accession=PF01535.11; Description=PPR repeat
  Pfam annotation: Domain name=PPR; Domain location=487-521; Score =49.0; E_value=1.6e-11; Accession=PF01535.11; Description=PPR repeat
  Pfam annotation: Domain name=PPR; Domain location=522-556; Score =27.4; E_value=4.9e-05; Accession=PF01535.11; Description=PPR repeat
  Pfam annotation: Domain name=PPR; Domain location=595-629; Score=1.0; E_value=5.7; Accession=PF01535.11; Description=PPR repeat
  Pfam annotation: Domain name=PPR; Domain location=630-664; Score =12.6; E_value=0.24; Accession=PF01535.11; Description=PPR repeat
  Pfam annotation: Domain name=PPR; Domain location=665-699; Score =40.3; E_value=6.6e-09; Accession=PF01535.11; Description=PPR repeat
  Pfam annotation: Domain name=PPR; Domain location=700-734; Score =23.7; E_value=0.00068; Accession=PF01535.11; Description=PPR repeat
  Pfam annotation: Domain name=PPR; Domain location=735-769; Score =37.9; E_value=3.5e-08; Accession=PF01535.11; Description=PPR repeat
  Pfam annotation: Domain name=PPR; Domain location=770-804; Score =43.0; E_value=9.9e-10; Accession=PF01535.11; Description=PPR repeat
  Pfam annotation: Domain name=PPR; Domain location=805-839; Score =33.9; E_value=5.7e-07; Accession=PF01535.11; Description=PPR repeat
  Pfam annotation: Domain name=PPR; Domain location=840-874; Score =28.6; E_value=2.2e-05; Accession=PF01535.11; Description=PPR repeat
  Pfam annotation: Domain name=PPR; Domain location=875-909; Score =51.9; E_value=2.2e-12; Accession=PF01535.11; Description=PPR repeat
  Pfam module annotation: Pfam domain module=PPR::PPR::PPR::PPR::PPR::PP R::PPR::PPR::PPR::PPR::PPR::PPR::PPR::PPR::PPR::PPR::PPR::PPR::PP ::PP R::PPR; Domain
  Pfam module annotation: Domain location=347-381::382-416::417 -451::452-486::487-521::522-556::595-629::630-664::665-699::700 -734::735-769::770-804::805-839::840-874::875-909
  Subcellular localization annotation: CTP_CleavageSite=72; ConfidenceScore=5.66e-01
MELCCSGVLSGAGASRPAPSRTSRPVKMGAPSTGLLVAPPKRRRGGRAGCRQSAPPVPPRDERRVVGTDSVVHMLRSAPDPAEALELFTAAARQPTKVHTTESCNYMLELMRAHGRVGDMAQVFDLMQKQVVKTNVGTFATIFGGVGVEGGLRSAPVALPVMREAGMSLNAYTYNGLIYFLVKSGFDAEAMEVYKAMVEDGISPSVRTYSVLMVAFGKKRDVDTVLWLLNEMEARGVKPNVYSYTICIRVLGQAARFDEAYHILGKMEDSGCKPDVVTHTVIIQVLCDAGRLSDAKAVFWKMKASDQKPDRVTYITLLDKCGDSGDSQSVVEVWNAMVADGYNDNIVSYTAVVDALCQVGRVDEALAVFDEMKEKGMSPEQYSYNSLISGFLKADMFDRALELFNHMNACGPSPNGYTHVLFINYYGKSGQSLKAIQRYEHMKSKGIVPDVAAANAVLYSLAGSGRLGMAKRVFYELKAMGVSPDTITYTMMIKCCSKASKADEAMNFFSDMVESGCVPDVLALNSLIDTLYKGGKGNEAWQLFHKLKEMKIEPTNDYATLCTILPSFVKNGLMKEALHTVKEYILKAGCNVDKSSFHSLMEGILKKAGVEKSIEFAENIASRGILLNDFFLCPLIRHLCKHKKALEAHQLFNKFKGLGVSLKTGSYNSLIRGLVDENLIDIAEDLFTEMKRLGCGPDEFTYNLILDAMGKSMRVEEMLKVQKEMHRKGYESTYVTYNTIISGLVKSKRLEQAIDLYYNLMSEGFSPTPCTYGPLLDGLLKSGKMVDAENLFNEMLEYGCEPNCTIYNILLNGHRIAGNTENVCQLFEKMVEQGINPDIKSYTILIDTLCTAGRLNDGLCYFRQLHELGLEPDLIVYNLLIDGLGKSERIEEAVSLFNEMKKKGIIPNLYTYNSLILHLGKAGKAAEAAQMPRPSSGETEVPPEALAEPASRHAVVQGGGSTVAGVAFCGIHGELLPR

SEQ ID NO: 69002 - protein, 426 aa, Zea mays
  Coding DNA Sequence Number=SeqID_27223
  Gene Ontology: Mol. function=ubiquitin-protein ligase activity; Cellular component=ubiquitin ligase complex; Biological process =protein ubiquitination
  Homolog annotation: Hit_ID=Q75I67; Match level="QueryCoverage=79%, HitCoverage=32%, E-value=1e-100, Identity=59%"; Hit description =Putative ubiquitin conjugation factor
MAFSSPASARPQRSPDEVEDIILRKILLVSLTPLANPGPAVAYLELTAAELLSESRPLLALRDAAERLLIDRLSLPDPPAGSPTPFAFLVSAFRRAADEARKISTIRDAALRARLAASIAHLRALILSYARIVAGNPDTFPSQPGAQHPAAELLVFLLAEAADPLDPTPGPGAPPPPGFIDEFFSGADYDSIETAMGELYELLRQSVDKVSALGDFQRPLRVLRRLVGIPNCAKALVNHPKWIPKNQIMFIGEGRVMELYSVLGAFFHVSAIRDREFASKPDVGQQCFSEASSRRPADLLSSFTTIKSVMNGLYDGLKDILLTLLKNLDTREKVLEYIAEVINKNASRSGMQTWPNPLCPHGDLQAGPYNMGRIVRVPLLTLRETKSWGLRGLGHSRPEVFDGLRLVSSDRRKRWRLRMGDVHGPG

SEQ ID NO: 69003 - protein, 159 aa, Zea mays
  Coding DNA Sequence Number=SeqID_27224
  Homolog annotation: Hit_ID=Q94DR2; Match level="QueryCoverage=22%, HitCoverage=15%, E-value=3e-10, Identity=88%"; Hit description =Putative Dephospho-CoA kinase
  Pfam annotation: Domain name=CoaE; Domain location=2-137; Score= -73.0; E_value=0.0016; Accession=PF01121.11; Description=Dephospho -CoA kinase
MRLVGLTGGIASGKSTVSNLFKDAGVPVVDADIVARMRSGRLLACSAIEQTTEEDMSALEGGGGLCRLQPPRDAGGAIAARAEGRRSTTGRRERRAQRWRRGSDAGEGVPVLGKGARETVRIILVQDVVQKGTGGLEEDCKKPSGMIFCWRVEKLTELT

SEQ ID NO: 69004 - protein, 32 aa, Zea mays
  Coding DNA Sequence Number=SeqID_27225
MGTTTAWSSKVGPLVHGVRYTLVWAPLIGIRD

SEQ ID NO: 69005 - protein, 189 aa, Zea mays
  Coding DNA Sequence Number=SeqID_27226
  Gene Ontology: Mol. function=protein serine/threonine kinase activity; Cellular component=cytoplasm; Biological process=protein amino acid phosphorylation
  Homolog annotation: Hit_ID=Q6RK06; Match level="QueryCoverage=58%, HitCoverage=16%, E-value=3e-49, Identity=88%"; Hit description =Tousled-like kinase 2
MASNQIKRVRSLDNRFQKIGEETIQNLLHLFMAGDCPSLILQLGNKISLADASLQVKKFSVGISFPQDELSTLRGKVAFLEEDLSKSHQEATNYHELSDRLAKELKDLKDHDQQMRLKQMKILSDLLIAVSKAERQEARMRIRQESFRLGNVAVMRAGTIISETWEDGQAIKDLNAHLILSAGLNICWG

SEQ ID NO: 69006 - protein, 195 aa, Zea mays
  Coding DNA Sequence Number=SeqID_27227
  Gene Ontology: Mol. function=protein serine/threonine kinase activity; Biological process=protein amino acid phosphorylation
  Homolog annotation: Hit_ID=Q6RK06; Match level="QueryCoverage=86%, HitCoverage=25%, E-value=8e-49, Identity=64%"; Hit description =Tousled-like kinase 2
  Subcellular localization annotation: CTP_CleavageSite=30; ConfidenceScore=5.28e-01
MSGSSAAGEDIVQHLSSNSNPSSSKLAKLEARMAGKAVSAPSSPPHHPMSAPVISFMDQEELPETSSSDDDNCEEFLIQKNTLKRPRSPDGDNMLALGNFEGSVNEAAKILGVTDTKPSLDNSSRKKQGRGRGRAGTGRGRGSRAADQTRLTSTSSAAVTNGQLDKLTNKGLKFRAGFDLFVGNDSSYLYSAIIF

SEQ ID NO: 69007 - protein, 170 aa, Zea mays
  Coding DNA Sequence Number=SeqID_27228
  Homolog annotation: Hit_ID=Q6UUF7; Match level="QueryCoverage=38%, HitCoverage=33%, E-value=7e-26, Identity=83%"; Hit description =Putative defective chloroplasts and leaves (DCL) protein
MRGGEALRAEGSNSNCCCAAIHSPVLHALQFSLDRGMAAGLSFPRAGAPFILLRTSCFSPWAALVPRRRLLSGPPTAGDPPPPALPPTSKLAAPPVVGTPEPPLPFRAVEAEILRDIDPVVLLIKDILHSDRYGDGECLCPRDENVVVEKLLSYHPRAQDKIGCGLDAIM

SEQ ID NO: 69008 - protein, 147 aa, Zea mays
  Coding DNA Sequence Number=SeqID_27229
MGKNNKRKREPTPPSEDLGDSEYSEEEFSSESEGSPAPIPLRESSDDSDDSQGLATEVWTYIRVVERSGLEGSDESEYSSDEEDSSEGDDGDGDDDDDDDDDDDGGGGGNDGDGGDDGDGGGRGGSKDGDGGSSRGGSGRGSNRASG

SEQ ID NO: 69009 - protein, 278 aa, Zea mays
  Coding DNA Sequence Number=SeqID_27230
MDQQRTNEEQENALSKASISIISRTHETPIIAPHGSHDKGLWPVTRLPSWQRQMRLAFTKPAQAHAAAHESMRARLRDAHRPTATPRPSPRDALHPDRQAPVAARDALDPNKFSHKIWRNPSPPLSSSTLGILVANVVLVGEMTSKLHQTSRSTDDWRPLPLRDLLIHKASRPPSTTSCRYARRRRRPTSASQWPRRAVLMCSAVSPASLPKAASRPSRWRQSATPAGNYGGWKVVPIGANSQVGFFDQLYAELVEPEKHMQIFSRRKNEVVRCYLEK

SEQ ID NO: 69010 - protein, 639 aa, Zea mays
  Coding DNA Sequence Number=SeqID_27231
  Gene Ontology: Mol. function=hydrolase activity, hydrolyzing O -glycosyl compounds; Cellular component=integral to membrane; Biological process=carbohydrate metabolic process
  Homolog annotation: Hit_ID=Q9LLB8; Match level="QueryCoverage=99%, HitCoverage=100%, E-value=0.0, Identity=95%"; Hit description =Exoglucanase precursor
  Pfam annotation: Domain name=Glyco_hydro_3; Domain location=119-355; Score=321.9; E_value=1.1e-93; Accession=PF00933.12; Description =Glycosyl hydrolase family 3 N terminal domain
  Pfam annotation: Domain name=Glyco_hydro_3_C; Domain location=427 -637; Score=223.3; E_value=5.2e-64; Accession=PF01915.12; Description= Glycosyl hydrolase family 3 C terminal domain
  Pfam module annotation: Pfam domain module=Glyco_hydro_3::Glyco_hydro_ 3_C; Domain location=119-355::427-637
MASVHKATTLVLMFCLLALGRAEYLKYKDPKQPVAVRIKDLLGRMTLAEKIGQMTQIERENATADALAKYFIGASDYTNTEAEGDRQTCGSVLSGGGSVPAPQASAQAWAAMVTEMQKGALSTRLGIPIIYGIDAVHGHNNVYKATIFPHNVGLGATRDPDLVKRIGEATALEVRATGIPYAFAPCIAVCRDPRWGRCYESYSEDPKVVQSLTSLISGLQGDAPADSAGRPYVGGSKKVAACAKHYVGDGGTHNGINENNTIIDTHGLLSIHMPPYYNSIIRGVSTVMVSYSSWNGVKMHANHFLVTDFLKNKLKFRGFVISDWEGIDRITTPPHANYSYSIEAGVGAGIDMIMVPFRYTEFIDDLTTQVQNKVIPMSRIDDAVYRILRVKFTMGLFENPYPDSSLAGELGKQEHRELAREAVRKSLVLLKNGKSSYAPLLPLPKKAGKILVAGSHANDLGNQCGGWTITWQGSSGNTTAGTTILSGIEATVDPSTQVVYSESPDSGVLADKYDYAIVVVGEPPYAETFGDNLNLTIPAPGPSVIQSVCGAAKCVVVLISGRPLVVEPYLGDMDALVAAWLPGSEGQGVADVLFGDYGFTGKLPRTWFKSVDQLPMNVGDAHYDPLFPFGFGLTTKGTK

SEQ ID NO: 69011 - protein, 248 aa, Zea mays
  Coding DNA Sequence Number=SeqID_27232
MGSEARWRMMRRWTGRERGLGKDSTSSNVRSKASLQPDGLGHKHTQRLHSVHHASVTDSMSHSTCKQLAERSREGTIAVRRPVLCSAAQHGRGPVQGRAVEAMPTASTPLSMALRQGCASPRQGELKAGTSTDRSVAGPDEELAASTWEMGRAEGQAGEQERRIEEAPVGPGEAREPWEEGWSWGRARARAGRATGASRELSSHGYGGEGGARRWELSTDLGKARPCGRERKAGGVASWRRTAATWVS

SEQ ID NO: 69012 - protein, 126 aa, Zea mays
  Coding DNA Sequence Number=SeqID_27233
  Subcellular localization annotation: CTP_CleavageSite=43; ConfidenceScore=5.13e-01
MNGSKKTKLGAGVGSKPRRPYPNRSPHSVYERPRDPAQRTALRAAARETGSRGQGLEDNLATPARHAARPSVRGRGRRGRTQQQALTLKAETAPRPPPPRRASQANQPVRRGTGERQLQRPRAEHA

SEQ ID NO: 69013 - protein, 115 aa, Zea mays
  Coding DNA Sequence Number=SeqID_27234
MKSTTLSGLRISSILDERCTSASLSSSGANARRWCLGCGYDCHTPCEDKGSQSDNGIATSTLSTELNDVAAQQKNSDAMMASVIVAGSREARRRSGMDKAEELGQQRYTAVPGTS

SEQ ID NO: 69014 - protein, 306 aa, Zea mays
  Coding DNA Sequence Number=SeqID_27235
  Gene Ontology: Mol. function=nucleic acid binding
  Homolog annotation: Hit_ID=Q2RA28; Match level="QueryCoverage=54%, HitCoverage=56%, E-value=6e-48, Identity=62%"; Hit description =Expressed protein
  Pfam annotation: Domain name=Alba; Domain location=1-59; Score=68.4; E_value=2.3e-17; Accession=PF01918.11; Description=Alba
  Pfam annotation: Domain name=GRP; Domain location=90-209; Score= -22.5; E_value=0.015; Accession=PF07172.2; Description=Glycine rich protein family
  Pfam module annotation: Pfam domain module=Alba::GRP; Domain location= 1-59::90-209
MRNYISYGMSLLEENGHDEISIKAMGRAINKTVMVVELIKRRVGGLHQNTATESVDITDTWEPLEEGLLPDNSPCVDDHCDTVKEPSGYIISRLACSLLVMFDIVLRYQPPIPAEEVKPAFDYDHEESYPTGRGRGRGGGRRGRGRGMSNGPPPPAYGYNEEWEEEGDYYNRGRGRGRLRGRGGRGRGGYYGGGRRGGYGYDYGYAPRGGYYEEQDEYYDEPEEYAPPPGRGKTYRRPYMSMWVLHRIFPSSHGLVGPCWFNSQDVAEGEGAACLGVGVEAAGHRAVAEGATTRREKCDVPNACAY

SEQ ID NO: 69015 - protein, 148 aa, Zea mays
  Coding DNA Sequence Number=SeqID_27236
MGATGSMHTEVDDERREQGQELGTQAKGDQSTGARELGPGAHARGSSTTRSARSSDSRERRGGLAPWQRARPSSALGQVPAMEVHRATSEREEDEEERESRGSEQWVWPWRGSRGHDGDGKQGRERRELREREAEVRAAGKNPTRPQR

SEQ ID NO: 69016 - protein, 62 aa, Zea mays
  Coding DNA Sequence Number=SeqID_27237
MAVLLNPVAHEASRGAKDATSARNRLKAYCGARSTCAGGRLKSGDVDSVSPVEPSFLRINLS

SEQ ID NO: 69017 - protein, 146 aa, Zea mays
  Coding DNA Sequence Number=SeqID_27238
MEDLSQMTPTIVIGKIAAFEMSRKMGRQEEPTSSGPYAFPCDERKGKKKAPTPSSSSEEEEEESDGDEDNQPSTSSSKDEETIRRVRKVEDLLFNIEGKSKEREDASHAGRRATSGTAVQIWSNPQRGGANARRLLKGKCALRTFL

SEQ ID NO: 69018 - protein, 82 aa, Zea mays
  Coding DNA Sequence Number=SeqID_27239
MMPRASMEDPSSSDPWRVSRLGESPSRPRAITGGIKVVDPWRGCTTAPTMKLSVQTQILLEAMAGAEQKGEERWARMMMVVE

SEQ ID NO: 69019 - protein, 81 aa, Zea mays
  Coding DNA Sequence Number=SeqID_27240
MKRVDSQRTGGAPDSEQYLSGVHRTVRWDTRTVCAGPQWVLSGCSTKLSGVHRTVWITVGSNGRLLQTPTAGRRGRAPDSE

SEQ ID NO: 69020 - protein, 103 aa, Zea mays
  Coding DNA Sequence Number=SeqID_27241
  Subcellular localization annotation: CTP_CleavageSite=29; ConfidenceScore=5.23e-01
MQASKSKSPLESRALVPWRRHRLPFAESCAATRSRSFGCFFFTTRTGPPLPTQGDDLEQRDRVERQGDTACSYGQDLVQPKGRPTVRRTDEGCCGRRKEEVER

SEQ ID NO: 69021 - protein, 105 aa, Zea mays
  Coding DNA Sequence Number=SeqID_27242
MWGVDRWSRARPSKSPIGGGATTADVGARVVNEEAEGVEQVCKMRRYSQAFSTTSTLRSNLSKSKNSQSFSPKRFSNMLVALPFICAIFNAASKLSQSSIELLMD

SEQ ID NO: 69022 - protein, 397 aa, Zea mays
  Coding DNA Sequence Number=SeqID_27243
  Gene Ontology: Mol. function=protein kinase activity; Cellular component=integral to membrane; Biological process=protein amino acid phosphorylation
  Homolog annotation: Hit_ID=Q5Z8V2; Match level="QueryCoverage=86%, HitCoverage=50%, E-value=4e-48, Identity=35%"; Hit description =Putative wall-associated kinase 2
  Pfam annotation: Domain name=Pkinase; Domain location=99-347; Score= -17.5; E_value=1.6e-07; Accession=PF00069.15; Description=Protein kinase domain
  Pfam annotation: Domain name=Pkinase_Tyr; Domain location=99-347; Score=-17.5; E_value=2.1e-11; Accession=PF07714.7; Description =Protein tyrosine kinase
  Pfam module annotation: Pfam domain module=Pkinase::Pkinase_Tyr; Domain location=99-347::99-347
MGGSGAVSGLEMLGISLFLKSGTTGGDEKPSGGIFAGILVTLIAFLSTEVFRHKASKKRQGYFEQHGGRTLLRILETDDNNITFTLYDRGDLAKATRGFHKANIVGEGAHGTVYKANLGSSAAENASTTVAVKRCKQIDRSRTDGFVQELVVLCRVSHPNVVRLLGCCFHFEAPMLVYEFVPNGTLSDLLHGKPRRRVTLPTRLKRPWRTCTRHRTRRSTATSSRRTFCSAKDTSPSVQVVPKGTLAYLDPEFLQDHQITDKKDVYSFGVVLIELLTRKNPQAKEWKNLTVMFQSSTGNGTLGDLLDADIVEEGSMGLIYAAAKLVSRCIAVPGNARPAMGQVAGELRRLSDQMPESPEVRVALEVEDGRYSYAASTEGETTRFSNLTKPSTAELAR

SEQ ID NO: 69023 - protein, 48 aa, Zea mays
  Coding DNA Sequence Number=SeqID_27244
MAVVERHMALAGGPHESISHGEIERFAGRAPEVGTRRGARLSSRDHSF

SEQ ID NO: 69024 - protein, 116 aa, Zea mays
  Coding DNA Sequence Number=SeqID_27245
MAVVERHMALAGGPHESISHGEIERFAGRAPEKWKDDGISLCAKVVNVAQVQEWSKPVEGFVSSVDLRLILFTSLSMIHVRAYGYGYAQCDISNYMIAVALLIQEAVQVPQFILPY

SEQ ID NO: 69025 - protein, 85 aa, Zea mays
  Coding DNA Sequence Number=SeqID_27246
  Homolog annotation: Hit_ID=Q108Z7; Match level="QueryCoverage=33%, HitCoverage=1%, E-value=8e-08, Identity=86%"; Hit description =Transcriptional regulator, putative, expressed
MGTVGPGRYQFFNCMHSNLFEEYKFFPKYPDKQLKIAAILFDYGAYSSKYAQEVKSAILNGNSNFLETSDSEIDKLSLGYSDLLV

SEQ ID NO: 69026 - protein, 79 aa, Zea mays
  Coding DNA Sequence Number=SeqID_27247
MAAAINNNEARPKRAAEQHGVWPARSGAARSGSPALRPARGGTTRHGGPASQRHNWPARDCALRRCPSAADRSCTGAPG

SEQ ID NO: 69027 - protein, 180 aa, Zea mays
  Coding DNA Sequence Number=SeqID_27248
MAATAGGGRGGRLRGGARSGSGELGRAAAGARPAGGGAVGGGAAGGDASVRAIRARGRGVRQIFFEREVWQIETTPLTSHHHVCVKLLPRSQLPVCRFRVNLDQDGPYSGVNATRRRVGHPKEAPPYLGMKTASASAVGAEEQLELRRSARVRELYEGEEFDSEEEEEFDEDGDDYVEPY

SEQ ID NO: 69028 - protein, 93 aa, Zea mays
  Coding DNA Sequence Number=SeqID_27249
MGLGGTHPWAEPDPIILPGDVIISKYNLVGRFDQRTFNTPKNEKGIFPRVTTLFSIKCTTTVVKGVLPRKLPNGIQMEQGQWHWKGDIFYFIS

SEQ ID NO: 69029 - protein, 436 aa, Zea mays
  Coding DNA Sequence Number=SeqID_27250
  Gene Ontology: Mol. function=serine carboxypeptidase activity; Cellular component=cellulose and pectin-containing cell wall; Biological process=proteolysis
  Homolog annotation: Hit_ID=Q69ME0; Match level="QueryCoverage=76%, HitCoverage=65%, E-value=1e-133, Identity=64%"; Hit description =Putative serine carboxypeptidase
  Pfam annotation: Domain name=Peptidase_S10; Domain location=90-427; Score=395.0; E_value=1.1e-115; Accession=PF00450.12; Description =Serine carboxypeptidase
MGSNNASCALSLLLLIIICAAAALRADASQADRLREFIRSRRNSPSDDKGSFKVTNLAQRVATSSLLSTSSYSDSEQSAMKAADKITSLPGQPDGVDFDSTPVANVIFLESPAGVGFSYSNTTSDYDLSGDQRTADDAYLFLVNWLERFPEYKSRPFYISGESYAGHYIPQLAATVLIQNSYNSKTAINLRGILVGNPLLDWNMNFKGAVDYYWSHGLMSDEVFDNITRHCNYDNSDGAACNGAVDVIDPGQIDPYNIYAPICVDAANGAYYPTGYVRHLLTILNLPGYDPCSDYYTYSYLNDPAVQNAFHARMTSWSGCANLNWTDAPISMVPTLAWLIEKKLPVWIFSGDFDSVCPLPATRLSINDLKLRITTPWRPWTVNMEVGGYVQQYKGGFTFASVRGAGHMVPSSQPERALVLLDSFFKGVLPPYVPEQ

SEQ ID NO: 69030 - protein, 89 aa, Zea mays
  Coding DNA Sequence Number=SeqID_27251
MASGRLPPRPSSALPLISTTEDIPNVIRHSGADTPLNQLFLIPNPVSTTTGEDSKERTSMDQVKVKAKRRLMDRGTMDKVKKRVLALSR

SEQ ID NO: 69031 - protein, 66 aa, Zea mays
  Coding DNA Sequence Number=SeqID_27252
MASSISVALIPHALFHHLAATQHDQQLEQQQQGVCFYEVDTIVREYLNPKIWAPEYLGNVIATLVL

SEQ ID NO: 69032 - protein, 81 aa, Zea mays
  Coding DNA Sequence Number=SeqID_27253
  Subcellular localization annotation: CTP_CleavageSite=28; ConfidenceScore=5.12e-01
MSHYFFLTGSWRCSRRSVAVICLPRTVRVQLSRACRLLTAANIARGLGPRDGKARPPEDMSVGVGIGTGTGTGTGTRRTAH

SEQ ID NO: 69033 - protein, 135 aa, Zea mays
  Coding DNA Sequence Number=SeqID_27254
  Gene Ontology: Mol. function=ubiquitin-protein ligase activity; Cellular component=ubiquitin ligase complex; Biological process =protein amino acid phosphorylation
MEEWDCEPLRSARCSPAATPSSLLQDELAAHEVFVAVPKEMAKAETRIRCICHTNMKPEEIKEYRKQKRAKAEKSLDTYVQMAKAVTFRLPVRKEMNMPKSMTALKLFKTAAPSCKMWFTCKGHLICTRIPAPIK

SEQ ID NO: 69034 - protein, 106 aa, Zea mays
  Coding DNA Sequence Number=SeqID_27255
MQAACNCTTTMHPLDFHASSMEAQAHTSCNRRAGYYVRKTTPSLTPVPRLLDCGTGATTRGNPAHGPTVPTKHIGHRDRERGYSERDPSLRRKRAPIPPTDQGFEG

SEQ ID NO: 69035 - protein, 80 aa, Zea mays
  Coding DNA Sequence Number=SeqID_27256
MGLGVCGSLCQGGNESDGLGFDSGNASPLQPDMTLAEYVDVYSPLLYTPNPPGCPHCSHCSGEDEAVEGDFQEFQDYDEF

SEQ ID NO: 69036 - protein, 109 aa, Zea mays
  Coding DNA Sequence Number=SeqID_27257
MGNYGERFVDTPDTTPTAIAANGFLIHRQITSAGPCWHGGSTGVDCLRRRCTGYGGTGPRFRKSRRSRWAKLYTGSTTPLSSPVSLASQGQLVTAHAEIHGRKRNKIAN

SEQ ID NO: 69037 - protein, 142 aa, Zea mays
  Coding DNA Sequence Number=SeqID_27258
  Homolog annotation: Hit_ID=Q9FGQ9; Match level="QueryCoverage=28%, HitCoverage=23%, E-value=2e-10, Identity=65%"; Hit description =Arabidopsis thaliana genomic DNA, chromosome 5, TAC clone:K14A3
  Pfam annotation: Domain name=DUF581; Domain location=14-66; Score =55.4; E_value=1.9e-13; Accession=PF04570.5; Description=Protein of unknown function (DUF581)
MATSVACAFFFDAEPLGEPGRHALDACALCAKPLSRNSDIFMYKGDTPFCSEDCRYEQMHHDAAYARQAASSRRKQQQSQSQRSRGASSVGAKADRYSCKRSRWGGGAPLRSWLAGRGAAPHNEFRARNRGKRRWMDLKTEE

SEQ ID NO: 69038 - protein, 364 aa, Zea mays
  Coding DNA Sequence Number=SeqID_27259
  Gene Ontology: Mol. function=metal ion binding
  Homolog annotation: Hit_ID=Q6ZGZ5; Match level="QueryCoverage=68%, HitCoverage=51%, E-value=1e-45, Identity=45%"; Hit description =Putative RING finger 1
  Pfam annotation: Domain name=PHD; Domain location=146-191; Score=9.2; E_value=0.0068; Accession=PF00628.19; Description=PHD-finger
  Pfam annotation: Domain name=zf-C3HC4; Domain location=147-188; Score= 35.9; E_value=1.4e-07; Accession=PF00097.15; Description=Zinc finger, C3HC4 type (RING finger)
  Pfam module annotation: Pfam domain module=PHD::zf-C3HC4; Domain location=146-191::147-188
  Subcellular localization annotation: CTP_CleavageSite=62; ConfidenceScore=5.91e-01
MSSSSSSSPSLQPPPAGATGGSSPYSASSSFLPSFMIIAALLAFVFLASVSIHLLLRFLSARSSSSSSSSSSPPLSGHPRPRTYRDDAGSAAASVARRPAATAAPADAGKNEEEEDAGDEKQRLIDSLPLFTMASALAALPKSSPDCAVCLSPFTPDADLRLLPACRHAFHAACVDAWLRTTPSCPLCRAAVALPHPSLSGMLAAAQARARDRPGPGSSFLVEMGTIDEEVESRGVPRRAHRRPRGNPAPSREEKPSAEQGSAPAAAPAPSPSSQPPPPGETVAEAAGSSRGWLREYVDRLASSAYTLSERWSSRWSQGQSQQQRQEEPWLWDAEAAEMSAAPGSDDDEEETAFMAMYRWIAGV

SEQ ID NO: 69039 - protein, 67 aa, Zea mays
  Coding DNA Sequence Number=SeqID_27260
MAGISPSSRAQLWMQHALDPGLDSQKGFAGLGDIPQEDGADSVGPGVSDTGLPMNARLQLESGGGLA

SEQ ID NO: 69040 - protein, 181 aa, Zea mays
  Coding DNA Sequence Number=SeqID_27261
MAAHLASAFFFAAEPVGEPGVHALCAKPLARDSDIFMYRGGHALLQRGVPLRADAARRHPRQAAAAGHVAREPIGQGHLEPPVVIVEAEEHVACPEHRNRQSLLEPGSIGLPGPTQTSMLSGLNKSSRGVQAPMGPPRHMAPSDLANCHVVRPLANWLARAVAEESLTKACVTRASRSDSW

SEQ ID NO: 69041 - protein, 49 aa, Zea mays
  Coding DNA Sequence Number=SeqID_27262
MAPAGVCGLVVRARGSTRTRTTGQGSGSQRMSKNLEADILAHRDRSESY

SEQ ID NO: 69042 - protein, 278 aa, Zea mays
  Coding DNA Sequence Number=SeqID_27263
  Gene Ontology: Cellular component=membrane
  Homolog annotation: Hit_ID=Q6ZGZ0; Match level="QueryCoverage=92%, HitCoverage=69%, E-value=3e-68, Identity=56%"; Hit description =Putative purine permease
MADNNGGNSNSGGTNANTTAEVQIQIPGPPKTEAPAAQEGPSESSKAKNWKRWLVVAADAILLIVGQTSATLLGRYYYSQGGNSKWLSTFVQTAGFPLLFFGLFFFPSKSSGSPVGKTAMIYAVLGLIITADNMMYSHGLMFLPVSTFSLICASQLAFNVFFSYVLNSQKLTGLIMNSVVLLTLAALLLGANHETHGPITGGVSGGKYLLGFLLTVGASGTYSLILSLMQLTFEKCDQETDLLGSFEHADIYCTCGNFRFSCWTICKWRMDGFKRGDG

SEQ ID NO: 69043 - protein, 158 aa, Zea mays
  Coding DNA Sequence Number=SeqID_27264
MGKNNKRKREPTPPSEDFGDLEYSEEEFSYESEGSPAPIPLRESSDESDDSQGLAAEVWTYIRAVERSGLEGSDESEYSSDEEDSSEEDGGGDGEDDDDDDEGGGGGDGDGGGRGGSKDGDDGSSRSGGGSSRGSNRGGSGRGSNRGGSGRGSNRASG

SEQ ID NO: 69044 - protein, 90 aa, Zea mays
  Coding DNA Sequence Number=SeqID_27265
  Gene Ontology: Mol. function=membrane alanyl aminopeptidase activity; Biological process=proteolysis
  Homolog annotation: Hit_ID=Q6K4E8; Match level="QueryCoverage=93%, HitCoverage=11%, E-value=7e-23, Identity=61%"; Hit description =Putative puromycin-sensitive aminopeptidase; metalloproteinase MP100
MANFHDNWDRVTRKYGDTQAGGFIRYVVTLFTSNEKAAEFSRFFATRKKPEFERTLKQSLENVRISARWIQGIKSEPRLAQTVQELLRRP

SEQ ID NO: 69045 - protein, 283 aa, Zea mays
  Coding DNA Sequence Number=SeqID_27266
  Gene Ontology: Mol. function=membrane alanyl aminopeptidase activity; Cellular component=cytosol; Biological process=proteolysis
  Homolog annotation: Hit_ID=Q9SN00; Match level="QueryCoverage=73%, HitCoverage=26%, E-value=7e-55, Identity=49%"; Hit description =Aminopeptidase-like protein
  Pfam annotation: Domain name=Peptidase_M1; Domain location=74-283; Score=-26.8; E_value=1.8e-11; Accession=PF01433.10; Description =Peptidase family M1
MTSLLVVLLLVSVLPGASGADSGPLDGRKMVFAGETAGVLARYSFNKDANVETASPPPPALAGSAAQFRGQAQLPRFAAPRRYDLRLRPDLVTCTFSGTAAVTVAVSAPTRFLVLNSADLSIDSASIRFRDLAPKEVVFFADDEILVLGFSKDLVLGEGVLSMKFNGTLNDQMRGFYRSKYQYKGKMKNMAVTQFESVDARRCFPCWDEPAFKAKFKLTLEVNVGMVALSNMPIANQTVAGPIRTVHYVESPLMSTYLVAIVIGLFEYIEGVTPEGTLGVSSY

SEQ ID NO: 69046 - protein, 365 aa, Zea mays
  Coding DNA Sequence Number=SeqID_27267
  Gene Ontology: Mol. function=protein dimerization activity
  Homolog annotation: Hit_ID=Q1S5N2; Match level="QueryCoverage=36%, HitCoverage=26%, E-value=3e-31, Identity=48%"; Hit description=Viral capsid/hemagglutinin protein
  Pfam annotation: Domain name=DUF659; Domain location=228-365; Score =137.5; E_value=3.6e-38; Accession=PF04937.6; Description=Protein of unknown function (DUF 659)
  Pfam annotation: Domain name=zf-C2HC_plant; Domain location=31-86; Score=51.4; E_value=3.1e-12; Accession=PF07567.3; Description =Protein of unknown function, DUF1544
  Pfam module annotation: Pfam domain module=DUF659::zf-C2HC_plant; Domain location=228-365::31-86
MESTGSALASVPVDSNTDPMADPKRRAKSNDPRWNYGYWIEIGNRDKVTCNLCKTVTMGGIKRLKEHLAGGYADTLMCSKTTTEIRKEVKAYLDKNKRTRPTFLDDDDHDGQGQQGEEDSTTSMQQPSSGTTAKRKRAAFQFRTTAQPQTSNKEKKKGKLQPCFEELLNKLWMRGAPQGHTTKPPWKHALSLRLTKIMSTSNELCSSMSVVYLLMPLILDSFTLLVRPLLNMVKEPLLAECVKDVTNLRVYHELAWKTYGCTHMSNGWTDRRGHQLINFLVNNPEGTYFLESVDASSEAHSATMHGDLLEKRIDNIGRDKVVQVVTDNGANYKAAGKILMDRIPTLFWSPCAAHCLDLMLEDIGK

SEQ ID NO: 69047 - protein, 74 aa, Zea mays
  Coding DNA Sequence Number=SeqID_27268
MARDTACENYIMSYKGITTTTQTFMDYCNLADREDVLIPEKEGVREGGPDPALEPPTEDIPSAPTPKGKPRFYA

SEQ ID NO: 69048 - protein, 114 aa, Zea mays
  Coding DNA Sequence Number=SeqID_27269
  Gene Ontology: Mol. function=nucleic acid binding
  Homolog annotation: Hit_ID=Q5R1J2; Match level="QueryCoverage=71%, HitCoverage=6%, E-value=2e-09, Identity=42%"; Hit description =Integrase core domain, putative
MDKSDQNSSESIEKRFIVVMMSYHKTIITFYWIRNLRIVLRVEKKEEVLDTPLLEEPAEDATVVIKNAYKKAMDANLEVSCLMLACMAPELQIYFETNHEAYDMTVALKNMFKT

SEQ ID NO: 69049 - protein, 340 aa, Zea mays
  Coding DNA Sequence Number=SeqID_27270
  Gene Ontology: Mol. function=RNA binding; Cellular component =ribonucleoprotein complex; Biological process=mRNA processing
  Homolog annotation: Hit_ID=Q84N49; Match level="QueryCoverage=85%, HitCoverage=45%, E-value=1e-160, Identity=92%"; Hit description=CRS2- associated factor 1
MARDCRAKKRKRPVRGCGVRCRRNHRSFSFLQLVCLNKSDCRKIGAKLKEVIWKSSLPPLENSYEVTKVQESFSGKESNEKVTHSGNVLAQIELVSAATSHKNWNLDEGQEKFKDSTDSDMVLNSAKDVPALFHSTGISRTEPSADIPLEYSPLNPVCDIMDPSLNCRSIPTNNCESRALVEKSEHCPDDYNLEMKRKRNDGTKGTVVLNSGSKVEGLLCLLEQAIHSGRALVLSEDELADSDLVYEKSVAFTKSIPRRLVFENTRRKSSARRNVPDNHARTKTHLVENKMLSSPVENKFIVNGGSAMQTIDHGQEFLSDVVHQGLRSVASWRVLFNWKY

SEQ ID NO: 69050 - protein, 144 aa, Zea mays
  Coding DNA Sequence Number=SeqID_27271
MVVSSSSSASELFMYSLSPNVAAPWLLLLPRTGHLKWLLEKESESCVFLAAMVLMVRDFASLSFYFELAQAFLKQAKRSREMLQYNAAQWTLCFAWLELEGCCVLVLGCVREVISKAKLNCRRAPKHSPRRNWHLFLVRKLKVT

SEQ ID NO: 69051 - protein, 80 aa, Zea mays
  Coding DNA Sequence Number=SeqID_27272
MEAGSAHGDAEARLHGQEMDLYRPDLDSERPAVRRAVGDLRGEEDRPGNESAHVGIGDRHRGPTEQRPESQHRLKIDMRM

SEQ ID NO: 69052 - protein, 89 aa, Zea mays
  Coding DNA Sequence Number=SeqID_27273
MASPHPSRSAASLGCGEDVWEPLDAPPTVTIETVGVPLRVTDQSCGSLIPRLGLDCIEDTCHPKIILVPGISSPRQVVPLITSFYPVMF

SEQ ID NO: 69053 - protein, 121 aa, Zea mays
  Coding DNA Sequence Number=SeqID_27274
  Gene Ontology: Mol. function=transporter activity; Cellular component= membrane; Biological process=oligopeptide transport
  Homolog annotation: Hit_ID=Q9FWL4; Match level="QueryCoverage=92%, HitCoverage=18%, E-value=1e-50, Identity=82%"; Hit description =Putative peptide transport protein
MEDTGEGGRGEYTKDGSVDLHGNPVLRSKRGGWTACTFIVVYELFERMAYYGVAANLVVYLTERLHQGTVQAANNVTNWSGTVFLTPLLGAFVADAYLGRYWTFVAGSAVYLMVRMDVGYR

SEQ ID NO: 69054 - protein, 1315 aa, Zea mays
  Coding DNA Sequence Number=SeqID_27275
  Gene Ontology: Mol. function=protein serine/threonine kinase activity; Cellular component=integral to membrane; Biological process=protein amino acid phosphorylation
  Homolog annotation: Hit_ID=Q337M0; Match level="QueryCoverage=88%, HitCoverage=96%, E-value=0.0, Identity=67%"; Hit description=Leucine Rich Repeat family protein, expressed
  Pfam annotation: Domain name=LRRNT_2; Domain location=19-60; Score =42.3; E_value=1.7e-09; Accession=PF08263.3; Description=Leucine rich repeat N-terminal domain
  Pfam annotation: Domain name=LRR_1; Domain location=113-135; Score =13.2; E_value=0.97; Accession=PF00560.23; Description=Leucine Rich Repeat
  Pfam annotation: Domain name=LRR_1; Domain location=137-159; Score =13.3; E_value=0.88; Accession=PF00560.23; Description=Leucine Rich Repeat
  Pfam annotation: Domain name=LRR_1; Domain location=161-183; Score =7.4; E_value=12; Accession=PF00560.23; Description=Leucine Rich Repeat
  Pfam annotation: Domain name=LRR_1; Domain location=206-225; Score =13.1; E_value=1; Accession=PF00560.23; Description=Leucine Rich Repeat
  Pfam annotation: Domain name=LRR_1; Domain location=231-253; Score =15.9; E_value=0.15; Accession=PF00560.23; Description=Leucine Rich Repeat
  Pfam annotation: Domain name=LRR_1; Domain location=255-277; Score =9.3; E_value=5.2; Accession=PF00560.23; Description=Leucine Rich Repeat
  Pfam annotation: Domain name=LRR_1; Domain location=279-301; Score =12.3; E_value=1.4; Accession=PF00560.23; Description=Leucine Rich Repeat
  Pfam annotation: Domain name=LRR_1; Domain location=303-325; Score =5.5; E_value=27; Accession=PF00560.23; Description=Leucine Rich Repeat
  Pfam annotation: Domain name=LRR_1; Domain location=327-349; Score =16.5; E_value=0.097; Accession=PF00560.23; Description=Leucine Rich Repeat
  Pfam annotation: Domain name=LRR_1; Domain location=351-374; Score =7.3; E_value=12; Accession=PF00560.23; Description=Leucine Rich Repeat
  Pfam annotation: Domain name=LRR_1; Domain location=376-398; Score =7.3; E_value=12; Accession=PF00560.23; Description=Leucine Rich Repeat
  Pfam annotation: Domain name=LRR_1; Domain location=400-422; Score =13.7; E_value=0.66; Accession=PF00560.23; Description=Leucine Rich Repeat
  Pfam annotation: Domain name=LRR_1; Domain location=424-446; Score =14.5; E_value=0.39; Accession=PF00560.23; Description=Leucine Rich Repeat
  Pfam annotation: Domain name=LRR_1; Domain location=448-470; Score =13.0; E_value=1.1; Accession=PF00560.23; Description=Leucine Rich Repeat
  Pfam annotation: Domain name=LRR_1; Domain location=472-494; Score =9.7; E_value=4.3; Accession=PF00560.23; Description=Leucine Rich Repeat
  Pfam annotation: Domain name=LRR_1; Domain location=496-519; Score =10.2; E_value=3.6; Accession=PF00560.23; Description=Leucine Rich Repeat
  Pfam annotation: Domain name=LRR_1; Domain location=520-543; Score =6.8; E_value=16; Accession=PF00560.23; Description=Leucine Rich Repeat
  Pfam annotation: Domain name=LRR_1; Domain location=544-566; Score =5.4; E_value=28; Accession=PF00560.23; Description=Leucine Rich Repeat
  Pfam annotation: Domain name=LRR_1; Domain location=568-590; Score =6.4; E_value=18; Accession=PF00560.23; Description=Leucine Rich Repeat
  Pfam annotation: Domain name=LRR_1; Domain location=592-614; Score =11.3; E_value=2.2; Accession=PF00560.23; Description=Leucine Rich Repeat
  Pfam annotation: Domain name=LRR_1; Domain location=616-638; Score =10.0; E_value=3.8; Accession=PF00560.23; Description=Leucine Rich Repeat
  Pfam annotation: Domain name=LRR_1; Domain location=64-87; Score=0.6; E_value=2.2e+02; Accession=PF00560.23; Description=Leucine Rich Repeat
  Pfam annotation: Domain name=LRR_1; Domain location=640-662; Score =12.3; E_value=1.4; Accession=PF00560.23; Description=Leucine Rich Repeat
  Pfam annotation: Domain name=LRR_1; Domain location=664-686; Score =12.4; E_value=1.3; Accession=PF00560.23; Description=Leucine Rich Repeat
  Pfam annotation: Domain name=LRR_1; Domain location=688-710; Score =17.4; E_value=0.05; Accession=PF00560.23; Description=Leucine Rich Repeat
  Pfam annotation: Domain name=LRR_1; Domain location=712-734; Score =19.5; E_value=0.012; Accession=PF00560.23; Description=Leucine Rich Repeat
  Pfam annotation: Domain name=LRR_1; Domain location=737-759; Score =1.6; E_value=1.4e+02; Accession=PF00560.23; Description=Leucine Rich Repeat
  Pfam annotation: Domain name=LRR_1; Domain location=761-783; Score =20.1; E_value=0.008; Accession=PF00560.23; Description=Leucine Rich Repeat
  Pfam annotation: Domain name=LRR_1; Domain location=785-808; Score =12.3; E_value=1.4; Accession=PF00560.23; Description=Leucine Rich Repeat
  Pfam annotation: Domain name=LRR_1; Domain location=89-111; Score =16.6; E_value=0.09; Accession=PF00560.23; Description=Leucine Rich Repeat
  Pfam annotation: Domain name=Pkinase; Domain location=910-1182; Score= 120.8; E_value=3.9e-33; Accession=PF00069.15; Description=Protein kinase domain
  Pfam annotation: Domain name=Pkinase_Tyr; Domain location=898-1182; Score=83.1; E_value=8.5e-22; Accession=PF07714.7; Description =Protein tyrosine kinase
  Pfam module annotation: Pfam domain module=LRRNT_2::LRR_1::LRR_1::LRR_ 1::LRR_1::LRR_1::LRR_1::LRR_1::LRR_1::LRR_1::LRR_1::LRR_1::LRR_1: LRR_
  Pfam module annotation: Pfam domain module=LRR_1::LRR_1::LRR_1::LRR _1::LRR_1::LRR_1::Pkinase::Pkinase_Tyr; Domain location=19-60::113
  Pfam module annotation: Domain location=376-398::400-422::424 -446::448-470::472-494::496-519::520-543::544-566::568-590::592 -614::616-638::64-87::640-662::664-686::688-710::712-734::737 -759::761-783::785-808::89-111::910-1182::898-1182
  Subcellular localization annotation: CTP_CleavageSite=58; ConfidenceScore=5.58e-01
SHSSSSLALATLAANAATPASPADALLAWKSSLNNPAALSTWTNATQVSICTTWRGVACDAAGRVVSLRLRGLGLTGGLDAFDPGAFPSLTSLDLKDNNLVGAIPASLSQLRALATLDLGSNGLNGTIPPQLGDLSGLVELRLYNNNLAGVIPHQLSELPKIVQLDLGSNYLTSVPFSPMPTVEFLSLSLNYLDGSFPEFVLRSGNVTYLDLSQNAFSGTIPDALPERLPNLRWLNLSANAFSGRIPASLARLTRLRDMHLGGNNLTGGVPEFLGSLSQLRVLELGSNPLGGPLPPVLGRLKMLQRLDVKNASLVSTLPPELGSLSNLDFLDLSINQLSGNLPSSFAGMQKMREFGISSNNLTGEIPGRLFTSWPELISFQVQNNSLQGRIPPELGKATKLLILYLFSNNLTGEIPPELGELANLTQLDLSANLLRGSIPNSLGNLKQLTRLELFFNELTGQLPPEIGNMTALQILDVNTNNLEGELPPTVSLLRNLRYLSVFDNNMSGTVPPDLGAGLALTDVSFANNSFSGELPQGLCDGFALHNFTANHNNFSGRLPPCLKNCSELYRVRLEGNRFTGDISEAFGVHPSMDYLDISGNKLTGRLSDDWGRCTRTTRLKMDGNSISGAIPAAFGNMTSLQDLSLAANNLVGAVPPELGNLSFLFSLNLSHNSFSGPIPTSLGRNSKLQKVDLSGNMLSGAIPVGIDNLGSLTYLDLSKNRLSGQIPSELGDLFQLQTLLDLSSNSLSGPIPSNLVKLANLQKLNLSHNELNGSIPVSFSRMSSLETVDFSYNQLTGEIPSGDAFQSSSPEAYIGNLGLCGDVQGVPSCDGSSTTTSGHHKRTAIAIALSVAGAVVLLAGIAACVVILACRRRPREQRVLEASDPYESVIWEKEAKFTFLDIVSATDSFSEFFCIGKGGFGSVYRAELPGGQVVAVKRFHVAETGEISEAGRKSFENEIRALTEVRHRNIVRLHGFCCTSGGYMYLVYEYLERGSLGKTLYGEEGRGKLGWGTRVKVVQGVAHALAYLHHDCSQPIVHRDITVNNVLLESEFEPRLSDFGTAKLLGSASTNWTSLAGSYGYMAPELAYTMNVTEKCDVYSFGVVALEVMMGKHPGDLLTSLPAISSSGEEDLLLQDILDQRLEPPTGDLAEEIVFVVRIALACARANPESRPSMRSVAQEISARTQAYLSEPFRQITKDPLLMAPDWMPEASSRPLEPHIRCEREKGTRQRPTLGKPHWGNILTSRAWGLLLEIRSAILGAHQSTSPLGKGLWQLGPAGQSEEIGNVYPRRIRPKTNPTASNPGLAVAEPNKGN

SEQ ID NO: 69055 - protein, 606 aa, Zea mays
  Coding DNA Sequence Number=SeqID_27276
  Gene Ontology: Mol. function=transporter activity; Cellular component= membrane; Biological process=oligopeptide transport
  Homolog annotation: Hit_ID=Q9FWL0; Match level="QueryCoverage=99%, HitCoverage=99%, E-value=0.0, Identity=80%"; Hit description =Putative peptide transport protein
  Pfam annotation: Domain name=MFS_1; Domain location=40-524; Score =5.1; E_value=0.00019; Accession=PF07690.6; Description=Major Facilitator Superfamily
  Pfam annotation: Domain name=PTR2; Domain location=102-508; Score =406.6; E_value=3.5e-119; Accession=PF00854.12; Description=POT family
  Pfam module annotation: Pfam domain module=MFS_1::PTR2; Domain location=40-524::102-508
MAERLEAAASDEYTQDGTVDLHGNPVLRSRRGGWRACGFVVVYEVFERMAYYGISSNLVLYLTKKMHQGVVPSANNVTNWVGTIWMTPIIGAYVADAHLGRYRTFMVASVIYLSGMILLTLAVSLPALRPPKCGAGTADPDCVHKATSEQLGVFFLALYILAVGTGGTKPNISTIGADQFDDAHPRERAHKLSFFNWWMFSIFFGTLFANTVLVYIQDTVGWAVGYALPTLGLAVSIAVFTAGTPFYRHKPTSAESPFAKMARVIVAAARKLDVPVPVDPRDLHELDAEHYAKRNVAPLPHTPNLSVLSKAAVKTGAATSRWSLSTVTQVEETKQMLKMLPVLAITFVPSAMMAQINTLFVKQGTTLDRHVGRHFEIPPASLQGFVTISMLLAVVLYDRAFMPFARRVTANPRGISLLQRMSVGLVIHILIMAIASLTERHRLAVARDHGLYDSKGTTVPLTIFVLLPQFVLMGVADAFLEVAKIEFFYDQAPEGMKSLGTSYAMTSLGIGNFLSSALLSAVSHITRRHGRTGWILNNLNASRLDKYYAFFAILNCANLVAFFFVCRFYVYNAEVSHVVDAGSSKQKREVPMAMQPPAVGAVDATL

SEQ ID NO: 69056 - protein, 826 aa, Zea mays
  Coding DNA Sequence Number=SeqID_27277
  Gene Ontology: Mol. function=RNA-directed DNA polymerase activity; Cellular component=intracellular; Biological process=RNA-dependent DNA replication
  Homolog annotation: Hit_ID=UPI00004C1731; Match level="QueryCoverage =94%, HitCoverage=52%, E-value=0.0, Identity=86%"; Hit description =UPI00004C1731 related cluster
  Pfam annotation: Domain name=RnaseH; Domain location=312-439; Score =11.2; E_value=5.3e-06; Accession=PF00075.14; Description=RNase H
  Pfam annotation: Domain name=rve; Domain location=538-697; Score =112.3; E_value=1.4e-30; Accession=PF00665.16; Description=Integrase core domain
  Pfam module annotation: Pfam domain module=RnaseH::rve; Domain location=312-439::538-697
MPFGLRNAGATYQRCMNHVFGEHIGRTIEAYVDDIVVKTRKASDLLSDLEVTFRCLKAKDVKLNPEKCVFGVPRGMLLGFIVSERGIEANPEKIAAITSMGPIKDLKGVQRVMGCLAALSRFISRLGERGLPLYRLLRKAECFTWTPEAEEALGNLKALLTNAPILVSPAAGEALLIYVAATTQVVSAAIVVERREEGHALPVQRPVYFISEVLSETKICYPQIQKLLYAVILTRRKLRHYFESHPITVVSSFPLGEIIQCREASGRIAKWAVEIMGETISFAPRKAIKSQVLANFVAEWVDTQLPTAPIQPELWTMFFDGSLMKTGAGAGLLFISPLGKHLRYVLRLHFPASNNVAEYEALVNGLRIAIELGVRRLDARSDSQPVIDQVMKNSHCRDPKMEAYCDEVRRLEDKFYGLELNHVAWRYNETADELAKIASGRTMVPPDVFSRDLHQPSVKTDDTLKPEEASAQSEAPSARPEAPSASEAPRALVGNAFQQGFYWPTVVADATRIVRTCEGCQFYARQTHLPAQALQTIPITWPFAVWGLDLVGPLQKAPGGYTHLLVAIDKFSKWIEVRPLNSIRSEQAVAFFTNIIHRFGVPNSIITDNGIQFTDRKFLDFCEDHHIRVDWAAVAHPITNGQVERANGMILQGLKPRIYNDLNKFGKRWMKELPSMVWSLRTTSCRATGFTPFFLVYGAEAILPTDLEYGSPRTRAYADQSNQANREDSLDQLEEARDMALLHSVWYQQSLRRYHVRGVRSRDLQVGDLVLRLRQDARGRHKLTPPWEGPFVVAKVLKPGTYKLANSQGEVYNNAWNIQQLRRFYP

SEQ ID NO: 69057 - protein, 52 aa, Zea mays
  Coding DNA Sequence Number=SeqID_27278
MSQEAPSLPYPKLTQATGNKTGVPSGSLRQTRIGVCLESSTTSIIHKNPEEY

SEQ ID NO: 69058 - protein, 46 aa, Zea mays
  Coding DNA Sequence Number=SeqID_27279
METTLYTWTSRARVKEEAMAFRKKMACLLRLKVQTRRLSTHTLAPK

SEQ ID NO: 69059 - protein, 39 aa, Zea mays
  Coding DNA Sequence Number=SeqID_27280
MEAMRRLEALASQGRVAMMEAEALKDEEARDFEDSVTTQ

SEQ ID NO: 69060 - protein, 110 aa, Zea mays
  Coding DNA Sequence Number=SeqID_27281
MPPSVKPAVTIEASQPSMKVVQAEAAKGAIDVGGVVVELLLVDYLIKLPVKALTSVTKAVKYVVEQMCYVGAFANQVASIAFVDSVTSQLRTEKGELEARVECLLVEVKS

SEQ ID NO: 69061 - protein, 1028 aa, Zea mays
  Coding DNA Sequence Number=SeqID_27282
  Gene Ontology: Mol. function=RNA-directed DNA polymerase activity; Cellular component=intracellular; Biological process=RNA-dependent DNA replication
  Homolog annotation: Hit_ID=UPI00005A975E; Match level="QueryCoverage =99%, HitCoverage=59%, E-value=0.0, Identity=89%"; Hit description =PREDICTED: similar to Retrovirus-related Pol polyprotein from transposon 297
  Pfam annotation: Domain name=RVT_1; Domain location=56-225; Score =149.7; E_value=7.5e-42; Accession=PF00078.17; Description=Reverse transcriptase (RNA-dependent
  Pfam annotation: Domain name=RnaseH; Domain location=455-582; Score =11.7; E_value=4.7e-06; Accession=PF00075.14; Description=RNase H
  Pfam annotation: Domain name=rve; Domain location=780-939; Score =125.8; E_value=1.3e-34; Accession=PF00665.16; Description=Integrase core domain
  Pfam module annotation: Pfam domain module=RVT_1::RnaseH::rve; Domain location=56-225::455-582::780-939
MPGIPRDVAEHSLDIRAGARPVRQPLRRFDEEKRRVIGEEIHKLMAAGFIKEVFHPEWLANPVLVRKKGGKWRMCVDYTGLNKACPKVPYPLPRIDQIMDSTAGCETLSFLDAYSGYHQIRMKESDQLATSFITPFGMYCYVTMPFGLRNAGATYQRCMNHVFGEHIGRTVEAYVDDIVVKTRKASDLLSDLEVTFRCLKAKGVKLNPEKCVFGVPRGMLLGFIVSERRIEANPEKIAAITSMGPIKDLKGVQRVMGCLAALSRFISRLGERGLPLYRLLRKTECFAWTPEAEEALGNLKALLTKAPILVPPADGEALLVYVAATTQVVSAAIVVERQEEGHALPVQRPVYFVSEVLSETKIRYPQVQKLLYAVILTRRKLRHYFESHPVTVVTSFPLGEIIQCREASGRIAKWAVEIMGETISFAPRKAIKSQVLADFVAEWVDTQLPTAPIQPELWTMFFDGSLMKTGAGAGLLFISPLGKHLSYVLRLHFPASNNVAEYEALVNGLRIAIELGVRRLDARGDSQLVIDQVMKNSHCRDPKMEAYCDEVRRLEDKFYGLELNHIARRYNETADELAKIASGRTTVPPDVFSQDLHQPSVKINDTPELEAPSVQPEVPSAQPEASSVQPKVPSAPEGEALHVEEEQNEATPDRNWQTPYLQYLRQGELPLDQAEARRVARRAKSFVLLGDEEELYHRSPSGILQRCISIAEGQELLREIHSGACGHHAAPRALVGNAFRQGFYWPTAVADATRIVRTCEGCQFYAKQTHLPAQALQTIPITWPFAVWGLDLVGPLQKAPGGYTHLLVAIDKFSKWIEVRPLNSIRSEQAVAFFTNIIHRFRVPNSIITDNGTQFTSKKFLDFCEDHHIRVDWAAVAHPMTNGQVERANGMILQGLKPRIYNDLNKFGKRWMKELPSVVWSLRTTPSRATGFTPFFLVYGAEAVLPTDLEYGSPRTRAYNDQSNQASREYSLDQLEEARDKALLHSARYQQSLRRYHARGVRPRDLQVGDLVLRLRQDARGRHKLTPP

SEQ ID NO: 69062 - protein, 162 aa, Zea mays
  Coding DNA Sequence Number=SeqID_27283
  Gene Ontology: Mol. function=zinc ion binding; Cellular component =intracellular
  Homolog annotation: Hit_ID=Q1RUU9; Match level="QueryCoverage=48%, HitCoverage=6%, E-value=5e-09, Identity=33%"; Hit description=BRCA1 C Terminus (BRCT) domain, putative
  Pfam annotation: Domain name=BRCT; Domain location=4-71; Score=28.9; E_value=1.8e-05; Accession=PF00533.16; Description=BRCA1 C Terminus (BRCT) domain
MVSVVATVSGYHGDERHRLVNLIAETGASYVGSMSRSITHLVCWRLEGKKYDIARRLGTLVVSHWWFTECLREGRRLPVDSYLMVSDSDRDNDKKGKRREKKRYHKKRGGDAHVCREWDSDESSTESSSDEDAANIAVTKGLLFPNVGHKVPHGKGRQKKEG

SEQ ID NO: 69063 - protein, 64 aa, Zea mays
  Coding DNA Sequence Number=SeqID_27284
MAAAGVSEALYAKVVGPVLLPGNRWRRLMYSLDDLVAGVTWPSSLPLGRMVERVTASAREDQEE

SEQ ID NO: 69064 - protein, 199 aa, Zea mays
  Coding DNA Sequence Number=SeqID_27285
  Subcellular localization annotation: CTP_CleavageSite=27; ConfidenceScore=5.17e-01
MGDGSAHTSDACCICSTVAPPCTVNTRAAYRSPSSSAVYRDVESCATSCGLDLQPRSGHLSVLMTRLRTKGICGYLTDQVFQNNQAVHIMGAPNRHHRQAPLPRSVARPAPGTNDADSYLNVTARGSPSLLDPSPEPYQRRILCIILIDCNLADGEYVLIPEQGDQEEAQELATKAATEDLPAAPAIEGKPRVTPGFKG

SEQ ID NO: 69065 - protein, 54 aa, Zea mays
  Coding DNA Sequence Number=SeqID_27286
MARVECTLRGKRLDGGVSVLLIPSWVLIDSDRRYFSDMKTWSLPYMQQSSKVKG

SEQ ID NO: 69066 - protein, 127 aa, Zea mays
  Coding DNA Sequence Number=SeqID_27287
  Subcellular localization annotation: CTP_CleavageSite=80; ConfidenceScore=5.16e-01
DQVATPAEIAKAYMGLKSSKGSPLRLRLHDPSSMPITSMEVSMSQKAKPPTIPLAQGSRLHTSKTSDCLESNYTTPNGVICKMSSSPYFKSGVSSKELFGSVSSHYQTSNSVHTFGRQDYYDSELQI

SEQ ID NO: 69067 - protein, 86 aa, Zea mays
  Coding DNA Sequence Number=SeqID_27288
MAVGGLLGGAFWATRALEVVKRNDSPGLLWKRIKLTTTRKNNAKKRLKRLWQVDYLPPPLLRSRSVHAHAYDLRGKGFLASMRGRR

SEQ ID NO: 69068 - protein, 65 aa, Zea mays
  Coding DNA Sequence Number=SeqID_27289
MESQRYNYGSGAGTGGKIRRYPPSRAVAASPYARPATAPTHAPGTATAAWMIVQNVKKTVEWLPM

SEQ ID NO: 69069 - protein, 139 aa, Zea mays
  Coding DNA Sequence Number=SeqID_27290
MATTSSSTASKPKRAKVLTRRTKLHSLEKTAAVPATEKIEIVEHAEAIPLASEIIPAATVEANVGSVEETEAKSSKTEEHLKLLSPPTTTGLPKLTTAAVITPRKGRRMSSVLDAVLKPSKVLTPVSTKASEDDIEKLG

SEQ ID NO: 69070 - protein, 134 aa, Zea mays
  Coding DNA Sequence Number=SeqID_27291
MQVACNCTTGTHPFDFDASSMEAQAHTTCNRRADYYVRKTAPPLAPMPRLVDCGTGAATRGNPVHGPTVPTEHIGHGPVNRGRRDRERGYPKRDPSPRRKRAPSPPTDQGFEGWSLGRVRQPRPEHSGFRLITD

SEQ ID NO: 69071 - protein, 505 aa, Zea mays
  Coding DNA Sequence Number=SeqID_27292
MVLKRKSTVSNEFVSAGPIRRIHQRYNRTSPLLETQLGYRRYPVGYGSKLEGSEQLARTQKRRCLDKVGDASLGSVEDKTNVNYPGQVPEKSAEMATKILKQLDTLVPSQKENTSETKQKHESAIYFEEDVSRQKKVQAERDLLEPSPSEVPDGIASNKSISQITLNKEKPPAFSSRGNAPNLVLSDEIGRSKMSTPGNGFTFPAPTVNNAYSQGPPTPTLTSPILTVEKQPSVFCSASVTSAQSDPRISKSVLGGPVTQKLESKLNGDNQRVPSKNSGQVASFTSNPVFKVDGPGHASNSVLSAVQSYNTSTGSVSFQSAGSSTISTNLTSNITQSCSTGGSFTFSNTRFGSLSATSNMFAAKSLALSCTASPGASLGFPPVHTASSPAAHRKSEAANSSISFSSMQQFGIAGSSTVQDKSKAVDSSTPFGFPQKFDTIHQLVQQQCALALRIQTLCFLGLLAQVQELLHHLPLLQAHLLLLVPVQHFQHIPFRQQIDYTCFTS

SEQ ID NO: 69072 - protein, 64 aa, Zea mays
  Coding DNA Sequence Number=SeqID_27293
MGMDLRDFGIHNAPVIGVGKVFLEHADTKANTRMHGRKFSRNQVVVVRRPHMQALRPRPPTPTR

SEQ ID NO: 69073 - protein, 97 aa, Zea mays
  Coding DNA Sequence Number=SeqID_27294
MAARWGRAPAPAAMDRGRKKGAAGLPAAGEQREDEPGKSRVREGGKESCWTTDAGGSWAAMGGEEEPRSLLLACVKEPGGWENGREEEKGCWRLGGR

SEQ ID NO: 69074 - protein, 94 aa, Zea mays
  Coding DNA Sequence Number=SeqID_27295
MARPRRDGAADLLPGAAARAEPLRAVPVCLSGSAPLPASRRQPVPAIFFDLGELPASLLARMLCTSAPWNLSKCERQVHAGMQSKCERLSTFDG

SEQ ID NO: 69075 - protein, 110 aa, Zea mays
  Coding DNA Sequence Number=SeqID_27296
  Gene Ontology: Mol. function=nuclease activity; Cellular component =intracellular; Biological process=DNA repair
  Homolog annotation: Hit_ID=Q5CT62; Match level="QueryCoverage=88%, HitCoverage=25%, E-value=2e-08, Identity=33%"; Hit description =Holiday junction resolvase, S1x1p, URI domain nuclease
  Subcellular localization annotation: CTP_CleavageSite=15; ConfidenceScore=5.21e-01
MSLTAAFPCHQNPARSSSKVRLRQHNGELKGGAKASSAGRPWNLACLVEGFANRSEACEFESKWKIVSRKIARKRTELSMKSVLQHREAALSRVETFMDCSHLKIKWQSS

SEQ ID NO: 69076 - protein, 99 aa, Zea mays
  Coding DNA Sequence Number=SeqID_27297
  Gene Ontology: Mol. function=two-component response regulator activity; Biological process=two-component signal transduction system (phosphorelay)
  Homolog annotation: Hit_ID=Q9FRY9; Match level="QueryCoverage=56%, HitCoverage=24%, E-value=3e-26, Identity=100%"; Hit description =Response regulator 6
MSSKLDSFCLLVYNLTLRASYLSPFNLPLRTGVSHGGPIYTYVLGQDFFGACTLSLAVVYAIAAADCGVPAFATVTVTLLVLFLVASAFQYVGLELVHV

SEQ ID NO: 69077 - protein, 159 aa, Zea mays
  Coding DNA Sequence Number=SeqID_27298
MGPAHPVSWDQVSKTGATPYDRALRERHNSQCRDRRHTHEHERERVERDAMHRCKNTSSVVLKQLQTGCAYDRTRSLPREGTPPRLKLDHGLGRTSISPERGFNLDSIDKRTLDVTRSTELTSGYFTDCQELFAILITVSTTMTRTTRSPDKLGYATEP

SEQ ID NO: 69078 - protein, 134 aa, Zea mays
  Coding DNA Sequence Number=SeqID_27299
MTSNVTVSVSALACLALWCSSPGTVDPSLDMGVSSTLPCIKRISGKKELGGASRAPAISLAGGAAGLVGRACLHGQCPRRRPLLRRVHDAVQDAFSIRDEGERSKAENLPALKMLGVFKMIATESSGINVAPHT

SEQ ID NO: 69079 - protein, 122 aa, Zea mays
  Coding DNA Sequence Number=SeqID_27300
MAPLVALHEAINRGAQGFIRERRTLHGNVMDWYDSGAFKNFEDAKERFRAKYYGEPFEDPVLGPNMYIDEVDHLCKVDPELVAELDKIHGLDFIVDMGWGEPFANLIPMGYGGPVANLVPTG

SEQ ID NO: 69080 - protein, 235 aa, Zea mays
  Coding DNA Sequence Number=SeqID_27301
  Gene Ontology: Cellular component=nucleus; Biological process =regulation of transcription
  Homolog annotation: Hit_ID=Q2RAQ8; Match level="QueryCoverage=96%, HitCoverage=73%, E-value=2e-43, Identity=44%"; Hit description=GRAS family transcription factor containing protein, expressed
  Pfam annotation: Domain name=GRAS; Domain location=2-235; Score=-9.1; E_value=6.6e-08; Accession=PF03514.5; Description=GRAS family transcription factor
MAPPSVQEQELVLLVPALYQCAAHVSEGSLEKANFSLSEIKRLSSIADGPLQRLPDALARRLLLPCEGLAGALIHPSDYFERSGGVRSARRTFAGLSPFLHAAFAATNRAILEAMEDEKVVRIVDLSCCSAASHPCQWLDLLHGFVHGRRPPPEVRLTVVHDDDDFVAGMRAALAKEAHRLNIPFQFNHVLVVRGGGLETMDLRGDFRDVLGVKYGEAVAVSCCLQMHRLLAPRG

SEQ ID NO: 69081 - protein, 258 aa, Zea mays
  Coding DNA Sequence Number=SeqID_27302
  Gene Ontology: Mol. function=protein binding; Biological process =proximal/distal pattern formation
  Homolog annotation: Hit_ID=Q2QXZ2; Match level="QueryCoverage=51%, HitCoverage=31%, E-value=1e-44, Identity=64%"; Hit description =Ankyrin repeat family protein, putative, expressed
  Pfam annotation: Domain name=BTB; Domain location=101-233; Score =29.8; E_value=8.1e-06; Accession=PF00651.21; Description=BTBPOZ domain
MAREKIKRKLVSPREIASPAGTVTLLRAHIKGTVDKDCSVALALAAGDGDAGPTHELSQVFSLYYLSGIASHRIDGATTYGTAHEIMSSEDSLKSLSLDYLNLLINGQAFSDVAFSVEGRLVHAHRCVLAARSLFFRKLFCGLDPNHPPPPPGARAAAAAAPELVIPVSSIRYEVLVLVLQFLYSGQASVAAPKSGPLPGCGARGCWHTRCGAAVDLALDTLAAARSFGVEQLALLVPGGWEWDGLAGAWGQTGSTNL

SEQ ID NO: 69082 - protein, 559 aa, Zea mays
  Coding DNA Sequence Number=SeqID_27303
  Gene Ontology: Mol. function=protein serine/threonine kinase activity; Cellular component=cytoplasm; Biological process=protein amino acid phosphorylation
  Homolog annotation: Hit_ID=Q84SX8; Match level="QueryCoverage=96%, HitCoverage=98%, E-value=1e-169, Identity=60%"; Hit description =Putative MAP kinase
  Pfam annotation: Domain name=Pkinase; Domain location=24-312; Score =202.2; E_value=1.2e-57; Accession=PF00069.15; Description=Protein kinase domain
  Pfam annotation: Domain name=Pkinase_Tyr; Domain location=24-309; Score=90.6; E_value=4.7e-24; Accession=PF07714.7; Description =Protein tyrosine kinase
  Pfam module annotation: Pfam domain module=Pkinase::Pkinase_Tyr; Domain location=24-312::24-309
MAAANNAASGGGDEARYPLNAESYRLLCKIGSGVSAVVYKAVCLPLGSSAVVAIKAIDLERSRADLDGVQREAKAMALLSHGNVLRAHCSFTVGSHLWVVMPFMGAGSLHSILRHGFPGGLPEPCVAVVLGETLRALCYLHGQGRIHRDIKAGNILVDSDGAVKLADFGVSASIYETIRQHASASASTAAAVGTGSSASCCFNDVAGTPYWMAPEVIHSHVGYGIKADIWSFGITALELAHGRPPLSHLPPSKSMLMRITSRVRFEESVGTGNRRDKNNKFSRAFKDMVSACLCQEPAKRPDFLVRNVLAAVPSIEERCRKDDEAGNDLCGCVGGGARCVSPCPRHADNVVVAKNRRISGWNFNEDNLEFDPTTEERPVEAEKRCLPFDFDEGDDQVELHDSNSAGDGDGDRGRPPAQPQHGDGDDHVHGKAAEAVGLKQQQQVVTQQLMTVLQSLEMQRDMVTHVLQRTAGRLDDGGGNGDVSVTAPREEREEMLLGYVRQLEHRVEDLRKEVEEEMAWNARLEKMLQERVIISDDDKKMNSSKTSSSAELRAVDENI

SEQ ID NO: 69083 - protein, 134 aa, Zea mays
  Coding DNA Sequence Number=SeqID_27304
MDLAASSCSDRKGVIGAQCRGCAPLASIAALGGEKSVCRYLLVKPLGLGWWLEGNSPACAGISSGDSGDRCRRFRISPEWSCWALASGGCAAWMKRIWDPSNGYGVRIWGCPAMLRRGGQAAPSGVRTHGEEQF

SEQ ID NO: 69084 - protein, 67 aa, Zea mays
  Coding DNA Sequence Number=SeqID_27305
MENHPRKQCYHNGECSSGLVEKWPQQPNLSRQDELERRCLLEQDDPGQYGLGAMCTHTWEDHLVSGS

SEQ ID NO: 69085 - protein, 461 aa, Zea mays
  Coding DNA Sequence Number=SeqID_27306
  Gene Ontology: Mol. function=transferase activity, transferring acyl groups, acyl groups converted into alkyl on transfer; Cellular component=intracellular; Biological process=carboxylic acid metabolic process
  Homolog annotation: Hit_ID=O04973; Match level="QueryCoverage=98%, HitCoverage=70%, E-value=1e-142, Identity=59%"; Hit description=2 -isopropylmalate synthase A
  Pfam annotation: Domain name=HMGL-like; Domain location=1-157; Score =54.5; E_value=3.5e-13; Accession=PF00682.9; Description=HMGL-like
  Pfam annotation: Domain name=LeuA_dimer; Domain location=264-439; Score=173.1; E_value=6.9e-49; Accession=PF08502.1; Description=LeuA allosteric (dimerisation) domain
  Pfam module annotation: Pfam domain module=HMGL-like::LeuA_dimer; Domain location=1-157::264-439
MVAYARSLGCTDVEFSPEDAGRSNREFLYHILGEVIKAGATTLNIPDTVGYNLPYEFGKLIADIKANTPGIEKAIISTHCQNDLGLATANTLAGARAGARQLEVTINGIGERAGNASLEEVVMAIKCRRELLDGLYTGIDSRHITLTSKMVQEHSGLHVQPHKAIVGANAFAHESGIHQSGIVLHAHFSSFCRMGCLNIKEHTKLYRLMIFGLTRANEFGIVLGKLSGRHAVRSKLVELGYEIGDKEFEDFFKRYKEVAEKKKRVTDEDLEALLSDEIFQPKVIWSLADVQATCGTLALSTATVKLVAPDGEEKIACSVGTGPVDAAYKAVDKIIQIPTVLREYSMTSVTEGIDAIATTRVVVTGDVSNNAKHALTGQSFNRSFRLYSSCLKSVSISAILFFFLTVSSCLSYGFSGSGASMDIVVSSVRAYLSALNKICSFAGAVKASSDVAETASVPSTE

SEQ ID NO: 69086 - protein, 46 aa, Zea mays
  Coding DNA Sequence Number=SeqID_27307
MEEDVGSIGCGFRYRPGGRVMALGAVDLGHTRGNGEVGRGYRKIVF

SEQ ID NO: 69087 - protein, 301 aa, Zea mays
  Coding DNA Sequence Number=SeqID_27308
EVEARLVVLAISGNMPQVLPRRTSAIQITRRKFPLGLRDRRLPLLPPALSDDSDDSQGLSAAVWTYIRAIERAGLEGSDESEVSSDEENSSGSSEERSNDDSDDEGDGSGDDSGGGDGGEGSDDDSCGGGDDGNCNTPAELLTLADTWCSSLAHVLQPAEPLPSALGADVLCPHLLPRRRPLPIGALQVGVFSLPDVSGAMAAAPRVACSTAPIRPSPYCRSPMARPCILLQLALPSPLAPYPQRRAPYLTVPLVVELVELPFLSLVLAHSAPSSQASPASLLATLPYPLAVSTWRANPKC

SEQ ID NO: 69088 - protein, 318 aa, Zea mays
  Coding DNA Sequence Number=SeqID_27309
  Gene Ontology: Mol. function=protein binding; Biological process =proximal/distal pattern formation
  Homolog annotation: Hit_ID=Q2QXZ2; Match level="QueryCoverage=98%, HitCoverage=62%, E-value=1e-136, Identity=82%"; Hit description =Ankyrin repeat family protein, putative, expressed
  Pfam annotation: Domain name=Ank; Domain location=121-154; Score =14.9; E_value=0.22; Accession=PF00023.20; Description=Ankyrin repeat
  Pfam annotation: Domain name=Ank; Domain location=156-188; Score =36.3; E_value=1.1e-07; Accession=PF00023.20; Description=Ankyrin repeat
  Pfam module annotation: Pfam domain module=Ank::Ank; Domain location =121-154::156-188
MVKEASVDDVMKVLMASRKFEMQELWATCSHLVARSGLSADLLAKHLPIDVVAKIEEIRAKSPVPAGAPRSPFLTHHYLPINAASSAADRDHKIRRMRRALDAADIELVKLMVMGEGLDLDDALAVHYAVQHCGRDVVKALLELGAADVNSRAGPTGKTALHLAAEMVSPDMVSVLLDHHADPSARTLDGVTPLDVLRGLTSEFLFKGAVPGLTHIEPNKLRLCLELVQSAVMVTTRDVDAAGDDAGGSDGGGGGNFPRSDADDSLVSLTMNSTLMYQGQEMAAAAVAAGEARKGNGGGGGGGRGSPSNLYFPNGGFP

SEQ ID NO: 69089 - protein, 248 aa, Zea mays
  Coding DNA Sequence Number=SeqID_27310
  Gene Ontology: Mol. function=kinase activity; Cellular component =ornithine carbamoyltransferase complex; Biological process=amino acid metabolic process
  Homolog annotation: Hit_ID=Q6QP54; Match level="QueryCoverage=65%, HitCoverage=37%, E-value=1e-24, Identity=69%"; Hit description =Putative kinase
GSDSGLAPEDDELRSARPRAWTRAQPRKTANSAPPDPGLGLGLSPGRRRTPLCPTQGSDMGSAPEDDELCLARPRARTQPWPQPTVSASPDQGSDIGSTPKDDELRLARPQGSDSTLASADGLRLARPRGSDSTTATEDRLDLGGASTSPNLGRGPTTSTGGAKREIQSLLGLGALDSVWWCTGQCPVVHRTVSGAPGWLWRTRRSREMINGVRLKFTGLSGGAPDCPVSQRVRCANGSQTPTVGFAK

SEQ ID NO: 69090 - protein, 244 aa, Zea mays
  Coding DNA Sequence Number=SeqID_27311
  Gene Ontology: Mol. function=peptidase activity; Cellular component =membrane
  Homolog annotation: Hit_ID=Q8H1V6; Match level="QueryCoverage=91%, HitCoverage=77%, E-value=1e-84, Identity=75%"; Hit description =Hypersensitive-induced reaction protein 4
LDSLDIADRIIQQVDKKFYVDNVFVQLICTIQYRVVKENADDAFYELQNPQQQIQAYVFDGDWLDIIGSACNCSDTSGHSLGDNFKYLTIAPVMADYGYSIEHILMVDIIPDAAVRKAMNDINAAQRLQLASVYKGEAEKILMVKKAEAEAEAKYLSGVGIAKQRQAITDGLRENILNFSHSVSGTSAKEVMDLIMVTQYFDTIKELGDGSKNTTIFIPHGPGHVKDISEQIRDGMMQASSSNV

SEQ ID NO: 69091 - protein, 50 aa, Zea mays
  Coding DNA Sequence Number=SeqID_27312
MPQLQENLCGLLYLARQDYLYQFNTESGIAYGSFSPLLIVIRLTINDRRK

SEQ ID NO: 69092 - protein, 430 aa, Zea mays
  Coding DNA Sequence Number=SeqID_27313
  Gene Ontology: Mol. function=nucleoside-triphosphatase activity; Cellular component=membrane; Biological process=transport
  Homolog annotation: Hit_ID=Q6ZIV9; Match level="QueryCoverage=99%, HitCoverage=49%, E-value=0.0, Identity=71%"; Hit description =Putative ABC transporter
  Pfam annotation: Domain name=ABC_tran; Domain location=174-321; Score= 100.5; E_value=5e-27; Accession=PF00005.17; Description=ABC transporter
MATDGWTLVMEIVPGFSLYRGLYELGQYAFSGSSIGTTGMTWRSLKDPLNGMRDVMIVMSVEWAVLLILAFYLDQTSLLGGGVRKNPFFCFRCLQKKCATSLHEPSFVQQDSKVILDMEKSDVALERKVVEQFLIDPNANQAIICDNLRKVYHGRDGNPDKLAVRGLSLVLQKGQCFGMLGPNGAGKTSFINMVCLLWETLTGKEHLFFYGKLKNLKGSALMKAVDHSLKSVNLSHGNVGDKQVKKYSGGMKRRLSVAISLIGDPKVVFMDEPSTGMDPASRNNLWNVVKEAKKNRAIILTTHSMEEAEVLCDRLGIFVDGDFQCLGNPKELKARYGGTYIFTVTTPPDQEMEVEHLVRQFSPSANKIYHLSGTQKFELPKQEVKIAHVFDMVEKAKRRLSIHAWGLVDTTLEDVFIKVARGAQVFNEFA

SEQ ID NO: 69093 - protein, 34 aa, Zea mays
  Coding DNA Sequence Number=SeqID_27314
MATTVRVLLCGVGCPWIRSEPGHLNIDSRIRLLR

SEQ ID NO: 69094 - protein, 111 aa, Zea mays
  Coding DNA Sequence Number=SeqID_27315
  Subcellular localization annotation: CTP_CleavageSite=33; ConfidenceScore=5.33e-01
MAAAPFSRLDPSANNVNRQRDPSATILGPARSSAAHSGDCEGKGGSTASASSSYLWPARWERRVGIAMALKPAGRGFQTSICGFNIKPAPITRDEYNMLPIPTTSEVPKST

SEQ ID NO: 69095 - protein, 73 aa, Zea mays
  Coding DNA Sequence Number=SeqID_27316
MVTGENPGSSRKKNEERTPSKEAGDKHKEESVSSIKSHKKGDKKKKEEYNKVQGLKSAKEIWDVLKTTHEGMR

SEQ ID NO: 69096 - protein, 46 aa, Zea mays
  Coding DNA Sequence Number=SeqID_27317
MKALGKKTRPGHQPTMGASRRTHLSVGTPPKFNPENLPFFLFQIHK

SEQ ID NO: 69097 - protein, 673 aa, Zea mays
  Coding DNA Sequence Number=SeqID_27318
  Homolog annotation: Hit_ID=Q10ML5; Match level="QueryCoverage=31%, HitCoverage=16%, E-value=2e-75, Identity=58%"; Hit description=BRCA1 C Terminus domain containing protein, expressed
  Pfam annotation: Domain name=Ion_trans_2; Domain location=440-524; Score=61.9; E_value=2.1e-15; Accession=PF07885.6; Description=Ion channel
  Pfam annotation: Domain name=Ion_trans_2; Domain location=568-642; Score=50.4; E_value=6.1e-12; Accession=PF07885.6; Description=Ion channel
  Pfam annotation: Domain name=PHD; Domain location=286-337; Score =16.2; E_value=0.0014; Accession=PF00628.19; Description=PHD-finger
  Pfam module annotation: Pfam domain module=Ion_trans_2::Ion_trans _2::PHD; Domain location=440-524::568-642::286-337
  Subcellular localization annotation: CTP_CleavageSite=31; ConfidenceScore=5.49e-01
APLSSPLWSPTPSAAPAPAMVAALPAQNSPVVQLAEGYSVNHMVSPQRAEESTLRGYSNLSTLETRQQKVIQPADVQSIAGNENPKREDGLDGACAQKRFFLKASFTKSECSKLLSPIRWILKREYLTSCIEAGKFVDEEPFEWFGTGFNDGRTISFDAPRKWRNIRQQMGHGAFYGMQIVAYGQFILPTLDTVKRAVKAGNGAVLATSPPYTRNSSATAHGIPCVSADYLVEYVCKPGQPLDRHVLFETNCVASMSLEKLTKKQLEMATAEKSEPSEDDDPEDLSCSACGRRDRGDVMLICGDEAGGGIGMHIDCCDPPLDAVPDDDWMCPRGSRELKGAEPNQGRAQDECARRRLRRRTRHSVPTVPRNRWNPTSPTAVSSLCFPEPESEKSPFDMDTEPLLPAHLLHSLPEHSEPAAGDQAPAPPRAPLHRAGTPSSFLLAYLALGVTFYAAAPANFSSSAGPTHPVADALYFCIVTLCTIGYGDITPATPAAKLFSISFVLIGFGFVDILLSGMVSYVLDLQEHLLITALKNPTSARKHRHNYIFDVKKGRMRIRMKVALALGVVAVCVGVGAAVLRRVESLGWLDAVYLAVMSVTTVGYGDQAFRTLAGRLFASAWLLVSTLAVARAFLYLAEMRIDKRHRAMANWVLSRDMTVSEFLAADIDNNGYV

SEQ ID NO: 69098 - protein, 199 aa, Zea mays
  Coding DNA Sequence Number=SeqID_27319
MLRPRLSSLLATVQSPLDAFHGEQIVGLPKSPPRTPPSAPPRQIHKVASDGSIGNGSMDVGVDGGGEDEGDYDEEDIRPLLSFDEMLHLHAACGVVLPGDMMEASRCRGSHSRGHCRDTADAEGGGAPALHRLYPLLDFLASPITSRKEEFGDEDPTSQRSIVPLPTPMSTAVTPGHGSPLPRDAISSPPSQLSRTPLS

SEQ ID NO: 69099 - protein, 180 aa, Zea mays
  Coding DNA Sequence Number=SeqID_27320
  Gene Ontology: Mol. function=nucleic acid binding; Cellular component= nucleus; Biological process=mRNA editing
  Homolog annotation: Hit_ID=Q6Z996; Match level="QueryCoverage=85%, HitCoverage=23%, E-value=6e-64, Identity=69%"; Hit description =Putative pentatricopeptide (PPR) repeat-containing protein
MPACMPVAEGRRCFRAMIEHGVVPEIDHYSCMVDLFGRAELLDEAWNLIQTMPMPPNGVVWSSLLASCRVHGSTWIGIQAAEHRLKLEPSCAAIHVQLANLYGSIGCWDDVARVRKVMKERGLKTNIGCSWIEVGNKVYTFTAENRSKNQSHMDHEYDILLIEGLDWDYPEHIKLSLNTI

SEQ ID NO: 69100 - protein, 163 aa, Zea mays
  Coding DNA Sequence Number=SeqID_27321
MAPYLLKAACGRAVMARAQLAACGDGCGGGRRWEVAVDCGEDLGRGWLSACVARGDDVEGDLGKGTDSSACAARGDGCGGDVDGRWPSTAARMTPSALKAAWGMALMARPTPRVRTGVEAGVDGRRGVDGRRGTGIGEGDEMVVGARVYLVAQGSTQFGGVPR

SEQ ID NO: 69101 - protein, 245 aa, Zea mays
  Coding DNA Sequence Number=SeqID_27322
  Gene Ontology: Mol. function=ribonuclease H activity; Cellular component=nucleus; Biological process=RNA metabolic process
  Homolog annotation: Hit_ID=Q53QG3; Match level="QueryCoverage=99%, HitCoverage=82%, E-value=1e-122, Identity=85%"; Hit description =Ribonuclease HII, putative
  Pfam annotation: Domain name=RNase_HII; Domain location=1-174; Score =93.0; E_value=9e-25; Accession=PF01351.8; Description=Ribonuclease HII
SKTLKEEQREELFESLKANSSIGWEVDVICPKDLSAKMLKRSKVNLNEISHNSAMGLVRKVLDMGVLLAEVYVDTVGDPEKYRTKLTEKFPGVKFVVAKKADSLYPVVSGASIAAKVTRDRALRNWVFDETALSLHMRTGSGYPGDPDTKQWLEDHKHPVFGFPTLVRFSWGTCKPFFKDAVDVTWESDEVDEEGTDNGGAKRQVKLSSLGFTGFKRKTEDIESSGKGRCKFFQARKLELVRKFQ

SEQ ID NO: 69102 - protein, 70 aa, Zea mays
  Coding DNA Sequence Number=SeqID_27323
  Gene Ontology: Mol. function=ribonuclease H activity; Cellular component=nucleus; Biological process=RNA metabolic process
  Homolog annotation: Hit_ID=Q53QG3; Match level="QueryCoverage=71%, HitCoverage=17%, E-value=4e-20, Identity=86%"; Hit description =Ribonuclease HII, putative
MAALVPEWATKEPCLMGIDEAGRGPVLGPMVYGCVYCACSYNNTLATLKFAGQYSQSSFSSTEYRHVHVI

SEQ ID NO: 69103 - protein, 137 aa, Zea mays
  Coding DNA Sequence Number=SeqID_27324
  Subcellular localization annotation: CTP_CleavageSite=47; ConfidenceScore=5.14e-01
MSRPLVGLGRSGVAGSRGRWAVGAAAADGQSGGGRGRGRWAVGRRRRGEAARSVRTRRPGAESPGGRCGADGCGVPSRPRKPRRPSPRFGVTQRLRADLGQWAAEGLRHWPFPQEKFVKMDRSSATVQRRSSHPQNF

SEQ ID NO: 69104 - protein, 158 aa, Zea mays
  Coding DNA Sequence Number=SeqID_27325
  Homolog annotation: Hit_ID=Q5N7G7; Match level="QueryCoverage=28%, HitCoverage=23%, E-value=7e-11, Identity=70%"; Hit description =Prolyl 4-hydroxylase alpha subunit-like
  Pfam annotation: Domain name=DUF584; Domain location=21-158; Score =103.8; E_value=5e-28; Accession=PF04520.4; Description=Protein of unknown function, DUF584
MDRIMMSRPPLPAPTHAAAGADGDFLELDVLWPASPSADEGKKKKRAAAGVGVGVGVGAPARSAARPVPETVAASAMARSAPVRIPSDPARRGRWAHAGAGAGGSAEDAGEALVPPHEIVARRAAAHSSVLEGAGRTLKGRDLRRVRNAVLRRTGFLD

SEQ ID NO: 69105 - protein, 123 aa, Zea mays
  Coding DNA Sequence Number=SeqID_27326
MVIEDEKDLEEIPIDLNETASTSTVQEANACAERRRSLNVVGGTVRSSTDPHGFPEILWRRRRHGAPPSATRQRAPQKLEDATALCENLVQPAERRAVVLLVHPNAIRVLLPSCVSVHVTTNL

SEQ ID NO: 69106 - protein, 122 aa, Zea mays
  Coding DNA Sequence Number=SeqID_27327
MESFMEWWLQVVSEADKALKKGLNSLVILGTWILWKHRNDIVFNGATPRLSTALSPLLQRKYGAGARPVLKASSSSWHRRRMRKVFFLRVVRSLVERAGFLAGSLKFNLVSVCLNLWRGGCV

SEQ ID NO: 69107 - protein, 1014 aa, Zea mays
  Coding DNA Sequence Number=SeqID_27328
  Gene Ontology: Mol. function=glycine dehydrogenase (decarboxylating) activity; Cellular component=glycine dehydrogenase complex (decarboxylating); Biological process=glycine metabolic process
  Homolog annotation: Hit_ID=Q38766; Match level="QueryCoverage=94%, HitCoverage=95%, E-value=0.0, Identity=82%"; Hit description =Victorin binding protein
  Pfam annotation: Domain name=Aminotran_5; Domain location=570-915; Score=-195.7; E_value=0.023; Accession=PF00266.9; Description =Aminotransferase class-V
  Pfam annotation: Domain name=GDC-P; Domain location=81-481; Score =921.2; E_value=4.4e-274; Accession=PF02347.6; Description=Glycine cleavage system P-protein
  Pfam module annotation: Pfam domain module=Aminotran_5::GDC-P; Domain location=570-915::81-481
  Subcellular localization annotation: CTP_CleavageSite=66; ConfidenceScore=5.14e-01
MERARRHASRVLLRRLLAAAVASPAASPATSSRGISTLSPPPPAAGKQQRRCCPPPRGAHQHAQARAVSVSALQPSDTFPRRHNSATPAEQEAMASAFDAGFTESQMLDHMRRLASMNRDFKSFIGMGYYGTHVPAVVLRNLMENPAWYTQYTPYQAEIAQGRLESLLNYQTMVADLTGLPMSNASLLDEATAAAEAMAMCSAILRGKKRTFLIASNCHPQTIDVCRTRSDGFGIRVVVADAKDLDYGGGDVCGVLVQYPGTEGEVLDYAEFVRDAHAHGVKVVMATDLLALTALRPPGEIGADIAVGSAQRFGVPMGYGGPHAAFLATSQEYKRLMPGRIIGVSVDSTGRPALRMAMQTREQHIRRDKATSNICTAQALLANMAAMYAVYHGPAGLKAIADRVHGLAGTFAHGLKKLGTVTVQDLPFFDTVRVTCSDARAIAKEAVKNEMNLRVVDANTITVAFDETSTLEDVDKLFKVFNNGKSASFTAESIAPEVSSSIPSSLARESPYLTHPVFNMYHTEHELLRYLHKLQSKDLSLCHSMIPLGSCTMKLNATVEMIPVTFPNFANLHPFAPTDQAAGYHEMFDDLGNLLCTITGFDSFSLQPNAGAAGEYAGLMVIRAYHNSRGDHHRDVCIIPVSAHGTNPASAAMVGMKIVAVGTDAKGNINIEELRKAAEANKDNLAALMVTYPSTHGVYEEGIDEICKIIHENGGQVYMDGANMNAQVGLTSPGFIGADVCHLNLHKTFCIPHGGGGPGMGPIGVKKHLAPFLPSHPVIPTGGFPLPEKTDPLGTISAAPWGSALILPISYTYIAMMGSQGLTDASKIAILNANYMAKRLEKHYPVLFRGVNGTVAHEFIIDLRAFKTTAGIEPEDVAKRLMDYGFHAPTMSWPVPGTLMIEPTESESKAELDRFCDALISIREEIAEIESGKADVLNNVLKGAPHPPQLLMGDTWSKPYSREYAAFPAAWLRGAKFWPTTGRVDNVYGDRNLICTLQQATQVAEEAAAATATA

SEQ ID NO: 69108 - protein, 120 aa, Zea mays
  Coding DNA Sequence Number=SeqID_27329
  Homolog annotation: Hit_ID=Q6EQW6; Match level="QueryCoverage=86%, HitCoverage=24%, E-value=6e-21, Identity=54%"; Hit description =Putative splicing factor
LDRGYSKPRLAMDLLSAAYGGTSDDEDAADPPFSTSVATGSAFFAPPPLKRPWWESHRYLPPTHCLPQQPLLKTAAPLASPSSGRYVSKRERALLPSSQAHVESGSPLPPLTGVEFDCTG

SEQ ID NO: 69109 - protein, 624 aa, Zea mays
  Coding DNA Sequence Number=SeqID_27330
  Homolog annotation: Hit_ID=Q40626; Match level="QueryCoverage=12%, HitCoverage=60%, E-value=5e-29, Identity=92%"; Hit description=DNA -binding factor of bZIP class
  Pfam annotation: Domain name=bZIP_1; Domain location=541-605; Score =38.2; E_value=2.8e-08; Accession=PF00170.11; Description=bZIP transcription factor
  Pfam annotation: Domain name=bZIP_2; Domain location=541-595; Score =13.9; E_value=0.027; Accession=PF07716.5; Description=Basic region leucine zipper
  Pfam module annotation: Pfam domain module=bZIP_1::bZIP_2; Domain location=541-605::541-595
MAERWCALAQLHAVVVKVDLTVHLAYARQVFDRVPTRSTLSGTAPCSAATHGGADTGPGARDVAAKVDDDLLNSSFLASVSDGPATTADMSWGKAATLGTRKAFSSSASSPSPDLAACTVPTMDRWNHTLSPSPPILISRARVVWEWQQQIYGVVADPSSSSLSSSISSEDAVMYVAAASADASETEARAAHVDPEGAPRRAGDGDSEDGGELAALRMEARSRPLRRRGRGRGGALRRERGMGTGPGHRTSRETGKGATGRGQAGGPLAHFSRAGARSSVLVLVLAWQRLKYTAAQPKAMPTGLPFQAQNPAEPCGIVAVPQPTPLPSPRKRLCGTRRQLLGPLTRGRAPPQEPERPMSCPASSLSVRSLGGVGRQPARLRLRLQRCSLHEEAARHPTCPVPALRCPRRGGAARASQTPRAAPGDRKDYRIRISSNLMSGGSGDDGQQRQCRRGVAVAADVELGAALALADMAAGSGASAVVAAQNHAAEEMTDDEETAASTRLSLRLGRVGVGVVQSPSCSSSSGAAAAHPRHIMLTEAEKEAKRLRRVLANRESARQTILRRQAVRDELARKVADLSSQNATMKKEKDVVMKEYLSLKETNEQLKAAEQAHHHHHLRLSSLF

SEQ ID NO: 69110 - protein, 115 aa, Zea mays
  Coding DNA Sequence Number=SeqID_27331
MAPMAFFTWCITREEGRELLMEILGGECGSHSSSRMLVGTPLLLRGVRTVRDRDWGKVRLFSIHRVASEVSNNDLHRPDVPVAKALALYFECVPHQASATHTMTWGPSLPVMCSG

SEQ ID NO: 69111 - protein, 144 aa, Zea mays
  Coding DNA Sequence Number=SeqID_27332
MATETDMKRCPRGYPFSRYDAEEWGIRLNEVTSWDARGLYNIHKNSAKSPTPCSGTSAATAMDMEVYERLTAETSHYRGTRFDALIGLDEVEPSDEEEDEEEEERAAGAGAGDELLCPFCSEELDAVGLWCHMDDEHRAEVNAG

SEQ ID NO: 69112 - protein, 120 aa, Zea mays
  Coding DNA Sequence Number=SeqID_27333
MDASPSCPKKGKKEASPRDHHSGRRKGKREHTFGKHKSRESDEDVKRRIEDKLNSMCFLADTVGSLCTMALGNDVVGGDGQDIGDDSASKDGGLENIWLMDSNYSRHMIGSKNGSPALTP

SEQ ID NO: 69113 - protein, 183 aa, Zea mays
  Coding DNA Sequence Number=SeqID_27334
  Homolog annotation: Hit_ID=Q2QNS5; Match level="QueryCoverage=88%, HitCoverage=66%, E-value=2e-39, Identity=55%"; Hit description=Fiber protein Fb2, putative, expressed
  Pfam annotation: Domain name=Di19; Domain location=1-178; Score=25.0; E_value=3.2e-11; Accession=PF05605.3; Description=Drought induced 19 protein (Di19)
MGILYYSHFVQFNLCTALQLAFQFCAVHVCPICTDKVDMNLIVHISSQHRGFLKIKLSYLTPEIHVQDKWRNQQGSSGVRYSTLALLKKDLHERISGSSRAAPVSTVPDPLLSSFVGSFYEVDLPKDAKKESLVETEVRSDNIEQRAAESFDEPLLPEVKEEKTRRSQFVQGLVLSLMFDDIL

SEQ ID NO: 69114 - protein, 79 aa, Zea mays
  Coding DNA Sequence Number=SeqID_27335
MAFDCTKNNRQTDLTSCEKSESEPLGSRSDSVVGQSGRPRADTIAHTGDNARQRKLPRTVSNFPDSLREGKISTIQVTT

SEQ ID NO: 69115 - protein, 1225 aa, Zea mays
  Coding DNA Sequence Number=SeqID_27336
  Gene Ontology: Mol. function=cellulose synthase (UDP-forming) activity; Cellular component=membrane; Biological process=cellulose biosynthetic process
  Homolog annotation: Hit_ID=Q09HT5; Match level="QueryCoverage=96%, HitCoverage=100%, E-value=0.0, Identity=57%"; Hit description =Cellulose synthase-like D6
  Pfam annotation: Domain name=Cellulose_synt; Domain location=324 -1217; Score=1955.5; E_value=0; Accession=PF03552.5; Description =Cellulose synthase
  Subcellular localization annotation: CTP_CleavageSite=67; ConfidenceScore=5.28e-01
MSRRLSLPAGSQVTVTVSPTRGKAESPGDGVIKRSGGRIGLTSPAPRHSLGGAGSSTIPTVQLSPVRRSGGSRYASLDGGAGADDSAEFVHYTVHIPPTPERTVAASADSVDAPAPTAYDEDGGAAGVRAQRSYISGTIFTGGLNQATRGHVLNTSANSAAVAASANMSCKMRGCDMPAFLSSGAGGGPCDCGFMICRECYADCVAAAGNCPGCKEPYSAGSDTDDDGEDDEAVSSSEERDQLPLTSMAKRFSLIHSMKMPSNNGGGGGKPAEFDHARWLFETKGTYGYGNALWPKDGHGGGGGGGGFSGFEEPPNFGSRCRRPLTRKTSISQAILSPYRFNSALRYRLLIAIRLVALGFFLTWRIRHPNPEAVWLWALSVTCEVWFAFSWLLDSLPKLCPIHRAADLDVLAERFELPTARNPKGHSDLPGIDVFVSTADPEKEPPLVTANTILSILAADYPVEKLACYLSDDGGALLTFEALAETASFARTWVPFCRKHGVEPRCPEAYFGQKRDFLRNKVRVDFVRERRKVKREYDEFKVRVNSLPEAIRRRSDAYNAGEELRARRRQQEEAMAAGTILGALPEAAGAVKATWMSDGSQWPGTWLTSAPDHSRGDHAGIIQAMLAPPTSEPVLGAEPAESGGLIDTTGVDIRLPMLVYVSREKRPGYDHNKKAGAMNALVRTSAIMSNGPFILNLDCDHYVHNSAALREGMCFMLDRGGDRVCYVQFPQRFEGIDPNDRYANHNLVFFDVAMRAMDGLQGPMYVGTGCVFRRTALYGFSPPRATEHHGWLGRRKIKLLLRKPTMGKKTDRENNSDKEMMLPPIEDDAFQQLDDIESSALLPRRFGSSATFVASIPVAEYQGRLLQDTPGAHQGRPAGALAVPREPLDADTVAEAISVISCFYEDKTEWGRRIGWIYGSVTEDVVTGYRMHNRGWRSVYCVTRRDAFRGTAPINLTDRLHQVLRWATGSVEIFFSRNNALFASPRMKFLQRVAYFNVGMYPFTSIFLLVYCVLPAVSLFSGKFIVQSLNATFLALLLVITITLCLLALLEIKWSGITLHEWWRNEQFWVIGGTSAHPAAVLQGLLKVIAGVDISFTLTSKPGTGDDGEEDAFAELYEVRWSFLMVPPVTIMMVNAVAVAVASARTLYSEFPQWSKLLGGAFFSFWVLCHLYPFAKGLLGRRGRVPTIVFVWSGLISMTISLLWVYISPPAGARELIGGGGFSFP

SEQ ID NO: 69116 - protein, 53 aa, Zea mays
  Coding DNA Sequence Number=SeqID_27337
  Homolog annotation: Hit_ID=Q9XEQ9; Match level="QueryCoverage=98%, HitCoverage=6%, E-value=1e-09, Identity=45%"; Hit description =Disease resistance protein RPM1 homolog
MRCEVVFLKDEMSSMNALLERLASSDALDPQTKEWRDQKVKDLVTCHEDAEQI

SEQ ID NO: 69117 - protein, 67 aa, Zea mays
  Coding DNA Sequence Number=SeqID_27338
  Subcellular localization annotation: CTP_CleavageSite=19; ConfidenceScore=5.13e-01
MAPMWLPSSVPTKSWRQARKSYKSVVLLIESCAHLFSQLSLQFQSSSKTTQIQVGKLCIPKVTVGAK

SEQ ID NO: 69118 - protein, 151 aa, Zea mays
  Coding DNA Sequence Number=SeqID_27339
  Homolog annotation: Hit_ID=Q6QP51; Match level="QueryCoverage=32%, HitCoverage=22%, E-value=2e-13, Identity=71%"; Hit description =Putative growth-regulating factor 1
MQAACNHTKGAHPFDFDASSMEAQAHTSCNRRAGCYVQETAPPLAPLPCLLDCGTSTATRGNPAHDPTVPTRHIGHGDRERGYPERDSSPRRKQAPSPPTDQRFEGWPLGRVQQPPQSTQAPHPLLVRGSKADPSKGFNGRLRPLGLRAHY

SEQ ID NO: 69119 - protein, 124 aa, Zea mays
  Coding DNA Sequence Number=SeqID_27340
MHQNTGTQFLQVAAHLVRAERTEIEGDRLGQREQRIGDREGREQILTGEKAAGRVVVGAVRRRRAGRVEAAVAPVASSRRRVGRVCPGFDPEGTTQGLVPGPEAHSFHPEQGLEWADPLKTNEA

SEQ ID NO: 69120 - protein, 166 aa, Zea mays
  Coding DNA Sequence Number=SeqID_27341
  Homolog annotation: Hit_ID=Q2QSV5; Match level="QueryCoverage=91%, HitCoverage=94%, E-value=6e-21, Identity=43%"; Hit description =Expressed protein
MEQSQGQGGRRRQIPAFGRWNQHSVGDEVPITQYFESAVQASLLARPGHCYHDAGAGEVLLFRSSASPPPHKPPKKVRSTTECHGHHQQVQVEEVGSRRRQQQRRRQEPLPPFVSGDVSRAARPRVVRAAVDEDLYKVPSDMLRKKKGRKHVRSVWMGCVGLTCVA

SEQ ID NO: 69121 - protein, 107 aa, Zea mays
  Coding DNA Sequence Number=SeqID_27342
  Subcellular localization annotation: CTP_CleavageSite=62; ConfidenceScore=5.61e-01
MGPTQALVRVLLGVPPLPALAGTRSCRVAYGPMTSASSSSRKRALRVSPPALTPGPNWSLPHCALASAYDRGPPVSPTIPPPLALVTSVWGASARASPPTNRADIGA

SEQ ID NO: 69122 - protein, 108 aa, Zea mays
  Coding DNA Sequence Number=SeqID_27343
MAGQAPGSVPDLHALDLPYWLRGNSPEYAGIWTSVRELGVASVAESELTRCGVRGMATIAAGHRNWTSPLHNHRELNPGFRRTRRSGVCAFELGCWEVGGDLLAVGLD

SEQ ID NO: 69123 - protein, 125 aa, Zea mays
  Coding DNA Sequence Number=SeqID_27344
MKQTVQCYAGQRSCSVSAVQQEPTVVAEDGTIVPRTLVYPISVKAIPPGDSPEVSMSEFLPPVVDDEDDSDQSQQRRRLIGHHSVSSARSSVLSRLGPRVSSSAAAGSVDVATLQMVSAVELVVT

SEQ ID NO: 69124 - protein, 85 aa, Zea mays
  Coding DNA Sequence Number=SeqID_27345
MQEHTSLPCTQTDTVSAGSDPKQKRLPFLPHDMTPAQKQLALPAALTNMTRMNQEVDQNGSHEAFFRAEESCYLEFPLITIGGIN

SEQ ID NO: 69125 - protein, 88 aa, Zea mays
  Coding DNA Sequence Number=SeqID_27346
MARTESGIPGLRTHVVRSDGGCFSPTGHKKPKPHEHHDQHGGLCAGWDEPHDYALISDHTLTGVGNKLVLAGSGTVHGCGSERRRQHA

SEQ ID NO: 69126 - protein, 58 aa, Zea mays
  Coding DNA Sequence Number=SeqID_27347
MATIAAGHRNWTSPLHNHRELNPGFRRTRRNGVCAFELGCWEVGGDLLAVGSDVIDRD

SEQ ID NO: 69127 - protein, 321 aa, Zea mays
  Coding DNA Sequence Number=SeqID_27348
  Gene Ontology: Mol. function=nucleic acid binding; Biological process= DNA integration
  Homolog annotation: Hit_ID=Q8H6I0; Match level="QueryCoverage=99%, HitCoverage=21%, E-value=1e-157, Identity=81%"; Hit description =Putative gag-pol polyprotein
MKSLKFARSMLYSGRRPGIKDGIGFQKGDNVKLNAPPKRLSNFVKGKAPMPQDNEGYILYPAGYPESKIRRIHSRKSHSSPNHAFMYKGETSSSRQSTHAKLPKNKTPKASNDSNISFKTFDASYVLTNKSGKVYASGGSSWIIDSRCTNHMTGEKKMFSSYEKNQDPQRAITFGDGNQGVTVFRRSDDSIAFKGVLQGQLYLVDFDRAELDTCLIAKTNMGWLWHRQLAHVGMKNLHKLLKGEHILGLTNVHFEKDRICSACQAGKQVGVHHPHKNIMTTDRPLELLHMDLFGPIAYISISGRKISYPRDLKRVLETGSK

SEQ ID NO: 69128 - protein, 289 aa, Zea mays
  Coding DNA Sequence Number=SeqID_27349
  Gene Ontology: Mol. function=oxidoreductase activity; Cellular component=integral to membrane; Biological process=carbohydrate transport
  Homolog annotation: Hit_ID=Q941T8; Match level="QueryCoverage=99%, HitCoverage=100%, E-value=2e-88, Identity=54%"; Hit description =Putative aldose reductase
  Pfam annotation: Domain name=Aldo_ket_red; Domain location=7-262; Score=299.6; E_value=6e-87; Accession=PF00248.11; Description =Aldoketo reductase family
MATYFTLNTGARIPSVGLGTYKAGPGVVADAITAAVKAGYRHIDCAPLYKNEKESRNNLSVKLHRCSDLAPEDVPLAIDITLNDLQLDYLDLYLIHWPFQIKRGSELSPENFVHLDMPKTWQAMERLYGSGKARAVGVSNFSTRKLADLLAVARVTPAVDQVECHPGWQQARLRAFCCSSGVHFSAYAPLGRMKAVASDPVVASVAESLGKTPAQVALRWGIQQGQSVLPKSANESRLKENIDLFGWSIPDELCAKFSEIEQVKQIRNDAFVHPQSIYKTIDELWDGEI

SEQ ID NO: 69129 - protein, 237 aa, Zea mays
  Coding DNA Sequence Number=SeqID_27350
MSIGPDFGPCSEPPFGGDPYIASLRSLPDATIAAYPRRGSPPGFPALAAHTWSDVVASLPASSALVTAIATIQAAVSASRDHKRVATLVLESEHAMSAAALTARMATTQHLILGHPPVVHEAHPPTAKGPLTSELDADHVATLHAQATSLMTITTMPPPAASTNHPSSGVRTSSSASASADARRLRLSKGRQMSMLAHRFVTFPEQRALKASFMIGYVLNPELMEALARPGYDFSVI

SEQ ID NO: 69130 - protein, 54 aa, Zea mays
  Coding DNA Sequence Number=SeqID_27351
MCPEKVICSKASTVVRTPTKSAGPPDIQFGPPGLVPDPRIFSLDPQGEIELEKT

SEQ ID NO: 69131 - protein, 499 aa, Zea mays
  Coding DNA Sequence Number=SeqID_27352
  Gene Ontology: Mol. function=protein serine/threonine kinase activity; Cellular component=integral to membrane; Biological process=protein amino acid phosphorylation
  Homolog annotation: Hit_ID=O24585; Match level="QueryCoverage=86%, HitCoverage=47%, E-value=0.0, Identity=100%"; Hit description =Putative receptor protein kinase CRINKLY4 precursor
  Pfam annotation: Domain name=TNFR_c6; Domain location=357-390; Score =29.4; E_value=1.3e-05; Accession=PF00020.9; Description=TNFRNGFR cysteine-rich region
MDHVPALVLAGCCFLALLPGWACGLGSMSSIAVSYGEDGPVFCGLNSDGSHLVACFGADASVLYGAPPNIPFLGLTAGDGFVCGLLLDTRQPYCWGSNSYVKSGVPQPMVEGARYSELSAGDNHLCALRAAQDGGRGSSAATSLIDCWGYNMTATHAVDEAVSTVSAGSVFNCGLFARNRTVFCWGDETVSGVVGLAPRDLHFQSIGAGGYHVCGVLENAQVFCWGRSLEMQQVVPSSAIGDGDVNIVPMDAMSTVVGGRFHACGIRSLDHQVACWGFTLHNSTSPPKGLKMYALVAGDYFTCGVPAETSLMPRCWGNSGPLALPMAVPPGICVPTACSHGYYEYVNHGEVGSIKVCKPANSRLCLPCSTGCPEGLYESSPCNATADRVCQFDCLKCVTDECLSFCLSQKRTKSRKLMAFQMRIFVAEIVFAVVLVLSVSVTTCLLTARSDVGRSRQEGDGDQRQAHYKPREGFIGRVPQQREGEGVGILFPQVASEWG

SEQ ID NO: 69132 - protein, 767 aa, Zea mays
  Coding DNA Sequence Number=SeqID_27353
  Gene Ontology: Mol. function=RNA-directed DNA polymerase activity; Cellular component=intracellular; Biological process=RNA-dependent DNA replication
  Homolog annotation: Hit_ID=UPI00004C1731; Match level="QueryCoverage =94%, HitCoverage=53%, E-value=0.0, Identity=81%"; Hit description =UPI00004C1731 related cluster
  Pfam annotation: Domain name=RnaseH; Domain location=334-461; Score= -6.2; E_value=0.00022; Accession=PF00075.14; Description=RNase H
  Pfam annotation: Domain name=rve; Domain location=463-638; Score =95.6; E_value=1.5e-25; Accession=PF00665.16; Description=Integrase core domain
  Pfam module annotation: Pfam domain module=RnaseH::rve; Domain location=334-461::463-638
MKESDQLATSFITPFGMYCYVTMSFGLRNADAMYQRCMNHVFGQHIGRTVEAYVDDIVVKTRKASDLLSDLEVTFRCLKAKGVKLNPEKCVFGVPRGMLLGFIVSERGIEANPEKIAAITSMGPIKDLKGIQRVMGCLAALSRFISRLGERGLPLYRLLRKAECFTWTPEAEEALGNLKALLTNAPILVPPAAGEALLIYVAATTQVVSVVIVVERREEGHTLPVQRPVYFISEVLSETKIRYPQVQKLLYAVILMRRKLRHYFESHPVTMVSSFPLGEIIQCREASGRIAKWAVEIMGETIAFAPRKAIKSQVLADFVAEWVDTQLPTAPIQPELWTMFFDGSLMKTGASAGLLFISPLGKHLRYVLRLHFRASNNVAKYEALVNGLQITIELGVRRLDARGDSQLVIDQVMKNSHCRDPKMEAYYDEVRRLEDKFYGLELNHIARRYNETADELAKIASGRTTVPPDVFSRDLHQPSVKIDDTPEPEAPSAQPEKAPGGYTHLLVAIDKFSKWIEVRPLNSIRSEQAVAFFTNIIHRFGVPNSIITDNGTQFTGRKFLDFCEDHHIRVDWAAVAHPMTNGQVERANGMILQGLKPWIYNDLNMFDKRWMKELPSVVWSLRTTPSRATGFTPFFLVYGAEAILPIDLEYGSPRTRAYADQSNQANREDSLDQLEEARDKALLHSARYQQSMRRYHARGVRSRDLQVGDLVLRLRQDARGRHKLTPPWEGPFVIAKVLKPGTYKLTNSQGEVYSNAWNIQQLRRFYP

SEQ ID NO: 69133 - protein, 94 aa, Zea mays
  Coding DNA Sequence Number=SeqID_27354
MGLATGGQARMGMGLVRADVVPHANWWMRPLLHAKRWFTASDKNAISDHRYMQELHKRRKYSENKYDNLPKTSTGCINMFQTPFALRNTMQRHE

SEQ ID NO: 69134 - protein, 129 aa, Zea mays
  Coding DNA Sequence Number=SeqID_27355
MADDEAGRRCTERYGCRQLSRALCRQLTSRLPWLLERHGRAEAEPGPPRASCEGRHARCAPRNAPGRRAAAGESSCCRAGEPRQPRAGAVHAEGKLEGGARDLDEQPWRKQAGGGRQPPWERASLHLLP

SEQ ID NO: 69135 - protein, 237 aa, Zea mays
  Coding DNA Sequence Number=SeqID_27356
  Subcellular localization annotation: CTP_CleavageSite=46; ConfidenceScore=5.06e-01
MALLATWSRVLGRARWMLLRGRGRVCLPRSRSSPSPESGEAETVVRGQGRVRALGSGEAEFVVFRGRARVRALGSGEAEFVVFRGRARVRVLGSGEAEFVVFRGRARVRALGSGEAEFVVFRGRARVRALGSGEAEFSMAPEAGLGCCQPHSVEWHSSRSNAGGAVFLSGRRNRLDPARPSSPCPTNPHNYQFPIADAGKGGSQRIPADLNADGPFLTRSRRPQSLSSGPVGAAIFQ

SEQ ID NO: 69136 - protein, 1246 aa, Zea mays
  Coding DNA Sequence Number=SeqID_27357
  Gene Ontology: Mol. function=G-protein coupled photoreceptor activity; Cellular component=membrane; Biological process=regulation of transcription, DNA-dependent
  Homolog annotation: Hit_ID=P93528; Match level="QueryCoverage=88%, HitCoverage=97%, E-value=0.0, Identity=93%"; Hit description =Phytochrome C
  Pfam annotation: Domain name=GAF; Domain location=216-399; Score =122.7; E_value=1e-33; Accession=PF01590.16; Description=GAF domain
  Pfam annotation: Domain name=HATPase_c; Domain location=1007-1121; Score=56.2; E_value=1e-13; Accession=PF02518.16; Description =Histidine kinase-, DNA gyrase B-, and HSP90-like ATPase
  Pfam annotation: Domain name=HisKA; Domain location=896-959; Score =39.8; E_value=9.1e-09; Accession=PF00512.15; Description=His Kinase A (phosphoacceptor) domain
  Pfam annotation: Domain name=PAS; Domain location=620-735; Score =90.8; E_value=4.1e-24; Accession=PF00989.14; Description=PAS domain
  Pfam annotation: Domain name=PAS; Domain location=750-875; Score =76.2; E_value=1e-19; Accession=PF00989.14; Description=PAS domain
  Pfam annotation: Domain name=PAS_2; Domain location=67-183; Score =238.5; E_value=1.4e-68; Accession=PF08446.1; Description=PAS fold
  Pfam annotation: Domain name=PAS_4; Domain location=626-740; Score =16.9; E_value=0.0043; Accession=PF08448.1; Description=PAS fold
  Pfam annotation: Domain name=Phytochrome; Domain location=410-590; Score=385.5; E_value=8.1e-113; Accession=PF00360.10; Description =Phytochrome region
  Pfam module annotation: Pfam domain module=GAF::HATPase _c::HisKA::PAS::PAS::PAS_2::PAS_4::Phytochrome; Domain location=216 -399::1007-1121::896-959::620-735::750-875::67-183::626-740::410-
  Subcellular localization annotation: CTP_CleavageSite=26; ConfidenceScore=5.08e-01
MSLPSNNRRTCSRSSSARSKHSARVVAQTPVDAQLHAEFEGSQRHFDYSSSVGAANRPSASTSTVSTYLQNMQRGRYIQPFGCLLAVHPDTFALLAYSENAPEMLDLTPHAVPTIDQRDALGIGVDVRTLFRSQSSVALHKAAAFGEVNLLNPILVHARTSGKPFYAILHRIDVGLVIDLEPVNPADVPVTAAGALKSYKLAAKAISRLQSLPSGNLSLLCDVLVREVSELTGYDRVMAYKFYEDEHGEVISECRRSDLEPYLGLHYPATDIPQASRFLFMKNKVRMICDCCATPVKVIQDDSLAQPLSLCGSTLRASHGCHAQYMANMGSVASLAMSVTINEDEEEDGDTGSDQQPKGRKLWGLVVCHHTSPRFVPFPLRYACEFLLQVFGIQLNKEVELAAQAKERHILRTQTLLCDMLLRDAPVGIFTRSPNVMDLVKCDGAALYYQNQLLVLGSTPSESEIKSIATWLQDNHDGSTGLSTDSLVEAGYPGAVALREVVCGMAAIKISSKDFIFWFRSHTTKEIKWGGAKHEPVDADDDGRRMHPRSSFKAFLEVVKWRSVPWEDVEMDAIHSLQLILRGSLPDEDANRNNVRSIVKAPSDDMKKIQGLLELRTVTNEMVRLIETATAPVLAVDIAGNINGWNNKAAELTGLPVMEAIGRPLIDLVVTDSIEVVKQILDSALQGIEEQNMEIKLKTFHEHECNGPVILKVNSCCSRDLSEKVIGVCFVAQDLTRQKMIMDKYTRIQGDYVAIVKNPTELIPPIFMINDLGSCLEWNKAMQKITGIKREDAINKLLIGEVFTLHDYGCRVKDHATLTKLSILMNAVISGQDPEKLFFGFFDTDGKYIESLLTVNKRTDAEGKITGALCFLHVASPELQHALQVQKMSEQAATNSFKELTYIRQELRNPLNGMQFTCNLLKPSELTEEQRQLLSSNVLCQDQLKKILHDTDLESIEQCYMEMNTVEFNLEQALNTVLMQGIPLGKEKQISIERNWPVEVSCMYLYGDNLRLQQILADYLACALQFTQTAEGPIVLQVMSKKENIGSGMQIAHLEFRIVHPAPGVPEALIQEMFQHNPGVSREGLGLYISQKLVKTMSGTVQYLREADTSSFIILMEFPVAQLSSKRSKPSTIGEASSSDAGGRSSPQLDVNTVSPVECRNHTCPTSVSEAEEYGAKSRGRQAHDHERESGNKASERPPGVAASNCSRTPSQSSASALGVGGRSPQLSRLRGAIPCVHVAVSVARA

SEQ ID NO: 69137 - protein, 102 aa, Zea mays
  Coding DNA Sequence Number=SeqID_27358
MGVRVPRPAARSLRNKRIRSHAQSMSIQGTALHGRVHLLGVRPVREPNISRGGLRCRWSSLCYSPLQIGIGTHRRTWTAAWGSGEPEINPVFVAPKVVLPFE

SEQ ID NO: 69138 - protein, 384 aa, Zea mays
  Coding DNA Sequence Number=SeqID_27359
  Gene Ontology: Mol. function=potassium channel activity; Cellular component=membrane; Biological process=potassium ion transport
  Homolog annotation: Hit_ID=Q850M0; Match level="QueryCoverage=77%, HitCoverage=85%, E-value=1e-122, Identity=73%"; Hit description =Putative outward rectifying potassium channel
  Pfam annotation: Domain name=Ion_trans_2; Domain location=156-238; Score=74.1; E_value=4.5e-19; Accession=PF07885.6; Description=Ion channel
  Pfam annotation: Domain name=Ion_trans_2; Domain location=277-352; Score=62.2; E_value=1.7e-15; Accession=PF07885.6; Description=Ion channel
  Pfam module annotation: Pfam domain module=Ion_trans_2::Ion_trans_2; Domain location=156-238::277-352
MRGRQLLEIERHAYRTSASIFSAHLELTSSQKATRTQERGEPESFPCRRDPVRLTRSDFPGGGQRYNSSSCFIAAVQFGFMQIQVKQMADNSIEQALIENPPNVLKWKPSERAKRFRRCRSTPSDPTDQKPAENGSVLKAKELFKEKRPSFMLVGLLLFAYLLVGVIIFYLFMDQLSGKTTNRVLDALYFVIVTMTSVGYGDLFPNSDTTKLLACAFVFTGMAIIALFISKAADYLVEKQEVLFFKALHMNMKGSEAKMLGAMETNRIKYKFYTVALLLAMVIVAGTVFLWKVEKLSLVDSFYCVCATITTLGYGDKSFSSKLGRVFAVFWITTSTLIMAQFFMYLAELYTERRQKILTKWVINRRITTMDLEAADIDDDRQVG

SEQ ID NO: 69139 - protein, 129 aa, Zea mays
  Coding DNA Sequence Number=SeqID_27360
MNALHSHVPLVTGDLPAPALMAGGQGQHRVTRAPHVADHGHARGSHDIPTTRMAAWVELQHLQLPPAWLLPFPPMRLIRLLKLAPPLHFVSQRVATRPHPIAGRTWFLHAYAQPSDGRTWPRTLARETI

SEQ ID NO: 69140 - protein, 187 aa, Zea mays
  Coding DNA Sequence Number=SeqID_27361
  Homolog annotation: Hit_ID=Q94CG6; Match level="QueryCoverage=24%, HitCoverage=16%, E-value=1e-16, Identity=86%"; Hit description=Seven transmembrane protein Mlo9
MEAISNTRLALGILVVDIVVLVGEKVTSKLFLISRSADVRRPSPLWDLLLIHKVGQAPWRDERPDLEQCVGERQMGGRARRDPSDHGEVTVEPDLVEARREGTRRRHGRKSRDDRRASVDRRRPGRGTVEERGSMNGENGRMKHSGIIMNHFLVCFIAQFGQSIVRADYLILRKGFIMVCQFFALQF

SEQ ID NO: 69141 - protein, 58 aa, Zea mays
  Coding DNA Sequence Number=SeqID_27362
MDDYDSVDPPTSDRVRFWEAGERATRVGSNNAVDFWAAPNRKWGGLGSRFGPTQMFEV

SEQ ID NO: 69142 - protein, 84 aa, Zea mays
  Coding DNA Sequence Number=SeqID_27363
MMLPPHKSYGGHCSLAELEGKLCLLIVDGALEVLKENTFLVWVIFGDKLAKKLEKDISEPQTPQEVESLLTLFAQISGTFLFLL

SEQ ID NO: 69143 - protein, 80 aa, Zea mays
  Coding DNA Sequence Number=SeqID_27364
  Gene Ontology: Mol. function=strictosidine synthase activity; Biological process=biosynthetic process
  Homolog annotation: Hit_ID=Q6H4H9; Match level="QueryCoverage=88%, HitCoverage=21%, E-value=5e-09, Identity=44%"; Hit description =Putative strictosidine synthase
MKMINNGRGGYWVVLSTGVAADEAAAAHTVAVRVSRDGNVTKALNGFNFVSVSEVAQRGGALWVGSVDTPYAGQLKRRAS

SEQ ID NO: 69144 - protein, 169 aa, Zea mays
  Coding DNA Sequence Number=SeqID_27365
  Gene Ontology: Mol. function=strictosidine synthase activity; Cellular component=cellulose and pectin-containing cell wall; Biological process=biosynthetic process
  Homolog annotation: Hit_ID=Q6H4H9; Match level="QueryCoverage=68%, HitCoverage=43%, E-value=8e-43, Identity=58%"; Hit description =Putative strictosidine synthase
MAAAATRSLHSFLALLLLLAAAAAAAALSYETKSIDPGLVVMTLPEPVSGPESLAFDGRGGGPYSGVSDGRVLRWQGPLRGWTEFAYNSKHRVAARGGLAQVVATEAAGGPFNFLNGLDVDQRTGDVYFTDSSATYRRRYGLIINGLAYAETEPVVHILHCPKYTQFRF

SEQ ID NO: 69145 - protein, 165 aa, Zea mays
  Coding DNA Sequence Number=SeqID_27366
  Homolog annotation: Hit_ID=Q2L3D2; Match level="QueryCoverage=55%, HitCoverage=46%, E-value=4e-07, Identity=31%"; Hit description =Fimbriata-like protein
MPSPRYSAGCLPVRSRPCRLVCKSWMSVLTDPHFIHEHLSRGQQKLLLFATDRGNDRSLAMVLADNNASMYQLSRPAASRSVFVHNSCNGLLCLGDSTGAVEVLNPTTGAHNDPFKVHCEIYTIGVGVWRQVGSCHGAPTVRGVHVNGMVYYGLVRYIASSRINC

SEQ ID NO: 69146 - protein, 753 aa, Zea mays
  Coding DNA Sequence Number=SeqID_27367
  Gene Ontology: Mol. function=RNA-directed DNA polymerase activity; Cellular component=nucleus; Biological process=RNA-dependent DNA replication
  Homolog annotation: Hit_ID=Q8S472; Match level="QueryCoverage=99%, HitCoverage=69%, E-value=0.0, Identity=82%"; Hit description =Putative gypsy-type retrotransposon RIRE2
  Pfam annotation: Domain name=Retrotrans_gag; Domain location=241-332; Score=70.9; E_value=4e-18; Accession=PF03732.7; Description =Retrotransposon gag protein
MQARLDEGAGTLEPFRRNIGQEWADQAPAGEARHLHQGIQHRIADDVRARPPPVSSGVGQNLAAAAILLRAMPEPSTTEGRRIQGELKNLLEDAAVRRAESSASRRQGYPSEHRAATSRFMREASVHTGRTRNTAPAAPGRLGNEHHHRNRRAHLDERVHRGYHPRRGGRYDSGEDRSPSPKPPGPQAFSWAIRRAPFPTRFRTLTTITKYSGETRPELWLADYRLACQLGGTDDDNLIIRNLPLFLSDTARAWLEHLPPGQISNWDDLVQAFAGNFQGTYVRPGNSWDLRSCRQQPGESLRDYIRRFSKQHTELPNVTDSDVLGAFLAGTTCRDLVSKLGCKTPTRESELMDIATKFASGQEVVEAIFRKDKQPQGRQPEDVPEACTQRGAKKKGKKKSQAKRDATDADLVVAAEYKNPRKSPGGANLFDKMFKEPCPYHQGPVKHTLEECVMLRHHFHKAGPPAEGGRAQNNDKKEDHKAEEFPEVHDCFMIYGGPAANASAWHRKQERREVCSVRVAAPVYLDWSDKPITFDQGDHPDHVPSPGKYPLVVDPVIGNVRLTKVLMDGGSSLNIIYAETLGLLQIDLSSIRAGATPFHGIIPGKRVQPLGQLDLPVCFGTPSNFRRETLTFEVVGFRGTYHAVLGRPCYAKFMTVPNYTYLKLKMPGPNGVITVGPTYRHTYECDVECVEYTEALAESEALIADLESLSKEAPDGKRHTGNFEPAETVKSVPLDPSNDASKQIRIGSELDPK

SEQ ID NO: 69147 - protein, 192 aa, Zea mays
  Coding DNA Sequence Number=SeqID_27368
  Gene Ontology: Mol. function=strictosidine synthase activity; Cellular component=vacuole; Biological process=biosynthetic process
  Homolog annotation: Hit_ID=Q6H4H9; Match level="QueryCoverage=79%, HitCoverage=41%, E-value=3e-47, Identity=61%"; Hit description =Putative strictosidine synthase
MEAPSTLLQLSLSSSSSLGLLLLLLLLVQLPSMASCHEEMKSIYVGQRVLPVRLGRPAFGPESLAFDHRGDGPFTGVSNGRILRWRGAQRGWTEFAHNHKHETVAMCAAKKRLVVPESACGRPLGLQFHRASGDLYYGDAYLGLMRVGRRGGLAEAVATEAGGAPLNFVNAVEVDQETGLVYFTDSSATYQR

SEQ ID NO: 69148 - protein, 185 aa, Zea mays
  Coding DNA Sequence Number=SeqID_27369
LIRPPQFQGTLEASRLHFGSYRPAPKDPVPVPDPMTDTQAKDTTFHQFETQGIVVPDDDDDFGIPPLPPPPMPSCSHDHEAGGSSAAPAGPPAIDPALAMILQSLTQYIPVFSFLLFSLHPLQLFKPLFSVSAQSLVPPAPAVTTTAVAVSMTSSAPAAQPQSESIPAPASMVDPGSDTDSDPQL

SEQ ID NO: 69149 - protein, 154 aa, Zea mays
  Coding DNA Sequence Number=SeqID_27370
MGVPKGCLPRERCLSHCPEVAYWRSIERIRLGGLDDSEETEEWSGGEGDRGEDDDSGGDEGVDSSDSEEWSGGEGDGGEDDGSGDDDDGKGGDDGEDGNDEGDVDGDSRGDIEGNDDGSGKGDDKGDGDDNGDDNGKGDNSKVDGKAGSIMLLA

SEQ ID NO: 69150 - protein, 116 aa, Zea mays
  Coding DNA Sequence Number=SeqID_27371
MVTPEVLHDPAPKGGVEDDPAPKGAELGSSSAASMDVHVGSPLVQSEEPMVTNLPSALVGPVTLQASDPDAGNLLPVVGAEVSPIDAVNIVPVNAPSTGSATMLPALGLPLFLSNL

SEQ ID NO: 69151 - protein, 93 aa, Zea mays
  Coding DNA Sequence Number=SeqID_27372
EVGEITAVTSKYGSASELVGVGRSTGSTRKELETGAETYPVTFAGERKKSCKVIRVLRCGMGEGTVSGALGVLWCISKGRTRGRLLLLLFKRR

SEQ ID NO: 69152 - protein, 2638 aa, Zea mays
  Coding DNA Sequence Number=SeqID_27373
  Gene Ontology: Mol. function=ubiquitin-protein ligase activity; Cellular component=intracellular; Biological process=protein modification process
  Homolog annotation: Hit_ID=Q2QSH6; Match level="QueryCoverage=36%, HitCoverage=100%, E-value=0.0, Identity=79%"; Hit description=E3 ubiquitin protein ligase UPL1, putative, expressed
  Pfam annotation: Domain name=HECT; Domain location=2326-2638; Score =584.6; E_value=9e-173; Accession=PF00632.15; Description=HECT-domain (ubiquitin-transferase)
  Pfam annotation: Domain name=UBA; Domain location=332-372; Score =45.1; E_value=2.3e-10; Accession=PF00627.21; Description=UBATS-N domain
  Pfam annotation: Domain name=UIM; Domain location=377-394; Score =22.2; E_value=0.0019; Accession=PF02809.10; Description=Ubiquitin interaction motif
  Pfam module annotation: Pfam domain module=HECT::UBA::UIM; Domain location=2326-2638::332-372::377-394
MNALLSEFGDASREVLEDVGQVHREVLWKISLFEKNKIVAETSSSSSTSEAQQPDMSASDIGDSRYTSFRQYLDPILRRRGSGWNIESQVSDLINMYRDIGRAASDSQRVGSDRYSSLGLPSSSQDQFSSSSDANASTSTSTLKVIRYLGKVVEFVDGMLLDRPESCNSIMVNSFYCRGVIQAILTTFQATSELLFTMSRPPSSPMETDSKTGKDGKEMDSSWIYGPLTSYGAIMDHLVTSSFILSSSTRQLLEQPIFNGSVRFPQDAETFMKLLQSKVLKTVLPIWAHPQFPECNIELISSVMSIMRHVCSGVEVKDTVGNGGARLAGPPPDESAISLIVEMGFSRARAEEALRQVGTNSVEIATDWLFAHPEEPQEEDDELARALAMSLGNSVTPAQEGDSRSNDLELEEATVQPPPIDEMLRSCLQLLQRKEALAFSVRDMLVTISSQNDGQNRVKVLTYLIDNLKQCVVASEPSNDTALSALLHVLALILHGDTAAREVASKAGLVKVALDLLCSWEVQIRESSMIEVPNWVISCFLSVDQMLQLEPKLPDVTELHVLKRDNSNIKTSLVIDDSKRKDSESLPNVGLLDMEDQFQLLKICCKCIGKQLPSASMHAILQLSATLTKVHAAAICFLESGGLNALLSLPTSSLFSGFNNMASTIIRHILEDPHTLQQAMELEIRHSLVTAANRHANPRVTPRNFIQNLAFVVYRDPVIFMKAAQSVCQIEMVGDRPYVVLLKDREKERIKEKDKDKSVDKDKATVAVTKVVSGDTAAGSPANSHGKQSDLNSRNVKSHRKPPQSFVTVIEHLLDLLMSFVPPPRPEDQVDVSGTALSSDMDIDCSSAKGKGKAVSVPPEESKHAIQESTASLAKTAFFLKLLTDVLLTYASSIHVVLRHDAELSNMHGPNRTSARLTSGGIFNHILQHFLPHATRQKKERKNDGDWMYKLATRANQFLVASSIRSAEARKRIFSEICSIFLDFTDSSAGYNAPVPRMNVYVDLLNDILSARSPTGSSLSAESAVIFVEAGLVHSLSTMLQVLDLDHPDSAKIVTAVVKALELVSKEHIHSADNAKGVNSSKIASDSNNVNSSSNRFQALDMTSQPTEMVTDHRETFNAVRTSQISDSVADEMDHDRDMDGGFARDGEDDFMHEMAEDGTGDGSTMEIRIEIPRNREDDMAPAADDTDEDISAEDGEDDEDEDEENNNLEEDDAHRMSHPDTDQEDREMDEEEFDEDLLEEDDEDEDEEGVILRLEEGINGINVLDHVEVFGGSNNLSGDTLRVMPLDIFGTRRQGRSTSIYNLLGRASDHGVLDHPLLEEPSSTTNFSDQGHPENLVEMAFSDRNHESSSSRLDAIFRSLRSGRNGHRFNMWLDDGPQRNGSAAPAVPEGIEELLISHLRRPTPQPDGQRTPVGGAQENDQPNHGSDAEAREVAPAQQNENSESTLNPLDLSECAGPAPPDSDALQRDVSNASELATEMQYERSDAITRDVEAVSQASSGSGATLGESLRSLEVEIGSVEGHDDGDRHGTSGTSERLPLGDIQAAARSRRPSGNAVPVSSRDMSLESVSEVPQNPDQEPDQNASEGNQEPTRAAGADSIDPTFLEALPEDLRAEVLSSRQNQVTQTSNDQPQDDGDIDPEFLAALPPDIREEVLAQQRTQRMQQQSQELEGQPVEMDAVSIIATFPSEIREEVLLTSPDTLLATLTPALVAEANMLRERFAHRYHSSSLFGMNSRNRRGESSRRDIMAAGLDRNTGDPSRSTSKPIETEGAPLVDEDGLKALIRLLRVVQGFSKKSIDAPEPPFRLYGCHANIAYSRPQSSDGLPPLVSRRVLETLTNLARSHPNVAKLLLFLEFPCPSRCFPEAHDHRHGKAVLLDDGEEQKTFALVLLLNLLDQPLYMRSVAHLEQLLNLLDVVMHNAENEIKQAKLEASSEKPSAPDNAVQDGKNNSDISVSYGSELNPEDGSKAPAVDNRSNLQAVLRSLPQPELRLLCSLLAHDGLSDSAYLLVGEVLKKIVALAPFFCCHFINELARSMQNLTLRAMKELHLYENSEKALLSSSSANGTAVLRVVQALSSLVNTLQERKDPEQPAEKDHSDAVSQISEINTALDSLWLELSNCISKIESSSEYASNLSPASASAAMLTTGVAPPLPAGTQNLLPYIESFFVTCEKLRPGQPDAVQDASTSDMEDASTSSGGQRSSACQASLDEKQNAFVKFSEKHRRLLNAFIRQNSGLLEKSFSLMLKIPRLIDFDNKRAYFRSKIKHQYDHHHHSPVRISVRRPYILEDSYNQLRMRSPQDLKGRLTVQFQGEEGIDAGGLTREWYQSISRVIVDKSALLFTTVGNDLTFQPNPNSVYQTEHLSYFKFVGRVVGKALFDGQLLDAHFTRSFYKHILGVKVTYHDIEAIDPSYYKNLKWMLENDISDVLDLTFSMDADEEKLILYEKAEVTDCELIPGGRNIRVTEENKHEYVDRVAEHRLTTAIRPQINAFLEGFNELIPRELISIFNDKELELLISGLPDIDLDDLKTNTEYSGYSIASPVVQWFWEIVQGFSKEDKARFLQFVTGTSKVPLEGFSELQGISGPQRFQIHKAYGSTNHLPSAHTCFNQLDLPEYTSKEQLQERLLLAIHEANEGFGFG

SEQ ID NO: 69153 - protein, 79 aa, Zea mays
  Coding DNA Sequence Number=SeqID_27374
MKELLLGAFFSAEGPLSKNTFGKITRKQVEFPEVLNIPRVSYLGSIHLAMLSNVNLGAPKIKSAGNTAWLGSQAPDYIW

SEQ ID NO: 69154 - protein, 93 aa, Zea mays
  Coding DNA Sequence Number=SeqID_27375
MPSHSVELTSGSTLITLASPGDPWLSTSFSMIPHSLASYRLKEARFDYGCNAIMAKFMAIPHYPYMILNLDLTASSPSELTSRELWNAFRGAI

SEQ ID NO: 69155 - protein, 264 aa, Zea mays
  Coding DNA Sequence Number=SeqID_27376
  Gene Ontology: Mol. function=transcription regulator activity; Cellular component=nucleus; Biological process=regulation of transcription
  Homolog annotation: Hit_ID=Q9SP39; Match level="QueryCoverage=57%, HitCoverage=48%, E-value=5e-33, Identity=51%"; Hit description=BHLH transcription factor GBOF-1
  Pfam annotation: Domain name=HLH; Domain location=123-173; Score =34.0; E_value=5.2e-07; Accession=PF00010.16; Description=Helix-loop -helix DNA-binding domain
MPAASAHAHSPSLSSLLLYGQESHGEAAPANANANAAAATVEDAASLETSSAVVDSASPMERKRKATAEDSAAISSPQPKDCKQESKSRRGKRPRKETEEKSSTDEDEASKGYIHVRARRGQATDSHSLAERVRRERISERMRMLQALVPGCDKVTGKAMVLDEIINYVQSLQNQVEFLSMRIASMSPVLYGFGTNSEGLHDHHAPKMGGVSFQEAAIAVPAGPAAAENGGTYYLVQQAVGEQATRQEELLLSQLVFSNMCSFQ

SEQ ID NO: 69156 - protein, 52 aa, Zea mays
  Coding DNA Sequence Number=SeqID_27377
MSTTVALDANENGEPVDQKDYKKIVGSTFAHLCGELGLLLLASGVEPLSASS

SEQ ID NO: 69157 - protein, 106 aa, Zea mays
  Coding DNA Sequence Number=SeqID_27378
MSNAQRERLLPVVFVRGFQGTFTVYSLGDTTSSRCCAGHAEFDVHYGLIQRWAVRKHCIRVFASRLKRACLLVAYVSAVGWITLQYSKFIGLKELLSDSEVMERFF

SEQ ID NO: 69158 - protein, 178 aa, Zea mays
  Coding DNA Sequence Number=SeqID_27379
  Homolog annotation: Hit_ID=Q1T2M3; Match level="QueryCoverage=28%, HitCoverage=10%, E-value=4e-11, Identity=83%"; Hit description =Protein kinase
  Subcellular localization annotation: CTP_CleavageSite=40; ConfidenceScore=5.35e-01
MEQSALGSGGGLSGVRTNGPGVGPYASLKSSPAHKRRITAAAGVTDFPVGPWGRRHRQSLAGASRNSHEIRVSDSDETLLAGHRRGVAATGCAQGGRTVVYEGAVVGSSLVGLGCGSGVRRERAWLGDSLPHAFIGEGFVDGANLLVSRIGVIGVSVMAVLSGFGAVNMPYSYLSLFI

SEQ ID NO: 69159 - protein, 136 aa, Zea mays
  Coding DNA Sequence Number=SeqID_27380
  Homolog annotation: Hit_ID=Q6AWY6; Match level="QueryCoverage=72%, HitCoverage=23%, E-value=5e-23, Identity=57%"; Hit description =Growth-regulating factor 3
  Pfam annotation: Domain name=QLQ; Domain location=57-93; Score=69.5; E_value=1.1e-17; Accession=PF08880.1; Description=QLQ
MAMPFASLSPAADHRPSSLLPYCRAAPLSAVGEDAAAQAQQQQQHAMSGRWAARPPALFTAAQYEELEHQALIYKYLVAGVPVPPDLLLPLRRGFVYHQPAHRMLARLVSGQKRRFSLLMIASFLGGFIPVWLLGA

SEQ ID NO: 69160 - protein, 76 aa, Zea mays
  Coding DNA Sequence Number=SeqID_27381
MAHRTVRCATGAPTVRHRCANGRFQRLVLTESRWTHGAPDSEQSTVRCTPDSPVRCPVQTGYDCIRIARRDFTNIL

SEQ ID NO: 69161 - protein, 40 aa, Zea mays
  Coding DNA Sequence Number=SeqID_27382
MLACIACSSKEGAEDGSRAAATTTTPHGKEAVKSLTSQAR

SEQ ID NO: 69162 - protein, 97 aa, Zea mays
  Coding DNA Sequence Number=SeqID_27383
MDIVVGPTWGAGPWPMGAGPPAGWPPPGAASAGAEACLLPVHHLYQLSYDAQPAANAFYTRPAPHMVAEAGYTQGEGPVPRRVQGPCQVQLAVVVLG

SEQ ID NO: 69163 - protein, 71 aa, Zea mays
  Coding DNA Sequence Number=SeqID_27384
MDWELGVSLGRVVQAKFGAKEYSQAMCDLMNLYQKESVEDYLKEFEGAHYATSVHNLGLDETIVWLISSRG

SEQ ID NO: 69164 - protein, 163 aa, Zea mays
  Coding DNA Sequence Number=SeqID_27385
MAVDVDVEVHGVFWVDVGDRVEGNNRCVEHLLDSHPNTYVVGDLIVQVLEGSPRCGVVVDGRHSEGGEWGFQTRCPPIPQQSVREPGRHGGGEGDECCPSWVVQRAERAASCCMRSIRGLRALAVAFVGGAGGTGGCLLPSSEPAISDTRLEEPWAPRRLQNA

SEQ ID NO: 69165 - protein, 141 aa, Zea mays
  Coding DNA Sequence Number=SeqID_27386
MDNPVGNYSRVNKIFNVDSQPIKRSFGRAGSMGLIGLENLENTCFMNNSIHKGEMILADDTCRILEILAYEYWSNHLAQNDSVIVDTCHFFRACNLIRCNKIKGIKAPRIMPKSSSVVISDVKCDNPKEEGKVQQTKRCKM

SEQ ID NO: 69166 - protein, 166 aa, Zea mays
  Coding DNA Sequence Number=SeqID_27387
  Subcellular localization annotation: CTP_CleavageSite=40; ConfidenceScore=5.20e-01
MAKRWEVGKSSVRSNGVKARLVRHSSDARQKPNSGVATLSSSSYENRRADTPIPSIIIPCSISLSSFASALVVVFHPAARHETGCRAPFLTNVGPAPAPAFAINLSSSVTLARCSIEDYNERPRRSGNYQIELRRGTLINHVKRKTSQVDPKRGLLHMAMLMDEPA

SEQ ID NO: 69167 - protein, 106 aa, Zea mays
  Coding DNA Sequence Number=SeqID_27388
MELGHGARLVPWMPGRGTKHRRRLGGTGGKGTLGPGSWTARGRMVLRTEATEQEMGRWLGEGRGGRGQRESRVSACSQGAPAPARTKQREEEMPPCLEGGALEKKS

SEQ ID NO: 69168 - protein, 125 aa, Zea mays
  Coding DNA Sequence Number=SeqID_27389
MRVVAFGAIYAQGYKFCYKPIKQVVMQKFKNNASKDPLSDQLNDLTMVQCTEISQGLVPLTVGDPRVRICARCRDSCQARCGYPRGVSFGSPDAPQPIQLSYTALDHREHLCSSVVCAVSVDWTI

SEQ ID NO: 69169 - protein, 170 aa, Zea mays
  Coding DNA Sequence Number=SeqID_27390
LQGAGYTTPPQYYVQLLEEHRGQTAYLTVRCMNALYRLQAVRAEAMSQLMGLVESTKITLDNREDLVVDLSTELVEKDLQVEQMATQIQELEDQVVARENTIEVLEEQLEEANQHLDMHHQEIQGMEAEGANEDVDIDGGEEPEPASSLDTAGSGRPPSPESSVALMDDL

SEQ ID NO: 69170 - protein, 169 aa, Zea mays
  Coding DNA Sequence Number=SeqID_27391
  Gene Ontology: Mol. function=protein-tyrosine kinase activity; Cellular component=integral to membrane; Biological process=protein amino acid phosphorylation
  Homolog annotation: Hit_ID=Q1RXR7; Match level="QueryCoverage=99%, HitCoverage=55%, E-value=2e-33, Identity=33%"; Hit description =Tyrosine protein kinase, active site
  Pfam annotation: Domain name=LRR_1; Domain location=112-135; Score =1.8; E_value=1.3e+02; Accession=PF00560.23; Description=Leucine Rich Repeat
  Pfam annotation: Domain name=LRR_1; Domain location=136-158; Score =3.7; E_value=58; Accession=PF00560.23; Description=Leucine Rich Repeat
  Pfam annotation: Domain name=LRR_1; Domain location=16-38; Score=7.3; E_value=12; Accession=PF00560.23; Description=Leucine Rich Repeat
  Pfam annotation: Domain name=LRR_1; Domain location=40-62; Score =15.4; E_value=0.2; Accession=PF00560.23; Description=Leucine Rich Repeat
  Pfam annotation: Domain name=LRR_1; Domain location=64-86; Score =11.2; E_value=2.3; Accession=PF00560.23; Description=Leucine Rich Repeat
  Pfam annotation: Domain name=LRR_1; Domain location=88-110; Score =12.5; E_value=1.3; Accession=PF00560.23; Description=Leucine Rich Repeat
  Pfam module annotation: Pfam domain module=LRR_1::LRR_1::LRR_1::LRR _1::LRR_1::LRR_1; Domain location=112-135::136-158::16-38::40-62::64 -86::88-110
NQLTSSIPQEIGFLANLSALLADSNQLGGPIPASIGNLTSLTYLQLTNNQLVGSIPGEIGRLVNLQVMALSENQISGSVPASVGNLTNLIEFNMFSNRLSGSLPREFRNLTLLVDVILGNNSLSGELPSDICRGGNLFEFTLAMNMFTGPIPESLKTCASLGYLNIGSN

SEQ ID NO: 69171 - protein, 90 aa, Zea mays
  Coding DNA Sequence Number=SeqID_27392
MASNVTANHAIDSRLLILCRMPRLRGCLYTRAPEGEASHVIVVVNNVEKSSRGAGRAMRYNRAEWVVCGIRGTVGGRGRARGETENLPKD

SEQ ID NO: 69172 - protein, 235 aa, Zea mays
  Coding DNA Sequence Number=SeqID_27393
  Homolog annotation: Hit_ID=Q6QP51; Match level="QueryCoverage=25%, HitCoverage=31%, E-value=1e-12, Identity=60%"; Hit description =Putative growth-regulating factor 1
IRQHSSPSPALLEDASSAKLVDGCHHKKLEEEVASRPAREVEPWLALLSAPARMMNVLEAEGRTKTTARLASPHPGAGDQRAKGRVAMQAACNCAKWAHFSDFQHAQHGGPGPRVMQPARRMLRASDCTATRATATPPRLRNQYRDLRQPYARPSSASLARRGSERRFAFAIMTASKKAPSLPTDQRFEGWPLGGVQQPPQSAWAPHPLLVRGSKAGPSEGFNDRLRPLGLRAHY

SEQ ID NO: 69173 - protein, 163 aa, Zea mays
  Coding DNA Sequence Number=SeqID_27394
MSWRAAVLLLACLVAVTAALVDGALLPRTRLCAWLLLVESPAAPSQLQLDPFLRAHAPAELRARAPHPSCARTAPSLPVLADRGCPTPCCARPARSRHNPVIVPCIVMKSQAWGEDEASSMVFTKCSNKSSSIILVYAKPPSREDTLVLVTRHQLDKINPMGV

SEQ ID NO: 69174 - protein, 134 aa, Zea mays
  Coding DNA Sequence Number=SeqID_27395
MGRACTELGRSVRAQKRIELELRRHGWRFDEQEPGAEASSGSSAPSTSAAVTATRHASNNTAALHDIVTDLCLPGASIITEAGKLAAEQMDRDATGYAMDWAPGERTEGGSEGAWGRKERSKGEKDPRHWRSRA

SEQ ID NO: 69175 - protein, 177 aa, Zea mays
  Coding DNA Sequence Number=SeqID_27396
  Subcellular localization annotation: CTP_CleavageSite=62; ConfidenceScore=5.61e-01
MAVAPLFQLARPSSLPSAMAPAVPIPSGSSPHHARLPGGWSSPWVLAAAAFSVARPAPTRIRCELLWCSPGRDLAELRPCSCRHWITIAARVVLNLCADSAAPARRHCSALASRSSGFDVFVFAVESHPPQLGTPYTVVVAHIPPCMCKLHCLIFDPSSFSTSLQRSAVRRRHPIAR

SEQ ID NO: 69176 - protein, 76 aa, Zea mays
  Coding DNA Sequence Number=SeqID_27397
METVQMIGWANVFRTTDNMDDKIEAWGSFTVSPEVMYTLEFGLGRWPKFDEVHGGVTALASLPTRYRHGDGPVTAD

SEQ ID NO: 69177 - protein, 48 aa, Zea mays
  Coding DNA Sequence Number=SeqID_27398
MAAKDNWSIVRQGGALQDMVDGVTWPSTLLPGWTVEWDAASAGEDQEE

SEQ ID NO: 69178 - protein, 43 aa, Zea mays
  Coding DNA Sequence Number=SeqID_27399
MSSSTPVRGQSDSDHLQPLSDHRRVRQDLPDLRDPFAGARPPL

SEQ ID NO: 69179 - protein, 169 aa, Zea mays
  Coding DNA Sequence Number=SeqID_27400
MAKLDLRHRSPLGEKLCSHRFTIPPGEAVIDILVDPAIPTACPRGIDIGEPEFSPMADMILSLPPMMVGYGGLEVRKWLAQFPFHLSTPTVARLSSVLPQLGISTGYLIPSGVLGGCGYGYIFLPDWLSGYGYLYKVGLHTSNQRSPNVMFEQVGGGIICVWQWHSSGT

SEQ ID NO: 69180 - protein, 125 aa, Zea mays
  Coding DNA Sequence Number=SeqID_27401
MRVNLDPIGGLRDAVKNWKGLERMEILSIRCRFPWGAERARRPVSARVGELDFGWRWGLVASLGWGRGGDPREAEGGGVRWRGIWFGLQLQRTVDFDDQWDHVTEAQLSVMRVSYTPMGLLVLAF

SEQ ID NO: 69181 - protein, 80 aa, Zea mays
  Coding DNA Sequence Number=SeqID_27402
MSGERAKREIMTGDKPASSGRTLSRESGNKYKEESSSSIKSNWKGDKKKKKKMKKVVYYETDFSSPSTSGSESSTTYKRH

SEQ ID NO: 69182 - protein, 181 aa, Zea mays
  Coding DNA Sequence Number=SeqID_27403
  Subcellular localization annotation: CTP_CleavageSite=86; ConfidenceScore=5.77e-01
MSPPKSAARPPASLTSPKTGANKRQRKAASAVPLGDITNLLVLAESPTPSKPRRTARRALPATSDVSAVSSTCSSSASVTPAPKPSSAAVFEEEHSVVKSPTISTVHRRTTGAQERCRRNPASANNKGKEPVAATASCPPLGKSARTHSSLISVGVSRCEAVQLIVIGNLSQLIVIGNLLA

SEQ ID NO: 69183 - protein, 67 aa, Zea mays
  Coding DNA Sequence Number=SeqID_27404
MGTYSWLRKKDTRPISASVPCHEGRKKRPIASTPNLLEDLLEKQRAYFADIDAFELVEEEVSESELE

SEQ ID NO: 69184 - protein, 499 aa, Zea mays
  Coding DNA Sequence Number=SeqID_27405
  Gene Ontology: Mol. function=nucleotidyltransferase activity
  Homolog annotation: Hit_ID=Q2QYQ5; Match level="QueryCoverage=72%, HitCoverage=25%, E-value=7e-74, Identity=41%"; Hit description =Retrotransposon protein, putative, unclassified, expressed
  Pfam annotation: Domain name=PLAC8; Domain location=296-431; Score =113.8; E_value=5e-31; Accession=PF04749.7; Description=PLAC8 family
MESHETSSKQIQRHGKARKERFLDFLRAAPSKDLWLQRFGVTVTAPHAFLRRVATVGYVPAAYARFFPLRAPAAFVRGVDWRALRARCKAWARRPTNAALLVWLAFVAAGVAFVFLLMTGALDSAVPDAARRRRWTEVANQVLNALFTVMCVYQHPRLCHHLALLLRWWRDDAAAAELRAVYCKNAAGTRRERLHVAVVLLLLHATCFAQYAYCALFWAFSSDTRPDWAVNFCMAFGLAAPVAAALYMVYGPLGRRIVQLPAAAAADTGDDEAVAVMAADEARYTGGRVAVARPEWAGGLFDLADDPTVAALSLTCTFCMFGWNMERMGMGNMYVHVFTFALLCAAPVLVFAVAALNIHDATLGFLVGATGALLSVLGLTYGGFWRAQMRRRFSLPADRSMCGGRPAAADYAKWLLCAPCALAQEVRTGNLYDVEDGSLYHVRGSDEDALEEEKPGMAPLEREGCVAPAPLTADKTRAGRVECVVTVKPPAPLRIMRGE

SEQ ID NO: 69185 - protein, 147 aa, Zea mays
  Coding DNA Sequence Number=SeqID_27406
MALGDLMASRLVHSSSSRGLSSSPTPPLPNQHHHQNHNHTGDGLLAASGPEPRNGLEADEVDKSAPVPYLPQLVVLCEQRHEPEGIDEAAAAAAGPSTSGLVSKWRPKDRVMDVMQIADAVSSDVILRYSLNSATPVLGGIFGIALS

SEQ ID NO: 69186 - protein, 137 aa, Zea mays
  Coding DNA Sequence Number=SeqID_27407
  Homolog annotation: Hit_ID=Q6RUS5; Match level="QueryCoverage=79%, HitCoverage=8%, E-value=1e-51, Identity=91%"; Hit description =Transducin/WD-40 repeat protein
  Pfam annotation: Domain name=WD40; Domain location=19-57; Score=21.9; E_value=0.0023; Accession=PF00400.22; Description=WD domain, G-beta repeat
  Pfam annotation: Domain name=WD40; Domain location=67-106; Score=3.6; E_value=14; Accession=PF00400.22; Description=WD domain, G-beta repeat
  Pfam module annotation: Pfam domain module=WD40::WD40; Domain location=19-57::67-106
IVSASQAGDIQFLDVRRSAEPYLTIEAHRGSLTALAVHRHAPVVASGSAKQMIKVFSLEGEQLTIIRYQPSFMGQRIGTVNCLSFHPYKSLLSAGAGDNALVSIYAEENYNSVTVKGVGGSARCARVVMGGNGPKTI

SEQ ID NO: 69187 - protein, 46 aa, Zea mays
  Coding DNA Sequence Number=SeqID_27408
MATPRRLMLRDGEPFTAQPDTLLPAQRLFLVTGGTPVLRNFVIAIL

SEQ ID NO: 69188 - protein, 106 aa, Zea mays
  Coding DNA Sequence Number=SeqID_27409
MQWSADHPGSHASVVAPWRIYGPKINRAYLGSLGHDKGHGPRLSLHLRSALDILLLVLLLVLSGYMTYALLIGLVYTGQAHTHPKTEKGCKLRFQPGFNPYKEHLA

SEQ ID NO: 69189 - protein, 586 aa, Zea mays
  Coding DNA Sequence Number=SeqID_27410
  Gene Ontology: Mol. function=binding; Cellular component=cytoplasm; Biological process=embryonic development ending in seed dormancy
  Homolog annotation: Hit_ID=Q6RUS5; Match level="QueryCoverage=98%, HitCoverage=46%, E-value=0.0, Identity=73%"; Hit description =Transducin/WD-40 repeat protein
  Pfam annotation: Domain name=HEAT; Domain location=232-264; Score =17.0; E_value=0.068; Accession=PF02985.12; Description=HEAT repeat
  Pfam annotation: Domain name=HEAT; Domain location=280-315; Score =12.5; E_value=1.3; Accession=PF02985.12; Description=HEAT repeat
  Pfam module annotation: Pfam domain module=HEAT::HEAT; Domain location=232-264::280-315
MAAEICLSKLPQLIADPNAEFQPSPFFTEQLTAFEVWLDHGSEDKKPPEQLPIVLQVLLSQSHRFRALVLLGRFLDMGPWAVDLFSPMHFIVVGPVCRNISLCTQTASNKCNGVASILVFIWTKILSLDKSCQVDLVKDGGHTYFVRFLDSLDAYPEQRAMAAFVLAVIVDGHRTGQEACMNAGLIDVCLRHLQPENPHDSQTEPLLLQWLCLCLGKLWEDFPDVQLLTLQTNTPEIVLCLLSEPQPEVRAAAVFALGTLLDTTSSNGADDDSDYDEKVKAEINVVRSLLQISSDASPLVRSEVAIALTRFALGHNKHLKSVAAEYWKPQSNSLLKSLPSLANINNPNNVYSPNNILQGSIGPVLRVGSDSSAAGRDGRMSTSSPIATSSIMHGSPQSDDSSQLSDSGLLLRENASNGGPGYTRSRPVDNVIYSQFISTMCSFAKDPYPRIATIGRRALSLIGVEQVVMKNTRFNSGGAHRGETSASNFGMARSSSWLDMNSGNNLIKFRTPPVSPPQHDFLPGLRRVCSMEFGQHPISSPDGLAVPLLSSAAATSNAELSILPQSPIYNWSCGHFSRPLLMNESS

SEQ ID NO: 69190 - protein, 593 aa, Zea mays
  Coding DNA Sequence Number=SeqID_27411
  Gene Ontology: Mol. function=RNA-directed DNA polymerase activity; Cellular component=intracellular; Biological process=RNA-dependent DNA replication
  Homolog annotation: Hit_ID=UPI00004C1731; Match level="QueryCoverage =99%, HitCoverage=45%, E-value=0.0, Identity=79%"; Hit description =UPI00004C1731 related cluster
  Pfam annotation: Domain name=RnaseH; Domain location=312-428; Score= -12.1; E_value=0.00078; Accession=PF00075.14; Description=RNase H
  Pfam annotation: Domain name=rve; Domain location=430-591; Score =74.2; E_value=4.2e-19; Accession=PF00665.16; Description=Integrase core domain
  Pfam module annotation: Pfam domain module=RnaseH::rve; Domain location=312-428::430-591
MPFGLRNVGVMYQRCMNHVFGEHIGRTVEAYVDDIVVKTRKASDLLSDLEATFRCHKAKGVKLNPEKCVFGVPRGMLLGFIVSERGIKANPEKIAAITSMGPIKDLKGVQRVMGCLVALSRFISRLGERGLPLYRLLRKAECFTWTPEAEEALGNLKALLTKAPILVPPAAGEALLVYIAATTQVVSAAIVVERQEEGHALPVQRPVYFVSEVLSETKIRYPQVQKLLYAVILTRRKLRHYFESHPVTVVSSFPLGEIIQCREASGRIAKWAVEIMGETISFSPRKAIKSQVLADFVAEWVDTQLPTAPIQPELWTMFFDGLLMKTGAGAGLLFISPLGKHLRYVLRLHFPASNNVAEYEALVNGLRIAIELGVRRLDARGDSQLVIDQMEAYCDEVRCLEDKFYGLELNHIARRYNETADELAKIASGRTTVPPDVFSRDLHQPSVKIDDTPEPEAPSAQPEKAPRGYTHLLVAIDKFSKWIEVRPLNSIRSEQAVAFFTNIIHRFGVPNSIITDNGTQFTGRKFLDFCEDHHIRVYWAVVAHPMSNGQVERANGMILQGLKPRICNDLNKFGKRWMKELPSVVWSLRITPS

SEQ ID NO: 69191 - protein, 102 aa, Zea mays
  Coding DNA Sequence Number=SeqID_27412
MGGLCAARITSVGVSGHCFAGRGRHHGGHAPPCLVAGRKKMGGPLTQLWMDEIAPSRTPFMCQSPTVGSDRMYGILSRLFKSWALVTDRTTRNVYRFVVAGF

SEQ ID NO: 69192 - protein, 207 aa, Zea mays
  Coding DNA Sequence Number=SeqID_27413
MSVRESFVAEGEADYGGRCDFYRVFDGNGCSHVVVACRDRMHDLLAGHPCPSLDLALARRSAARPLHPLGQEMPCIPIPLWCSSASPLLSWPRVLLSPSVVVGMSWLQHQHPRPRPKLYVGFVSVLLVRTPRVRDIVVCLLAGLIRDPVSLWSPLLIPWHANHPAARHETRCRAPFPANARPAPAPAFAISLSSLVTLARCSIEDFN

SEQ ID NO: 69193 - protein, 152 aa, Zea mays
  Coding DNA Sequence Number=SeqID_27414
MEKCKPIKTPMPTNGHLDLDEGGTRGSATMQPYPVVHQTVTVHCPVCIGQPLYTVRSQFRIVRTKNVTPCGGGDDEDLPRPFRQATLEASRLQFGFCRLALEDTALTPAPDIRVEDEAIRQFENQGAVADTSSDDEEDQGDSATTSRATLFS

SEQ ID NO: 69194 - protein, 102 aa, Zea mays
  Coding DNA Sequence Number=SeqID_27415
  Homolog annotation: Hit_ID=Q1EP91; Match level="QueryCoverage=33%, HitCoverage=31%, E-value=1e-07, Identity=76%"; Hit description =Mitochondrial inner membrane preprotein translocase (TIM23) component- related
MMMLMLEVEDPTLGMMLMMMIWTRNADVAMARPSDIRTVLASYQGHDVAAKFIERSKEHQRVKNVGTHVLNVKNVGTVELNGQPSPTHVGPISSTAIWPRRT

SEQ ID NO: 69195 - protein, 89 aa, Zea mays
  Coding DNA Sequence Number=SeqID_27416
  Homolog annotation: Hit_ID=Q3LRV2; Match level="QueryCoverage=92%, HitCoverage=44%, E-value=6e-16, Identity=44%"; Hit description=Gag
MKKVVYYETDSSSPSTSGSESASVTSKQHERKKYSKPPFFDGEDYCMWSDKMRHHLTSLHKSIWDIVEYGTQVSSDSDHEHTEHGQDEA

SEQ ID NO: 69196 - protein, 133 aa, Zea mays
  Coding DNA Sequence Number=SeqID_27417
  Homolog annotation: Hit_ID=O24421; Match level="QueryCoverage=34%, HitCoverage=5%, E-value=7e-11, Identity=78%"; Hit description=Starch branching enzyme IIa
  Subcellular localization annotation: CTP_CleavageSite=16; ConfidenceScore=5.12e-01
MASLAVSGARLGVVVRAGGSAGSGGERRSGVALPSVLFRRKDAFSRVVLGCDGAPGKELLMAGCGSDHLLSSTEPVVDALQRSEGLQFVIIRSDSTQYRAKQQNSGKMILILNLVLQYLHLLETKKSSTDSPR

SEQ ID NO: 69197 - protein, 76 aa, Zea mays
  Coding DNA Sequence Number=SeqID_27418
MASADKATGCQRNGAVRSSIETPIVPPSLATLARPEVERTQGGLAATILANRSKLLFAYSSGGKIEKEGGRDGNDI

SEQ ID NO: 69198 - protein, 156 aa, Zea mays
  Coding DNA Sequence Number=SeqID_27419
MANVAWAQHLHRGDEGWLGSTTSARRRTGESGQREIEGEGANRGVSWVVDIEAKLTEATNTARTRRRLRNKLETEADNSGFFSGVRTAWGEDESSAGVRVREGSEWGMTSKGVGRVGRGGLETRDVSASTVGHTGGRLEERRELTSVVRGSAGEGA

SEQ ID NO: 69199 - protein, 105 aa, Zea mays
  Coding DNA Sequence Number=SeqID_27420
MDSGLQVRAALKCVTPYVLARVWTYIRAVERSGLEGSDESKYSSDEEDSSDSSEEDSGGDGGDGGDDGGDGDGGGDSGRGGDGGRKGDHGSGSKGSSKGGNKTSG

SEQ ID NO: 69200 - protein, 96 aa, Zea mays
  Coding DNA Sequence Number=SeqID_27421
  Gene Ontology: Mol. function=nucleic acid binding; Cellular component= nucleus; Biological process=mRNA processing
  Homolog annotation: Hit_ID=Q10KN7; Match level="QueryCoverage=54%, HitCoverage=16%, E-value=1e-15, Identity=77%"; Hit description =Polypyrimidine tract-binding protein, putative, expressed
MPPLHHLCPCAATAMLPLPSAAAGIIIIRIFQSIILPWMLAVGADGRKGEAQGNVLLASIENMQYDVTVDVLHTVFSSFGSVKKLLFFRRMGGHKL

SEQ ID NO: 69201 - protein, 574 aa, Zea mays
  Coding DNA Sequence Number=SeqID_27422
  Gene Ontology: Mol. function=oxidoreductase activity, acting on single donors with incorporation of molecular oxygen, incorporation of two atoms of oxygen; Cellular component=chloroplast; Biological process=abscisic ...
  Gene Ontology: Biological process=acid biosynthetic process
  Homolog annotation: Hit_ID=Q69ND5; Match level="QueryCoverage=97%, HitCoverage=94%, E-value=0.0, Identity=61%"; Hit description =Crocetin dialdehyde-like
  Pfam annotation: Domain name=RPE65; Domain location=61-566; Score =134.2; E_value=3.5e-37; Accession=PF03055.6; Description=Retinal pigment epithelial membrane protein
MAVGRRPCPCLPAHGPQHQWAPALRPWFGDLLGRLSSTMDGASRALKDAPQRFLDALVDATFRFTDQALNSAESNFAPVDETGEAIEIHQSQIQGAIPDGFPEGVYIRNGDGFSHFPLLALSVSMSERERESERPVNIVLGSNPLFGALHSTSSVLGQSREIWVEGEGMLHAVYFTKSSAGHLWSVSYASRYVQSETLELETARHKPCFLPAVEGDSAAIVAAYVFNYLRFGKVSKDISNTNVFEHSGRVFAVAENSLPYEICVGSLDTRDAWDVGGEWDRPFTAHPKVAPGSGELVIFGTDAKKPFLVVGVVSADGTKLKHRADLKLDRCTLCHDIGVTPKHNVIMDIPLTMDVGRIVKGGQLIQFEKESYARIGVMPRYGDADSAVWFDVEPFCMFHLVNCFEEGDEVVVQALRSPDSIIPGSTIALDKLDSEMPEVAGDDKPAKRPTAEEFFFRLYQWRLNLRTRSVSGEYLSGTDYSLEFPIISSQYTGLQHRYAYAQVVDSCGNCGKVNPKYGGFAKFYLDERSNAEVHIVDAKRFEDAPVAKITFPRRVPYGFHGTFVRNQMYYINNS

SEQ ID NO: 69202 - protein, 138 aa, Zea mays
  Coding DNA Sequence Number=SeqID_27423
MEQSRPFSRQSRSGDLGGWFAVRAHHDTMSLCLFQRAVGSGGSGCQTCDLAAHTYVDAAETKKTGAGAGASGQCPGGRGGPVTTWPMARVLIPPPGTLGPTPWERCVQIRNTDTGPVEAFLTCGAVYFGTVRPLLESH

SEQ ID NO: 69203 - protein, 76 aa, Zea mays
  Coding DNA Sequence Number=SeqID_27424
MSSCCRRAPCLSPRGCSLDDVVEPSLLRLAPSMFLGRSIKCLTEQLVLGSPFAMSSTPLAVNAIRRARVFEARPVG

SEQ ID NO: 69204 - protein, 160 aa, Zea mays
  Coding DNA Sequence Number=SeqID_27425
  Gene Ontology: Mol. function=DNA binding; Cellular component =mitochondrion; Biological process=DNA integration
  Homolog annotation: Hit_ID=UPI00004C1733; Match level="QueryCoverage =75%, HitCoverage=8%, E-value=2e-60, Identity=90%"; Hit description =UPI00004C1733 related cluster
  Pfam annotation: Domain name=rve; Domain location=12-160; Score=66.1; E_value=1.2e-16; Accession=PF00665.16; Description=Integrase core domain
MHLPAQALQTIPITWLFAVWGLDLVGPLQKAPEGFKHLLVAIDKFSKWIEVRPLTSIKSEQAVVFLTNIIHRFGVPNSIITDNGTQFTRKKFLDFCEDHHIRVDWAAVAHPMTNGQVERTNGFGPETSKWGTWYFGCDKTPEGATSLLLPGRGRSSSPKF

SEQ ID NO: 69205 - protein, 100 aa, Zea mays
  Coding DNA Sequence Number=SeqID_27426
MEDSAPSSAAPDPPLSPPPSTPPHPHPHPPEEEGGCWVLVPAQRGRGGPTRPRSSTGTTCSRSSRASGASPPRSSPAKGPQGAPHRAPRVRSTEYPGFVT

SEQ ID NO: 69206 - protein, 777 aa, Zea mays
  Coding DNA Sequence Number=SeqID_27427
  Gene Ontology: Mol. function=ATP binding; Cellular component =membrane; Biological process=defense response
  Homolog annotation: Hit_ID=Q84YX3; Match level="QueryCoverage=83%, HitCoverage=71%, E-value=2e-93, Identity=36%"; Hit description =Putative disease resistance gene homolog 9N
  Pfam annotation: Domain name=LRR_1; Domain location=453-475; Score =0.2; E_value=2.6e+02; Accession=PF00560.23; Description=Leucine Rich Repeat
  Pfam annotation: Domain name=LRR_1; Domain location=477-498; Score =9.0; E_value=5.9; Accession=PF00560.23; Description=Leucine Rich Repeat
  Pfam annotation: Domain name=LRR_1; Domain location=500-521; Score =8.0; E_value=9.1; Accession=PF00560.23; Description=Leucine Rich Repeat
  Pfam annotation: Domain name=LRR_1; Domain location=646-668; Score =1.7; E_value=1.4e+02; Accession=PF00560.23; Description=Leucine Rich Repeat
  Pfam annotation: Domain name=NACHT; Domain location=47-196; Score= -39.0; E_value=0.063; Accession=PF05729.3; Description=NACHT domain
  Pfam annotation: Domain name=NB-ARC; Domain location=9-303; Score =54.3; E_value=9.5e-14; Accession=PF00931.13; Description=NB-ARC domain
  Pfam module annotation: Pfam domain module=LRR_1::LRR_1::LRR_1::LRR _1::NACHT::NB-ARC; Domain location=453-475::477-498::500-521::646 -668::47-196::9-303
MVELELRDDVHDADAVIYMEEHDKLEDALVNNNLAEHQDGKDDHYPVMITVSGESGIGKTTLVRDIYKKMENQKVFEVQAMESFAPYLTAPNILQQITQQLTQDDTNCPKEMAQEMLQSRLRGKKYLLVIDGEVSGTEWKHFLTSIPVGARGSRVVHITQGKPEEPPSSYHHVTIELKKLTEDAAMALFRQRLPKELQDKNLSKYRKSVFKITQGLPLAVVLLSGLVQTKVFPGEWVKVFHYLKSKPSTANLESMLSVCFDDLPHELKCCFLYFAALPTNTTVEARSLVFMWVAEGFLSSKGGKTMEKIGFVYLSELISRNLVNRAKMNDDSSFGSMLVTIQTKVHDFLQIEAHEASFVEVHSNDDIPTLTSARRLSLQNYTDKYAVLAHPLPKLRSIFSQYEQEPNKGDRGHHHRSKGSRAYMFRLSQQRAISKMKRDIRSHIKDLFHGSEFLRVINLQGIEIGETLTSAIGDLVHLQYLGITSCSLRHVPWSIGGLTSLQTLDVRETNVRELPRSFWMIKTLRHVLGFVLKLPKQIGNLKQLHTLDSIDLEQVSEETDLVETLGEMIHLEFLSIWHVSHANVKALSAAMEKLESLRTLILEGKIIPSNVFTTASLRRVKFMFLSGDLLRSSDLDDGGESFILPNLAMLSLEKTYVTQEFISKLSELPSLTTLALYPGSYRDKKLVFASAKFPRLKRIKTVDVEVLESVEVEVSKVPELKELEIHSYFTGGYHHIDLGSERRKRSRKTRIVVDLKKVNGAVHEENADTSGWWMIFS

SEQ ID NO: 69207 - protein, 177 aa, Zea mays
  Coding DNA Sequence Number=SeqID_27428
  Homolog annotation: Hit_ID=Q2RB13; Match level="QueryCoverage=56%, HitCoverage=16%, E-value=3e-18, Identity=53%"; Hit description =Expressed protein
  Subcellular localization annotation: CTP_CleavageSite=63; ConfidenceScore=5.73e-01
MADKLASLSAPVQVLSSIFSSFVATHGASLSSMNSGSPPRDQLSGAPPGFQVEKRPRLERTVLASDMGAPPFSMQAPRLQQPVGSMPTQAATQMNQAPGLFAPPPPPPLPPLLPPLLQQFGQSAGGMMGMGPFGMMAGSMPPPPPMSSIMPAVVRLCIDPLRRKKVVLELLLNRAAL

SEQ ID NO: 69208 - protein, 79 aa, Zea mays
  Coding DNA Sequence Number=SeqID_27429
MGQRQTPRYAVRTSKVSPGPPCVQAGPLERDPDPPPAAHACTDILSSVRGCSWGVVCGQGDATQPSKFHGLAGSHETVA

SEQ ID NO: 69209 - protein, 182 aa, Zea mays
  Coding DNA Sequence Number=SeqID_27430
  Gene Ontology: Mol. function=protein serine/threonine kinase activity
  Homolog annotation: Hit_ID=Q2RB13; Match level="QueryCoverage=94%, HitCoverage=29%, E-value=2e-48, Identity=60%"; Hit description =Expressed protein
MPYVSGFPIGWRIGIWDDRKVFGTRIESLKDGIFGDNPPIFDHSGNNNNSNPSSNPLNSKVGRKDSSTVLKKLAVGGMPEKIVTAYQSVFDQHFDEDTALNKCKSTVSVLENLKKDIDLASTEGDPPASTMISDLQEQETILKHCIAQLGSVDAARISLINQLKEALTEQESKSEVLRSQFA

SEQ ID NO: 69210 - protein, 85 aa, Zea mays
  Coding DNA Sequence Number=SeqID_27431
MDEGWKKRGTLSSEWVVKIDEFIDRGFGRNHLVRMYQKFRQMKRGTTIEWKRCLRMYDMSFYMTILRINLHPSGKLKINVAKLGL

SEQ ID NO: 69211 - protein, 191 aa, Zea mays
  Coding DNA Sequence Number=SeqID_27432
  Gene Ontology: Mol. function=protein serine/threonine kinase activity; Cellular component=membrane; Biological process=protein amino acid phosphorylation
  Homolog annotation: Hit_ID=Q8LJZ0; Match level="QueryCoverage=42%, HitCoverage=9%, E-value=6e-14, Identity=52%"; Hit description =Receptor-like kinase
MSIRRRHLIGVHVVTLSLLITLAPGTPASDMIYTGGKLIDGNTLVSAGGSFTLGFFSPPGEPTKRYLGTWFSFSAPTPDATAIYWVANRDRPLAGTSSALVLTTSGTLLLLDGTTNDTNLWNGDEWYLSLVGAPPPTPAREASAYITELGGGTPENVMRDSGSAKRYRTGPWNGERLDGVPEMASYSSYFT

SEQ ID NO: 69212 - protein, 79 aa, Zea mays
  Coding DNA Sequence Number=SeqID_27433
MSVSLRTWGTRTQYDTHGGLVVELQNHPALQMAGFAEFGPHNSATAVLKGTSGSTWRHKEECVKVKHLHVEHVAAGLKT

SEQ ID NO: 69213 - protein, 164 aa, Zea mays
  Coding DNA Sequence Number=SeqID_27434
  Gene Ontology: Mol. function=protein serine/threonine kinase activity; Cellular component=membrane; Biological process=protein amino acid phosphorylation
  Homolog annotation: Hit_ID=Q2QUP5; Match level="QueryCoverage=98%, HitCoverage=34%, E-value=6e-60, Identity=64%"; Hit description=D -mannose binding lectin family protein, expressed
  Pfam annotation: Domain name=PAN_2; Domain location=75-146; Score =111.8; E_value=1.9e-30; Accession=PF08276.2; Description=PAN-like domain
  Pfam annotation: Domain name=S_locus_glycop; Domain location=1-58; Score=-33.4; E_value=0.01; Accession=PF00954.11; Description=S-locus glycoprotein family
  Pfam module annotation: Pfam domain module=PAN_2::S_locus_glycop; Domain location=75-146::1-58
RLVWDAGSRQWNSFLKEPRDDCDDYAHCGAFGLCDRNAASTSLCTCFKGFVPAVPKEWSLREYSDGCRRNVSLDCGGSNRSRSSTDGFQVVPLVKLPDTQNATVDMAISLDECGLRCLANCSCVAYAAADATGGGCIIWTDSFTDLRFVEKGQDFYLRLPKSLL

SEQ ID NO: 69214 - protein, 148 aa, Zea mays
  Coding DNA Sequence Number=SeqID_27435
MGKNNKRHREPTPPSKDFGDSEYSEEEFSSESEVSPAPIPLRESSDDSDDSRGLAAEVWTYIRAVERSGLEGSNESEYSSDEEDSSEEDGGGDGEDDDDDNDEGGGGGDGDGDGGGRGDSSGDKDGDGGSSRSDSGGGSGRGSNRASG

SEQ ID NO: 69215 - protein, 110 aa, Zea mays
  Coding DNA Sequence Number=SeqID_27436
MARKLPWCTSNPYAPRSSRTNAEHSPRYDRERTSPSLGAPIHSPAVKERTRMRGHGRRNEGELHPTRPWAAPKRHRDDPWPAAEGPTATQQNSSMMHLLLRVSFRTQIPI

SEQ ID NO: 69216 - protein, 151 aa, Zea mays
  Coding DNA Sequence Number=SeqID_27437
MHHQEIQDQEANEDVDIEGGDEPASSVDIRRNNRAHVVQIPGKNGFPSLPCSSQRFSLAQRRTGRNRVAGLELARSSTAPVEVNPPSPSLPRPPFFFVAMRVWASVVVRGSPMAANTTSAVRGSPMAARRARALARPRPGLGLPRAVRCAQ

SEQ ID NO: 69217 - protein, 83 aa, Zea mays
  Coding DNA Sequence Number=SeqID_27438
  Subcellular localization annotation: CTP_CleavageSite=45; ConfidenceScore=5.16e-01
MKGWAGGLHFLVSGFSQRERLLVNVQRLKGTPGAIAFFGGMMKVVARAVAESGRLSSPEVGANVGHLFSNVVNQEQGNTIVKD

SEQ ID NO: 69218 - protein, 196 aa, Zea mays
  Coding DNA Sequence Number=SeqID_27439
  Subcellular localization annotation: CTP_CleavageSite=65; ConfidenceScore=5.06e-01
METAPGEGRARLRATNGLLAAPWGSSGGAQPWGCGGHSPARLTRARTARGRPRPGRGRAKARARRAAMGEPRTALVMLAAMGEPRTATDAQTRIATKKKGGRGREGEGGFTSTGAVELRASSKPATRFLPARRRAREKRWDEQGREGKPFFPGIWTTWARLLRRLDEQRGRAPLLARRHAGWRLGWDTHAARVWGR

SEQ ID NO: 69219 - protein, 174 aa, Zea mays
  Coding DNA Sequence Number=SeqID_27440
  Gene Ontology: Mol. function=protein serine/threonine kinase activity; Biological process=protein amino acid phosphorylation
  Homolog annotation: Hit_ID=Q9FIU5; Match level="QueryCoverage=30%, HitCoverage=12%, E-value=3e-18, Identity=79%"; Hit description =Serine/threonine-specific protein kinase-like protein
MVDRSRAVLIGVTAGVAGRAGRDGGRASGRLALPPAGQRRRTDALPGVALGDAAGRRRRSRQPRLQRLRLGGLRERRRLGPPATAQTRRVLGLERRRRPQRQGAATAVRLRDPKIPLQIIRDLQKATSNFTTILGQGSFGPVYKAVMATGEVVAVKVLASDSRQGEREFQTEVL

SEQ ID NO: 69220 - protein, 287 aa, Zea mays
  Coding DNA Sequence Number=SeqID_27441
  Gene Ontology: Mol. function=protein serine/threonine kinase activity; Cellular component=membrane; Biological process=protein amino acid phosphorylation
  Homolog annotation: Hit_ID=Q40543; Match level="QueryCoverage=93%, HitCoverage=62%, E-value=7e-93, Identity=64%"; Hit description =Protein-serine/threonine kinase
  Pfam annotation: Domain name=Pkinase; Domain location=1-237; Score =95.1; E_value=2.1e-25; Accession=PF00069.15; Description=Protein kinase domain
  Pfam annotation: Domain name=Pkinase_Tyr; Domain location=1-237; Score=48.7; E_value=1.9e-15; Accession=PF07714.7; Description =Protein tyrosine kinase
  Pfam module annotation: Pfam domain module=Pkinase::Pkinase_Tyr; Domain location=1-237::1-237
MGHALPEKNETLKEKQTKVALLSRLHHRNLVNLVGYCVEKGQRILIYEYMSNGSLARLLYGDNKRSLSWQERLQIAHDVSHGIEYLHEGAVPSVIHRDLKSDNILLDHSMRAKVADFGLSKEEVYDGRKSGLKGTYGYMDPDYMSTNKLTKKSDVYSFGIILFELITAINPQQGLMEYINLAAIGGEGRVDWDEILDKDLLVGNIPEEVRMLADVAYRCVNKNPRKRPWISEVTQAISRLRQHQLIKHDAITLPRSETRTVLRRIDYQHVELSDLTSIKELTPIRAS

SEQ ID NO: 69221 - protein, 67 aa, Zea mays
  Coding DNA Sequence Number=SeqID_27442
MKECNIQDFDLEKAQLDLRHGYNRAEMKFNVNRVDNMPLKSTLEPKWSSLWTEQRWLRDPGVVGRHR

SEQ ID NO: 69222 - protein, 301 aa, Zea mays
  Coding DNA Sequence Number=SeqID_27443
  Gene Ontology: Mol. function=microtubule motor activity; Cellular component=microtubule associated complex; Biological process =microtubule-based movement
  Homolog annotation: Hit_ID=Q6K990; Match level="QueryCoverage=67%, HitCoverage=25%, E-value=2e-69, Identity=64%"; Hit description =Putative phragmoplast-associated kinesin
  Pfam annotation: Domain name=Kinesin; Domain location=1-142; Score= -60.3; E_value=2e-10; Accession=PF00225.13; Description=Kinesin motor domain
MSPFVLTLGKISRELSGNEAGRISREVFKIILDVPSVGGRLMLVDMAGSENIEAAGQTGFEAKMQTAKINQGNTALKRVVESIANGDSHVPFRDSKLTMLLQDSFEDDKSKILMILCASPDAKELHKTVSTLEYGAKAKCIVRVAHAATPRDKMSSEESSVEENWLKVTSKAIVGTLWSSVLTSESEQIARTHRRMARFERSGRQGRLMRELINLSVSWSWSVGERDAALRHRISHRAMRQCPTRGTASSTWGQARRACSSAHHLRVSSVGGLLGSQVPHSRGCSPWGRIRQTHRPFAPGP

SEQ ID NO: 69223 - protein, 436 aa, Zea mays
  Coding DNA Sequence Number=SeqID_27444
  Gene Ontology: Mol. function=phosphotransferase activity, alcohol group as acceptor; Cellular component=membrane; Biological process =protein modification process
  Homolog annotation: Hit_ID=Q5VMR5; Match level="QueryCoverage=99%, HitCoverage=63%, E-value=0.0, Identity=84%"; Hit description =Phosphatidylinositol 3-and 4-kinase family-like
  Pfam annotation: Domain name=PI3_PI4_kinase; Domain location=163-426; Score=222.1; E_value=1.2e-63; Accession=PF00454.17; Description =Phosphatidylinositol 3- and 4-kinase
MPRNLECPVQTQMAVSALDRTLSSEYPTKSKSETKVGGWKRVFVQTDVGCVLAIQLNCGDNAHTVKRKLQVALNFPTDESVLKNDLSTIRNDFPLLLTKTFMHRSSSTPCLSPSGKDLQQQKDRGCPIELLVCPSRCSRTRQLVKDVARAIKKGVDPVPIKSGLGGAYYFRNSKGENAAIVKPNDEEPFAPNNPKGFIGKSLGQPGLKRSVRIGETCFREVAAYLLDYDNSANVPPTLLVKISHPVFHMNEDINFANKNIADGSIQAVSKTASFQQFIPHDFDASDHGTSSFPVSAVHRIGILDIRIFNTDRHAGNLLVRKQTGAGKFGNHTELIPIDHGLCLPECLEDPYFEWIHWPQASVPFSEDELEYIANLDPVKDADMLRMELPMIREACLRVLILSTIFLKEATAFGMCLAEIGEMMSRVLLGWKISQVS

SEQ ID NO: 69224 - protein, 161 aa, Zea mays
  Coding DNA Sequence Number=SeqID_27445
MAVTHARLTSLPSHVQTPGTVEQAWVGAGKQGRPVGAPGGGAVVPTESWWRGAGRRAGTGGAAFSECGSGGGGAVPDLRLRRRNPPFPGQWGHREVEPLFQQPRVGGAAPAAGQGLVVLPSRSAAAAEQCQICDPDGAIHHSLASALHQDLTINKQACPVS

SEQ ID NO: 69225 - protein, 102 aa, Zea mays
  Coding DNA Sequence Number=SeqID_27446
MELEPEGWFVLLSYYMSCQGLSGGVHMHNHGGEYFDKTTVSSSLYAYSPTWGVVDFIGYLVIAWEREEPPSVYIILPEPSIRLSQHRCKGSPRASARAERMV

SEQ ID NO: 69226 - protein, 542 aa, Zea mays
  Coding DNA Sequence Number=SeqID_27447
  Gene Ontology: Mol. function=RNA-directed DNA polymerase activity; Cellular component=mitochondrion; Biological process=RNA-dependent DNA replication
  Homolog annotation: Hit_ID=UPI00004C1732; Match level="QueryCoverage =99%, HitCoverage=55%, E-value=2e-96, Identity=75%"; Hit description =UPI00004C1732 related cluster
  Pfam annotation: Domain name=rve; Domain location=395-542; Score =51.3; E_value=3.2e-12; Accession=PF00665.16; Description=Integrase core domain
MAVPNYTYLKLKMLEPSCVITVGPTYHHAYECDVECVEYAKPLIESEALIADLEKLAGEVPDPKKHAGSFEPVKAMKTVPLDPSGSVVLARRKLRHYFESHPVTVVSSFPLWEIVQNREASGRVAKWMVEHMGETLSFAPRKAIKSEILADFLVEWNDTQLPTTPIQVKLWTMYFDGSLMKMGMGVGLLFISPLRVHLRYVIWLQFVASNNMAEYEALVSGLHITIELGVRRLDIRGDSQLVIDQVMKNSNCHDERMEAYCKEDRATPVSDRRTPYLEFLLRGELPLGEAEAWCLARWVKTFILLEKKGVVSMQPFRNSPAVHPHQLGIETIRRNPLGCLRTPCYASDPRWKCLQAKFLLANYGRRRHQNCAILLRMPVLHEANALASLGPADNPHHLGLCHVGLDLVGPLQNAPGGFTHLLVAIDKFSKWVKVRPLANIRSKQVVAFFTDIIHRFRVPNSIITDNDTQFTGKKFLSFCVDHHIRVDWSVGAHLRTNRQVERANGMILQGLKPRIFNKLNKFDIRWLIELASVIWSLRTTLS

SEQ ID NO: 69227 - protein, 224 aa, Zea mays
  Coding DNA Sequence Number=SeqID_27448
  Subcellular localization annotation: CTP_CleavageSite=56; ConfidenceScore=5.51e-01
MPRRPQTVPRSAFSAARTQALRTRRTPSAPQPLPQTAPALRLLRRPPAHCLTRRTHCDKKARAPRLLLFLWLHDAMRRRLLLLVAVHHRNLRRRVCSCILRLFLSVLVALAPFHYLAPPWAASSHFPPSHLTHRAGLEEEDEEDTAPAFPGVEAEAEANALHRLDFFVLMVFCHVTISQMMQYACKRYFVLEDTTLRWFKFAPSSKRECRGEIRNPPASIFFLN

SEQ ID NO: 69228 - protein, 85 aa, Zea mays
  Coding DNA Sequence Number=SeqID_27449
METDAIHRRRGLRQERAGKRTRFVDEKDCTRRKRTRFVDGESREWAQKRTRFLVAGIAETPYTCFVGEGKSGAVVKPVDALGINI

SEQ ID NO: 69229 - protein, 121 aa, Zea mays
  Coding DNA Sequence Number=SeqID_27450
  Homolog annotation: Hit_ID=Q9LWU9; Match level="QueryCoverage=71%, HitCoverage=13%, E-value=6e-29, Identity=73%"; Hit description =Putative gibberellin response modulator
MGGRAAEKTECGSCLGQRLRSGWRAACPERLDEEYDGLVIRAKRTRMGGDGDKVWFHRSIAGTLQAAGSGDGDKAEEEKAFLVTSAAAFPHGMSVAAAGQSMAVAKKEEFSKSPSNSSAKF

SEQ ID NO: 69230 - protein, 35 aa, Zea mays
  Coding DNA Sequence Number=SeqID_27451
MAFQVVLVIWSKIGIHRMRRELDQGNEDATPRKKT

SEQ ID NO: 69231 - protein, 123 aa, Zea mays
  Coding DNA Sequence Number=SeqID_27452
MKEAWEAVKVMKMGVDRAHYAIIHWTDRCATGLSGESAGNDYLRATVDCKSTDEVNSAVAEVRSTKSEGTELSGVAPDYPTPQGDKAPAVDFAPNPNGWVTWQRTGLSGAPIARSLPNGYFGG

SEQ ID NO: 69232 - protein, 93 aa, Zea mays
  Coding DNA Sequence Number=SeqID_27453
MVSRQRSLPEDDSFINQDCNLQWRGREHGWRAHLGDPQQLPGERTLTVALDPSPAALRFLLGLFSWGDTQDLGSKLDLNFSFELQNCKYHTNF

SEQ ID NO: 69233 - protein, 138 aa, Zea mays
  Coding DNA Sequence Number=SeqID_27454
  Gene Ontology: Mol. function=metal ion binding; Biological process =metal ion transport
MKRSPQHPIQTHIRNRSQPDDGADDDAHRHREPGMLPLQQQDPEDPLRHSARHLRLQTVRFFCSIDRWTCSYACHDNMTCCTTTEGEFTIEKIVYEKDKVLVTGPFDADKLSCKLWCKAGRIIKDIQVAKPKDEKTNL

SEQ ID NO: 69234 - protein, 193 aa, Zea mays
  Coding DNA Sequence Number=SeqID_27455
MAKPHLKVRLFIHKDSEYITAWKSKAPPDLWDGELVKLVSPDPQGEVVKLASPDPLGELVKLGVGEAGVGATYTDVDASAMKLTRNRSLSRGTSWPEARVDPKSLVVIEASANISRGAIPLSAAFTEELVASFGDVIYAEAKLERDGVGRSRARARRSFLPTLRPTSDEAEFPPEGETMLRRAHTTSEVVRAQ

SEQ ID NO: 69235 - protein, 60 aa, Zea mays
  Coding DNA Sequence Number=SeqID_27456
MGVLFGLLFNTKYGYTESAREVLEACQDMDITCSSGTRLSFGWRWGSNLYPDGRRAGDTG

SEQ ID NO: 69236 - protein, 43 aa, Zea mays
  Coding DNA Sequence Number=SeqID_27457
MNYDRTEFRHSPTLSQEHMVTGVGQEQDAAALASNTEDRWERN

SEQ ID NO: 69237 - protein, 87 aa, Zea mays
  Coding DNA Sequence Number=SeqID_27458
MASSKDNSDVSPNNIIKPTTNDLSVKEYQRLEDARKMMLAELDDLFLADFKVDRNQKLIRLREYNLVSLCPTTIRPAVSKPYDIQVL

SEQ ID NO: 69238 - protein, 82 aa, Zea mays
  Coding DNA Sequence Number=SeqID_27459
MGLDLGLDLGLFVVRSAGGMAAAKGAPAEIESCIRSLEEERQKIEVFRRELQLCVRLLVDGWTKERGWAKLFIMWKKGERMD

SEQ ID NO: 69239 - protein, 250 aa, Zea mays
  Coding DNA Sequence Number=SeqID_27460
  Homolog annotation: Hit_ID=Q2QLK4; Match level="QueryCoverage=48%, HitCoverage=14%, E-value=4e-42, Identity=68%"; Hit description =Pentatricopeptide, putative, expressed
MGYERNREEDSPEDASHLCELECMRPRTVTNPSAMRWLLTLASLSAGAVDELERRSRRRLPIRAHELASHLGELERRRPRRTAGASVGRLRSERGVANLSLGGRAERQELERSLRRTVTIRERGRSLGWASGENVYPDSVREKSSSNWLINLHLMHEGTTVIALSTTLAWFHRQVLTLGTGPETIDIVTGWGRRSRVTTSSLVRQSIQKLLNLFESPFFTTRRNTGCFVGCGEPLNKWLQNPYVGRIHLL

SEQ ID NO: 69240 - protein, 499 aa, Zea mays
  Coding DNA Sequence Number=SeqID_27461
MAPDAVPMAAPSAAPRAALDPLGKAPVVRGIPGKKRSGADSVVVTGPLWGTCQLQNAKDQRHDRATPCSSAEVRAIVNNVAAADSTTIAIAAAAGSTAADIAAATGSTPATFSATRGYATSAAAATGAHSVIAAAARAAAAAGTVPDPSDQLSGAVGGFSRQYLRGAHRSQLGQWVRPDARCIWSSTCEPIGRGLDRCAPMEHPGPAAAEPEAEGPTEDAPASATTEPMVEDSTTAALASVATGSLAITAAMSSTATRPAVTGVPAAGAGAAAKRAPEPEEIEAPEPEEAKAVEMVFGHRELPAATSEEVPEREKSIIEREELMAQRLETVDQYKASLVKKDRMLDGQLAQQLEMAKALDEATARLKEREIQVAQAKGELVEERADLAHREADVANMEGVLKKRDAKMLDRENKLKAEGRCPRPAEEADTTLVPLGVSPIRAGPVESLSNALPVLDTAFEWLRHLDQGTASGAESASEATVQDVVEVVAARFKRDPEDV

SEQ ID NO: 69241 - protein, 151 aa, Zea mays
  Coding DNA Sequence Number=SeqID_27462
  Subcellular localization annotation: CTP_CleavageSite=55; ConfidenceScore=5.52e-01
MAAVMARLPVATLAKAAVVESSTIGSVVALAGASSVGPSASGSAAAGPGCSMGAAAASVGSSTDGSDVVVPLATASVEAPADGLAGRAPDASGVRPDPLAELGTVGTAEVLAGEAALGEESKLAGPPQGTRHHDAIGAAPFLARNSPHHRS

SEQ ID NO: 69242 - protein, 81 aa, Zea mays
  Coding DNA Sequence Number=SeqID_27463
  Homolog annotation: Hit_ID=Q94HJ7; Match level="QueryCoverage=36%, HitCoverage=7%, E-value=9e-07, Identity=76%"; Hit description =Putative RING-H2 finger protein
RWNRGGLPGPGELTDQIGRQVKVARVGRIPRLFLPGGAFGNADAGGSPQGSIGGHLMAADGAGVAERELEQYEGGVVDVGA

SEQ ID NO: 69243 - protein, 244 aa, Zea mays
  Coding DNA Sequence Number=SeqID_27464
  Gene Ontology: Mol. function=cellulose synthase (UDP-forming) activity; Cellular component=membrane; Biological process=cellulose biosynthetic process
  Homolog annotation: Hit_ID=Q944E3; Match level="QueryCoverage=86%, HitCoverage=28%, E-value=7e-85, Identity=71%"; Hit description =Cellulose synthase-like protein OsCslE2
MAPYVGCDVIPRGLEGHRKISLGLQMGYSICGCWAAISFPTLYYVTIPSLCFLNGISLFPEITNPWFVPFAYVVVAAYSCSLVESLQCGDTAVEWWNTQRMWLFRRITSYLLAAIDTICRMLGVTESGFTLTAKVTDSQSLERYKKGIMLFGSLSTMFVIITTVALLNLACMMLGVAKVLLCKGAVSLGAMFVQTVLCALIVAINFPVYEAMFVRKDSGRLPASVSVGSLYTNRSTNTVLAIML

SEQ ID NO: 69244 - protein, 203 aa, Zea mays
  Coding DNA Sequence Number=SeqID_27465
  Gene Ontology: Mol. function=hydrolase activity
  Homolog annotation: Hit_ID=Q2QN73; Match level="QueryCoverage=35%, HitCoverage=11%, E-value=2e-29, Identity=87%"; Hit description =Diphosphonucleotide phosphatase 1, putative, expressed
MGRTKRSFCSVNHERDWPGTGSFYGNLDFGGECGVPVQTVFYTPTENRAKFWYATDYDMFSLLHCSHGRGLETRDRAVQIHRAMPHWPHEVSQSQWFLQGFQFMGWAEALPFASDSALLCTELSKASKDALEYLRKDCQESARFGRELHGPGCIIVKGETPWVLISAIQLCTELCKASKDALEYLRKNCIEGLARCNTIKAIN

SEQ ID NO: 69245 - protein, 241 aa, Zea mays
  Coding DNA Sequence Number=SeqID_27466
  Gene Ontology: Mol. function=RNA-directed DNA polymerase activity; Biological process=RNA-dependent DNA replication
  Homolog annotation: Hit_ID=UPI00004C1732; Match level="QueryCoverage =92%, HitCoverage=22%, E-value=2e-29, Identity=51%"; Hit description =UPI00004C1732 related cluster
MSDDNLIIRNQPLFLSNFTRAWLEHLSLAQIQDWDDLIRVLGEFPGHIRAHTGRSRMRLCRTELPNVTNSDVIGSNLTGTTCQDLVSKLGRKTPTKEAIEAFFHKDKDNGKRKEDAPEATTQRNPKKNKKRRRRGSTSPSRQILSPQQNEGTLEAPTEVFSIEAATLIYLDWIDRSITFDRDNHSDYVPNPGKYPLVVDPVIGNTRLSKVIMDGGSSLNIIYAETQSSVIPGSTNFTAQCM

SEQ ID NO: 69246 - protein, 169 aa, Zea mays
  Coding DNA Sequence Number=SeqID_27467
  Subcellular localization annotation: CTP_CleavageSite=14; ConfidenceScore=5.04e-01
MPGAPPSRGPVLARGQQKSRWSSGEIGRSLRLRRRKPWQRAPHGSEGQARTDKSYTRVSLIITPQREQRFPTFSKCIFRVYSSGSSSSMPAEAAAPSIHATTTRDEASEQGRALGEVEGANTRARGRGCCRENQSRRPQAQPWEPKRESAGGSRRAGERVDWEMASPES

SEQ ID NO: 69247 - protein, 89 aa, Zea mays
  Coding DNA Sequence Number=SeqID_27468
MATGFSAQNGHEGVGRADDACDPTSLGSDQTRDDNGYPRPNTRWIFTSLGYICGLNILPVGLFLNKNLHPMGKWVLEHSPSSIPINPWV

SEQ ID NO: 69248 - protein, 227 aa, Zea mays
  Coding DNA Sequence Number=SeqID_27469
MATGNCGNDIKSALHHTGKITMRFSPYLSLFQQLRLGLHLHLTNAHPRDDGGGPDELAAKHEDVLHARHEATARLSLCHVDYAGAAAGMDDDGNDDTPRLHRMVARLCRGHASESRARQPHAGRAEGTHAGCAEREREAAPGAEARATPGQACRGGLGSGLGAGLRAPRWLAIEPSRQVEAALAGERWVGRTDCAELPDLPRPALPRPGARLETLPCLGARACCRVG

SEQ ID NO: 69249 - protein, 938 aa, Zea mays
  Coding DNA Sequence Number=SeqID_27470
  Gene Ontology: Mol. function=protein binding; Cellular component =membrane; Biological process=defense response
  Homolog annotation: Hit_ID=Q6YYL2; Match level="QueryCoverage=95%, HitCoverage=86%, E-value=1e-123, Identity=33%"; Hit description =Putative RGH1A
  Pfam annotation: Domain name=LRR_1; Domain location=431-451; Score =2.6; E_value=93; Accession=PF00560.23; Description=Leucine Rich Repeat
  Pfam annotation: Domain name=LRR_1; Domain location=476-497; Score =12.0; E_value=1.6; Accession=PF00560.23; Description=Leucine Rich Repeat
  Pfam annotation: Domain name=LRR_1; Domain location=499-520; Score =8.5; E_value=7.4; Accession=PF00560.23; Description=Leucine Rich Repeat
  Pfam annotation: Domain name=NACHT; Domain location=69-218; Score= -34.0; E_value=0.026; Accession=PF05729.3; Description=NACHT domain
  Pfam annotation: Domain name=NB-ARC; Domain location=21-323; Score =169.0; E_value=1.2e-47; Accession=PF00931.13; Description=NB-ARC domain
  Pfam module annotation: Pfam domain module=LRR_1::LRR_1::LRR _1::NACHT::NB-ARC; Domain location=431-451::476-497::499-520::69 -218::21-323
ELDELRAKYTVRGAGADLAASIGIDPRVINMHKKESDLVGIQESRDKVIRMLSLGTKYDDAHASHQDLKIVSIVGVGGLGKTTLAKTVHDMLKKQFSPSAFISVGRTPNLNRTFEKILVELDAKYKQVDMTRWDLEQFGKELHEFLQNKRYLIVVDDIWDVGSWEAIRYGLKNNNCGSRIIMTTRNFELVTKVEEVYRLKPLSNENSKKLFYKRIQSQEGESLDDELSTEIIDKCGGIPLAIIAIASLLVERPCEEWSKVYHSISLGNGDNTTKILSYSYYDLPSYLKPCLLQLSIFPEDYQFDTNAAIWMWIGEGLVHLEKEEGSLFVVGERYFKELVNRSMIQPIEDKYDRLVEVFRIHDIVFDLIRKLLKDEDFITLLDSGGQHSPQASLRREKKTCVPRSDCKLRRLAVRNHHVQRFPEDIMDIPEALRSLNIIYCNIAIMTPLHSFRVCRVLCIEYSYVPISLKHLGKLLHLKYLELYGTPVDELPKEIGHLRSLQTLLLVNTGLDELPPAVCSLTRLMCLMAEGFKRLPADKMGNLTSLEELRLESIVGQSATQALVAELGKLTRLRVVNITFSEELEESLQEALVQSLFNLWGLQELALSSKWSQQGSAMWGDWEPPRQLRRLIIKGIIFSRQPRWINRSCMAHLCFLSLAVHAVEAQDLDNLARLPELRYLKLDGVSWPPRYDTGPDDFRNLRFCDVGTMLVFHMGAMPRLEELVFGVCAGYWSWEHNGVLLEQCPTMDVIEDLDLGLDNLLSLEQVTVVVDCSGATAAKVQEVEAVVMRAMENHANRPTIKMERVCENFILSDKEQEDLLQRRIEKEGRLLEFKDKSDAFFITFLRLLRHPLKSVISHDCAGASMCEVQKVEPAWRHAAEVHPNHPSIELIRKNNDEIASSSDHPNTEIKGFHPDLLETLLNANDPRLGYQLTKKHIQN

SEQ ID NO: 69250 - protein, 89 aa, Zea mays
  Coding DNA Sequence Number=SeqID_27471
  Gene Ontology: Mol. function=ATP binding; Biological process=defense response
  Homolog annotation: Hit_ID=Q2QNU3; Match level="QueryCoverage=97%, HitCoverage=11%, E-value=1e-18, Identity=55%"; Hit description=NB -ARC domain containing protein
MELALGAMASLAPKLGDLLMEEYVVHKGLKPDIESLSDELVMMNAALLDASRIPPDQLTAVEKLWARKVRDLSYDMEDAIDDFILGCGL

SEQ ID NO: 69251 - protein, 119 aa, Zea mays
  Coding DNA Sequence Number=SeqID_27472
  Subcellular localization annotation: CTP_CleavageSite=35; ConfidenceScore=5.34e-01
MPQPSPPLPCSLSQAAATPSPRRPTPDGVLLPGTYAKLVGYKSGTRKLHNMSSINLGLSEISFVKYKLGTSKLCNKSSIIWNFVKFAYMDHDSLLPKGTVHIDLFLSPDVIVSSNVDEF

SEQ ID NO: 69252 - protein, 139 aa, Zea mays
  Coding DNA Sequence Number=SeqID_27473
MWGCSGPNGVCGGVCANGSGALQRLLPGLTDGRCGGATRGAAAARPGPWAQPEVVAVEACTVKSKLLRQGMWLGNDDMGRTPLLRGLVCFEDEAFGGGEAVDQGFGSVAGEESELSRVGYLVAWQRRRATVFLLFCRCL

SEQ ID NO: 69253 - protein, 162 aa, Zea mays
  Coding DNA Sequence Number=SeqID_27474
MEVRSPNSWSVRPEQKRAKSVVYNPKAKGKERRQGRLSRAAHEMMYQAGREGIIIFEEAHNGLALAIEGFSWTRWELRDVLQSCATRHFQQGTRTLQPALNIIQAHQAAFSTLDKLHLRCSDCSTLDWIFNDVLNVRQYNGMIQGHRKIILACCSIQRAANS

SEQ ID NO: 69254 - protein, 303 aa, Zea mays
  Coding DNA Sequence Number=SeqID_27475
  Homolog annotation: Hit_ID=Q10CM8; Match level="QueryCoverage=37%, HitCoverage=25%, E-value=9e-38, Identity=58%"; Hit description =Expressed protein
MAQGALFVWKRALGGYPELMGLLVRLEGEAKNAIRDKAKELVVEAGVGVRESSRCAIVVLPTCGERKKTDQWVLGLFNSRVIDMWDLTGMVAYNEMLNAGTGSDLEEALVVDSIIARGGEDMSYCTVTGCKTIDNKDKPLVLKELKRVWNKDEPDLPWGQGEFSPSNTLLVDDSPYKALCNPPNTAIFPEPYNYMNQRDDYSLDNVQNFVRDNPFGQKSITESDPNWNFYVKIVDKMEKQIVDQVETKIVDEVERLQSPSPLLKVPRGTTLQHIPEFPPGPAETFNCQCQAIMCFWYRKEKRC

SEQ ID NO: 69255 - protein, 165 aa, Zea mays
  Coding DNA Sequence Number=SeqID_27476
MTPKGEYSGEEQDTHNETLLFLAHCFVEHLSIPASHCLGLLDHVSVGSNIWQPPFMLQQTNHVMAPKKATSKATTSLDDTTKTALAEKKDKAALVGEIPQEALEDGAVNSKRPRTENPPLKASFAPKSQRINMQAWVRQMILNEEHKARELEQHIVEMQGEDPLR

SEQ ID NO: 69256 - protein, 194 aa, Zea mays
  Coding DNA Sequence Number=SeqID_27477
  Subcellular localization annotation: CTP_CleavageSite=71; ConfidenceScore=5.55e-01
MAKSFIKALKGPTLTWSYISYLNSMSDQKSSTRGKSSLSGNPRRLHNPVERGSGLRNQTQLGKTAPSPKCTISQISSKQEITPLVVKITPCSKVTVAKRPGVEAEAEDLNNNEDSIVSSTTKTHHTQPGTSQRLKQQRTEWSGPYQLTTKESPLTLTNPINTTNINFKTNTTITPSSKTTTYFLNNSACNTKKS

SEQ ID NO: 69257 - protein, 471 aa, Zea mays
  Coding DNA Sequence Number=SeqID_27478
  Subcellular localization annotation: CTP_CleavageSite=44; ConfidenceScore=5.24e-01
MSEVLKSPALSNKSLRFQAFVSSPTEALPSVRVEGMSNLDSATPAAAVAEIGTAERDSTTASVSALNGTHRCKKKKIKKNTTREQQELQLDLDSTLTAEAEGQVEAKGNEVEEQDATDAVASVMEGTAKYYEEDSKVKVSLMPEKEANTTVVSADKSENGCTDVVGASGHADINMDPINGDDLSSAQSKANDADVLLKNKDGNKGDKNCAENSVLLQESSARRKRRRGKRKWGSAGGGPGFSSDNGGVVAEHSLHSSANHGLSCICAPCLVEAHEKKIQNIYSPRGSLVRFQRKKLLILDLNGLLADINQDYHNAHLAHAKVRTKLVFRRPYCDDFLRFCFQNFELGIWSSRKRIPICSGLLASLRKPEFVRSAPVRGPAWVTTAPPRRRPSRAQAPPYNLRDLPGRIRSPTNLASEDSTIMSSSATSKPPSPGQQPPPSMSPSAAPITSLTATPAPSEAMALGPPSAVVN

SEQ ID NO: 69258 - protein, 75 aa, Zea mays
  Coding DNA Sequence Number=SeqID_27479
MNNMEFYILDPSPGFKSTPARVEDTYVSVCDPIAHHRVTHVMLLVRTTSLTATRWLYELQMSCDGAQRSWMMASV

SEQ ID NO: 69259 - protein, 547 aa, Zea mays
  Coding DNA Sequence Number=SeqID_27480
  Gene Ontology: Mol. function=DNA binding; Cellular component =chromatin; Biological process=DNA integration
  Homolog annotation: Hit_ID=O24587; Match level="QueryCoverage=82%, HitCoverage=46%, E-value=0.0, Identity=74%"; Hit description=Pol
  Pfam annotation: Domain name=rve; Domain location=113-276; Score =183.8; E_value=4.2e-52; Accession=PF00665.16; Description=Integrase core domain
MGYNCLFTNVDVSVFRRSDGSLVFKGVLDGKLYLIDFSKEEADLDACLIAKTSMGWLWHRRLAHVGMKNLHKLLKGEHVLGLTNVCFEKDRPCAACQAGKQVGSTHHNKNVMNTSRPLELLDMDLFGPVAYLSIGGSKYGLVIVDDFSRFTWVFFLHDKSETQGTLKHFLRRAQNEFELKVKKIRSDNGSEFKNLQVEEYLEEEGIKHEFSAPYTPQQNGVVERKNMMLIDMARTMLGEFKTPERFWSEAVNTACHAINRLYLHRLLKKTSYELLTGNKPNVSYFHVFGSKCYILVKKGRNSKFAPKAVEGFLLGYDSNTKAYRVFNKSSGLVEVSSDVVFDDTNGSPREQVDLDDIDEDDVRPQEQQEQDQLSSSTMVHPPSQDDEQVPQEEACDQGGAQEDQVVEEEAPRAPPNSSSSDDSKESSRRPDFGVEEALLDPDWVLAMQEETCPICKKKEHIKQAISVGNFALSLSKHTAFLVRQMAQQTTASPTDCTDYPEEKYCHPKPILIKASWSTIPRLLSAHHVYRAQKLPKSSIKISIKNTS

SEQ ID NO: 69260 - protein, 143 aa, Zea mays
  Coding DNA Sequence Number=SeqID_27481
MARKFGVWWICSVGWNRGALGGTGREEEARDEGGVVALSTGKEDVGEERRRQGADIEGRDDDAAEVATVMERGSEDEEDRAARCLSRWGKKVEATRGGGGGAGRGVAGMAGRVRWLRESQAVMVRGWRGLERAHPSPTRAASL

SEQ ID NO: 69261 - protein, 395 aa, Zea mays
  Coding DNA Sequence Number=SeqID_27482
  Gene Ontology: Mol. function=DNA binding; Biological process=RNA -dependent DNA replication
  Homolog annotation: Hit_ID=Q9LGH0; Match level="QueryCoverage=69%, HitCoverage=91%, E-value=6e-41, Identity=32%"; Hit description=NAM -like protein-like
MAGSGLSDGGSTGGGGLGSSGGGRRGRGCGGAGRFGGAGGAERGGGGGLGAGVGGGHGGGGDAGGRGGDYWPAVPARARVVADPLASTMFSCRDELPSSFGQGEDVVPGNGYFSNMMMDDYVEGEFDNNSNTCPDIQPQSMQVGPIVPTSRPNHKRSKNFSDQEDEILVSAWLNISMDPVVGKDQKVGRIQLRRQSGTTMQDMVAQACALYKSEDEHEKGFQFMHCWNKLRLQPKWLGKVDDLAAPKPSNKKQKTTREGDANRTLPYETKESQVQVVENYQLTRPPGKKTAKAALVQEKRKSVTVAIENLWAAKKESDAEKEQKKEERFNKAFALEVDRVNTKKALLEVRKEEIELQKRRDEERIINMDLSGLTEEQQSYYTKLRAKILDQLSDA

SEQ ID NO: 69262 - protein, 91 aa, Zea mays
  Coding DNA Sequence Number=SeqID_27483
MMEWMKGGDACGGGRVYARLELRAVGAAPRHGAAAGPAQQRVRPEDRLSVVPCGLVVGHHSRVALSIAGNGMPASHSHRIFCFGAELRTAF

SEQ ID NO: 69263 - protein, 150 aa, Zea mays
  Coding DNA Sequence Number=SeqID_27484
  Gene Ontology: Mol. function=N-acetyltransferase activity; Cellular component=intracellular; Biological process=metabolic process
  Homolog annotation: Hit_ID=Q94F75; Match level="QueryCoverage=99%, HitCoverage=100%, E-value=2e-68, Identity=78%"; Hit description =Silencing group B protein
  Pfam annotation: Domain name=Acetyltransf_1; Domain location=31-104; Score=15.0; E_value=0.05; Accession=PF00583.14; Description =Acetyltransferase (GNAT) family
MTTIRRFCCDDLLRFASVNLDHLTETFNMSFYMTYLARWPDYFHAAVSPGGRVMGYSMSLKLAKKLMNLLEEISDKMDKAYFVDLFVRASNMPAIRMYEKLGYVVYRRVLRYYSGEEDGLDMRKALSQDVEKKSIIPLKRPITPDELEYD

SEQ ID NO: 69264 - protein, 355 aa, Zea mays
  Coding DNA Sequence Number=SeqID_27485
  Gene Ontology: Mol. function=ATP-dependent helicase activity; Cellular component=nucleus; Biological process=rRNA processing
  Homolog annotation: Hit_ID=Q5Z5F6; Match level="QueryCoverage=99%, HitCoverage=60%, E-value=1e-128, Identity=65%"; Hit description =Putative myc-regulated DEAD/H box 18 RNA helicase
  Pfam annotation: Domain name=Helicase_C; Domain location=145-221; Score=116.1; E_value=1e-31; Accession=PF00271.21; Description =Helicase conserved C-terminal domain
MCLIIDEADRILEQNFEEDMKQIFKPLPQDRQSVLFSATQTKKVQDFANFTFGKNEERQRKLVYVGVDDSELKLWQPTVEGLQQGYCVIPSEKRFLVLYTFLRLKAREAQTAKAALRGEVGEEQKKVKIMVFFSSCSSVKFHAELLNFLGIECYEIHGQLKQQKRTSTFFRFLKEKSGILLCTNVAARGLDIPEVDYIVQYDPPDDPKDYIHRVGRTARGDKGRGSALLFLLPEELKLLIHLQAARISLTEYVFTEKHVPKSLSQLSAKEAYRSYLLAYNSHSMKDIFDIHQLDLKKVAASFCFKEPPKVNLDLESSASRHRKMRKVFGGQSHGIGASNPYGRRGVYDRSKFARF

SEQ ID NO: 69265 - protein, 180 aa, Zea mays
  Coding DNA Sequence Number=SeqID_27486
  Gene Ontology: Mol. function=nucleoside-triphosphatase activity; Cellular component=protein complex; Biological process=protein catabolic process
  Homolog annotation: Hit_ID=Q9SEI4; Match level="QueryCoverage=70%, HitCoverage=31%, E-value=1e-59, Identity=91%"; Hit description=26S protease regulatory subunit 6B homolog
MAPPPSYPASSTISASVAASVEEEDDLYGRLKSLQRHMEFVEIQEEYVKDEQKNLKRELLRAQEEVKRIQSVPLVIGQFMEMVDGNNGIVGSTTGSNYYVRILSTINRELLKPSASVALHRHSNALVDVLPPEADSSISLLGSSEKPNVTYNGSASSFGRLPYLSMLLIALNVFLIMVYK

SEQ ID NO: 69266 - protein, 134 aa, Zea mays
  Coding DNA Sequence Number=SeqID_27487
MVGIETNVQLIVSIAVSEYFHFFPALWENSSLYSVHDRLEHILFIGERIPSSDGGESLVFTMRDWATTIGGPPLWAHVGSLCCSGRASRVNTSSRAAASVTQKPRRRGTLAPREQWPPHGDEEDPFGDWALARS

SEQ ID NO: 69267 - protein, 139 aa, Zea mays
  Coding DNA Sequence Number=SeqID_27488
MAAHGDHQFDLSLTLCFYAEVMELRSGEGWARIAVAGLFYGRGNAPAEEGEVTRSLLQRNSEIPGCIIPTASLGGGGPTSRSHESMGDQGTRSVMGRAKRTGHQDPHVSAITKGKGRGRRWAVWRGEMEEWAEFPERPS

SEQ ID NO: 69268 - protein, 89 aa, Zea mays
  Coding DNA Sequence Number=SeqID_27489
MVRSLRAMLCTDLGKVSNWRALVDDLRHELMDWVLDYLAEPTTCSIYRIPERWPVNLRWRGGGRRGKELLAQAIRGCYRGKATGDGLAN

SEQ ID NO: 69269 - protein, 218 aa, Zea mays
  Coding DNA Sequence Number=SeqID_27490
MGLAAVDRHRCADRLTLSRTAHKSTWTEVRPWQRGRKEVELQGKNSSGAAREGDDADRRSGRHGAMLLLCLLGPQAAGRWENEQGAARLGNRGAMGGAGKILGIIHGKWSSRPWIGGQGADVSRPGEDGQYQEGGGIDVPANPHNRRVLRQQQQQADMNPPNPPPAGTAPVIAAQMQMMQQMADTMADMHVQIRQECQEMFQERQDTRKEMGQERMGR

SEQ ID NO: 69270 - protein, 47 aa, Zea mays
  Coding DNA Sequence Number=SeqID_27491
MAFRRGVLHWRCMVVAILWQMGNDTPSPGEEQVVEEEPPYNEAYELI

SEQ ID NO: 69271 - protein, 92 aa, Zea mays
  Coding DNA Sequence Number=SeqID_27492
MAVMGSTSEKMYICQEPNFGIVNDKDETGLTLTPSGRHILESLFILSGLSEVLRTRTTGCETVRLSSHTFIAQQAVGNNVHELAKGGSSCEV

SEQ ID NO: 69272 - protein, 100 aa, Zea mays
  Coding DNA Sequence Number=SeqID_27493
MGITLAREHQRALHTARRTNGSADQLRRAITRAKRAITAELRAQAERESEGPRLRAQMRKGRWASRARGSKGAQARGRGRECTDVGASTVGDRGREVGDD

SEQ ID NO: 69273 - protein, 151 aa, Zea mays
  Coding DNA Sequence Number=SeqID_27494
MEHRSTGAGRREHRSTRAGMRGTAPLEQGGGNTGALEHGAPEFAVRCIATPRGPREHWSREHPSLSCAAPGGGSREHWSSLCAAHGEAGARDGGTPRLREQGAQELNMRCAERRELSHPVLEDKPNVNRVRARIRTHVHSDYIIGHHHTNA

SEQ ID NO: 69274 - protein, 102 aa, Zea mays
  Coding DNA Sequence Number=SeqID_27495
MSTTGYGGSSRMHGQWPWQGECWMSSTTGDERSTNVRLAVEQEYGNIGTMVGLVKLEHGRRDHQVWREHRQGANVPGTKGAGEMAWFLSETGWGRRPADGAL

SEQ ID NO: 69275 - protein, 154 aa, Zea mays
  Coding DNA Sequence Number=SeqID_27496
  Subcellular localization annotation: CTP_CleavageSite=69; ConfidenceScore=5.05e-01
MDVWLLVSLHLFAIVPHPVDSNTRHSRHQYHVRRARLYSPHGVLVTQQLVPRPGVELPFTSPTCHAEPLLSRVGSPSRSLRVLVVVLSPRLDVGPYVTSLTCVRAGKKDPKRLWWSNLPIDAHQVLGERPEQGSSSFGWIASQYGNHTLIRYSS

SEQ ID NO: 69276 - protein, 117 aa, Zea mays
  Coding DNA Sequence Number=SeqID_27497
MRLGSKRRVAEGGTEPEEESSEEYEVEEVCDHIASSRGSRLALFGSDLRLGRFRPRRRRRRPLAGEGAAEGFLHDLVIHPDNRSLCDIQLTVNRLCVSIPAANFSLLDDEPARYASY

SEQ ID NO: 69277 - protein, 98 aa, Zea mays
  Coding DNA Sequence Number=SeqID_27498
  Homolog annotation: Hit_ID=Q3S4H8; Match level="QueryCoverage=43%, HitCoverage=19%, E-value=1e-16, Identity=97%"; Hit description=Dual -specificity protein-like phosphatase 1
MSKVKNHSGHKPLRQGPRGLIFATAPTPTFWFIEIRLQLRIIPGPIKEVSNCVYENEHVLLGAVPFPSDVLRLKTLGVCGVVTLNESYERLVPTSLYE

SEQ ID NO: 69278 - protein, 843 aa, Zea mays
  Coding DNA Sequence Number=SeqID_27499
  Gene Ontology: Mol. function=RNA-directed DNA polymerase activity; Cellular component=intracellular; Biological process=RNA-dependent DNA replication
  Homolog annotation: Hit_ID=UPI00004C1731; Match level="QueryCoverage =93%, HitCoverage=52%, E-value=0.0, Identity=87%"; Hit description =UPI00004C1731 related cluster
  Pfam annotation: Domain name=RnaseH; Domain location=312-439; Score= -2.1; E_value=9e-05; Accession=PF00075.14; Description=RNase H
  Pfam annotation: Domain name=rve; Domain location=539-698; Score =121.3; E_value=2.8e-33; Accession=PF00665.16; Description=Integrase core domain
  Pfam module annotation: Pfam domain module=RnaseH::rve; Domain location=312-439::539-698
MPFGLRNAGATYQRCMNHVFGEHIGRTVEAYVDDIVVKTRKASDLLSDLEVTFRCLKAKGVKLNPEKCVFGVPRGMLLGFIVSERGIEANPEKIAAITSMGPIKDLKGVQRVMGCLAALSRFISRLGERGLPLYRLLRKAESFAWTPEAEEALGNLKALLTKAPILVPPADGEALLVYVAATTQVVSAAIVVERQKEGHALPVQRPVYFVSEVLSETKIRYPQVQKLLYAVILTRRKLRHYFESHPVTVVSSFPLGEIIQCREASGRIAKWVVEIMGETISFAPRKAIKSQVLADFVAEWVDTQLPTAPIQPELWTMFFDGSLMKTGAGASLLFISPLGKHLRYVLRLHFLASNNVAEYEALVNRLRIAIELGVRRLDARSDSQLVIDQVMKNSHCHDPKMEAYCDEVRRLEDKFFGLELNHIARRYNETADELAKNSLGANDGPPGRLLPGFASTLRQDRRHARARGTLGSARGALGSARGALGSARAPRALVGNAFRQGFYWPTAVADATRIVRTCEGCQFYAKQTHLPAQALQTIPITWPFAVWGLDLVGPLQKAPGGYTHLLVAIDKFSKWIEVRPLNSIRSEQAVAFFTNIIHRFGVPNSIITDNGTQFTGKKFLDFCEDHHIRVDWAAMAHPMSNGQVERANGMILQGLKPRIYNGLNKFGKRWMKELPSVVWSLRTTPSRATGFTPFFLVYGAEAILPTDLEYGSPSTRAYNDQSNQASREESLDQLGEARDKALLHSARYQQSLRRYHARGVRPRDLQVGDLVLRLRQDARGRHKLTPPLGGAIRHRQSSEARNIQAGQQSRRDLRQRLEHQTATSLLPLRCFQVVHTPRAHAKV

SEQ ID NO: 69279 - protein, 68 aa, Zea mays
  Coding DNA Sequence Number=SeqID_27500
MTWAGQATADGARGGALTELQHATVVATPATSSPSKCDAESSPLVASPALLDGRRHLLRMGGDSGKKP

SEQ ID NO: 69280 - protein, 105 aa, Zea mays
  Coding DNA Sequence Number=SeqID_27501
  Homolog annotation: Hit_ID=Q2QPI7; Match level="QueryCoverage=30%, HitCoverage=6%, E-value=8e-07, Identity=78%"; Hit description =Pentatricopeptide, putative, expressed
MGGGGPHSVELSAQSRRQGASEVQSLETHHGDRSVTHRFLLYSYHFLRLSDWIATLGAIYDGPGIQDYSNANDMQLALAHRSCSFLYGKGRVSIEWGSGPDWYGQ

SEQ ID NO: 69281 - protein, 47 aa, Zea mays
  Coding DNA Sequence Number=SeqID_27502
MADDGATCGNVCDARPARGGAGRVGGATPGAGRVDRAEYGASEGDGA

SEQ ID NO: 69282 - protein, 93 aa, Zea mays
  Coding DNA Sequence Number=SeqID_27503
MSCSLTGRARRSAGGGVRASGAVLTGRAGLAEGDGATGVGEGINTDRSSMKNQKTILVAREENPTRSDMQKPLHAQLLFFWIQKRYRTEFYSV

SEQ ID NO: 69283 - protein, 56 aa, Zea mays
  Coding DNA Sequence Number=SeqID_27504
MADVWPYHTMCPCSQRPAPTSVMDGGSSGAAVLIVPRDEWTPHVGAYQQLCAGAWA

SEQ ID NO: 69284 - protein, 136 aa, Zea mays
  Coding DNA Sequence Number=SeqID_27505
MPRIRRPAKVSFPGHQRRRRLCPRWGPAGDDGAGALGAPRRHEGLREVRESVVSMSIDTTLVRRHQRVAVHDGVARRRRNFTPVNNRAQPRAGKGNTGWGRLVTSREVFWALELWQRRGEGSRWRRWRCDCTEEEQ

SEQ ID NO: 69285 - protein, 32 aa, Zea mays
  Coding DNA Sequence Number=SeqID_27506
  Homolog annotation: Hit_ID=Q6Z1V9; Match level="QueryCoverage=78%, HitCoverage=19%, E-value=8e-07, Identity=100%"; Hit description =Chloroplast ORF133; ORF within trnI intron
MAYSSCLNRSLKPNKLLLRRIDGAIQGPGDWI

SEQ ID NO: 69286 - protein, 81 aa, Zea mays
  Coding DNA Sequence Number=SeqID_27507
MPTPTPSPGKNSEIASVSTMFQQHLIDRAIMTERKRKEMEDRKCKISGPQPRSSNRPRFSGNPPQQFRQNYNTPGVTVTKT

SEQ ID NO: 69287 - protein, 375 aa, Zea mays
  Coding DNA Sequence Number=SeqID_27508
  Homolog annotation: Hit_ID=Q54731; Match level="QueryCoverage=35%, HitCoverage=50%, E-value=2e-12, Identity=35%"; Hit description=Orf5; Method: conceptual translation supplied by author
  Subcellular localization annotation: CTP_CleavageSite=41; ConfidenceScore=5.54e-01
MATPTAPSHLPLATASASTSFPDRFLRTPCALRPRSWPRLRAGSVKEWREFEDDAGAVKEWREFEDAVRRKDLPRALQFLQSVEPAAVQVAVPVPPGRDWEVLDACVDADDMRLVGRAYQFLVDRGVLASFGKCKNIVLEWPREVTPTVLKEMTGLEAEKLAPKKWGLSGSSPYVLIGFLGGVSFLLTQGVDLRPKLSAVLGLAAADAMLLGAYLMGCPIRGVILDPFVALRMGIQGQAGTQFWDEKMEKELAEGHLSSTAFDSSWTSFDLRNLETDGRYCMIMFAGIAAEALVYGEAEGGENDENLFRSLCILLNPPPAVAQMANRARWSVMQSYNLLKWHKKAHRAAVKALEDGHSLSVVIRRIEEAIASDSK

SEQ ID NO: 69288 - protein, 120 aa, Zea mays
  Coding DNA Sequence Number=SeqID_27509
MGNREKRIGKRLGSVQPKLSSVWHTGLSSGAPDSVRCARLVSGEKAALGKRSAAYDNNSSDCTSTIGTVDCCSFGSLDSPVNYSGAIPKESREWPVRECLGLGTREHKVDLSLVVWVDDE

SEQ ID NO: 69289 - protein, 393 aa, Zea mays
  Coding DNA Sequence Number=SeqID_27510
  Gene Ontology: Mol. function=receptor activity; Cellular component =integral to membrane
  Homolog annotation: Hit_ID=Q8SAX6; Match level="QueryCoverage=93%, HitCoverage=93%, E-value=8e-98, Identity=68%"; Hit description =Putative organic solute transporter
  Pfam annotation: Domain name=DUF300; Domain location=5-271; Score =146.3; E_value=8.2e-41; Accession=PF03619.7; Description=Domain of unknown function
MEWASAAYTAAALVCAAAASVVALAHIYRHLLHYAEPIYQRFIVRIIFMVPVTLSARRSHPQQTLAAKGALAPDLSPAFAGAFPYRAATAMELKYKYSVESFAGAYDSDQKVYAVMSFLSLILPDNAIYFNSIREIYDAWVIYNFLSLCLAWVGGPGAVVVSLSGRTLKPSWILMTCCYPAIPLDGDLLRPYNPVPKFIMIKSVVFLTYWQGVLVFLAAKSRFIKNADKAADLQNFVLCVEMLIAAIGHLFAFPYKEYAGPNARPSGGFRESLLHALKFNDFYHDTVHQFAPTYNEYVLYNHNEGDNAETKFPSGSTATSGQGVELAGITVVASNSPVTSSVSCNQADQEETMTTPIKDKVDPGGLYDLTELLDVDLSSYPDKVPAITDVRKQ

SEQ ID NO: 69290 - protein, 309 aa, Zea mays
  Coding DNA Sequence Number=SeqID_27511
  Homolog annotation: Hit_ID=Q9LXE9; Match level="QueryCoverage=82%, HitCoverage=75%, E-value=1e-57, Identity=47%"; Hit description=Ids-4 protein-like
  Pfam annotation: Domain name=SPX; Domain location=1-158; Score=68.1; E_value=2.9e-17; Accession=PF03105.10; Description=SPX domain
MKFGKDFRNHLEETLPAWRDKYLAYKALKKLIKNLVPREPAAAPPLPPPAPAAADAEGPGAPAAAHGNVNLANWFASILDAELHKLNEFYIEREEWYVIRLQVLKERIERVKAKKNDAFTSRSEFTEEMLEIRLVKILKKYDKRTGGVLSLPFTQRVRHQPFFTTEPLTRLVRECEANLELLFPVEAEVLEPSSSSNLEPHDVARCDPTSSRDVETVDVYRSTLAAMKAIQGLRRASSTYNPLSLSRFFHGEDGEPCSGAITSESSLSDSSTDSQIQDAGKDDKEVQSNSRDQNAAQGEQNAQGEPTDE

SEQ ID NO: 69291 - protein, 289 aa, Zea mays
  Coding DNA Sequence Number=SeqID_27512
  Homolog annotation: Hit_ID=Q4WYS7; Match level="QueryCoverage=45%, HitCoverage=56%, E-value=1e-07, Identity=27%"; Hit description =Putative nicotinamide N-methyltransferase
MDTAVFSPADLFHGVDDSDDDRGCSLRAPNGRCCLFCGIEDEMQICSDGEKPVALEYQERVHDFPDMKLSVREFSCHELNANLLWPGTFSFATWLVKNRSILDGRRVLELGSGTGALAIFLRKAFEVNITTSDYDDGEIEKNISYNCRANALDVLPHIRHTWGDPFPVCTPNWDIVIASDILLYVKQYDNLVKTVSFLLNEYKQKDHKSGCITITDKSGTQISAKPPVFLMSWRRRIGKGHQSLFFDGCEKTGLQVQHLGDLVYLISNKQEADFVETKSDGGSSEGMIF

SEQ ID NO: 69292 - protein, 120 aa, Zea mays
  Coding DNA Sequence Number=SeqID_27513
MAELAHGEEMGTAHHRGAEVGCHEGGEPQWRSSAMEIQTDHSWLIDLQLTRQRNSPLMKVEQWEGGDQPCLLAGVEAVLRTRNKRATAESEGGWAVGGGRVSGRAALCRERAVGRRGVLP

SEQ ID NO: 69293 - protein, 33 aa, Zea mays
  Coding DNA Sequence Number=SeqID_27514
MEGSRVSEMYSCPATLGSPTASGSAQSKPIVMP

SEQ ID NO: 69294 - protein, 383 aa, Zea mays
  Coding DNA Sequence Number=SeqID_27515
  Homolog annotation: Hit_ID=Q84MF1; Match level="QueryCoverage=43%, HitCoverage=41%, E-value=1e-63, Identity=72%"; Hit description =Putative stearoyl-acyl-carrier protein desaturase
  Pfam annotation: Domain name=FA_desaturase_2; Domain location=2-380; Score=209.9; E_value=5.7e-60; Accession=PF03405.5; Description=Fatty acid desaturase
  Subcellular localization annotation: CTP_CleavageSite=57; ConfidenceScore=5.54e-01
MATTAAAQLKHMACSSRSPASILNYPRTPSPQCQCQVPRPLASFLGAVHHRLKPSIVVVMEQDANHNAPPFSARFAEALGYYAALFDSLDAVAAASAAGDRAQVERMVLGEEIKNVLLCEGASRLERHERLSQWAMYMDASGFRRVPLSFRAIRESELKLASFGMSACRYQVESDGLLLGWGSTRLYSVSAWRPNKSGTRECAQRRAAISQARATFVSHARTARLAGLHGDACLAKLCGVIAADERRHEAAYTRASDRAFEEDPDGMVRALAAVMRAKVTMPGELMADGRDDRLFDHFSAVARRSGVYTAADYADMVEHFVRRWKVAELDAGLSGEGRRAQDYVCGLPRKIRRMEELAQDRAAQMEAQSVCFSWVFDRPVRIH

SEQ ID NO: 69295 - protein, 57 aa, Zea mays
  Coding DNA Sequence Number=SeqID_27516
MMTTAENSDAFQLRPEPSVVGANSNNYLYMWITKNRNGKRFSLSVGLRKPSVEIDFY

SEQ ID NO: 69296 - protein, 159 aa, Zea mays
  Coding DNA Sequence Number=SeqID_27517
  Gene Ontology: Mol. function=glutamine-fructose-6-phosphate transaminase (isomerizing) activity; Cellular component=cytoplasm; Biological process=carbohydrate biosynthetic process
  Homolog annotation: Hit_ID=Q2RAY0; Match level="QueryCoverage=93%, HitCoverage=34%, E-value=2e-29, Identity=82%"; Hit description =Glucosamine-fructose-6-phosphate aminotransferase, isomerizing family protein, expressed
MDLSVLASRNTVGITLSRRTHCGVHINADCRYKGIYKSNSSNGDDGVGYRIRPIIYLLELEGKLSSVDLTTFQQAAVGDPAAPLAQGDAADSDVLEGGRHRAAVCPSGSCRVIEVPEVACCLQPVINIIPLQLLAYNLTVLQGFDVDQPRNLEKSVTTQ

SEQ ID NO: 69297 - protein, 137 aa, Zea mays
  Coding DNA Sequence Number=SeqID_27518
  Gene Ontology: Mol. function=RNA binding; Cellular component =mitochondrion; Biological process=protein amino acid phosphorylation
  Homolog annotation: Hit_ID=Q6Z0A7; Match level="QueryCoverage=94%, HitCoverage=44%, E-value=8e-21, Identity=41%"; Hit description=PPR protein-like
  Pfam annotation: Domain name=PPR; Domain location=100-133; Score =23.5; E_value=0.00076; Accession=PF01535.11; Description=PPR repeat
  Pfam annotation: Domain name=PPR; Domain location=30-64; Score=16.0; E_value=0.095; Accession=PF01535.11; Description=PPR repeat
  Pfam annotation: Domain name=PPR; Domain location=65-99; Score=30.1; E_value=7.8e-06; Accession=PF01535.11; Description=PPR repeat
  Pfam module annotation: Pfam domain module=PPR::PPR::PPR; Domain location=100-133::30-64::65-99
MEKASRAGRTVPAKVKFHEMTESGITMDKWTYNIGLSEHFKNRCSVEAILLFEELRAMNVKINIKTLNTMIAGMFQTRRVEEAKDLFASISRSGLVPSVVTYSIMMTNLIKGLVEEADDMFSSMENAGREPDSRLCG

SEQ ID NO: 69298 - protein, 364 aa, Zea mays
  Coding DNA Sequence Number=SeqID_27519
  Gene Ontology: Mol. function=RNA-directed DNA polymerase activity; Biological process=RNA-dependent DNA replication
  Homolog annotation: Hit_ID=Q6ZBH9; Match level="QueryCoverage=48%, HitCoverage=12%, E-value=3e-85, Identity=89%"; Hit description =Probable protein NAP1
MRDCILWRWTADGTYSARSSYRIQFRGSFGLFRSNLIWRVHAKNKCKVFAWTMTMEKVLTAANLQKRIWPHQDHCALCNRPLETCIHLALLCPFAKSVWRFTLAWGHFDENLVIPSEEPTKLTRWWEVSQAKIPIGERRRFNGVVIYTIWNIWKERNRRFFTGAFETAVQVASRAKQDIEQQRRALTWKMVFSALALSHREVIWYFQHVGIASSKSTRLKTVDIDATDPTIGFLLDGIGKLCCLVRKYIAAIKGYALSYLLSSAGRIRFLLGTPGMVALDLDATLKGLFQQVLHCLENIPKPQGESVPDITADLADLRKHWLSILMIVTSSRSSINIKHLEKATVSTGKEGLVSEGNAAYNWSR

SEQ ID NO: 69299 - protein, 183 aa, Zea mays
  Coding DNA Sequence Number=SeqID_27520
  Homolog annotation: Hit_ID=Q2QY17; Match level="QueryCoverage=75%, HitCoverage=29%, E-value=6e-18, Identity=48%"; Hit description =Phosphate translocator, putative, expressed
  Subcellular localization annotation: CTP_CleavageSite=36; ConfidenceScore=5.30e-01
MGTGDDDTKPAAMEVTSTSSPPSLPSPAAPPPSLLRSVLLSYAYVGIWMSLSFSVIVYNKYILDPKLYNWPFPISLTMIHMGLLRAPGHNASSASSRVVDVPSLLPLPHQKKKAMTAAALYASLPGSPIGGALSAFSVLGFQTPQKFTSPVSFIKKPQGLEAPLRFNSSAGGVPTEAFRRRPF

SEQ ID NO: 69300 - protein, 410 aa, Zea mays
  Coding DNA Sequence Number=SeqID_27521
MGGWNRSLYVTGHRDRSAGASRTPLPPPSPDYDDLDTDGSLESELLSVPVGFLSNVYGLFFALRNEMSELGAEKCYICVTITSLGLEVRFSLKGYGFGFKSAIISVLHAATMDSYTHFFICAGDKHQQVPLWEREFCRHVGDITWEQFCENKQYVGQFHKLEPWDDSAAFDCFQNAKARFWASYHGQPSDIPLLDDPDLYIDKVDHQCEVDPELVADLDSVGLPFESDDNPASAKGWTNAGADNKCTQNGSGNWDAFVEKPAEVSKWDSEANLASNTTWGGQANVATPEAVWRGQSFSKWGNDSNTSRGVPLEKPSWRGCNKNRYTPNSWSSNFHSRPSDNRYQQLEDPSYTSGTGRKWNGGDGGGYVKQRSFKHRNQDQGQHQQPRSGSWQQDQRGRSRQWRPVHSRAP

SEQ ID NO: 69301 - protein, 397 aa, Zea mays
  Coding DNA Sequence Number=SeqID_27522
  Gene Ontology: Mol. function=O-methyltransferase activity; Biological process=lignin biosynthetic process
  Homolog annotation: Hit_ID=Q67VD3; Match level="QueryCoverage=98%, HitCoverage=99%, E-value=2e-73, Identity=43%"; Hit description =Putative O-methyltransferase
  Pfam annotation: Domain name=Dimerisation; Domain location=41-89; Score=44.3; E_value=4.2e-10; Accession=PF08100.2; Description =Dimerisation domain
  Pfam annotation: Domain name=Methyltransf_11; Domain location=227 -331; Score=12.7; E_value=0.0031; Accession=PF08241.2; Description =Methyltransferase domain
  Pfam annotation: Domain name=Methyltransf_12; Domain location=227 -329; Score=18.9; E_value=0.01; Accession=PF08242.2; Description =Methyltransferase domain
  Pfam annotation: Domain name=Methyltransf_2; Domain location=95-374; Score=227.5; E_value=2.9e-65; Accession=PF00891.8; Description=O -methyltransferase
  Pfam module annotation: Pfam domain module=Dimerisation::Methyltransf_ 11::Methyltransf_12::Methyltransf_2; Domain location=41-89::227 -331::227-329::95-374
MSPCAHAEQQEPDAPPLHNDHHRHQTYVELYHHGLHHVKSSALLCAVGLGIPGAIHRRGGAATVSDLVSGTGVHPAKRAQLRRLMRMLACFGIFGAAGGDEGESETVYTLTPVSSVLVGDKDKEASATSSASSPDMSALLRLLARPSTSVSTFFDMEEWFRDGGTTTLFETALGVPPWSLTKSDAAYNRAMNEACVADTSLSMDIMLKDTSGGASSVFGGGRLTSLVDVGGGHGAAAIAIANAFPHIKCTVLDLKQVIDNKVPPAAAAGTDRIINSTVQFVAGDMFESIPPADAVLLRHVLDCWDDEHCVKILGQCKRAIPGREAGGKVIIINVVVGYGSPDKLVKETQVLFDMYMMRYDGSEREEHEWREIFSRAGFSDYKITPTIGFHSIIEVFP

SEQ ID NO: 69302 - protein, 569 aa, Zea mays
  Coding DNA Sequence Number=SeqID_27523
  Gene Ontology: Mol. function=protein kinase activity; Cellular component=plasma membrane; Biological process=protein amino acid phosphorylation
  Homolog annotation: Hit_ID=Q6ZFB7; Match level="QueryCoverage=86%, HitCoverage=69%, E-value=9e-94, Identity=44%"; Hit description =Putative receptor-type protein kinase LRK1
  Pfam annotation: Domain name=APH; Domain location=379-562; Score=1.1; E_value=0.0046; Accession=PF01636.13; Description=Phosphotransferase enzyme family
  Pfam annotation: Domain name=Lectin_legB; Domain location=42-274; Score=204.9; E_value=1.8e-58; Accession=PF00139.10; Description =Legume lectin domain
  Pfam annotation: Domain name=Pkinase; Domain location=376-569; Score =20.7; E_value=8.5e-10; Accession=PF00069.15; Description=Protein kinase domain
  Pfam annotation: Domain name=Pkinase_Tyr; Domain location=376-569; Score=-12.0; E_value=9.8e-12; Accession=PF07714.7; Description =Protein tyrosine kinase
  Pfam module annotation: Pfam domain module=APH::Lectin_legB::Pkinase:: Pkinase_Tyr; Domain location=379-562::42-274::376-569::376-569
  Subcellular localization annotation: CTP_CleavageSite=22; ConfidenceScore=5.03e-01
MAAGRPSLGPHHRLARHLLSLYAAAAAAAVHPRPSRTLAVFRPQLLQAPRALGLSQLVNCTGDAYITPDTLELTRNRRDQSSTYSLGRATYMHPVPLWDARTGETASFTTTFSFLISRDPSTFPGDGMAFFLGHFGSSIPTNSSGGMLGLMPAFTNGTGDGTVVAVEFDTFLNHANDDISGSHVGIDVNSLNSTAATDTSSTRNLTSGYEMVATVSYENVTRFLAVQLTIYDTSYNVNATVDLKSYLPERVAVGFSAATGKGGEQHQVLSWSFTSTLQEAPAPAPAPPPRALTPGSSTQQPKKTSSEGNTAAAVLVWWKRRRRRRSSGGIGTSDDDDDDNGHRDQDGSRAELERGVAASGPRRYAYRDLAAATNYFAEDGKLGRGGFGSVYKGNLVVAGEARPVAIKVFSSESSAQGRKEFEAEVRIISRLKHRNLVQLLGWCDSRHGLLLVYELVAQGSLDRHLHSSSGDSGSESPFLAWPERYRIILGLGSALRYLHQEWEQRVVHGDIKPSNIMLDDALSAKLGDFGLARLGDHGGRWHTTNAVLGTAGYIDPEFVNTRHPSTTNL

SEQ ID NO: 69303 - protein, 68 aa, Zea mays
  Coding DNA Sequence Number=SeqID_27524
MEAGPPYEPAPKVADGRDWSELSLDALVLVFSRLGPVEMLMGSGLGFVHKGRPCSFTISYVDLLQRIS

SEQ ID NO: 69304 - protein, 73 aa, Zea mays
  Coding DNA Sequence Number=SeqID_27525
MGRFAAQWIYRQEGLRRPTRWEEEFLGDGGRGCLDAAAGGGRMADDSPRAGAWVMEAEVARMRQLAEPTQQFG

SEQ ID NO: 69305 - protein, 96 aa, Zea mays
  Coding DNA Sequence Number=SeqID_27526
MTQARHAGLLKNGAGGGVQTHTLMEEGQETPDDTVDFMDHNLEYVHNVKLLHNMKLLLTAFHKCQGVNLTKDNLAKRGWKGSFYGNILAQILKIIA

SEQ ID NO: 69306 - protein, 54 aa, Zea mays
  Coding DNA Sequence Number=SeqID_27527
MEDQIPSLAELIKFGSLLDFQQQCSERYRSNFFLLGSGSFATKFLNVVKSGYST

SEQ ID NO: 69307 - protein, 178 aa, Zea mays
  Coding DNA Sequence Number=SeqID_27528
  Gene Ontology: Mol. function=nucleoside diphosphate kinase activity; Cellular component=chloroplast; Biological process=CTP biosynthetic process
  Homolog annotation: Hit_ID=Q852S5; Match level="QueryCoverage=71%, HitCoverage=55%, E-value=5e-56, Identity=83%"; Hit description =Nucleoside diphosphate kinase 2, chloroplast precursor
  Pfam annotation: Domain name=NDK; Domain location=47-176; Score =304.1; E_value=2.5e-88; Accession=PF00334.9; Description=Nucleoside diphosphate kinase
MRIPWENGVAKLALRVKQYPHLSPGQSMDQKGPSLGLTGQRCLCEVEQSYIMIKPDGVQRGLVGEIISRFEKKGFLLKGLKLFQCPKDLAQEHYKDLKDKPFFPKLIDYITSGPVVCMAWEGDGVVASARKLIGATNPLQAEPGTIRGDLAVQTGRNVVHGSDSPDNGKREIGDFLSQ

SEQ ID NO: 69308 - protein, 109 aa, Zea mays
  Coding DNA Sequence Number=SeqID_27529
MKPYTSHELPPLRTYDLHPALSHKSGKGGGIDLPPNRHSSRIFRQQQQQPEMDPPNPPPAGVDPAVTAQMRIMQQMADTMVNIHAQMRQERQEMRQEREEICQERRVQQ

SEQ ID NO: 69309 - protein, 160 aa, Zea mays
  Coding DNA Sequence Number=SeqID_27530
MVGKKFNEAVCKNEGIAGDVWQHRDHNLKLLRQDCYISHQNKFINHLVNQLAAHLFLKIACQLEEQIKISSAYSFLKAVELELQGYFSAFDGRLITELHDELQYLQHETENVLPREQGRCTDELEEVLEARIRVLEVCEKMIIRMHARRWRNIPQLMERF

SEQ ID NO: 69310 - protein, 49 aa, Zea mays
  Coding DNA Sequence Number=SeqID_27531
METSLARALELGAMDWAWRPGAKRQGAARRAQGRGSGEHHGSSLQGRYF

SEQ ID NO: 69311 - protein, 140 aa, Zea mays
  Coding DNA Sequence Number=SeqID_27532
  Subcellular localization annotation: CTP_CleavageSite=64; ConfidenceScore=5.19e-01
MLLFWPRRGACALGPSHLAALGFSAARVLLASCLQPWMSAVLDGSQTPPLNAASPAPASLLPVSSMAASRAFRCSCPCCREAHCSVLLRRVVVRAKLLVVDIESVTCVLDTVKHCVCLCPSPLGRNLALLSSSLLAESFP

SEQ ID NO: 69312 - protein, 260 aa, Zea mays
  Coding DNA Sequence Number=SeqID_27533
  Gene Ontology: Mol. function=protein binding
  Homolog annotation: Hit_ID=Q75KA7; Match level="QueryCoverage=80%, HitCoverage=37%, E-value=3e-43, Identity=52%"; Hit description =Expressed protein
MRRWERGSGAGAWAWWGTTWWLARSCKLLTRGRAALGGLRSMVCRGWATQRWVGARAVGLRKGSSWKLHGEDHRANPVLRRVTSDTLANPPNDTLAHIIELVLKSSEDRGRREMKSLVLKLFKESSNGSANSSSADSSCITTLYECFQNCQDSLLVLPREATGADELAVEEELSSGSKVQAFRKIGKIDLEADNLLWLAEILSDRHAVDELASIWARQTELAAELHTRIPVMHRHLVSCVTARLLVVVGRGATLPSRETR

SEQ ID NO: 69313 - protein, 222 aa, Zea mays
  Coding DNA Sequence Number=SeqID_27534
GSGLGDQLVELLIPRMQQQQEEEAAGGAGLQLQTRGKEEDEEEPVLATWDCGSPLYDSFEVASLHYVLEKHTMILPFPDAAAGSRSRRRTQQRRHHRGGHRAAMAPDVAKTGNRRVGAGAARRTWGWWGSKAAAAIFRAVTLLFACPVLALGKAWKTLDKASFAKCISMPSVPPSANEADCRILMWIYDTISSDLQQSLMMHRNTWCYLEDEFLGQESRALT

SEQ ID NO: 69314 - protein, 110 aa, Zea mays
  Coding DNA Sequence Number=SeqID_27535
MRRNAAQEPVCGSSGARLTAGDPYILSGWGILLQSSRNFSTGRLLYRKFNLIVDCASSPFQTPIFIVYFIYMFGVMLIFAILYHYVNGNMERPPGKTVLPQGFNGTPLAD

SEQ ID NO: 69315 - protein, 59 aa, Zea mays
  Coding DNA Sequence Number=SeqID_27536
MEPPRWVSLATGVGGRGHGHWIPRRQWRLEIAHPFDRLLFTVHDKIIMLIGTLSDHPGK

SEQ ID NO: 69316 - protein, 361 aa, Zea mays
  Coding DNA Sequence Number=SeqID_27537
  Gene Ontology: Mol. function=RNA-directed DNA polymerase activity; Cellular component=mitochondrion; Biological process=RNA-dependent DNA replication
  Homolog annotation: Hit_ID=UPI00004C1731; Match level="QueryCoverage =99%, HitCoverage=25%, E-value=1e-122, Identity=64%"; Hit description= UPI00004C1731 related cluster
  Pfam annotation: Domain name=RnaseH; Domain location=1-123; Score= -17.4; E_value=0.0024; Accession=PF00075.14; Description=RNase H
  Pfam annotation: Domain name=rve; Domain location=191-342; Score =51.7; E_value=2.4e-12; Accession=PF00665.16; Description=Integrase core domain
  Pfam module annotation: Pfam domain module=RnaseH::rve; Domain location=1-123::191-342
MYFDGSLMKIGAGASLLFISPLGKHLRYVLHLHFPASNNVAEYEALVNRLRVAIELGVRRLDARGDSQLVIDQVMKNSHYRDRKMEAYYDEVQRLEDKFYGLELNHIARWYNETADELAKIASGQTTVPPDVFSRDIHQPSVKIDDTPEPEEASAQPEEASAQPEVSSSAEGEALCVEGEWNGVAPNRNCVGSGPRWSLAEGTRGLLAPAGHHRQILQVDRGPTLTSIRSEQAVAFFTNIIHRFGVPNSIIIDNGTQFTGKKFLDFCEDHHIRVDWAAVAHPMTNGQVERANGMILQGLKPRIYNDLNKFGKRWMKELPSVVWSLRTTPSRATGFSPFFLVYGAEAILPTDLEYGSPRTKA

SEQ ID NO: 69317 - protein, 162 aa, Zea mays
  Coding DNA Sequence Number=SeqID_27538
  Homolog annotation: Hit_ID=Q6QP51; Match level="QueryCoverage=70%, HitCoverage=49%, E-value=6e-09, Identity=37%"; Hit description =Putative growth-regulating factor 1
  Subcellular localization annotation: CTP_CleavageSite=38; ConfidenceScore=5.25e-01
MGMIQVKASSTHGMRSRLARARPRAGTVVLDEFTSRPRASSGKQRRSPRFDCCASHPGKADNSQVQPQAQQEDPPRPTLGLGLGRRSPPRPTPGLGLNLGLERWSPPRPTLGLGLNLGLGRWSPPHPTPGLGLNLGLRRSLRLARPWARTDRATGDASLPYP

SEQ ID NO: 69318 - protein, 67 aa, Zea mays
  Coding DNA Sequence Number=SeqID_27539
MSTLQLMAWTGNCGEHNKQGCTASIGTTQKLQDNVGPHQRGRRTAKRGVGRWYQVGELERVRWSSGK

SEQ ID NO: 69319 - protein, 380 aa, Zea mays
  Coding DNA Sequence Number=SeqID_27540
  Gene Ontology: Mol. function=RNA-directed DNA polymerase activity; Cellular component=chromatin; Biological process=chromatin assembly or disassembly
  Homolog annotation: Hit_ID=Q8SA91; Match level="QueryCoverage=99%, HitCoverage=15%, E-value=1e-87, Identity=45%"; Hit description =Putative gag-pol polyprotein
  Pfam annotation: Domain name=RVP_2; Domain location=170-284; Score= -60.0; E_value=0.047; Accession=PF08284.2; Description=Retroviral aspartyl protease
MRFIDGLRADIKSVILVQRPGDLDTACSLALLQEAAESSRRPELVRGDHSPFSRPLLRAAPTSSYRGEQSRGGGGDYTKTNMTGPTTVDSKVASLRVYRRAKGLCQYCAEKWNKGHKCADTVQLHAVQELWEMLSTDQPESEGEFEDSAEQFMILLSTEAASVHRPSKSFRIRGVLQGVDLLMLIDSGSSHSFLNSAHTSKLCGITSMDTPLSVRVANGTVLQCSVELPQASWSVQDLSFCTTFKLIHLPFYDAILGMDWLEQLSPMTVDWKHKWLSIPYAGSTVILEGCNPLVPVGTVLEIQRLLPVSTDPAQLHSVEDLQLPEAVMRLLRSFQDVFQPPSALPPTQSCDHAIPLIEGARPVNIRPYRFSPAMKDEMES

SEQ ID NO: 69320 - protein, 72 aa, Zea mays
  Coding DNA Sequence Number=SeqID_27541
MELRELLAVLEVGRRTAWLCDRAPSQILGSSRTGCRLGRWSAMAPPCGPRAGAVGSWGMEDGSVSVDLKMGG

SEQ ID NO: 69321 - protein, 32 aa, Zea mays
  Coding DNA Sequence Number=SeqID_27542
MALLSTVETCSTSTLNWCCLTVLLVLECGEGA

SEQ ID NO: 69322 - protein, 136 aa, Zea mays
  Coding DNA Sequence Number=SeqID_27543
  Pfam annotation: Domain name=GRP; Domain location=34-133; Score= -19.8; E_value=0.0077; Accession=PF07172.2; Description=Glycine rich protein family
MGKNNKRKREPTPPSEDFGDSKYSEEEFSSKFEGSPAPIPLRLTAEVWTYIRAVERSGLEGSDESECSSDEEDSSEGGGGDGGDDDGGGGGNDGDSGDDGDGGGRGGSGGSKDGDGGSSRGSNRGGSGRDSNRASG

SEQ ID NO: 69323 - protein, 56 aa, Zea mays
  Coding DNA Sequence Number=SeqID_27544
MGELLPNANVKERPSWGDGVREREKGEGWVLPFIEQSSEHVRQQFYNFYSRSYPIS

SEQ ID NO: 69324 - protein, 328 aa, Zea mays
  Coding DNA Sequence Number=SeqID_27545
  Gene Ontology: Mol. function=transcription factor binding; Cellular component=histone deacetylase complex; Biological process=regulation of transcription, DNA-dependent
  Homolog annotation: Hit_ID=Q5Z608; Match level="QueryCoverage=95%, HitCoverage=88%, E-value=1e-149, Identity=79%"; Hit description =Putative HDA2
  Pfam annotation: Domain name=Hist_deacetyl; Domain location=39-326; Score=45.7; E_value=7.9e-13; Accession=PF00850.10; Description =Histone deacetylase family
MASSSSSPAPALAGEALRQKRILSSKLYLEVPSSKAPVVYSPAYDISFLGLEKLHPFESAKWGRICRYLTREGYLDKKQMVEPLEACKEDLLVVHTEAYLNSLKCSFRVSSIVEVPPVSLVPNWIVHRKLLHPFRKQVGGSILSAKLAFERGWAINVGGGFHHCSADEGGGFCAYADISLCIQFAFVRLNISSVLIIDLDAHQGNGHEKDFANDGRVYILDMYNAGIYPFDFTAKQYIDQKVELVSGSKTDEYLEQLDKALEICNSRFEPQLIVYNAGTDILDGDPLGRLKVSPEGVVTRDEKVFRFAKDRNIPLLMLTSGEILLTSL

SEQ ID NO: 69325 - protein, 177 aa, Zea mays
  Coding DNA Sequence Number=SeqID_27546
MPKLGCTISFIQEILAVILVMEKHSVLMNDIGQAFATNCNYTTTSSTQAAHERTNNLPDQNYQAHGCREQQGAKPRSRAQATQASDRASSAQRLRLARHRQPELVPSVQVLHPPVLSQLRGVTVPLPGDPQNDEQEKGIEQIRVWCSICRVRLCFCQQQKVLPILDELTLQPVNCEK

SEQ ID NO: 69326 - protein, 163 aa, Zea mays
  Coding DNA Sequence Number=SeqID_27547
  Gene Ontology: Mol. function=DNA binding; Cellular component =cytoplasm; Biological process=DNA integration
  Homolog annotation: Hit_ID=O24587; Match level="QueryCoverage=96%, HitCoverage=16%, E-value=6e-64, Identity=70%"; Hit description=Pol
  Pfam annotation: Domain name=rve; Domain location=2-144; Score=117.3; E_value=4.5e-32; Accession=PF00665.16; Description=Integrase core domain
MRTSRPLELLHMDLFKPVAYLSIGEDKSETQVTLKRFLRRSQNEFELKVKKIRSDNVSEFKNLQVEEYLEEEGIKHEFSAPYTPQQNGVVERKNMTLIDMAKTMFGEYKTPKRFWSEAINTACHAINRLYLHRLLKKTSYKLLTGKTKMFPAFVYLGANATSW

SEQ ID NO: 69327 - protein, 76 aa, Zea mays
  Coding DNA Sequence Number=SeqID_27548
  Gene Ontology: Mol. function=threonine endopeptidase activity; Cellular component=proteasome core complex (sensu Eukaryota); Biological process=ubiquitin-dependent protein catabolic process
  Homolog annotation: Hit_ID=O64464; Match level="QueryCoverage=85%, HitCoverage=51%, E-value=2e-16, Identity=47%"; Hit description =Proteasome subunit beta type 1
MAQLLSNTLYYKCFFPYYAFNVLGGLDSEDAVTPLSESEAIDLIKVVFASATERDIYTSKYMLFVLPGAVRGYENN

SEQ ID NO: 69328 - protein, 78 aa, Zea mays
  Coding DNA Sequence Number=SeqID_27549
  Gene Ontology: Mol. function=methyltransferase activity; Cellular component=cellulose and pectin-containing cell wall
  Homolog annotation: Hit_ID=Q6EP94; Match level="QueryCoverage=84%, HitCoverage=9%, E-value=6e-21, Identity=70%"; Hit description =Dehydration-responsive family protein-like
MRFPQDHLVYRERHCPASERERERLQCLVPALVGYQTPFPWPASHDVACFANVPHKELTVEKEVQEFDPCRREKVVCS

SEQ ID NO: 69329 - protein, 99 aa, Zea mays
  Coding DNA Sequence Number=SeqID_27550
MVDGDEHVFGELVLAEICNDWCPNLTNTKSYPGDTNPSTNCTNPGRNLSAHDDGENQRQSERAGHSEVLTVAQKANLGEIRNWEALVDDRRQRVGALDA

SEQ ID NO: 69330 - protein, 153 aa, Zea mays
  Coding DNA Sequence Number=SeqID_27551
  Gene Ontology: Mol. function=carboxyl- and carbamoyltransferase activity; Cellular component=ornithine carbamoyltransferase complex; Biological process=amino acid metabolic process
  Homolog annotation: Hit_ID=Q8SA97; Match level="QueryCoverage=59%, HitCoverage=20%, E-value=2e-10, Identity=43%"; Hit description =Ornithine carbamoyltransferase
MSLLKKAGCEHLKAIIQPEFLVLANDIREPSTEANALSEKFYSKVWMNGGREIADEAIKRSWGDVEAPPKPRSSLSSVAEVESEPLVRARRRPSAEARVESEPWVGRSGVRRLLGLSPSLNPGSGGAEFVVFWDLARVRALGRAERSSSSSGT

SEQ ID NO: 69331 - protein, 557 aa, Zea mays
  Coding DNA Sequence Number=SeqID_27552
  Gene Ontology: Mol. function=binding; Cellular component=nucleus; Biological process=mRNA editing
  Homolog annotation: Hit_ID=Q69MX4; Match level="QueryCoverage=94%, HitCoverage=87%, E-value=0.0, Identity=65%"; Hit description =Pentatricopeptide (PPR) repeat-containing protein-like
  Pfam annotation: Domain name=PPR; Domain location=153-187; Score =30.1; E_value=7.7e-06; Accession=PF01535.11; Description=PPR repeat
  Pfam annotation: Domain name=PPR; Domain location=215-249; Score =33.4; E_value=7.8e-07; Accession=PF01535.11; Description=PPR repeat
  Pfam annotation: Domain name=PPR; Domain location=277-311; Score =22.0; E_value=0.0022; Accession=PF01535.11; Description=PPR repeat
  Pfam annotation: Domain name=PPR; Domain location=381-415; Score =44.7; E_value=3e-10; Accession=PF01535.11; Description=PPR repeat
  Pfam annotation: Domain name=PPR; Domain location=416-450; Score=7.3; E_value=1; Accession=PF01535.11; Description=PPR repeat
  Pfam annotation: Domain name=PPR; Domain location=452-486; Score=1.3; E_value=5.2; Accession=PF01535.11; Description=PPR repeat
  Pfam annotation: Domain name=PPR; Domain location=518-552; Score =15.3; E_value=0.12; Accession=PF01535.11; Description=PPR repeat
  Pfam module annotation: Pfam domain module=PPR::PPR::PPR::PPR::PPR::PP R::PPR; Domain location=153-187::215-249::277-311::381-415::416 -450::452-486::518-552
  Subcellular localization annotation: CTP_CleavageSite=25; ConfidenceScore=5.42e-01
MPSPTLGHWRRRSLRATTALLLRLRDAAGPTTPRRLLLQSMAVVLTSGLSFSHPVLASRLLNSLLPHVPARRLPALLRLLPPDHLTLLLLSSAKHHHAQSLPAACALHALGLSYGHLPSDLRLANSLLSLYLSHGSTASARRLLADIPRPDTVTWNTLLRSFLRMGLLPAARRLFDEMPERDLVTYNSMLSGYAAEGDIANARELFDGMPERDVVTWNSMLAGYAQRGDMESAKRLFDVMPVRDVVSWNSMLDGYAQTGDIEMTRMVFDGMPRRSTVSWNVVLALYAKVKDWHECLNLFDAMMAVGGSKPNEKTFVSVLTACGHLGDLERGRWVHHLVHESWERLLPDVLLLTAMMTMYAKCGVMGTAKEIFDLMTERSVASWNSMIIGYGLHGYSEKALELFMEMEKNGPQPNETTFICILSSCAHGGLVLEGWWCFDRMVRFYNIEPKAEHFGCMMDLLGRAGLLRDSENLINNLQAKVSPALWGALISASRTQDSSKLGEFIGTKLIEMKPTEFSSYVLLSNIYATEGRWDDVEKVRKVMKEKVVEKDVGMSLV

SEQ ID NO: 69332 - protein, 79 aa, Zea mays
  Coding DNA Sequence Number=SeqID_27553
  Homolog annotation: Hit_ID=Q7XBD3; Match level="QueryCoverage=98%, HitCoverage=15%, E-value=7e-33, Identity=82%"; Hit description=Zeon1 gag protein
MIKGLRPGPTTQYFARKPPQTLEKLLQKMDEYIRADNDFLQRREEAYRYSEMTRGFGGRLHPRHVRTIHNPNTNDDRAN

SEQ ID NO: 69333 - protein, 67 aa, Zea mays
  Coding DNA Sequence Number=SeqID_27554
  Subcellular localization annotation: CTP_CleavageSite=55; ConfidenceScore=5.23e-01
MPSGRIADGVADEGASRSSMFRAAARPSLSSVANNREMEARRVDGRTRAGQNTSLAEHVRGRLLLLT

SEQ ID NO: 69334 - protein, 891 aa, Zea mays
  Coding DNA Sequence Number=SeqID_27555
  Gene Ontology: Mol. function=hydrolase activity, hydrolyzing O -glycosyl compounds; Cellular component=lysosome; Biological process =carbohydrate metabolic process
  Homolog annotation: Hit_ID=Q5NBJ1; Match level="QueryCoverage=99%, HitCoverage=98%, E-value=0.0, Identity=66%"; Hit description=Alpha -glucosidase-like
  Pfam annotation: Domain name=Glyco_hydro_31; Domain location=397-877; Score=209.1; E_value=1e-59; Accession=PF01055.16; Description =Glycosyl hydrolases family 31
  Subcellular localization annotation: CTP_CleavageSite=20; ConfidenceScore=5.27e-01
MASLKTAKKHHARLNNPFPRALAHAHDFPVGTRFRLRWDPSRGGEVSLSRVPPSSGGGAMWETVPGVAFLSVASVATEADECRGSFALRDGGARLVPDRQHVDKIRAFYRCDAEAGGSEPDLLRAAAFRPSDATRFPVLVVTGLVSAAKKAGASPSCTCCGLRLRAAGRRARSAAAAARPVLSARYWILLEEKSDTQVRFSVKIGDYQWTCSHADPAKSPPATATTTTTTPRLHRASLRLRLSARVQRATTSKRTRLAPAPSREREEASALLPAPERAEERRPEEFNRVFLTYASSRDERFFGFGEQFSHVEFKRKRVPVLVQEQGIGRGDQPITFAANLVSYRSGGNWSTTYAPSPFYMTSKMRSLYLEGYEYSIFDLTRPDRVQIQIYGNSVQGRILDGDSPTELLTSYTESTGRPPVLPRWITSGAVVGMQGGTDAVRRVWGQLKDYDVPVSAFWLQDWVGQRKTAIGSQLWWNWELDDAHYNGWNDLVDDLRSHGIRTMAYCNPCLVPMDEKPSAKRHLFEEARKLGILVRDDAGEPYMMPNTAFDVAMLDLTNPAAHAWFKSTVLRGMVDRGVSGWMADFGEGLPLDARLHSGEDSVAAHNRYPELWARVNREIADEWRASRRRAAAESDDIVDDDDGLVFFVRSGFRESSRWAMLFWEGDQMVSWQANDGIKSSVVGLLSGGLSGFPLNHSDAGGYCTVDLPPFLRYRRSEELLMRWMEVNAFTVVLRTHEGNRPGSNCQFYSSGRTLAHFARCAKMYKAWEFYRARLVGEAARTGLPVARHLFLHYPADERVQALTYQQFLVGTEMLVVPVLDKGRTAVTAYFPAGAGAWRHVWSGNEYGTGAGVQGGFEAQVEARIGYPAVFVRAGSSVGERFVSNLRNLTVL

SEQ ID NO: 69335 - protein, 116 aa, Zea mays
  Coding DNA Sequence Number=SeqID_27556
  Gene Ontology: Mol. function=transferase activity, transferring nitrogenous groups; Biological process=biosynthetic process
  Homolog annotation: Hit_ID=Q5GAQ3; Match level="QueryCoverage=67%, HitCoverage=15%, E-value=2e-11, Identity=51%"; Hit description =Putative alanine aminotransferase
MSRPQLGATSYPRRANGIASSYNRSPIHDRYDNLKETLQRSKDSASRFVERMQHTWTAAQMLWKSLLSVLSSANHGGIKGLRDEIAAHDGFHASADNIFLTDGASPTVHMILQLLI

SEQ ID NO: 69336 - protein, 155 aa, Zea mays
  Coding DNA Sequence Number=SeqID_27557
  Homolog annotation: Hit_ID=Q8W303; Match level="QueryCoverage=44%, HitCoverage=17%, E-value=7e-17, Identity=57%"; Hit description =Putative hydrogenase
MPCYDKKLEAVWDDFTLSVDGKEITEVDSVLTTGEVFHSAPVLKLTNVYEEGHLYGVSGDSRGYAETIFLVITEELGMNLENVEPHMLGSCKKVNIKVQAEEEGAHLPWMVGRGGGGAPSMDDGPPSNGERRSAVDLDGAGAVQWALVVERDNGG

SEQ ID NO: 69337 - protein, 55 aa, Zea mays
  Coding DNA Sequence Number=SeqID_27558
MEGAPSKMRHLIELLDPRQKRKVANLQLKVIRFGELANLHTPRKHVRLNILKVHS

SEQ ID NO: 69338 - protein, 176 aa, Zea mays
  Coding DNA Sequence Number=SeqID_27559
  Gene Ontology: Mol. function=Rab escort protein activity; Cellular component=Rab-protein geranylgeranyltransferase complex; Biological process=regulation of GTPase activity
  Homolog annotation: Hit_ID=Q9C8Z5; Match level="QueryCoverage=79%, HitCoverage=27%, E-value=5e-28, Identity=44%"; Hit description=Rab escort protein, putative; 48705-51166
MAEAGADSSNAAVDGGGGSVQNDYPTIDPTSFDVVLCGTGLPESVLAAACAAAGKTVLHVDPSPFYGSLYSSIQLSSLASFLSREATPPTSTVAAAASDWHTVVDLHRRIVYSEVETSGAAPEPARRFTIDLVGPRVLYCADEAVDLLLRSGGSHHVEFKSVEGGSLLYWEGCLYP

SEQ ID NO: 69339 - protein, 75 aa, Zea mays
  Coding DNA Sequence Number=SeqID_27560
MARGTIVKSDRTPRLLVDAALVMLKPRLREKRFHENPPKNPRCLATRISFSWLESHEKLIQPEMQLSLVSNFIML

SEQ ID NO: 69340 - protein, 123 aa, Zea mays
  Coding DNA Sequence Number=SeqID_27561
MAQAPFPMVELPQLAVVLPAPLSLVHGSGQGTISELPSMATPSPWQARLPQASVLGALAMDAQVLAPLLHAPGRVHQTSSPLGCPAGSPAPPSAHGARHPTGRNSALPALCARSPMAGHLMFT

SEQ ID NO: 69341 - protein, 482 aa, Zea mays
  Coding DNA Sequence Number=SeqID_27562
  Gene Ontology: Mol. function=hydroxymethylglutaryl-CoA lyase activity; Cellular component=mitochondrial inner membrane; Biological process=metabolic process
  Homolog annotation: Hit_ID=Q2PF06; Match level="QueryCoverage=63%, HitCoverage=72%, E-value=1e-115, Identity=68%"; Hit description =Putative hydroxymethylglutaryl-CoA lyase
  Pfam annotation: Domain name=HMGL-like; Domain location=194-462; Score=263.7; E_value=3.7e-76; Accession=PF00682.9; Description=HMGL -like
  Subcellular localization annotation: CTP_CleavageSite=84; ConfidenceScore=5.17e-01
MAKRTARLGLDPLKPDTVWVWLTRHTAIGCRRPKPRRNATHPLSVLSVLNSRLASSLPFPPAEASRSFSSETELTSSPAGRMLAASTKVGSRLASPHASLSAGAAAAALASSPVLGSGMLPGAGFGETGSHHAADAPPALPCSSSGDSREYYQWKRLVNQRQSTLDGGKVPAALGHHVLHDLPGYVKIVEVGPRDGLQNEKDIVPTPVKVELIRRLATSGLPVVEATSFVSPKWVPQLADAKDVMEAVRTMGGVRFPVLTPNLKAAIAAGAKEIAIFASASEGFSKSNINCTIKESIARYNDVALAAKEKEIPVRGYVSCVVGCPVDGPVPPSNVAYVAKELYDMGCYEVSLGDTIGVGTPGTVVPMLEAAISVVPVEKLAVHFHDTYGQSLSNILISLQMGVSVVDSSVAGLGGCPYAKGASGNVATEDVVYMLNGLGVKTGVDLGKVMAAGEFICRHLGRQSGSKAATALSKVTANASKL

SEQ ID NO: 69342 - protein, 256 aa, Zea mays
  Coding DNA Sequence Number=SeqID_27563
  Gene Ontology: Mol. function=Rab escort protein activity; Cellular component=Rab-protein geranylgeranyltransferase complex; Biological process=intracellular protein transport
  Homolog annotation: Hit_ID=Q8LLD4; Match level="QueryCoverage=92%, HitCoverage=44%, E-value=4e-50, Identity=44%"; Hit description=Rab escort protein
FANAEGTFIYPMYGHGELPQAFCRCAAVKGAIYVLRMPVVALLMDEEKKHFVGARLVSGQDILCQQLIIDPSYKTILDVPFDGSDSHFPRKVVRGVCIISKSVKQGSSNVLVIFPPKSLEEQQVTAVRLLQLSSNLAVCPLGMFMSYLSTPCTDVSVGKQCIKKAIDALYSPQASDGSEDHLETASESTEDVKPTLIWSCVYVQEITQGTAGPLLSCPMPDEYLDYRNILGSTKKLFAVSMLMKRSCLKVSSCICQ

SEQ ID NO: 69343 - protein, 69 aa, Zea mays
  Coding DNA Sequence Number=SeqID_27564
MGRATTRLIRATADMKVPTGWPYIALVGNSWRETCSVQMALYGLANIVVRKITANTGYKMLNARFGPPI

SEQ ID NO: 69344 - protein, 79 aa, Zea mays
  Coding DNA Sequence Number=SeqID_27565
MKKLDEEIQRQQEQVLKVAEKWSTLSTAGPSSPPSDHPTPYVGQSGGTRTGTHTPSHGSQRCLVRLDSPRIAPDHPVRS

SEQ ID NO: 69345 - protein, 59 aa, Zea mays
  Coding DNA Sequence Number=SeqID_27566
MVCFAGQTNGPQSDWANLIQENEDWASELCADRSADISDQEGILHRWVPIREKIFFDGA

SEQ ID NO: 69346 - protein, 517 aa, Zea mays
  Coding DNA Sequence Number=SeqID_27567
  Gene Ontology: Mol. function=hydrolase activity, hydrolyzing O -glycosyl compounds; Cellular component=extracellular region; Biological process=carbohydrate metabolic process
  Homolog annotation: Hit_ID=Q10P81; Match level="QueryCoverage=90%, HitCoverage=93%, E-value=1e-149, Identity=50%"; Hit description =Glycosyl hydrolase family 10 protein, expressed
  Pfam annotation: Domain name=Glyco_hydro_10; Domain location=164-454; Score=77.8; E_value=3.5e-20; Accession=PF00331.11; Description =Glycosyl hydrolase family 10
SMEAAAATTAAALLPPARKVFILPLLLLLAASSLVPRASSDGAQYDYRAYTECKPHPEPALYNGGVLRWASKITDFRTEDEGNYSPAFVLYNMSAATAYSFSCWVKIDGPESAHVKAKILTVENAASQCVGTAIARNDCWSFLKDCEPKCFYDLNQKPLLAAILTRSVESAQGGAKSILGNGPYQDGFNARFNAAVFENELKWYATEPSPGKEEYGAADQLLRFVQSNDVTARGHNIFWEDPRYTPAWVKNLTGPELRAAVAGRVQSLLSRYKGDFVHWDVSNEMLHFDFYEDRLGGNATADFFSTARRADPLATLFLNDFNVVEACDDLSSSADSYVSRLRQLADDAGVTFEGIGLEGHFAKPNVPYVRAVLDKLGTLRLPVWLTEVDVSAAFDHATQAAYLEDVLREGFAHPAVDGIVLWTAMGANATCYQMCLTDADFTNLPAGDVVDRLLGEWQTKEVLGATDDRGSFNFSAFYGEYRLSVTYLNRTADATFSLPRSDDTKHINIRLPPGPAA

SEQ ID NO: 69347 - protein, 49 aa, Zea mays
  Coding DNA Sequence Number=SeqID_27568
MASDAAQRPTQPPPTRGRSPAQCELSRDDALYQLKVLALMGLYQESGDN

SEQ ID NO: 69348 - protein, 150 aa, Zea mays
  Coding DNA Sequence Number=SeqID_27569
  Gene Ontology: Mol. function=metal ion binding; Cellular component =extrinsic to vacuolar membrane; Biological process=intracellular protein transport
  Homolog annotation: Hit_ID=Q9M621; Match level="QueryCoverage=75%, HitCoverage=25%, E-value=7e-14, Identity=38%"; Hit description =ReMembR-H2 protein JR702
  Pfam annotation: Domain name=PA; Domain location=42-119; Score=8.7; E_ value=0.042; Accession=PF02225.12; Description=PA domain
MSPRVVLLFLAALRPCAALVRLHSTTFSFTFLDAPARFGPRVSGDGICGSLRAADPAEACETIKDRGGRRGAGRKAFVLIARGNCSFEEKVRAAQQAGFDASIVYDDEEKASLYSREGLPRFIPCPEPAHMGTTIWEPPALGLPYWVCRY

SEQ ID NO: 69349 - protein, 84 aa, Zea mays
  Coding DNA Sequence Number=SeqID_27570
MRSATLLTICTLSALLLVARGSEKPSAAPPPVVAVGVAAASDLIRSGGHRYLDVSFTEECSEKTISLSETKHTLFVQTDSQFLQ

SEQ ID NO: 69350 - protein, 81 aa, Zea mays
  Coding DNA Sequence Number=SeqID_27571
MDKVAPNYLRHARVKFDTESRPFDTPWHEISPTSSAAWIRGQTSSGLQGRQPVPRRDRQRLPILARPFVGTLPMPVVDHGD

SEQ ID NO: 69351 - protein, 299 aa, Zea mays
  Coding DNA Sequence Number=SeqID_27572
  Homolog annotation: Hit_ID=Q6QP51; Match level="QueryCoverage=62%, HitCoverage=84%, E-value=1e-14, Identity=35%"; Hit description =Putative growth-regulating factor 1
MQAACNRTKGAHPFDFDASSMEAQAHTSCDRRAGYYVRETAPPHAPVPRLLDCGTGTEKGDTLKGILLREGSGPRAPLLIRGSKAGPSEGFNSRLRALGLRAHYWSEVRRLAPQKGSTAASGHPGSAPTTDQGFVGWPSKGSDSCLRARRARDDPGYVRYITKARATLPRLSLGSGRRRTPPRPTQGLDSTTTQKTTDSASPDPRARTQARLRKTVSASPEPRARAQPRRWMTNSASPDPRARTQPRPRKMVSVSPDPGLGLDLDFGRQTRPRPRRSLRLARPRARTDHVTGGPSLPYP

SEQ ID NO: 69352 - protein, 162 aa, Zea mays
  Coding DNA Sequence Number=SeqID_27573
  Gene Ontology: Mol. function=metal ion binding; Cellular component =extrinsic to vacuolar membrane; Biological process=intracellular protein transport
  Homolog annotation: Hit_ID=Q9M622; Match level="QueryCoverage=85%, HitCoverage=44%, E-value=4e-27, Identity=44%"; Hit description =ReMembR-H2 protein JR700
  Pfam annotation: Domain name=zf-C3HC4; Domain location=95-136; Score =33.8; E_value=5.8e-07; Accession=PF00097.15; Description=Zinc finger, C3HC4 type (RING finger)
MAGETLKKFARGEDEECCINSSMDETAGTVLVMSFVSLVVIMSVLASFLFARNCRLLRHGVDNHPPYVKKQVVEKFPCSAYSAPCSSEDNFQEACAICLEDYNNGDMLRHLPCKHEFHKICIDSWLTKWGIFCPICKLEVTLGGWLKTMVLGGGSQESMVLK

SEQ ID NO: 69353 - protein, 81 aa, Zea mays
  Coding DNA Sequence Number=SeqID_27574
MKGIFAFGKKSIPWKQYCNCSIAMTKKRGYLLLTKAAKVPLERISIPLTAARLEDHISECSIVILRWEEAEDDSEQQEAAT

SEQ ID NO: 69354 - protein, 174 aa, Zea mays
  Coding DNA Sequence Number=SeqID_27575
  Subcellular localization annotation: CTP_CleavageSite=53; ConfidenceScore=5.27e-01
IIIFVTRKVGSPLARRIGISSACPAATCRRVLLQRPRTPTHGSKEVGVADRPQLASRSQFSSDNSSWTALNSGYYTSLLSQDVADDFVSVDYVQVDIEVVQSPGLNEMSSHSTKRHEPKWTFKDSKLKDLHEANSNGPVNVDKPLGRKDDERENMMAAIWVQDEVEMQRRPKQQ

SEQ ID NO: 69355 - protein, 334 aa, Zea mays
  Coding DNA Sequence Number=SeqID_27576
  Gene Ontology: Mol. function=DNA binding; Cellular component=nucleus; Biological process=regulation of transcription
  Homolog annotation: Hit_ID=Q1T126; Match level="QueryCoverage=88%, HitCoverage=85%, E-value=4e-26, Identity=31%"; Hit description=Myb, DNA-binding
MDGLPDADTAPVAAAPAQKRDEWSESGILRLLEAYEAKWLLRNRAKLKWSDWVDIAREVSVHCADDAAAAGKPPGHGGGSSAKTPNQCKNKIESMKKRYRAEAAAAARAGPAAAGPTWRFFARMDGLLKGPPVCSAQVQQPELTSSIDLRAPAKPEAEVELADFATQLREAVPVPGAFSDLMNIDTNGAVPDKAEKVDNSMQKESRPADSDANVSSPRSKVADEDVEEVDKAWDRPSKRKSTEFDIAKSIELLASSFLKIEHARMEMYRETERMRVEAEIKKGEMELKRTEIMAKTHLQIARLFAKKLKQSSGKNGVSSSVTAEVDTLTKKGEN

SEQ ID NO: 69356 - protein, 109 aa, Zea mays
  Coding DNA Sequence Number=SeqID_27577
MSTWKAHTGGDDPGRTEDGTRSHRVTEMTEEEGGEFGGTEALKTESREKGGREELLTEGKSAVEVAGVQQGWSPPVKLAGGGEIAPGQRARVLGERKGPLAWLGLEAVF

SEQ ID NO: 69357 - protein, 337 aa, Zea mays
  Coding DNA Sequence Number=SeqID_27578
  Gene Ontology: Mol. function=transmembrane receptor activity; Cellular component=integral to membrane; Biological process=defense response to bacterium
  Homolog annotation: Hit_ID=Q1SI21; Match level="QueryCoverage=94%, HitCoverage=51%, E-value=1e-125, Identity=67%"; Hit description =Nonaspanin
  Pfam annotation: Domain name=EMP70; Domain location=51-337; Score =118.8; E_value=1.6e-32; Accession=PF02990.7; Description =Endomembrane protein 70
MLRWAAALAVLLAVAAPAAGFYLPGVAPSDFAKGDPLPVKVNKLTSIKTQLPYTYYSLPFCKPDTIVDSAENLGEFKMGEPKMCQIVCRAPITEKEAKELKEKIEDEYRVNMILDNLPLVVPVTRQDKNSIAYQGGYHVGAKGLYSGTKDEKYFIHNHLSFTVKYHKDDNLEHSRIVGFEVNPHSVKHQVDDKWNGVDTRLSTCDPHASKFVINSDSPQEVEVGKEIIFTYDVRFEESEIKWASRWDTYLLMTDDQIHWFSIVNSLMIVLFLSGMVAMIMLRTLYRDISRYNQLETQEEAQEETGWKLVHGDVFRPPTYSDLLCVFVGTGVQFFGML

SEQ ID NO: 69358 - protein, 479 aa, Zea mays
  Coding DNA Sequence Number=SeqID_27579
  Gene Ontology: Mol. function=protein binding
  Homolog annotation: Hit_ID=Q75KA7; Match level="QueryCoverage=86%, HitCoverage=74%, E-value=9e-07, Identity=22%"; Hit description =Expressed protein
  Pfam annotation: Domain name=BTB; Domain location=53-169; Score=-5.6; E_value=0.013; Accession=PF00651.21; Description=BTBPOZ domain
  Subcellular localization annotation: CTP_CleavageSite=25; ConfidenceScore=5.35e-01
FVILKLVVFGFASLASVLLACPIRRAASRLSFLGVFLACLCRGNGMRAGRPKIGDQATSDVVVRLRTPEGRDEWLYCHSAVLAAGSTYFADRLSDAWPTCQILGSRYCVEVYCQELDLSSYVTALRLLYAIEPCSHFGVRGALGVLQAAVHLGCGQIAAACAGYIESAPWEEADEEEILRTVPGLGPQYECILARLRPIDPAPVTSIFLSAFRHATLSSAAGPARELKSAAQEQLEYMLTEDDDAPLVALDNDTVKSQVKDCATALLSQFSAFMSSILTKQKEAPPLDGEHGQLQQELQFFLCDISWVSQVLSKLEMMKCIVVYWVGVSTDMVETVDAVCTGDDCLKTRLKVVEVSAKVLEAVAFGNVILPAEKRRHMVNLWIRFARVTKSLADQADQDGDGEAETPKENLDNEVWQGLESAIVSIVLTLPSNSQAEILSEWLQSKHVRYPDLTEAFEAWCYRSKVAKRRLSFLSDIGQ

SEQ ID NO: 69359 - protein, 50 aa, Zea mays
  Coding DNA Sequence Number=SeqID_27580
LGRSKEDERDLQSSTPPPDHHPFVPDPDRCCTSSSRRSASSSDSAAAESR

SEQ ID NO: 69360 - protein, 104 aa, Zea mays
  Coding DNA Sequence Number=SeqID_27581
  Subcellular localization annotation: CTP_CleavageSite=65; ConfidenceScore=5.18e-01
MATASHLTLSSQAPGRSDTAYIQCFGDAPSYYPSVVSLVALQGRRSRERARGQARGRNKEEERCRASPLPRTLDSATNRGQVETESEVGVGRRVPWMEVATNRS

SEQ ID NO: 69361 - protein, 263 aa, Zea mays
  Coding DNA Sequence Number=SeqID_27582
MAHRTVRCTPDSPVPPSDRWLGHVSRADCAADRWPGRPLTHRTVRCTPDSPSRSDRRHSAAPLTGLTEGQRRLRHSDCSATRQSESDRQSGLARGAIGNSAPPDPRARTRAKTRKTANSAPPDPRARTRAKTRKTVNSAPPDPRARTRAKTRKTANSAPPDPRARTRAKTRKTANSASPDPRARTRAKTRKTANSAPPDPRARTRAHPQKTTKLYLARPQGSDSAPDLGRTISASPDPGARARPRPRKTDSTSASEEPPRRPT

SEQ ID NO: 69362 - protein, 41 aa, Zea mays
  Coding DNA Sequence Number=SeqID_27583
MAAAAGRWNVRRCGYVRSDTEDRNSNAFGEADVMLTAGARM

SEQ ID NO: 69363 - protein, 306 aa, Zea mays
  Coding DNA Sequence Number=SeqID_27584
  Gene Ontology: Mol. function=sequence-specific DNA binding; Cellular component=nucleus; Biological process=regulation of transcription
  Homolog annotation: Hit_ID=Q94J08; Match level="QueryCoverage=99%, HitCoverage=96%, E-value=7e-48, Identity=66%"; Hit description=WRKY transcription factor-like
  Pfam annotation: Domain name=WRKY; Domain location=88-148; Score =132.7; E_value=1e-36; Accession=PF03106.6; Description=WRKY DNA -binding domain
MSSAEDGYCSSDSPRAESPDEPQAGADAESPRAGAGLNKRERDLPASPSSPLPPAKRSRRSVEKRVVSVPLAECGDRPRGASGEGPPPSDSWAWRKYGQKPIKGSPYPRGYYRCSSSKGCPARKQVERSHADPTALLVTYTFEHNHEAPQPKTSGGSCCHQQGKPSARPPAPKPEPSVVLVQRDELGPEHELVETEVPEQEQETEPEEEHEPAEEGVPCLAGPEAAATLTVAPAAEEDESFDFGWFDQYPTWHRSALYAPLLPPEEWERELQGEDALFAGLGELPECAVVFGRRRELSLAATAPCS

SEQ ID NO: 69364 - protein, 114 aa, Zea mays
  Coding DNA Sequence Number=SeqID_27585
  Homolog annotation: Hit_ID=Q6KC47; Match level="QueryCoverage=32%, HitCoverage=11%, E-value=4e-10, Identity=78%"; Hit description=S -adenosylmethionine decarboxylase
  Pfam annotation: Domain name=AdoMetDC_leader; Domain location=64-114; Score=108.7; E_value=1.8e-29; Accession=PF08132.2; Description=S -adenosyl-l-methionine decarboxylase
MADVMDDVIVMQDPASGIKNRRKTHVDVFLSGQIDSYAMEIHRLIRPFHSRSWFKEIAFVDALMESKGGKKSSSSSSNFMYEAPLGYKIEDVRPAGGIKKFQTAAYSNCVRQPS

SEQ ID NO: 69365 - protein, 136 aa, Zea mays
  Coding DNA Sequence Number=SeqID_27586
MARRGGWPVIGVVEGGIGGEMAAIAVVGGDGAAGRMAGDWRCRGRDWRGDGVAGRGRRRAGGGVAAHGRWSGGARAAHKLRPISGADRKLRAPYSLNMAVNLPSSCLKLYKTQTKSENHETCPHVMISYVEAVIKI

SEQ ID NO: 69366 - protein, 246 aa, Zea mays
  Coding DNA Sequence Number=SeqID_27587
MDGGLIPKNFKGLSAKSFGRRGICKPQPLDHQPRARIRSGVHRKRYAILAVRSNIDDADTIKAWSDLHCTSTDLWTRSDPTKREPSSSLQRWATVPCPHAAKLAGVQATRGTGAQNRVCLGATRNEGEIEFSGRLLTEVWHTGEAGRDAQWDHGCALSTASTQAGAGGHHRSKTSRRASIRSRTLPRPAAELRTSRIAFVHDTRRSAVALGLRHDILVSQMCLPIREGHGGFIPQVPEGIAQVVDS

SEQ ID NO: 69367 - protein, 79 aa, Zea mays
  Coding DNA Sequence Number=SeqID_27588
MGGNGSLCSPEQRGRRTEGEMDGLLTERDEEKHKVAVGSPPVKRWTPARGGIARDREKSLAGRRSIGTLIYFSKYFAIG

SEQ ID NO: 69368 - protein, 95 aa, Zea mays
  Coding DNA Sequence Number=SeqID_27589
MKGVGLGHIADKEPMFAGSLSSSVVGDGSHHCNERDRTCWAGRRRHDDEQVTGSFDIGVENFSYDRTKGNKEWTTKLEAKELRLDMLTKLKCDND

SEQ ID NO: 69369 - protein, 209 aa, Zea mays
  Coding DNA Sequence Number=SeqID_27590
  Gene Ontology: Mol. function=nutrient reservoir activity; Cellular component=anchored to membrane; Biological process=cell adhesion
  Homolog annotation: Hit_ID=Q651Y5; Match level="QueryCoverage=60%, HitCoverage=52%, E-value=1e-46, Identity=69%"; Hit description =Fasciclin-like arabinogalactan-protein 2-like
  Pfam annotation: Domain name=Fasciclin; Domain location=5-122; Score =24.2; E_value=3.5e-05; Accession=PF02469.12; Description=Fasciclin domain
MAKGGCKALSGLIAASPDASSTYQSAVEGGMTYRNLSADGKAELLLFHAVPVHYSLGSLKSNNGPMNTLATDGAARNFNFTVQNRGDVVTIATAASAPARVKSTALDEDPLAIYVISAVVEPVELFKPAPAPVPAPAPAPASVADAPRPGKAAAGRRHPPPAAADAPGPAAEDNAAPVDQKDAKKSAAAGAPCALWWLAAALAAASALA

SEQ ID NO: 69370 - protein, 344 aa, Zea mays
  Coding DNA Sequence Number=SeqID_27591
  Gene Ontology: Mol. function=transferase activity; Cellular component= histone acetyltransferase complex; Biological process=regulation of transcription
  Homolog annotation: Hit_ID=UPI0000162BA0; Match level="QueryCoverage =98%, HitCoverage=8%, E-value=1e-122, Identity=68%"; Hit description =inositol or phosphatidylinositol kinase/ phosphotransferase, alcohol group as acceptor
MAPINSGNMEQHSQRLLEPDLPVQVRLQLAMEVRDSLEMTHTPDYLNFLRCYFRAFSAILTAYTKPQATENAEHKLRNVVIEILNRLPHSEVLRPFVQDLLKLSLRVLTQDNEDNALLAIRIVFDLLRNFRPTVEAEVQPFLDFVVNIYHKFPTTVSYFFDNPNTSASMAASMPMQHLDPTADASVMMQVPGGGQLNPSARSFKIVTESPLVVMFLFQLYAKLVQTNIPHLLPLMVAAISIKGPDKVPPHLKTPFNDLKGAQVKTLSFLTYLLKSNADYIKSYEESICKSIVNLLVTCPPDSVSIRKARYDLELLVGLKQVLNTEYKRGLFPLIDTLLDESYFW

SEQ ID NO: 69371 - protein, 190 aa, Zea mays
  Coding DNA Sequence Number=SeqID_27592
MSVRVTWERRGQAVVAVPIASADPQIPDFPKPAIRAINRSKMVIDVVLLGYRSYTGQRQLEHCELAGGCFTAHWLVAGGWLEHYALAGVWRLEHCALAGGQGQRLEHCCTGRRRLDLKQWHHGACRWREEGGPEEGGGGPAAYLQSGGRGRPASGIPRLALAAGWRLGVILTGKAAGLASELVAGWVKAH

SEQ ID NO: 69372 - protein, 61 aa, Zea mays
  Coding DNA Sequence Number=SeqID_27593
MERAAPVASLLGGRLAGDSGEHGGGLCGPGPSGAGLEDGANNPTPPLAAQSSRAWDRGGPK

SEQ ID NO: 69373 - protein, 842 aa, Zea mays
  Coding DNA Sequence Number=SeqID_27594
  Gene Ontology: Mol. function=binding; Cellular component =intracellular; Biological process=RNA processing
  Homolog annotation: Hit_ID=Q8LIB1; Match level="QueryCoverage=96%, HitCoverage=97%, E-value=0.0, Identity=62%"; Hit description =Putative adapter protein ATH-55
  Pfam annotation: Domain name=HAT; Domain location=456-488; Score=2.0; E_value=13; Accession=PF02184.7; Description=HAT (Half-A-TPR) repeat
  Pfam annotation: Domain name=HAT; Domain location=529-563; Score=6.4; E_value=2; Accession=PF02184.7; Description=HAT (Half-A-TPR) repeat
  Pfam annotation: Domain name=HAT; Domain location=638-671; Score=5.4; E_value=3.1; Accession=PF02184.7; Description=HAT (Half-A-TPR) repeat
  Pfam annotation: Domain name=TPR_2; Domain location=273-306; Score =6.9; E_value=5.1; Accession=PF07719.7; Description=Tetratricopeptide repeat
  Pfam annotation: Domain name=TPR_2; Domain location=476-509; Score =10.0; E_value=2.3; Accession=PF07719.7; Description=Tetratricopeptide repeat
  Pfam annotation: Domain name=TPR_2; Domain location=515-548; Score =1.8; E_value=20; Accession=PF07719.7; Description=Tetratricopeptide repeat
  Pfam annotation: Domain name=TPR_2; Domain location=551-584; Score =3.3; E_value=13; Accession=PF07719.7; Description=Tetratricopeptide repeat
  Pfam module annotation: Pfam domain module=HAT::HAT::HAT::TPR_2::TPR _2::TPR_2::TPR_2; Domain location=456-488::529-563::638-671::273 -306::476-509::515-548::551-584
MPSASGPVAVASAPAPVKSAPSLAVGISPDLYPTEDDLPYEEEILREPFKLKGWWRYLVARATAPFAKRAVIYERALKALPGSYKLWHAYLRDRLDHARPHPIDHPAYSSLNNTFERALATMHKMPRVWVLYLTSLLDQRLLTRARRAFDRALRALPVTQHDRIWPLYLRLASLPACPVETSLRVFRRYLQFDPSHAEDFINFLISANHWQEAANRLASVLNDDGFRSVKGKTRHQLWLELCEILTKHADEVAGLKVDAILRGGIRKFTDEVGKLWTSLADYYVRRGLFEKARDVFEEGVSSVVTVKEFSVVFEAYTQFEQSMLAAKLEAAEEEGAEDENEGGGRKSGMDKLSKKFLNEFWLNDEDDTDLRMARFERLLDRRPELLSSVLLRQNPHNVEEWHRRVKLFEKDPARQNIHANNMIDAAAAEGDEPVQMKVHKSLKLWSFYVDLEESLGTLDSTRAVYERILDLRIATPQIILNYAYLLEEHKYFEDAFKVYERGVKIFKYPHVKAIWVTYLTKFVHRYKRSKLERARELFHEAVQQAPAEEKKPLYLQWAKLEEDYGLAKRAMNVYDEAVRAVPNSEKMAMYEIYIARAAELFGVPRTRQIYEQAIESGLPDRDVLTMCMKFAELERSLGEIDRSRAIYVHASNYADPNNPDFWKKWNDFEIQHGNEDTFREMLRIKRTVAASRSQTHFILPEYLMQRDQKLNLDEAVDTLKRAGVPEDEMAALERQLATGPSTAPPAAPSTAPASANRMMNFVSAGVEAQVESSRQQAANNEDIELPDESDDEEPDVQIAEKSVPAAVFGELGKRAAENNEESSGAQGNEQLGALERIKRRRQ

SEQ ID NO: 69374 - protein, 285 aa, Zea mays
  Coding DNA Sequence Number=SeqID_27595
  Homolog annotation: Hit_ID=Q10KZ9; Match level="QueryCoverage=99%, HitCoverage=100%, E-value=1e-114, Identity=63%"; Hit description =Nodulation protein, putative, expressed
MHPYSLKSSKGAPILPRPVFVFFIATFGFYVCYLSFNQITLENNREGNSREEQRDDICRKPYVPYEELSYVHFPKPTSYSRGECSCTPVRFFVIVSMQRSGSGWFETLMNSHPNISSNGEIFNRMDRRENISSILQTLDTLYNLDWLTSAAKNECTAAFGLKWMLNQGILENPEDIVSYLNKKGVSVIFLFRRNTLRRLVSVLANDYDKDAKQLNGTHKSHVHSKEEALSRVQEFLRVPVRRLMSRQVKIHTRPLPDLVKNWEEVSSKLNGTEFAHFLDGSDYAK

SEQ ID NO: 69375 - protein, 183 aa, Zea mays
  Coding DNA Sequence Number=SeqID_27596
  Homolog annotation: Hit_ID=UPI0000162BA0; Match level="QueryCoverage =95%, HitCoverage=4%, E-value=3e-44, Identity=53%"; Hit description =inositol or phosphatidylinositol kinase/ phosphotransferase, alcohol group as acceptor
MGSSAGSHIRQGQRPELDSSVNSRSTIDSTVISNMKTVLKLISERVMSSSDHRKSMGQILQALLSEKGTDSSILLCMLDMIKTWIEEDCRLASSTGSVSSLNPKEIITYLHKLSLVDRKSFPPAAQEEWDAKYLQLLYSLCADSTKYPLSFRQEFFHKIERQYMLGLRAKDPEMRKAILQALP

SEQ ID NO: 69376 - protein, 314 aa, Zea mays
  Coding DNA Sequence Number=SeqID_27597
  Gene Ontology: Mol. function=catalytic activity; Cellular component =histone acetyltransferase complex; Biological process=metabolic process
  Homolog annotation: Hit_ID=UPI0000162BA0; Match level="QueryCoverage =94%, HitCoverage=7%, E-value=1e-97, Identity=59%"; Hit description =inositol or phosphatidylinositol kinase/ phosphotransferase, alcohol group as acceptor
MGFDAAAYGWDKGSGGFIDLALPEDQFYSEINSPYRAPLAKFLNRYVLEAVDYFLARLSHPKYFRRFMYIICSDTGDLRDALARSPQKILASAFSQFYSQSEASAAQLSSVKDEALTGAVSESITVQSSSNMVTTSESYFNGLELVSALVKLMPEWLRNNRVVFDTLLLAWKSPARLARLQNEQDLSLPQVMESKRLIKCFLNYLRHDRTEVGALFDMLSVFLYRSRIDYSFLKEFYVIEVAEGYSPNLKKTILNHFLNIFQSKQYGQDHLVVTMQILILPMLAHSFQNGQSWEVVDPTIIKTIVEKLLDPPEE

SEQ ID NO: 69377 - protein, 142 aa, Zea mays
  Coding DNA Sequence Number=SeqID_27598
  Gene Ontology: Mol. function=peptide deformylase activity; Cellular component=mitochondrion; Biological process=translation
  Homolog annotation: Hit_ID=Q9FUZ0; Match level="QueryCoverage=96%, HitCoverage=47%, E-value=3e-42, Identity=67%"; Hit description =Peptide deformylase, mitochondrial precursor
  Pfam annotation: Domain name=Pep_deformylase; Domain location=2-123; Score=-29.3; E_value=9.8e-06; Accession=PF01327.11; Description =Polypeptide deformylase
MELQIIVLEDTQEYISYAPKKDIEAQDRRPFDLLVGTSCLVRGRPLSIWNPSHALCFSLDTHSVDGYRAVVERHLDVEVSGLDRNGSTMKVRASGWQARILQHECDHLEGTLYVDKMVARTFRVVENLDLPLPTGCPQLGAR

SEQ ID NO: 69378 - protein, 48 aa, Zea mays
  Coding DNA Sequence Number=SeqID_27599
MAVVGDSNRRRFRLGLYLSPLPHPIGKSPAKGALIVAVAHESEPNLIS

SEQ ID NO: 69379 - protein, 209 aa, Zea mays
  Coding DNA Sequence Number=SeqID_27600
  Gene Ontology: Mol. function=DNA-dependent ATPase activity; Cellular component=nucleus; Biological process=DNA metabolic process
  Homolog annotation: Hit_ID=Q69KV4; Match level="QueryCoverage=92%, HitCoverage=69%, E-value=2e-57, Identity=64%"; Hit description=Trad -like protein
VCLHSASHAPVKHTGVVMYLDTSNSFSPSRIATIIDGTNDLSDQKGFDLLSKERLKTVMQSIICESVFDIFGMFEVLHQLEVSLLNEKVIGDGRRICLLIIDSISSLLAPIIGGKYPQGRSMMISLAMILKKLAYEHNLAVLVTNHMVSAGNGAVKPALGESWKSVPHVRLMISREHSSNICTGTVLKHTLLVFPLAIQLYFYLSLQQQ

SEQ ID NO: 69380 - protein, 304 aa, Zea mays
  Coding DNA Sequence Number=SeqID_27601
  Homolog annotation: Hit_ID=Q10D64; Match level="QueryCoverage=49%, HitCoverage=30%, E-value=1e-60, Identity=76%"; Hit description =Transducin family protein, putative, expressed
  Pfam annotation: Domain name=SHMT; Domain location=1-85; Score= -228.1; E_value=0.002; Accession=PF00464.10; Description=Serine hydroxymethyltransferase
SLISKGYELVSGGTDNHLVLVNLKNKGIDGSRVEKVLESVHIAANKNTVPGDVSAMVPGGIRMGTPALTSRGFVEEDFAKVADFFDAAVNLALKIKAATTEENEVTLLAFLFASRSTSYDPQIHRPALPLLSQFSRPLYRSSTTASGKKQMKDSDGEGTGGGVARSHPSNLPLPTPQSDPNLQFSGGTDDESSSRNSSSSATGGASPGYYSDYPSSFSGECSPYNMSPWNQTMASPWSHHNEASAAGLGGPPTMAPGTSLISSLVREEGHIYSLAAKGDTLYTGSASKNIRVWRKQKDSGGNEI

SEQ ID NO: 69381 - protein, 396 aa, Zea mays
  Coding DNA Sequence Number=SeqID_27602
  Gene Ontology: Mol. function=phosphotransferase activity, alcohol group as acceptor; Cellular component=cytoplasm; Biological process =mRNA catabolic process, nonsense-mediated decay
  Homolog annotation: Hit_ID=Q10D72; Match level="QueryCoverage=88%, HitCoverage=9%, E-value=1e-167, Identity=85%"; Hit description =Phosphatidylinositol 3-and 4-kinase family protein, expressed
  Pfam annotation: Domain name=PI3_PI4_kinase; Domain location=181-383; Score=-50.2; E_value=0.021; Accession=PF00454.17; Description =Phosphatidylinositol 3- and 4-kinase
VLRRINILKDEAVRVAANSTLSSAEKNKINAAKYSAVMTPIVVALERRLVSTSREPKTPHEMWFHKEYNAKLKSAVTTLKMPPGSPAALGEIWQPFDSIAASLATHQRRSHIMLSEIAPQLAVLSTSDIPMPGFEKILGSSESFSGNHGIVTISSFCKEVTILSTKTRPKKLILQGSDGQRYTYLLKGREDLRLDSRIMQLLEAINSLLYSSSDTRSRNITLRFYSVTPVSGRAGLIQWVENVSSIYNVYKSWQKRSQLAHAHAEAQVSSVSTGNIHNPVAPVPRPSDMFYGKIIPALKEKGIKRVVSRRDWPLDVKRKVLLELMNETPKQILWQEMWCASEGFRNFNSKGFGDFLDLREKVLLIIQAIFSIFNLKLMLILGTLVKNFVYIRPCWS

SEQ ID NO: 69382 - protein, 61 aa, Zea mays
  Coding DNA Sequence Number=SeqID_27603
  Homolog annotation: Hit_ID=Q96Q15-3; Match level="QueryCoverage=91%, HitCoverage=1%, E-value=2e-12, Identity=47%"; Hit description =Isoform 3 of Q96Q15
  Pfam annotation: Domain name=FATC; Domain location=29-61; Score=48.8; E_value=1.8e-11; Accession=PF02260.10; Description=FATC domain
MATGKNPFALSILKQVEHKLHGQNIDGTRSLNISEQVDYLLKQATSIDNLCNMYEGWTPWI

SEQ ID NO: 69383 - protein, 103 aa, Zea mays
  Coding DNA Sequence Number=SeqID_27604
  Gene Ontology: Mol. function=DNA binding; Cellular component =mitochondrion; Biological process=DNA integration
  Homolog annotation: Hit_ID=Q1SX87; Match level="QueryCoverage=97%, HitCoverage=7%, E-value=3e-24, Identity=56%"; Hit description =Polynucleotidyl transferase, Ribonuclease H fold
  Subcellular localization annotation: CTP_CleavageSite=50; ConfidenceScore=5.32e-01
MSSPTSKLVVYTDADWNGCPNTCRSTSGYIVFLGANHVSWSSKRQPVVSRSSAEAEYRALPPRGRGVMALSAGIRAPHPLAWATLIYCDNVRVVYLYTDLVQH

SEQ ID NO: 69384 - protein, 216 aa, Zea mays
  Coding DNA Sequence Number=SeqID_27605
  Gene Ontology: Mol. function=glycine hydroxymethyltransferase activity; Cellular component=mitochondrion; Biological process=L -serine metabolic process
  Homolog annotation: Hit_ID=Q7Y1F0; Match level="QueryCoverage=92%, HitCoverage=37%, E-value=1e-105, Identity=91%"; Hit description =Putative glycine hydroxymethyltransferase
  Pfam annotation: Domain name=SHMT; Domain location=51-216; Score =51.8; E_value=2.3e-19; Accession=PF00464.10; Description=Serine hydroxymethyltransferase
MAMATALRKLSANALRRQPLSRITPLYYMASLPATEERSGITWTKQLNAPLEEVDPEIADIIEHEKARQWKGLELIPSENFTSVSVMQAVGSVMTNKYSEGFIDMAESLCQKRALEAFRLDPAKWGVNVQPLSGSPANFHVYTALLKPHERIMALDLPHGGHLSHGYQTDTKKISATSIFFETMPYRLDESTGLIDYDQICNKQKGNYFLADWATY

SEQ ID NO: 69385 - protein, 161 aa, Zea mays
  Coding DNA Sequence Number=SeqID_27606
  Homolog annotation: Hit_ID=Q10D72; Match level="QueryCoverage=87%, HitCoverage=3%, E-value=2e-44, Identity=60%"; Hit description =Phosphatidylinositol 3-and 4-kinase family protein, expressed
  Subcellular localization annotation: CTP_CleavageSite=41; ConfidenceScore=5.07e-01
MGWACAGPNTSSAGGSTAKGSGIPPEFHGHLLKRRKLLRVVQKEASDLVKVCTSVLEFEASRDGLYFVPEDKASEQSSDKGRAWHQTFLNLLARLDAAFHSFTCAEQEWKLGQLSLEAAGKGLFSANNQVSVVSVKANSALVSGLVRYACIYRCIIDCVRD

SEQ ID NO: 69386 - protein, 736 aa, Zea mays
  Coding DNA Sequence Number=SeqID_27607
  Gene Ontology: Mol. function=phosphotransferase activity, alcohol group as acceptor
  Homolog annotation: Hit_ID=Q10D72; Match level="QueryCoverage=91%, HitCoverage=17%, E-value=0.0, Identity=63%"; Hit description =Phosphatidylinositol 3-and 4-kinase family protein, expressed
MLQANTDWGKMTAGLGGGRATTLLVGAGERIGTGELWLLVPLPLTVVSFSQEHKDLFLTNLPATVSSLKKFLDILDQYEVASAIFYHAEKERSSVLQHEMSAKLVLADATSGAEKSRTSFEIHAHELAEAKAAAVDEANKLAIWVEKHALVLEAIRENSVACIESCMQLNCKDKTLSLISAVLESGVPLTVVPEPTRAQCSELDREISQLLSELQGGLSSALDSLGEYSLVLKQVLPVNYITTSPVTSWAQVLQRSVRSTSQDMLSLAKIQAAEVIAKVQGEGINLVQQRYQDLVNQMESYVSCVEKLARECSELMNSIGLNNEVQSKERILSVFMNSVQLPSQKKDGDSTHLSHSGSPQQGEIKTPAKGDVQETTGKVLSILGIAVSQLYGDIRAKVSELSIKAIGKAKFRTDDSGLQADAGMSLQVFEQHIEKCALISGVVDEVHEVIGRTLAETSAAYAKPSPRHWASTFQAALHSSINLIEQMTEAFLPEFIRSVVPHNSEVKETVRSISEVRGSVDNALEKLIEVELERTSLAELEQNYSVKVGRITEQQIALEEAAARGREHLSWEEAEELASQEEICRAQLEQLHETWRQKDMRILSLMKVEDNIMNSLLSSKQYVSSLVDHDQESEFHYGQIKALLSIFAKPFADLESLDHMLSSSGMFPHIDNPISNIKDALSLGSSLSDVVWPLAGILKDHAFFVWELNLLDSVLVLCMREISSSLEHGIMPINFT

SEQ ID NO: 69387 - protein, 703 aa, Zea mays
  Coding DNA Sequence Number=SeqID_27608
  Gene Ontology: Mol. function=phosphotransferase activity, alcohol group as acceptor
  Homolog annotation: Hit_ID=Q10D72; Match level="QueryCoverage=86%, HitCoverage=20%, E-value=1e-158, Identity=68%"; Hit description =Phosphatidylinositol 3-and 4-kinase family protein, expressed
  Pfam annotation: Domain name=HEAT; Domain location=142-180; Score =0.6; E_value=37; Accession=PF02985.12; Description=HEAT repeat
  Pfam annotation: Domain name=HEAT; Domain location=58-95; Score=17.3; E_value=0.054; Accession=PF02985.12; Description=HEAT repeat
  Pfam module annotation: Pfam domain module=HEAT::HEAT; Domain location=142-180::58-95
MQTPRPSYAHHQLQQHLSSLLSAAAADPPHPSDDASRTAALSNLRLSFLHPPNRPLLPALAPFLAPPLSVLLADDASYAVRRAAVSAYAALCAVLCSHEAPGGLPDGFVAWALPLLGDPSSAALVAEGLRELLSTGDVSPVERFVPPLLAACRDVLEDERMSPAVLRCLLSLLMLVAAKFPHCFRPQFVDIMDLLLGWAFVQDLADADRSMIIDSFPQFQWHWLGNLQFSLGLLPKFLADMEGLVHDLNLGGSHNPGRLRSLFACFSTVLQIMSSGVAERNNLRELVAGPLEGLAPQLLRCASVIASNLGWSERMEDASKCLVLLAEILQERFADFYVHFVDVLVQSLEVASSAQLAAALKTNLQVLSLQNLGLHAASVGALLDFSSILSKSRLHPNHSVVANSAATYIFCLQHGLEDVVDQAIASVMNELELIKSLLAEGQASCPDIHSPPLELNSERKNESNSVQGLNASSSLTLKLEALDWIGSFEKLIHGLERGVDNFSFSYEVLLDKLSDPDSNVKDAFLRLFSITLPITTYAFGLFADEHNYRNSSDIVNMSNHCMNWRHVLAVKQQPRKLHWQQLVSVLSYLSLRLKLPLSSWVQRLVFSYRGKKDTRYGQIDMFGDADGNELPKGPGVDRNTIDIIYSVNNHAAVWWGIHEAARHCINLRLRTHLGGPTQTFAALERMLLDVTNVLMVEAKEAEG

SEQ ID NO: 69388 - protein, 343 aa, Zea mays
  Coding DNA Sequence Number=SeqID_27609
  Gene Ontology: Mol. function=phosphotransferase activity, alcohol group as acceptor
  Homolog annotation: Hit_ID=Q10D72; Match level="QueryCoverage=99%, HitCoverage=10%, E-value=4e-73, Identity=67%"; Hit description =Phosphatidylinositol 3-and 4-kinase family protein, expressed
MEQANSSPLNSIIPMVVKDFSDSDGFQDGAEKLLSGDSVSVSTLDYHALAQEIIGTARKISWQLCPTMGKAWLAYASWCFAHGSYSLSGTDSNLQNSLSPVLQSELSPSRCHLTDDEKSEVGEIIRSICADEHANHVGCEYPMTPGCYNSAPEHPISLLVEQAISLIETAAGAPGFESREGDDPSAVLASELVVLCKCDSGKDTAPLIGKLTEIWWSLRKRRETLESGLSTVPLLPWQEIIPHLFARLSSHPEKIVRELLESILLKLGKLSPCSIVYPTLVDISACEGEPSEELQRISDFMVKLYPNLIKDVKLAIEELGMITVLWEEQWLSTLQDLHSDVSG

SEQ ID NO: 69389 - protein, 90 aa, Zea mays
  Coding DNA Sequence Number=SeqID_27610
MDKQEHPKSSQDPPLEMFEPLTMKKILAPSLEVKEEAASTPPAPPSSEVTLELQELVKLEEEFDHVLPSQLPEEVINISSLLTYPGDVLE

SEQ ID NO: 69390 - protein, 453 aa, Zea mays
  Coding DNA Sequence Number=SeqID_27611
  Gene Ontology: Mol. function=RNA-directed DNA polymerase activity; Cellular component=intracellular; Biological process=RNA-dependent DNA replication
  Homolog annotation: Hit_ID=UPI00004C1733; Match level="QueryCoverage =99%, HitCoverage=33%, E-value=0.0, Identity=90%"; Hit description =UPI00004C1733 related cluster
  Pfam annotation: Domain name=RVT_1; Domain location=1-152; Score= -8.1; E_value=0.00022; Accession=PF00078.17; Description=Reverse transcriptase (RNA-dependent
MCVDYTGLNKACPKVPYPLPRIDQIVDSTAGCETLSFLDAYSRYHQIKMKESDQLATSFITPFGMYCYVTMPFGLRNAGATYQRCMNHVFGKHIGRTVEAYIDDILVKTRKASDHLFDLEATFRCIKAKGVKLNPEKCVFGVPRGMLLGFIVSERGIEANPEKIAAITNMGPIKDLKGVQRVMGCLAALSRFISRLGERGLPLYRLLRKTECFTWTPEAEEALGNLKALLTNAPILVPPAAGEALLIYVAATTQVVSAVIVVERREEGHALPVQRSVYFISEVLSETKIRYPQIQKLLYAVILTRRNLRHYFESHPVTVVSSFPLEEIIQCREASSRIARWVVEIMGETISFAPRKAIKSQVLADFVAEWVDTHLPAAPIQSELWTMFFDGSLMKTGAGAGLLFISPLGKHLCNVLRLHFPASNNVTEYEALVDGLHIAIKLGVRCLDARGDS

SEQ ID NO: 69391 - protein, 363 aa, Zea mays
  Coding DNA Sequence Number=SeqID_27612
  Gene Ontology: Mol. function=hydrolase activity, hydrolyzing O -glycosyl compounds; Cellular component=cell wall; Biological process= carbohydrate metabolic process
  Homolog annotation: Hit_ID=Q8VWG5; Match level="QueryCoverage=81%, HitCoverage=84%, E-value=1e-104, Identity=64%"; Hit description =Putative endoxyloglucan transferase
  Pfam annotation: Domain name=Glyco_hydro_16; Domain location=29-230; Score=258.0; E_value=1.9e-74; Accession=PF00722.11; Description =Glycosyl hydrolases family 16
  Pfam annotation: Domain name=XET_C; Domain location=259-306; Score =29.3; E_value=1e-05; Accession=PF06955.3; Description=Xyloglucan endo-transglycosylase (XET
  Pfam module annotation: Pfam domain module=Glyco_hydro_16::XET_C; Domain location=29-230::259-306
  Subcellular localization annotation: CTP_CleavageSite=19; ConfidenceScore=5.24e-01
MASSSAALAVLMLSWAAALAAASSPVTLFEAGYMPLFGGGNLVPSPGGRSVRLKLDRHTGSGFVSRSSYHHGFFSASIKLPDHHTAGVVVAFYTTLFIEWSLKKKVRYKLSNADVFPGNHDEVDFELLGNRRGHEWRVQTNIYGNGSTSRGREERYLLPFDPTLRPHAYAVAWTPTAILFYVDGTPIREVVRVPAMGGDFPSKPMSVYATIWDGSAWATEGGRYKVDYAFAPFAADFSSLVLSGCPVAGGGDDLAAAECQVATMTADCAVMTPAKRAAMRRFRRRYLLYTVCHDMYRYNGTVFPECDADGSERDDFHKWGESKRVSPSSRGYKQQQQRADKAVAVAAPGRPDTWPTVGTLRVD

SEQ ID NO: 69392 - protein, 56 aa, Zea mays
  Coding DNA Sequence Number=SeqID_27613
  Gene Ontology: Mol. function=serine carboxypeptidase activity; Biological process=proteolysis
  Homolog annotation: Hit_ID=Q2R5Q3; Match level="QueryCoverage=77%, HitCoverage=14%, E-value=3e-12, Identity=81%"; Hit description =Serine carboxypeptidase family protein, expressed
MEITPQMVSHILFVDSPVGAGFSFSRDPKGYDVGDISASLQLQEFLIKVLSINPTS

SEQ ID NO: 69393 - protein, 436 aa, Zea mays
  Coding DNA Sequence Number=SeqID_27614
  Pfam annotation: Domain name=C4dic_mal_tran; Domain location=219-436; Score=-84.3; E_value=0.037; Accession=PF03595.8; Description=C4 -dicarboxylate transportermalic acid transport protein
EKLKNRVRAFTGAFVVMISPVLLAIVLKKVSLTGTGGRYQGRIRLRALEAFVDLVQRRFAHLAAVTLQMGIMPFLCVMVAEACASLPPLSYVAPRLVAACRVLVFLSNLLLMALGCGILLLFHSNALLVLTICSAMALGVAAVQIRYLCRGVADAGAADDAEAEEYHSKLEQLLELSAGMTVMMFLVLEFVALESLLRNTRQGQAVKRGQTFLGVALLVSFMASTLGVSLMNVWTTPHVISGCVVLTAEFMRVLNFSFHALPIAAVVVLITLDVLPHAWKLAVWLPFFPLVIVLLVLLARYSREAMKQQEPAARGRGKQGPEATGSSTASDPSSSGEKKPDDPKPASLELTKVAFTGFLAVAVPSVTSASFCVPSAFFVLFSAATVLLGLLWRLLTHEAEPPSCVLQAANHASFSAHMSIFLAGIAFWVMAAFALH

SEQ ID NO: 69394 - protein, 51 aa, Zea mays
  Coding DNA Sequence Number=SeqID_27615
MDAGVATLLAEDEVRKRGEKVVDLRARSGRRRGTPSAIDLVSEGLECVPIH

SEQ ID NO: 69395 - protein, 56 aa, Zea mays
  Coding DNA Sequence Number=SeqID_27616
MSHLMALLEATKITLDNREELMVDLSTEMVEKDLQEIQDMEANEDVDIEGGDEPCL

SEQ ID NO: 69396 - protein, 339 aa, Zea mays
  Coding DNA Sequence Number=SeqID_27617
  Gene Ontology: Mol. function=zinc ion binding
  Homolog annotation: Hit_ID=Q8H6I1; Match level="QueryCoverage=37%, HitCoverage=20%, E-value=2e-18, Identity=46%"; Hit description =Putative MURAZC
  Pfam annotation: Domain name=zf-CCHC; Domain location=248-265; Score =8.4; E_value=0.041; Accession=PF00098.13; Description=Zinc knuckle
MLFCHSAETLFDWSMLEIEEHEIHEAIVRIDEDEMYITLGLRDDDGSQQGATAQFASQPSFGSQSNGAYLNDYDDDMVVDYDIPERFNILHDVDHPEMHLGTIYPSMVEFKLVVRQYAINEEFLLGTINRLNGLNVSQGWVAHKALPILRIEPSIGAKHLQKRLQATYKMHVRDSLHVSALVKGGSIQISHNGLKLIRDHEVRAPLGKRGVGRQRKLRIKSCLEGGRESKSASKEGDKPAKTVKRGPTKCKRCGELGHRQTSCKCSLNRTQKRKRKPRARRYVGATEPSTDATTNVPANESSQLMIVGLQAGMTLPRDATCALVPAPMQVLKMKQLQVL

SEQ ID NO: 69397 - protein, 198 aa, Zea mays
  Coding DNA Sequence Number=SeqID_27618
MGGEGMVLAAADAMDGGGMIRATMGWGGRGHKGANRGCDGAGLKRGNWMSATNDEAVVFSAVTPQGVVEISLSSAWEEGADLLDSSDPLHPLPEEQRRALQPVHYCLDEHGGLDGVVRVVAVADTACGRLRGHEKKPRHNVVVMDGKTAEDKPGNDVVHAQWDRGHESCRLCGICRVALELLRHVVANGAAGEGLERR

SEQ ID NO: 69398 - protein, 613 aa, Zea mays
  Coding DNA Sequence Number=SeqID_27619
  Homolog annotation: Hit_ID=Q5QLD5; Match level="QueryCoverage=59%, HitCoverage=70%, E-value=8e-48, Identity=34%"; Hit description =Putative SF16 protein
  Pfam annotation: Domain name=IQ; Domain location=148-168; Score=25.9; E_value=0.00014; Accession=PF00612.17; Description=IQ calmodulin -binding motif
MGRKGKWFDTGQRILITSEPDPVETQNDDAAKDWKLDHHEKAAKLRDNKSAIRRIWQFGKSNSSGASASATAPEDAEVLQFPKSPRSDNEYHVVQDLTEEVPFMETRGEEEEEEDGERMNPGDEVAASPDSKADAAPMTAWSARSKEDIAATRIQAACRGHLARRGQQERGMARLMSLVDEGFAVRRQTQEALYCMQMMTRIQTQLYTRRLKTEKDKKVLKSQTKAVNKHSLDKAKVRLVKGWDHSLQSKEQMETVQKMKQEAATRRQRALSYAFSQQWRNRNTSSARAAHGPAPMYMEPGNPNWGWCWAERWMAATRPWENQTMPPPDTGRAASKSASTRLPRVAVSVQIPTATTTPKGKPFRPPNWSSSSSLSSPSTPPPRRTATLASPRSGPLHATSGLQHSKSLQPDHRRPRSSQELSANSPRRAAVPASPRCASGSSSPLHPSSGAGAQHATTTATMRLERRPRSSQDRGMSSPRLLGAKDAPLRRTASLRSELPIRLSLGSAVAAAAVGDDEGAPVTPSYIHPAKKSVRAKVRCPSPSAAAATPDMFDALESSPAPPLQVPPSPSSAKKRLSQAFADKPSASSPSKVALERVRRHSQLISSPRMSLS

SEQ ID NO: 69399 - protein, 206 aa, Zea mays
  Coding DNA Sequence Number=SeqID_27620
  Gene Ontology: Mol. function=hydrolase activity; Cellular component =membrane
  Homolog annotation: Hit_ID=Q8LM38; Match level="QueryCoverage=99%, HitCoverage=29%, E-value=4e-45, Identity=52%"; Hit description =Putative nucleosid phosphatase
MQIKDKSVIIALQYTWTHGSCLLEDWSSIVSRLDIQGYRILHREINPKYSHSTVSDFNCVGSYVPYYASAIRYQDHSASLICQFIGIILEAVLFLVWDCLSNIYYGIPLVQVCASDGRTKTPLSPTVAGSDPHPFAGLGGSSVELMESSRQSLGAYHSYSVGSLGQMQFSSGVRNPSRGQTTLQSRRSQSREDLSSSLADIHFPKV

SEQ ID NO: 69400 - protein, 226 aa, Zea mays
  Coding DNA Sequence Number=SeqID_27621
  Gene Ontology: Mol. function=structural constituent of ribosome; Cellular component=ribonucleoprotein complex; Biological process =translation
  Homolog annotation: Hit_ID=Q9SF35; Match level="QueryCoverage=62%, HitCoverage=100%, E-value=9e-70, Identity=92%"; Hit description=40S ribosomal protein S23-1
  Pfam annotation: Domain name=Ribosomal_S12; Domain location=8-141; Score=260.8; E_value=2.8e-75; Accession=PF00164.15; Description =Ribosomal protein S12
MGKTRGMGAGRKLKTHRRNQRWADKAYKKSHLGNEWKKPFAGSSHAKGIVLEKIGIEAKQPNSAIRKCARVQLVKNGKKIAAFVPNDGCLNYIEENDEVLIAGFGRKGHAVGDIPGVRFKVVKVSGVSLLALFKEKKEKPRTNLRAILFRAIRLHITNHLTINNAFNRTSNRSRPKFSILNKKTFMLQMRRENVVERSPNAVADLQGMPDLLVIKNSRVLPPSDAD

SEQ ID NO: 69401 - protein, 122 aa, Zea mays
  Coding DNA Sequence Number=SeqID_27622
  Gene Ontology: Mol. function=oxidoreductase activity
  Homolog annotation: Hit_ID=Q10AZ7; Match level="QueryCoverage=64%, HitCoverage=15%, E-value=1e-35, Identity=83%"; Hit description=Kelch motif family protein, expressed
  Pfam annotation: Domain name=Kelch_1; Domain location=5-50; Score =20.7; E_value=0.0051; Accession=PF01344.15; Description=Kelch motif
  Pfam annotation: Domain name=Kelch_1; Domain location=61-103; Score =11.8; E_value=0.18; Accession=PF01344.15; Description=Kelch motif
  Pfam module annotation: Pfam domain module=Kelch_1::Kelch_1; Domain location=5-50::61-103
MQQMTGGHTAVIISKSKVVVFGGFANKRFLADVSVYDVENKLWYTPECTGNGSNGQAGPSPRAFHIAVVIDCNMFIFGGRSGGKRYVSNAVLIFDRRMVDHCEGSGGVGRHGQTKAGQSHLQ

SEQ ID NO: 69402 - protein, 338 aa, Zea mays
  Coding DNA Sequence Number=SeqID_27623
  Gene Ontology: Mol. function=Rab GTPase activator activity; Cellular component=intracellular; Biological process=regulation of Rab GTPase activity
  Homolog annotation: Hit_ID=Q5QMF8; Match level="QueryCoverage=99%, HitCoverage=43%, E-value=1e-111, Identity=60%"; Hit description =RabGAP/TBC domain-containing protein-like
  Pfam annotation: Domain name=TBC; Domain location=182-337; Score =20.9; E_value=4e-09; Accession=PF00566.9; Description=TBC domain
MKPKSLPFIAFEHKRDAYGFAVRPQHLQRYKEYAGIYKEEEEERSDRWKNFLERQPESSGQDAGDNATGDGSESLHEKTVAGPQKIQIWTPIRSSLSNIEQIMSLRIGKKQSSAGKQQAKDGTHHVKGEESKLSEDSDDEFYDVDKVDLSQEAQSSDTRNADVGSRNQEENYISREELECLVHGGLPMVLRGELWQAFVGTGARRIEGYYDSLAAEGELDNKSSPTSEGVQEKWIGQIDKDLPRTFPGHPALDEDGRNALRRLLIAYAKHNPSVGYCQAMNFFAGLLLLLMPEENAFWTLVGIMEDYFDGYFSEEMIESQVDQLVLEELVREKFPKLG

SEQ ID NO: 69403 - protein, 270 aa, Zea mays
  Coding DNA Sequence Number=SeqID_27624
  Gene Ontology: Mol. function=Rab GTPase activator activity; Cellular component=intracellular; Biological process=regulation of Rab GTPase activity
  Homolog annotation: Hit_ID=Q5QMF8; Match level="QueryCoverage=88%, HitCoverage=27%, E-value=1e-100, Identity=80%"; Hit description =RabGAP/TBC domain-containing protein-like
MKPVCGDPKHIISTKLYIMFTSEFYISVLRVWDVLLFDGNRVMLFRTALALLEFYGPALVTTKDAGDAVTLLQSLAGSTFDSSQLVLTARMGYQSVNETILQELSNKHRPSVMSAMEERAKGLGVWTDTNGLASKLYNFKRDPEPLVSLSNSADQLSDVGDGDANQESDPVNMDDEYVGVTVKSEIDSLPDPKDQVAWLKLELCQLLEERRSAVLRADELETALMEMVKQDNRRQLSAKVEQFEQEISEFREALSDKQEQEQAMFQLKQF

SEQ ID NO: 69404 - protein, 60 aa, Zea mays
  Coding DNA Sequence Number=SeqID_27625
MAVTQSTQLGLATALFGVLSFVLTDLKKELRMKTFDTTYPSVNSLRADLVTSDIGRIGVD

SEQ ID NO: 69405 - protein, 860 aa, Zea mays
  Coding DNA Sequence Number=SeqID_27626
  Gene Ontology: Mol. function=kinase activity; Cellular component =proton-transporting two-sector ATPase complex; Biological process =ATP synthesis coupled proton transport
  Homolog annotation: Hit_ID=Q6I5J6; Match level="QueryCoverage=99%, HitCoverage=96%, E-value=0.0, Identity=69%"; Hit description =Putative kinase interacting family protein
  Pfam annotation: Domain name=DUF827; Domain location=116-313; Score= -115.4; E_value=0.077; Accession=PF05701.2; Description=Plant protein of unknown function (DUF827)
  Pfam annotation: Domain name=KIP1; Domain location=1-52; Score=64.8; E_value=2.8e-16; Accession=PF07765.3; Description=KIP1-like protein
  Pfam module annotation: Pfam domain module=DUF827::KIP1; Domain location=116-313::1-52
MEDRVKSMLELIGADGDSFGKKAELYFQSRPELINHVEEMFRSYQALADRFDRISSELHKANHTIATVFPDHVQFSMQEGDGEEFPKAIGGIDLSNFKFPTLEGLSMGSQSASRGTSPVPKRGTKPHRRVTTNMNEEKAQEEIDKLQKQILALQTEKEFLKTTYDSALGKYLDIEKQVAELQDEVCNLQDAFSTGVAIEDNEARALMAAQAIISCEDTLVNLQDQKNRMTEEAKVELRRANEAIEKLKSFKNECELPHAPMNVHDHYEIELVNALPLDDADDSALNESRLDLQEICQTVKDIIESYPELSVAELAEKVDRLVEKVINLELATTSQNAHINRMKIEIDGLHERLHALEQDNVALAVDSSNLADRLRIVEEMLQEVQQIWKSIRNGSENICKQMTEATHELTEFIETLHSPKQEISDFVDSLRDSKGDASLEDDSGLTSLYVQNEPSKSLRVATSEIEKYEETSEGLVAQKQLVPKESEGEGKIILEDYASVLQSYKNTEQKLSEIEKRNQDYHLEAMSELKELKSVNARKDEEIHSLRHMLSSLQKKMSASIIESLEKSEETSKISAITTTEDKEIAKSEQTSKISTSPTTEDKEIAEIEEYIKQWQVDEPLASSVAEEKFRVEIDRVLGENLNFWLRFSTLYHQIRNFQISFDMLKTEMHRMTDEQEDEGIYGFAGSYQVAKLESAVLEKKLRDLNTDLQVWIERNVRLKGELENRFSSLCSIQEDISKITTLDKCDEVHFNPFQAAKFQGEVLNMKQENNKVAKELEAGLDHVRGLQVELGRVILKLRENLKVSIARSHRTQQNFRTLSTKGGVPLRAFLFGSKSKRPSLFSCMPGVHKQHSGSKAGRG

SEQ ID NO: 69406 - protein, 160 aa, Zea mays
  Coding DNA Sequence Number=SeqID_27627
MAGAPVGSRIRHDRVGVHSEDLRMAEQGGERAGSRLRRGRRYPRPGREPEAGGRREVSERRKIHKRLRGEADPGARAVGARGMEWAARGKTADGPNWRQRPRDLDDFTQLILLRSTGGLFGESFDICKVECYLSDQRSHVYESEGDVKVWVICEGDVKTN

SEQ ID NO: 69407 - protein, 202 aa, Zea mays
  Coding DNA Sequence Number=SeqID_27628
PKLIAQKEHRKTLTSSTLEPGTRHRAHSSARGKELDVCRETETELENGRLKEMETGRAGAGLGRRGWLLREKHDQRPEESGDGSSVGEIGEEAEQRSAVWTVEASCHGRGSGDGQESSTAMADGDAPWLNPEHAGELATVRREQRTARRGSSRGELTAAMGTPRAGAGEESAWRAASLSRGKLRTQEDEAAGKDHEHGSRRR

SEQ ID NO: 69408 - protein, 63 aa, Zea mays
  Coding DNA Sequence Number=SeqID_27629
  Subcellular localization annotation: CTP_CleavageSite=21; ConfidenceScore=5.35e-01
MAAPSLSPSALAALSLSPLVPAMAGTLINRVMRKTSQVDPKRGLLRKAMLMDKPEDGRQVLID

SEQ ID NO: 69409 - protein, 250 aa, Zea mays
  Coding DNA Sequence Number=SeqID_27630
  Homolog annotation: Hit_ID=Q7G2B3; Match level="QueryCoverage=15%, HitCoverage=7%, E-value=2e-10, Identity=78%"; Hit description =Pentatricopeptide, putative
  Subcellular localization annotation: CTP_CleavageSite=69; ConfidenceScore=5.60e-01
MAASVLLAAPAASPPLTWRRWGPLLAASHPRANPPPPAPRLRAPASPLRASSVPRDSCARAAVRRTSCVAAAIGAALLAPLKIAPSPRSWRRRGCVREGGRRGRCTGAAAGARLRAGLPRDGSQIRPLSPLTEQIQGRLFGFQHSSGECVSPSEQWFSLGAYPWDALYGGGNILAFALALFFSCSRCAPSSQAVQLSSLSLNYMNDVGCVPNVLHFTNLIDGLGHTGNLEAYRYIFDEMFWRVRMSIDVF

SEQ ID NO: 69410 - protein, 183 aa, Zea mays
  Coding DNA Sequence Number=SeqID_27631
MASVCPLPARKKEPLLPPADRYGVACGVAWPRRVVIQLGARACRVGVRGYCSSRSRRLWPFGWGCGVPVFVGSWEQMARLIRLHERDLFCLMPTGGGKSMCYQISALILDLKNLLTGTDGCLGIVDDDHVELNNLHRQLTTTVATMSFSIPDAREIPAAVGQRGGLSSATVMGGSGGGAQSSH

SEQ ID NO: 69411 - protein, 70 aa, Zea mays
  Coding DNA Sequence Number=SeqID_27632
MALQFGFPPTLKLHAAVIALPWPGEPVALGTRGAHRGSKLIDSDVTDWERELDAPVSALSVGRTLFWGAI

SEQ ID NO: 69412 - protein, 94 aa, Zea mays
  Coding DNA Sequence Number=SeqID_27633
MGFLSEQERWIHTRFKGLDVGRVSQERLTGAARCGAAGRVRRGERGWGRGEKGEDSPGTAMCREPGTLASAQSGSGEGDERKKKRKARKREGNT

SEQ ID NO: 69413 - protein, 70 aa, Zea mays
  Coding DNA Sequence Number=SeqID_27634
MTPSPSIRARAPRPANCSFRWLSCIVRAPAVTDSRRLPRNGEQIKQTPAHKDVPTQLKVPYALEQDLDVA

SEQ ID NO: 69414 - protein, 96 aa, Zea mays
  Coding DNA Sequence Number=SeqID_27635
MSGAHRTVRCPLLAVGSATCPAQIARLTVGPADRWLTGQSETTDQAKDGGKKSFEVSSAREKVKETRNPKPGVKKKTCKVKVDRVKKTYGASRITT

SEQ ID NO: 69415 - protein, 163 aa, Zea mays
  Coding DNA Sequence Number=SeqID_27636
  Gene Ontology: Mol. function=alpha-1,3-mannosylglycoprotein 2-beta-N -acetylglucosaminyltransferase activity; Cellular component=Golgi membrane; Biological process=protein amino acid N-linked glycosylation
  Homolog annotation: Hit_ID=Q8RW24; Match level="QueryCoverage=83%, HitCoverage=35%, E-value=9e-59, Identity=72%"; Hit description=N -acetylglucosaminyltransferase 1
  Pfam annotation: Domain name=GNT-I; Domain location=2-163; Score= -161.6; E_value=2.3e-07; Accession=PF03071.5; Description=GNT-I family
MSSSSLLPSFPLLCTLQFCILRSNFTYWDDWVRLKEGSSLGQFFEQYLEPIKLNDVHIDWNSEDLSYLGEDKFSTKFGKEVASATPLRGSDAVLKAHNMAEDVRIQYDDQEGFEQIARQFGIFEEWKDGIPRTAYKGVVVFRYNSSQRRIFLVSPDSLRQLGV

SEQ ID NO: 69416 - protein, 100 aa, Zea mays
  Coding DNA Sequence Number=SeqID_27637
MEAKGTRLRKPKQKASSRVKNHHRPLFRGKRHLWQAKQASFHLRHDDRVKKGTGKGDISKGILLHEGSGPRALLLIRGLKASSSEGFDSRPRALGLQAHY

SEQ ID NO: 69417 - protein, 123 aa, Zea mays
  Coding DNA Sequence Number=SeqID_27638
MPQNPIKRLLRDAGLKARHGKGIIPTVEAQGPLCTTMAAPRQIWDDDKEFHGQCFGRSVLRRQQQPPGIRVEDPSSAKPSEHGGRDGLARRGHQSATASQHELQEVFDERARGANEHGWGAAN

SEQ ID NO: 69418 - protein, 76 aa, Zea mays
  Coding DNA Sequence Number=SeqID_27639
  Subcellular localization annotation: CTP_CleavageSite=12; ConfidenceScore=5.06e-01
MATTTVQPLIPACNAVPKPLHRVHQPVHLHPRHSPPLRVPGETTSSSVAFGAIYAQVKKVSRWILQEFQDFDKFKD

SEQ ID NO: 69419 - protein, 89 aa, Zea mays
  Coding DNA Sequence Number=SeqID_27640
MAIRKNKGEAGEQGRAPSTEVELVPMEGASRAAARPRERGELAGGCLQGDVACARSRKEEGVAPWLAEGGRESCCARDKKIGKSAGEER

SEQ ID NO: 69420 - protein, 63 aa, Zea mays
  Coding DNA Sequence Number=SeqID_27641
MAHVYAVHATLLLGDNVSSNLDPLWSLPFAPLNIPLGQLTPYSRITANPTSTTICQPLGGLFG

SEQ ID NO: 69421 - protein, 162 aa, Zea mays
  Coding DNA Sequence Number=SeqID_27642
MGMWDLTQTVAQRWTITTSCSWLLEGMSSVVDVVLESLEFGGAIRRSATTTRKRSGDRYPKEEIGGFDQRCTGRGEGGGSGALGFGMANREGKGASGAIRGVWLGVQVRKLPYADSQGHQSLRIQTQDPIRRLVSHSLYADCTFFLLDKMTRSSPVLFEKLK

SEQ ID NO: 69422 - protein, 120 aa, Zea mays
  Coding DNA Sequence Number=SeqID_27643
  Homolog annotation: Hit_ID=Q6L548; Match level="QueryCoverage=55%, HitCoverage=14%, E-value=2e-28, Identity=89%"; Hit description =Putative WD-repeat protein
MPCLLPGYVLRATFWLGRCRVGGDDLLVMGGQGPTLVWAPIYPYCQCWELRARESYANVTDIHDGLDFSQHEDVQYSFGIFSVKFSSDGRELVAGSNDDSIYVYDLHANKLTLRLSAHTV

SEQ ID NO: 69423 - protein, 118 aa, Zea mays
  Coding DNA Sequence Number=SeqID_27644
  Homolog annotation: Hit_ID=Q8LIY0; Match level="QueryCoverage=52%, HitCoverage=8%, E-value=2e-14, Identity=58%"; Hit description =Putative CSLC9
MGEFMGLIGCLCALAQGPLDTSFRHTAASPRARARARVALSLLLLAVEVAAYLRGWHLEVDVGAGILTVDALFVAAYAAWMRAPLDYLAPPLQFLTNVCVVLFLVHSVDRLVICLVCF

SEQ ID NO: 69424 - protein, 557 aa, Zea mays
  Coding DNA Sequence Number=SeqID_27645
  Homolog annotation: Hit_ID=Q5VNN5; Match level="QueryCoverage=41%, HitCoverage=86%, E-value=2e-89, Identity=75%"; Hit description =Putative polygalacturonase
  Pfam annotation: Domain name=Pep_deformylase; Domain location=373 -528; Score=174.9; E_value=2e-49; Accession=PF01327.11; Description =Polypeptide deformylase
MAALEAQAAERVIEACVRTESVRKCVFTSSLLACVWRQDYPHDRRCPTTIDESCWSDESFCRDNKLWFALGKTAAEKAAWRAARGRDLKLVTICPALVTGPGFRRRNSTASIAYLKGARAMLADGLLATANVETVAEAHVHAYEAMGDNTAGGRYICYDHVVKRPEEFAELERQLGLPGGAAPAPAHGSDDRPARFELCKRKLSRLMSSRRRCAYDTYYSVAFEGDVISTLYRIVSTLVPSFRCSLHVRAAQTCSHATRAPPVLSRGVLGSPLTPPSPPVRPLLTASCRTPKKIEAEGAAPMAAALCPRLRGFMASSRPLLALRPVALRLPMRRAVPAMPLAARARRGLGSSTANAQLDEDFATASDLRFESPLEVVKYPDPVLRARNKRINTFDDNLRALADEMFDVMYKTDGIGLSAPQVGVNVQLMVFNPAGVKGEGEEIVLVNPVIYKSAKRLLVFEEGCLSFPGIYGNVVRPESVKIEAQDVTGAKIKVKLSGIHARVFQHEFDHLLGILFFDRMTIDVLETVREELKTREILRILEHIVQLSITLKSFWDS

SEQ ID NO: 69425 - protein, 115 aa, Zea mays
  Coding DNA Sequence Number=SeqID_27646
MSGVHRTVRCNGGATATSGANGYLQRIKCAAARAEVRDAHAGAPDTLQFMSARRLCEFPKVKSLKSVFPGAPDTVRWHTRQSGAPDQGAFGCPFAPLFEPFFLVFLLAYGEPLYL

SEQ ID NO: 69426 - protein, 263 aa, Zea mays
  Coding DNA Sequence Number=SeqID_27647
  Gene Ontology: Mol. function=cytokinin dehydrogenase activity; Cellular component=vacuole; Biological process=electron transport
  Homolog annotation: Hit_ID=Q8LNV6; Match level="QueryCoverage=92%, HitCoverage=41%, E-value=3e-77, Identity=60%"; Hit description =Putative cytokinin oxidase
  Pfam annotation: Domain name=Cytokin-bind; Domain location=44-262; Score=134.6; E_value=2.8e-37; Accession=PF09265.1; Description =Cytokinin dehydrogenase 1, FAD and cy
MVTGTGEVVTCSPTQSPELFFAVLGGLGQFGIITRARIPLQLAPPKVRWVRAFYDSFETFTKDQELLVSMPELVDYVEGFVVLNEQSLRSSSVAFPAQVDFSPDFASGAGSNKVHYYCIEFAVHEFQQQDSAADHVSLSTATYHSYQQQQPVALASSTVVDLVSGQLSYLRPHAYSVQVAYLDFLNRVRMEEESLRSRGLWDVPHPWLNLFVPRHGVARFKDLLMDTITQGDFEFEGPVLVYPLLANSTVEYSFMKEVARAGR

SEQ ID NO: 69427 - protein, 125 aa, Zea mays
  Coding DNA Sequence Number=SeqID_27648
MELNAQGKGGGPSVVEGLVFGQNSSSSVLVLFFELRTVRGLSADRPQYKYFVLRTVQGPGADRPQYKDFVLRTVRGPGADRPQYKFQQMCRVSKTSFWLSFMYRGPSDLEGQTVRKSFLNALTFL

SEQ ID NO: 69428 - protein, 93 aa, Zea mays
  Coding DNA Sequence Number=SeqID_27649
MGPLRMWRGTLRCKTEVEGGGGLDSDVLHGGGTSKRSLVVRDGGGRARRRWPTWGDTLRRSSTVWALGKICLPAGVARRGPEACIEGTAGEGD

SEQ ID NO: 69429 - protein, 125 aa, Zea mays; identical to SEQ ID NO: 69427
  Coding DNA Sequence Number=SeqID_27650

SEQ ID NO: 69430 - protein, 373 aa, Zea mays
  Coding DNA Sequence Number=SeqID_27651
  Gene Ontology: Mol. function=nucleic acid binding; Cellular component= nucleus; Biological process=regulation of transcription
  Homolog annotation: Hit_ID=Q5SNG6; Match level="QueryCoverage=99%, HitCoverage=100%, E-value=9e-62, Identity=45%"; Hit description =Putative MCB2 protein
  Pfam annotation: Domain name=Myb_DNA-binding; Domain location=161 -208; Score=56.1; E_value=1.2e-13; Accession=PF00249.21; Description =Myb-like DNA-binding domain
  Pfam annotation: Domain name=zf-CCHC; Domain location=3-20; Score =9.1; E_value=0.031; Accession=PF00098.13; Description=Zinc knuckle
  Pfam module annotation: Pfam domain module=Myb_DNA-binding::zf-CCHC; Domain location=161-208::3-20
  Subcellular localization annotation: CTP_CleavageSite=51; ConfidenceScore=5.16e-01
MARKCSSCGNNGHNSRTCGGHSRTAAAFENNGGGVRLFGVQLHVGSSSPVAVAMKRCFSMECLSPPPPLPPPPAAPAYYAAALAAANSSSPSASASASSSSSLVSVEEAQAPEKMASGYLSDGLVGRAQAERKKEACLSYVNNLSKKKVFFSGFSDRPSPGVPWTEDEHRRFLAGLEKLGKGDWRGISRHFVTTRTPTQVASHAQKYFLRQSSLAHKKRRSSLFDVVENAAERATTTSSRERPRLTVTDAIIATASAAAPGTTTAALPALSLGIRRPARPEYHAALPPNSLSLQLPRCSAAMGSASPSPSLALALAGPKHKHPSPSSLTAAKASSSGQAPDLELKISTGRQSEHQVQTGSPPRTPFLGTIRVT

SEQ ID NO: 69431 - protein, 140 aa, Zea mays
  Coding DNA Sequence Number=SeqID_27652
  Homolog annotation: Hit_ID=UPI00004BF72E; Match level="QueryCoverage =86%, HitCoverage=42%, E-value=2e-07, Identity=43%"; Hit description =UPI00004BF72E related cluster
RSLRGCPAILALAQYSIDGKGTIPGIASTDLGAFLLKPWYWARVAPPRALQFAERPSPVVAAIHCGLSHHARPSPAETSPSPCAPAHPRITPRRYAAPSTVPPPPPSQHPGPIPAFSTLLKNPPVPRIPTRPCICRHHNE

SEQ ID NO: 69432 - protein, 171 aa, Zea mays
  Coding DNA Sequence Number=SeqID_27653
MEVPLEELDMDESVGYAFDTIRRLSGRPSDITLSPTARLTAVGHKLMSDGLSWTPSEIRSFNRRPPSAHRFILPRAANHMHASRRRRRRRDAIAVSPPPPGSTAQAQPVPVDLPSRPDAQPEHDATEATPTPPEPPRRSPRPPEPSAPVPNATGARPDPAGARFTGSSSGK

SEQ ID NO: 69433 - protein, 60 aa, Zea mays
  Coding DNA Sequence Number=SeqID_27654
MAKACERAVLPRVIGCYDDEEDGYDYAYGNGCPWCNLCSRKEEGVEMDLQEFQDFDEFED

SEQ ID NO: 69434 - protein, 104 aa, Zea mays
  Coding DNA Sequence Number=SeqID_27655
MAAHRTVNWTCPSLATRSDVGDHAKREIVTGDKPASSGRTLSRESGNKHKEESSSSIKSHRRGNKKKKMKKVVYYETDSSSPSTSSSESSIASKRHERKLLTGE

SEQ ID NO: 69435 - protein, 141 aa, Zea mays
  Coding DNA Sequence Number=SeqID_27656
MENHLGKQCYHKGGQDQVPQDEAHGGCCDEFMSRDGNGFKTRGVWARLATCQPVPTFGTHCSCFDKAIPRWLPRKRLPRPPPLDDVAKTTIAEKKGKAALVGEAPREAPGNDGAVNSKHPHTENPPTSKAPFARAALKTSL

SEQ ID NO: 69436 - protein, 313 aa, Zea mays
  Coding DNA Sequence Number=SeqID_27657
  Gene Ontology: Mol. function=nucleic acid binding
  Homolog annotation: Hit_ID=Q9C9N3; Match level="QueryCoverage=54%, HitCoverage=55%, E-value=2e-11, Identity=29%"; Hit description=C-x8 -C-x5-C-x3-H type Zinc finger protein, putative
  Subcellular localization annotation: CTP_CleavageSite=90; ConfidenceScore=5.12e-01
MEVVLAPAQHDGLHAAFWPNPFDIGVGGDGRFSSSLSSLGGDRFCGYSTTASRFVNSPGLSSPSPRADSLSRGSSDSGSVVEDGDDAAATASSVAERRLRLVRLALQYQEVVNRFELCLSYLADAINEAAALRQENDELRVANEYLARRINVVGGRLADEFSGLRLAEEHTTPPPPSPLPATPVMPKSISVRSPGYLKMIQNGKHRASKPTKGSQRVLVGMEGGVKGEEEEKLNGGLQFEVYNQGMLKTELCNKWEETGTVLSLRMLGEHCRLTGGSIWVGWAARVSDEGQGQATGASGGDFERQFLGSESRG

SEQ ID NO: 69437 - protein, 100 aa, Zea mays
  Coding DNA Sequence Number=SeqID_27658
MALWCNCSCTPVLHSSPFVGQVPKLVTEVDLLALFREVATVVEITIIKDKVSRGADLPCPISRLIVFPSPRLLPLGLPQCHAMTSTARSGSVLKHLTEAD

SEQ ID NO: 69438 - protein, 423 aa, Zea mays
  Coding DNA Sequence Number=SeqID_27659
  Gene Ontology: Mol. function=nucleotide binding; Cellular component =cytoplasm; Biological process=response to unfolded protein
  Homolog annotation: Hit_ID=Q9AQZ5; Match level="QueryCoverage=97%, HitCoverage=53%, E-value=1e-137, Identity=58%"; Hit description =Putative heat shock protein
MVNDGFPFSIALSWKQDSQNSAPQQTLYILKVDVLYVDTCDSQIPQKISTYTIGPFQPSKGERAKLKVKVRLNIHGIVTVDSAMMLEEDVAVPVSSANEAPKDTTKMDTDDAPSDPVSGTDVNVHEPDTTEAAPAAENGTQNPEEKSVPMETDAKVEPSKRKVKRTSVPVHALVYGALAAADLQKAVEKEYEMALQDRVMEETKEKKNAVEAYVYDMRNKLYDRYNDFVTPEEKEGLIGKAFRRLKIGYMKMIGDPIEARYKESTERGSSVDQLVYCINSFREAALSSDQKFGHIDISEKQKVINECSEVENWLRERKQQQDALPKHTDPVLLVSDLKKKAEALDRFCKPIMTKPKPAPKPQTPPPHTPPPQPEAQASDPQTPEQQQSGTGAAGEPGSEGGVQQASGEQMDMDRPDDSADVAA

SEQ ID NO: 69439 - protein, 656 aa, Zea mays
  Coding DNA Sequence Number=SeqID_27660
  Homolog annotation: Hit_ID=O24425; Match level="QueryCoverage=12%, HitCoverage=10%, E-value=4e-13, Identity=51%"; Hit description =NADPH:ferrihemoprotein oxidoreductase
  Pfam annotation: Domain name=RRM_1; Domain location=247-314; Score =7.8; E_value=0.027; Accession=PF00076.12; Description=RNA recognition motif. (a.k.a. RRM, RBD, or
MASSPIDPALNLTLETQTRALLSELDKCLTAIDSKSGGPLATVVAVAEGQLRHAEANTSTRIAEHESTTQVFELWHPRIDSGTDHLHSSMVQVRAAVNTRDLRWPPDPHGGGSSHPGVFGSVSESDLACPEPLVVDAAVGAGTTTNAARVTDIRLDNLTTALLGPNLNSAATPTHLRELRAELSLSSLASSLLQLVTREEEGAVLSTLPTKCLMQGFNSSCDSVLHGITKFIKPTSDWRSPSHVLEVTIHQVCYPMTESVIHAVFAPYGRVELVHIIGGLDPVLAHVVFETKHEAADAFGELHGRNIYDGCCQLDIQWCSSPDPRNTNLAFSCGDTMVTTATARPATSVLGQDEFSNTNNSVEVATTFEIVSGVTNIAPPAPVFAKAAGDNSKNIIVDSTYTFLGHNDEIFTVACCPTDASVVASRTYSNVNLHGISVGDATLQLPTSTVDSDDSSKEPYELVEAPVSTPLEDFKLIYACALEAFQLISGCSKSVSNYLTYNGLEGTHIKVIEFVSGNDYLLRKVLEHMTRKNLSVPMFELLKEVPYTIASDRSCTQLEFDIAGTGITYESSNCIGVYTENCPEVVEEAKRWLGYSLDSFEVVDQGVQHFFVMIWDPSGIDVMYRFEGKPIFKKGGMLGTCYYAITCLITERAINR

SEQ ID NO: 69440 - protein, 333 aa, Zea mays
  Coding DNA Sequence Number=SeqID_27661
  Gene Ontology: Mol. function=RNA-directed DNA polymerase activity; Cellular component=mitochondrion; Biological process=RNA-dependent DNA replication
  Homolog annotation: Hit_ID=UPI00004C1731; Match level="QueryCoverage =99%, HitCoverage=31%, E-value=1e-109, Identity=94%"; Hit description= UPI00004C1731 related cluster
  Pfam annotation: Domain name=RnaseH; Domain location=37-149; Score= -28.3; E_value=0.025; Accession=PF00075.14; Description=RNase H
  Pfam annotation: Domain name=rve; Domain location=120-274; Score =102.6; E_value=1.2e-27; Accession=PF00665.16; Description=Integrase core domain
  Pfam module annotation: Pfam domain module=RnaseH::rve; Domain location=37-149::120-274
MGETISFAPRKAIESQVLADFVAEWVDTQLPAAPIQPELWTMFFDGSLMKTGAGVGLLFISPLGKNLRYVLRLHSPASNNVAEYEALVNGLRIAIELGVRRLDARGDSQLVIDQVMKNSHYRDPKMEAYCDEKAPGGYTHLLVAIDKFSKWIEVRPLNSIRSEQAVAFFTNIIHRFGVPNSIITDNGTQFTSRKFLDFCEDHHIRVDWAAVAHPMTNGQVERANGMILQGLKPRIYNDLNKFGKRWMKELPSVVWSLRTTPSRAMGFTPFFLVYGAEAILPTDLEYGSPRARAYNDQSNRTNREDSLDQLEEARDMALLHSAWYQQSLRRYHA

SEQ ID NO: 69441 - protein, 42 aa, Zea mays
  Coding DNA Sequence Number=SeqID_27662
MAAADPSLGEAQDFLCACDFRRLARPEDGRCQVGIDMLIKIR

SEQ ID NO: 69442 - protein, 244 aa, Zea mays
  Coding DNA Sequence Number=SeqID_27663
  Gene Ontology: Biological process=regulation of transcription
  Homolog annotation: Hit_ID=Q2R3Q8; Match level="QueryCoverage=69%, HitCoverage=19%, E-value=3e-12, Identity=32%"; Hit description=GRAS family transcription factor containing protein
TEARLARFASGCPNLRFEFEGIVDGADDSERITVDDGATVVVNLVFPAAAAAAARSSSATSSTREGACSALARIRSLDPSLVFLVEKGGGGGNATSRGRRPSLLAPFAASLRYFAAVFDSLHERLPADSAERLAIERDHLGAEISDAVASLADYSSSSYGGDDEPSSSATAGCSWRQMMERAGFEGVELSSRAVSQAKLLLKMKSGCGGGFRVVEEGDGGRAVSLGWRDGRAQLITATGWRRCR

SEQ ID NO: 69443 - protein, 131 aa, Zea mays
  Coding DNA Sequence Number=SeqID_27664
  Subcellular localization annotation: CTP_CleavageSite=22; ConfidenceScore=5.19e-01
MKSTAGGFSSPTGPRTRRRPLRAAATTLVNCGPAPKDTTPEPDSINARVGKSITVPAHKGPEHTPLRSATLESPDSVATAAPRARSRKLDLIQRAHSSAIKLMQVHAVERVREPLKSELRLRSYDFLKVMC

SEQ ID NO: 69444 - protein, 60 aa, Zea mays
  Coding DNA Sequence Number=SeqID_27665
MAKLKLSKKRFLVIEEILEKAVCDHAKAVVQPDFAFSTDAELFLLPNHTIPKLTRPSRRR

SEQ ID NO: 69445 - protein, 72 aa, Zea mays
  Coding DNA Sequence Number=SeqID_27666
MRRLGKVVVAGERGASANDGERRPRRQRSRYISLVPGFTPAGGNGFRSREKGKEVAAATVFLGFEKIYTGVS

SEQ ID NO: 69446 - protein, 126 aa, Zea mays
  Coding DNA Sequence Number=SeqID_27667
MKDHIKENKFDAKSWFSTVENLEKKRGCAAVDRSRGQLHRRPTNLHLPQAITCTHRVPASRLSLYPGPPWIEGHEGVVAVVCVVLSWLVWCRFTGVEHDSVVDGSLQKRRNRGALMQWSVTQDNRA

SEQ ID NO: 69447 - protein, 67 aa, Zea mays
  Coding DNA Sequence Number=SeqID_27668
MANSIRARTADGGQRDEGATANGGSQATASDLPRNRTVPSPDAHGMVSATLDDAPKPESEIPTRVYA

SEQ ID NO: 69448 - protein, 158 aa, Zea mays
  Coding DNA Sequence Number=SeqID_27669
  Homolog annotation: Hit_ID=Q6QP51; Match level="QueryCoverage=30%, HitCoverage=22%, E-value=3e-15, Identity=77%"; Hit description =Putative growth-regulating factor 1
MQAACNRAMGMHPFDFDAPSMESQAHTSCNRRAGYYVRKTTVPLAPAPRLLDCGTGAAIRGNPARGPAVSAKHAGHGSVSRGRRDRERGYSERDPSPRRKRAPSPPTDQRFEGWPLGRVRQPPQSIQAPQPLLVRGSKASPSEGFNSRLRPLRLRAHY

SEQ ID NO: 69449 - protein, 223 aa, Zea mays
  Coding DNA Sequence Number=SeqID_27670
  Gene Ontology: Mol. function=steroid hormone receptor activity; Cellular component=nucleus; Biological process=regulation of transcription, DNA-dependent
  Homolog annotation: Hit_ID=Q7XD60; Match level="QueryCoverage=85%, HitCoverage=25%, E-value=1e-65, Identity=65%"; Hit description=HAT family dimerisation domain containing protein
MEAKHGLRQLKSCTLRKVKLAGNKTLSQTSLRFSATDVGTVSVENYTFDQDIARKELAAMIILHEYPLSMVDHAGFQRFVHALQPLFKIGTRNTLRKHIVKQYDLEKKKVIQYMTEIKSRVAITSDMWTSDNQKRGYMAITAHFVDESWTPMPLNRYRFIYVPSPHTHDVIGDVLYESLVYWNLNEKVSTITLDEGMVNDEGQPGTFWSVLQEVQKGLQELSL

SEQ ID NO: 69450 - protein, 91 aa, Zea mays
  Coding DNA Sequence Number=SeqID_27671
MTGVPTVLAGGTSDAGLPPQRPTFNSPSDELEDKSDMTSPPILEPHHPVRKRQATEREKTMFDPTNARLGTSPRKETLPLSGYCRGNDPSP

SEQ ID NO: 69451 - protein, 100 aa, Zea mays
  Coding DNA Sequence Number=SeqID_27672
MVRAMPARPAPSESPNAISMALNTLSLAPQMMPYCGGIDAFPPRLRHAPTVIATLGSLDHLSMMNDLEFMEMAGGGGDLIFDTLYTDLDSDLGPSASDDE

SEQ ID NO: 69452 - protein, 50 aa, Zea mays
  Coding DNA Sequence Number=SeqID_27673
MDFMVFEVAELDGATMIYHTNNKMKGYLLVLNSVIVNSLLIAHFIDHVVP

SEQ ID NO: 69453 - protein, 60 aa, Zea mays
  Coding DNA Sequence Number=SeqID_27674
MSNVGTNSASDITDALNFNPLKTEWSFVESLSVLLIILGLEMILRASRANLPLEIHEYQV

SEQ ID NO: 69454 - protein, 88 aa, Zea mays
  Coding DNA Sequence Number=SeqID_27675
MAFTGAVDRSVRWNWSPTLALHRVAAHRRGQGPPHCEVRARESTPGCLCAEMTNSGHVVRCKVCAAMRFWCHSGRVWVEDWLIAIGFV

SEQ ID NO: 69455 - protein, 210 aa, Zea mays
  Coding DNA Sequence Number=SeqID_27676
  Gene Ontology: Mol. function=electron carrier activity; Biological process=electron transport
  Homolog annotation: Hit_ID=Q76LB2; Match level="QueryCoverage=99%, HitCoverage=44%, E-value=2e-61, Identity=58%"; Hit description =Aluminum-activated malate transporter
IESECFRENATFENLEAKPFLQVYQSVLNSKATEDSLCNFAKWEPCHGKFKLRHPWSQYQKLGALCRECASSMEALSSYVVTLARTEYPEAHPELCSQQVRTACRQMSLHSAKALRELTAAMRTMTTVPSPASVHVSAAIKAAKGLRDGLSEGADLARAMHVAVIASLLSELVTKTKQITESVDVLARLARFRNPETTQTHKGVAIDVVS

SEQ ID NO: 69456 - protein, 85 aa, Zea mays
  Coding DNA Sequence Number=SeqID_27677
MAQRRSADDLFIYPEIEVGRAHGEEKITRFVGARDICADSVLSGESDSRRISDRITGKEGRSYTSPDGRSGTPVPIRCRAKMPPK

SEQ ID NO: 69457 - protein, 80 aa, Zea mays
  Coding DNA Sequence Number=SeqID_27678
MARRVQYRGGDLVVEKLLTGGRPLPQVHGGVWAMWWLRAEASVPVEFLTGFMLVVDPTLTGNNDVAGRWTSSLHGFNGRC

SEQ ID NO: 69458 - protein, 241 aa, Zea mays
  Coding DNA Sequence Number=SeqID_27679
  Gene Ontology: Mol. function=hydrolase activity; Cellular component =integral to membrane
  Homolog annotation: Hit_ID=Q6ERC2; Match level="QueryCoverage=98%, HitCoverage=56%, E-value=1e-84, Identity=64%"; Hit description =Cytidine/deoxycytidylate deaminase-like protein
  Pfam annotation: Domain name=dCMP_cyt_deam_1; Domain location=1-201; Score=-11.7; E_value=0.0071; Accession=PF00383.13; Description =Cytidine and deoxycytidylate deaminas
MQIVAKATDQTHKHDTPEGNTVSEANADVTCSLNESMGNGSNLSLPGSFLPKCDSLNMEISCINPWGWMKKKTCERKPLPCDGCFAWHPLRHAPMVAIENAAERDRTMFPSLASITKTDSNGNLEKYCDNEQAKRLKTDTKVKFKHQDNEPSASESFCGDLSETSRPYLCTGFDIYLVWEPCTMCAMALVHHRFKRVFYAFPNPVTGALGGVYMLHGERSLNHHYNVFRVSVPEAYSNGLN

SEQ ID NO: 69459 - protein, 169 aa, Zea mays
  Coding DNA Sequence Number=SeqID_27680
  Homolog annotation: Hit_ID=Q3LRV2; Match level="QueryCoverage=31%, HitCoverage=22%, E-value=1e-16, Identity=77%"; Hit description=Gag
EHAKNEKVTSGGKPESSGSKLEDKVPSRGMKPSGDKHKHKQHEEESTGTTKLHKKKDNKKKKKKIKKLVYYDTYSSMSSTSYIESTSFKRQECKKSKMGHHLTSLHEIIWDIVEFGAQGPQVGNEDYDSDEAAQIQHFNSQATTILLVSLFSHLVLEEDPKAAHNRDHS

SEQ ID NO: 69460 - protein, 106 aa, Zea mays
  Coding DNA Sequence Number=SeqID_27681
MASVVDFRRTAKTGHGDGRHLPLMASNNGKDEREIRASGEGDGRSTSLRRRRRESRSRAADTKWRSALQLSHGVVVVIRFVHAGKGLEDKQGWEGPHMADGLDSFF

SEQ ID NO: 69461 - protein, 83 aa, Zea mays
  Coding DNA Sequence Number=SeqID_27682
MRSSGPGLIVHSEELGSRRGFTMATDFMEGSASAWGSRTRRMVPPTSEPNAQVKLATWVHLLAPAQTRSGGCPAGNDVSERTW

SEQ ID NO: 69462 - protein, 141 aa, Zea mays
  Coding DNA Sequence Number=SeqID_27683
MLVDYTTILDRPGVSVEGPTQQGIKSVVEVTPTSGVMSDEYSDPPLRLRLLRTLRVMALTATGVVVVVVSVSIGVSSSSRDALWWCRGHLWLRCRGRRPLRLHLPLRRGGRVLLLLLLLLASALLLLVQATMQSLQLAGLT

SEQ ID NO: 69463 - protein, 118 aa, Zea mays
  Coding DNA Sequence Number=SeqID_27684
  Subcellular localization annotation: CTP_CleavageSite=28; ConfidenceScore=5.20e-01
MAGGSLLRRAGGWFPPPGAGRRDGQPTRAGAGADRVFSNTLQGPPPTTQGLGPTRHASWPRAEEAKPPRVVRVTTQRLQALLHFRPNQRVKGRTAMQAACNRTKGAHPFDFDASSMEA

SEQ ID NO: 69464 - protein, 83 aa, Zea mays
  Coding DNA Sequence Number=SeqID_27685
  Subcellular localization annotation: CTP_CleavageSite=50; ConfidenceScore=5.09e-01
MADGPKRGVRVRKPKLKVQSRAPFEPRTLFAHVPSSICALCLALSLSLSRSAHANREPPPPSADVHCLFCGRRYACAPSRATI

SEQ ID NO: 69465 - protein, 97 aa, Zea mays
  Coding DNA Sequence Number=SeqID_27686
  Subcellular localization annotation: CTP_CleavageSite=69; ConfidenceScore=5.02e-01
MALHVVEGTCTGGAIISHLSSPPPSCSSSSCVVLLDAAEELANNQLPAAQRPAKNMSAFGVLVTALVLSCVAGASIAGYVFSVLQVQAQGRDRAIPS

SEQ ID NO: 69466 - protein, 508 aa, Zea mays
  Coding DNA Sequence Number=SeqID_27687
  Homolog annotation: Hit_ID=Q6EN70; Match level="QueryCoverage=93%, HitCoverage=89%, E-value=1e-112, Identity=53%"; Hit description =Streptococcal hemagglutinin-like protein
  Pfam annotation: Domain name=DUF566; Domain location=130-486; Score =94.6; E_value=2.9e-25; Accession=PF04484.3; Description=Family of unknown function (DUF566)
  Subcellular localization annotation: CTP_CleavageSite=92; ConfidenceScore=5.72e-01
MAAAAAAAPPSECADLMPPPPTAPRPRRRAREVSSRYLSTPVPPTPRLSTVSAASSTRSRSPTPSPRGRQRMATPFANENHPPPPPKGTVARRRAVQKLFDETGAGNPRASVGSNSADVLEATPRPLLRSTRGPVAPTARRGYPRLPTPARAGSCPTSAAVESDASSCCFSSDTSSTSTDFSEADGALGMAPAAPCESPTLLGPASCRGGRLSSELRSSVPESGGSSRASNPLCYRSLNSALSISMAMAGKPTPAGRPPQPQGPKATDLKKAATVGGRKAVGKQEDVHQLRLMDNSYLQYRLLNARAEAAGKAKAAAAEKSLYGLEEKIASLSVSVAEKRVEVQWMRRENRLSSVVNAQISCLNQWSDVEGSYASCLRGATRALYNGSLRLPIIGSVDVNCEELTEVLKSATQLLEPLTSCIDNFLPKVEQIDDVACNLAQVIATEKTLIEECGNLLYHAQNLQPMSLPLAGICSDFATKYPTDAMTNSNCIDEGEQFVESSDATETK

SEQ ID NO: 69467 - protein, 44 aa, Zea mays
  Coding DNA Sequence Number=SeqID_27688
MAQNIAILLLVLNVIKKRLITWKDRVTKAIEKIKSARNKSSQGR

SEQ ID NO: 69468 - protein, 199 aa, Zea mays
  Coding DNA Sequence Number=SeqID_27689
  Homolog annotation: Hit_ID=Q7G3M2; Match level="QueryCoverage=45%, HitCoverage=25%, E-value=4e-25, Identity=58%"; Hit description =Expressed protein
  Pfam annotation: Domain name=X8; Domain location=112-196; Score =171.7; E_value=1.8e-48; Accession=PF07983.3; Description=X8 domain
DQGAVKDQGRDQGQEAVEIKDQGEGQSQVEIKGQAEGVEIKARAEGQSQGGDQSQGGGQGQGGSQGQGGGGGDQGQERPTDIHDAETRRHSRRSYTHLRWRRRCRPGAGQTLWCVAKPTVPDPIIQEAMDYACGAGAGCDSILPSGSCYRPNTVLAHASFAFNSYWQQAKATGGTCDFGGTATIVTRDPSYEECKFDLM

SEQ ID NO: 69469 - protein, 147 aa, Zea mays
  Coding DNA Sequence Number=SeqID_27690
  Gene Ontology: Mol. function=coproporphyrinogen oxidase activity; Cellular component=chloroplast; Biological process=porphyrin biosynthetic process
  Homolog annotation: Hit_ID=Q2F7H7; Match level="QueryCoverage=93%, HitCoverage=33%, E-value=2e-73, Identity=98%"; Hit description =Coproporphyrinogen III oxidase
  Pfam annotation: Domain name=Coprogen_oxidas; Domain location=32-146; Score=-112.8; E_value=5.7e-09; Accession=PF01218.9; Description =Coproporphyrinogen III oxidase
MASNLLSAVAIEKETPESELPPTFLREDGRGAGSVRARFESMIRRVQGEVCAALEEADGGGARFVEDVWSRPGGGGGISRVLQDGRVFEKAGVNVSVVYGVMPPDAYRAAKGEAGKNEVAADGHKPGPVPFFAAGISSLHAEIAHGS

SEQ ID NO: 69470 - protein, 66 aa, Zea mays
  Coding DNA Sequence Number=SeqID_27691
MTWYSSPRDATTTTVFDSPGGGELSDSISPQQERSAPVIPATLLAGGGGDGATKATQEAAPCRLSH

SEQ ID NO: 69471 - protein, 172 aa, Zea mays
  Coding DNA Sequence Number=SeqID_27692
MAKSLRSKREKRLRTLRREIAEPFYDKKEAAKLAAQAAALAAAPLPVRGPPPSQDAGSSRAASSASAMGGNRNSSTLCVLVVHSQLTLLSVKTLWLIGYTSKEKQMPTGYLQKLSTRCGGSADVEMSDAGNNRSKTFLRPLGSISKKKVQLHLKIKKDKRKARKKGKFSFKK

SEQ ID NO: 69472 - protein, 79 aa, Zea mays
  Coding DNA Sequence Number=SeqID_27693
MPLATALAAGRAFLGAMEGGERVTLRPGGGGGGCADGQGLSAGRKGRWVRVSVNGTCKCNLAPVVAWRHINVLERQPEE

SEQ ID NO: 69473 - protein, 179 aa, Zea mays
  Coding DNA Sequence Number=SeqID_27694
  Gene Ontology: Mol. function=transcription factor activity; Cellular component=nucleus; Biological process=regulation of transcription, DNA-dependent
  Homolog annotation: Hit_ID=Q5MJ54; Match level="QueryCoverage=32%, HitCoverage=26%, E-value=4e-16, Identity=68%"; Hit description=AT -rich element binding factor 2
  Pfam annotation: Domain name=AP2; Domain location=2-66; Score=138.8; E_value=1.4e-38; Accession=PF00847.10; Description=AP2 domain
MEPRFRGVRKRPWGRFAAEIRDPARKARVWLGTFDTAEAAARAYDAAALHFRGPKAKTNFPVAFAALPPPPPPKKPAAVTARVSVPAGPVARPQPSGTPAMVAAQPFLFLDPRLAVTVAVPAPVPYRPTAVAAGANKHAAASCREEEQSDTGSSSSVVDASPAVGVGFDLNMPPPAEVA

SEQ ID NO: 69474 - protein, 509 aa, Zea mays
  Coding DNA Sequence Number=SeqID_27695
  Gene Ontology: Mol. function=protein serine/threonine kinase activity; Cellular component=cytoplasm; Biological process=protein amino acid phosphorylation
  Homolog annotation: Hit_ID=Q5QNM6; Match level="QueryCoverage=97%, HitCoverage=97%, E-value=0.0, Identity=71%"; Hit description =Putative wpk4 protein kinase
  Pfam annotation: Domain name=APH; Domain location=26-200; Score= -15.3; E_value=0.071; Accession=PF01636.13; Description =Phosphotransferase enzyme family
  Pfam annotation: Domain name=NAF; Domain location=363-428; Score =54.6; E_value=3.2e-13; Accession=PF03822.5; Description=NAF domain
  Pfam annotation: Domain name=Pkinase; Domain location=24-278; Score =341.0; E_value=2e-99; Accession=PF00069.15; Description=Protein kinase domain
  Pfam annotation: Domain name=Pkinase_Tyr; Domain location=24-276; Score=47.7; E_value=2.1e-15; Accession=PF07714.7; Description =Protein tyrosine kinase
  Pfam annotation: Domain name=RIO1; Domain location=37-186; Score= -91.2; E_value=0.03; Accession=PF01163.12; Description=RIO1 family
  Pfam module annotation: Pfam domain module=APH::NAF::Pkinase::Pkinase_ Tyr::RIO1; Domain location=26-200::363-428::24-278::24-276::37-186
KGGSSNGGGGGRESKKPALLLGRYEVGKLLGQGNFAKVYHARSVRTGEEVAIKVMEKEKILKSGLMAHIKREIAVLRRVRHPHIVQLYEVMATKLRIYFVMEYVRGGELFARVARGRLREDDARRYFQQLVSSVAFCHARGVYHRDIKPENLLLDDAGELKVTDFGLSAVAEQMRHDGLFHTFCGTPAYVAPEVLSRRGYDAAKADLWSCGVVLFVLAAGYLPFRDRNLVAMYRKIHRGEFRCPRWFSPGLTRLLRRVLDTSPPRRATAAEIMGDEWFKVGFRRFSFRVEDDRSFTRFDLDDDASTSPPEPDTPRADAAAAGREKPRRVAAGLTSCASAPSLLQLEARGGSSSSSSSSSSSRRRSSLNAFDIISFSRGFDLSGLFEGGGAPEQPPHPAAARFVSAAPAERVLAALEAAASAAGMAVRGRDDSSVSIEGTREGEHGALAVAAEIYELTPELLVVEVRRTSGGAADYEEFFRARLRPSLRDLVCDEDEPTLLQSDERSRSL

SEQ ID NO: 69475 - protein, 109 aa, Zea mays
  Coding DNA Sequence Number=SeqID_27696
MADGLQSAINGFGYLRRRQWEEQWGGRNGHARFGVFKTQVAQTSGLGARSDCSVARRAGIVASGSGPGLGLEAARRGKELARRGIPGQRARSGSDVAAGERRGSAAVAR

SEQ ID NO: 69476 - protein, 71 aa, Zea mays
  Coding DNA Sequence Number=SeqID_27697
MVDSGCTGKTPVKADRANQRDWGQSEKCPELLTVRQNSPRQRAWHGLDGGRRTGGGLRVFNSNSNLVSKLN

SEQ ID NO: 69477 - protein, 280 aa, Zea mays
  Coding DNA Sequence Number=SeqID_27698
MPPPRFREHDETEVRPLADDPQLLDLQRATTARVSRFKHVPLDSWLPAQRDPTAAPPFSTRTQESFFMAHLYAQVALRAHQRLDLTAFRSVSGAESKGHITYLPGLYSLLTFGGRYVEEWLRVFYATVWVDPYNQLMRFKFEYQRAFCIPESSMRLHSMCCGTSDPPRCPHNGVAPGTAHVAALFRPPFSDGSRRSPTDFTLAAKFLYELMRCTLLPRMGYREATTHIQLWLLGALISHSDFDVVDFLIWEIEDTVLDDLRARRQLPYAHYLRHIFDQLI

SEQ ID NO: 69478 - protein, 152 aa, Zea mays
  Coding DNA Sequence Number=SeqID_27699
MEHHRWSSKGWEPAQAYTGVCAQIPSPKLDGGRAWVEDATRPSKGSGDRTRVRCWRASIARTPTPTTLARTNGPSASHRARGRRTKGGRRSPESEIHGHGVWEGSPAHVRVRRLVIGPRCQQARKRKGMGHASDGEVFWLATLAHASVRIDS

SEQ ID NO: 69479 - protein, 80 aa, Zea mays
  Coding DNA Sequence Number=SeqID_27700
  Gene Ontology: Mol. function=Rab GTPase activator activity; Cellular component=intracellular; Biological process=regulation of Rab GTPase activity
  Homolog annotation: Hit_ID=Q5QMF8; Match level="QueryCoverage=86%, HitCoverage=8%, E-value=3e-20, Identity=74%"; Hit description =RabGAP/TBC domain-containing protein-like
MRVPSRGQKEGPALVTTKDAGDAVTLLQILSGCTFDSSQLVLTSRMGYQSVNETILQELSNEHYPPVISAIEERAKCLGV

SEQ ID NO: 69480 - protein, 588 aa, Zea mays
  Coding DNA Sequence Number=SeqID_27701
  Gene Ontology: Mol. function=protein dimerization activity; Cellular component=nucleus; Biological process=regulation of transcription, DNA-dependent
  Homolog annotation: Hit_ID=Q8S976; Match level="QueryCoverage=61%, HitCoverage=55%, E-value=1e-93, Identity=48%"; Hit description=Auxin response factor 10
  Pfam annotation: Domain name=Auxin_resp; Domain location=277-360; Score=119.3; E_value=1.1e-32; Accession=PF06507.4; Description=Auxin response factor
  Pfam annotation: Domain name=B3; Domain location=137-242; Score=82.5; E_value=1.3e-21; Accession=PF02362.12; Description=B3 DNA binding domain
  Pfam module annotation: Pfam domain module=Auxin_resp::B3; Domain location=277-360::137-242
MSPEACELTLAPRMPASQAGAGAGAEPETKGSVHPQLWYACAGPTCTVPPVGTAVYYFPQGHAEHAGAAADANLHAPPFVPCRVAGVRFMAELDTDEIFVKIRLDPLRSGEPLTDVGEAQVVNDEAGQRQPTRPVISSAKTLTKSDSYSGGSLSVRRTCAETIFPKLDKSIKRPQQLVSARDVHGVEWTFRHVYRGTPERNLLTTGWSDFVNSKKIVIGDSVVFLREEDGTIHIGLRRAERASRRNAYGRQLVRGNASGTGAAADGVLRAEDVVAAAVTLAAAGNPFEVVHYPRATAPAFCVRVATVIEALQVSWCPGLRFKMAFEAKDLSRISWFMGTVAGVGPADPARWPLSPWRFLQVTWDEPELVRNMNRLSPWQVELVATMPNLPHFAAPPTPTPPRKKPRMPTYKEYQSQGRQLFDPVFPLNNPLPLPHPHHHPAPTHDWNCHGFVHCSSFPFPDSIAPAAAAGIQGARHANFAQFLFSDHLLSNLRRSLVLGGIRQYPGDHHAAPAPRIPIPTDDVKTGSETPRSPSHATKKRDGVKPPGIRLFGQEILTEEQMKGSHDGKATNNTSGRSGAPEFGLEPGQ

SEQ ID NO: 69481 - protein, 94 aa, Zea mays
  Coding DNA Sequence Number=SeqID_27702
MEPKAPELYFSVCPPLVSFRWRGSSLAYEQVVLVNFRKEVMSFILKDPRRRPIVTAPTVIAAHNEDREKVDRVQHTTTTDMWSQSSHHNPLGPK

SEQ ID NO: 69482 - protein, 61 aa, Zea mays
  Coding DNA Sequence Number=SeqID_27703
MCELKFTKERVGCYLLVVLVIVLLVGVLFGLGVFRHGYDRFKDLGRNHTCFDCNTTVQTIL

SEQ ID NO: 69483 - protein, 416 aa, Zea mays
  Coding DNA Sequence Number=SeqID_27704
  Gene Ontology: Mol. function=nucleotide binding; Cellular component =membrane; Biological process=small GTPase mediated signal transduction
  Homolog annotation: Hit_ID=P49104; Match level="QueryCoverage=63%, HitCoverage=87%, E-value=9e-88, Identity=68%"; Hit description=Ras -related protein Rab-2-B
  Pfam annotation: Domain name=Arf; Domain location=58-247; Score= -103.6; E_value=0.092; Accession=PF00025.11; Description=ADP -ribosylation factor family
  Pfam annotation: Domain name=DUF702; Domain location=260-355; Score= -2.0; E_value=4e-09; Accession=PF05142.3; Description=Domain of unknown function (DUF702)
  Pfam annotation: Domain name=Miro; Domain location=66-202; Score =19.4; E_value=7.1e-05; Accession=PF08477.3; Description=Miro-like protein
  Pfam annotation: Domain name=Ras; Domain location=66-249; Score =260.4; E_value=3.8e-75; Accession=PF00071.12; Description=Ras family
  Pfam module annotation: Pfam domain module=Arf::DUF702::Miro::Ras; Domain location=58-247::260-355::66-202::66-249
MSYAYLFKYIIIGDTGPCRHVGPLPSSVLRLDPRASQPESAAARWRSNLVRLPACDDGDVLGFPIAAGVGKSCLLLQFTDKRFQPVHDLTIGVEFGARMITIDNKPIKLQIWDTVLSRLLVHGNLSYPSPVANWNLGCPVGVAGQESFRSITRSYYRGAAGALLVYDITRRETFNHLASWLEDARQHANANMTIMLVGNKCDLSHRRAVSYEEGEQFAKEHGLIFMEASAKTAQNVEEAFVKTAGAIYKKIQDGVFDVSNEGFSGGGSCRAPSPDPKHLKPPLCPDPPSYCGEPVGTVAVATERFPREVSSEALFHCVRLGPVHETGTEVAYQTSVKIAGHVFKGILHDVGPDPSSSVAASDDYFRHATDGSSPGTVGEGSVAGAGPSRHWLWSWTRTRRQRPNRTTAHISSTAIR

SEQ ID NO: 69484 - protein, 299 aa, Zea mays
  Coding DNA Sequence Number=SeqID_27705
MPKLEFTIRAENLGQYPREPPRDSDMHWGEVPQFGDANKLADLRLKDITIADFDIGVRTENPVRSPPKLPFDKKAVVVPKLALPWLGPLDKLFVETSPRKLCRLRRWRRVRRQSPDNPLQLNINYLVLATGYSLGIIGMKTVGDCNRKRVWVKDFGFAGKGCKAQRRAVRDRRHASFAESYLIASDAGDAFSNYKHRTMLMHYDVDRSEDRQSEEVQSAYRRDSDIGEEMIISSEEQNDENEWSWVNQDRDGGPLAESVSSLHMTQQVLENGTVFFRYFESWNFMVFQCRIMQHLAKYA

SEQ ID NO: 69485 - protein, 75 aa, Zea mays
  Coding DNA Sequence Number=SeqID_27706
MPLPMRHQQVLKLVLELPDVVAATRTMSLRCRSPFCCLHTMYHVVTPHCIELLQPHVPVLPCKKDQDFTYLRNGN

SEQ ID NO: 69486 - protein, 87 aa, Zea mays
  Coding DNA Sequence Number=SeqID_27707
MAMRRTIQWETHTRHEWGLSKESLSEEDEIVAIIVIHKSSTTPRLFNMFDDDDCPSHLYHGKWRDVKPNQNPNLLLVIYLVMKKLIK

SEQ ID NO: 69487 - protein, 396 aa, Zea mays
  Coding DNA Sequence Number=SeqID_27708
  Homolog annotation: Hit_ID=Q8GZC4; Match level="QueryCoverage=26%, HitCoverage=39%, E-value=2e-08, Identity=33%"; Hit description=Zinc finger protein
  Pfam annotation: Domain name=zf-C2H2; Domain location=271-294; Score =20.0; E_value=0.0084; Accession=PF00096.16; Description=Zinc finger, C2H2 type
  Pfam annotation: Domain name=zf-C2H2; Domain location=346-368; Score =14.9; E_value=0.25; Accession=PF00096.16; Description=Zinc finger, C2H2 type
  Pfam annotation: Domain name=zf-C2H2; Domain location=79-103; Score =2.8; E_value=5.2; Accession=PF00096.16; Description=Zinc finger, C2H2 type
  Pfam module annotation: Pfam domain module=zf-C2H2::zf-C2H2::zf-C2H2; Domain location=271-294::346-368::79-103
MVQVTKETTPTFSALSSGICFFDRKFYLLAAEAAAAEDAAHGAEGNEPPKALLLKIQAQGTAVEPALRQGSGLAPTMGTQCLECECDKVFASKKAMFVHLQRDYNGATSPTINMAAAAATTAVEKKLWDLWEEAGLRGRPPVAPLQASRCCSSQEDQEEVEAAMTLLEMASHGRTSSETQQQSVEPVRAPNAASGQHIVKTSAVEQVVAVQVVLPTIPPIFPSLDSSAGDKKAKKRRVMNHPEEAAASTSPLPLPPKGAARTPAPVSGKTHTCRTCGKSFSTHQALGGHVSSSHVKGKTTSVRHDGQSAGNGNITIPDSAGAFQERQDAQPSPAQAPTPQTTQASHVCDVCSLTFTSGQALGGHMGMHRKPAAPVLEPEYFDLNELPGQGENDNQP

SEQ ID NO: 69488 - protein, 657 aa, Zea mays
  Coding DNA Sequence Number=SeqID_27709
  Gene Ontology: Cellular component=integral to membrane
  Homolog annotation: Hit_ID=Q9FF99; Match level="QueryCoverage=95%, HitCoverage=94%, E-value=1e-116, Identity=50%"; Hit description =Amino acid transporter
  Pfam annotation: Domain name=Aa_trans; Domain location=30-653; Score =340.0; E_value=4e-99; Accession=PF01490.8; Description=Transmembrane amino acid transporter protein
MALGEGGDHGAALPLIADQAKHAAAGGIVRSGSMWTAAAHVITAVIGSGVLSLAWSIAQLGWVAGPAAMLVFAAVTALQSTLFADCYRSPDPEHGPHRNRTYAKAVDRNLGSNSSWVCMLLQHTALFGYGIAYTITASISCRYAACILLYTDMVVGTRAPKPASRLSDVPIVWWNTRARSSRTGATAKAAHHSVEVLDGHPLRSLWPGGDSLIRPSRVRVPTFGPCLSYVSPPITARDGVRRARAGTAWTVDVRGAHQHGGDRLRGAVLGMERASVAQLGWVVGPSGMFCFALVITHVSAALLASPTATGAETPRRATEPLLNGRHLRVPRAILKANCYHEHGHDAHCDYDGNYYMLIFGGVQLLLSFIPDFHDMAWLSVVAAAMSFSYAFIGLGLGLARTIANGTIKGSITGVRMRTPMQKVWRVSQAIGDIAFAYPYSLILLEIQDTLKSPPAENKTMKRASMISILVTTFFYLCCGCLGYAAFGSDAPGNLLTGFGLYGPYWLIDFANACIILHLLGGYQVYSQPIFQFAERLLAERFPDSGFVNGGSYTVRFACLRACRVNPLRVCLRTLYVASTTAVAVALPYFNEVLALLGALSFWPLAIYFPVEMYFIQRNVRRWSARWVVLQTFSVVCLLVSAFALVGSIEGLISKKLG

SEQ ID NO: 69489 - protein, 246 aa, Zea mays
  Coding DNA Sequence Number=SeqID_27710
MWKSSSEGGMFVFAPTFALRGASSTKLAGVEDCREMRLGYFGNGVRRAPGAEEVPEQEEELVVFEAFFAADLRLPTHRFVVEVLRKFKKRKIGDKIAQFGSCTFMPRTGKTSAKVVEIVPCARNKWGNWWDFWFYVASEDIEGLPSLPPAILCSHCYVAFPQFEVAEEDEDEGVLRYAARLSSGCDLVEEFIAYGALLCSAHCARQWVKAPSPPRVAETAVVGAGGASMELSVDDYLVGGVAMFNA

SEQ ID NO: 69490 - protein, 255 aa, Zea mays
  Coding DNA Sequence Number=SeqID_27711
  Gene Ontology: Mol. function=binding; Biological process=protein kinase C activation
  Homolog annotation: Hit_ID=Q9LRV2; Match level="QueryCoverage=80%, HitCoverage=42%, E-value=8e-20, Identity=29%"; Hit description =Selenium-binding protein-like
  Pfam annotation: Domain name=PPR; Domain location=63-97; Score=31.4; E_value=3.2e-06; Accession=PF01535.11; Description=PPR repeat
MVSASTAVSTVSAISTHIAAGHLFTAIDALPSCSASSDENGWQGVGLADAREMFDAMPRRDGGSWNAIISASSRAGHPAEAFSLFADMNSLGIRPKDFTLASVLACCAAECLDLRGAQAAQQLHGHIVYGKCLSLTDARRAFDDILQPNDVFMEHNHPEVSSCCTKALQPGPKEGCGDVHFGCVRVELAVCGRIADAKLVFDGMEQHNLVSWNAMLTGYVKPMDLADEAEETKELDVVTLASVLNACTGLLDLGK

SEQ ID NO: 69491 - protein, 122 aa, Zea mays
  Coding DNA Sequence Number=SeqID_27712
  Subcellular localization annotation: CTP_CleavageSite=46; ConfidenceScore=5.27e-01
MPAWWPPQQAEASSPRKSADLESPSPSPSPTPTPRDRKAHSLDFPGAAAARGRPAGAAPGHGSVGYKLPTPVEAVEPVGTLYEVVLAAAAAAAAGDGCSSAEESSVCSAASLDEPHYQHGFR

SEQ ID NO: 69492 - protein, 312 aa, Zea mays
  Coding DNA Sequence Number=SeqID_27713
  Gene Ontology: Mol. function=isomerase activity; Cellular component =endoplasmic reticulum; Biological process=cell redox homeostasis
  Homolog annotation: Hit_ID=P29828; Match level="QueryCoverage=95%, HitCoverage=52%, E-value=5e-78, Identity=50%"; Hit description =Protein disulfide-isomerase precursor
  Pfam annotation: Domain name=Thioredoxin; Domain location=35-174; Score=55.7; E_value=1.6e-13; Accession=PF00085.10; Description =Thioredoxin
MVVSLVLPFTLLAGILLLSGYALAGPETAAEPGEMVLTLDAGNFSEVVAKHQFIVVEFYAPWYVWPLQATRSRGNNSLPLSYTSLCQTAGCPPRRMQLAPCMQYEKAAAVLRDHDPPLVLAKVDAYDERNKDIKDKYQVHAYPTLKIIENGGKDVRGYGGPRDADGIVEYLKKQVGPASIELSSAEAAQASIGDKGVILVGVFPEFAGVEYENFMAVAERKRSDYDFFHTSDASILPRGDVAIKGPAVRLFKPFDELFVDSQDFDTDALEKFIEVSGFPAVVTFDADPTNHKFLERYYSTPSAKVAICGFSE

SEQ ID NO: 69493 - protein, 267 aa, Zea mays
  Coding DNA Sequence Number=SeqID_27714
  Gene Ontology: Mol. function=diacylglycerol kinase activity; Cellular component=intracellular; Biological process=protein kinase C activation
  Homolog annotation: Hit_ID=Q337S8; Match level="QueryCoverage=96%, HitCoverage=44%, E-value=1e-29, Identity=33%"; Hit description =Pentatricopeptide, putative
  Pfam annotation: Domain name=PPR; Domain location=218-252; Score =39.0; E_value=1.6e-08; Accession=PF01535.11; Description=PPR repeat
  Pfam annotation: Domain name=PPR; Domain location=84-118; Score=17.6; E_value=0.045; Accession=PF01535.11; Description=PPR repeat
  Pfam annotation: Domain name=TPR_4; Domain location=116-141; Score =2.7; E_value=18; Accession=PF07721.5; Description=Tetratricopeptide repeat
  Pfam annotation: Domain name=TPR_4; Domain location=186-211; Score =1.5; E_value=25; Accession=PF07721.5; Description=Tetratricopeptide repeat
  Pfam annotation: Domain name=TPR_4; Domain location=52-77; Score=4.8; E_value=10; Accession=PF07721.5; Description=Tetratricopeptide repeat
  Pfam annotation: Domain name=TPR_4; Domain location=87-108; Score =11.1; E_value=1.8; Accession=PF07721.5; Description=Tetratricopeptide repeat
  Pfam module annotation: Pfam domain module=PPR::PPR::TPR_4::TPR _4::TPR_4::TPR_4; Domain location=218-252::84-118::116-141::186 -211::52-77::87-108
MARHLHHHRGQELVAHLRASSPLADLLRSAPSLPGARAAHGCVLKSPVAGETFLLNTLVSTYARLGRLREARRVFDGIPLRNTFSYNALLSAYARLGRPDEARALFEAIPDPDQCSYNAVVAALARHGRGHAGDALRFLAAMHADDFVLNAYSFASALSACAAEKDLRTGEQVHGLVARSPHADDVHIGTALVDMYAKCERPVDARRVFDAMPERNVVSWNSLITCYEQNGPVGEALVLFVEMMATGFFPDEGLLRRGKDGRSMLIW

SEQ ID NO: 69494 - protein, 117 aa, Zea mays
  Coding DNA Sequence Number=SeqID_27715
MTPSQRSRSQDYTPATVNYTPWAPSGCRLPDYFHDMEHHCASPSTCYSQRAASPEYKPVTPVSRPRCASSPEYIPSSPVVSNAVSRTSPPSRHRYHPYQRSKTSCCQRRRSSSQHGN

SEQ ID NO: 69495 - protein, 213 aa, Zea mays
  Coding DNA Sequence Number=SeqID_27716
  Gene Ontology: Mol. function=beta-amylase activity; Biological process=polysaccharide catabolic process
  Homolog annotation: Hit_ID=Q10LG9; Match level="QueryCoverage=66%, HitCoverage=27%, E-value=7e-41, Identity=65%"; Hit description =Glycosyl hydrolase family 14 protein, expressed
  Subcellular localization annotation: CTP_CleavageSite=27; ConfidenceScore=5.17e-01
MLQRPGQQRAGAVRLGAARRAVSGAVRASSSRHLGPVRALVSEEAAAGERAAEGEGEDVQVRLFVGLPADAVVSDGRGVGRPRAVSAALRELKLLGVDGVELPVSWAVAQPGPGGWFEWVGYRGVAAMVRDAGLDLRVSLRTDGDALPGWVADAAAADPDVLFTDRSGHRRVGCLSFAVDELAVFVGKSLLQAYEAFFRSRPSVSKKRKENRK

SEQ ID NO: 69496 - protein, 87 aa, Zea mays
  Coding DNA Sequence Number=SeqID_27717
  Gene Ontology: Mol. function=DNA binding; Biological process=DNA integration
  Homolog annotation: Hit_ID=Q10AB7; Match level="QueryCoverage=88%, HitCoverage=3%, E-value=4e-16, Identity=53%"; Hit description =Retrotransposon protein, putative, Ty1-copia subclass
MSDAKRSKKLIMKFLVFPTPIGLNTSNFDVKKALNMFSGIGEKYAEPRVLSCIKINPCKFGKIVNKTDIILITTNRNWEQDPKHQNE

SEQ ID NO: 69497 - protein, 34 aa, Zea mays
  Coding DNA Sequence Number=SeqID_27718
  Homolog annotation: Hit_ID=P49690; Match level="QueryCoverage=82%, HitCoverage=20%, E-value=7e-07, Identity=86%"; Hit description=60S ribosomal protein L23
MPLQLDNAGVIVNPKGDMKGFAITGPIDKECANL

SEQ ID NO: 69498 - protein, 67 aa, Zea mays
  Coding DNA Sequence Number=SeqID_27719
  Gene Ontology: Mol. function=translation initiation factor activity; Cellular component=cytoplasm; Biological process=regulation of translation
  Homolog annotation: Hit_ID=O81481; Match level="QueryCoverage=64%, HitCoverage=20%, E-value=2e-15, Identity=81%"; Hit description =Eukaryotic translation initiation factor 4E-1
MGSGSMKATTTDDLDHPRVLLRAKDDDREEGEIIDNACAPAPLATHPLEHSWTFWFDHPQRKSKHAA

SEQ ID NO: 69499 - protein, 318 aa, Zea mays
  Coding DNA Sequence Number=SeqID_27720
  Gene Ontology: Mol. function=hydrolase activity; Cellular component =nucleus; Biological process=gibberellic acid mediated signaling
  Homolog annotation: Hit_ID=Q6L545; Match level="QueryCoverage=99%, HitCoverage=99%, E-value=1e-123, Identity=65%"; Hit description =Gibberellin receptor GID1
  Pfam annotation: Domain name=Abhydrolase_3; Domain location=100-296; Score=185.6; E_value=1.2e-52; Accession=PF07859.3; Description =alphabeta hydrolase fold
MAGSDEVNRNECKGAVPIHTWVLISNFKLAYNMLRRADGTFDRDLSDFLDRRVAPDARAQEGVSSFDHVFDTSTGLEVRIYRASAFYNGGGGATLPILDFLGGTPAASTPFPGVVVSVNYRRAPEHRYPCAYDDGWAALKWATSQPSLGSGSSGGARVFLSGDSSGGNIAHHVAVRAAVAGIRVRGNVLLNAMFGGAERTESERRLDGKYFVTLQDRDWYWKAYLPEDADRDHPACNPFGPNGRRLAGLPFPRSLIIVSGLDLTCDRQLAYADGLREDGHHVKLVYREKATVGFYLLPNTNHYHEVMEEIADFLRANL

SEQ ID NO: 69500 - protein, 126 aa, Zea mays
  Coding DNA Sequence Number=SeqID_27721
MAENICEQKLLIPYVDYENPLKLIYALNQMVWEVQVEVLGDNELAMVTSKFMRFHNNLKIKIRVGKRRGAFNYRDPNDFIASYTKMNVDNKMTSGNGYDYESEDDSDPKISLFTDEIATLNSTFLS

SEQ ID NO: 69501 - protein, 862 aa, Zea mays
  Coding DNA Sequence Number=SeqID_27722
  Gene Ontology: Mol. function=protein binding; Biological process =protein metabolic process
  Homolog annotation: Hit_ID=Q6ER93; Match level="QueryCoverage=99%, HitCoverage=99%, E-value=1e-173, Identity=45%"; Hit description=Heat shock protein-related-like
  Subcellular localization annotation: CTP_CleavageSite=83; ConfidenceScore=5.36e-01
MRAGGCTVQQSLTAEAAAVVKQAVSLARRRGNAQVTPLHVASAMLAAPTGLLRAACLRSHSHPLQCKALELCFNVALNRLPASAAVASSPLLGGHGHHHHHHYYPPSLSNALVAAFKRAQAHQRRGSVESQQQPVLAVKIELEQLVVSILDDPSVSRVMREAGFSSTQVKANVEQAVCSSTTTTSTAAAATAPSKNPNPSSSAATASPPQEAAKGNKLPLHQARDEDVAAVLDCLASRSKRRVVVIAESAAAAEATAHAAMDKIKSAEAKHDALRGAQVVSVRVSSFREMAREETERRLGELRCLVRGRRGQVVVLVVEDLKWAAEFWAGHVVQSGRRGYYYCSVEHVVTELRALASGGGGSLCWLLGFGTYQAYTRCRVGQPSLESLWELQTLTVPAGSLALSLNCAFDDSALGLGTVNQSMKAGSSDTDGNGPASCWPLLAGSKLISRCCGGDCSAARIETTKAALPRTPFVSSSSLPSWLQHCRDHQEPATHLTDDLGKTWSSICSSSRPSQRTTTLHFSAPVSPASSISSYEHGGGQSQQPRHSWLLAGLDAAHHPWRPKREASIRSHDSGASNGSVEVECRARFKELNAENLKLLCGALEKEVPWQKEIVPEVASAVLQCRSGIAKRRDKSRSADAKEETWMLFLGGDADGKERVARELARLVFGLRSSFLSIRPGGVVSASSPPPASSGSSEGHRSSKRPRMPEEEPAAYYLERLHEAVSENPHRVIFMEDVERADRDCQLRIKEAIESGVVRNHAGQEVGVGDAIVILSCESFGDSRSSRACSPPSKKVKVEMEEAKEERAGDHEHNQDGVSKPSPSCIDLNVDMESDQADEPSLGDQCLLTAVDRALFFRRQDN

SEQ ID NO: 69502 - protein, 211 aa, Zea mays
  Coding DNA Sequence Number=SeqID_27723
  Pfam annotation: Domain name=DUF1279; Domain location=132-204; Score=- 13.4; E_value=0.00045; Accession=PF06916.3; Description=Protein of unknown function (DUF1279)
MSCARALRPAPPRPAPARRGERARARVWLSTLSPLIHDLIVAPPQGEGPDFDGPFTCMSCARALRPAQQLQLQCGTLACCSRSLRRTRRPVCVVQETKEREAKTAEEITEKYGLEFGLWKVFNSKEEEEGAEGKKSRTAKELLAKYGSAYLAISISLSLVSFALCYLLISAGADVQELLAKVSIFSMNTFLTSFVNYYASIEAKCFDLTSA

SEQ ID NO: 69503 - protein, 69 aa, Zea mays
  Coding DNA Sequence Number=SeqID_27724
MRSCTSYVASGTAASIQSSIALHAFRLYESGKGRKAATSKLQQSEQLPKRWEQCWPQDITDKLLKTGLS

SEQ ID NO: 69504 - protein, 82 aa, Zea mays
  Coding DNA Sequence Number=SeqID_27725
MEGAPLGRQGRGAGALGSERHGWQKERRSCVQDIWSRVLGIRKIGVRANPAIHASVRKTKAGLTDEPHESVASRGVGPHASD

SEQ ID NO: 69505 - protein, 225 aa, Zea mays
  Coding DNA Sequence Number=SeqID_27726
  Gene Ontology: Mol. function=GTPase activity; Cellular component =microtubule; Biological process=cell division
  Homolog annotation: Hit_ID=Q9SMB6; Match level="QueryCoverage=90%, HitCoverage=33%, E-value=2e-88, Identity=84%"; Hit description =Phragmoplastin
  Pfam annotation: Domain name=Dynamin_N; Domain location=32-202; Score= 275.8; E_value=8.4e-80; Accession=PF00350.13; Description=Dynamin family
  Pfam annotation: Domain name=MMR_HSR1; Domain location=5-203; Score= -12.8; E_value=0.015; Accession=PF01926.13; Description=GTPase of unknown function
  Pfam module annotation: Pfam domain module=Dynamin_N::MMR_HSR1; Domain location=32-202::5-203
  Subcellular localization annotation: CTP_CleavageSite=33; ConfidenceScore=5.33e-01
MARFFVLVLIGSGAVTPASWGWISRVAGGGTAMSSGKSSVLESVVGKDFLPRGSGIVTRRPLVLQLHRIDGDREYAEFMHLPRKRFTDFAAVRKEIADETDRETGRSKQISPVPIHLSIFSPYVVNLTLIDLPGLTKVAVEGQPENIVQDIENMVRSYIEKPNCIILAVSPANQDLATSDAIKISREVDPKGERTFGVLTKIDLMDKGTDAVDGQRRPTEGLRQQ

SEQ ID NO: 69506 - protein, 130 aa, Zea mays
  Coding DNA Sequence Number=SeqID_27727
  Gene Ontology: Mol. function=GTPase activity; Cellular component =microtubule; Biological process=cell division
  Homolog annotation: Hit_ID=Q672H6; Match level="QueryCoverage=32%, HitCoverage=58%, E-value=2e-12, Identity=81%"; Hit description =Phragmoplastin
  Pfam annotation: Domain name=GED; Domain location=49-126; Score=5.0; E_value=0.00099; Accession=PF02212.8; Description=Dynamin GTPase effector domain
MARSPDPLTSAAAGREGKAAEGKAGGESAERGKMGAAGRGWDLYHMQYARPHSCEGMPCKHRKTSIPLLKECLMRLHSYLIILPFCMQMKQLSKLLDEDPAVMERRTNLAKRLELYRSAQSEIDAVAWSK

SEQ ID NO: 69507 - protein, 101 aa, Zea mays
  Coding DNA Sequence Number=SeqID_27728
ELAENVAEMINPQFANKVDMSEVHVTDLIFVPNLCEYFIDITIGEEDSTSIRQYLQDEFLAMITKSLMTLVHGLETKFDAEMVAMAHVPWATLESVGDQSD

SEQ ID NO: 69508 - protein, 68 aa, Zea mays
  Coding DNA Sequence Number=SeqID_27729
MAQGHISLSVCIVLMRVDEQAAEDFEVQLVETDEQELVEDHYVNGNMENHPGKQCYHKGLMGRPWLIN

SEQ ID NO: 69509 - protein, 368 aa, Zea mays
  Coding DNA Sequence Number=SeqID_27730
  Gene Ontology: Mol. function=oxidoreductase activity; Cellular component=vacuole; Biological process=response to oxidative stress
  Homolog annotation: Hit_ID=Q7X766; Match level="QueryCoverage=87%, HitCoverage=88%, E-value=1e-145, Identity=80%"; Hit description =Peroxidase
  Pfam annotation: Domain name=peroxidase; Domain location=61-331; Score=437.0; E_value=2.6e-128; Accession=PF00141.13; Description =Peroxidase
MARRQQWSRGGLAAVAVLAVLCVLCSGHPVPGGHGSGGGGFVNTLQPHFYDHACPQMQAIVGSVVAKAHAEDPRMAASLLRMHFHDCFVQGCDASVLLDADGSGRFVTEKRSNPNKDSLRGFEVIDEIKAALEHACPRTVSCADIVAVAARDSVVLLIACAAPQTGGPGWEVPLGRRDSLTASLSGSNNLIPAPNDSLPTIIGKFANQGLDIVDLVALSVAVPSTIEQLSAGGHTIGDSRCVSFRQRLYGQNNNGQVDRTLNPAYAAELRGRCPRSGGDQNLFALDPASQFRFDNQYYHNILAMDGLLSSDEILLTQSRQTMGLVHRYAADQGLFFDHFAKSMVKMGNISPLTGSAGEIRHNCRRVNH

SEQ ID NO: 69510 - protein, 97 aa, Zea mays
  Coding DNA Sequence Number=SeqID_27731
MSGELWRSGFPKLASSELLSPGAPDSPVNYSEAPLRIPEGEEFSLESPGAPDTVRWHTGQSGLSKVRRTRTTVCGPNTLGGSVTTGIGAKPISSDIT

SEQ ID NO: 69511 - protein, 462 aa, Zea mays
  Coding DNA Sequence Number=SeqID_27732
MDLVERTGTEESTGITRELLGCSRVLRMVEEEGARAKIGEMIRGDPAVWIYSGADVPQLAEHHGMVVVTTPTEIDAGWKKHIAVVEGPPASQCETSAAVDSGAETPHAGKLAPMGHAAEKGIWAGQILGLTTVEGRGGRGRGVEGVGGMEGGGGACGVAREKRRNPRVDENLFYSIQLFPPSSTGRGDKLVDGTSDVGKPLTSSQVHLADSKVASLGAYRKARAMVYVSSLWRNGLKATNDELTTNFHSYAAASSSPIPIPTPTLPLSFAWHILSSAAACFFTGVVAYFFTGAMVYFFDDAEAYRADGSVDEWISGIWQIFRRSATAYRADGSTDEWISGAWQIFRVRPTGWMDLRCLVYPRHRGLLHQGRRGSGTDLQCWEGGRKPLGGTYFVGAPRREGGSQPPSGGRNPPLGGSNLRTVGPRPVPLGIHEQLLRASRNPRAAAPCLESANPVTSTAPCL

SEQ ID NO: 69512 - protein, 127 aa, Zea mays
  Coding DNA Sequence Number=SeqID_27733
  Subcellular localization annotation: CTP_CleavageSite=84; ConfidenceScore=5.24e-01
MAPYSSRPEKQREKLRICGSHVLTMSARVVLFLHRPSTRSTLSRWTRHCSSPSSSLRRSTPQLLNPCGTALTLPQPRTPSAPPSCSSTRPPHPWEIAMQAWLTQRQMRHQVCVRIFGNAIGFCVFES

SEQ ID NO: 69513 - protein, 41 aa, Zea mays
  Coding DNA Sequence Number=SeqID_27734
MTEIAIVTDGRYVPSALAWSERLAAMATVTYWEVYCLGSDP

SEQ ID NO: 69514 - protein, 87 aa, Zea mays
  Coding DNA Sequence Number=SeqID_27735
MAFAHSKLSSGDVSLGMVVVDANHSSWAAAALPFTDSFTCLNSLLLLGHLNRVVVIVAGVHCLGCAHQLGAIGVPTTKGRLWPQQTL

SEQ ID NO: 69515 - protein, 77 aa, Zea mays
  Coding DNA Sequence Number=SeqID_27736
MEGWGFSRIVFWSGRKRKGKGLNSVGPNLAQTMVHDEEPRWSNSGKPTPAGYRNGWGSRVAETRLDPFRTFPPNQFH

SEQ ID NO: 69516 - protein, 83 aa, Zea mays
  Coding DNA Sequence Number=SeqID_27737
MACRMLPTWVHIYMPSALQLAGPHLSLAIAILAKGRNIRIWNEAVHNMESTIGTKVESIPKLRARKLWLSSRKRNRLKEEKAI

SEQ ID NO: 69517 - protein, 163 aa, Zea mays
  Coding DNA Sequence Number=SeqID_27738
MVALLSRVVTPRTGPYGEPRARARGRASADRRARGVNDRGEGRTDRAGPTLGNTGADRRAKGQGASAGSGIRDLGHAIKIGQGDQTGEGEPLRAALLLSAVVKSLELGQARARVAPGSPGLGREGEDVMANSVAGKRPRIRGQRGKNVGEKASGGPEELRRGI

SEQ ID NO: 69518 - protein, 356 aa, Zea mays
  Coding DNA Sequence Number=SeqID_27739
  Gene Ontology: Mol. function=DNA binding; Cellular component=nucleus; Biological process=regulation of transcription
  Homolog annotation: Hit_ID=Q1S8N2; Match level="QueryCoverage=80%, HitCoverage=64%, E-value=5e-35, Identity=68%"; Hit description =Homeodomain-like
MPGGAGGGKASRAGSSGHGHGHAAAAQQQKKGKWKSVSHAMMDKGFVVSPQQCEDKFNDLNKRYKRVVDLLGRGRACRVVENHALLDAIDELTPKAKDEARKLLSSKHLFFREMCAYHNSGVAGGSHLPPHAGGGAAGDAACLHHPAADDSDAVSDNGEEDEDDYDEEDDGHMYHSHLTSRQHSGGGRRRGKREHGEDSAAAEDLEDEAAGGGKRARTGAAPDPSAMLQQLKSELAAAAAAAMDPQQARCWVRRRAVEVEEQQILLESHAYDLERQRLKWDRFRANKERDMERARLQNDRLRIQSRRLLLMLRHKEVELDMAEANSSSVDHHPGASPLAAHQQTIGSSPSTAGHPN

SEQ ID NO: 69519 - protein, 102 aa, Zea mays
  Coding DNA Sequence Number=SeqID_27740
MHNDCNLNDGEYILVPEQGVAQEIAPDPAPEPSIEDLPAPALEGKPRNPWGLVVYEMEIGIRIKVWYRTLQDMVDGVTWPTTLPPGWTVEWDAAPTGEEQEE

SEQ ID NO: 69520 - protein, 373 aa, Zea mays
  Coding DNA Sequence Number=SeqID_27741
  Gene Ontology: Mol. function=zinc ion binding; Cellular component =intracellular; Biological process=translational elongation
  Homolog annotation: Hit_ID=Q1SFH4; Match level="QueryCoverage=57%, HitCoverage=29%, E-value=3e-85, Identity=73%"; Hit description=Zinc finger, RanBP2-type; AAA ATPase; Translation elongation factor Tu
  Pfam annotation: Domain name=GTP_EFTU; Domain location=175-372; Score= 199.4; E_value=8.7e-57; Accession=PF00009.17; Description=Elongation factor Tu GTP binding domain
  Pfam annotation: Domain name=MMR_HSR1; Domain location=178-331; Score= 13.2; E_value=6.1e-05; Accession=PF01926.13; Description=GTPase of unknown function
  Pfam module annotation: Pfam domain module=GTP_EFTU::MMR_HSR1; Domain location=175-372::178-331
MVYCEMCGVFRETFVKSAKDGLLKDTAVAVSSEPRTSAASKNDSAKAPVKTRAVNSDGDSMRKHASMSYDKANSTQLPSAGSSLGAEKKKKTPVLSEEVPVERIALLASDGFQSKGNQNSGASSSSQNDNVIQKLSSDVGQLNVNKNNVNVTKSCLPDEYKPEKWMLADLESRALSQLNLAIVGHVDSGKSTLSGRLLHLLGRISKKYMHKNEKESKEKGKGSFAFAWAMDESSEERERGVTMTVAVAYLETKKFRVVLLDSPGHKDFVPNMISGATQADAAILVVDASTGSFEAGMDGEGGKSVGQTKEHAQLVRSFGVEQLVVAVNKMDAVDYAKERFDFIKLQLGSFLRSCNFKDSAITWIPLSAVENQN

SEQ ID NO: 69521 - protein, 204 aa, Zea mays
  Coding DNA Sequence Number=SeqID_27742
  Gene Ontology: Mol. function=zinc ion binding; Cellular component =intracellular; Biological process=transcription
  Homolog annotation: Hit_ID=UPI000065DBF5; Match level="QueryCoverage =75%, HitCoverage=94%, E-value=3e-41, Identity=56%"; Hit description =UPI000065DBF5 related cluster
  Pfam annotation: Domain name=DUF59; Domain location=77-161; Score =47.8; E_value=3.5e-11; Accession=PF01883.9; Description=Domain of unknown function DUF59
MDRFPRSRSGSQLATKQCMRGGPTLPEFFFLVKSYCIHFTVMAMGLINANPIIHEKKERRARQAPETTDENAAEPIDQLEIFDILLNDFFKYIKDPEHPYSLEQLNVVTEDSIELNDESNYVRVTFTPTVEHCSMATIIGLCIRVKLVRSLPPRYKVDIRVAPGSHATEAAVNKQLNDKERVAAALENPNLLDMVEECLSPTFD

SEQ ID NO: 69522 - protein, 256 aa, Zea mays
  Coding DNA Sequence Number=SeqID_27743
MALPLPPRCAMPASTEQPTLKLDPHCRDCPSLALLAVPTPFPSTVVGDLPARRSSPHPTPPLDARMHAIGFACLTSPLPPFLLRQVSFSTLASYPQSTSKSRQPGQCRCRGGGRAGSGGDALAGWTHGDGGGWEAHEEGWCRLECEQLCGDCSFEKRRFLRADAPSSSSLARDKDCSPPACAAAALAWAYGPPRSSEKDHTLSLGDVDKAAASDPPRHPLAPGRSLRPTTPGFTKGQGQGTSTELDRVSIYRIGGL

SEQ ID NO: 69523 - protein, 68 aa, Zea mays
  Coding DNA Sequence Number=SeqID_27744
MALGSARALKKFVGSARRVIIELTCAEEEEGKSPRASSSSSVMQTGPTTVASGFAYAKFGKTKVIVSV

SEQ ID NO: 69524 - protein, 698 aa, Zea mays
  Coding DNA Sequence Number=SeqID_27745
  Gene Ontology: Mol. function=RNA-directed DNA polymerase activity; Cellular component=intracellular; Biological process=RNA-dependent DNA replication
  Homolog annotation: Hit_ID=UPI00004C1731; Match level="QueryCoverage =93%, HitCoverage=51%, E-value=0.0, Identity=78%"; Hit description =UPI00004C1731 related cluster
  Pfam annotation: Domain name=RnaseH; Domain location=297-425; Score= -18.5; E_value=0.0031; Accession=PF00075.14; Description=RNase H
  Pfam annotation: Domain name=rve; Domain location=426-569; Score =21.0; E_value=0.0001; Accession=PF00665.16; Description=Integrase core domain
  Pfam module annotation: Pfam domain module=RnaseH::rve; Domain location=297-425::426-569
MNHVFGEHIGRTVEAYVDDIVFKTRKAFDLLSDLEVTFRCLKAKGVKLNPEKCVFGVPRGMLLGFIVSERGIEANPEKITAITSMGPIKDMKGVQRVMGCLAALSRFISRLGERGLPLYRLLRKAECFAWTPEAEEALGNLKALLTKAPILVPPAAGEALLVYVIATTQVVSAVIVVKRQEEGHALPVQRPVYFVSEVLSETKIRYPQVQKLLYVVILTRRKLRHYFESHLVTVVSSFPLGEIIQCREASGRIAKWAVEIMGETISFAPRKAIKSQVLADFVAEWVDTQLPTASIQPELWTMFFDRSLMKTGADAGLLFVSPLGKHLRYVLRLHFPASNNVAKYEALVNGLRIAIELGVRCLDARGDSQLVIDQVMKKSHCRDPKMEAYCDEVRRLEDKFYGLELNHIARRYNETADELAKIALGRTTVPPDVFSRDLHQPSVKIDGTPEPEAPSAQPEKAPGGYTHLLVAIDKFSKWIEVRPLNSIRKFLDFCEDHHIRVDWAAVAHPMSNGQVERANGMILQGLKPQIYNDLNKFGKRWMKDLPSVVWSLRTTPSRATGFTPFFLVYGAEAILPTDLEYGSPRIKAYTDQSNQASREDSLDQLEEARDKALLHSARYQQSLRRYHARGVRSRDLQVGDLVLRLRQDARGRHKLMPPWEGPFVIAKVLKPGTYKLANSQGEVYNNAWNIQQLRRFYP

SEQ ID NO: 69525 - protein, 737 aa, Zea mays
  Coding DNA Sequence Number=SeqID_27746
  Gene Ontology: Mol. function=oligopeptide transporter activity; Cellular component=integral to membrane; Biological process =oligopeptide transport
  Homolog annotation: Hit_ID=Q9FME8; Match level="QueryCoverage=96%, HitCoverage=97%, E-value=0.0, Identity=65%"; Hit description =Oligopeptide transporter 4
  Pfam annotation: Domain name=MFS_1; Domain location=48-385; Score= -49.7; E_value=0.06; Accession=PF07690.6; Description=Major Facilitator Superfamily
  Pfam annotation: Domain name=OPT; Domain location=43-703; Score =797.9; E_value=5.6e-237; Accession=PF03169.6; Description=OPT oligopeptide transporter protein
  Pfam module annotation: Pfam domain module=MFS_1::OPT; Domain location=48-385::43-703
MEIERQLSRRDADVGADDDDDDVALVEQVRLTVPTTDDPTLPVWTFRMWTIGIVSCALLSFFNQFFAYRTEPIIISQITVQVAALPVGHFMARVLPKTKLSAFGREWTMNPGPFNVKEHVLICIFANAGTAFGNGGAYAISIITIIKAFYKRNISFVVSLLLIMTTQVLGYGWAGLMRKHVVEPAQMWWPQSLVQVSLLRALHEKEEQRRMTRSKFFLIALICSCAWYIVPGYLVPTVSAVSWVCWAFPRSVTMHQIGSGMNGIGLGAFTLDWSVVAAFLGSPLVSPFFAIVNVYVGFVGFIYVVLPVCYWAFNLYNASTFPIFSTDLFTGAGQLYNISAIVNDRFEIDMDAYAKQGRIHLSLLFAVSYGLGFASIAATLSHVSLFYGKEIYQRMRESYKGKADVHTRMMKRYDDIPNWWFYLLLVVTMAVALVLCTAFKHEVQLPWWGLLFACAIAFFFTLPISVITATTNTTPGLNVITEYCMGLIMPGKPIANVCFKVFGYMSMNQSVSFLTDFKLGHYMKIPPRSMFLVQLIGTLVAGTVNTIVAWWLLTTVPHICEKELLPQGSPWTCPGDHVFFDASVIWGLVGPRRIFGPLGYYNALNWFFLGGLVCPVFVWLLARALPRHAWWIRLVNLPVILGATASMPPASPINFTAWCFVGAVFNFFVFRYRKQWWKRYNYVLSAAMDAGVAIMGVIIYFALSGHPIDWWGSRGEHCDLATCPTARGVMVDGCPVF

SEQ ID NO: 69526 - protein, 196 aa, Zea mays
  Coding DNA Sequence Number=SeqID_27747
MRTTASGRMLLSVLVALAVTAAHHAAAVGPPKPRGQETHLFEATVRVPDNGAAGDLEEYNYRLLANVLGSVEAARSAMYESELGLFSAFITNNQARRLSKKKKKSSEAASLRQSVQLQHMRTTASGRMLPVLVALAVTAAHHAAAVGPPKPRGQQTHLFETTVRIPDNGEVEEYNYRLLANVLGRSASRQTTTAPI

SEQ ID NO: 69527 - protein, 49 aa, Zea mays
  Coding DNA Sequence Number=SeqID_27748
MGGGLLAVAPALRSVLPLFDPPEQKSSSSPLLEQGCLRGRELLLAEGDE

SEQ ID NO: 69528 - protein, 162 aa, Zea mays
  Coding DNA Sequence Number=SeqID_27749
ALRYNSSDCPVYTGQYPVLQGRAALELASFGNSQRLVRYNSPDMSGVHRTVRCDIEATDTSAPTATCSALNARQRAQKSGTPMLAHRTLYSTCPVRHRTSRRAQKTELQRSEPNGFGDVAGAPDMSGVQGRSVNGCVTIAGALVFWVSLDDGGAPDMIGTVA

SEQ ID NO: 69529 - protein, 152 aa, Zea mays
  Coding DNA Sequence Number=SeqID_27750
MGKSKKGGSSLHHSGDKRKRELTPPLKDFGDSEYSEEFSSESEGSPIHASPPTSSDDSDDSQGISVEVWTYIRAVEHAGLEGSDDSEVSLDEGNSSDSSEEGSDSDNDGEGDGDDGGDGDGDDDGSKGDGNGDGDGSKGDGKDGGGSDKASG

SEQ ID NO: 69530 - protein, 72 aa, Zea mays
  Coding DNA Sequence Number=SeqID_27751
MEKVGKERDPYIQGNRAEENIGRDPPRLKLRSQLLLCQDGHSKRPLFSYLQISHRVVTYAGKNSSILCTARN

SEQ ID NO: 69531 - protein, 37 aa, Zea mays
  Coding DNA Sequence Number=SeqID_27752
MADVPNVKNAGQGMVDILKLLNLHVPFWDNYNSVFYS

SEQ ID NO: 69532 - protein, 108 aa, Zea mays
  Coding DNA Sequence Number=SeqID_27753
  Subcellular localization annotation: CTP_CleavageSite=46; ConfidenceScore=5.80e-01
MKSPTAKQALAAALSALLILLFFVLLCGPSSSSSSPSSQPLQLQPSVVRVRSRRLLSTQCRDSCSTPVGGFSQAFKAPATVLFESLKTTPKSSGSLLLVRMYTLRGQS

SEQ ID NO: 69533 - protein, 104 aa, Zea mays
  Coding DNA Sequence Number=SeqID_27754
MVPTSSPEAWGNAGTSPPGWHNGRGRYKICIAVCSSTTLCPFNLTGSREGCCKPLLAVEPNEVDVIVMRVRDYLSRATPSTDNDAAADLFSSNYMAYLNPSIYK

SEQ ID NO: 69534 - protein, 212 aa, Zea mays
  Coding DNA Sequence Number=SeqID_27755
  Subcellular localization annotation: CTP_CleavageSite=17; ConfidenceScore=5.43e-01
MDDAANPTPPPSTSAASAAAAAAQHQQLQRQLFLMQQAQSHPQQLSQQAMSRFPSNIDAHLRPLGPLRFQQPQPQPQPSHSQGPSQSPSQATQQASPQQQQQQAAAAAAAAQAQAQAQAQAARVRSPEMEMALQDAMRVCNPDVKTPFQSIEDAVNRCATVGFMPNLATFLFRCLSKSRSRVLSLSVDFKFCSSFPMLYSIVKPDGGIVEVF

SEQ ID NO: 69535 - protein, 65 aa, Zea mays
  Coding DNA Sequence Number=SeqID_27756
MDMIRREERGILQLLVVVGWLPMTAMEARGAEREGRRRPQLYLRSKHILISSYSLELAWHIDPTY

SEQ ID NO: 69536 - protein, 192 aa, Zea mays
  Coding DNA Sequence Number=SeqID_27757
  Homolog annotation: Hit_ID=Q2QQY1; Match level="QueryCoverage=88%, HitCoverage=79%, E-value=6e-49, Identity=58%"; Hit description=SAM domain family protein
  Pfam annotation: Domain name=SAM_1; Domain location=121-184; Score =62.6; E_value=1.3e-15; Accession=PF00536.20; Description=SAM domain (Sterile alpha motif)
  Pfam annotation: Domain name=SAM_2; Domain location=120-186; Score =61.2; E_value=3.4e-15; Accession=PF07647.7; Description=SAM domain (Sterile alpha motif)
  Pfam module annotation: Pfam domain module=SAM_1::SAM_2; Domain location=121-184::120-186
  Subcellular localization annotation: CTP_CleavageSite=72; ConfidenceScore=5.20e-01
MGDSGGPHHHRPSPPPLLDAGKRRRIPNVRLAGSVPLPSHLPHPRRVPIAPATRSRKPLQLQHNSNQHDHPSAEPPNTLLKPFVDSGDDVVLAAAFPRKVRAPKSTAWEDSEMETETEMEEQEEVVDVPSWLWGMGMGRYAAAFEAHEVDAEVLPWLTMDDLRDMGIGAVGARRKLFCAIQRLNLQPPPSRR

SEQ ID NO: 69537 - protein, 175 aa, Zea mays
  Coding DNA Sequence Number=SeqID_27758
  Subcellular localization annotation: CTP_CleavageSite=58; ConfidenceScore=5.16e-01
MDAPSAPSLHLPSRPTGGQPNLPVLLDAGAPSPLARAPLLCLVGTPPLPCIVVLGPTQATAPSAFAPPPSRWHASWGRPTAPAVAVARFSGGLPSPLLLQPDPTPTELPHIFPRPTMSAGHVPRPCRRCSRTDVGSFCHLGAARVSARPRCYAKMARRMPTVALLPVTQVDNRPD

SEQ ID NO: 69538 - protein, 98 aa, Zea mays
  Coding DNA Sequence Number=SeqID_27759
MGNDPGDSIEDKLDRLLAQVSMLITHMMLHDQRLARMEKIVLPGADATEGLDGTKSGAGGGRTGKGGAADNNEDPLQESDGSPLGLGIRFYPTFRFGF

SEQ ID NO: 69539 - protein, 238 aa, Zea mays
  Coding DNA Sequence Number=SeqID_27760
  Homolog annotation: Hit_ID=Q9LF51; Match level="QueryCoverage=89%, HitCoverage=61%, E-value=1e-65, Identity=58%"; Hit description =Glutamine-rich protein
MTEVVPPNYRETLFLYGSLIQTMVCLCSMRQPQKRKLLPYHVVADYEAEEDDRILDSDTTGQIPSRLQQWDHNILVKIAEFTTTFDKQVLAYNIMTKKRAIGEFRSEERLMLEQALLQEEKQAMLGLRAEMESREKAGREAAEVKMRLAMEHARAEAQAHSEMMNHGPIRASAVASQGEDGPSHDMVQEHGEDGWGNSQRDDEDPSEDFLNDENEPENGNSDGQEDWRRSGEFDLNSR

SEQ ID NO: 69540 - protein, 74 aa, Zea mays
  Coding DNA Sequence Number=SeqID_27761
MAASCRAGKGDEGGMPRASAMAATRNKGETVMGEKDKGRGLPRRRTAVPTGAPSEHHSGRRRGRLYARKRVPKK

SEQ ID NO: 69541 - protein, 351 aa, Zea mays
  Coding DNA Sequence Number=SeqID_27762
  Subcellular localization annotation: CTP_CleavageSite=60; ConfidenceScore=5.51e-01
MGFAAQRLWPPSSPFPARHGATMALVARRGLVKRPGAANASAYTVAYVTQPAWLVASVVRIATIAQEKMKSWWRISRDYDEFWAWMAHLRHTAWNSVIPFSRLTEHPLRRLVTGQSSHLERLHHRLHEELERWRQEMEQQGSSSSPQQEVESVRRPSPMPPMEASPAPPLGTPATGVAAGGDPNDGDGNDGSSSHNTDLSEKLDRRDGSPDPLLVTSLAGVTSMMRSIPCCAGPLTGKLGPSSITVWSTSTVVTCLVRRPEDGLWGAEDNPRLRSTVNLATMLNTKLDHALDELSRARAKIVQLRAERAERHHLEDGSPSPIETQHPYRSPQHGHHVYDTPGCRTRINLEP

SEQ ID NO: 69542 - protein, 271 aa, Zea mays
  Coding DNA Sequence Number=SeqID_27763
MKSWWRISRDYDEFWAWHPLRRLVTGQSSHLERLHHRLHEELERWRQELEQQGSSSSPQQEVESVRHHSPMPPMEASPAPPLGTPTIGVAAGGDPNDGDGNDSSSSHNTDLSEKQDQRDGSPDPLLVTSLAGVTSMMRSIPCYAGPLTGKLGPSSITVWSTSTVVTCLVRRPEDGLWGAEVCSEHYSFFERYSAEAAMQDAARRELSQYCSVFSGVALWPLHELRAEHAERRHLEDGSPSPVGTQHPYRSPQHGHYVYDIPGYRTRINLEP

SEQ ID NO: 69543 - protein, 36 aa, Zea mays
  Coding DNA Sequence Number=SeqID_27764
MESDIRFVGRDLVAAGATVVSVILVNPSKSLRSTFT

SEQ ID NO: 69544 - protein, 156 aa, Zea mays
  Coding DNA Sequence Number=SeqID_27765
  Gene Ontology: Mol. function=transcription regulator activity; Cellular component=nucleus; Biological process=regulation of transcription
  Homolog annotation: Hit_ID=Q2QMV9; Match level="QueryCoverage=94%, HitCoverage=43%, E-value=1e-32, Identity=55%"; Hit description=Helix- loop-helix DNA-binding domain containing protein
  Pfam annotation: Domain name=HLH; Domain location=74-121; Score=31.6; E_value=2.7e-06; Accession=PF00010.16; Description=Helix-loop-helix DNA-binding domain
GRKRAPKKSGDEDEDPSTAIASGSGPTSCCTTSDSDSNASPLESADAGARRPKGNENARAAGRGAAAATTTTAEPQSIYARKRRERINERLKVLQSLVPNGTKVDMSTMLEEAVHYVKFLQLQIRLLSSDDTWMYAPIAYNGMGIGIDLRMHGQDR

SEQ ID NO: 69545 - protein, 60 aa, Zea mays
  Coding DNA Sequence Number=SeqID_27766
MSRREQRTAAAAATSFWAKLLRATRGGGKKDHRGCSLAARGNTLQERAAAPKCPRGVQLG

SEQ ID NO: 69546 - protein, 159 aa, Zea mays
  Coding DNA Sequence Number=SeqID_27767
MNKMHQKNQSNVRRTLEIEVPGAGLPGLGRMHAWVRWRDQKRTHLGAAALSWSVLPRAASEHPRWSFFPPPRVARSSLAQKLVAAAAAVLCSLLDITNAATAAAIPTNRPRRISFDPLGERRRLFWGCWMFHANCTALGPSKECPDNAYHSELDNTLGC

SEQ ID NO: 69547 - protein, 238 aa, Zea mays
  Coding DNA Sequence Number=SeqID_27768
  Homolog annotation: Hit_ID=Q6Z7U7; Match level="QueryCoverage=44%, HitCoverage=41%, E-value=3e-35, Identity=69%"; Hit description =Putative Blue copper protein
  Pfam annotation: Domain name=Cu_bind_like; Domain location=37-120; Score=122.8; E_value=9.6e-34; Accession=PF02298.8; Description =Plastocyanin-like domain
MASSLVSRLPVAVLLLLVACSSTAAATSYTVGDGSGWTSGVDYTSWAASKDFKVGDNLVFNYAKGLHTVVEVSAGEYMACTAANPLGSESDSSGATTVALKAPGTHYYVCSIAGHCGAGMKLAVAVTVGGSNSNSPGATPDDPTTPRTSPTPTAPYTTPTTTTPYTTTPTTTPPYTTPTTTPTTTTPYTTPTCSGGGGATATPGMTPFMSFPSAAGLGSAALAGFGLVWCVIVQLALL

SEQ ID NO: 69548 - protein, 166 aa, Zea mays
  Coding DNA Sequence Number=SeqID_27769
  Gene Ontology: Mol. function=nucleic acid binding; Cellular component= cytoplasm; Biological process=biological_process
  Homolog annotation: Hit_ID=Q6Z7V3; Match level="QueryCoverage=55%, HitCoverage=43%, E-value=1e-49, Identity=98%"; Hit description =Putative poly(A) binding protein
  Pfam annotation: Domain name=RRM_1; Domain location=47-111; Score =54.4; E_value=3.7e-13; Accession=PF00076.12; Description=RNA recognition motif. (a.k.a. RRM, RBD, or
MAASDVVRSCWSTDITWVVRKYDMLLIVVYGILWGFSAPGPGADPKVDYACTPEEVQQHFQACGTVNRVTILTDKFGQPKGFAYVEFLEQEGVQEALNLNESELHGRQIKVAPKRTNVPGMKQRPPRGYNPYHGYPYRSYGAPYFPPYGYGRAPRFRRPMRYRPYF

SEQ ID NO: 69549 - protein, 131 aa, Zea mays
  Coding DNA Sequence Number=SeqID_27770
  Subcellular localization annotation: CTP_CleavageSite=62; ConfidenceScore=5.15e-01
MRPSQDASACPWDCAPARSRLGRIPRQDRTRAQGRLLARRVCALGPRRHGKPRRGCRQRAVAAAAPRDAVRGRARAVVRGRACAPWGGLAPDPPEGRARATTAEAASSLGLRGSHVEQLGPPLGVSRTRPE

SEQ ID NO: 69550 - protein, 56 aa, Zea mays
  Coding DNA Sequence Number=SeqID_27771
MQQTGRWRQCYTGGGGGGAVQAVARRRGYGYEPENNEEIFLLLRKATETVVKQMMN

SEQ ID NO: 69551 - protein, 390 aa, Zea mays
  Coding DNA Sequence Number=SeqID_27772
  Homolog annotation: Hit_ID=Q6Z7V1; Match level="QueryCoverage=94%, HitCoverage=71%, E-value=1e-127, Identity=83%"; Hit description =LMBR1 integral membrane protein-like
MAVKLDNAHQEYSNAIVVAQATSNQMSKRDILRPYMDIIDNMLSQMLREDPAFKPSGGRLGENDMDYDTDDKSMATLRRQLRRAHEEYYRCKRMVARYAPPISYNFLNLIRLGGNAKTTFEKRMGNIDDAVPFFGRGFNKIYPLIMVVYTLLVASNFFVRVIDFLGRWKRFKFQREEENIDGLDPSGMIILQKERSWIEQGCKVGEQVIPLARNFNGVNADIESQNVPLVENTVEMKVGATSSRNDGRAGQLKYANNRETIASKYTSIREQNRQSGKVVRKEISPNSISLLEERNSEQGSNAGVPPTGVSATWASMKIGFQNFKANMGSKKFLPLRQDPGFVPNLNVSSPESLDDIFQRLKRRPANVPVDYLDDDDDDNIGDTDLHFQDQ

SEQ ID NO: 69552 - protein, 58 aa, Zea mays
  Coding DNA Sequence Number=SeqID_27773
  Subcellular localization annotation: CTP_CleavageSite=26; ConfidenceScore=5.26e-01
MAVKVVLPTTMSGAAHRPDPDEKFVVPSLASGTRTALHRSQTSWRFSPFAPWSPSGVE

SEQ ID NO: 69553 - protein, 508 aa, Zea mays
  Coding DNA Sequence Number=SeqID_27774
  Gene Ontology: Mol. function=protein serine/threonine kinase activity; Biological process=protein amino acid phosphorylation
  Homolog annotation: Hit_ID=Q9FNE1; Match level="QueryCoverage=89%, HitCoverage=66%, E-value=3e-68, Identity=47%"; Hit description =Receptor-like serine/threonine kinase
  Pfam annotation: Domain name=DUF26; Domain location=204-259; Score =40.8; E_value=4.7e-09; Accession=PF01657.8; Description=Domain of unknown function DUF26
  Pfam annotation: Domain name=DUF26; Domain location=89-142; Score =47.3; E_value=5e-11; Accession=PF01657.8; Description=Domain of unknown function DUF26
  Pfam annotation: Domain name=Pkinase; Domain location=343-508; Score =4.4; E_value=8e-09; Accession=PF00069.15; Description=Protein kinase domain
  Pfam annotation: Domain name=Pkinase_Tyr; Domain location=343-508; Score=-8.7; E_value=6.2e-12; Accession=PF07714.7; Description =Protein tyrosine kinase
  Pfam module annotation: Pfam domain module=DUF26::DUF26::Pkinase::Pkin ase_Tyr; Domain location=204-259::89-142::343-508::343-508
MQRQRRPRASHQHRSGPFLLVLFLSAVVAADDAAPAGTPAIVDTVCAATQAADPEAFDVSFVTTLEMIYQNVTRWSFGAAGSGEGNDTVFGLGQCMGYLSPTDCQLCYAQSRVKLPHCLPADGGRIYLDGCFLRYGADNFTAAATDASDTAVCSNATAAASAPPVVGTGFAAAAAALVRNVTAAAPAAKDYYYAASASGRAPPAYAAAQCWRSLNASACATCVASARDRLLRNCLPAAPEGYGLNAGCVVRYSTRPFYLPASAGGGGGSSARRIAVIVVASVLSAMAVMGIAFIWTRMRSRSRDDLLRADMGDDGSSGEMIRAIAASQLSFKYQELRAATDEFSQTNKLGQGGYGSVYRGVLADGREVAVKRLFFNTRQWAEQFFNEVKLVSQVQHKNLVKLLGCSVEGPESLLVYEYLCNTSLDHYLFDAFKKNALDWERRFEIVLGTAEGLSYLHSASEVRIIHRDIKASNVLLDDRFRPKIADFGLARNFMDDQSHLSTGLAGTL

SEQ ID NO: 69554 - protein, 184 aa, Zea mays
  Coding DNA Sequence Number=SeqID_27775
  Homolog annotation: Hit_ID=Q6QP51; Match level="QueryCoverage=51%, HitCoverage=39%, E-value=7e-07, Identity=57%"; Hit description =Putative growth-regulating factor 1
MPPLRRGRSEPEVGRGGGSSEVEAESKLRGWARRRPPSEVEVESEPWGRARRSPSSEVEVESEPRGQARRSLSSEVEVEVESEPWGRARRSFLWRLRPVLAAVNLTLTGGTAVGAAQAVLFSCQAILALNAPAMRSVGVAIRPRLLLREACPSWASGESKLCADGGYQLRLGVLGVPLIMVPDK

SEQ ID NO: 69555 - protein, 104 aa, Zea mays
  Coding DNA Sequence Number=SeqID_27776
MKLMTNLRLKMVLTMKLLIVMMRVMMRLTLTHMKIIFNRCCWTKMVGGGMRTRRGRGRRSTRRTAKEAQQDDDVQQQVEQQAAVDAAQQDDGDAQQDASGLRNV

SEQ ID NO: 69556 - protein, 171 aa, Zea mays
  Coding DNA Sequence Number=SeqID_27777
MARRTSDGTIAGERQPLVLLHYFERLRVGVEHQGADDLSLLRHIVHTCRGLKNLTKAYTRWTKGTRFHFYAPGWAKPNHEGKGLVDPITPSANTEDSRAWGLGSGLASDAYGPEGVRVRACENATDAADPHVGRCTRLGTRVGIKQVSDPRGWDPLVGKPASLDGGCGLGF

SEQ ID NO: 69557 - protein, 340 aa, Zea mays
  Coding DNA Sequence Number=SeqID_27778
  Gene Ontology: Mol. function=hydrolase activity; Cellular component =nucleus; Biological process=metabolic process
  Homolog annotation: Hit_ID=Q0ZPV0; Match level="QueryCoverage=82%, HitCoverage=78%, E-value=3e-61, Identity=46%"; Hit description=CXE carboxylesterase
  Pfam annotation: Domain name=Abhydrolase_3; Domain location=74-309; Score=251.5; E_value=1.8e-72; Accession=PF07859.3; Description =alphabeta hydrolase fold
  Subcellular localization annotation: CTP_CleavageSite=10; ConfidenceScore=5.21e-01
QPPSRWHNVRTAVSGALFLFLSDLKTGASRATPARMFRRYDPPISQFDVSRGLWARVFCPTAIADDAPAPLPVFVYFHGGGFMLFSASFGPYDTFCRRLCRKLRAVVVSVNYRLAPEHRFPAAYDDGVATLRYLDETPTPLPADLVPAPVDFGSCFLIGDSSGGNMVHHVAQRWASMSSATSSQSQSQPPLRMRRLRLAGAVLIQPFFGGEERTEAEVRHDKACRILSVARADLYWREFLPEGASRDHPAARVCGEGVELADTFPPAMVVTGRIDLLKDWHARYVETLRGKGKRVRVVEYPDAFHGFYAFPELADSSKLVEDIKLFVDDHRSGSRLDACG

SEQ ID NO: 69558 - protein, 146 aa, Zea mays
  Coding DNA Sequence Number=SeqID_27779
  Gene Ontology: Mol. function=threonine endopeptidase activity; Cellular component=proteasome core complex (sensu Eukaryota); Biological process=ubiquitin-dependent protein catabolic process
  Homolog annotation: Hit_ID=Q9LSU0; Match level="QueryCoverage=99%, HitCoverage=69%, E-value=1e-74, Identity=82%"; Hit description =Proteasome subunit alpha type 3
  Pfam annotation: Domain name=Proteasome; Domain location=31-145; Score=50.8; E_value=4.7e-12; Accession=PF00227.16; Description =Proteasome A-type and B-type
MSSIGTGYDLSVTTFSPDGRVFQVEYATKAVDNSGTIVGIKCKDGIVLAVAGLAADGRQIVSRTKSEAASYEKVYGEPISVKELADRVASYVHLCTLYWWLRPFGCGVILGGYDRDGPQLYMIEPSGVSYKYFGAALGKGRQAAKT

SEQ ID NO: 69559 - protein, 271 aa, Zea mays
  Coding DNA Sequence Number=SeqID_27780
  Gene Ontology: Mol. function=nucleic acid binding; Cellular component= nucleus
  Homolog annotation: Hit_ID=Q5NAW2; Match level="QueryCoverage=98%, HitCoverage=80%, E-value=1e-128, Identity=63%"; Hit description=Zinc finger CCCH domain-containing protein ZFN-like 1
  Pfam annotation: Domain name=zf-CCCH; Domain location=224-250; Score =45.8; E_value=1.5e-10; Accession=PF00642.15; Description=Zinc finger C-x8-C-x5-C-x3-H type (and similar)
  Pfam annotation: Domain name=zf-CCCH; Domain location=29-53; Score =24.2; E_value=0.00045; Accession=PF00642.15; Description=Zinc finger C-x8-C-x5-C-x3-H type (and similar)
  Pfam annotation: Domain name=zf-CCCH; Domain location=72-98; Score =44.9; E_value=2.7e-10; Accession=PF00642.15; Description=Zinc finger C-x8-C-x5-C-x3-H type (and similar)
  Pfam module annotation: Pfam domain module=zf-CCCH::zf-CCCH::zf-CCCH; Domain location=224-250::29-53::72-98
MAQHKTFQNDRANLYARYINTFTHEFNYLSRNLYYLKTGTCKFGSNCKYHHPKQDGSVQSVILNNNGFPLRLGEKECSYYMKTGQCKFGSTCKFHHPEFGGIPVTPGIYPPLQSPSVPSPHTYAPNWQMGRSPAVPGSYIPGSYTPMMISSGMVPLQGWSPYPASVNPVASGGAQQTVQAGPLYGIGHHGSSTAIAYGGTYLPYSSSAGQSSNNHQEHGFPERPGQPECQYYMRTGDCKFGTTCKYNHPRDWSTPKSNYMFSHLCLPLRPV

SEQ ID NO: 69560 - protein, 71 aa, Zea mays
  Coding DNA Sequence Number=SeqID_27781
MTKVVARAVVEGDRLSSPEDLYYIGTFGLFEGVDARAITIQREQYGDSIFVLRALDEEEDPQHCLQTMSSS

SEQ ID NO: 69561 - protein, 162 aa, Zea mays
  Coding DNA Sequence Number=SeqID_27782
MIYPGSGYEGPYFQQRRDVDYITRTKSAHSRGYKHDGRGKKAFAGGVSSTVCDHVGKSSVTDIEGRIELGRGGGSSEVTTEPVLRLDDACHSRRSGRSGRASSRGLVRARRSLRPRLSLASGEAELAPEVLVRVLSYYASRPPGGVRTLNDVGESLTRLLSY

SEQ ID NO: 69562 - protein, 160 aa, Zea mays
  Coding DNA Sequence Number=SeqID_27783
  Homolog annotation: Hit_ID=Q5NAW2; Match level="QueryCoverage=29%, HitCoverage=59%, E-value=1e-16, Identity=73%"; Hit description=Zinc finger CCCH domain-containing protein ZFN-like 1
  Pfam annotation: Domain name=zf-CCCH; Domain location=90-116; Score =41.5; E_value=2.8e-09; Accession=PF00642.15; Description=Zinc finger C-x8-C-x5-C-x3-H type (and similar)
MEPPHAEQAVAAVAAGGEGGTASPGTGLEDLRPGVRPRGSLVASRCNRVVRERVAFAGPVLRRGLDGGGEGEDGELGAGQEANARLPERPGEADCGYYLRTGACGFGERCRYNHPRDRGGTEVRAGGRFSPASASRSLAFSIFPDLIRVRVRHAAAGELR

SEQ ID NO: 69563 - protein, 442 aa, Zea mays
  Coding DNA Sequence Number=SeqID_27784
  Gene Ontology: Mol. function=nucleic acid binding; Cellular component= nucleus
  Homolog annotation: Hit_ID=Q5NAV3; Match level="QueryCoverage=98%, HitCoverage=91%, E-value=1e-128, Identity=53%"; Hit description=Zinc finger CCCH domain-containing protein ZFN-like 3
  Pfam annotation: Domain name=zf-CCCH; Domain location=100-126; Score =41.8; E_value=2.4e-09; Accession=PF00642.15; Description=Zinc finger C-x8-C-x5-C-x3-H type (and similar)
  Pfam annotation: Domain name=zf-CCCH; Domain location=254-280; Score =46.3; E_value=1e-10; Accession=PF00642.15; Description=Zinc finger C- x8-C-x5-C-x3-H type (and similar)
  Pfam annotation: Domain name=zf-CCCH; Domain location=58-82; Score =25.3; E_value=0.00021; Accession=PF00642.15; Description=Zinc finger C-x8-C-x5-C-x3-H type (and similar)
  Pfam module annotation: Pfam domain module=zf-CCCH::zf-CCCH::zf-CCCH; Domain location=100-126::254-280::58-82
MRKLGFGEDDEAGGRRSFRSGPGEAGLHYYLRTGRLRATGSAAATTTPGIGRLRLMALGRPQYYAKNGTCKFGSNCKFDHPRESGFVPVALNNSGFPLRLGEKECSYYMKTGHCKFGGTCKFHHPELGFLTETPGMYPPVQPSPISSPHPYPHHSNWQMGRPAVVPGSFLPGPYPPMMLPPTVMPMQGWNPYVSPMNQTTPAGGQQAVPAGPSYGLSHQEPTSAVTYGSHYAQLYSSSGTSSSNIQEYVFPERPGQPECEHYMKTGTCKYGAACKYHHPQYFSGPKSNCILSPLGLPLRPHDRIVAPVPLEMFSVHLHLKLYIGVQGSQRCALLRTPWLFASLGRHAKFDHPMGTPNYSLPAPSLTDVPVAPYPHTFSVTPIAPYLLPRDPRPQYTLAKDPSAYPPQAPGTTYGPVGAISKVYARHTLIRSPTSGAAGMQAS

SEQ ID NO: 69564 - protein, 41 aa, Zea mays
  Coding DNA Sequence Number=SeqID_27785
FAQVLAQTFAQVRPSYRFLLSIRAGIQSQGFQSVPSADAIS

SEQ ID NO: 69565 - protein, 111 aa, Zea mays
  Coding DNA Sequence Number=SeqID_27786
MWSGDECMRLLYCFHFIPFLLLEHACNHGISEGGLVALAREDGWRFSSSSEHKNKNRYILALKGQMQLQAGAVDVSSSEYIILHRNNNLATAALYHSYTLAFSDLYSMEWD

SEQ ID NO: 69566 - protein, 450 aa, Zea mays
  Coding DNA Sequence Number=SeqID_27787
RSINDDKDLVQHDFPDQTSSFLEMPELGQFVAALPYQSKSKRPDPDDELLLYSHPTNVQIHEPACCPRGKPGARARVRAVVMMATHHDALWVKLHELELQLAAYKLLRAARGDDHAGAVGFASADGADTPGGSACRGRQYDAYMRQRDARRVAALAQQQQQPPHPANNKAQRPRGVRATPMSPRALRCATRNVQEAGATPRLAVTPVKRTPAASIPSTPRRDGAALPRSRTASGGRRHGGEPPRGRRTTRGGAASACSRSFGECATPRPFLKRGTGTGGAAAPVRLRTTRVYDLPSIDVAVTPRPLPHVHAHTHAHAPRHVRSLSELPFDTAALASPQSRARRRWGSPERPAAMFSAAAAAAADSHRDLSKGLKKLLSYVRKGGRSGGGGGGDQPFPAPSPRGSGKPVSKGWSGCSRVDVPFDRASLDVMWFDEPEHHRSLHFPVPPCLL

SEQ ID NO: 69567 - protein, 51 aa, Zea mays
  Coding DNA Sequence Number=SeqID_27788
MGVSDFCARCAHIKCRRRSADTLGTETVMKVTKSQHRTFNEDLKANYSIAA

SEQ ID NO: 69568 - protein, 240 aa, Zea mays
  Coding DNA Sequence Number=SeqID_27789
  Gene Ontology: Mol. function=aminoacyl-tRNA ligase activity; Cellular component=cytoplasm; Biological process=tRNA aminoacylation for protein translation
  Homolog annotation: Hit_ID=Q01B72; Match level="QueryCoverage=65%, HitCoverage=14%, E-value=1e-46, Identity=56%"; Hit description=[J] KOG0437 Leucyl-tRNA synthetase
MNSVEWQMNPYYDAFVKWQMRKMKKLDMNSVEWQMNPYYDAFVKWQMRKLKKLGKVVKDMRYTIYSPLDGQPCADHDRTTCEGVQPQEYILIKMEVISPFPPKLKSLEGRKVYLAAAILRPETMYGQTNCWVLPDGMYSAFEINDTDVFNLTTRSAFNLAYQHLSNVPGKPTCLCELSGSDLFGLPLKSPLAFNETMNGNRNGVEEGGGGISRTTEKRIWQLRAAASNRVVSQGTLGSLL

SEQ ID NO: 69569 - protein, 88 aa, Zea mays
  Coding DNA Sequence Number=SeqID_27790
  Gene Ontology: Mol. function=magnesium ion binding; Cellular component=membrane; Biological process=photosynthesis, light harvesting
  Homolog annotation: Hit_ID=Q69P91; Match level="QueryCoverage=88%, HitCoverage=35%, E-value=2e-13, Identity=43%"; Hit description =Putative chlorophyll a/b-binding protein type II
MGWADYMRPGTVCGSTGPTEPVMLRLDQATKHIHSAAHQCKEIKNGRLAILAFVGFWFQAVYTGQGPVDNLLAHLADRIFCILAPKPK

SEQ ID NO: 69570 - protein, 717 aa, Zea mays
  Coding DNA Sequence Number=SeqID_27791
  Gene Ontology: Mol. function=protein serine/threonine kinase activity; Cellular component=membrane; Biological process=protein amino acid phosphorylation
  Homolog annotation: Hit_ID=Q7XIS7; Match level="QueryCoverage=98%, HitCoverage=93%, E-value=0.0, Identity=71%"; Hit description =Putative receptor-like protein kinase 4
  Pfam annotation: Domain name=DUF26; Domain location=168-222; Score =47.8; E_value=3.7e-11; Accession=PF01657.8; Description=Domain of unknown function DUF26
  Pfam annotation: Domain name=DUF26; Domain location=51-105; Score =43.8; E_value=6e-10; Accession=PF01657.8; Description=Domain of unknown function DUF26
  Pfam annotation: Domain name=Pkinase; Domain location=396-668; Score =146.6; E_value=6.7e-41; Accession=PF00069.15; Description=Protein kinase domain
  Pfam annotation: Domain name=Pkinase_Tyr; Domain location=396-668; Score=133.0; E_value=8e-37; Accession=PF07714.7; Description=Protein tyrosine kinase
  Pfam module annotation: Pfam domain module=DUF26::DUF26::Pkinase::Pkin ase_Tyr; Domain location=168-222::51-105::396-668::396-668
  Subcellular localization annotation: CTP_CleavageSite=30; ConfidenceScore=5.40e-01
PTNSSVLRTYQPNSTFAGNLQKLVSELPSNASAASGFAAGRFGAGAGPGAAYGTALCRGDFLGGQCADCLAEGFSQAASRCPGSVDATMYYDQCQLRFSDQDFLLAAASANNMPESTAWNMNRVSAGNVAAFDALVKGLVAAASDAASDRSSRYATGQAGFPPESINVYALVQCAQDLTARRCRECLAGLMGQMGNFFAGRVGGRILGVRCVIRYEKDVFFAQTPDMLTVAPLLGSTSTKGGRALARVATSTSYVRVRSFARAARNVTPPVDMRPFVFKKIGWTSVRALAHCTYQDGSDHLAVTKSAPDAEMVKLLTTLWVVAVAVPVSVLLACFLACVLWIRKRRRRVTNVSGTVSVPTMSMEMEQVLKLWRVEESDSEFSLFDFDQIADATDNFSDDHKLGQGGFGPVYKGELPGGLEVAIKRLSSVSVQGLMEFKTEIQLIAKLQHTNLVRLLGCCVQADEKMLVYEYMHNKSLDFFIFDGGDRGRALTWGRRFRVVDGVAQGLLYLHKHSRLRVVHRDLKASNILLDRDMNPKISDFGMARIFCSNVTEANTTRVVGTHGYIAPEYASEGLFSVKSDVFSFGVLLLEIVSGKRTAGFYQYGKFFNLTGYAYQLWQDGKWHELVDPALGDDLPVGEVMKCVQVALLCVQDSADDRPSMSEVVAMLGSEGVTMPEPRQPAYYNVRISSLAVSSDSFAESSCRMISNITLTDHEEG

SEQ ID NO: 69571 - protein, 694 aa, Zea mays
  Coding DNA Sequence Number=SeqID_27792
  Gene Ontology: Mol. function=protein serine/threonine kinase activity; Cellular component=membrane; Biological process=protein amino acid phosphorylation
  Homolog annotation: Hit_ID=Q69W20; Match level="QueryCoverage=80%, HitCoverage=93%, E-value=0.0, Identity=69%"; Hit description =Receptor-like protein kinase-like
  Pfam annotation: Domain name=DUF26; Domain location=203-257; Score =64.4; E_value=3.6e-16; Accession=PF01657.8; Description=Domain of unknown function DUF26
  Pfam annotation: Domain name=DUF26; Domain location=76-131; Score =49.4; E_value=1.2e-11; Accession=PF01657.8; Description=Domain of unknown function DUF26
  Pfam annotation: Domain name=Kdo; Domain location=358-530; Score= -86.5; E_value=0.08; Accession=PF06293.4; Description=Lipopolysacchari de kinase (Kdo)
  Pfam annotation: Domain name=Pkinase; Domain location=367-635; Score =139.2; E_value=1.1e-38; Accession=PF00069.15; Description=Protein kinase domain
  Pfam annotation: Domain name=Pkinase_Tyr; Domain location=367-635; Score=113.5; E_value=6e-31; Accession=PF07714.7; Description=Protein tyrosine kinase
  Pfam module annotation: Pfam domain module=DUF26::DUF26::Kdo::Pkinase: :Pkinase_Tyr; Domain location=203-257::76-131::358-530::367-635::367 -635
  Subcellular localization annotation: CTP_CleavageSite=66; ConfidenceScore=5.36e-01
MGTLPYLLLVVLSSLSLVPRAAAYSEYSCNGTTGNFTAASAFGANLARLVAALPANASSSPSLFASAAVGAAPDTAYGLALCRGDVTDAGVCSACLADAFGRLRRLCGADRDATFYADLCTARYSGGDFLARPDDNSPVINALDVNGSTYYGWDARNATSRTLFLSLVGTLFGEMAMYAAYNSSAARMFASAAMYVNPQLPTVYGFVQCTPDLSRAQCWDCFQVLQDQNRRWYDGREGGRILGVRCSFRYEAYHFFGGMPEVRIGLKGDPSSPAAETEIHGSNHRVVLIVAVIVSITAFSAMMAAGLVIIRARRRKGAEKKRKLQLEAQSRNSSTTEDALKLWRIEESSSEFTLYDFAELAAATGGFSDENLLGRGGFGPGKLPDGAEIAVKRLAAHSGQGLEEFKNEIQLIAKLQHTNLVRLVGCCVQEEEKLLVYEYMPNRSLNCFIFDQQRGPLLDWEKRRRIIEGVAQGLLYLHKHSRVRIIHRDLKASNILLDKDLNPKISDFGMARIFGSNMTEANTNRVVGTYGYMAPEYASEGIFSVKSDVYSFGVLLLEIVSGKRNTGHHNYGDFVNLLGYAWQLWRDGRVFELIDPTLGERGDVATIVRCVKVALLCVQESATDRPTMADVTAMLATAGDAASAGPLPDPKRPPHFSLRVATTSGSDDDCGSRTRFTTSCSTNDLTITSIHEGR

SEQ ID NO: 69572 - protein, 672 aa, Zea mays
  Coding DNA Sequence Number=SeqID_27793
  Gene Ontology: Mol. function=protein serine/threonine kinase activity; Cellular component=membrane; Biological process=protein amino acid phosphorylation
  Homolog annotation: Hit_ID=Q7F1L6; Match level="QueryCoverage=93%, HitCoverage=95%, E-value=0.0, Identity=62%"; Hit description =Putative serine/threonine kinase receptor
  Pfam annotation: Domain name=DUF26; Domain location=181-235; Score =72.6; E_value=1.3e-18; Accession=PF01657.8; Description=Domain of unknown function DUF26
  Pfam annotation: Domain name=Pkinase; Domain location=344-611; Score =168.8; E_value=1.4e-47; Accession=PF00069.15; Description=Protein kinase domain
  Pfam annotation: Domain name=Pkinase_Tyr; Domain location=344-615; Score=133.3; E_value=6.6e-37; Accession=PF07714.7; Description =Protein tyrosine kinase
  Pfam module annotation: Pfam domain module=DUF26::Pkinase::Pkinase _Tyr; Domain location=181-235::344-611::344-615
  Subcellular localization annotation: CTP_CleavageSite=62; ConfidenceScore=5.06e-01
MTTVAHHHHLAAATVLFFVAFTMAPLAAGDPVGQLCGTSGNYTLNSTYQGNIRRLAATLPKNASTSATLFATDTFGAVPDIVYALALCRGDTQRLRLQRLRRRRVPGRAAANFLADPSSDGRGTALILMNTQNVTARFKVFDAAVAALLNATAAYAAANSSKRFGTGVEAFQNFDSNRPRIYGLAQCTPDMTPADCQSCLSGIIQTGPKYFSGKQGGRILSVRCNYRYEQYPFFTSTPLLQLAEPTVGAPAPAPAVVNGTPTPPTTGGARRGTTGNKTGRVLAITLPIVAAVLATVVLCSCLWRRKRKTQGKSSLPDTTNPEDIQSIDSLIIDVSTLRAATENFAEANKLGEGGFGSVYKGILPDDQEIAVKRLSQTSRQGMEELKNELVLVAKLQHKNLVRLVGVCLEDHEKLLVYEYMPNKSLDTILFNHERCGELDWGKRFKIVNGIARGLQYLHEDSQVKIIHRDLKASNVLLDNDFNPKISDFGLARLFGSEQSRDVTNRVVGTYGYMAPEYAMRGHYSVKSDVFSFGVLILEIVTGRRNGGSYSSEESADLLSLVWEHWTTGTLVEIMDPSLSSLAPRDLMLKCIHIGLLCVQDDHEDRPMMSTVNVMLSSSTVTLQAPSRPAFCFPKSGFNSEINSEVYPPGAYQSASRSPMSLNDVSITELEPR

SEQ ID NO: 69573 - protein, 855 aa, Zea mays
  Coding DNA Sequence Number=SeqID_27794
  Gene Ontology: Mol. function=two-component response regulator activity; Cellular component=membrane; Biological process=two -component signal transduction system (phosphorelay)
  Homolog annotation: Hit_ID=Q9FXT2; Match level="QueryCoverage=98%, HitCoverage=95%, E-value=1e-127, Identity=40%"; Hit description =Ethylene receptor homologue
  Pfam annotation: Domain name=GAF; Domain location=168-349; Score =28.1; E_value=3e-05; Accession=PF01590.16; Description=GAF domain
MAARCSGGCDGREDSAVEALVQWQKVSDFLIGASYMSIPLELLHFATCADLAPLRWVLLQFGAFIVLCGLVHLVAIFTYARPDSRRLLLAITAAKALAAVAASVAAVSLPTFVPQLLRLKTREALLRDKARQLDRDVALVRRREETATRIVRAITKHVCCGCHGGASLAPDVLRTAVFHLSDALGLHSCAVWMPAAAAAASDGGPSLLHLVHRLPEDDHQDPTTRLAICSTDPDVAAVMASKNAKVLRPGSALRRTTSTSGHGHAGAAAIRMPMLRVSNFVDASSSLSDGQGAGVSYAIMVLVLPAPAPTTKNHRTRGPRGEGGGGAREWSRQELEIVEVAADQLAVALSHAAVLKEWQLTRHKLAERQRVLVHARHDAAVATRARDASQSAMRDGVLRPMHSVAGLLSLMQAQQHEDEAFRCTEQRVAVGAMARISALSTTLTDDVMAALLTPTAAGVSLARRPFDPRALVKDAAGVAGCLARCRGLGFSHRAEMSSLPAGCWVVGDDRRVFHLLLHMVGVLLDQCECHCHDLCFAVDTVPVGDQETMSGSGLPDWITPNFSGCNTVCVRFRFGITRHFRNGLLLSSSPRPQERITRRTSVSISSASSKTRLSIATCNKIVQMMNGKMWWESTPASGGQHEEHMSLILHFQLVYGVASPSASSPAGGGGFYHIGGRFGVPSPSTSAPPQHNFNGLRVLLLNTDDTSREVTRKLLERLGCQVLPVPSAARCLSLLLGSATATGGGDQPSFQSPYLVLQAVLVDLHTPAAAIADAATAMDDGFEVALRIREVTGDRFSWLLILVALPLPPRASRIDVRDVCKRTGVNGVIYKPISPSRCQRWQLSFTGFSKTTTDR

SEQ ID NO: 69574 - protein, 397 aa, Zea mays
  Coding DNA Sequence Number=SeqID_27795
  Gene Ontology: Mol. function=actin binding; Cellular component =cytoskeleton; Biological process=cytoskeleton organization and biogenesis
  Homolog annotation: Hit_ID=Q6Z3N3; Match level="QueryCoverage=78%, HitCoverage=33%, E-value=1e-130, Identity=75%"; Hit description =Putative villin
  Pfam annotation: Domain name=Gelsolin; Domain location=81-161; Score =31.0; E_value=4.2e-06; Accession=PF00626.12; Description=Gelsolin repeat
  Subcellular localization annotation: CTP_CleavageSite=24; ConfidenceScore=5.14e-01
MGLYSSSGPQLPTGAAAPGGDPPLAATVTAPNTQSRSQKEGSETDQFWSLLGGKSEYSGQKMVQELESDPHLFSCILSKGNLKVKEMHHFTQDDLMTEDVFVLDCHTSIFVWVGQQVDVKLRLQALDVGEKFIVLDFLMENLARETPIFTIMEGSEPLFFTRFFTWDLAKSLMHGNSYQRKLAIVKGGGAPALDKPKRRTSIYSGRSTAQDKSQRPRSMSFSPERVRVRGRSPAFTALAATFESSSNRNLSTPPVVKKLYPRSVTPDSSNTSKSSVIAALAGSLDRPSQTPAPAFMKDGSESEKPKQEGDGKGVHTVATSVESLTINEDVKENEPEDEDGLPIYLYERLKTTAVDPVTEIDVTRRETYLSSTEFQREVWDDKRKHLSKLPKWKAGQA

SEQ ID NO: 69575 - protein, 612 aa, Zea mays
  Coding DNA Sequence Number=SeqID_27796
  Gene Ontology: Mol. function=protein serine/threonine kinase activity; Cellular component=membrane; Biological process=protein amino acid phosphorylation
  Homolog annotation: Hit_ID=Q69W20; Match level="QueryCoverage=77%, HitCoverage=94%, E-value=1e-159, Identity=54%"; Hit description =Receptor-like protein kinase-like
  Pfam annotation: Domain name=DUF26; Domain location=157-211; Score =57.8; E_value=3.5e-14; Accession=PF01657.8; Description=Domain of unknown function DUF26
  Pfam annotation: Domain name=DUF26; Domain location=83-129; Score =28.8; E_value=1.4e-06; Accession=PF01657.8; Description=Domain of unknown function DUF26
  Pfam annotation: Domain name=Pkinase; Domain location=289-550; Score =53.3; E_value=8.2e-13; Accession=PF00069.15; Description=Protein kinase domain
  Pfam annotation: Domain name=Pkinase_Tyr; Domain location=302-550; Score=-10.1; E_value=7.6e-12; Accession=PF07714.7; Description =Protein tyrosine kinase
  Pfam module annotation: Pfam domain module=DUF26::DUF26::Pkinase::Pkin ase_Tyr; Domain location=157-211::83-129::289-550::302-550
MAVLLLPPCLVFLLLQLFSAPSDGATAEYAEYTCNGTTGNFTSGSAFAANLDRLVAELPGNASASPLLFASASAPGSADADTAYGLALCRGDVTDARACSACLADAFSRLRRLCGGDPGRHVLRRPVHGAMSMYGAYNSSRRLATAVMFINAGLPTVYGLAQCTPDLAPAQCWHCFQGLGDLNRQWYDGREGGRVSGVRCSFRYEGYQFYQGTPDVRIGLQGGPSSSPDDDGTSASNHKKVLIIALVVPIALVCGVLVAGLLLTRAQRKRAAGNLRARNDPGKTRLPTQMHSRNSSKTEEALKLWRIEERSSEFTLYDFAELAAATADFSDDNLLGKGGFGPEEEKMLVYEYMPNRSLDCFIFDQQRGPLLDWEKRRRIIEGIAQGLLYLHRHSRVRIIHRDMKASNILLDKDINPKISDFGMARIFGSNMTEANTNRVVGTYGYMAPEYASEGIFSVKSDVYSFGVLLLEIVSGKRNSGHHQHQYGDFINLLGYAWQLWREGRAFELIDPTLGECTEVADIVRCVKVALLCVQDSATDRPTMTDVTAMLASRDGGAAASLPDPRRPPHFSLRVSSSDDGSSEVRTRSHGTASFSTNDLTITTVHPWQMMHA

SEQ ID NO: 69576 - protein, 94 aa, Zea mays
  Coding DNA Sequence Number=SeqID_27797
MGMKIDPNPYPNWVKTHRVTGFGLRPTRYRYLLPAEPPPSLLIILLPATVPSPLAVAYLQISQTEAARQASSGTIRLLKMERVLLEEDEEDRLL

SEQ ID NO: 69577 - protein, 135 aa, Zea mays
  Coding DNA Sequence Number=SeqID_27798
  Subcellular localization annotation: CTP_CleavageSite=41; ConfidenceScore=5.66e-01
MASSCATTSASAKSTRWKQWPYPFTSTASTSLAAHRLSTLRSAVYVCGVPPVVGHVLLSEAHEDTCAWVDRPDQERGPSVVGRKDATARKWLVAINTIPTTSIHMIQASHSFAFNSRASTSSQDTFKASKLLQVS

SEQ ID NO: 69578 - protein, 314 aa, Zea mays
  Coding DNA Sequence Number=SeqID_27799
  Gene Ontology: Mol. function=hydrolase activity; Cellular component =nucleus; Biological process=metabolic process
  Homolog annotation: Hit_ID=Q67IZ2; Match level="QueryCoverage=95%, HitCoverage=90%, E-value=1e-128, Identity=73%"; Hit description =Putative PrMC3
  Pfam annotation: Domain name=Abhydrolase_3; Domain location=66-292; Score=173.5; E_value=5.3e-49; Accession=PF07859.3; Description =alphabeta hydrolase fold
MAHVAHIRAAASSAFLPVDFAPPSTDAAPGVSSKDVAILPDACLLVRIYLPLPPLSGSYSGKLPVLVFFHGGGFCLGSAFDAAVHSHAKPVSRGCRRNHRVGLSVEYRLAPEHPVPALYGDAWTALQWVAAHSVGRGQEPWLTAHADLGRVHVGGESAGANIAHHAAMRAGREELGHGVKLSSLVMIHPYFLGGESSETDDMGVALLRELVRLWPVVCPGTSGCDDDPLINPMAEGAPNLASLGCRRVLVCVGGKDPMRGRGRLYCEKLKRSGWRGEVDDWEADGQGHGFHLSCPMSAEAEAQVRVIAEFLTYG

SEQ ID NO: 69579 - protein, 37 aa, Zea mays
  Coding DNA Sequence Number=SeqID_27800
MAVRRGILALLFLETAAGFLKLVELWYNLYNEAYKLI

SEQ ID NO: 69580 - protein, 598 aa, Zea mays
  Coding DNA Sequence Number=SeqID_27801
  Gene Ontology: Mol. function=protein serine/threonine kinase activity; Cellular component=flagellin-based flagellum; Biological process=protein amino acid phosphorylation
  Homolog annotation: Hit_ID=Q94KC3; Match level="QueryCoverage=87%, HitCoverage=87%, E-value=0.0, Identity=83%"; Hit description=CaMK1
  Pfam annotation: Domain name=Pkinase; Domain location=139-407; Score =311.4; E_value=1.6e-90; Accession=PF00069.15; Description=Protein kinase domain
  Pfam annotation: Domain name=Pkinase_Tyr; Domain location=139-405; Score=4.5; E_value=9.6e-13; Accession=PF07714.7; Description=Protein tyrosine kinase
  Pfam module annotation: Pfam domain module=Pkinase::Pkinase_Tyr; Domain location=139-407::139-405
MGLCHGKPTQIPEAEAEEDPHVASGAGDGGDGATSPSAAAPAAKPGTPKQPKFPFYLPSPLPPSSYKGSPANSSVSSTPARGGLKRPFPPPSPAKHIRALLARRHGSVKPNEVSIPEGGEPELGLDKSFGFSKHFFAKYDLGEEIGRGHFGYTCSAKAKKGEHKGQDVAVKVIPKAKGDLVALMTTAIAIEDVRREVRILSSLTGHSNLVQFYDAFEDEDNVYIVMELCKGGELLDRILARGGKYSEEDAKVVMVQILGVVSFCHLQGVVHRDLKPENFLFSSKDENSPLKVIDFGLSDFVKPDERLNDIVGSAYYVAPEVLHRSYGTEADMWSIGVIAYILLCGSRPFWARTESGIFRAVLKAEPSFDEAPWPTLTAEAKDFVKRLLNKDYRKRMTAAQALSHPWIRNAQQVKVPLDMIIYKLMRAYISSSSLRKSALRALAKTLTTNQLFYVREQFELLGPNKNGYISLQNLKSALVKNSTDAMKDSRVVDFVNTVCTLQYRKLDFEEFAASAISVYQMEALETWEQHARRAYELFDKEGNRPIVIEELASELGLGPSVPLHVVLQDWIRHADGKLSFLGFIKLLHGVSSRSIPKA

SEQ ID NO: 69581 - protein, 363 aa, Zea mays
  Coding DNA Sequence Number=SeqID_27802
  Gene Ontology: Mol. function=kinase activity; Cellular component =ornithine carbamoyltransferase complex; Biological process=amino acid metabolic process
  Homolog annotation: Hit_ID=O24186; Match level="QueryCoverage=22%, HitCoverage=84%, E-value=3e-34, Identity=90%"; Hit description=10 kDa chaperonin
  Pfam annotation: Domain name=Cpn10; Domain location=4-83; Score=75.9; E_value=1.3e-19; Accession=PF00166.12; Description=Chaperonin 10 Kd subunit
MAKRLLPSLNRVLVEKLVQPKKTAGGILLPETSKQLNAAKVVAVGPGERDKAGNLIPVALKEGDTVLLPEYGGTEVKLAADKEARTRAKSRKTANSAPPNPGLGLGLSPGRRRTPLRLTQGSDSGSAPEDDELRSARPRARTRAQPRKTTNSASLDPRARTPPWPLLNDLRLARPRGSGSASAMEDRLDLGFGGASTSPNLGRRPATSTGSAIITLPRADSGRREQDRARTRAKPRKTANSAPPDPGLGLGLSPGRQRTPLRPTQGSDSGSAPEDDELRFARPQGSDSALASTEQPPPRPTQGLGLGLGHGRQTRPRLRRSLHVTRPRAQASHVNRKRHHHPTPSRLGPQRTRPVSHLASSAR

SEQ ID NO: 69582 - protein, 72 aa, Zea mays
  Coding DNA Sequence Number=SeqID_27803
MDLKMEERIRCWEVRSKGRRMPRKRAASIQAPERIRKKGEVGMKENPSGPGGIATGKLPAGSPAPAAGGWAK

SEQ ID NO: 69583 - protein, 404 aa, Zea mays
  Coding DNA Sequence Number=SeqID_27804
  Gene Ontology: Mol. function=hydrolase activity, acting on ester bonds; Cellular component=cellulose and pectin-containing cell wall; Biological process=lipid metabolic process
  Homolog annotation: Hit_ID=Q8GS76; Match level="QueryCoverage=79%, HitCoverage=85%, E-value=1e-106, Identity=59%"; Hit description =Lipase-like protein
  Pfam annotation: Domain name=Lipase_GDSL; Domain location=90-401; Score=104.9; E_value=2.4e-28; Accession=PF00657.12; Description=GDSL- like LipaseAcylhydrolase
  Subcellular localization annotation: CTP_CleavageSite=43; ConfidenceScore=5.14e-01
MTCEASGPNTSKASGPSASCREITSAVSNNGRVSLDVIIVVYTAGMVSTLEQLLIAAAFLVVAAAASTVPVSPAAAATRPYHGGGCYSHFFAFGDSLIDTGNFIRYSTARPSSTAPPAAGPTAASSLTSLVLERLGYPRWPPYLDGKSKDDFRHGANFAVASGTALNQLLFKKHGLNVNGITPYSLGVQIGWFKKVLAMLASNEHERREIMASSLFLVGEIGANDYNHPFFQNRTLDFVDSLVPLVIRSIGRSLESLIQLGAKTVYVPGIFPLGCLPRYIFLFRDSGAAGCLRWLNDLTSRHNALLRAKLAGLRRAYRDVSIVYVDYYAEVTGIVGAPARNGFAPATALDACCGGGGFHNANFTVHCSEPGAVQCADPSRYVSWDGLHMTEAVYRIMARGVLDG

SEQ ID NO: 69584 - protein, 183 aa, Zea mays
  Coding DNA Sequence Number=SeqID_27805
  Homolog annotation: Hit_ID=Q6H7Q8; Match level="QueryCoverage=82%, HitCoverage=25%, E-value=1e-30, Identity=56%"; Hit description =Tubulin-specific chaperone C-like protein
MAVAASMAIYTFRKLGKAERRGPVSVSGPSDAAGPATSSPAALLRPRREAFKHGLKEKLIPKLIFPEGMLAQTLAQLKEKLSASVPDGRVRAAALAEAQQIPQEQAALALGTLAAVLPAEDPVLGDGAIDGAAADIRDVLLFLYIQSYKRLVQRSAHKDSPAVADVWPSTSAFDGYLSALSLI

SEQ ID NO: 69585 - protein, 51 aa, Zea mays
  Coding DNA Sequence Number=SeqID_27806
  Homolog annotation: Hit_ID=Q8GU82; Match level="QueryCoverage=100%, HitCoverage=3%, E-value=2e-15, Identity=86%"; Hit description=PDR -like ABC transporter
MTVALTPNIEIAMGLSFLIFIFWNVFSGFIIVRDDACVVAVGVLGRSGDMD

SEQ ID NO: 69586 - protein, 138 aa, Zea mays
  Coding DNA Sequence Number=SeqID_27807
  Subcellular localization annotation: CTP_CleavageSite=24; ConfidenceScore=5.23e-01
MGEVTATALVVWMRLVPFYCHFFVANQFSSRRSTRAWRVPWPEGKSTGTPIGRHLLRLTINNVFPSNDADGGRSGEYMRQGRQLEEERCFMTKQLERFLRRLTEKKAAWKSRVRAKACHAMAALQALLQIMLYETVNF

SEQ ID NO: 69587 - protein, 745 aa, Zea mays
  Coding DNA Sequence Number=SeqID_27808
  Gene Ontology: Mol. function=RNA-directed DNA polymerase activity; Cellular component=intracellular; Biological process=RNA-dependent DNA replication
  Homolog annotation: Hit_ID=UPI00004C1731; Match level="QueryCoverage =94%, HitCoverage=52%, E-value=0.0, Identity=82%"; Hit description =UPI00004C1731 related cluster
  Pfam annotation: Domain name=RnaseH; Domain location=312-439; Score =12.9; E_value=3.6e-06; Accession=PF00075.14; Description=RNase H
  Pfam annotation: Domain name=rve; Domain location=441-616; Score =99.8; E_value=8.1e-27; Accession=PF00665.16; Description=Integrase core domain
  Pfam module annotation: Pfam domain module=RnaseH::rve; Domain location=312-439::441-616
MPFGLRNAGATYQRCMNHVFGEHIGRMVEAYVDDIVVKTRKASDLLSDLELTFRCLKAKGVKLNPKKCVFGVPRGMLLGFIVSEQGIEANPEKIAAITGMGPIKDLKGVQRVMGCLAALSRFISRLGERGLPLYRLLRKAECFAWTPEAEEALGNLKALLTNAPILVPPSAGEALLIYVAATTQVVSATIVVERREEGHALPVQRPVYFISEVLSETKIRYPQIQKLLYAVILTRRKLRHYFESHPVTVVSSFPLGEIIQSREASGRIAKWAVEIMGETISFAPRKAIKSQVLADFVAEWVDTQLPTAPIQPELWTMFFDGSLMKSGAGAGLLFISPLGKHLRYVLRLHFPASNNVAEYEALVNGLRIAIELGVQRLDAHDDSQLVIDQVMKNSHCLDPKPEAYCDEVRRLEDKFYGLKLNHIARRYNETADELAKIASGRTTVPPDVFSRDLHQPSVKTDDTPEPEAPSAQSEKAPGGYTHLLVAIDKFSKWIEVRPLNSIRSEQAVAFFTNIIHRFGVPNSIITDNGTQFTSRKFLDFCEDHHIRVDWAAVAHPMTNGQVERANDMILQGLKPRIYNDLNKFGKRWMKELPSVVWSLRTTPSRATGFTPFFLVYGAEAILPTDLEYGSPRARAYADQSNQANRENSLDQLEEARDMALLHLARYQQSLRRYHARGVRSRDLQVGDLVLRLRQDAQGRHKLTPPWEGSFIIAKVLKPETYKLANSQGEVYSNAWNIQQLRRFYP

SEQ ID NO: 69588 - protein, 56 aa, Zea mays
  Coding DNA Sequence Number=SeqID_27809
MGRMFLKIKLDGGSIMAVMGSTSEKIYLCQLCNRFRISVPPMFYNVCVTGETLLGK

SEQ ID NO: 69589 - protein, 133 aa, Zea mays
  Coding DNA Sequence Number=SeqID_27810
MKSRSPPDDGRAAERQETRREYREGEAQEDVSASSAKSTEGKGWVRGRILEYVLTGEHQNKWTHYGGWAKGRSGHDKFISNSNFNSNSKCVELEHGYNEYGAKTHSEIYSLQIVYKLGITNPTPLRKNLVLEI

SEQ ID NO: 69590 - protein, 452 aa, Zea mays
  Coding DNA Sequence Number=SeqID_27811
  Gene Ontology: Mol. function=transporter activity; Cellular component= integral to membrane; Biological process=transport
  Homolog annotation: Hit_ID=Q6SZ87; Match level="QueryCoverage=55%, HitCoverage=35%, E-value=1e-103, Identity=68%"; Hit description =Nucleobase-ascorbate transporter 11
  Pfam annotation: Domain name=Xan_ur_permease; Domain location=198 -449; Score=-132.0; E_value=0.0034; Accession=PF00860.11; Description= Permease family
  Subcellular localization annotation: CTP_CleavageSite=39; ConfidenceScore=5.32e-01
MAVTTAPPGMSTGGMSATTLMPYNHNQRTETVWRTGGAPCRARGKELLARGGLSLPLDAVGEGDARKVIKVVARHGNSLGNLALYTAIGGVQPSAVGYPDYVLKEGEGGTIVFGMSSLLIFSPQELDYLICGQQEIWESRIPGAVTWMLGYKIAIVLSKEWMITMFYSSTVTGASQCPTLARSSQRACGHSSLAVEEPLLIFYGMQHYLPIAGSLVFVPLILVPAMDGSDEDTATVISTMLLVSGLTTILHTFLGSRLPLIQGSSFVYLAPALVIANSEEFRNLSDNKFKHIMRELQGAILVGSVFQIILGYTGLISLFLRLINPVVVAPTIAVVGLAFFSYGFPQAGSCVEISMPLILLVLLCTLYMRKISLFGNHIFLVYAVPLSVAIVWAYAFFLIAGGAYNFKCCSSNIPSSNILLDSCRRHLETMRRCRTDVSTAWKTTAWVRVEST

SEQ ID NO: 69591 - protein, 251 aa, Zea mays
  Coding DNA Sequence Number=SeqID_27812
  Gene Ontology: Mol. function=structural constituent of cell wall; Cellular component=cellulose and pectin-containing cell wall; Biological process=cellulose and pectin-containing cell wall organization and biogenesis
  Homolog annotation: Hit_ID=Q41645; Match level="QueryCoverage=65%, HitCoverage=50%, E-value=6e-18, Identity=35%"; Hit description =Extensin
  Pfam annotation: Domain name=Extensin_2; Domain location=1-237; Score= -136.6; E_value=0.058; Accession=PF04554.4; Description=Extensin-like region
MAGAPQLRATQPPPRILAEPPLGLLAASPQPPPRILAEPPLGLLAASPQPPPRILAEPPRSLLAASPQPPPRILAEASPPRSLVAAPPQPTPRILAEASPPLGLVAAPLQPPPRVLSEASPPRSLVAAPPQPTPRILAEASPSRCLVMAPLQPPPRVLAEASPPWGLVAAPPPRGTQLLPRGLGGGGASAIGRVDVQIDGDEGLPQGASSTAPAMFNCNGDVRYYREGDEGYVPRFDMADDQFYGLDIEST

SEQ ID NO: 69592 - protein, 62 aa, Zea mays
  Coding DNA Sequence Number=SeqID_27813
MAGLGRARCDGKAPWPSSPARTVSRSAQSYDDEDDYAYAYGNGKEGVEADLQEFQDVNEFED

SEQ ID NO: 69593 - protein, 93 aa, Zea mays
  Coding DNA Sequence Number=SeqID_27814
MCAYGQAHARPSSQRDPDVVFFLPSTVGGGGDVGLGDGGVGLEDGATWRAPSSETAALGLGLGDGVAGAHSSETGTGTAAQYQPGGAISAPGE

SEQ ID NO: 69594 - protein, 363 aa, Zea mays
  Coding DNA Sequence Number=SeqID_27815
  Gene Ontology: Mol. function=DNA binding; Biological process =regulation of transcription
  Homolog annotation: Hit_ID=Q84Q21; Match level="QueryCoverage=71%, HitCoverage=64%, E-value=8e-79, Identity=54%"; Hit description =Putative regulatory protein
EPPTFSKTMLLKQDILEQYDPGITHSTKNFLGFLLGAAVTAACILLLLPPAPCPCGVLPAQQESVVLGNGNGTQADPSMKKLHMAGNSTDHELLELLKRAAMDDRTIIMTFTNEAWTAPGSLLDLFLQSFRLGVRTAPLLKHLIVVAVDAMAYERCQHVHRLCYHLRVDGVDYAAEQSYMQKDYLDMMWRRNRFQARILELGYSFVFTDVDIIWLRNPLLRIPVGADMAMSCDFFYGDNPYDLNKLANGGFVYAKANARMVAFYGSWYESRKGFPGAHEQYVFDQVKQELSARHGVRVQFVDTAYLSGFCELRKDFYRVCTVHANCLVGLQSKLQKLTQVFDEWKQFREKAALLGSNTTALTD

SEQ ID NO: 69595 - protein, 346 aa, Zea mays
  Coding DNA Sequence Number=SeqID_27816
  Gene Ontology: Mol. function=DNA binding; Biological process =regulation of transcription
  Homolog annotation: Hit_ID=Q6ZIA2; Match level="QueryCoverage=92%, HitCoverage=91%, E-value=1e-75, Identity=47%"; Hit description =Regulatory protein-like
MRGFSDSRGCFLSFFLGAAVAAACIVLLQPSALCPFDGLTPADRQELAILSNRTHAAPCSKKLHMPATTSPDDVRLLALLRRASMDDNTIIMTFTNKAWTAPGSLMDLFLESFRVGVRTEPLLKHLVIVAVDDKAHERCGQVHPLCYRLRVRGVDYAAEQSFMEKDYLDMMWRRNRFQARVLRLGYSFVFTDMDIVWLRNPLLRVPVGADLAMSSDYFYGDNPYDLNKTANGGFVYARASARTVAFYGGWYEAREAYPRRNEQDVFDRVKHVLSARHGVRVQFLDTAYLGGFCELRKDFHKVCTVHGNCLFGLRDKLQKLTQVLDEWKQFRADAALMGSNSTALTD

SEQ ID NO: 69596 - protein, 235 aa, Zea mays
  Coding DNA Sequence Number=SeqID_27817
  Gene Ontology: Mol. function=oleoyl-[acyl-carrier-protein] hydrolase activity; Cellular component=chloroplast; Biological process=fatty acid biosynthetic process
  Homolog annotation: Hit_ID=Q8L6B1; Match level="QueryCoverage=67%, HitCoverage=52%, E-value=8e-69, Identity=81%"; Hit description=Acyl -[acyl-carrier protein] thioesterase
  Pfam annotation: Domain name=Acyl-ACP_TE; Domain location=84-235; Score=69.6; E_value=1e-17; Accession=PF01643.8; Description=Acyl-ACP thioesterase
MLRCHTPPQCARAPLRHHGRWESPPAAAPAVVVRCARGAPQVSGIEAASPGHAAVTAALAKAEGGDARPSLAERLRLGNLLEDGLSYKESFIVRCYEVGINKTATVETIANLLQEVGCNHAQSVGVLTDGFVKATTMRKLGLIWVTNRKHMRSTSLILTGNSAAGRGDVVEIETWCQEDGRIGTRRDWILKDLANGEVIGRATSKWVMMNQNTRRLQRVSDDVRDEVFMHCPKAP

SEQ ID NO: 69597 - protein, 122 aa, Zea mays
  Coding DNA Sequence Number=SeqID_27818
MAQGHISLSTFNDFWLTHEGCLGMIKLSSLPPGYPHPIGRGLSNHHRDLADAIGLAREAERQEDLFLAKVVEATQSRLTHNLPWTAGSDASVSNQSIAPAYSNLPVATMESKLEGGPTNVRN

SEQ ID NO: 69598 - protein, 73 aa, Zea mays
  Coding DNA Sequence Number=SeqID_27819
  Gene Ontology: Mol. function=transporter activity; Cellular component= membrane; Biological process=transport
  Homolog annotation: Hit_ID=Q7XHQ9; Match level="QueryCoverage=56%, HitCoverage=13%, E-value=4e-14, Identity=92%"; Hit description =Putative permease
MNRENPTIIMFLELAAWVYRNVDKPSATISAQVKHRTEAAKARDLPAVKRHGTMKAAYAQPCQGTLAIKHEST

SEQ ID NO: 69599 - protein, 134 aa, Zea mays
  Coding DNA Sequence Number=SeqID_27820
MAGWFYKSGRALLKDYQAEGVRISSDHPIRDGGLRSHWDGIEPGPFFPRLDLSRGSTKVPRAAASEIPTGEAAIGAWSRAERLFARMGRKDSPRFRCAEARTRHDAARPIDRTTGESSSEERRARRPVTRRRRG

SEQ ID NO: 69600 - protein, 290 aa, Zea mays
  Coding DNA Sequence Number=SeqID_27821
  Gene Ontology: Mol. function=protein transporter activity; Cellular component=mitochondrial inner membrane; Biological process=protein transport
  Homolog annotation: Hit_ID=Q6Z4G6; Match level="QueryCoverage=75%, HitCoverage=100%, E-value=5e-45, Identity=64%"; Hit description =Translocase inner membrane-like protein
  Pfam annotation: Domain name=Tim17; Domain location=4-122; Score =147.1; E_value=4.6e-41; Accession=PF02466.9; Description =Tim17Tim22Tim23 family
MGTPETSREPCPDRILDDVGGAFGMGAVGGSAFHFIKGIYNSPNGMRMSGGAQAVRMNAPRVGGSFAVWGGLFSTFDCAMVYARQKEDPWNSIIAGAATGGFLSMRQGMGAAGPVRAHGRCPSGPHRGRRPYAQPRPRQPAASRGGSQPYRGHGRQPFPGPATGAAGRGTSGSGELQRRGWVVRGTDWQEGRREEIQRGQVGDLGELRHAQQSDTIVRVQVRKRRCDHFVANPFRIQLEIVIASYWKNVTCGREWAGMGSAFVIGAVGGSFFHFVNDLCKDLLVARRLCA

SEQ ID NO: 69601 - protein, 64 aa, Zea mays
  Coding DNA Sequence Number=SeqID_27822
MAHRIVWCASHVTRPLGFDRWSSDWWGRLAVRWCTGQVTVGVEVAVAPLAHRTVWCAPDMSGEL

SEQ ID NO: 69602 - protein, 428 aa, Zea mays
  Coding DNA Sequence Number=SeqID_27823
  Gene Ontology: Mol. function=GPI anchor binding; Cellular component =membrane; Biological process=root hair cell differentiation
  Homolog annotation: Hit_ID=Q6Z4G7; Match level="QueryCoverage=89%, HitCoverage=90%, E-value=0.0, Identity=80%"; Hit description=COBRA -like 6 protein precursor
  Pfam annotation: Domain name=Phytochel_synth; Domain location=47-192; Score=285.0; E_value=1.5e-82; Accession=PF04833.5; Description =Phytochelatin synthetase-like conserv
MEPRRSVLLLALAVAAALSVAVAYDPLDPNGNITIKWDIMSWTPDGYVAVVTINNFQTYRQITAPGWTVGWTWAKREVIWSMVGAQATEQGDCSRFKANIPHCCKRTPAVVDLLPGVPYNQQIANCCRGGVVSAYGQDPATAVAAFQVSVGQAGTTNRTVKVPKNFTLLGPGPGYTCGPGKVTWNVTCTYSQHLASKYPSCCVSFSSFYNDTIVPCAKCACGCEHKTCVQGDSKRLAVTGKHAHTAAAVRGQHRDKEAPLLQCTTHMCPVRVHWHVKLNYKEYWRAKIAITNFNYHMNYTQWTLVAQHPNLDNITEVFSFGYKPVVSYGSINDTAMFYGLKYFNDHLMQAGPYGNVQSEVLMRKDASTFTFRQGWAFPRKVYFNGDECQMPPPDAYPYLPNSAPPTAAASLGGAAAAAVVVLLGMIVA

SEQ ID NO: 69603 - protein, 120 aa, Zea mays
  Coding DNA Sequence Number=SeqID_27824
  Homolog annotation: Hit_ID=Q94HS0; Match level="QueryCoverage=55%, HitCoverage=7%, E-value=2e-19, Identity=65%"; Hit description =Putative salt-inducible protein
MWAEKLREDSFVFDGATRNIIDWARREMEDDPQANNEDIGRCMFLEFLMFMTYEAMLNSRSSKATHMLTEKSFDPASSSMIRKEVKMGLAVIACLLLNQTFLMNPKYPSFCLINPCYERL

SEQ ID NO: 69604 - protein, 64 aa, Zea mays
  Coding DNA Sequence Number=SeqID_27825
MGWSCGDKNDGRDARPGSSKFDDKPGKHARSTGGGKYPSLDCTRTRRARDFSSVSICSGDRLSS

SEQ ID NO: 69605 - protein, 188 aa, Zea mays
  Coding DNA Sequence Number=SeqID_27826
  Homolog annotation: Hit_ID=Q6QP51; Match level="QueryCoverage=26%, HitCoverage=23%, E-value=8e-14, Identity=72%"; Hit description =Putative growth-regulating factor 1
  Subcellular localization annotation: CTP_CleavageSite=82; ConfidenceScore=5.50e-01
MQAACNRAKWAHLSDSQRAQLGGPGPRVMQLVRRSLRVSNCIATHATTTPPRLRSQYRDSRQPCNASQARRSNAVKIGPAVMAVAGGQEQRSRTGKGDTPKGILPCEGTRLRASLLIRGSKVGPSEGFNSRLKARGPHTHYWSEVQRPAPRKGSTTASGYSGSAPTTDQGFEGWPPKGSQPPQTQSEG

SEQ ID NO: 69606 - protein, 262 aa, Zea mays
  Coding DNA Sequence Number=SeqID_27827
  Gene Ontology: Mol. function=GPI anchor binding; Cellular component =anchored to membrane
  Homolog annotation: Hit_ID=Q9SUC9; Match level="QueryCoverage=60%, HitCoverage=50%, E-value=5e-17, Identity=35%"; Hit description =Uncharacterized GPI-anchored protein At4g28100 precursor
MARLISVGADLAIRTQLVAELLKFYSCAGIIIFLPKTCVSHCRSLLPPPSGSRRRRQMSAHLTVALLLAVAAASARGSDVPSFPLSQAQSPSNSSSPSNASSPPCHLDLSAELFGGVAAACGASGGPGSLDRGRCCPVLAAWLFAAHARTALSVPPAPAPSAVAGEEGLGPGDDGPMVPYDNQRCVNALGAALEKRGVALPRPNATCDNIGSLRCPAAFAVGPGAGAAAKNATPTAAVKGQEKSCRNASYAGCSRCVQSFWK

SEQ ID NO: 69607 - protein, 366 aa, Zea mays
  Coding DNA Sequence Number=SeqID_27828
  Gene Ontology: Mol. function=DNA binding; Cellular component=nucleus; Biological process=regulation of transcription, DNA-dependent
  Homolog annotation: Hit_ID=O04141; Match level="QueryCoverage=84%, HitCoverage=81%, E-value=7e-91, Identity=60%"; Hit description=Myb protein
  Pfam annotation: Domain name=Myb_DNA-binding; Domain location=14-61; Score=46.3; E_value=1.1e-10; Accession=PF00249.21; Description=Myb -like DNA-binding domain
  Pfam annotation: Domain name=Myb_DNA-binding; Domain location=67-112; Score=47.9; E_value=3.3e-11; Accession=PF00249.21; Description=Myb -like DNA-binding domain
  Pfam module annotation: Pfam domain module=Myb_DNA-binding::Myb_DNA -binding; Domain location=14-61::67-112
MGRAPCCEKSGLKKGPWMPEEDEKLVAYIKKHGQGNWRTLPKNAGLARCGKSCRLRWTNYLRPDIKRGRFSFDEEETIIQLHSILGNKWSAIAARLPGRTDNEIKNYWNTHIRKRLLRMGIDPVTHAPRLDLLDLSALFKPAAAAAYYPTQADLDTLRALEPLANYPDLLRLASALLSGPPAAPAIGDQQPRQLLPWILQAQMAQQAAAAVAQAQLQVAPQAEQFVQQRQAAGAACQMPDLVHTSPTVQQHQQVAAAQEQQHQPQGQDDMAAACHSMQPQPPTGGYAVDTLDIPALMQMVQADDASNLQQWSSMITSSTNNNNVGSGVSTPSSSPGAALESLHHRHHDVRRRERCRRRRAVQHAAI

SEQ ID NO: 69608 - protein, 88 aa, Zea mays
  Coding DNA Sequence Number=SeqID_27829
  Homolog annotation: Hit_ID=Q6K7R4; Match level="QueryCoverage=44%, HitCoverage=5%, E-value=3e-13, Identity=87%"; Hit description =Putative ABC transporter
VRMAVFSPHHVDGLGLTVNPLLYMMKCYLGVPEQKLRAHLDLDTVEALIQGYSFSRSADGMTKRHCVNLHMLPTTFPMTKEGGVGMLK

SEQ ID NO: 69609 - protein, 135 aa, Zea mays
  Coding DNA Sequence Number=SeqID_27830
  Subcellular localization annotation: CTP_CleavageSite=47; ConfidenceScore=5.70e-01
MSKKTVVGSNQGGLVYLKYTFRQGGKRKVATSTSFSASKPKRAKVLTQSMKASTPAFAEASGEKSEDTREGIIANAATALAEAGPSKAAPVRLTEGSLPEKSTSPAPEAPPFGDLEYIVRHTSGNQLSLEQIAEV

SEQ ID NO: 69610 - protein, 122 aa, Zea mays
  Coding DNA Sequence Number=SeqID_27831
MAARGAASYPPSSSPQWALRRGWLWLAHASQVYGSGPPASHCGLLVDLVARWQPLAPQSIKIRIDGIFTKCVSMLLLRGLAANPNEDNAININQQDQSGAAKACVGPNTQVQENFKNCIRGL

SEQ ID NO: 69611 - protein, 114 aa, Zea mays
  Coding DNA Sequence Number=SeqID_27832
MRLPTVVASLLYCILPYWGFGSWLLEDGLPGCSGAGIDFLLAGCSDGTAAAEETASGTIGGVCFIAEGPMRRYTFRRSKQKWCRSYHPESFSIVTRLETKDGTDLKMKRPIGPL

SEQ ID NO: 69612 - protein, 115 aa, Zea mays
  Coding DNA Sequence Number=SeqID_27833
MVADSGCARKRSGERGPDEIERERAHRRVSRVADGKAKLTVALAGARAQRRPQNRRWASAGGGGALGSCGKSKREGEGAGQRAQMREGRWASRARGLERGRVHGGEIVGERLETG

SEQ ID NO: 69613 - protein, 114 aa, Zea mays
  Coding DNA Sequence Number=SeqID_27834
MDQGNSRTNPFLTSPYPEPSDGSEREQQPERTLEEGRVIYRSSPICKDIEGHKAYDKVRPWDVCNRLMYALAYKRQRYVGAYPAYPVGLPLPTPLGLSVLTDLALLHHNSNRCL

SEQ ID NO: 69614 - protein, 106 aa, Zea mays
  Coding DNA Sequence Number=SeqID_27835
MGSCSPRVETLEHRSNGGTQGDLGSTATELRLQGEEAGERGPGEPAGLGANRKMSHVAGEEAELTEATGVAETQQRPQNGRRTTASFTARAQNERDRARVLGWGRN

SEQ ID NO: 69615 - protein, 58 aa, Zea mays
  Coding DNA Sequence Number=SeqID_27836
MTKTKVMKDIPSLLQYMLMKGETYEMHKTQPVRNYSHALYIYYWLIEKSMRTEWPFPL

SEQ ID NO: 69616 - protein, 67 aa, Zea mays
  Coding DNA Sequence Number=SeqID_27837
  Gene Ontology: Mol. function=hydrolase activity
  Homolog annotation: Hit_ID=Q940L0; Match level="QueryCoverage=91%, HitCoverage=18%, E-value=1e-25, Identity=90%"; Hit description =Glyoxalase II
MRGQPSLLPSVRKQWPGKPLLYGIGTLLVMPLRTLYGVGRVFGAGRFLCNMTNVSSSLQIELERIQW

SEQ ID NO: 69617 - protein, 213 aa, Zea mays
  Coding DNA Sequence Number=SeqID_27838
  Gene Ontology: Mol. function=ubiquitin thiolesterase activity; Biological process=ubiquitin-dependent protein catabolic process
  Homolog annotation: Hit_ID=Q6ZJC2; Match level="QueryCoverage=89%, HitCoverage=17%, E-value=2e-28, Identity=39%"; Hit description =Putative ubiquitin-specific protease
  Pfam annotation: Domain name=zf-MYND; Domain location=23-45; Score= -2.2; E_value=0.081; Accession=PF01753.9; Description=MYND finger
MRAEKRSRKAWLAAMPVLFGATKGAEVCSFKCQIAHWRQGHKDECHPPSVNTRHDDEEEKAEVGRAAKENVSVGVKQVAEMNKPDVGSETSDANHDLKSSNGKSKHMPSKAVCSSVEIPGGHKSNNTVEISQNVQSVDSSKMGSSIKHANFVEDGSSTEDLNEALPCNSHSSSLNINGHSSFVNKEFCNHSKEYQRAKDATVVEDCSQTNSTR

SEQ ID NO: 69618 - protein, 317 aa, Zea mays
  Coding DNA Sequence Number=SeqID_27839
  Subcellular localization annotation: CTP_CleavageSite=53; ConfidenceScore=5.62e-01
ASTAELFCPHPARCAFSTRFPRRRAFSTRFPPPAIASALPLRRNQLPGNLPSMAPLEGSPRSIFTEKRIQRSIHAPSQPPPRAYSPNCCPRASLPLVHPILLATLTYELAHLGTDMRVIEVPPRGPAWDDGSRWGVRAEVQVGVQGGRAALARNATRATAKATGDGLEPSTPAPWRGHREGVEEHLSGGWDGMAAPRARSLDPGVGGRGPIVDSFLLEEDEAGGAARVMARLQCELTELEEKKAAQEQRAAESLARVKAIRDGSRMGKLIVCSKVDDLCTNELHELLHGLSRVDQEIRALLPPPAPARTAEAGGLMR

SEQ ID NO: 69619 - protein, 70 aa, Zea mays
  Coding DNA Sequence Number=SeqID_27840
MTEESVLIPLMTCEPGPEPPLMTNESVDIWLTHGLPSLGMSPLTIYKTRNTMRDAKAQATKDRSQRDVEE

SEQ ID NO: 69620 - protein, 617 aa, Zea mays
  Coding DNA Sequence Number=SeqID_27841
  Gene Ontology: Mol. function=zinc ion binding; Cellular component =mitochondrion; Biological process=regulation of transcription, DNA -dependent
  Homolog annotation: Hit_ID=Q8H349; Match level="QueryCoverage=94%, HitCoverage=59%, E-value=0.0, Identity=70%"; Hit description =VP1/ABI3 family regulatory protein-like protein
  Pfam annotation: Domain name=B3; Domain location=376-479; Score=96.1; E_value=1e-25; Accession=PF02362.12; Description=B3 DNA binding domain
MAPTAHRIYVESWSDRHVVAISRDMRGSQFEQGIYCETFHSEEGGWRNCESCGRRVHCGCIVSIHKYQLRDAGGVDCAKCARSTRAAMAPPSPVWTNPIHSSQNVSDRKDITVKSWRPPAGQISSQWRQTNLWSVSSIQSDLQQRLAFEFDRPSGSEKLLPGRTFIHSQERKFDDMHDRPATPAGMNHIMRERDPNGHGQTTNMDPAYSYTLYHRDGSHPNNLHDSNHHCGENDSLSSRKVAMPEASTSVDAGFKLDSHHTSNLKDDPPSLSVGLASNFAPQNGPKDHIRIAPTQQQSQMTSSSLQKQFYSHAVTGYNEFQAQMRNGRPRMDSKARSQLLPRYWPRITDQELQHLSSEYPTHSTYVNNSNSVITPLFEKMLSASDAGRIGRLVLPKKCAETYFPPISQPEGLPLKVQDASGKEWIFQFRFWPNNNSRMYVLEGVTPCIQSMQLQAGDTVTFSRIDPEGKLIMGFRKATNNSFEQEQATKPANGALATSEANGKVSAPDSSPNAAVSRQNKLNTETKSSSPVEQATALKMDKDGLTQKEGPGTGSSSPGSVKRKTTILGQKNKRLRMDNEESMELKITWEEAQELLRPPPKAPSIVIVDGHEFEEYEV

SEQ ID NO: 69621 - protein, 157 aa, Zea mays
  Coding DNA Sequence Number=SeqID_27842
MGCACPPKPQGKGIKETTASRRRAVVKASPEKKKKKRNAQQPDKATKAPSECAAALPVPAPLPPNKSTHAASLFRRDWEWRVAIGPALPNLQAADGARAERGGRTEDATCFYYSPDGLGSKILRHRPLPTPNHITSPGMQRLSGGSDALHTVNRLII

SEQ ID NO: 69622 - protein, 53 aa, Zea mays
  Coding DNA Sequence Number=SeqID_27843
MGLKAKIAERFGSSGAWRGGGQKSVGILDDVLVRNPGDLEQFMGLSEPCTEFC

SEQ ID NO: 69623 - protein, 239 aa, Zea mays
  Coding DNA Sequence Number=SeqID_27844
  Gene Ontology: Mol. function=translation elongation factor activity; Cellular component=cytoplasm; Biological process=translational elongation
  Homolog annotation: Hit_ID=P13905; Match level="QueryCoverage=90%, HitCoverage=53%, E-value=1e-107, Identity=82%"; Hit description =Elongation factor 1-alpha
  Pfam annotation: Domain name=GTP_EFTU_D2; Domain location=48-115; Score=87.5; E_value=4e-23; Accession=PF03144.15; Description =Elongation factor Tu domain 2
  Pfam annotation: Domain name=GTP_EFTU_D3; Domain location=122-209; Score=90.1; E_value=6.6e-24; Accession=PF03143.7; Description =Elongation factor Tu C-terminal domain
  Pfam module annotation: Pfam domain module=GTP_EFTU_D2::GTP_EFTU_D3; Domain location=48-115::122-209
MIERSTNLDWYKGPTLLEALDQINEPKRPSDKPLRLPLQDVYKIGGIGTVPVGRVETGLLKPGMVVTFAPTGLTTEVKSVEMHHETMQEALPGDNVGFNVKNVAVKDLKRGYVASNSKDDPAKEAASFTAQVIIMNHPGQIGNGYAPVLDCHTSHIAVKFSELLTKIDRRSGKELESAPKFLKNGDAGFVKMIPTKPMTEKVVVINSVEMKDPTGAKVRNHVGGTPNLTYAVQTLMGGS

SEQ ID NO: 69624 - protein, 237 aa, Zea mays
  Coding DNA Sequence Number=SeqID_27845
  Gene Ontology: Mol. function=motor activity; Cellular component =myosin complex
  Homolog annotation: Hit_ID=Q6UAL5; Match level="QueryCoverage=92%, HitCoverage=14%, E-value=7e-68, Identity=63%"; Hit description =Myosin heavy chain class VIII A1 protein
MNGHYPHEPVITELQGRITKAEAALRGKEEENVMLKQQLEQYERKWSEYEAKMKCMEEAWKRQLSSLQNGSTYSCNMNFQLSLVVAKKSLAADDAATRAARTDCTPTHAQYDSEDTLSTGTRTPEVIESKHDNHNPEAKVSAGNSDRRVNAVNHLAKEFEDRRQVFEDDAGFLVAVRSGQIGSNMNPDEELRKLKDRFATWKKDYKSRLKETKVNLSKVGTHDEKSRKRWWGKKSSK

SEQ ID NO: 69625 - protein, 231 aa, Zea mays
  Coding DNA Sequence Number=SeqID_27846
  Subcellular localization annotation: CTP_CleavageSite=41; ConfidenceScore=5.41e-01
MAEARAMLPSATRQSKSDRQSGLAKGATANSAPPDPRARTRAKTRKTANSAPPDPRARTRAKTRKTANSAPPDPRARTRAKTRKTANSAPPDPRARTRAKTRKTANSAPPDPRARTRAKTRKTANSAPPDPRARTRAKTRKTANSAPPDPRARTRAKTRKTTKLPPRPTPGLGLRPWPRPNDFRLARPQGSDSALASAERLSASPDPLARLGHGNRRQTQLGSEETPRRPA

SEQ ID NO: 69626 - protein, 108 aa, Zea mays
  Coding DNA Sequence Number=SeqID_27847
  Homolog annotation: Hit_ID=Q6JAC8; Match level="QueryCoverage=78%, HitCoverage=76%, E-value=1e-10, Identity=37%"; Hit description =Putative auxin-induced protein family
  Pfam annotation: Domain name=Auxin_inducible; Domain location=1-90; Score=-12.2; E_value=0.00079; Accession=PF02519.5; Description=Auxin responsive protein
MAAWTRKATAKAMASCVTTGAVRDDDGNKQRIPKGYIPLVLVRDGEGEGGSETRILVRVRDLREPCMAVLLEMAEEQFGYGQQGVLKVFPPPATLSPCGCHGTQVQGC

SEQ ID NO: 69627 - protein, 164 aa, Zea mays
  Coding DNA Sequence Number=SeqID_27848
EYKLIGRGRGSQVLEASVNISVERAEAIVWGLVAYPSLSDDRVILVIVVEAVISMKKKLLEIRRVSDVSFVASSDVGRAFINTIKAEATLERDRSLPEAMVEPALGLAVVQGTIEGVAFCRIHGEQLAETELGRDEFTRPLTKAGLGVVLLPESGSGEVETTVS

SEQ ID NO: 69628 - protein, 759 aa, Zea mays
  Coding DNA Sequence Number=SeqID_27849
  Gene Ontology: Mol. function=identical protein binding; Cellular component=cellulose and pectin-containing cell wall; Biological process=negative regulation of enzyme activity
  Homolog annotation: Hit_ID=Q8H047; Match level="QueryCoverage=88%, HitCoverage=90%, E-value=1e-138, Identity=42%"; Hit description =Putative serine protease
  Pfam annotation: Domain name=PA; Domain location=365-456; Score=46.1; E_value=1.2e-10; Accession=PF02225.12; Description=PA domain
  Pfam annotation: Domain name=Peptidase_S8; Domain location=140-593; Score=8.2; E_value=3.2e-07; Accession=PF00082.12; Description =Subtilase family
  Pfam annotation: Domain name=Subtilisin_N; Domain location=42-133; Score=34.9; E_value=2.8e-07; Accession=PF05922.7; Description =Subtilisin N-terminal Region
  Pfam module annotation: Pfam domain module=PA::Peptidase _S8::Subtilisin_N; Domain location=365-456::140-593::42-133
MPIQTPFLLLFLLTTTVAILLCPAATVGDDIATTGAAGDAVGTYLVVVCRANGPKEGGEKLREWHASLLASLLNTSTTTILEEARSPEGGQLVYSYQHVISGFAARLTVREVDALRKLKWCIDAIPDVNYRLRTTYTPALLGLSTPQTGMWAAARSMGEGIIVGVLDNGIDPRHASYSDEGMPPPPAKWRGSCEFGGAPCNKKLIGGQSLTPGEHGTHTSSTAVGAFVSDVQMFRAKVGAASGMAPRAHLAFYEVCFEDTCPSTKQLIAIEQGAFMDSVDVISISAGDDTQKPFYQDLTAVGSFSAVTSGVFVSTSAGNAGPDYGTVTNCAPWVLTVAASTMTRRVVSRIRLGNGLVIQGEAGRRYKGLKPAPLIYVQGVFEDGALNTVDVRGKIVFCDRSETATMRGEMVRAAGGVGIIMFNDASEGGVTRFLGNVSIAAARVSEADGAKIMSYINSTANPTANLHFTGVMLDPSYQPAIAEYSSRGPCNMSNLGVIKPDITGPGTSIIAAVPGAGGGNGSAPSHTFGLLSGTSMAAPHLSGIAAVLKRARPAWSPSAIKSAMMTTADVTHPDGTPITDQITGKPAGPLLMGSGIVNPTKALDPGLIYDLSALDYTTYICGLGYNDNFVNEIIAQPLQNVSCATVSKIESKDLNYPSFLVTLTAAAPVVEVRRTVTNVGEAVSAYTAEVVAPKSVAVEVVPPRLEFGSVNQKMDFRVRFSRVGAAADGGTAEGSLRWVSGKYSVRSPILVLDGTQNLV

SEQ ID NO: 69629 - protein, 124 aa, Zea mays
  Coding DNA Sequence Number=SeqID_27850
MGNSLVFQHPPHVEALSGLRRGIRASTSGSVGGRPSGKDSSQARAEISHGCGGRVEEEEGGAAGVNGCGGVGFGGVAGAVPPGPGAWGWNGAGTGKGSGASDGRARSGRMAWGSGIRGGGGGRS

SEQ ID NO: 69630 - protein, 94 aa, Zea mays
  Coding DNA Sequence Number=SeqID_27851
MTCYFLEIYMALDGFAILRCGVEGSDDLEEEGGGGPDGSGYDGDDEGGDDDKVGGGNKSDGSSSSGNDSNKGSNSDKGNDGKGSGNTAGKAPPA

SEQ ID NO: 69631 - protein, 192 aa, Zea mays
  Coding DNA Sequence Number=SeqID_27852
  Subcellular localization annotation: CTP_CleavageSite=42; ConfidenceScore=5.31e-01
MGKRLLGRFLHCGPLPLSLSSAQEGLHRRCRVGRSHMHPLPRGSRASGLRSSMSARIGSAEAHQSQESAPFPPRSMRTVEPDRGGRILVDPSRSPCAYKCSSRDPLSISVHATIVDHNRRRGISSKLQGLGVKQLCKKIRWWVKIAFVRDLKLVRTRWLGDFSPECYESRLHFRLSPDFSGNRGPVQNTNQA

SEQ ID NO: 69632 - protein, 399 aa, Zea mays
  Coding DNA Sequence Number=SeqID_27853
  Gene Ontology: Mol. function=unfolded protein binding; Biological process=protein folding
  Homolog annotation: Hit_ID=Q7XXN2; Match level="QueryCoverage=43%, HitCoverage=29%, E-value=4e-73, Identity=82%"; Hit description =Putative serine/threonine-protein kinase ctr1
EAAESCGSHAAAAASGGGAAELATSSSSAAAAVQARKQQQQQRHKLEVYTEVLRRLHDAGLPDARAPGFDDELWNHFNRLPARYAMDVNVERAEDVLTHKRLLEQAKDPAQRPAFAVRAVQVSPILDGNQTDADSNTAGEEVASRLLNRQQSIHPPPAFGSSTNLEALALEASKSHQDHDSTSDNCRSLYRRGCRVQEVMKLLEHLTEPRRLGNTVGHNTILSLCVGVGDDKLLLGGLGDEIGAQEHDIDRGGPTSVGAADVGVGNQLISQRGSKKKTVVDGGTEVAKNPLCSGEVWFPRGAHAKEHLLDCVGDVGPSECVSLLKNVNGVLALVKEEDLELVLHGDPYEVAERAQFLYLELALQGGNGALKTGGTGCREHDVVDVEQKVNGVVTAPKDE

SEQ ID NO: 69633 - protein, 70 aa, Zea mays
  Coding DNA Sequence Number=SeqID_27854
  Subcellular localization annotation: CTP_CleavageSite=54; ConfidenceScore=5.47e-01
MTFTHVMLRYFMATLSHSQPGARQVFSSRTSVFLHVADTVPVRAFTGLLYGCYSASAGDEQTSTLEFCAH

SEQ ID NO: 69634 - protein, 76 aa, Zea mays
  Coding DNA Sequence Number=SeqID_27855
MEGARSWRGRGGCNKGVQRARRGARTRGVGAATHGGADAASLAAARDESRRPGGWFTGYHCKSLVFRGYVEGATIG

SEQ ID NO: 69635 - protein, 106 aa, Zea mays
  Coding DNA Sequence Number=SeqID_27856
MDEEDNFFLIRFFIAEDTMNYELLDDDEEEVHKGSTQTNKKIKLGFKRKEQKKPKSTLRHSAIIHRTVRCATGLSGAPAEQRLFGATVDCTVPLTALQFATEVRAE

SEQ ID NO: 69636 - protein, 159 aa, Zea mays
  Coding DNA Sequence Number=SeqID_27857
MHMVLAYFCLTSEIRDVRDSGFDEVEQGRTRETSRYEVTAKDDGMRATQGKAPARHGEREPMEQHRPSMEKHRGRTTSRDRNQGRGAGNREKRRQVGTKKQGGTHCAGEFGCALELESGATAMVSIVGLREEDAQGLETEQGDAPVTKLHGEEGHRQGS

SEQ ID NO: 69637 - protein, 487 aa, Zea mays
  Coding DNA Sequence Number=SeqID_27858
  Homolog annotation: Hit_ID=Q9FJU3; Match level="QueryCoverage=60%, HitCoverage=67%, E-value=4e-08, Identity=26%"; Hit description =Arabidopsis thaliana genomic DNA, chromosome 5, P1 clone:MIK19
SEGFKLEFVRLPLRDAAATAVNKRRWPRVFATLPRLVLRPATFNRRGFPDEDRCEDPPRWLRALRCVLDRRAAPVVAFEVDCGFMCVYGEWFGWVFREVCGSGGLLELSIANTDYKECYALPDAVYTCKTLTSLDLYNCRLQVPIRAAAVTLRALQTLRLRNVVARDSDIRLIVCRCTAIERLEIHGIHMARNIVIRAPCLKRLDIYSYRPLCISLKKAKAQPLNMVRLSLSYGYPEHYWSLHDTKDTKREYSVHEIEEMLDYKKMAEREHRQTDEIKNMETFLTALSCTKTLQLHLSTEYSEFPTTKNVVLPVLVSLASHQVLDMVKASTLTSLPKKKYLHGLKSLSLTLDHNHAVLATLVSCLLNSSPNLKDLRIIELRHPGSPVPLAAEFWEKKITADGFLYHLASVTFYTDSLLEGHPCEGICKFLVMNARVLKRMSIVYHHSQVRPEHAAKLEAARRELRVWPRASADVLLELTPVHRFPWF

SEQ ID NO: 69638 - protein, 213 aa, Zea mays
  Coding DNA Sequence Number=SeqID_27859
  Gene Ontology: Mol. function=nucleoside-triphosphatase activity; Cellular component=signal recognition particle, endoplasmic reticulum targeting; Biological process=SRP-dependent cotranslational protein targeting to membrane
  Homolog annotation: Hit_ID=Q53QG1; Match level="QueryCoverage=93%, HitCoverage=37%, E-value=4e-72, Identity=69%"; Hit description =Signal recognition particle protein, putative
  Pfam annotation: Domain name=SRP_SPB; Domain location=57-157; Score =156.3; E_value=8e-44; Accession=PF02978.9; Description=Signal peptide binding domain
MPKFGHGQKKCWDVGQGERIEDLEPFYPDRMAQRILGMGDMRQEDADELQKKILSAKFNFNDFLKQTQMIAKMGSFSRLIGMIPGMNKVTPAQIREAEKNLKFMESMINVMTLEERERPELLAESRERRKRVAKDSGKTEQQVSQLVAQLFQMRAKMQKMMGAMQGKESPDMDELMGSMKAEEQSAAGTGRRRRKYGNLRQRQLDAMRGFRRR

SEQ ID NO: 69639 - protein, 141 aa, Zea mays
  Coding DNA Sequence Number=SeqID_27860
MEKDRRDVQREAELALKRAVDKESELKSVRNYCEKTKASTRAGVERAHTLFVEAYRELGAQTAPSDKSGEEVGLRFLGWLQQEPESLPSIVMGLMSYASLVTCEGAMNALSREGCRHFEVFDRASEDFDSRIFQMMNQEEV

SEQ ID NO: 69640 - protein, 82 aa, Zea mays
  Coding DNA Sequence Number=SeqID_27861
ATFLSGNVSEGSELGSWSLDEEEFGSPFSWVEESSEDDLDYFAALDLATSESLPRSIPRKVLSTSTDARAKDSRRRRMGVSK

SEQ ID NO: 69641 - protein, 413 aa, Zea mays
  Coding DNA Sequence Number=SeqID_27862
  Gene Ontology: Mol. function=nucleic acid binding; Cellular component= intracellular; Biological process=RNA splicing
  Homolog annotation: Hit_ID=Q9LU44; Match level="QueryCoverage=87%, HitCoverage=50%, E-value=1e-152, Identity=68%"; Hit description =Similarity to transcription or splicing factor
  Pfam annotation: Domain name=KH_1; Domain location=192-266; Score =27.4; E_value=5.2e-05; Accession=PF00013.19; Description=KH domain
  Pfam annotation: Domain name=zf-CCHC; Domain location=299-316; Score =16.1; E_value=0.0022; Accession=PF00098.13; Description=Zinc knuckle
  Pfam annotation: Domain name=zf-CCHC; Domain location=325-342; Score =10.0; E_value=0.022; Accession=PF00098.13; Description=Zinc knuckle
  Pfam module annotation: Pfam domain module=KH_1::zf-CCHC::zf-CCHC; Domain location=192-266::299-316::325-342
MASAETLARSPSREPSSDPPRAGSSEPHHNGAGDSSRRRRRSRWEQSNDDSANNSGGEGGAVGRKRKTRWAEEEPRPAIALPDFMKDFAAEMDPEVHALNARLLDISRLLQSGLPLDDRPEGARSPSPEPVYDNFGIRINTREYRARERLNRERQDIISQLIRRNPAFKPPSDYRPPKLQKKLYIPMKEYPGYNFIGLIIGPRGNTQKRMEKETGAKIVIRGKGSVKEGKFLQKRDLKPDPSENEDLHVLVEAETQEALDAAAGMVEKLLTPVDEVLNEHKRQQLRELAALNGTIRDDEFCRTCGEAGHRQYACPNKMNTFKSDVQCKICGDGGHPTIDCPVKGTSGSGGSGGASAGTGSNPPWSAGGGAAVIGLNGIKKDYDETNLYIGYLPPTMDDDGLVSLFSHGLYCHG

SEQ ID NO: 69642 - protein, 429 aa, Zea mays
  Coding DNA Sequence Number=SeqID_27863
  Homolog annotation: Hit_ID=Q2R276; Match level="QueryCoverage=74%, HitCoverage=63%, E-value=1e-34, Identity=35%"; Hit description =Expressed protein
  Pfam annotation: Domain name=DUF593; Domain location=37-130; Score =121.4; E_value=2.5e-33; Accession=PF04576.6; Description=Protein of unknown function, DUF593
MADVGEPPPSLCPLCGHPAAFSVSPSTSAAASIGDEAAALREALARQQAALADVQAELDAERGAAAGAASEAMTMILRLQREKAEAMMEARQFRRYAEEKMAHDAAELAALEEALSKREAGMRALQGQTPRHACAAPSGGSTPRRPSVATPRHPPSSLSPAASSGGGYYPPLRCSIDHPPTASEADALETPRDQLNHLAHRVHLLERGATPMAATNTTPIIRVAPGSAFPHHARAYSDDSLDLYDGGDCFPDDDCGASDRVYTVDAIHGAPLAVPEGSYAGSTPMGSDCYGGAPWAEDEEVRRLSVRMQALEADRESMRQAIMSMGAEKAQVMLLKEIAQKLCKDATPPVPAAAVAQHGFYKGGNTQPAMTITVRPPRHPALLMQRKLVKKKPSLLAVVVKCGNNVGLLLLLDKAPRAGHGHQRPPKRI

SEQ ID NO: 69643 - protein, 106 aa, Zea mays
  Coding DNA Sequence Number=SeqID_27864
MAIYCVTLQVLRECHGDVATVPDDDSIDQSDGRIHDYEGKVTLATDVNEYVTSAANNNEENLDITSVQQSEVTRADFLDVTSNTEYNLTATPDYATSSALLQDSAS

SEQ ID NO: 69644 - protein, 32 aa, Zea mays
  Coding DNA Sequence Number=SeqID_27865
MVLATLESLDDALPSNRNWSFKTTAGDDMFFG

SEQ ID NO: 69645 - protein, 74 aa, Zea mays
  Coding DNA Sequence Number=SeqID_27866
MLRLHLFGFDGFGAAGPMVTAGPAAEDATQGVVQDVVLVWEAKLCVRTPWTAVLDTRTPIAEWWSVQAYGTGPG

SEQ ID NO: 69646 - protein, 632 aa, Zea mays
  Coding DNA Sequence Number=SeqID_27867
  Gene Ontology: Mol. function=RNA-directed DNA polymerase activity; Cellular component=intracellular; Biological process=RNA-dependent DNA replication
  Homolog annotation: Hit_ID=UPI00004C1731; Match level="QueryCoverage =90%, HitCoverage=41%, E-value=0.0, Identity=79%"; Hit description =UPI00004C1731 related cluster
  Pfam annotation: Domain name=RnaseH; Domain location=312-439; Score =2.4; E_value=3.4e-05; Accession=PF00075.14; Description=RNase H
  Pfam annotation: Domain name=rve; Domain location=441-623; Score =16.0; E_value=0.00027; Accession=PF00665.16; Description=Integrase core domain
  Pfam module annotation: Pfam domain module=RnaseH::rve; Domain location=312-439::441-623
MPFGLRNAGATYQRCMNHVFGEHIGRTVEAYIDDIVVKTRKASDLLSDLGATFRYLKAKGVKLNPEKCVFGVPRGMLLGFMVSKWGIEANPEKIAAITSMGPIKDLKGVQRVTGCLAALSRFVSRLGERGLPLYRLLRKAECFTWTPEAEEALGNLKTLLTNAPISVPPAAGEALLIYVAATTQVVSAAIVVERREQGHALPVQRPVYFISEVLSETKIRYPQIQKLLYAVILTRRKLRHYFESHPVTVVSSFPLGEIIQCREASGRIAKWAVEIMGETISFAPRKAIKSQVLADFVAEWVDTQLPIAPIQPELWTMFFDGSLMKTGAGAGLLFISPLGKHLRYVLRLHFPASNNVAEYEALVNGLRIAIELGVRRLDARGDSHLVIDQVMKNSHCRDPKMEAYCNEVRRLEDKFYGLELNHITRCYNETADELAKIASGRTTVPPDVFSRDLHQPSIKTDDTPEPEKASAQPEDHPRHPRLSPRHPRLGPRYPRPPRKALGGYTHLLVAIDKFSKWIEVRPLNSIRSEQAVAFFTNIIHRFGVPNSIITDNGTQFTGRKFLDFCKDHHILVGDLVLRLRQDARGRHKLTPPWEGPFVIAKVLKPGTYKLANSQGEFYGNAWNIRQLRRFYP

SEQ ID NO: 69647 - protein, 323 aa, Zea mays
  Coding DNA Sequence Number=SeqID_27868
  Homolog annotation: Hit_ID=Q6QP51; Match level="QueryCoverage=64%, HitCoverage=80%, E-value=3e-21, Identity=42%"; Hit description =Putative growth-regulating factor 1
  Pfam annotation: Domain name=AT_hook; Domain location=198-210; Score =8.2; E_value=0.88; Accession=PF02178.9; Description=AT hook motif
  Pfam annotation: Domain name=AT_hook; Domain location=217-229; Score =8.2; E_value=0.88; Accession=PF02178.9; Description=AT hook motif
  Pfam annotation: Domain name=AT_hook; Domain location=236-248; Score =0.9; E_value=16; Accession=PF02178.9; Description=AT hook motif
  Pfam module annotation: Pfam domain module=AT_hook::AT_hook::AT_hook; Domain location=198-210::217-229::236-248
MQAACNHTKGVLPFDFDASSMEAQAHTSWTGKGDTPKGILLRKGNGPRASLLIRGSKAGPSEGFNSRLRALGLRAHYWSGVRRSAPRKGSTAASGHSGSAPTTDQGFVGWPSKGSTVASDAERGMTLGAADPGGFTPRPRAPSSNGHTFGSPEAQSSPRSNLGQIATPTDCTTGAFNAKRPSPASGAIGSSALPDPRARTRARPRKTTNSASPDPRARTRARPRKTTNSASPDPRAQTRPRPRKTTNSASPDPGLGLGLGPGRRRTPPRSTPGFGLGLGPGRRRTPPRPTRGSDSTSTTEDRLDLDLGGASASPDPGLGPTTS

SEQ ID NO: 69648 - protein, 62 aa, Zea mays
  Coding DNA Sequence Number=SeqID_27869
MGIRFFGTEPRNYHIHVGLMKIKKKEFLSLKQGGMSVPPLVAVLDNSLHRSKLLLKQVPQQD

SEQ ID NO: 69649 - protein, 243 aa, Zea mays
  Coding DNA Sequence Number=SeqID_27870
  Gene Ontology: Mol. function=catalytic activity; Biological process =aromatic compound metabolic process
  Homolog annotation: Hit_ID=Q8S125; Match level="QueryCoverage=69%, HitCoverage=61%, E-value=3e-60, Identity=67%"; Hit description =Putative ethylene-induced esterase
MAPVLPVAQGCGKHIVLVHGGCLGGWSWFKVATALRAAGYRTDKPDLAASGVDPRALREVPTFRDYTEPLLKLLASLPDGERVVLVGHSLGGVSVALAAETFPDKVAAVVFLCAFMPDCAARPSHVLEKLIVRIEQFVEGKWLEWMDIEVKPQDGEGKLTTSMLFGPRIIREKFTQLCSPEIYSMLRKMACATRVLKEITTLLAAIPTIGYARILDIGWEWAGVIWIYNVVTFLPMDMFKLAI

SEQ ID NO: 69650 - protein, 429 aa, Zea mays
  Coding DNA Sequence Number=SeqID_27871
  Gene Ontology: Mol. function=protein dimerization activity; Cellular component=nucleus; Biological process=regulation of transcription, DNA-dependent
  Homolog annotation: Hit_ID=Q1S866; Match level="QueryCoverage=99%, HitCoverage=69%, E-value=8e-81, Identity=35%"; Hit description=Zinc finger, TTF-type; HAT dimerisation
PSQSIEFALKKQQDIAKEEYFIRLSTSINAVRYLLHQGLAFCGHNESEDSANRGNFIELVKLLTEQNEKIKRVVLRNAPENHQMVSPEIQKDIANCFAEVIVNSIIEEIGGDVFCLLVDESTDVSDKEQMAVVLRWKQVRGQGYDGASNMRGEFNGLRALIMKDNGSAYYVHCFAHQLQLVIVAVAKKNDAISDFFDMISLLLNVAGASCKRKDMIRQSQQDRVLEYVEKHGPNDKKRRQARGLLDYLKDFDFVFHLHMMLMILGYANSLSLCLQRKDQDILEAMTEHDIPKLDMEEEYIDRHKPRKKSNRTNYQHYRWDCLNSVIDLLLIEFNDRFGETNSNLLTYMAALSLKDSFGNFNLESLMELAKHYFDDFSPEQLKDLAHELPIYIDNIQADERFSNLNTITELAKLMVGTKKHLAFPLVYVF

SEQ ID NO: 69651 - protein, 112 aa, Zea mays
  Coding DNA Sequence Number=SeqID_27872
MGSWSLWQPWRAAGRLAGHPSGSGAEGAGHGGHHSWGRTTMGWSPTEEDDPGAMAAESQRPGRRGHGEEWRMGSDLSHGWGATCSMLQWRRRNSHGRGALADTAMGEERGGL

SEQ ID NO: 69652 - protein, 166 aa, Zea mays
  Coding DNA Sequence Number=SeqID_27873
MTFICNTLEFEHLVNSVANGLLTEVHIRTHEVDYNRELSQNRKEKIKALLHCKKSVRPFDADADLLEMKALSQALGIPLHLAAVDDNPLPDRTVQVKWIDFIPRPGPLGSIREYYLGPLGSIRQYYLPSATDKHPVLPAENFLLSGRMPLVTILRTVRATAILYRK

SEQ ID NO: 69653 - protein, 203 aa, Zea mays
  Coding DNA Sequence Number=SeqID_27874
MQASHAEVTRLMECVARSREKFCRLHWNDAYFSNPEAFFSSVVSEFEQLVNSVANGLLTEVHIRTHHADYPEFSQETEALMFCLASVRPFEAGANILQMSALSSALGIPLHLACTDVTTSDDEIVTVKCFDLFPQSESGASTTSGATSSIRSYSLSSTTDKHPEQGRDDNNSTMPAGNLFSSDRMPLVILLSRKGQYGILYRK

SEQ ID NO: 69654 - protein, 231 aa, Zea mays
  Coding DNA Sequence Number=SeqID_27875
  Gene Ontology: Cellular component=nucleus
  Homolog annotation: Hit_ID=Q2QM91; Match level="QueryCoverage=79%, HitCoverage=15%, E-value=4e-49, Identity=51%"; Hit description=SET domain containing protein, expressed
MVSGFGCSYAVTGRKRVKLLAAESSDGEPLGCCVPICDDSLGDLIEWCSEWHHMPSDCGDQTQHTGVFAAMQEYTCSTGNNGVIYPQSGISHSSGQNGAQGTYLQHQHFEGCMYMSGNGQMCGPYLPEQLYEGLSSGFLPQSLAIYAVFGGKTVDPVQLIFLKQFLSQWNVGAVASTPNVSTETERVTSHAKMVFPDVWLALLSIFVRVILSLPAFLTALVLASSLLVSFK

SEQ ID NO: 69655 - protein, 207 aa, Zea mays
  Coding DNA Sequence Number=SeqID_27876
  Homolog annotation: Hit_ID=Q2QYK4; Match level="QueryCoverage=29%, HitCoverage=27%, E-value=3e-25, Identity=87%"; Hit description =Elongation factor P, putative, expressed
  Pfam annotation: Domain name=EFP_N; Domain location=118-182; Score =53.1; E_value=9.1e-13; Accession=PF08207.2; Description=Elongation factor P (EF-P) KOW-like domain
  Subcellular localization annotation: CTP_CleavageSite=59; ConfidenceScore=5.23e-01
MAALRHLAAGPTCHHHHHHGVAAATASLRLHRLPLPFRPLRSRSGSFTRVYAISSNDIRVGTNVEVDGAPWKVLGDKTAFLSLPSFIRRLFIHPRLLKDMQHCTSISFMDTTHLVFIEKQKLRRCAKCTSLLCKICRLTSLHPTTEFLHVKPGKGAAFVRTKLRNYVTGNTVEKTFRAGSTLQEPSLSKETKQFTYKDGSQFVFMDL

SEQ ID NO: 69656 - protein, 110 aa, Zea mays
  Coding DNA Sequence Number=SeqID_27877
  Subcellular localization annotation: CTP_CleavageSite=57; ConfidenceScore=5.14e-01
MAQRLSGQPGTFLASLGRAWTHVLARDPNRHGPSQQRAGPGTTLFVPCLTGLGPGPCRAARMDIYTPGNEVGQLSHGQREGDGSDLHTSVSACQEWRCRQYWLSGNGADC

SEQ ID NO: 69657 - protein, 1191 aa, Zea mays
  Coding DNA Sequence Number=SeqID_27878
  Gene Ontology: Mol. function=binding; Cellular component =intracellular; Biological process=metabolic process
  Homolog annotation: Hit_ID=Q8SB86; Match level="QueryCoverage=63%, HitCoverage=95%, E-value=0.0, Identity=41%"; Hit description =Putative pentatricopeptide repeat domain containing protein
  Pfam annotation: Domain name=PPR; Domain location=117-151; Score =38.8; E_value=1.9e-08; Accession=PF01535.11; Description=PPR repeat
  Pfam annotation: Domain name=PPR; Domain location=218-252; Score =23.6; E_value=0.00072; Accession=PF01535.11; Description=PPR repeat
  Pfam annotation: Domain name=PPR; Domain location=319-353; Score =30.3; E_value=6.7e-06; Accession=PF01535.11; Description=PPR repeat
  Pfam annotation: Domain name=PPR; Domain location=420-454; Score =31.7; E_value=2.7e-06; Accession=PF01535.11; Description=PPR repeat
  Pfam annotation: Domain name=PPR; Domain location=455-489; Score=8.0; E_value=0.85; Accession=PF01535.11; Description=PPR repeat
  Pfam annotation: Domain name=PPR; Domain location=521-555; Score =44.5; E_value=3.7e-10; Accession=PF01535.11; Description=PPR repeat
  Pfam annotation: Domain name=PPR; Domain location=55-89; Score=2.3; E_ value=4; Accession=PF01535.11; Description=PPR repeat
  Pfam annotation: Domain name=PPR; Domain location=622-656; Score =49.7; E_value=9.7e-12; Accession=PF01535.11; Description=PPR repeat
  Pfam annotation: Domain name=PPR; Domain location=657-691; Score=6.0; E_value=1.4; Accession=PF01535.11; Description=PPR repeat
  Pfam annotation: Domain name=WRKY; Domain location=990-1054; Score =80.6; E_value=4.8e-21; Accession=PF03106.6; Description=WRKY DNA -binding domain
  Pfam module annotation: Pfam domain module=PPR::PPR::PPR::PPR::PPR::PP R::PPR::PPR::PPR::WRKY; Domain location=117-151::218-252::319 -353::420-454::455-489::521-555::55-89::622-656::657-691::990-105
  Subcellular localization annotation: CTP_CleavageSite=27; ConfidenceScore=5.53e-01
MPLPPHACSAGAGFVATATFSHLYQLCASAGRSALTTGQAAHARMLVSGFMPTTFVSNCLLQMYARCGGTAHAHGVFDTMPHRDTVSWNTMLTAYVHAGDTDTAASLFGTMPDPDVVSWNTLISGYCQHGMFRNSVGLSMEMSRRGVALDRTTLAVLLKSCGGLDDLALGVQIHALAVKTGLETDVRAGSALVDMYGKCRSLDDALRFFHGMGERNSVSWGAAIAGCVQNEQYTRGMELFVQMQRLGLGVSQPAYASAFRSCAAMPCLSTARQLHAHAIKNVFSSDRVVGTAIVDVYAKAGNLVDARRAFIGLPHHNVETCNAMMVGLVRTGLGAEAMQLFQFMTRSGVGFDVISLSGVFSACAEVKGYFQGLQVHCLAVKSGFDVDVCVRNAILDLYGKCKALVEAYLVFQEMEQRDSVSWNAIIAALEQNECYEDTIAHLNEMLRSGMEPDDFTYGSVLKACAGLQSLEYGLVVHGKAIKSGLGLDAFVSSTVVDMYCKCGAITEAQKLHDRIGGQELVSWNSIISGFSLTKQSEEAQRFFSEMLDMGVKPDHFTYATVLDTCANLATIELGKQIHGQIIKQEMLGDEYISSTLVDMYAKCGNMPDSLLMFEKARKLDFVSWNAMICGYALHGQGLEALEMFERMQRANVVPNHATFVAVLRACSHVGLLDDGCQYFHLMTSRYKLVPQLEHFACMVDILGRSKGPQEALEFIRSMPIEADAVVWKTLLSICKIRQDVEVAETAASNVLRLDPDDASVYILLSNVYAGSGKWVDVSRTRRLMRQGRLRKEPGCSWIEVQSEMHGFLVGDKVHPRSKEVYEMLNSLIGEMKLSGYEPASALFAEVEEEENIQCTGDCTMKKMDSRRGSGSWAGLALAMALVLGREEELLAQLRALLTFLPPPASPPAPAAPVKVESIMGTSGGGRRLGSKRDRDDDSEAEAEQHGDEPAAAQPHYCPHPPPPCKRTRRRKNKKKRQQSKCLVTTVPDFDGYQWRKYGQKQIEGAMYPRSYYRCIQSAKQGCQAKRTVQRNDDDGATAPPEYTVVYVAEHTCTANDDALEAPPVILETTTSVVVRAPAAHTDPVVVVVPATATTSAAAAASACSTTVTTGTESPAISGDDVACCWSSSGSSSSGYSYADDSCCCCCCDGLLAAVVHGGCGGSWAPGPADSVSVPSFRLQEMEDLTGPIRSP

SEQ ID NO: 69658 - protein, 146 aa, Zea mays
  Coding DNA Sequence Number=SeqID_27879
MPDTLHRDPEEVWVYKIISYCGGPQRALQTRFIRATSPDYEPLVIRQGLRDRTPTRLFLMCTMCQRFNTNQSKEQVRSQKKGAKRKPKAALVWRTGQSGVPSDSVRCTRVNQLKLFTFGFPRRSSAIIHRTVRCSTEQCPVAHRTV

SEQ ID NO: 69659 - protein, 310 aa, Zea mays
  Coding DNA Sequence Number=SeqID_27880
  Gene Ontology: Mol. function=nucleic acid binding; Cellular component= nucleus; Biological process=chromatin modification
  Homolog annotation: Hit_ID=Q2QM91; Match level="QueryCoverage=100%, HitCoverage=30%, E-value=3e-82, Identity=63%"; Hit description=SET domain containing protein, expressed
  Pfam annotation: Domain name=SET; Domain location=219-310; Score =41.4; E_value=3.2e-09; Accession=PF00856.18; Description=SET domain
MDEQLSKPLCQLVDRKIYVKNIQEPNKSLTSKRVSFVDKPSEKGAKTVANDAYDLNIQQDLTLLSSEVPKRARSSHPTKKHMVANRTPTVNDNVANNSMLTKHVKKKKGRNISSETSQKVKPVISCPESDGCARASINGWEWRNWARNATPSERARVRGYHVRTILSASNDNVWKNSQAKVSSARTNRVKLRNLLAAAEGSELLKITQMKEVLVILIYAFLDVQARKKRLRFQRSKIHDWGLVALESIEAEDFVIEYVGQLIHRRVSDIRESQYEKSGIGSSYLFRLDDDFVVDATKRGGLARFINHSCE

SEQ ID NO: 69660 - protein, 36 aa, Zea mays
  Coding DNA Sequence Number=SeqID_27881
MGFRENQLDSFRARKEHGSQCYDKKLDSENGGDLDR

SEQ ID NO: 69661 - protein, 320 aa, Zea mays
  Coding DNA Sequence Number=SeqID_27882
  Homolog annotation: Hit_ID=Q5GAV3; Match level="QueryCoverage=25%, HitCoverage=6%, E-value=1e-11, Identity=48%"; Hit description =Putative integral membrane protein
  Pfam annotation: Domain name=Rtt106; Domain location=59-202; Score= -17.3; E_value=0.069; Accession=PF08512.2; Description=Histone chaperone Rttp106-like
MASTNAIDFQLTQARALLSEFDNRLREIDSKWETRVGVLETKVADSARNLETISKEIRDGVVAQLAAAEAGVDFRIRLLETGTIIRVAALESTAHAFELWRPHVDLSIDSLFSSIDAVCTEVEKLGIHRFPGPRPSDGAAAPGTATQPEPSSHRPRSSPPPEVHDGDDDDEEIDDDDDDDDDDDDDDDDDDDDDDDEDYEGFTDEELDKFESAFGWGSTFLSDPQVLCMDSSDPQNPPRIGRQNYEPLTAQEFFSLRHNWQQLLDGKKTYLRPPKNNRVAKHSYANCTFVTPEPLEKALQCQGVFGSKVFQNHSFGILRF

SEQ ID NO: 69662 - protein, 88 aa, Zea mays
  Coding DNA Sequence Number=SeqID_27883
MSSLFDLNMQPPGEDLVFEFNEEAVDLQYEVGLFDLNMEPPAEESFGLDLNQEPLEAEDDDVVMDLTWDEPDTFDVMKRKDYSEKVKN

SEQ ID NO: 69663 - protein, 123 aa, Zea mays
  Coding DNA Sequence Number=SeqID_27884
  Gene Ontology: Mol. function=sugar porter activity; Cellular component=integral to membrane; Biological process=transport
  Homolog annotation: Hit_ID=Q53WP9; Match level="QueryCoverage=95%, HitCoverage=22%, E-value=4e-53, Identity=81%"; Hit description =Putative anion/sugar transporter
MGGFHIGNVISFLATPIIMSHIGLSGTFTFFASLGYLWLSIWMVNVESDPIDSRTISKSELQLILDGRIGSKVQGSKFPSVRELFSKTQFLAVTLANVVNNWGYFVLLSWMPVYFKTLYGEDR

SEQ ID NO: 69664 - protein, 54 aa, Zea mays
  Coding DNA Sequence Number=SeqID_27885
  Gene Ontology: Mol. function=protein serine/threonine kinase activity; Biological process=protein amino acid phosphorylation
  Homolog annotation: Hit_ID=Q69W20; Match level="QueryCoverage=89%, HitCoverage=8%, E-value=1e-14, Identity=75%"; Hit description =Receptor-like protein kinase-like
MAPEYVSDGLLSIKSDVFSFGVLLLEIISGKRSSGFQHNGEFYNLLEYIPTNIC

SEQ ID NO: 69665 - protein, 374 aa, Zea mays
  Coding DNA Sequence Number=SeqID_27886
MAMASRDGGGAAGRAALRVGRTREYRTGMETELLSIDAGSSGGPAVSLFVLCGDGFEAARLFRSGTLSLHMARVEGLVPMSMATVAVGDHRWMLARDALVARVDERTFVFELPGFFYAVAMPPDAERECASMAEILSRFCSYHDLAADAAADGGGELAGELDTNPWAGAHARISRLKRQHTSPAAADAPSDPARQMERAVRTSAVVKLLTRSLLSGVLQPGRHLTVTTGTASAIAGTSSWPSTAALPSRSVVADLLDAIETNRAVPRCGGSGGDGGLGLGWWNLNVEGVMLLLRVVQAVRGRNNLAAPAPGGKRPRDEGPAGRDTMRGGVVGGSSAARRWCGAGGRPGKIGNAPLAPVAVGSRPSSNRCLIDDR

SEQ ID NO: 69666 - protein, 115 aa, Zea mays
  Coding DNA Sequence Number=SeqID_27887
  Subcellular localization annotation: CTP_CleavageSite=37; ConfidenceScore=5.21e-01
AATRTNHQQAAAAGDSRQQLVPITSRQQQQAARQQQQAAAAGSRQEQAVPQWRSAGLGVQQAVLATPRLHYSDSPAARKPVARSPTPTAMASGTGKQPQGSQNWSLEKLKRRFGC

SEQ ID NO: 69667 - protein, 299 aa, Zea mays
  Coding DNA Sequence Number=SeqID_27888
  Gene Ontology: Mol. function=catalytic activity; Biological process =trehalose biosynthetic process
  Homolog annotation: Hit_ID=Q6ZAL2; Match level="QueryCoverage=98%, HitCoverage=75%, E-value=1e-127, Identity=78%"; Hit description =Putative trehalose-phosphatase
  Pfam annotation: Domain name=Trehalose_PPase; Domain location=26-276; Score=289.2; E_value=7.6e-84; Accession=PF02358.7; Description =Trehalose-phosphatase
MARHPSALGRFERIVAAAEGKRIVMFLDYDGTLSPIVDDPDAAFMSETAFVGLAGEKQMRMAVRSVAKHFPTAIVSGRCRDKVFEFVKLAELYYAGSHGMDIKGPAAAKASCSSRHAAKAKGVVFQPASEFLPMIEEVHERLVQTTRCIPGAKVENNRFCVSVHFRRVDEKMWGELSESVRGVLRGYPKLRLTHGRMVLEVRPSIKWDKGKALEFLLESLGFADCSSVLPVYIGDDRTDEDAFKVLRRRGQDQGVGILVSKHPKETSASYSLQGPAEVMEFLLRLVEWKRLSRARLRLQ

SEQ ID NO: 69668 - protein, 183 aa, Zea mays
  Coding DNA Sequence Number=SeqID_27889
MGRAERSSPSSGAEPESEPLVGRGGVRRLPGPSPSPSPRSGEAELPMAPEAGLGRCQPHSVEWHSSRSGEGGAVLLSGWIRCQATFALNAPAIRSVVVVIWPRLLLGEDWASGEPKLCADEGYQLRLGVLRVPLIMVPDSSPRASKGCVNTRLEAFVALFCKGTGLSWLRFVPVGARERTRRV

SEQ ID NO: 69669 - protein, 87 aa, Zea mays
  Coding DNA Sequence Number=SeqID_27890
MGWASAPVLRGGRTRAFDGGGTCASATHEKVGASGGGTHHVGGEGRIECRNRMTEDEEVGGWEPTMNGDHRQGKPLETDGGDICCQP

SEQ ID NO: 69670 - protein, 61 aa, Zea mays
  Coding DNA Sequence Number=SeqID_27891
MGILDLPIDYKFSDPRCNRRHRGRRVQDCFQEGVIHGDRAVIPAGEGLTEQALRRMGEWLS

SEQ ID NO: 69671 - protein, 41 aa, Zea mays
  Coding DNA Sequence Number=SeqID_27892
MPFQPVPGGQGFTEIQMSKLKKSEAFTREREREIEQVWNPD

SEQ ID NO: 69672 - protein, 605 aa, Zea mays
  Coding DNA Sequence Number=SeqID_27893
  Gene Ontology: Mol. function=peptide-N4-(N-acetyl-beta-glucosaminyl)as paragine amidase activity
  Homolog annotation: Hit_ID=P81898; Match level="QueryCoverage=87%, HitCoverage=93%, E-value=1e-120, Identity=42%"; Hit description =Peptide-N4-(N-acetyl-beta-glucosaminyl)asparagine amidase A (EC 3.5.1.52) (PNGase A) ...
  Homolog annotation: Hit description=(Glycopeptide N-glycosidase) (N -glycanase) [Contains: Peptide-N4-(N-acetyl-beta-glucosaminyl)asparagi ne amidase A light chain (PNGase A small chain) (PNGase A subunit B);
  Homolog annotation: Hit description=(N-acetyl-beta-glucosaminyl)aspara gine amidase A heavy chain (PNGase A large chain) (PNGase A subunit A)]
  Subcellular localization annotation: CTP_CleavageSite=75; ConfidenceScore=5.06e-01
MASSYVRLLVLVMASLVPASVASLPHKLRLSASDVAALGPLAPRPPAPDQPTVFFEVDRPHRPPPGSFGPCSTLLLSHSFAYTYAKPPATVAYSPPPCLAAAGGRAAVISLAVLEWRATCRGVQYDRVFGVWLGGAELLRGCTAEPPIQSGAGVEWTVSKDVTKYASLLAARDPTTLAVYLGNIVDQQYIGVFHANVTLHLYFRHPPPPPPQPGLGPADVVAPISRSLPLNDGLWFEIKDDFDIASASITVPANTYRAVLEVYLSYHSEDEFWYGNAAGNGPFREVAVQIDGDLVGVVWPFPVVYTGGINPLLWRPITGIGSFNLPSYDIELTAFLGKLLDGEKHEVAFTVTNAMDTWFVDANLHLWLDPRGAATAAGIVSYDAPPLDTATATLPDGPNNGLYYTTAFRHVSASGWVHTPSYGKVTATWTQRLGYENTINFRDSFFQPEVNQTTDAYSAAHVADHAGVLYAQEAQQSFTLYKFVGVVNQTDVDSYTAATKVQLGFSDDRVAAGRSGFWARSLSNSQECARDVDVEDGEAVRESWAARQTYRYEASDACFFRNVTSRGNNVVSDHSDETCVKESPAAAGGIAERAAAAVAPRLRKE

SEQ ID NO: 69673 - protein, 101 aa, Zea mays
  Coding DNA Sequence Number=SeqID_27894
MEHYTTFFEHPTTPRLYDHAVVLLDRDSSVFLSCAIGSSASPDPRARNRPRPREDDELRLARPQGTDSASALKTTNSASPDPRARNRASAPEDDELRLARP

SEQ ID NO: 69674 - protein, 368 aa, Zea mays
  Coding DNA Sequence Number=SeqID_27895
  Gene Ontology: Mol. function=transferase activity, transferring nitrogenous groups; Cellular component=cytosol; Biological process =biosynthetic process
  Homolog annotation: Hit_ID=Q7XDA3; Match level="QueryCoverage=93%, HitCoverage=91%, E-value=1e-137, Identity=69%"; Hit description =Aminotransferase, classes I and II family protein, expressed
  Pfam annotation: Domain name=Aminotran_1_2; Domain location=27-352; Score=62.2; E_value=1.7e-15; Accession=PF00155.11; Description =Aminotransferase class I and II
MERRLSATSRRSAPSAIQRLSHLAQRVGAVNLAEGFPDFPAPPHVKAAAVAAIAADLNQYRTSWRHVGILPDGYAFCFHFHAVIDQGDEVLIFDPAYETYETSIELARGVPVYVPLDPPSWTLNEEKFLKSFTSRTKALVLNSPHNPTGKVFSKEELLIISQACQKMDCFVITDEVYEYITYDANKHISLASLPGMQERTIITSSLSKTYSVTAASIASAIRNIHIKLTDSAPAPFQEAALIALTSTADYYISLRKDYEVKRDFILLLLKDLGFKISVKPQGSVFVFAELPRSCQLSDVEFVTKLINDAGVVAVPGRGFFHKTCDGESYCHRYVRFAFCKGDDTLKAAAMKMRKLASRQGEPWLTGRQ

SEQ ID NO: 69675 - protein, 231 aa, Zea mays
  Coding DNA Sequence Number=SeqID_27896
  Gene Ontology: Mol. function=protein transporter activity; Cellular component=membrane; Biological process=intracellular protein transport
  Homolog annotation: Hit_ID=Q9SUJ1; Match level="QueryCoverage=100%, HitCoverage=66%, E-value=4e-66, Identity=59%"; Hit description =Syntaxin-43
  Pfam annotation: Domain name=Syntaxin; Domain location=91-187; Score =65.5; E_value=1.7e-16; Accession=PF00804.15; Description=Syntaxin
MATRNRTPLYRKYRDALRHVRAPAGATSSSCGGGGGSVIEMASLLRSDRPYAPLSIEDPSASRFTKMMDLKVTFTISVDLLKGRGAVSVGLPPAWVDVSEEISANMQRARTKMTELAKAHAKALMPSFGDGRDDQRAIEVLTHEITDLLKRSEKRLQKLSMKDLSEDSNVRKNVQRSLATDLQNLSMEFRKKQSSYLKQLRQQKEGQDGVDLEMNMNGTKSTFEDDEFDDV

SEQ ID NO: 69676 - protein, 304 aa, Zea mays
  Coding DNA Sequence Number=SeqID_27897
MGSISRKPRVLFIKLQTEGGRQRCWAEAGSSVGLGRGANEVGGSGEGSARTPDRRGPLASGSSEAEGERLSARALAPDWWVPLVRAAIFLGYALGASAMAEADDSARAKEHRALAVDRGVSVRWRGAITGDHRRPIGGTEKSGERDGEVRRRNSPQVRRNRRQNFTWRWLNSVRDDGQALLGAESGAGSLTTGELRPSHDLLMLVVVLLILLGCWKLAADELLSSGNESLSDLVPHSGNIHDLLLALGLSDCSGWLLRQEGEVSGYSVADIGFLPVGCAGSTVVVAKGTASGTVVDAGASALEG

SEQ ID NO: 69677 - protein, 94 aa, Zea mays
  Coding DNA Sequence Number=SeqID_27898
RASVPQLDNELTVCVTTSPPGTGRHSNDIEFTNSHIRRHPQAVHQMIEGTVRYLKNQGHCKGVFDSIGATVDEGSMSEGASNPVGGQLKTFVAE

SEQ ID NO: 69678 - protein, 100 aa, Zea mays
  Coding DNA Sequence Number=SeqID_27899
MKNQIMSDKAVTDVFLSEAYPGVADRPPEGSGRSTHRCPNCRATTVTTPPLKPVCPTLCSGVLYSFIVDDKTKDMPQQGRREPSKARTIRSVVFESKHIY

SEQ ID NO: 69679 - protein, 74 aa, Zea mays
  Coding DNA Sequence Number=SeqID_27900
IRLLPSITKKGEIESSLVGFGGLDDNPIKGLTETTNQAKGGGKKSFEVPSAWEKVKETEEPKARGEEEDLQSQG

SEQ ID NO: 69680 - protein, 117 aa, Zea mays
  Coding DNA Sequence Number=SeqID_27901
  Homolog annotation: Hit_ID=Q10QS2; Match level="QueryCoverage=54%, HitCoverage=5%, E-value=1e-13, Identity=65%"; Hit description =Expressed protein
MTMPKCRRTISSRYLLWNRDYIWVYANRRLKDKLALDKNIVRDNHSKGRSMLVAALMGIINSNCDNADYSSFQPLLPADADIRDSGQCPLSPKAISADAMDTQQLVKKITQRKKKYT

SEQ ID NO: 69681 - protein, 365 aa, Zea mays
  Coding DNA Sequence Number=SeqID_27902
MARYAFTTESDSSITSLIFSTTQVLKRVWRPAGSPVSAGHTSGYNKECEYQTNSKHLDSNLKAIRQRHYNYLQLLKERPRYMEGRQKLSDTLDNYSHTEYSLRERGSFFVAGSGTPVIHGGVRSGATLGESTVASTVDLERGTGRCGRKGGREKGEQWGKAAARPGGRFVSKRNGGKAAMDGRAWRERGCHEGGAGRDSHGWKLCGRFVADLGDQVGAWADQRFAADLGELSCHGWKRDLGGRVPWHSWGSGARLGERGAVVGLEASRLGERAICGRFAADPSRLPWIGVICGQSRRSISCKERGSGARRQPWMEAQHVEKKARRGERQKARRAGGMLFRQNRAPSASVDVYIRHLSSSRDLTCS

SEQ ID NO: 69682 - protein, 160 aa, Zea mays
  Coding DNA Sequence Number=SeqID_27903
MPPTDPLSIGGSKGSGRVPSAGGDGFFDRSLHENFDPHCHKLTFPNYDGESDTLPRLTKYEIYFHGLMLQKQVNLFTTSLSEPFWTNVKLQCPSNLHTTMSLAWACKHQSETTPTSKNTVSCSTGHGTNTKAKSEIAGPARSRFKWSTIEELATKHDEEC

SEQ ID NO: 69683 - protein, 386 aa, Zea mays
  Coding DNA Sequence Number=SeqID_27904
  Gene Ontology: Mol. function=protein binding; Cellular component =cytoplasm
  Homolog annotation: Hit_ID=Q6H4J0; Match level="QueryCoverage=42%, HitCoverage=77%, E-value=1e-29, Identity=57%"; Hit description=CD2 -binding protein-like
METTEPSRGTKRPLTATAGDDDDAGLERKPRFPKGKKAKYRDVGAEGGPSGNAVDLDSMLNPELAAERRARQRHVQLKEGDDAKGGAAEVKGFEVRYNDSVNFVDDGIRIEPFNLEREREEGYFDENGNFVEYARGNEIKDAWLDSVEVDPTYAAKVQNKGKEKVDEFEDLSSDDIGRLKRQIANLLEPGETIMQALKRLKGTSTDKRGKMAEGTKRIFDELTEAAMKLMENGDYNVYSDDRETFEREAAGYERLARARLGLPEVDGVSEDQKYNQTPSSALEIDQPSSVLEMELGPSTANVYTATAAINDDDSNLDMFGDDDNDDTKHSSDANTVGSGLKPGTSDVKITTIAAAQAITMTLTLDIMVLHLREPGKIVPNSSLIYV

SEQ ID NO: 69684 - protein, 101 aa, Zea mays
  Coding DNA Sequence Number=SeqID_27905
MSGDRWRRIVVAPLAHRTVRCTPDSPVNYSGANSRDWRVPEPLFLGAPDTVRCTPDSPVNYSVAPLDFPEGEEFSMKSPGALDTVRWHTGQSGAPDQGTLR

SEQ ID NO: 69685 - protein, 93 aa, Zea mays
  Coding DNA Sequence Number=SeqID_27906
LKCLRVWYHQNLRSILTLTAEKKGSLLVTGRGDSEFVLDAKVPGWLWRGQLKAGGTNLFLYMNHDTCETASNLLHGDLRAIVPALLQTRDMTI

SEQ ID NO: 69686 - protein, 46 aa, Zea mays
  Coding DNA Sequence Number=SeqID_27907
MARRGLGGAAVVMLGSGENGSLPADLVVRSGLVSHITLRRGQSGNA

SEQ ID NO: 69687 - protein, 102 aa, Zea mays
  Coding DNA Sequence Number=SeqID_27908
MPRLKLGEASQGLGEAICRWENPPTGWWNAPALILRCSAQAWRSFIGSWGSYLSVGKSSGQVAKCTRPNPKMRRGPKRLPVWSISDEHKETRGIIVVQAAGA

SEQ ID NO: 69688 - protein, 114 aa, Zea mays
  Coding DNA Sequence Number=SeqID_27909
MEDARTWKGELRARRLSLSAAYGKNRGVQEPQPWMEGGVTSFEGAAAGKNLARAAMDGRGRRHECGYNGGREDMGRGVEGAAAVLVCGREARGGESLVGACVRGWQNRACGRLH

SEQ ID NO: 69689 - protein, 182 aa, Zea mays
  Coding DNA Sequence Number=SeqID_27910
  Homolog annotation: Hit_ID=Q6KAK1; Match level="QueryCoverage=37%, HitCoverage=4%, E-value=3e-27, Identity=86%"; Hit description =Protein kinase-like
MGNKIARTTQASATEYYLHDLSSTYNLVLLDVVSRGRFLKSVRCKHDEGLLLVKVYFKCAGESIDLKRYALVLSVAAAILPISVPMGTVLSCVAAAGKVLVPGGGSDDFCGFLVPGGGSDHTLNLCQNKNDQEVQGCEFSTSYVSPKRWDYAWYAVCSNGLDCLSDISHFSAPIEYKDYAIF

SEQ ID NO: 69690 - protein, 154 aa, Zea mays
  Coding DNA Sequence Number=SeqID_27911
  Subcellular localization annotation: CTP_CleavageSite=67; ConfidenceScore=5.63e-01
MATTLSLSSPLFLGAPARARDVVPYGVTSASVSLMTLNMPGKGYTSRVRCREQQRRTTIVSMVGIASAFAYADNLLAAAPVGLLGLLLLFQTTRVRFVFDNEALEVKVGEQLQESGENVFVGGKNRWNAMAQDGRQLYDVMVERAGPSKTSGPK

SEQ ID NO: 69691 - protein, 72 aa, Zea mays
  Coding DNA Sequence Number=SeqID_27912
MLLVHVLFSKFRWYFELWKMPRWTENAASTKSAELVKQQDRLEFDDPDEIDDEEEVEHEEEEVEEDVEYEEP

SEQ ID NO: 69692 - protein, 53 aa, Zea mays
  Coding DNA Sequence Number=SeqID_27913
MAVRWGILASALPINKPPQVPSRDNEQPVVPECVAEDLPEQQPGEGKCPLTYN

SEQ ID NO: 69693 - protein, 88 aa, Zea mays
  Coding DNA Sequence Number=SeqID_27914
MAQSLEWMVAFLVADYVRGESVRRDEGRDSCGLLDDRFSEGVVDGGWARSVFSLGVMTGRFLVADGWAEKDALRVSVCVRASALRMVH

SEQ ID NO: 69694 - protein, 112 aa, Zea mays
  Coding DNA Sequence Number=SeqID_27915
MGGGQASVEQCSGLRRPVGGSSALSARWEQHFQKLVLGGAMGGGQASVEQCSGLRRPVGGSSALSAWVLINLELFWMLTNLVQKHRSTALLFPVQLGPRLVCFALKYQQFGE

SEQ ID NO: 69695 - protein, 77 aa, Zea mays
  Coding DNA Sequence Number=SeqID_27916
MPVFFVGRRYARAAAYTVLIITRTLPVKLPLHANATQTADIRAHGDCTVVTSPTFPPPHCFQVHGNKLVSTRIIHIL

SEQ ID NO: 69696 - protein, 107 aa, Zea mays
  Coding DNA Sequence Number=SeqID_27917
  Subcellular localization annotation: CTP_CleavageSite=51; ConfidenceScore=5.38e-01
MPPPDPRSPRQPPIPLKKPGDGAVIEVKEIRRSPTPRSVSSAIGLSSNPNRCSNAPSTRFSCRRESECEISMFEISVLEGSPAIHASERHHSRHRARALHARAFPSP

SEQ ID NO: 69697 - protein, 150 aa, Zea mays
  Coding DNA Sequence Number=SeqID_27918
MAQRIVFFAADLDLASREGSCREEEIIGPDHHCRAAGRERRRTGQVFPFADLGELSGRGALRVRGESVRGLGGANQGSVREELLIGVSPATENRTTAWAVKPSPRFKALVCGFGAPQSWRRRAVRVLRRALDAVAPRDISGEGDERLPSI

SEQ ID NO: 69698 - protein, 81 aa, Zea mays
  Coding DNA Sequence Number=SeqID_27919
  Subcellular localization annotation: CTP_CleavageSite=23; ConfidenceScore=5.46e-01
MATSGAQKQQSPARRRMTRRRVQAGRRTDAAWKVPTRPAGAVVPKSTPRHGLARAVPCRALRAGACVTGKGCRGLPRRRCA

SEQ ID NO: 69699 - protein, 143 aa, Zea mays
  Coding DNA Sequence Number=SeqID_27920
  Gene Ontology: Mol. function=small conjugating protein ligase activity; Cellular component=UBC13-MMS2 complex; Biological process =protein modification process
  Homolog annotation: Hit_ID=Q95XX0; Match level="QueryCoverage=96%, HitCoverage=68%, E-value=6e-40, Identity=64%"; Hit description =Ubiquitin conjugating enzyme protein 13
  Pfam annotation: Domain name=UQ_con; Domain location=9-143; Score =80.8; E_value=4.3e-21; Accession=PF00179.16; Description=Ubiquitin -conjugating enzyme
MANSNLPRRIIKETQRLLSEPAPGISASPSEENMRYFNVMILGPAQSPYEGGVFKLELFLPEEYPMAAPKSPVPGTLPICYRLPVSSCLPYLQVRFLTKIYHPNIDKKVMPHISHNLLQLGRICLDILKDKWSPALQIRTVLL

SEQ ID NO: 69700 - protein, 128 aa, Zea mays
  Coding DNA Sequence Number=SeqID_27921
MALVTVYLPPSNRTIRPDHHCRAAGRERRRTGQVFPFADLGELSGRGALRVRDESVRGLGGANQGSVREELLIGVSPATENRTTAWAVKPSPRFKSWRRRAVRVLRRALDAVSPRDISGEGDERLPSI

SEQ ID NO: 69701 - protein, 118 aa, Zea mays
  Coding DNA Sequence Number=SeqID_27922
MRESGGGVENAVARRRCARVGEGRRTRRSCCGDGSDDARGAAEALTVLRQTLRVGHGNGATGHGNRNGNATGDATGGTWEWRHGTWESEWQRYGWDMGMAPRDMGIGMAEPGMGQPTP

SEQ ID NO: 69702 - protein, 473 aa, Zea mays
  Coding DNA Sequence Number=SeqID_27923
  Gene Ontology: Mol. function=protein-tyrosine kinase activity; Cellular component=integral to membrane; Biological process=protein amino acid phosphorylation
  Homolog annotation: Hit_ID=Q5QNM3; Match level="QueryCoverage=74%, HitCoverage=50%, E-value=1e-94, Identity=51%"; Hit description =Leucine-rich receptor-like protein kinase-like
  Pfam annotation: Domain name=Pkinase; Domain location=187-441; Score=- 44.6; E_value=6.7e-06; Accession=PF00069.15; Description=Protein kinase domain
  Pfam annotation: Domain name=Pkinase_Tyr; Domain location=187-441; Score=-47.0; E_value=1.4e-09; Accession=PF07714.7; Description =Protein tyrosine kinase
  Pfam module annotation: Pfam domain module=Pkinase::Pkinase_Tyr; Domain location=187-441::187-441
MDASSSLSLLALVTMLSLLHSATTDAAAGLPAARTSHRRLLLLHQQDTNLAALPPPARVHVVPVDVHVPSHGTGSFPAASPGPHGGKNGPSEAAPATPATAAAYLSRSMRWLYMVAVPAVALLALAGLACWLLCRKSAVATIGPWKTGLSGQLQKAFVTGVPKLQRSELERACEDFSNIVVSYPHYTVYKGTLSTGVEIAVVSTMITSSKEWTEHSESCFRRKVDALSRINHKNFVNLLGFCEEEEPFTRMMVLEYAPNGTLHESLHAEDFERIAWRGRMRIVMGLAYCVQHMHELSPPVAHPDMQSSSVLLSEDGAAKIADMSVWHEVISQGKTTTNGDEQASSAGLLAGNVYSFGALLLEIISGKLPTPYPAHERSLQMTSALVERVTNDDRSVASLLDPTLGGDHREDELAVIGEVIRACMQSDPRRRPSMREVAARLREAVGISPVAATPRLSPLWWAELEVLSAAEAS

SEQ ID NO: 69703 - protein, 478 aa, Zea mays
  Coding DNA Sequence Number=SeqID_27924
  Gene Ontology: Mol. function=kinase activity
  Homolog annotation: Hit_ID=Q5DK69; Match level="QueryCoverage=89%, HitCoverage=89%, E-value=1e-135, Identity=59%"; Hit description =Pollen-specific kinase partner protein
  Pfam annotation: Domain name=DUF315; Domain location=1-403; Score =594.8; E_value=8e-176; Accession=PF03759.4; Description=Domain of unknown function (DUF315)
MDAQAQPFTRRALSRSCGSKGSRLSVDHPPPPLAGGPFGGQGGGRELVLARDAEKVREKFSKLLLGEDMSGTGKGVTSALALSNAITNLAASVFGEQRRLQPMADDQKSRWKKEVDWLLSVADHIVEFVPSQQVAENGTSVEIMITQQRQDLQMNIPALRKLDAMLLEYLDSFAGKQEFWYASKDADGPGKGSTPRQDDKWWLPTVRVPPDGLSGAYSKWLQNQKDLVAQVLKAAMAINANVLMEMEVPESYTESLPKNGKSTLGDSVYRLITDDHFDPEELLRSVDSSDEHSIVDLKNRIEASAVIWQKKMTHNKDSKLPWGHSHEKRGMFEGRAENVLLLIKHRFPGIAQSALDISKIQCNKDVGLAILESYSRTLESLAFTVMSRIEDVLSADLAARDLRNTESMRIAASLASDDTDKVVSDAKAEVEKTGRMEPVSPALSDLVGPKLTKISPVATKRFSYLENLGGTRSPIARH

SEQ ID NO: 69704 - protein, 72 aa, Zea mays
  Coding DNA Sequence Number=SeqID_27925
MPLNNTNKSSSGPSSIDPMSCKKGPKWWFLEDHQFIILYGHFAFLPVYQRWPLLMVHFDRSASPGPLVQPNN

SEQ ID NO: 69705 - protein, 343 aa, Zea mays
  Coding DNA Sequence Number=SeqID_27926
  Subcellular localization annotation: CTP_CleavageSite=38; ConfidenceScore=5.03e-01
MAKAPLLPLSLLVHVVLAASFPAPCTAQGRTENISAVEAAVRARASELLRDTTTNDTTQPVDLLPLPGNLSGAGVRAWALRVSSNALWADGVNAAGFVVPPRVVPAPFARCLTIVFERFTGGSAAAFAAPRLYALAAPVAGFFAYDAAAGPRRPGSRSGRSARRGAAARDAAASLSRVVGVDGGCRRRWGAGSQRLGALGGRRDQLEQEAAMGGDGAAGNGPEEELGRMTGAREQDAIGEGGKDAPRVGGAQHAAVARSGRPVPLRVPPAAGAEDSNVSLVVLPHMGWPNQLTFLQFSAKNRLRRKRSVQLNLHDPDYRCSRNRYLFFWVNFIGLLLYKMHFS

SEQ ID NO: 69706 - protein, 182 aa, Zea mays
  Coding DNA Sequence Number=SeqID_27927
  Gene Ontology: Mol. function=ATPase activity, coupled to transmembrane movement of substances; Cellular component=integral to membrane; Biological process=transport
  Homolog annotation: Hit_ID=Q6J0P5; Match level="QueryCoverage=80%, HitCoverage=8%, E-value=8e-56, Identity=78%"; Hit description =Multidrug-resistance associated protein 3
  Pfam annotation: Domain name=ABC_tran; Domain location=9-122; Score =2.2; E_value=1.1e-07; Accession=PF00005.17; Description=ABC transporter
MTTPGPDLGEEAAAAREPPWEGGMSLLGRWLDVGRRGLEEGVVEDGSNWSMGQRQLFCLGRALLRRCRILVLDEATASIDNATDAILQKTIRTEFRDCTVITVAHRIPTVMDCDMVLAMSDVLLDCGSLPPDSIAACQHLHANGFSLFPGKVVEYDKPTKLVETEGSLFRDLVKEYWSYTSN

SEQ ID NO: 69707 - protein, 1386 aa, Zea mays
  Coding DNA Sequence Number=SeqID_27928
  Gene Ontology: Mol. function=ATPase activity, coupled to transmembrane movement of substances; Cellular component=integral to membrane; Biological process=transport
  Homolog annotation: Hit_ID=Q6J0P5; Match level="QueryCoverage=100%, HitCoverage=97%, E-value=0.0, Identity=80%"; Hit description =Multidrug-resistance associated protein 3
  Pfam annotation: Domain name=ABC_membrane; Domain location=312-581; Score=81.7; E_value=2.3e-21; Accession=PF00664.13; Description=ABC transporter transmembrane region
  Pfam annotation: Domain name=ABC_membrane; Domain location=957-1233; Score=72.6; E_value=1.3e-18; Accession=PF00664.13; Description=ABC transporter transmembrane region
  Pfam annotation: Domain name=ABC_tran; Domain location=654-827; Score= 148.3; E_value=2e-41; Accession=PF00005.17; Description=ABC transporter
  Pfam annotation: Domain name=SMC_N; Domain location=643-831; Score= -127.3; E_value=0.027; Accession=PF02463.9; Description=RecFRecNSMC N terminal domain
  Pfam module annotation: Pfam domain module=ABC_membrane::ABC _membrane::ABC_tran::SMC_N; Domain location=312-581::957-1233::654 -827::643-831
MDIFGSPFCSKQAVASCGGWTDILDSSSCTNHILETGTAALITVALALHLLVVRITTKTRASARRPPVAPGLPLQLAGAAFTACLGLVYLGLASWMLGSNFTQHASAYLPHWWVTALSQGLCLVLAGFALSGVGGARLLGPMSARAWSALLAAYAAFVACSSVVHMVADRALTMKGFLDALFLPGALLLVCGAWCVKEEDGDGGTGTAASLYKPLKTDDTVDDERGGSESHVTPFAKAGVFSVMSFWWMNPMMKTGYEKPLEEKDMPLLGPSDRAYSQYLVFLEKLNRKKQLRAHGNPSMFWTIVSCQKTGILVSGLFALLKVLTLSSGPVLLKAFINVSLGKGSFKYEGYVLAVAMFLCKCCESLSQRQWYFRTRRLGLQVRSFLSAAVYKKHQRLSNSAKLKHSSGEIMNYVTVDAYRIGEFPYWFHQTWTTSVQLCIALAILYDAVGLATVAALAVIIATVVCNAPLAKLQHKFQSRLMEAQDVRLKAMSESLVHMKVLKLYAWETHFKKVIEGLREVEIKWLSAFQLRKAYNSFLFWTSPILVSAATFLACYLLKIPLDASNVFTFVATLRLVQDPIRQIPDVIGVVIQAKVAFTRITKFLDAPELSGQVRKKSCLGDEYPIVMNCCSFSWDENPSKPALKNVNLVVKTGQKVAICGEVGSGKSTLLAAVLGEVPKTEGTIQVCGKTAYVSQNAWIQTGTVQDNILFGSSMDRQRYQETLERCSLVKDLEMLPYGDRTQIGERGINLSGGQKQRVQLARALYQNADIYLLDDPFSAVDAHTATSLFNGYVMGALSDKTVLLVTHQVDFLPVFDSILGVILEAFEVGTESYQFDLDVNLAACLRGEKCANAILASMELMSDGQIIRSASYHDLLAYCQEFQNLVNAHKDTIGVSDLNRVPPHRENEILIKETIDVHGSRYKESLKPSPTDQLIKTEEREMGDTGLKPYILYLRQNKGFFYASLGIISHIVFVCGQISQNSWMATNVENPDVSTLKLTSVYIAIGIFSVFFLLFRSLAVVVLGVKTSRSLFSQLLNSLFRAPMSFYDSTPLGRILSRVSSDLSIVDLDIPFGFMFSIGAGINAYSNLGVLAVVTWQVLFVSVPMIVLAIRLQRYYLASSKELMRINGTTKSALANHLGESIAGAITIRAFQEEDRFFEKNLELVDKNAGPYFYNFAATEWLIQRLETMSAAVLSFSALIMALLPQGTFNPGFVGMALSYGLSLNISFVFSIQNQCQLASQIISVERVHQYMDIPSEAAEIIEENRPAPDWPQVGRVDLKDLKIRYRQDAPLVLHGITCSFHGGDKIGIVGRTGSGKTTLIGALFRLVEPTGGKIIIDSIDITTIGLHDLRSRLGIIPQDPTLFQGTIRYNLDPLGQFSDQQIWE

SEQ ID NO: 69708 - protein, 106 aa, Zea mays
  Coding DNA Sequence Number=SeqID_27929
  Homolog annotation: Hit_ID=Q9XIY6; Match level="QueryCoverage=44%, HitCoverage=12%, E-value=4e-21, Identity=95%"; Hit description =Putative lanatoside 15'-O-acetylesterase
MTRRPSEARPAGLPKYVMPNGPCCAGKAAQKPPVSELESPKLKTAGNLQVLLALAAEVESSAVATRSSGHAVLIVPRQPICMRVGQSVTANADARRCKETEEKKMN

SEQ ID NO: 69709 - protein, 49 aa, Zea mays
  Coding DNA Sequence Number=SeqID_27930
MLGLPKRRFVAFGMLVVLTVCLVGCVLNCLQPGAGYALTSDEIAFLARL

SEQ ID NO: 69710 - protein, 337 aa, Zea mays
  Coding DNA Sequence Number=SeqID_27931
  Pfam annotation: Domain name=DUF295; Domain location=243-302; Score =25.7; E_value=0.00017; Accession=PF03478.8; Description=Protein of unknown function (DUF295)
METEHGGHEEESAMLPCVAFASEHGYKFFSLAHMRMLNSVDVRPMPPVLGRRLVPSPYGGMVLATDVCYRHPCHLVDPFTGSRAPLPDLPIPFSEKEPVGCLSDEPRLRCARVTDDGLAWDWSRRGVMVARGDMAFFCEHGGERWMPVHQSKLGSPMTVNYRGGLFFVLELRTLKTTIIDAGTLQARTKIPAPPGFGDVDYAYLAPSTDDAILLVHRAGDSDGVVFTKAYCARHRDSQRPPRWRPVLDIGDRAVFVDGAHGFTVTADPTGAKANRVYVILAHQLTHPCGRLAVAYDVGFTDLTRLERMGRLNLNTGEVEPMWGRPHWIIPRNESGRR

SEQ ID NO: 69711 - protein, 264 aa, Zea mays
  Coding DNA Sequence Number=SeqID_27932
  Gene Ontology: Mol. function=oxidoreductase activity; Cellular component=nucleus; Biological process=rRNA processing
  Homolog annotation: Hit_ID=Q1SAX7; Match level="QueryCoverage=99%, HitCoverage=100%, E-value=3e-77, Identity=60%"; Hit description =Nucleotide binding protein, PINc
  Pfam annotation: Domain name=Fcf1; Domain location=90-253; Score =159.3; E_value=9.8e-45; Accession=PF04900.3; Description=Fcf1
MGKAKSKGPKFAAVKKIITKKTINKYKEDVLNHKKKDVDKEKLGRNVPQVSSALFFSYNTALGPPYRVIVDTNFINFSIQNKLDLEKGMMDCLYAKCTPCITDCVMAELEKLGQKYRVALSITFIYLHNLIYLPHRIAKDPRFQILACTHKGTYADDCIVERVTQVEGQPGAVVRAVSLSHHDVGSKGSKQTCICVVWLNAMFSEIRDFTISVPKHKCYIVATCDRDLKRRIRKVPGVPIMYITRHRYSIERLPEATIGGAPRI

SEQ ID NO: 69712 - protein, 148 aa, Zea mays
  Coding DNA Sequence Number=SeqID_27933
  Gene Ontology: Mol. function=lyase activity
  Homolog annotation: Hit_ID=Q5VMX8; Match level="QueryCoverage=98%, HitCoverage=94%, E-value=1e-53, Identity=73%"; Hit description =Lactoylglutathione lyase-like
  Pfam annotation: Domain name=Glyoxalase; Domain location=5-144; Score= 3.0; E_value=0.071; Accession=PF00903.15; Description=GlyoxalaseBleomy cin resistance proteinDioxygenase superfamily
MAAATLRWVLQLHRDVPRAARFYSEGLDFSVNVCTLRWAELQSGPLKLALMHTNDSKTNPFPGEDLVPDIKSERALQAEVDFRFYSNLASQRVYSSMLSFTVPDINSAVSKLMALGAELDGPIKYEIHGKVAALRCIDGHMLGLYEPA

SEQ ID NO: 69713 - protein, 53 aa, Zea mays
  Coding DNA Sequence Number=SeqID_27934
MGWLRQEYPSVRKFMVRKDSLLGDVFVDITPQPITLNQRSKSDRYHKNKHSSI

SEQ ID NO: 69714 - protein, 67 aa, Zea mays
  Coding DNA Sequence Number=SeqID_27935
MARWVLLCLGRAPGTLGRHGHSPIIPEARRREGPIWCSDFIVVRDRSGAPALPPVRDRSGAPTLGLK

SEQ ID NO: 69715 - protein, 200 aa, Zea mays
  Coding DNA Sequence Number=SeqID_27936
  Gene Ontology: Mol. function=oxidoreductase activity, acting on the CH-OH group of donors, NAD or NADP as acceptor; Biological process =malate metabolic process
  Homolog annotation: Hit_ID=Q5G1U0; Match level="QueryCoverage=43%, HitCoverage=16%, E-value=5e-24, Identity=85%"; Hit description=NADP -dependent malic enzyme
  Pfam annotation: Domain name=malic; Domain location=57-179; Score= -50.2; E_value=0.00035; Accession=PF00390.9; Description=Malic enzyme, N-terminal domain
MLGSHERRLQIRTRHRPDPPRDAREQQLHGSAPAAPPLICDQKSSSHAQGSQIIISVERNDRLFYKLLIDNVEELLPVVYEPTVGEACQKYGSIFRRLQGLYICLKEKCVIPPPLLIVIAYIMLGAWEFLGKACTVYCYWRCTTIRCGYLICDVSGFRRGTLASEKPPPAVVVEKVGNEGGGEGEGLYDAIVIASTTVQH

SEQ ID NO: 69716 - protein, 382 aa, Zea mays
  Coding DNA Sequence Number=SeqID_27937
  Gene Ontology: Mol. function=protein transporter activity; Cellular component=membrane; Biological process=intracellular protein transport
  Homolog annotation: Hit_ID=Q9SUJ1; Match level="QueryCoverage=99%, HitCoverage=99%, E-value=1e-90, Identity=52%"; Hit description =Syntaxin-43
  Pfam annotation: Domain name=SNARE; Domain location=291-353; Score =83.7; E_value=5.8e-22; Accession=PF05739.9; Description=SNARE domain
  Pfam annotation: Domain name=Syntaxin; Domain location=132-228; Score= 64.4; E_value=3.6e-16; Accession=PF00804.15; Description=Syntaxin
  Pfam module annotation: Pfam domain module=SNARE::Syntaxin; Domain location=291-353::132-228
MATRNRTPLYRKYRDALRHVRAPPGAPSSSGGGGGGGGPVIEMASLLRSDRPYAPLSTDDPSASRCHHLQLSTALLTSRLVSRTFGNISEDRANVRLAIACRSTVISGLGSKAVVLCSDLQTQSRGAATVGLPPAWVDVSEEISANMQRARTKMAELAKAHAKALMPSFGDGRDDQRAIEVLTHEVTDLLKRSEKRLQKLSMKDSSEDSNVRKNVQRSLATDLQNLSMEFRKKQSSYLKQLRQQKEGQDGVDLEMNINGAKSTFEDDEFDDVGFTEVQMSKLKKSEAFTREREREIEQVVESVNELAQIMKDLSVLVIDQGTIIDRIDYNIQNAAASVEEGYKQLQKAERTQKKGGMVMCATVLVILIFIMIVLLILKEIIF

SEQ ID NO: 69717 - protein, 206 aa, Zea mays
  Coding DNA Sequence Number=SeqID_27938
  Subcellular localization annotation: CTP_CleavageSite=51; ConfidenceScore=5.04e-01
MPSTPLALAQPRVRVFLCSSPCLAAPLHLSLQAAPRIGLPERPRRSIAFLLAAAAPSSVHARTLHLHPFSGCPMEIPNARAVLRVRCPRCHCVLEEAGAPVYQCGGCGASLQGWTEGVHHRTVPPPATLTPARVFLLPANHTRSRRPRRRVSRPRQAPLPRRAVMPAVGYPALVSAPLALTPVFEEPCFHPQRRQLAGILLILARC

SEQ ID NO: 69718 - protein, 95 aa, Zea mays
  Coding DNA Sequence Number=SeqID_27939
  Gene Ontology: Mol. function=nucleic acid binding; Cellular component= nucleus
  Homolog annotation: Hit_ID=Q5NAW2; Match level="QueryCoverage=69%, HitCoverage=14%, E-value=7e-14, Identity=55%"; Hit description=Zinc finger CCCH domain-containing protein ZFN-like 1
  Pfam annotation: Domain name=zf-CCCH; Domain location=59-85; Score =26.4; E_value=9.8e-05; Accession=PF00642.15; Description=Zinc finger C-x8-C-x5-C-x3-H type (and similar)
MEPPHAVAAVAAGGEGGTASPGTGLEGPVLRRGLDGGGEGEDGELGAGQEADARIPERPSEADCGYYLCTGACGFRDRCRYNHPRDRGGTEVRAS

SEQ ID NO: 69719 - protein, 277 aa, Zea mays
  Coding DNA Sequence Number=SeqID_27940
  Gene Ontology: Mol. function=nucleic acid binding
  Homolog annotation: Hit_ID=Q5QNF9; Match level="QueryCoverage=74%, HitCoverage=31%, E-value=7e-20, Identity=34%"; Hit description =Putative Not4-Np
MGNPISKLQDMICINDDRLLPNGAIKYTSLPSVTTPRDSSLSSGSPPSPASIVLHQRNDHERLHNNQQNLSDLKPQRYIPPGGRNCSSEMTTSVKHMQPIEGAWLHSSSNEHLGSNNDKSQASSQLGNDNSNPKQITSAENGTSDTVQQKPQYADVVSQGQVAPVRRLTVLNRPSIASSDTRPKATGQVVNASVKSHAGVEIMNECSDIKEKIVLGGYKQLPESTVSHRLTASQNMSSGTLPSNLSASYAKTQGSAGSHNLSDLNMKLVAKKSITAG

SEQ ID NO: 69720 - protein, 257 aa, Zea mays
  Coding DNA Sequence Number=SeqID_27941
MAFLGRSHQVMVKLGVLPQARDPLKWFPFDMPSPLVRSHHARPRARCSGFIRGIISLHPNNDKVQQTKIFLYRETKPNNRSHRSSRTDNQTDAQPKSTHATIQDGMFIVTEAGFFFLESWGWCHNGTGNQRQKRTQRYLTTSYWTREREDTFRAALEIPLQGYGICIVPFSLKTQIVYSSISICYWRTEALRTDTKDSLTPFSPPSIILASTRLEGHQVQSNVQSKLCLNRSTDEASQIQEDSLSPFLSMHRCAISG

SEQ ID NO: 69721 - protein, 221 aa, Zea mays
  Coding DNA Sequence Number=SeqID_27942
  Gene Ontology: Mol. function=nucleic acid binding; Cellular component= nucleus; Biological process=regulation of transcription, DNA-dependent
  Homolog annotation: Hit_ID=Q5QNF9; Match level="QueryCoverage=75%, HitCoverage=21%, E-value=1e-70, Identity=76%"; Hit description =Putative Not4-Np
  Pfam annotation: Domain name=RRM_1; Domain location=50-126; Score =24.7; E_value=0.00033; Accession=PF00076.12; Description=RNA recognition motif. (a.k.a. RRM, RBD, or
MAHLKELCADKSNYQKEQVKSHKQTSAKVQLGQSEPKDPNSIRVIQRKLVYIVGMPTEFASEKLLRQKSFLGQYGKIENIIIDNVGANQQVPDSGRVYVTFAKEVEAIRCIQAVDGYSLDGRPLKATFGVTRYCHIWLSNKDCYKPNCSYVHYKAPAEEICTKDDVSVVCARSSFCAVAMAAAVSNRLVVAIARKADETGEGFEVVRWPERGSKNGKKNRT

SEQ ID NO: 69722 - protein, 197 aa, Zea mays
  Coding DNA Sequence Number=SeqID_27943
  Gene Ontology: Mol. function=catalytic activity; Biological process =trehalose biosynthetic process
  Homolog annotation: Hit_ID=Q1W5S8; Match level="QueryCoverage=97%, HitCoverage=59%, E-value=1e-90, Identity=89%"; Hit description =Ramosa 3
  Pfam annotation: Domain name=Trehalose_PPase; Domain location=3-179; Score=105.3; E_value=1.8e-28; Accession=PF02358.7; Description =Trehalose-phosphatase
MALVQFIGAQLREADGAVVHTQAEAAAVHYQAASEFLPVIEEVFRTLTAKMESIAGARVEHNKYCLSVHFRCVREEEWNAVNEEVRSVLREYPNLKLTHGRKVLEIRPSIKWDKGKALEFLLKSLGYAGRNDVFPIYIGDDRTDEDAFKVLRNMGQGIGILVSKLPKETAASYSLSDPAEVKEFLRKLANKKGARQP

SEQ ID NO: 69723 - protein, 55 aa, Zea mays
  Coding DNA Sequence Number=SeqID_27944
MGGGLHAIRTVDVGNRALDRRVALLRRALPCEVNAPPRLGSVVGENASSVVDSEE

SEQ ID NO: 69724 - protein, 343 aa, Zea mays
  Coding DNA Sequence Number=SeqID_27945
  Gene Ontology: Mol. function=RNA-directed DNA polymerase activity; Cellular component=intracellular; Biological process=RNA-dependent DNA replication
  Homolog annotation: Hit_ID=UPI00004C1733; Match level="QueryCoverage =77%, HitCoverage=19%, E-value=1e-136, Identity=91%"; Hit description= UPI00004C1733 related cluster
MPFGLRNAGATYRRCMNHVFGQHIGRTVEAYIDDIVVKTKKASDLLSDLEVTFRCLKAKGVKLNPEKCVFGVPRGMLLGFIVSERGIEANPEKIVAITSMGPIKDLKGVQRVLGCLAALSHFISCLGVRGLPLYRLLKKAECFTWTPEAEEALGNLKALLTNAPILVPPAAGEALLIYVAATTQVVSAAIMVERREEGHALPVQGPVYFISEVLSETKICYPQVQKLLYTVILMRRKLRHYFESHPVTMVSSFPPGEIIQCREASGAGAGLLFISPLGKHLRYVLRLHFPASNNVAEYEALVNRLRIAIELGVRRLDARGDSQLIIDHVMKNSHCRDPKMEAY

SEQ ID NO: 69725 - protein, 62 aa, Zea mays
  Coding DNA Sequence Number=SeqID_27946
MAKQLGSEAEAEALSGREDSTVFSMAKTQGTQPGIARRPRRPRTDWLGLPRYFLSVNFKSCK

SEQ ID NO: 69726 - protein, 72 aa, Zea mays
  Coding DNA Sequence Number=SeqID_27947
  Homolog annotation: Hit_ID=Q8LIP4; Match level="QueryCoverage=47%, HitCoverage=5%, E-value=3e-08, Identity=74%"; Hit description =Selenium-binding protein-like protein
MEHYGCIVDLLGRAGKLQEAVRFIESMPLKPGAFLEYLKCFLRQRNLCFLGSIVGFSIAFRWLPCDILALSP

SEQ ID NO: 69727 - protein, 301 aa, Zea mays
  Coding DNA Sequence Number=SeqID_27948
  Gene Ontology: Mol. function=hydrolase activity; Cellular component =membrane; Biological process=protein transport
  Homolog annotation: Hit_ID=UPI000060F2B5; Match level="QueryCoverage =71%, HitCoverage=49%, E-value=2e-13, Identity=62%"; Hit description =UPI000060F2B5 related cluster
MVLVLALGDLHIPHRAPDLPAKFKSMLVPGKIQHIICTGNLCIKSHFPDRTKDIARGEEALFFPSGQQSNNDFWWPTIWIFLHFPRAQGFQSLFQGSKAWGISLLQLTMSLLQTVGERCFLDECVSGAIAGAKEFESLVLVAALGRVYLGGGGVSTLVGTWKMQEKEVHDYLKSLCPDLHITRGEHDEDARYPETKTLTIGQFKLGLCHGHQMSMFPWQQSDMCTTTWIPWHSLVGVETWDWSQQCLVETPLLRLMKDCGDIMHMRCPRGWNKCLGDRRKRCLRGQNKRCPKDRRKSCLRG

SEQ ID NO: 69728 - protein, 130 aa, Zea mays
  Coding DNA Sequence Number=SeqID_27949
  Gene Ontology: Mol. function=small conjugating protein ligase activity; Biological process=protein modification process
  Homolog annotation: Hit_ID=Q6I602; Match level="QueryCoverage=77%, HitCoverage=19%, E-value=1e-33, Identity=69%"; Hit description =Putative ubiquitin-conjugating enzyme
MGSSLAGRRACWLLQLQTCSRTELTCRRANFEDFVAGHFRQHGRNILVACRAYLDGAQVGCLSGDGVQDVDEGDTSCSVRFKQSLKKLVEELLTEFTVKGADCGKFLTEEKAKRSSGACSTWTADTTLRL

SEQ ID NO: 69729 - protein, 111 aa, Zea mays
  Coding DNA Sequence Number=SeqID_27950
  Gene Ontology: Mol. function=ATP-dependent helicase activity; Cellular component=nucleus; Biological process=rRNA processing
  Homolog annotation: Hit_ID=Q84T03; Match level="QueryCoverage=56%, HitCoverage=18%, E-value=1e-18, Identity=49%"; Hit description =Putative RNA helicase
MSGGGVEPWWTPSLRPYRVVEIKEHGPPHHTKRKGTGAGLMGTTILAMCLVIDEADRILEQNFEEDMKQIFKRLPQATVEGLQQGYCVISSNKRFLVMYAFLRKKRNKKIM

SEQ ID NO: 69730 - protein, 100 aa, Zea mays
  Coding DNA Sequence Number=SeqID_27951
  Gene Ontology: Mol. function=structural constituent of ribosome; Cellular component=intracellular; Biological process=translation
  Homolog annotation: Hit_ID=Q6I600; Match level="QueryCoverage=84%, HitCoverage=34%, E-value=2e-18, Identity=62%"; Hit description =Putative ribosomal protein L21
  Pfam annotation: Domain name=Ribosomal_L21p; Domain location=5-82; Score=70.2; E_value=6.8e-18; Accession=PF00829.11; Description =Ribosomal prokaryotic L21 protein
MGPVWFSFFLTSFSENLALFLNRVLMLGSQTQTVIGRPILPDAAVHAVVEEHALDAKVIIFKKKRRKNYRRTKGHRQELTKLRIINIEGIDKPETAAVAA

SEQ ID NO: 69731 - protein, 144 aa, Zea mays
  Coding DNA Sequence Number=SeqID_27952
MGKSKRGGSSSHHSGDKRKREPTPPSEDFGDSEYSEEEFSFESEGSLAPASPPASFDDSDDSQGITAEVWTYIRAVERAGLEGSDESEYSSDEENSSDSSEEGSGSDSDDDGGDGDNGKGGDDSGKGGNDDGGDGSKGSNKGSG

SEQ ID NO: 69732 - protein, 69 aa, Zea mays
  Coding DNA Sequence Number=SeqID_27953
MANTTEVIIPANVEAQGPSHGRGGSAAMGLLRCSLGFASRTNAVHLPKVLTERYSGKRHEPPRVSLKVA

SEQ ID NO: 69733 - protein, 357 aa, Zea mays
  Coding DNA Sequence Number=SeqID_27954
  Gene Ontology: Mol. function=structural constituent of ribosome; Cellular component=intracellular; Biological process=translation
  Homolog annotation: Hit_ID=Q018B0; Match level="QueryCoverage=52%, HitCoverage=53%, E-value=3e-27, Identity=30%"; Hit description=[S] KOG1685 Uncharacterized conserved protein
MSLPHPVPRETVASAVASLTMWMKKRTAQTRPNLLADERDDLVVLQLSLRLSDVIPLSTLRTDYRPYESRRRLAASHDLFIADRAIVPLLPRVLGKAFYATKKAPIGVDFSRVGWPEQVRKVLGSAFLYLRSGTCSGIKVGRLDMEEEVIVDNVMAAVEEAVEKVPKKWANVRALHLKAVDSVALPIYQVVPELGMKIEVPEIIGSGEVIDAAEAETCGKKIDKKGDAGARGREVFANVSAKRKRNKKGQVEDDVAMQEEVQVEIEKKKRKSIVISANDSQMAGKKGEKKGKRGLENKVNEASLDNKKVKMGKTEQRKKKSMNGDGEVGTEEMQGDKKIKVEKSDVKIKKLRTRIRV

SEQ ID NO: 69734 - protein, 115 aa, Zea mays
  Coding DNA Sequence Number=SeqID_27955
MVRRWNQRRGAEEAAPHRCKSIWINRGWPGHHFNRSSASRCRGCFARGARSLGRKMTISRAIHPSLDDGDLTVGKMFGFKRAVRPIGDPRAEGWLGRGRISGDDLGSKGLGCVLV

SEQ ID NO: 69735 - protein, 679 aa, Zea mays
  Coding DNA Sequence Number=SeqID_27956
  Gene Ontology: Mol. function=asparagine synthase (glutamine -hydrolyzing) activity; Cellular component=cytosol; Biological process=asparagine biosynthetic process
  Homolog annotation: Hit_ID=Q2QN88; Match level="QueryCoverage=92%, HitCoverage=99%, E-value=0.0, Identity=63%"; Hit description =Asparagine synthase family protein, expressed
  Pfam annotation: Domain name=Asn_synthase; Domain location=347-623; Score=132.8; E_value=9.7e-37; Accession=PF00733.11; Description =Asparagine synthase
MGRSLLQKHHLLYSHCAHWPLSTGKKTLKSSMCGIALVLASDRLVIVPCATATTAALETQHSCKRKGVPDELKEALRRRGPDSLGYRSRCLLADGTVVVGDGCNDGVEGKIGVSDSSVADLFFIGATLHLRGAKLVSQPLVAPSGSVFLYNGEIYGGIQVADDENDTQALFNSLESCCSCDCHALGRDKTCTCCGTGSGAKSVLQVLSTIKGPWALIYWQADQTVSDRDMSNHTKASYWEELPCGIYSMHMKDIGKHGACMKEGWIVEVNTHKWMASSLNGLIKWERKLTVPTMENIPVDRGNHQLSQSFISSREPEENTNNGITKADFLSDSSLCDANCITQSAHRVLVALRESVMVRTKMNTLFQGTLDRSEDGESAPIAVLFSGGLDSMLLAALLDQCIDSKWIIDLLNVSFDGQLAPDRISAIAGLKELQRISPCRRWRLIEIDTALTDLNGESEHVMSLIHPSNTFMDLNIGIALWLAAGGDGWVDGSICRMQDGSRYKYRSRSRVLIVGSGADEQCAGYGRHRTKYRLGGWNALDQEMRLDVQRIWKRNMGRDDRCISDHGKEARFPFLDENVIKTLLEIPLWEIAKLDEPVGRGDKKILREVARLLGLQEAALQPKRAIQFGSRIARESNRKNFGSNRAANQASAGSVQIHQSPASPVASATRQPFLTNNQP

SEQ ID NO: 69736 - protein, 145 aa, Zea mays
  Coding DNA Sequence Number=SeqID_27957
MALSTTQCPFWALRQTQDMYHDARATGTTTFVAVELHSDGEKERLAAGGLLAMGAELAARGLHGKGKSYRSLELPVPCSNGGDRGRWTPVGGAFGQGEMGRAPSRSEINLIGDRLDVWLVEADGSQLDITLLCASMLLLIRLALQ

SEQ ID NO: 69737 - protein, 103 aa, Zea mays
  Coding DNA Sequence Number=SeqID_27958
MGKPVPSLLMLLLSRGRVPLNSPTRWQDFARAAGFYGDLAGSFLLLLGLRGGAYKTRGAATPFFILSGAARSLSALGVDLWVIRRIAHRRVSPCGQQAPSCTV

SEQ ID NO: 69738 - protein, 310 aa, Zea mays
  Coding DNA Sequence Number=SeqID_27959
  Gene Ontology: Mol. function=transferase activity; Cellular component= integral to membrane; Biological process=glycolysis
  Homolog annotation: Hit_ID=Q2KNB7; Match level="QueryCoverage=85%, HitCoverage=57%, E-value=1e-100, Identity=65%"; Hit description =Hexokinase-9
  Pfam annotation: Domain name=Hexokinase_1; Domain location=38-217; Score=98.8; E_value=1.6e-26; Accession=PF00349.11; Description =Hexokinase
  Pfam annotation: Domain name=Hexokinase_2; Domain location=219-310; Score=-127.3; E_value=0.0033; Accession=PF03727.6; Description =Hexokinase
  Pfam module annotation: Pfam domain module=Hexokinase_1::Hexokinase _2; Domain location=38-217::219-310
  Subcellular localization annotation: CTP_CleavageSite=20; ConfidenceScore=5.18e-01
MRKPAALVVSTAVFAAAAVVAVMARQRLREARRWARAGAVLRDLQERCAAPVERLRQVADAMVAEMRAGLASNDSEGDSGSSVLLKMLFGGKEQRIVKQESKTVSIPQHLMSRGSNELFDFIAAALAKFIASEGEGFYLPEGMQRQLGFTFSFPVKQNSVASGTLIKWTKGFAIDEMVGKDVVAELNKAIKRQGVDMEVTVLVNDTVGTLAAGRYVDNDTVAAVILGTGTNAAYIEHMDSIPKWCGPPPESGNMVINMEWGNFRSTHLPLTEFDVALDAESLNPDEQYPPRSFEMQIGAVFLVELQGPPS

SEQ ID NO: 69739 - protein, 80 aa, Zea mays
  Coding DNA Sequence Number=SeqID_27960
MHIVDVSVNRSEVNTLSLIVDSITNKLVTDTSPSAKDVELTKSVHDLAVKALLSNDDTEREMCPWAISKCFGDLVSNTSA

SEQ ID NO: 69740 - protein, 49 aa, Zea mays
  Coding DNA Sequence Number=SeqID_27961
MAEKGTNLKGKRPSSPRWVVHKSIVNMKGMNLCVKLGLLPSVKPKVCPS

SEQ ID NO: 69741 - protein, 91 aa, Zea mays
  Coding DNA Sequence Number=SeqID_27962
MAEMSNMVPGNAAVQGKRRLYDGATDVEAEHGGVHGKDDRRGGQAPDMGGLTTMGEVDSSRQRAARGTAMDMPGLGAGKLRIALAHDTTTK

SEQ ID NO: 69742 - protein, 169 aa, Zea mays
  Coding DNA Sequence Number=SeqID_27963
MVQRFTRSMCSGGVPNSGEYDCAIPVARVLGLSAGMLHGLLGDLSEGLDQAEEGGKGVGHGCCPRAALAGRGEVAGAASELRRVRRGTEEATGMMARHWGGLYSCGAGVVTGRPRACGRALSAPPSVSPRRTCVGLLLPGFNDRFDCLSVQILAKPPCTVSSLHQILPF

SEQ ID NO: 69743 - protein, 73 aa, Zea mays
  Coding DNA Sequence Number=SeqID_27964
MSKDDLADSLAYNSIKLHPKAEGPCECIILRKHVSRVFEDLRKTKAPNNLSEDSDDSDDFDVESGDEDSKDQP

SEQ ID NO: 69744 - protein, 136 aa, Zea mays
  Coding DNA Sequence Number=SeqID_27965
MKLNTMLRPNPKKPRLKTFGNNLPKPKKINWFILLPDRAFHIVYSFIPKPKGGRGKGRGAEGRGRERERRGCDQGHGRLDRVTGRRDVRRARHQAAAVLEVKKGPPDGWSPRVSESGREDMGVGADGPWWAGFGQG

SEQ ID NO: 69745 - protein, 76 aa, Zea mays
  Coding DNA Sequence Number=SeqID_27966
MASVLEKDGYDHARIVGGAGLGIGVDDIRNPLKNVLNVVKRFFFELCNKGGRQLAASEAEEYTGKNKESKKTKETK

SEQ ID NO: 69746 - protein, 107 aa, Zea mays
  Coding DNA Sequence Number=SeqID_27967
  Subcellular localization annotation: CTP_CleavageSite=62; ConfidenceScore=5.18e-01
MRSVVPSSTELPVSRGWPALDARSSAMTALDSVSPVIKVTLGSSGGIDNREPTNLSPSRKVRAGPLRTVVSSPNLTPVSDHYVNGNMERPPGKTVLPQGYNGTPLDD

SEQ ID NO: 69747 - protein, 195 aa, Zea mays
  Coding DNA Sequence Number=SeqID_27968
MGEGEEKPLRWFSVREVDGRKRRGAGSAEVGHRVEARSRELGTAQAWMRLAAATWPESTGVLAQNNPDSDYTVVVPRVDFLISQGLFSKYAEAKRLDYYSSEPDRHRRDQWFRIHALASSHPMEAPATDTAADHRSSPKLGPQYPKIQLMPFYSMPGEKRDAGREYYRLVRCEAHDTRFSNSNLDSIVTVNLSSF

SEQ ID NO: 69748 - protein, 73 aa, Zea mays
  Coding DNA Sequence Number=SeqID_27969
  Subcellular localization annotation: CTP_CleavageSite=52; ConfidenceScore=5.19e-01
MKGTQTAARQDTQPSAARDSTPAFSLQPPARTHNHQQPLSQGLHACLQPSARDSHAFSQGLSLQVILLTLAKQ

SEQ ID NO: 69749 - protein, 213 aa, Zea mays
  Coding DNA Sequence Number=SeqID_27970
  Gene Ontology: Mol. function=RNA-directed DNA polymerase activity; Cellular component=mitochondrion; Biological process=RNA-dependent DNA replication
  Homolog annotation: Hit_ID=UPI00004C1731; Match level="QueryCoverage =92%, HitCoverage=13%, E-value=1e-102, Identity=90%"; Hit description= UPI00004C1731 related cluster
  Pfam annotation: Domain name=rve; Domain location=26-185; Score =114.1; E_value=4.1e-31; Accession=PF00665.16; Description=Integrase core domain
MQHLEPSWGMPSDKIRLPAQALQTIPITWSFAVWGLDLVGPLHKALGGFTHLLVTIDKFSKWIEVRPLTNIRSEQAVAFFTNIIHRFGVPNSIITDNGTQFTGKKFLDFYEDHHIHVDWAAVAHPMTNGQVERANGMILQGLKPRIHNNLNKFGKRWMKELPSVVWSLRTTSSRATGFTPFFLVYGAEAVLPTDLEYGSPRTKAYDDRSNQIS

SEQ ID NO: 69750 - protein, 83 aa, Zea mays
  Coding DNA Sequence Number=SeqID_27971
MGRARVAFFSLLFEKRDLVEIGALQPSLGFKDFRHAARLHSLTNASRIFVIRAEAEERTEWGLPPRGSVTLFFPWRLGEKGIL

SEQ ID NO: 69751 - protein, 58 aa, Zea mays
  Coding DNA Sequence Number=SeqID_27972
MAETKGNLKTLARAVAGGSCNRHCDSAALRRRQDLGWSGIAVELLIGAMDPLRCRYAT

SEQ ID NO: 69752 - protein, 106 aa, Zea mays
  Coding DNA Sequence Number=SeqID_27973
  Homolog annotation: Hit_ID=Q67YJ0; Match level="QueryCoverage=39%, HitCoverage=6%, E-value=3e-08, Identity=64%"; Hit description=MRNA, partial cds, clone: RAFL24-27-O06
MSLAPRALCLSPPQLFHRGALLRPLLRGMASCAATGSHVAAEAPPFGVGGWGASDPRWLVLEKLPASYPTTRDLTPSRGRSCTPVTPGCFLLPKGTTSSWLRGLIP

SEQ ID NO: 69753 - protein, 109 aa, Zea mays
  Coding DNA Sequence Number=SeqID_27974
MAGYRGSGEDVTLPEAEVEAEAEPRGRARRSFLLRPRLNLTVVGFARVVIPSLNAHAMRSAGKAIWPRSLARKGLPLAEPRVRLRPEETLGRGANSSGTTVPPEARLRR

SEQ ID NO: 69754 - protein, 133 aa, Zea mays
  Coding DNA Sequence Number=SeqID_27975
CGFLKNPKSLHKAQDQPSSSMQASPPTQDEDQAQDDEDEDQEDEPPQEEDMDQGGDEDDQDKEDDQEIRDQRPPHSRVHQAIQRYHPVNSILGDIHKGSGCIGLSGGAPDSVRCARLESGQLAALGNSSTAYG

SEQ ID NO: 69755 - protein, 54 aa, Zea mays
  Coding DNA Sequence Number=SeqID_27976
  Subcellular localization annotation: CTP_CleavageSite=27; ConfidenceScore=5.35e-01
MAASSAVASSNSSPTAAFTQPVHGLMRVPTVPNPTTLRCLQFITDIDVKATSKI

SEQ ID NO: 69756 - protein, 79 aa, Zea mays
  Coding DNA Sequence Number=SeqID_27977
  Gene Ontology: Mol. function=catalytic activity; Biological process =metabolic process
MAIVLYWVYADGYQLILHRWLLERYRLHTLDEEEDNVVSLSTVVRGVLLQQLMHAIHVMVLFMVHFSAIFYQKTSSFPE

SEQ ID NO: 69757 - protein, 125 aa, Zea mays
  Coding DNA Sequence Number=SeqID_27978
MQKERLVGGATFSFSFFRGMLEDMVGIKDLSSIAIAFVVEVNKLAPKEMTDVKDHSRVVDVFTVEVDKLAQGWYLEQYPCIHPSILRLHLFLRPIDSRFRMNRTREYETTEVSQPNKQSVLLISA

SEQ ID NO: 69758 - protein, 432 aa, Zea mays
  Coding DNA Sequence Number=SeqID_27979
  Gene Ontology: Mol. function=calcium ion binding; Cellular component =mitochondrion; Biological process=embryonic development ending in seed dormancy
  Homolog annotation: Hit_ID=Q94HS0; Match level="QueryCoverage=57%, HitCoverage=70%, E-value=1e-92, Identity=33%"; Hit description =Putative salt-inducible protein
  Pfam annotation: Domain name=PPR; Domain location=11-45; Score=48.8; E_value=1.8e-11; Accession=PF01535.11; Description=PPR repeat
  Pfam annotation: Domain name=PPR; Domain location=113-147; Score =33.6; E_value=7.1e-07; Accession=PF01535.11; Description=PPR repeat
  Pfam annotation: Domain name=PPR; Domain location=148-182; Score =25.6; E_value=0.00018; Accession=PF01535.11; Description=PPR repeat
  Pfam annotation: Domain name=PPR; Domain location=183-216; Score=7.6; E_value=0.94; Accession=PF01535.11; Description=PPR repeat
  Pfam annotation: Domain name=PPR; Domain location=217-251; Score=4.8; E_value=2; Accession=PF01535.11; Description=PPR repeat
  Pfam annotation: Domain name=Peptidase_M22; Domain location=139-366; Score=-15.5; E_value=9.1e-06; Accession=PF00814.15; Description =Glycoprotease family
  Pfam module annotation: Pfam domain module=PPR::PPR::PPR::PPR::PPR::Pe ptidase_M22; Domain location=11-45::113-147::148-182::183-216::217 -251::139-366
MAQVGIQVNTITFNVLIDGYAKSGQMDQASATYREMQARGLVPDSCTFNIIAARAHKFGYAAQLVHDHDMFSSHMSADGLDMLVCRLCWDHRLDDAWELLLGAIEQGVPLRVTGFNALIAAYSKEGLHEEASELYRIMNKLGLAPSSSTFNYLIMGLCNQVRLDEAQLLLEHMVSKGYCLSTSFTISLDAYFRDGNAVGALKCWDDMSKIGLQTDFIAFSAYINDLSRLDYVNEAYQEFAEMTSRGILAKKGEQFIDVPYVVKGMDVSFSGILSFIEAAAIEKLKNNECTPADLCYSLQETIFAMLVEITERAMAHCDSKDILIVGGVGCNERLQEMMKIMCSERGGRLFATDDRYCIDNGAMIAYTGLLAYAHGMTTPLEESTFTQRFQTDEVHAIWREKEMPVLNNTHSDAIAEVSIDEASMATPIVIDY

SEQ ID NO: 69759 - protein, 195 aa, Zea mays
  Coding DNA Sequence Number=SeqID_27980
  Gene Ontology: Mol. function=sequence-specific DNA binding; Cellular component=nucleus; Biological process=regulation of transcription
  Homolog annotation: Hit_ID=Q6B6Q7; Match level="QueryCoverage=72%, HitCoverage=32%, E-value=2e-48, Identity=70%"; Hit description =Transcription factor WRKY100
  Pfam annotation: Domain name=WRKY; Domain location=26-88; Score =120.4; E_value=5.1e-33; Accession=PF03106.6; Description=WRKY DNA -binding domain
MCKRRKGLPRWTAKFRVPETSLEATPDDGFSWRKYGQKDILGAKFPRGYYRCTYRAAQACAATKQVQRSDADLCVFDVTYQGEHTCHQKPRRATAALSAPGGRSQTPPPPPTPPALPLEQQDPGMRLLGMGFRRVLRVETAGLALHDDPDDRGPASAPAAPFLLPLRAAGFSPRRRGGDDDGQHPRGSGPSRRPR

SEQ ID NO: 69760 - protein, 133 aa, Zea mays
  Coding DNA Sequence Number=SeqID_27981
  Homolog annotation: Hit_ID=Q337A9; Match level="QueryCoverage=77%, HitCoverage=22%, E-value=4e-48, Identity=91%"; Hit description=Major Facilitator Superfamily protein, expressed
MSKQILVPTSSVKGSNISIGGSLQLLGFCTFEACVGIFWPSIMKMRSQYIPEEARSTIMNFFRIPLNLFVCVVLYIVNAFPITVMFGMCSIFLFMAAILQRRLMVVSDLAETVDGCICSTVFSDFYFFILLHF

SEQ ID NO: 69761 - protein, 123 aa, Zea mays
  Coding DNA Sequence Number=SeqID_27982
MSPDRPIRSAPTPIRRQIRIIADRGSHQALLARVGQLCAGRACPPPSSGSSPAFACIGRTGAKESFDSGDLPPTLPSWCFYTHRTGSFSDGIHLRFWSHANQSVKAIGRSGRLSWGRNKGRMA

SEQ ID NO: 69762 - protein, 117 aa, Zea mays
  Coding DNA Sequence Number=SeqID_27983
  Gene Ontology: Mol. function=nucleotide binding
  Homolog annotation: Hit_ID=P09189; Match level="QueryCoverage=50%, HitCoverage=9%, E-value=2e-15, Identity=69%"; Hit description=Heat shock cognate 70 kDa protein
MAGIKDQKDPHDKILQGQLLAVDEVLEQLLDLGDPSGAANKDHLMDATLVHLCISWTFLNMLHALPEQVIGALDHPVGGTDCLVNQLTVGSGRRVNYPLVGWHTGLSGTLHGLTGDL

SEQ ID NO: 69763 - protein, 73 aa, Zea mays
  Coding DNA Sequence Number=SeqID_27984
MSVRAKTTNAALVFPIEDSASAKPFEVPKGLDRELSAKEVAPKTWILRRSYMMQSTPYSILNILSSRSCLRKI

SEQ ID NO: 69764 - protein, 180 aa, Zea mays
  Coding DNA Sequence Number=SeqID_27985
MVGRIWPAGAYGGRSTAQWRAPAAVKPPVRANTTGHGAQPDPRRILRYDDEFRGHRPPFLRSESPVLSPKHDETHRHEIVDATTATQIELRRQNFPLQWRRRTENLTVARMRLGGGEEWPRGTERRLLYGQLPKRPSELRGGRGGEDCSRRATFTEKKTATRRGPHAVTAARTKEQVTGC

SEQ ID NO: 69765 - protein, 61 aa, Zea mays
  Coding DNA Sequence Number=SeqID_27986
MVVMSVEEKMMGPILGRPLRFLGVALKPTILLVLTGMMTSSQRVGGTVHWSSRVFPVLTII

SEQ ID NO: 69766 - protein, 334 aa, Zea mays
  Coding DNA Sequence Number=SeqID_27987
  Gene Ontology: Mol. function=nucleic acid binding; Cellular component= oxygen evolving complex; Biological process=DNA integration
  Homolog annotation: Hit_ID=Q7XBC6; Match level="QueryCoverage=80%, HitCoverage=15%, E-value=1e-147, Identity=93%"; Hit description =Putative copia-type pol polyprotein
  Pfam annotation: Domain name=RVT_2; Domain location=1-255; Score =511.5; E_value=9.1e-151; Accession=PF07727.4; Description=Reverse transcriptase (RNA-dependent
MQEELNNFTRNEVWHLVQRHNQNVVGTKWVFRNKQDEHGVVTRNKARLVAKGYSQVEGLDFDETYAPVARHESIRILLAYATYHGFKLYQMDVKSAFLNGPIKEEVYVEQPPGFEDSEYPNHVYKLSKALYGLKQAPRAWYECLRDFLITNGFKVGKADPTLFTKTLDNDLFVCQIYADDIIFGSTNESTCEEFSRIMTQKFEMSMMGELKYFLGFQVKQLQEGTFISQMKYIQDILNKFGMKDAKPIKTPMGTNGHIDLDTGGCKINRKITSGTCQFLGRSLVSWASKKQNSVALSTAEAEYIAAGHCCAQLLWMRQTLRDYGYKLTKASSSM

SEQ ID NO: 69767 - protein, 163 aa, Zea mays
  Coding DNA Sequence Number=SeqID_27988
MKVLLERLKLALKGDRTRDMKVLLERFNHYAREAERHFRLTSVLEEINHIMAPQILLVSRYWNSKMANKIKLCRLEVLESNPKLKQHKRAKREVCTPTCFAVKVPFWSLFEEKLRNGGKRNLQGAWGYVKEYTKTASAHRTSHYWAPNPKEYTKTTSKCSTIE

SEQ ID NO: 69768 - protein, 167 aa, Zea mays
  Coding DNA Sequence Number=SeqID_27989
MASLRPRHCSGAPDFPLEVSNSPTPCIALSSVQSLAGGSLRRRYAIPPQTATLWCPYAGVVPMIVSVVSPRTFLCPSQRPMAPSASTPSSSANLRRRRERHHRWRSGNPARGCHWISGVHPRLSGLGLIRLDLISTVCFGSGRSDNEQPVVPECVAEDLPEQQPGEG

SEQ ID NO: 69769 - protein, 139 aa, Zea mays
  Coding DNA Sequence Number=SeqID_27990
  Subcellular localization annotation: CTP_CleavageSite=42; ConfidenceScore=5.06e-01
MGCHELWAYFGYLVLGYPSAAPSLCSVSLSCSEALLLGTRVSSMPLVQRVLLVLCQRQKTICKIGSFSARIPFLSSVRSYEGKWFYVKNLEGSASQLTSRVPVSNVEWNYGAEKKFKSKIDYMLEVVAMLNGGVSLARG

SEQ ID NO: 69770 - protein, 149 aa, Zea mays
  Coding DNA Sequence Number=SeqID_27991
  Subcellular localization annotation: CTP_CleavageSite=37; ConfidenceScore=5.07e-01
MAIAVLLRRGEGSVFTQYRNRTARATYYHIGSSFGIRPASRKLNNINLNSSPSKRSHRSPSPMHDPDVDASSSRRVPRSSRDPLRRWDLSIPIWRWLLTLREDSLMLCFDTPILHLHESPMPASVEVTSASQGANHSRDSDAARFNAAK

SEQ ID NO: 69771 - protein, 38 aa, Zea mays
  Coding DNA Sequence Number=SeqID_27992
MATISVRIWVPYLIGILAAEKTCDCLCVATGTYIGRLG

SEQ ID NO: 69772 - protein, 72 aa, Zea mays
  Coding DNA Sequence Number=SeqID_27993
MTNMKSMTVQNTIGASKEMDVELARRGTRQVTASMADGARLGVGDRGSSRELSRRASETEGAGRAAREMGAE

SEQ ID NO: 69773 - protein, 33 aa, Zea mays
  Coding DNA Sequence Number=SeqID_27994
MATSLADRLRNRTSPPSISQQQVQAPYHKPYRL

SEQ ID NO: 69774 - protein, 102 aa, Zea mays
  Coding DNA Sequence Number=SeqID_27995
MELVPLPTELALLTRALFSLSHPRSSTPLLAAGLPTVEDRPKASTPLVPDLASRSPQSLLACLADPCCFADHRRPPSLLGRPANNPLAHRSPMRSEPEEEEG

SEQ ID NO: 69775 - protein, 141 aa, Zea mays
  Coding DNA Sequence Number=SeqID_27996
MAAPPPSMAGDRWSWAIQPHSAPILLWLEVIRRTGYDEHTGMHLTANGRLIGANRGNGRIWGSSRSSVSNCGRSNGRSRPIPPRTPDRSNGETLPPNFESSTESGPRIDGGGTQSDTALAGDDGFVRGVRGMGVSVRCPIL

SEQ ID NO: 69776 - protein, 71 aa, Zea mays
  Coding DNA Sequence Number=SeqID_27997
MKHAFLRRPFWTPTGPSCRQGKAWGPVLKNGCPFYRVVRSLCGRNELRYIGAPHLEARKAKRCGGRKRSEA

SEQ ID NO: 69777 - protein, 350 aa, Zea mays
  Coding DNA Sequence Number=SeqID_27998
  Gene Ontology: Mol. function=protein binding; Cellular component =integral to membrane
  Homolog annotation: Hit_ID=Q2R9D4; Match level="QueryCoverage=94%, HitCoverage=94%, E-value=1e-126, Identity=68%"; Hit description=Non -imprinted in Prader-Willi/Angelman syndrome region protein, putative, expressed
  Pfam annotation: Domain name=DUF6; Domain location=2-136; Score=0.9; E_value=0.059; Accession=PF00892.11; Description=Integral membrane protein DUF6
  Pfam annotation: Domain name=DUF803; Domain location=15-289; Score =559.2; E_value=4e-165; Accession=PF05653.4; Description=Protein of unknown function (DUF803)
  Pfam module annotation: Pfam domain module=DUF6::DUF803; Domain location=2-136::15-289
  Subcellular localization annotation: CTP_CleavageSite=53; ConfidenceScore=5.44e-01
MAAPASAAAGRGGAMSSDNAKGLVLAVSSSAFIGASFIVKKMGLRRAADSGVRAGYGGFSYLVEPLWWIGMISMIVGEIANFAAYAFAPAILVTPLGALSIIISAALAHAILQEKLHTFGILGCVLCVVGSITIVLHAPQERDIDSVKEVWDLATEPAFLCYAAIVVAAALVLIYFVVPHHGQTNIMVYIGVCSLLGSLTTWAFALIVATCVSTQINYLNKALDTFNTAVVSPIYYVMFTSLTIIASVIMFKDWDHQNPTQIVTEMCGFMTILSGTFLLHKTKDMTDSPGQSLLTRRPKHASQNAFAIEVMPLKCQDYIDDETLTLSLPKVENGYLKEEYLLRYKDSSIV

SEQ ID NO: 69778 - protein, 489 aa, Zea mays
  Coding DNA Sequence Number=SeqID_27999
  Gene Ontology: Mol. function=DNA binding; Cellular component =intracellular; Biological process=DNA integration
  Homolog annotation: Hit_ID=O24587; Match level="QueryCoverage=99%, HitCoverage=49%, E-value=0.0, Identity=80%"; Hit description=Pol
  Pfam annotation: Domain name=rve; Domain location=150-313; Score =199.2; E_value=9.4e-57; Accession=PF00665.16; Description=Integrase core domain
MTGEKKMFSSYVKNKDSQNSIIFGDRNQGKVKGQLCNMGYNCLFTNVDVSVFRRSDGSLASKGILDDKLYLVDFAKEEAGLDACLMAKTSMGWLWHRRLAHLGMKNLHKLLKGEHVIGLTNVTFEKDRPCAACQAGKQVESSHHIKNVMTTSRPLELLHMDLFGPVAYLSIGGSKYGLVIVDDFSRFTWVFFLQDKSETQGILKRFLRRAQNEFELKVKKIRSDNGSEFKNLQVEEYLEEEEIKHEFSAPYTPQQNGVVERKNRTLIDKARTMLGEFKTPERFWSEAVNTACHAINRVYLHRLLKKTSYELLTVFGSKCYILVKKGRNSKFAPKAVEGFLLGYDSNTKAYRVFNKSSGLVEVSSDVVFDETNGSPREQVIDLDDVDEEDVPTAAIRTMAIGDVRPQEQKEQDQPSSSIMVQPPTQDDEQVHQEEACDQRGAQNDHVMEEEAPQAPPTQVRATIQRNHPVDQILGDISKGVTTRSRLANF

SEQ ID NO: 69779 - protein, 673 aa, Zea mays
  Coding DNA Sequence Number=SeqID_28000
  Homolog annotation: Hit_ID=Q2R9D1; Match level="QueryCoverage=98%, HitCoverage=97%, E-value=0.0, Identity=66%"; Hit description =Expressed protein
  Pfam annotation: Domain name=DUF616; Domain location=335-673; Score =611.2; E_value=9.3e-181; Accession=PF04765.4; Description=Protein of unknown function (DUF616)
  Subcellular localization annotation: CTP_CleavageSite=76; ConfidenceScore=5.15e-01
MAQYRQQYGGGFSDSRGHQHQALPDWHRPHHASAKPSSRIRRPGKPAPRRRSPAAAVAAALLLLAAVFLLSRRISRSSAEVSQDSSAGEALPEWNQSKSWKKLKFGQGGGGRSARDSRYWDRDDRRRDEDYTEDEKEKNSGGTGASTDAGGSGDKGTTSEAGGEDKGLTLETGSGAKDVPEASEGGKAGTLYNEGGRKELAQYEAAAMGATGTGVKEVDPDDEYDDGIDMQDDLEDAHLHSSDGGRKLGGGSHESVEEKDDVTTERRTEAGGGIADNHDITSPDKKKVSGTGDKKHVSKKKPKRKKSGSTCEMKFLNSTAQLVEPGRNERFSSFNLKYVEVEERPIGSEYWEPRFAGHQSLQEREESYKAHDQQLTCAFVKGPNGTSTGFDISDDDRKYMSKCHIAVSSCIFGNSDRLRTPFSKTNPITSLRNVFLITLSQITSLSKKTVCFAMFLDEVTLQTLESEGQKMDGMGFIGIWKIILIKNMPYNDMRRVGKIPKFLAHRLFPSSRFSIWLDSKLRLQTDPILILEYFLWRHGYEYAISNHYDRHCVWEEVAQNKKLNKFNHTIIDQQFEFYQADGLTRFNPSDPSRLLPSYVPEGSFIAREHTPMSNLFSCLWYNEVDRFTPRDQLSFAYTYLKLRRTNPDRPFRLNMFKVGTVDRRSSYFENCKR

SEQ ID NO: 69780 - protein, 69 aa, Zea mays
  Coding DNA Sequence Number=SeqID_28001
MHAALVLSPCPCRRAAGHASFASPSRCQWGSMYAARSAEGGLPLGEECGKEEGVEADLQEFQDFDEFKD

SEQ ID NO: 69781 - protein, 57 aa, Zea mays
  Coding DNA Sequence Number=SeqID_28002
MAYGERERVDEGRNSPRIARAEHGRGEASGTAPVRRGRDFASGEHAAVAWRDRDQLA

SEQ ID NO: 69782 - protein, 187 aa, Zea mays
  Coding DNA Sequence Number=SeqID_28003
  Subcellular localization annotation: CTP_CleavageSite=54; ConfidenceScore=5.37e-01
MEPRVRSRLTRPVHASSHTRAQPCTPVRAHAGPRSLVHRAASIRTGKPRPYSLRASLNVSSPALCSGELCAARQATQALGHHGQTPPSHPHSIPCLGQLPPEPRRAPRSKKSGAISPEKMFHPRWSCNPRRHTWPRQTGWIPRRRRVRPLAHVDRPTPTIARDDPHIGMTVKTSPRPSTTSPEQSRR

SEQ ID NO: 69783 - protein, 221 aa, Zea mays
  Coding DNA Sequence Number=SeqID_28004
MTATYRVRPPRADNWTSRLALRPSLAYPRCAADPLVSGALLIFSDALTAGAADADPALISRWLQPPMSWPRLAPDGYGWNHFFLDSWRPGYLDPFGVLDALFSLRRRHGLARIARRTQCPPPDRFAPWSCSTAYVKPSVVDPGGSTAHMYALCGLVWAESSSGPPRFLAGVGASPHRRHVLWVAFLASFQHPDHYVNGNMENHPGKQCYHKGSMGGPWLTN

SEQ ID NO: 69784 - protein, 139 aa, Zea mays
  Coding DNA Sequence Number=SeqID_28005
  Subcellular localization annotation: CTP_CleavageSite=35; ConfidenceScore=5.30e-01
MDGCGVVFSLPMTECNGATPPPQQTPVNSPSSHARAPKTRAWFAGSAEAGNLGSAVEALHYAREVVEGGPARWAPRVSVRVPAHRAGVTGCWVPPVSESAEVRACGVQLSAPVPPVSPINEPGCTVIVGLGRIAYSEPS

SEQ ID NO: 69785 - protein, 103 aa, Zea mays
  Coding DNA Sequence Number=SeqID_28006
MENGGSIERSRGRWSIGLHPQSREGRCLGARMGGEKSSCSCGKGHREEEGQRRALVCCIEGASGGRRREKRRPVGEARLLELGPERGRGSIGRRRKKTGGAVG

SEQ ID NO: 69786 - protein, 79 aa, Zea mays
  Coding DNA Sequence Number=SeqID_28007
MDKTNTKKISNEMLAGLSEDSDDSESFDLESGNEDYCYPSQKQGKKRKDATSAFSEYPAPAGAKGESDEVSKAMVIAEH

SEQ ID NO: 69787 - protein, 109 aa, Zea mays
  Coding DNA Sequence Number=SeqID_28008
MAHRTVSGALGPYRLEPATLGKMEARSAIIHRIVRCAIGLSGEPAEQRLSALTIDSAKATVRQQCRDRVRRAEVRGHRTVWCSKTTNGSNGQLLRTLTDTLTWRAPDSA

SEQ ID NO: 69788 - protein, 110 aa, Zea mays
  Coding DNA Sequence Number=SeqID_28009
MGCTRVAFFLLLLEGSVIPWGLALSSNRSSFQGIFIMQPGYSPSPMVIRRDDHQPSDGEKQAGLRPLPRPQLQGCSSSGLRRRALRVGSCLPRGLVTRFFLQHSGEKGIL

SEQ ID NO: 69789 - protein, 103 aa, Zea mays
  Coding DNA Sequence Number=SeqID_28010
MDELSAQGGCLPQARTEERLEDGGEAVNSRVDGDRLWLHVKHSGERKPGNPEGLGVNRGVSRVAGDAAELTEAIDATGIQRRSCNGGDLWVFNSNSNQVSNSN

SEQ ID NO: 69790 - protein, 176 aa, Zea mays
  Coding DNA Sequence Number=SeqID_28011
MTEGDQGKNRGRVWVAYLERKHRSPRATAEAQGRLRAMVAELRLHMKNSDEGGPGGPEGMGANRGVFQVAGDRAELTGATDVAGSPTAIVEQTVDVGERQQNCLGAHAGRVRGRECSAEGANEQGEVGERGAGSKQARACGGGRGLRGRGHVHGGGMGGRLGTRTDGWGPRDTERG

SEQ ID NO: 69791 - protein, 56 aa, Zea mays
  Coding DNA Sequence Number=SeqID_28012
MAEAFFGGMTKVMLAEGVQNSRNGREFTGETNYKCTFGLMKSKGTGVMQKANVKSA

SEQ ID NO: 69792 - protein, 109 aa, Zea mays
  Coding DNA Sequence Number=SeqID_28013
MSSFFGNRGKLRLNRVMNAIGFEYPSYEDPSIDNETTEKRKMVAKGAGKTSKKIIEADTENDESKGDEEPSLDPEKKKAKTSRKSVTRQDQGKGSATTTSSLGCTRILE

SEQ ID NO: 69793 - protein, 93 aa, Zea mays
  Coding DNA Sequence Number=SeqID_28014
MECQVATTEKNWCRCLGKPSAQAFEEIEAAAKQLLGSSHIGQQYIPVYVVSDLILAVRYRSIGQKTLRAPLAALSANKPLGFLRKNPPSHGYF

SEQ ID NO: 69794 - protein, 99 aa, Zea mays
  Coding DNA Sequence Number=SeqID_28015
MAHVGPEWSHGMAYDDSRYTDVAKRGDVKVKVVLRWRVFSVGDNLFLYYGVGKWVGVQGVHGGVPDDDAVFSELCGGSVQSAGTVSNQRLKACQNKDYT

SEQ ID NO: 69795 - protein, 366 aa, Zea mays
  Coding DNA Sequence Number=SeqID_28016
  Gene Ontology: Mol. function=hydrolase activity; Biological process =aromatic compound metabolic process
  Homolog annotation: Hit_ID=Q2QUI2; Match level="QueryCoverage=65%, HitCoverage=82%, E-value=1e-113, Identity=80%"; Hit description =Phospholipase, putative, expressed
  Pfam annotation: Domain name=Abhydrolase_1; Domain location=61-277; Score=14.5; E_value=0.00059; Accession=PF00561.10; Description =alphabeta hydrolase fold
MDNDDIKYDEEYVLNARGMNLFTCQWRPLNSEPKALIFLCHGYAMECSISMRGTRLAQAGFVVHGMDYEGHGKSSGLQGYINSFDDIVVDCSKYFASVCEKEEYKKQKRFLLGESMGGAIVLMLHRKEPTFWDGAILVAPMCKILDDMKPHPIMMSILSKLSNVIPTWRIIPNEDIIDRAIKCEERREEVRNNHYCYKGKPRVKTGHEIFMASLDIESNLDKVTLPFIIVHGGDDAVTDPTGIINFLSWIQQRFTVTRTMLIAHKNQWVCVREDDIHLSIGGTINGVDICKILYWHMTLARNSRTQQFHHLQQHGSENPKYGVYFGKSYTLKEKESQGYVGFWESRAVTKSSCPRSNNEPNRLIPS

SEQ ID NO: 69796 - protein, 65 aa, Zea mays
  Coding DNA Sequence Number=SeqID_28017
MELMHSPVTGKTLRVPRSQYYSESSSYVAFTENDGELHDDIYSGKWGFEYSRVQVALMLSKFNLS

SEQ ID NO: 69797 - protein, 81 aa, Zea mays
  Coding DNA Sequence Number=SeqID_28018
MQRKLTNGKEREDGKAWPITPHAEQHGSSSLISCEKQTIRIEFLTLQVTALVPTITGMGDYVSGRVRRAICGQVHSVRSNA

SEQ ID NO: 69798 - protein, 144 aa, Zea mays
  Coding DNA Sequence Number=SeqID_28019
  Gene Ontology: Mol. function=phospholipase D activity; Cellular component=membrane; Biological process=phosphatidylcholine metabolic process
  Homolog annotation: Hit_ID=Q8SAG6; Match level="QueryCoverage=66%, HitCoverage=11%, E-value=3e-22, Identity=61%"; Hit description =Phospholipase D lambda
MEPKAGSTDRLMACLPPWRLSQHLSGCLEATHVAVTDPAHVKVSPSTPDPTRSVERLMGVLAAMEVELALEWLSRGDACDGNRSGTEDARADEVLVLDREGDRHGGVGAVQAERLVLRRVGGGRSGTPPHRCVPPTPRRHRCLH

SEQ ID NO: 69799 - protein, 40 aa, Zea mays
  Coding DNA Sequence Number=SeqID_28020
MAGAALQLGTGLPVMLGRAPLSMAPKELLSIAPNRLKFLQ

SEQ ID NO: 69800 - protein, 186 aa, Zea mays
  Coding DNA Sequence Number=SeqID_28021
MEQQDSSSLPQQEMESTRRLSPVPLLEMPPATPQGVPAVGGADGGDPDDNNDVGGSSSHNTALAEEQELGDGSLGPSLVTPLVDVTFTTHLTPCCVGLSTDTLGQSSEGNPRLNNAANLVVVLNTELDHSLNELSRARAEITELRAQRVEHRHREYGSPAPLGLSTCTAHRHEGTMLMARLTIEPS

SEQ ID NO: 69801 - protein, 44 aa, Zea mays
  Coding DNA Sequence Number=SeqID_28022
NEQSEVPECVVGDLPEQQPGEGKGLRLFPERLSIRTYLGSDNPR

SEQ ID NO: 69802 - protein, 395 aa, Zea mays
  Coding DNA Sequence Number=SeqID_28023
  Subcellular localization annotation: CTP_CleavageSite=61; ConfidenceScore=5.64e-01
ISNPSPPNTILNHSQGLSLTSTPDSATTSSTYRRFSQGDESFSYQARQGGCSKTQRWSDVSSSGGSSRELCSFKDALVSGSRRLPTPIQAPSHATTSSRAPEAVKEREKEKVGESLVVQNQSVGSQRDEFGWQVVERRKKTQRELLPYKTYGAYEAVWRIEARNEAAPPLPLAPFRESEDDQDHNEQDPHLRRRGNAGAAGDSRRPLQFRLGPRLPLGRAHDMHRSREEDPLPLRVLGIDCNNDTTGRHEALQLRVPGKGGDDETTRGHEMFEVLTLRAARKARHEEMVGSQEMQSTSCMGNEEDMAADEREIPIPEAVGQRAVENLNRFSSFRSSGPLGWIAPWTPQLDVSAGLLNSLGSSLPHQASRDMNYPPVESLGSIWPPLPQQISLFGL

SEQ ID NO: 69803 - protein, 68 aa, Zea mays
  Coding DNA Sequence Number=SeqID_28024
MDGGGGSRFVWAEREIGRESWTEGANGREEVGEQGTGFKRGAGARTWPENARSRLWARGFSIQIQIKY

SEQ ID NO: 69804 - protein, 86 aa, Zea mays
  Coding DNA Sequence Number=SeqID_28025
MEWVFLSRKILEDISVEYLDNISGQNLKGVTREISGRYFWKEIEEPYWNTTPLKKNEGGTLESWGFELLEVPHNKGVTGPPAAVVA

SEQ ID NO: 69805 - protein, 153 aa, Zea mays
  Coding DNA Sequence Number=SeqID_28026
MEDIVDAGAFWKVSKISDGANALGDLERIGEPRARVCAGQGGDTRGRTEGPKRRRTDQRGDRSSRESCSNVDPTGKATAAMEPTMVVMKGEGDGAGIAGQGPTPGLAGWCDAGDGRSAAKERGGALLDARAGRDGVVNGDAPPLDMSQGCGDG

SEQ ID NO: 69806 - protein, 443 aa, Zea mays
  Coding DNA Sequence Number=SeqID_28027
  Gene Ontology: Mol. function=ubiquitin thiolesterase activity; Cellular component=nucleus; Biological process=ubiquitin-dependent protein catabolic process
  Homolog annotation: Hit_ID=Q2QQM3; Match level="QueryCoverage=75%, HitCoverage=31%, E-value=1e-175, Identity=83%"; Hit description =Ubiquitin-specific protease 12, putative, expressed
MFVSFTGLTGPCAHSSALRSRVWHVLVQWEHLLTGEPLNNLRARFPSFQLADELFIEGGRDVMLEDGDIICFQKAPVPDGDAQVRYPDVPSFLEYVHNRQVVHFRCLDKPKDDDFSLELSKLHTYDDVVERVAHQLGLDDPSKIRLTSHNCYSQQPKPQPIRYRGVAHLLDMLVHYNQTSDILYYEVLDIPLPDLQRLKTLKVAFHHATKDEVVVHSIRLPRNSTISDVITDLKTKVELSNPDAELRLLEVFYHKIYKIFPPHEKIENINDQYWTLRAEEIPEEEKNLGPHDRLIHVYHFMKDPNQNQQIQNFGDPFLMVIREGETAAEVMERIQRKLRVPDDEFSKRRDVYGAWEQYLGLEHTDTTSKRSYTSNQNRHTYEKPLWEQWQRLYNGFGIILRAVEKRTRITRSDSRVLRPVKQNLLKLTYPLYQKGRLQVFYYT

SEQ ID NO: 69807 - protein, 351 aa, Zea mays
  Coding DNA Sequence Number=SeqID_28028
  Gene Ontology: Mol. function=ubiquitin thiolesterase activity; Cellular component=nucleus; Biological process=ubiquitin-dependent protein catabolic process
  Homolog annotation: Hit_ID=Q2QQM3; Match level="QueryCoverage=50%, HitCoverage=18%, E-value=3e-89, Identity=80%"; Hit description =Ubiquitin-specific protease 12, putative, expressed
  Pfam annotation: Domain name=UCH; Domain location=35-213; Score= -65.4; E_value=0.018; Accession=PF00443.19; Description=Ubiquitin carboxyl-terminal hydrolase
MDAVDGDRVVHGRLGAGRRVVGSRGSGTLAAVVDEGGVGEMSRARQRCWFGGGRGSGLPAAVVDEGGVGEAGHSCQWGRTWHGRGRLGPRVAREETQAEASRPRVAQVEARAEASEPRVVRVTAQGGASGPREKRAVLVHSGGVHGGHYYAFIRPTLSDQWYKFDDERVTKEDTKKALEEQYGGEEELPQINPGFNNTPFKFTKYSNAYMLVYIRESDKEKIMCNVDEKDIAEHLRIARDEDLKEQIGKNIYFDLVDHEKVHSFRIQKQLPFTSFKEEVAKEFGIPVQFQRFWLWAKRQNHTYRPNRPLTPHEEAQSNTSIIVVDNCLRRPMEGLRQQQPWARQGRLDKDS

SEQ ID NO: 69808 - protein, 221 aa, Zea mays
  Coding DNA Sequence Number=SeqID_28029
  Gene Ontology: Mol. function=nucleic acid binding
  Homolog annotation: Hit_ID=Q2QQM2; Match level="QueryCoverage=52%, HitCoverage=68%, E-value=2e-53, Identity=95%"; Hit description =Expressed protein
  Pfam annotation: Domain name=Alba; Domain location=85-154; Score =69.3; E_value=1.2e-17; Accession=PF01918.11; Description=Alba
MQAMRPAAEGEAQEQAVRAEADEVKREVAKAHEEEEAVPEEKDVAVVGEEAEAEAETETEGEAEAEVEVEAEVEVEAEAGASSAKKNRIQVSTNKKPLYFYVNLAKRYMQNYDEVELSALGMAIGTVVTVAEILKNNGLATEKKILTSTIGTKDEAKGRLVRKAKIEILLCKSENFNSIMSSKKSERPKPPAEEEIKRLAAHHTAQLGLLIMGHRGSLIKY

SEQ ID NO: 69809 - protein, 92 aa, Zea mays
  Coding DNA Sequence Number=SeqID_28030
MGYKLLLVPGIREYRNSLSLYVYNMTNLEFFEDAARARAPTLMFIGVLQRTIELEQLLSLRSSMETHKPSIVGYDEDNNVIFPLDKRRHDPT

SEQ ID NO: 69810 - protein, 116 aa, Zea mays
  Coding DNA Sequence Number=SeqID_28031
MADQLQALATGPFKNKIGFLTRPLTPFPDDEGAQGDTFDAQPEAHPAQQMPPPPPPPQQGQYWQPASRYFDPYFQQMHQGLQTHIDGQFQGMMSHVDDRFDHMQSTFDGPFSDLHD

SEQ ID NO: 69811 - protein, 331 aa, Zea mays
  Coding DNA Sequence Number=SeqID_28032
  Gene Ontology: Mol. function=ubiquitin thiolesterase activity; Cellular component=nucleus; Biological process=ubiquitin-dependent protein catabolic process
  Homolog annotation: Hit_ID=Q2QQM3; Match level="QueryCoverage=91%, HitCoverage=26%, E-value=1e-138, Identity=78%"; Hit description =Ubiquitin-specific protease 12, putative, expressed
  Pfam annotation: Domain name=MATH; Domain location=92-214; Score =68.2; E_value=2.6e-17; Accession=PF00917.16; Description=MATH domain
  Pfam annotation: Domain name=UCH; Domain location=229-331; Score= -59.1; E_value=0.0075; Accession=PF00443.19; Description=Ubiquitin carboxyl-terminal hydrolase
  Pfam module annotation: Pfam domain module=MATH::UCH; Domain location= 92-214::229-331
MRVLGCAPRFTRRAGSDSSARALPSSQQQQGDEMLVPHQELPVAGPEPAPQPMEGEDLSLLSPSVLVLTEPANTAETQPPEDPQTSRFTWTIESFSRLNTKKHYSDAFVVGGYKWRVLIFPKGNNVDHLSLYLDVADSGSLPYGWSRMYVDHQSHTELIIVIVPFVIVHDTQHQFNARESDWGFTSFMPLSDLYDPNRGYLVNDTVVIEAEVAVRRMVDYWTYDSKKETGFVGLKNQGATCYMNSLLQTLYHTPYFRKAVYHMPTTENDMPSGSIPLALQSLFYKLQYSDNSVATKELTKSFGWDTYDSFMQHDVQELNRVLCEKLEDKMF

SEQ ID NO: 69812 - protein, 98 aa, Zea mays
  Coding DNA Sequence Number=SeqID_28033
MPLLPSLKLDLFHRVAAAGTGTGAAVVRFPFGSIPVTHLYYFFGQTAATAEAGSVDSSDAENPGLDDVDVANMHMEATDSQLIDALYFSLTVDRRECI

SEQ ID NO: 69813 - protein, 211 aa, Zea mays
  Coding DNA Sequence Number=SeqID_28034
MWEYTGDNDSNRHSAKNLMREELTSHVLAITVGVRSDFLDESGPLPFNQARLKDLGLCSIKVSRPPLLEDVAIKSEKKWKREVEQSTMAVCKKRHLEMKRTRLTRAGLGWSITSSTDMEDMTSTEVKASSNAQPERVWDAVEVVLPVARGEHPRERLGTASSSSSPVAITERGIAGEAGALPSMVTIMVECHEEARTVIVPTPTASLVATS

SEQ ID NO: 69814 - protein, 60 aa, Zea mays
  Coding DNA Sequence Number=SeqID_28035
MANDVANTNPASLDTVGPNGDEGTLHLESQQRTIVSLRKSANRFFAWEPTLNQFELDNPG

SEQ ID NO: 69815 - protein, 816 aa, Zea mays
  Coding DNA Sequence Number=SeqID_28036
  Gene Ontology: Mol. function=potassium ion transporter activity; Cellular component=membrane; Biological process=potassium ion transport
  Homolog annotation: Hit_ID=Q1T6Z3; Match level="QueryCoverage=99%, HitCoverage=100%, E-value=0.0, Identity=77%"; Hit description =Potassium transporter
  Pfam annotation: Domain name=K_trans; Domain location=130-816; Score =1241.9; E_value=0; Accession=PF02705.7; Description=K+ potassium transporter
MDDGGIQEEPPSTRFLTPTRSGGTRWVDGSEVDSSESTPSWSLEDERSAGGVSSNGGAAAASRVSSGAFRRRFGKRPRRVDSLDVESMNVRGAHGHSSKILIFYSRIMNPMAKNSETHFAQEISMLSTLAMAFQTLGVVYGDMGTSPLYVFSDVFSKVPIKSEVEILGALSLVMYTIALIPFAKYVFIVLKANDNGEGGTFALYSLICRYAKVSLLPNQQRVDEDISSFRLKLPTPELERAISVKDCLEKKPLFKNILLFLVLMGTSMVIGDGILTPSMSDAVVIVSIVVLLLLFSVQRFGTGKVGFMFAPILALWFINLGSIGIYNLVKYDISVVRAFNPVYIYLFFETNGIKAWSALGGCVLCITGAEAMFADLGHFSVKSIQVAFTAVVFPCLLIAYMGQAAFLMKNPLVVERIFYDSVPGVLFWPVFVIATLAAMIASQAMISATFSCIKQAMALGCFPRIKIIHTSKKVMGQIYIPVMNWFLMVMCIIIVATFRSTNDIANAYGIAEVGVMMVSTALVTLVMLLIWQTNLFLVLCFPILFGAVEFVYLTAVLSKIQEGGWLPLAFSSLFLCIMYTWNYGSVLKYQSEMRGKISLDFILDLGATLGTYVPVPYVPLEERFLFRRVGQKDYHMFRSVARYGYKDVRKEDHGFFEQLLVESLEKFLRREAQEIALEASTMEAERDDISVVSEVPQTPAGDGDLQTPLLSDQRSGDNNRMAATDGSDPVLPSSSMSLEEDPGLEYELSALREAMASGFTYLLAHGDVRARKESVFTKKFVINYFYAFLRRNCRAGTATLKVPHSNIMRVGMTYMV

SEQ ID NO: 69816 - protein, 217 aa, Zea mays
  Coding DNA Sequence Number=SeqID_28037
MVKVTEGGEEDTLLHLCLLEVLLLKHLLVKPPVGHVLARGLLVLALAPTRLVGTWASLRLTLLGAKSDEVVRVATVVASILGLTTSPVLPVVVKPRELAGHKCHLLIPRLSTCSSVMVNKEDKANIAGAHLVPDRLEPRKHSVNGLSSQLNKVLVLSLVNLKESGLYMIIALMEFLMGGPDLIRKNVNLLVWVVCPIEEWRFANTSFHVTFYESRTD

SEQ ID NO: 69817 - protein, 36 aa, Zea mays
  Coding DNA Sequence Number=SeqID_28038
MGIKGYPQPRAPKINRKQGLCSREILVIGLRLCDAG

SEQ ID NO: 69818 - protein, 769 aa, Zea mays
  Coding DNA Sequence Number=SeqID_28039
  Gene Ontology: Mol. function=binding; Cellular component=cytoplasm; Biological process=embryonic development ending in seed dormancy
  Homolog annotation: Hit_ID=Q6RUS5; Match level="QueryCoverage=97%, HitCoverage=61%, E-value=0.0, Identity=72%"; Hit description =Transducin/WD-40 repeat protein
  Pfam annotation: Domain name=HEAT; Domain location=524-556; Score =17.0; E_value=0.068; Accession=PF02985.12; Description=HEAT repeat
  Pfam annotation: Domain name=HEAT; Domain location=572-607; Score =12.5; E_value=1.3; Accession=PF02985.12; Description=HEAT repeat
  Pfam module annotation: Pfam domain module=HEAT::HEAT; Domain location=524-556::572-607
MAYGMMKTGCVALVLCLNISVDPPDVIKISPCARMECWIDPFSMAPPKALESIGKTLHSQYERWQPKARYKLQLDPTVEEVKKLCNTCRKYARSERVLFHYNGHGVPKPTSNGEIWVFNKSYTQYIPLPITDLDSWLKTPSIYVFDCSASGIIVKAFLEMKVIMIYGLVFVFVPGLSNIHNDFCLLQRLDWSSSSSASSRKDCILLAACEAHQTLPQSAEFPADVFTACLTTPIKMALHWFCKRSLLRGSLDLSLIDQIPGRQNDRKTLLGELNWIFTAITDTIAWNVLPHGMASAMDAWDMAAEICLSKLPQLIADPNAEFQPSPFFTEQLTAFEVWLDHGSEDKKPPEQLPIVLQVLLSQSHRFRALVLLGRFLDMGPWAVDLALSVGIFPYVLKLLQTSAMELRQILVFIWTKILSLDKSCQVDLVKDGGHTYFVRFLDSLDAYPEQRAMAAFVLAVIVDGHRTGQEACMNAGLIDVCLRHLQPENPHDSQTEPLLLQWLCLCLGKLWEDFPDVQLLTLQTNTPEIVLCLLSEPQPEVRAAAVFALGTLLDTTSSNGADDDSDYDEKVKAEINVVRSLLQISSDASPLVRSEVAIALTRFALGHNKHLKSVAAEYWKPQSNSLLKSLPSLANINNPNNVYSPNNILQGSIGPVLRVGSDSSAAGRDGRMSTSSPIATSSIMHGSPQSDDSSQLSDSGLLLRENASNGGPGYTRSRPVDNVIYSQFISTMCSFAKDPYPRIATIGRRALSLIGVEQVVMKNTRFNSG

SEQ ID NO: 69819 - protein, 221 aa, Zea mays
  Coding DNA Sequence Number=SeqID_28040
  Subcellular localization annotation: CTP_CleavageSite=42; ConfidenceScore=5.19e-01
MTTTTTIGTSQDCIRNSHRCILQAIHIVISTTTTTTTDVAMLSNMANKMSNTMATTLDVELVNTTTTTMADCITHNIVFNTVGWISDDPNIPMKETLVLRSNNWELRSRSSIQSETRQCPPVNWLKDEGVLCAPKRLRAVFVKLEKFQGKLVSSSSKRGSVSSACWWQNNFRSLAWHRPRKPPTNRGCRNNKEGLRAMNKAVAATKGTTNQHGHNADLGTQ

SEQ ID NO: 69820 - protein, 260 aa, Zea mays
  Coding DNA Sequence Number=SeqID_28041
  Gene Ontology: Mol. function=binding; Cellular component=trans-Golgi network; Biological process=protein transport
  Homolog annotation: Hit_ID=Q5ZEA1; Match level="QueryCoverage=60%, HitCoverage=17%, E-value=2e-76, Identity=91%"; Hit description=Beta adaptin-like
MSPLGASWLHSWAVLFGVGVAASDARVRFDAEEEVRGVLPEARATAMQFVVAGEHVVEARVGAEPGRRQMWLLDVEACMKRSEVEAEMREATVGTRRQGLPARAGRKSEVTDLKQQLRQLAGSRAPDADAQRRDVFKRVISCMTAGIDVSAAFGEMVLCSATSDVVTKKMCYLYVGAHARAHPDLALLTINFLQRDCQDQDPTIRGLALRSLCSLRVPNLVEYLVTPLTTGLKDPSAYVRMIAAVGAAKLYHISATACFL

SEQ ID NO: 69821 - protein, 311 aa, Zea mays
  Coding DNA Sequence Number=SeqID_28042
  Gene Ontology: Mol. function=sequence-specific DNA binding; Cellular component=nucleus; Biological process=regulation of transcription, DNA-dependent
  Homolog annotation: Hit_ID=Q6VBA4; Match level="QueryCoverage=99%, HitCoverage=100%, E-value=4e-76, Identity=49%"; Hit description=Heat shock factor RHSF13
  Pfam annotation: Domain name=HSF_DNA-bind; Domain location=25-199; Score=144.7; E_value=2.4e-40; Accession=PF00447.8; Description=HSF -type DNA-binding
MDGLHTELALGLLECGVVGSGGETAPFVAKTYQMVCDSRTDALVRWGRGNNSFVVADPAGFSRLLLPCFFKHSNFSSFVRQLNTYGFRKVHPDRWEFAHESFLRGQTHLLPRIVRRKKRGGGGGACSSGGDAPQAGCCISTMGEDHRPEADPDEKQEADAEAALLEEVQRLRQEQTAIGEELAQMSRRLQATERRPDQLMPAEKKRRRMQLASQSQPARPPLPPAPPPPVLHPLLALGGAAAKGLDGWQWAELQKPSVVLPAFDFDPAASCCGAQHAPNLGGAGIIGMGLTADETTVETPFPFCLLGQGFF

SEQ ID NO: 69822 - protein, 163 aa, Zea mays
  Coding DNA Sequence Number=SeqID_28043
  Subcellular localization annotation: CTP_CleavageSite=34; ConfidenceScore=5.03e-01
MTVAAPGPLAHRTLSGVHQTVRCTSRPLEQTMCRAKIARPTVGAGDRWLTGQSGAPPDSPSGPWDRPLGADSTDPTALSPTWRFGRQTLGGCSARRALCGGVDGLRPRVGLSMNWKQERGFLRCTERSASGGRMVHVCAEWRAFANDIWISSTGRDPVREERS

SEQ ID NO: 69823 - protein, 118 aa, Zea mays
  Coding DNA Sequence Number=SeqID_28044
MAGGCSCRTMDRGLRGWRHQRETRRMAAAAWKTADQGLRGWLYEGEKGLCEMSVGVEIRGNKASGYKIIVATDPKGFDDPVCPLPSGRKHTMSKEMIKHMALSKDKGKLEQKPNQERS

SEQ ID NO: 69824 - protein, 156 aa, Zea mays
  Coding DNA Sequence Number=SeqID_28045
MVKEKKRKQHPATQPPLGDEGEGRCGRNARKEKAEPPERQVPRTIENTREPDETGPKESIAGGTSSSSGLTLSSIGPVARCVGEAREVHTEAGRAALAAALGESGGVNAAIAQIGADGETAWPLGPRPRRHGPGGGRFYRFQRESAAGTGGGGRRA

SEQ ID NO: 69825 - protein, 435 aa, Zea mays
  Coding DNA Sequence Number=SeqID_28046
  Homolog annotation: Hit_ID=Q10QG0; Match level="QueryCoverage=14%, HitCoverage=22%, E-value=6e-10, Identity=58%"; Hit description =Uncharacterized plant-specific domain TIGR01568 family protein, expressed
  Pfam annotation: Domain name=DUF623; Domain location=375-434; Score =80.5; E_value=5.4e-21; Accession=PF04844.4; Description=Protein of unknown function, DUF623
  Subcellular localization annotation: CTP_CleavageSite=47; ConfidenceScore=5.57e-01
PFSSTRSPQCARKLVDKSPQYRRDSAAGRLKQRLARILTRSTCTTNNAAAASSGGTATATAFVSLAKTNNAHTAASSSHPEPEAPPSPYFCTPCTYDYERPKADRGTRPRRSRTRSASLVHISVDCTGGAASGRRSAHSDAPLLQHLLSEQVPARDVVGGTKQSKGGGGRSKLTTARSSPSASRRHCSSSSSSWGRARARRPSSTPTPYSWSSSSRSSATATDDELAPFSGSDDEAGGQAADMRTLFSSLSFSSDPTSSEFYRTNGGRSGNGNASRRSHRNTASRRRGRRARAPRRALSRSSGGDPAAPPDAFRPLVSVETTRRTTERSERSKEDKGLNNAKKLTMTMLGAAAAAEEEEEEAIAAGAGMAVVKRSSNPYLDFRSSMVEMVVERRIASVGKMEELLGSYLSLNSPRHHPAILAAFEDVWEAVFGEE

SEQ ID NO: 69826 - protein, 253 aa, Zea mays
  Coding DNA Sequence Number=SeqID_28047
MAFSATTTVAEVEHIGSLPDQAPINFSMNFGYVIVDAMAGRALLYWLITTWTDGTGPGSQPQRALARSSFTARPWGPPALTCAIVYRPFAHARSQRRAPTCRPLESRNPARAFAPDGGKSLSAGVADARASLGSGTVRACEWAAAAIAGCAAWTDQRRAYGADACAPGDFGFGDAGLRMRTARVASRRVLRLFAHAGRWGCAAPGRRGVGRRISTPMCARGPCACNCGVASCAPGANRARAVVRSCPSAAAAV

SEQ ID NO: 69827 - protein, 143 aa, Zea mays
  Coding DNA Sequence Number=SeqID_28048
  Gene Ontology: Mol. function=sequence-specific DNA binding; Cellular component=nucleus; Biological process=regulation of transcription
  Homolog annotation: Hit_ID=Q9FE35; Match level="QueryCoverage=84%, HitCoverage=34%, E-value=7e-52, Identity=76%"; Hit description=DNA -binding protein WRKY2-like
  Pfam annotation: Domain name=WRKY; Domain location=35-94; Score =142.3; E_value=1.3e-39; Accession=PF03106.6; Description=WRKY DNA -binding domain
MGRIPPKANKSKKKAEKRQRQPRVAFLTKSEVDHLEDGYRWRKYGQKAVKNSPYPRSYYRCTTPKCGVKKRVERSYQDPSTVITTYEGQHTHHSPASLRAGGAHLFMSSAHALPPHLTMPSSSFRPDLNLMSMMHPAMVGREP

SEQ ID NO: 69828 - protein, 58 aa, Zea mays
  Coding DNA Sequence Number=SeqID_28049
MKEFCDTGDVLVAAAAPEVVGMVVVTGETEGWGGSSDILGSVRSSDTRLLGTGLRRSW

SEQ ID NO: 69829 - protein, 127 aa, Zea mays
  Coding DNA Sequence Number=SeqID_28050
MGLMVGVALSHVGSHTYCNEWSNPAHYKLGHHDVLHWSGSSDQTPDVEVARVSGVNLRCPCVLLVKWSVPKKIFEIVRALCACLIFLDMSSMNLRLPKKIFYHSVKLIVAIRSTLTSVIALTWCTNY

SEQ ID NO: 69830 - protein, 326 aa, Zea mays
  Coding DNA Sequence Number=SeqID_28051
  Gene Ontology: Mol. function=ATP binding; Cellular component =membrane; Biological process=apoptosis
  Homolog annotation: Hit_ID=Q8H8A3; Match level="QueryCoverage=84%, HitCoverage=79%, E-value=3e-98, Identity=68%"; Hit description =Putative disease resistance protein
MELVVGASESTMNTLLGKLGNLLAQEYAMLRGVRGDIQYINDELASMKAFLLDLARDNQDNRRKDWMKQIREMAYDCEDCIDDFAHRLPKDSSNLLNTKCWPRWMATLIYDLTTCWPRREIACNIAELKVRAQLIAERRVRYGVKEPDSSGSMPADAPPENIAEDQLARRDLTIKEPVGMGHVMADLERWVKHDEQGAGGQRAVASIVGFGGVGKTTVAMALYKKVMKDFDCRAWVTVSQNYDIEAVLREILKQINPDYMHQDGGTAATISEKTKTNRTASASIACKLLNRALNHRTGHTHGGGTAGSSKKNDTSKAVMEHLKGKS

SEQ ID NO: 69831 - protein, 141 aa, Zea mays
  Coding DNA Sequence Number=SeqID_28052
MGLSTAARAYWRSIERTGLGGSDESGVSLDEVDSSEDKGFSEVLCVNHVIFFLFPMAPFSFQEGPKVFNGAKGCNFHFSLRSPVQYKGQFPPYVKYEKAPESSLRGCRAKIPPKSKVKKVQSRSEGDAELSSKVILKGMQS

SEQ ID NO: 69832 - protein, 101 aa, Zea mays
  Coding DNA Sequence Number=SeqID_28053
MAVAQVNGGGTARVRRTTGERGQGKPEGEGVNWGMYQAVDVKAKLTEATVTMGPERRRWNKLESTTNARQFFPDVRMALGSGGGSTDVRMREGESEWGSGS

SEQ ID NO: 69833 - protein, 255 aa, Zea mays
  Coding DNA Sequence Number=SeqID_28054
MALASGGGSSSNPSPAMFSLSSLLTIIEEQVESLGDEELVLVASRFMRLAHATITIVDARESGSTPLVSTNPGEVQEGGAQEEDEGLENTCLMDSGCSRHMTESFRWLSNLDPMISKEYITFGDKSRATKVMTSQLGDLLHKNTVGLARVCSFWEHDKMSETIFVEEEHNDVDCSDLEPSPLAAPVEPASTTSVDGPDITSSMALGPFEPKPAESGGKYTKDVLKKFDMGEAKPLSKPISMMTPLDANEDGEPVD

SEQ ID NO: 69834 - protein, 87 aa, Zea mays
  Coding DNA Sequence Number=SeqID_28055
MAKLKVMRVHVDGPGAVKDECWELTEGPESPENPPSAMDDRFFDGVWPQNSAVADSVGIRGGLWRHNEGCVEVKQLGVERVTIRSKS

SEQ ID NO: 69835 - protein, 592 aa, Zea mays
  Coding DNA Sequence Number=SeqID_28056
  Gene Ontology: Mol. function=ATP binding; Cellular component =membrane; Biological process=defense response
  Homolog annotation: Hit_ID=Q8H8A4; Match level="QueryCoverage=99%, HitCoverage=76%, E-value=0.0, Identity=69%"; Hit description =Putative disease resistance protein
  Pfam annotation: Domain name=LRR_1; Domain location=242-263; Score =9.6; E_value=4.5; Accession=PF00560.23; Description=Leucine Rich Repeat
  Pfam annotation: Domain name=LRR_1; Domain location=265-286; Score =7.5; E_value=11; Accession=PF00560.23; Description=Leucine Rich Repeat
  Pfam annotation: Domain name=LRR_1; Domain location=434-456; Score =1.3; E_value=1.6e+02; Accession=PF00560.23; Description=Leucine Rich Repeat
  Pfam module annotation: Pfam domain module=LRR_1::LRR_1::LRR_1; Domain location=242-263::265-286::434-456
MAGLVACNLNQPISYWEELGKLLPAREISNTRGAPNQVNSLTLDGVKRILDCCYNDLPGDVKTCLLYLGMFPKGCKISRKCVTRRWIAEGFVSRRHGLMEEEVAETYFNQLLRRKLIRPVDHSSNGRLKTFQAHDMVLDYIASKASEENFITVVGGHWMMPAPSGKVRRLSMQSTSRPKAAAGDYSTTRGMNLSQVRSLAAFGSLAQLPFQAFNNRIMQVLDFQGLKGFKNRHMKHICEMLVLKYLSLRGTDITEIPSRIGKLEYLETLDIRETDVVELPKDVKQLKRISSILGGNKHKNPRKGLRLPQEKSRKKKRRRTTDDDGMMKALRILSGIEINENTDVSGLHQLTELKKLTVYMLNVLDEYRADIFEQLLSSIEYLCSCGLQTLAINDEDSKFTQSLDKMSAAPRYLVALELSGKLVKPPEWIDKLLTLNKLTLSITILRTPTFEKLRSLPLLYSLTFSFSAVKQDQQDDIKEILEENKSTTDGEIFVPKGFQNLKLLRFFAPHIPKLGFSDNAMPVLETIEARFKAFEGLFGVDTLENLKGVHLREAKVGENGKEIADINEILVHDLKDSTEGLKAIVDHTFITY

SEQ ID NO: 69836 - protein, 201 aa, Zea mays
  Coding DNA Sequence Number=SeqID_28057
  Gene Ontology: Mol. function=ATP binding; Biological process=defense response
  Homolog annotation: Hit_ID=Q8H8A4; Match level="QueryCoverage=31%, HitCoverage=8%, E-value=6e-12, Identity=59%"; Hit description =Putative disease resistance protein
MSRENTSGPAHQIELVPRGASVGAKAEHSIDQSNSTIIKHVLAQAHQVKGTLARASSEVFSYSLQRGEAKAHAKQGCLLAAPYTCPKGSDGEVRVPTKSRELPREVKEVNTNESHTRYLILVDDIWSAETWKRISKSLPDNDKGSRIIVTSRLRAVGATCCQNGKDHLCAVDFLRDEDAGHSVEVFLNRLRATTITWSRKL

SEQ ID NO: 69837 - protein, 99 aa, Zea mays
  Coding DNA Sequence Number=SeqID_28058
MTKVMLAEGVQNSKNGRSIFREDTRRAQEEACQAREEARLAREEAHRNREDSEYKKTHLQAQTQHPKNRSFLNILMNDIHPYLSGQVIVNYGMYHTPLV

SEQ ID NO: 69838 - protein, 112 aa, Zea mays
  Coding DNA Sequence Number=SeqID_28059
  Subcellular localization annotation: CTP_CleavageSite=55; ConfidenceScore=5.71e-01
MGTAAAAQPLGSRRCACLVEQQSSSCFGNNSRCRVPLRICRRARASGSSRHAPPRGATVVRTPRGTVIARASGSSLRAPLGNHLRSYVGGIPQLLEAQGLYYTMYIYIQIRI

SEQ ID NO: 69839 - protein, 226 aa, Zea mays
  Coding DNA Sequence Number=SeqID_28060
  Gene Ontology: Mol. function=nucleoside-triphosphatase activity; Biological process=defense response
  Homolog annotation: Hit_ID=Q2QZF1; Match level="QueryCoverage=92%, HitCoverage=16%, E-value=4e-15, Identity=32%"; Hit description=NB -ARC domain containing protein, expressed
  Pfam annotation: Domain name=NB-ARC; Domain location=2-222; Score= -132.6; E_value=0.079; Accession=PF00931.13; Description=NB-ARC domain
MTACELVRIKQPVGPDVERLGSWVVDVDKKMNNKLGVLSVVGYGGQGKTTIAMELYRKFGPQFDCRAMVTVSQNSEPEIVWRNILSQLKQQAENGVKEGKDSSTRSRMERKIQVIRSIVNRLRHPCRNEDEDGSTLLGRHRQNHQAGLVGNTLSQVKNNGEQHGTSLEKKAPVTGSIWSRLIMLLSRKGGVDGGQQIQAELRSYLEQKRYLRDPSLYLAFSLLGTP

SEQ ID NO: 69840 - protein, 755 aa, Zea mays
  Coding DNA Sequence Number=SeqID_28061
  Gene Ontology: Mol. function=protein binding; Cellular component =membrane; Biological process=defense response
  Homolog annotation: Hit_ID=Q2R4B6; Match level="QueryCoverage=85%, HitCoverage=84%, E-value=1e-163, Identity=49%"; Hit description=NB -ARC domain containing protein, expressed
  Pfam annotation: Domain name=LRR_1; Domain location=371-392; Score =1.8; E_value=1.3e+02; Accession=PF00560.23; Description=Leucine Rich Repeat
  Pfam annotation: Domain name=LRR_1; Domain location=401-426; Score =3.7; E_value=58; Accession=PF00560.23; Description=Leucine Rich Repeat
  Pfam annotation: Domain name=LRR_1; Domain location=428-449; Score =3.3; E_value=68; Accession=PF00560.23; Description=Leucine Rich Repeat
  Pfam annotation: Domain name=LRR_1; Domain location=451-472; Score =5.4; E_value=28; Accession=PF00560.23; Description=Leucine Rich Repeat
  Pfam annotation: Domain name=LRR_1; Domain location=582-602; Score =1.4; E_value=1.6e+02; Accession=PF00560.23; Description=Leucine Rich Repeat
  Pfam annotation: Domain name=LRR_1; Domain location=604-626; Score =2.5; E_value=97; Accession=PF00560.23; Description=Leucine Rich Repeat
  Pfam annotation: Domain name=LRR_1; Domain location=691-711; Score =8.2; E_value=8.4; Accession=PF00560.23; Description=Leucine Rich Repeat
  Pfam annotation: Domain name=NB-ARC; Domain location=1-286; Score= -7.0; E_value=7.7e-10; Accession=PF00931.13; Description=NB-ARC domain
  Pfam module annotation: Pfam domain module=LRR_1::LRR_1::LRR_1::LRR _1::LRR_1::LRR_1::LRR_1::NB-ARC; Domain location=371-392::401 -426::428-449::451-472::582-602::604-626::691-711::1-286
METQTRSLTEKTKKDATTTDLGNSPGYQGASPAGAAQRRDHADLARWCDLDDSAPAWPQRGAARRGRSPAGTGTRLQREHASLTRGSGGTNRQYLLLIDDVWSESSWLYIKKCLPENNKSSRIIVTTRIQAVATTCSPRDKDLHLIHTVKSLEEDEARELFEKTLDECKGTGYDHLNHRKIPERVWKMCGGLPLAIVTMAGLVASDKQQGAHKDWNEVCDSLFPNKEVCHKPEEFMRIINHCYHDLDNDLKTCSLYLSIFPKGRKISMKRLTRRWIAEGFVSEKQGLSVEVVAETCFNQLIERKLIRAVEHNSSGRVKSCQVHDMVLEYLISKAAEEDFITVVGSHWSMPTHSNKVRRLSVHSSDSKRAQHVDSMNLSHVRSLTVFESLDKLHFKSLKTRMVQVLDLQGCRGFRESHVKVSDISEMVLLKYLCLRSTDIKYLPRNIHKLKYLETIDIRETGVQRLPATVGKLQRIKNILGGDKRARKTLKLPREFKGTTRTLRILSGVEIAEGSTTAASDLKYFTGLRKLAIYKIHQNEDIFRDLLSSIQYLTGYSLQTLKIDDESSDFHKTLDSMSSYPTDLSTLELSGMLLKLPLWIKELHRLVKLTLSATALRTDNLKVLSNLGSLFSLTFSISEEQDPALGAILQRNKSESGGEIFFPAGKFSKLKLLRIFVPLLPLLNFSSKAVPELERIELRFNRLEGLHGMENLERLNDVLLTVDGKRSEPTKSILDDLKEVSVSSKYTVIVNESHHD

SEQ ID NO: 69841 - protein, 123 aa, Zea mays
  Coding DNA Sequence Number=SeqID_28062
MGSARGQGVGQHGSRMEARGESGVRDCRGSSWSAEAPATHQRLLELDTTSIIAWIHDLAASNTQAFLCFRNSQASAEFYKIFKIVLSCGVWLEQKLLKGSGLNLGFSSPVLRGLVFGVLAQFF

SEQ ID NO: 69842 - protein, 131 aa, Zea mays
  Coding DNA Sequence Number=SeqID_28063
MVTDTPRGLPQMISALPRTPIALPLESARWRRGKPRRRAESDGGAVSLLSIPLDVFDGSRGAKLVPSQHMERGAGNNAGVLCPCGRSPHPRDSANSPTNSVEDPNNPVERLSACGSQPVQRSIHTACIRGP

SEQ ID NO: 69843 - protein, 90 aa, Zea mays
  Coding DNA Sequence Number=SeqID_28064
MRKGVEEVGPPEIQFFWAVAYWPVGMGYYTYVSLDVARRETEEALNKSDGESSWAMGVGRPKKIAHELRTFLMEWPRFTRILLRNVPHTL

SEQ ID NO: 69844 - protein, 96 aa, Zea mays
  Coding DNA Sequence Number=SeqID_28065
MAPLLLGCCADIVWSRMITGVQASFPRRWWAGYGLGSPAIAHRSHIAAANPLTAGGSGICATNRQIGSPVGRFTSSGDGTAVGGCAVVLGAGLGRR

SEQ ID NO: 69845 - protein, 55 aa, Zea mays
  Coding DNA Sequence Number=SeqID_28066
  Gene Ontology: Cellular component=membrane
  Homolog annotation: Hit_ID=Q5QNB0; Match level="QueryCoverage=91%, HitCoverage=13%, E-value=4e-09, Identity=56%"; Hit description =Putative MtN21
MDHRFNSFVFVFYRQIAASLLMVPTVVLLERRNARSMSSALLFKIFVCALIGYVQ

SEQ ID NO: 69846 - protein, 590 aa, Zea mays
  Coding DNA Sequence Number=SeqID_28067
  Gene Ontology: Mol. function=RNA-directed DNA polymerase activity; Cellular component=nucleus; Biological process=RNA-dependent DNA replication
  Homolog annotation: Hit_ID=Q8S472; Match level="QueryCoverage=92%, HitCoverage=50%, E-value=0.0, Identity=88%"; Hit description =Putative gypsy-type retrotransposon RIRE2
  Pfam annotation: Domain name=Retrotrans_gag; Domain location=78-169; Score=72.9; E_value=9.8e-19; Accession=PF03732.7; Description =Retrotransposon gag protein
MPEPSTTEGRRIQGELKNLLEDVAAFSRAIRRAPFPTRFRTPTTITKNSGETRPELWLADYQLACQLGGTNDDNLIIRNLPLFLSDTARAWLEHLPLGQISNWDDLVQAFAGNFQGTYVRPGNSWDLRSCRQQPRESLRDYIRRFSKQRTELPNITDSDVIGAFLAGTTCRDLVSKLGHNTPTRASELMDIATKFASGQEAVEAIFRKDKQPQGRLPEDVPEASTQRGAKKKGKKKSQAKRDAADTDLVAAAEYKNPRKPPGGANLFDKMLKESCPYHQGPVKHTLEECVMLRRHFHKAGPPAEGGRACDDDKKEDHQAGEFPEVRDCFMIYGGQVANASARHRKQERREVCSVKVAAPVYLDWSNKPITFDQADHPDRVPSPGKYPLVVDPVIGNIRLTKVLMDGGSSLNIIYAETLGLLRIDLSSVRAGVAPFHGIIPGKRVQPLGRLDLPVCFGTPSNFRRETLTFEVVGFRGTYHAVLGRSCYAKFMVVPNYTYLKLKMSGPNGVITVGPTYRHAYECDVECVEYAEALAESEAPIADLESLSKEVPDVKHHTDNFEPAETVKSVPLDPSSDASKQIRIGSKLDPK

SEQ ID NO: 69847 - protein, 90 aa, Zea mays
  Coding DNA Sequence Number=SeqID_28068
MQSCNHFEGDEATKVVLKGAQRKEGKVFFAFGSKVTHGFRPQQSNSFMDGKILSSIQEVIKGSFSPATFGMRFGLLTFGAAILQTNNSIR

SEQ ID NO: 69848 - protein, 66 aa, Zea mays
  Coding DNA Sequence Number=SeqID_28069
MAGGCGAEVVEDCGDATNPSSLAAISWFPCWLRWLWTGEHTDACLLAILGPVRALSLQIPVPFAID

SEQ ID NO: 69849 - protein, 87 aa, Zea mays
  Coding DNA Sequence Number=SeqID_28070
MQEMVLEQKTAPRLKVILLLKMMDMELPMIEDTAYLVRQLSVFCVRPHIRGYPRGAFGEDGVKDRNSMVVSTRLWDANEMKMEGIPP

SEQ ID NO: 69850 - protein, 42 aa, Zea mays
  Coding DNA Sequence Number=SeqID_28071
MAGPVPLPCYRTRGWGLYQLLRPSRNFWSHRHAPISEIEMVA

SEQ ID NO: 69851 - protein, 106 aa, Zea mays
  Coding DNA Sequence Number=SeqID_28072
MEEEQRPQWHPAPRTEKGAGHHGSRKAEQRARREGQRPWKELAAAVREREDGVGRKGAGQVGCHLKRRSLQPLVDMGGMLQSSAYVSLLAGSTIFIKGQTSYLEYK

SEQ ID NO: 69852 - protein, 108 aa, Zea mays
  Coding DNA Sequence Number=SeqID_28073
MGKHVPSLLLPFLYRVTALVPTITGMGDHVSGCVRGKVCGQVHSGRRGLPAVREVRRRVGLALGSLGDHVEAGGLVGGVCSCLLTLVEFNPRAQGASWGAKETTRARN

SEQ ID NO: 69853 - protein, 444 aa, Zea mays
  Coding DNA Sequence Number=SeqID_28074
  Gene Ontology: Mol. function=transferase activity, transferring glycosyl groups; Cellular component=cytoplasm; Biological process =metabolic process
  Homolog annotation: Hit_ID=Q6ZBE1; Match level="QueryCoverage=96%, HitCoverage=96%, E-value=0.0, Identity=68%"; Hit description =Putative glucosyltransferase
  Pfam annotation: Domain name=UDPGT; Domain location=14-441; Score= -55.7; E_value=8.1e-08; Accession=PF00201.9; Description=UDP -glucoronosyl and UDP-glucosyl transferase
MGSLPPVDGQRRPPHVVMIPYPAQGHITPMLQFAKLLHTRGFHVTFVNNEFNHRRHLRARGPNALDGTDGFRFTAIDDGLPLFEADATQDIPALCHSTLTTCLPRFKDLIARINAEAEAEGQPTVTCVVGDSTMTFALRAARELGLRCATLWTASACGFIGYFHYRHLVERGMVPLKNEEQLTDGYLDTIVDWIPGAPKDLRLRDFPSFLLPPIYTVGPLQLTVRNNVQANSPVAAIGSNLWKEQEAPLRWLNGRAPRSVVYVNFGSITVMSNEQLVEFAWGLANTGYYFLWNVRPDLVKSGDSAGLPPEFSAATEGRSMLSTWCPQAAVLEHDAVGVFLTHSGWNSTLESICGGVPMLCWPFFAEQQTNCRYKCTEWGIGKEIGDDVQRGEVESLIREAMEGEKGQEMLRRVTELRDSAVAAAGPDGRSMRNVDRLIEEVLLA

SEQ ID NO: 69854 - protein, 173 aa, Zea mays
  Coding DNA Sequence Number=SeqID_28075
  Homolog annotation: Hit_ID=Q69K58; Match level="QueryCoverage=74%, HitCoverage=13%, E-value=5e-39, Identity=61%"; Hit description =Putative PPR protein
MDCGLFSQKGKVSYVKCSARREEDRRTSQGGCDEPTTASRSTATFIGIEASKSIYESIISTYCKLGFPETAHGVIIIEAYGKIKLWQQAEILVKGLRQASESGLYEKARAVFDNMIKTCPLPTVDSVNGMIRALIVDGRLDELYVVVEELQDMNFKISKSTVLLLQKLGMYSR

SEQ ID NO: 69855 - protein, 264 aa, Zea mays
  Coding DNA Sequence Number=SeqID_28076
  Gene Ontology: Mol. function=nucleic acid binding
  Homolog annotation: Hit_ID=Q75L03; Match level="QueryCoverage=61%, HitCoverage=28%, E-value=5e-28, Identity=47%"; Hit description =Hypothetical protein OSJNBb0041A22.17 (Os05g0114500 protein) (Putative RNA recognition ...
  Homolog annotation: Hit description=motif (RRM)-containing protein)
  Pfam annotation: Domain name=RRM_1; Domain location=185-254; Score =16.6; E_value=0.0042; Accession=PF00076.12; Description=RNA recognition motif. (a.k.a. RRM, RBD, or
MVLARKKLKLKLHTLLPAGKAAEEEHGEDVEAVKERLASSKRLRPKRERRPKKKLSLPEVVRQTEEEIREEVERRREERRKEKKEKRRIRRLMEAEAAEPETQQVEGEIGEADSAAGSESDQPVEAKDSDQNINKLEVTNPAVGSNNNIVPDNRQQNHKMQLAKTVVVSDNHVVAEHREQSIKKVYVGGIPYYSSEDDIRSFFEACGSITMIDCMNFPESGKFRGIAILTFKNMAVERIWLWEESEYRGDYVRRKMKWSKGSRI

SEQ ID NO: 69856 - protein, 51 aa, Zea mays
  Coding DNA Sequence Number=SeqID_28077
MAGKAADATAARWAEGYPWREKLAKYNGELGKGVWGYWELGTFIGCKNYLD

SEQ ID NO: 69857 - protein, 67 aa, Zea mays
  Coding DNA Sequence Number=SeqID_28078
MARGGATAGKAWNGKSISDGIVVDDDGLLLGPEGAPTSPYVAVARSWWSAVVGRLPRIAAAAMQLDS

SEQ ID NO: 69858 - protein, 208 aa, Zea mays
  Coding DNA Sequence Number=SeqID_28079
MEAWGVGEVAVVELRRGQVDERDAAERGEGKRVVVELRQGRVGVGSAACAGAPVQGAGRGSGSSRASRGVGRARKVAGGAVAWAGRGSGDCTPGRVRPRPWQRRADPRRRGPSAARTLGARGIGAAARRPPAPAASVPPPGARGRGPSSGGAEAGRPLGASAAGTLARSSVVTPWQPLVGGGYREMGRRLGADGGREADGWEVERKKM

SEQ ID NO: 69859 - protein, 168 aa, Zea mays
  Coding DNA Sequence Number=SeqID_28080
  Homolog annotation: Hit_ID=Q6ZL37; Match level="QueryCoverage=21%, HitCoverage=3%, E-value=3e-10, Identity=83%"; Hit description =Putative karyopherin-beta 3 variant
MAKRVVSGVQPTGSVHLGNYLGAIKNWVALQAHGVSSILNFSENCTPEFLTPYLDGIVNKLLVLLQTAPASARPTSRNPASANLRESHVRRKPRRRKPPAPRLAVIPACPQTFDRRDPQARKSLRESRRDHHNATNRLPHDPWNPAAAPEQTLPQSVRRVPEQSRASR

SEQ ID NO: 69860 - protein, 91 aa, Zea mays
  Coding DNA Sequence Number=SeqID_28081
HVEPLGISARFRKEVLDRISAEKRANTVELMNKMPNRLQVKTLESQITCSGFLITDARLQSSVDVGTRQSARGPSSPTLAHGCVPYGNMGV

SEQ ID NO: 69861 - protein, 126 aa, Zea mays
  Coding DNA Sequence Number=SeqID_28082
MPGGPGTRRGWHGVDAAVAFFSSLRRAMTAEVLVSGGPGGNGAITARSQGMVRGGSEGGEVNERKRGVGWRGLWHSVSLRGPWCKAEEERSAGKNGRGVHVDHWSTDEDGRDAGGVWKGQARMKGR

SEQ ID NO: 69862 - protein, 135 aa, Zea mays
  Coding DNA Sequence Number=SeqID_28083
MGQWWPLHRIHPRAAIQFGSLNFVISREGHIVRVAPTQPPPPRNPDTISKAFGALRLTPCGWREGHGLAPPYEVDKIRRQITIHMGPNPSYDDLMAFFASLEDLSGYTMQRQCPTMVPLAAAPVPSRLDYATPWR

SEQ ID NO: 69863 - protein, 134 aa, Zea mays
  Coding DNA Sequence Number=SeqID_28084
MDNSVLVAVTAHSVWIRIKSRSQRHAGEDLYPHAGMGDPHPNRARSYHVDLGTQQPHEDDRLSCAKMGEGTGKWGPPTSDRLAAHLMPRVESTATEQVPCCSGTGYAHTRESQADRAHQSVPYSLSNSCATKST

SEQ ID NO: 69864 - protein, 86 aa, Zea mays
  Coding DNA Sequence Number=SeqID_28085
MNVCELTLVVLTSFQVKNKYPRMRRIEDVVRPTKGSSSGDFLRKESLGNGKTKRSTRGLVRIGQECAACRGGTWVINALQFECVIA

SEQ ID NO: 69865 - protein, 174 aa, Zea mays
  Coding DNA Sequence Number=SeqID_28086
MAELQSRVSEADYTGENLCCAGPTVRVVFDPVCCDMRAVFLGVDFNRNGENLARILILSPCAWGKVDSACGGHKTRRDLLPRLSGPLVEPSSSPITHGNATPRLVRLPIAKSDCPPLIPPLEPPCVRGVGLGRVLLERCERSSTEVYGTRRRIRASAADPRFTVDRPRGRLNTW

SEQ ID NO: 69866 - protein, 176 aa, Zea mays
  Coding DNA Sequence Number=SeqID_28087
MAELQSRVSEADYTGENLCRAGPTVRVVFDPVCCDMRVVFSGVDFNRHGKNLARILILSPCAWGKVDSACGGHKTRRDLLPRLSGPLVEPSSSPITHGNAPPRLVRLPIAKSDCLPLIPPLEPPCVRGVGLGRVLLERCERSSTEVYGTRRRIRASAADPRFTVDRPRGRLNTCKS

SEQ ID NO: 69867 - protein, 66 aa, Zea mays
  Coding DNA Sequence Number=SeqID_28088
MDVCELPLRVLAFTVVLLPGLGLGGALMVGDSGGSGASIAWVVLTGGSVAVVGVHAGMIPTLGGCR

SEQ ID NO: 69868 - protein, 113 aa, Zea mays
  Coding DNA Sequence Number=SeqID_28089
MSFTTARRHSASRARCEYVALLRVSGCCADELWHGGHEFWRGTVGELRRRGFGKERGREKRASLSREKEGLGWDFIEKERGRAEVVAMNGQGKSNRRHQWCGIETVDVVNGGS

SEQ ID NO: 69869 - protein, 132 aa, Zea mays
  Coding DNA Sequence Number=SeqID_28090
MVDKSHFLLDQREALEHSAGDHLTTKSEATKAHARVASFQDAHNTLVDASAIQGKFDAAEGSFVEAQSRLVQLEKERHLLSKMGYCQVFAIATSHFEDGIELEALSEGYCDALNDSDLISMVRAAESFARKL

SEQ ID NO: 69870 - protein, 79 aa, Zea mays
  Coding DNA Sequence Number=SeqID_28091
MDKYYVELNVHNLELADQTENAGKKDFEEPSAQEKVKNIEVPKARGEEDGLQEVKVGQAKKSHAALKTVIYERDLQPLR

SEQ ID NO: 69871 - protein, 105 aa, Zea mays
  Coding DNA Sequence Number=SeqID_28092
  Homolog annotation: Hit_ID=Q10P18; Match level="QueryCoverage=64%, HitCoverage=24%, E-value=2e-15, Identity=52%"; Hit description =TB2/DP1, HVA22 family protein, expressed
  Pfam annotation: Domain name=TB2_DP1_HVA22; Domain location=35-104; Score=-33.2; E_value=0.053; Accession=PF03134.9; Description=TB2DP1, HVA22 family
MLSCYDLTKFELCTLDLQLKGLLLSSPPLLVKSRQVSILVAQHVYKFQCILLVELTKNLVALLIILERFEDFTISWLPFYSEEKLMSFVYLWYPKTKGTTYVQSP

SEQ ID NO: 69872 - protein, 75 aa, Zea mays
  Coding DNA Sequence Number=SeqID_28093
  Subcellular localization annotation: CTP_CleavageSite=46; ConfidenceScore=5.40e-01
MATIIRKNTNSDVKMLPKPYLPSPGVGSRTRLVLETPSACKCTSTLGMQKTKSSLMGFGVLDDNPIKGLTCVAKC

SEQ ID NO: 69873 - protein, 92 aa, Zea mays
  Coding DNA Sequence Number=SeqID_28094
MKIIDHGVGHGCWSSWTALEIKLWQLDALESYPVLKQAKGCKMMKKVKHARCWRSYKPKERGKVLMRDIASDCDLEQYFGVTFIHRRAIKLR

SEQ ID NO: 69874 - protein, 63 aa, Zea mays
  Coding DNA Sequence Number=SeqID_28095
MEVGVSEALYAKAVSPDLLPGNRWGRLICSLEDMVAGVTWPSILPPGWTVKWDPASAEEEHEE

SEQ ID NO: 69875 - protein, 172 aa, Zea mays
  Coding DNA Sequence Number=SeqID_28096
  Subcellular localization annotation: CTP_CleavageSite=9; ConfidenceScore=5.16e-01
MWGLDASPSAKAPREKSHRRVQVSGANLYRFTRARLKLLTGMRLNIHVARTPASMAADLALHQTAPTFHPPARGAPSIRQGQKFILPSRQLLRNTCDAINLSRAYPSTRNAIEADRREITHHHESRVAATAVPWLHHRSVPRGWPMVFVGCLGGCSGDPGRAGDHLMPTIAC

SEQ ID NO: 69876 - protein, 117 aa, Zea mays
  Coding DNA Sequence Number=SeqID_28097
  Gene Ontology: Mol. function=nucleotide binding
  Homolog annotation: Hit_ID=Q2QWX6; Match level="QueryCoverage=95%, HitCoverage=23%, E-value=2e-32, Identity=80%"; Hit description =Dynamin family protein, putative, expressed
MPLADIQAYIEAENLRLENDPCQFSEKEIIIKVDPDLARTVLVSTKLDTKIPQFARPSDVEVFLHPPNCVLDVSLLGDSPFFTSVPSGRVGSCHEAVFRSNGEFKKVMPYKYLRTLP

SEQ ID NO: 69877 - protein, 121 aa, Zea mays
  Coding DNA Sequence Number=SeqID_28098
  Homolog annotation: Hit_ID=Q39290; Match level="QueryCoverage=25%, HitCoverage=43%, E-value=2e-09, Identity=93%"; Hit description=DNA -directed RNA polymerase II 8.2 kDa polypeptide
  Pfam annotation: Domain name=RNA_pol_N; Domain location=40-81; Score =13.7; E_value=0.00032; Accession=PF01194.8; Description=RNA polymerases N  8 kDa subunit
MATRSVVVARALILWFYHCISSGVSVASCCGVLRGLKQEVCFGAEFLCFSIARDALDALELFRYCCRRMLMTHVDLIEKLLNYNREDCCECELAFALEHSRTDKGMLHLCYDVGDFNRYNG

SEQ ID NO: 69878 - protein, 715 aa, Zea mays
  Coding DNA Sequence Number=SeqID_28099
  Gene Ontology: Mol. function=protein serine/threonine kinase activity; Cellular component=membrane; Biological process=protein amino acid phosphorylation
  Homolog annotation: Hit_ID=Q2QWW5; Match level="QueryCoverage=97%, HitCoverage=97%, E-value=0.0, Identity=54%"; Hit description=Protein kinase domain containing protein
  Pfam annotation: Domain name=APH; Domain location=342-529; Score= -5.7; E_value=0.014; Accession=PF01636.13; Description=Phosphotransfer ase enzyme family
  Pfam annotation: Domain name=Pkinase; Domain location=340-629; Score =109.0; E_value=1.4e-29; Accession=PF00069.15; Description=Protein kinase domain
  Pfam annotation: Domain name=Pkinase_Tyr; Domain location=340-629; Score=82.6; E_value=1.2e-21; Accession=PF07714.7; Description =Protein tyrosine kinase
  Pfam annotation: Domain name=Usp; Domain location=25-165; Score=41.3; E_value=3.3e-09; Accession=PF00582.16; Description=Universal stress protein family
  Pfam module annotation: Pfam domain module=APH::Pkinase::Pkinase _Tyr::Usp; Domain location=342-529::340-629::340-629::25-165
MKLRTLSITRCAPSPLGCVGMGGGRRRTVLVALRRDAAGRELLTWALVKAAAAGDRVVALHVSTVAADGEMAAAEEDRTRASDSLASVLGAYRGFCERNQIDLELKLCEGPSIKKALVAEATSCAAAHLVLGVTRSSRPSGSSATATAVARYCAKRVPPSCMVTAVSNGAVVYRRDPVQHHHQLLLSPYSAVVETPRRLYRKILDARTAAGDKSQDDMAIGDVGRSARRNMSQAMSALVSPRVTLAPGTVRSSCHGQESSSSPKVSAGWPLLKKDSMPALPELSEVSVVEWAMQLPTRCCSDQRSDEKQVPEELASLRDKYSSKYTVFRHSDLAKITNGFSPDRLVGKGGAGRVYRGCTEGGKELAVKVLKPSEDVVKDFASEVDVLSSVEHENAMSLVGFCVDGGRDRLMLVYDYMPRGSLEEALHGHGGGVQAPGKGGGGVALGWPERCKVAAGVARALEYLHGDGGEGHRRPMIHRDVKSSNILVAADFEPKLCDFGLAIWADDAAAQVTGDDVAGTFGYLAPEYFMHGKVSEKMDVYAFGVVLLELVSGRKPVSAGGPRGKGSLVMWANSVIQGGKVMDLVDPNLPLPATGGDGGEVERMALAAALCIRRAHQHRPTMSNVVKLLAGDGDAVAWAKSQVGVPGDNDIDGRRHGCGAATSPEEKGGDIQSYINLALRDIVDDDDNDASSVGSAVSLEEYLRGRWSRSSSFEG

SEQ ID NO: 69879 - protein, 84 aa, Zea mays
  Coding DNA Sequence Number=SeqID_28100
MAASFTRVCLCGPISCGVAPEVQLFARIDCVGVRVREPAAGGRAAGRRWAGEAGRGQRRRLRGRPPRVPRQVADGRRANAAVCG

SEQ ID NO: 69880 - protein, 501 aa, Zea mays
  Coding DNA Sequence Number=SeqID_28101
  Gene Ontology: Mol. function=metal ion transporter activity; Cellular component=membrane; Biological process=metal ion transport
  Homolog annotation: Hit_ID=Q01H09; Match level="QueryCoverage=34%, HitCoverage=40%, E-value=3e-23, Identity=33%"; Hit description=[P] KOG2474 Zinc transporter and related ZIP domain-containing proteins
  Pfam annotation: Domain name=Zip; Domain location=54-235; Score= -84.5; E_value=0.023; Accession=PF02535.12; Description=ZIP Zinc transporter
MDRRAGAILVFLLVVLVWDVAAVAETEPGSVRLVQEAPHRKVVEDGAKAGRVPVSTVAWSTLAMAAATGLGAVPFFFMELEAQWAGLCNGLAAGVMLAASFDLVQEGQVYGSGSWVVFGILSGGIFIWLCKKFLEQYGEALVWGVSFAGSKGFSQGLLVTIAIAVHNIPEGLAPIVAVPAFLCADAFQKVLPFCTGFAAGCMIWIVIAEVLPDAFKEATPSQVASAGTLAVAFMETLSTVLLGFTDGNNVEDASGFLVSLVFGLGPLIGGIILVTFSLGFSMPHPLLTGVASGIAFRLAAWRPVQLLMTSKMGLFTTLFLLIGGSLAYHAATSSILRLFNRKRSSVNVIASSSGLSLSALTVQSLLACGAVFLHAYAEGLALGVAARKAYGLGRYMVLPASLHGLPRGAAAASCVYGATDSWRGALAAAALTGLAAPSAAISAILAKIDYDGLDYWMVIACGALIPSFGRVFRRSLRLDVRKRANWPAGRCCLRLRVLDVD

SEQ ID NO: 69881 - protein, 205 aa, Zea mays
  Coding DNA Sequence Number=SeqID_28102
  Gene Ontology: Mol. function=nucleoside-triphosphatase activity; Cellular component=membrane; Biological process=proteolysis
  Homolog annotation: Hit_ID=Q1SJW8; Match level="QueryCoverage=94%, HitCoverage=55%, E-value=2e-89, Identity=82%"; Hit description =Chaperonin clpA/B; Checkpoint protein Rad24; DEAD/DEAH box helicase, N-terminal
  Pfam annotation: Domain name=AAA; Domain location=44-205; Score=17.0; E_value=1.1e-05; Accession=PF00004.19; Description=ATPase family associated with various cellular activities (AAA)
  Pfam annotation: Domain name=AAA_5; Domain location=44-181; Score= -19.7; E_value=0.057; Accession=PF07728.4; Description=ATPase family associated with various cel
  Pfam annotation: Domain name=DEAD; Domain location=23-155; Score= -49.9; E_value=0.091; Accession=PF00270.19; Description=DEADDEAH box helicase
  Pfam annotation: Domain name=Mg_chelatase; Domain location=21-186; Score=-145.5; E_value=0.011; Accession=PF01078.11; Description =Magnesium chelatase, subunit ChlI
  Pfam module annotation: Pfam domain module=AAA::AAA_5::DEAD::Mg _chelatase; Domain location=44-205::44-181::23-155::21-186
MAPLVPMSQPWVEKYRPRQVKDVAHQEEVIRVLNNTLQTADLPHMLFYGPPGTGKTTTALAIAYQLYGPELYKSRVLELNASDDRGINVVRTKIKNFAAVAVGTARKAFLVVMDFSGYPCPPYKIIILDEADSMTEDAQNALRRTTETYSKVTRFFFICNYISRIIEPLASRCAKFRFKPLSEEVMSSRIMHICNVCFVLNLNAQ

SEQ ID NO: 69882 - protein, 63 aa, Zea mays
  Coding DNA Sequence Number=SeqID_28103
MGARSAMTAQEWARSVVACSGVGQDPAGAAATCSSVGRGTHRKTTTEISRYAVEAWEIKCNIQ

SEQ ID NO: 69883 - protein, 56 aa, Zea mays
  Coding DNA Sequence Number=SeqID_28104
MENMNQRSTQNLTLITSGLNRLGGSFSDRDNTDDGLGSFVELGTEMPRQQFMLHFF

SEQ ID NO: 69884 - protein, 223 aa, Zea mays
  Coding DNA Sequence Number=SeqID_28105
  Homolog annotation: Hit_ID=Q2QWZ2; Match level="QueryCoverage=47%, HitCoverage=13%, E-value=1e-20, Identity=50%"; Hit description=SWIRM domain containing protein, expressed
MEGMEMVAFLAAEVGPRVAASCASATLSILTWDDSRMHAEGIDAMGHATQLNYGPSTSISSETVKNAAICGLSAAATKSKLFVDQEEHEFQRSAADRIPMPMPEFEMAIMESAGGGSMRSAARRMSGWLLGPAATMTTEPLRPRMVKAGTTTVGEVEKIRRQVLVCHCGKIGRDTGGGIDEHDGGVHRGGGCKRQRVRLGGGRQGGGLCWWRGAHGGRRIVGL

SEQ ID NO: 69885 - protein, 210 aa, Zea mays
  Coding DNA Sequence Number=SeqID_28106
  Gene Ontology: Mol. function=kinase activity
  Homolog annotation: Hit_ID=Q6QP54; Match level="QueryCoverage=55%, HitCoverage=34%, E-value=5e-11, Identity=43%"; Hit description =Putative kinase
MGRRAAAVAQARPVSLLVVPGRPGGTMAYLTLRVEIVAQARHYSHAVPGTGTILTRPGRAWTVLFRVVPGLAHRVSAKWPSIPDPRARTQPRLRKTVSASPDPRARTPPRPRKTVSASPDPRARTQPRLRKTVFASPDPRARTPSQPRKTVSASLDPRARTQPRLRKTVSASSDPRARTQPRPQRSHRLARPRARTDHVTGGGHHYPTPS

SEQ ID NO: 69886 - protein, 568 aa, Zea mays
  Coding DNA Sequence Number=SeqID_28107
  Gene Ontology: Mol. function=protein serine/threonine kinase activity; Biological process=apoptosis
  Homolog annotation: Hit_ID=Q53PM3; Match level="QueryCoverage=65%, HitCoverage=63%, E-value=1e-52, Identity=35%"; Hit description=NB -ARC domain, putative
  Pfam annotation: Domain name=NB-ARC; Domain location=223-515; Score= -80.9; E_value=3.9e-05; Accession=PF00931.13; Description=NB-ARC domain
MVATEMMSIEQRSITITVALGGTAGSEHETRRAGVNQNPCPNEKKFYRYRMEVVVPAALSEILGRIFAFLFDSLPRPSRGARELHRRRLERLLGNIASMVEEAEGRHITNQQLLSHLKALTAGMYRGRFTLEVTDLDDVVSRNGDGDDEDAGDGDATTAAASSAGKRSFALCRSFSRAKRSRVTGLIAGGDGGTERLVAVAEELEGLTRDYMREFILLVQGYPRKVHRPVRTTLYMDRCVFGRHVEKERVVDFLLQHAPSGRAPYLSALAVVGAKKVGKTTLVKHACDDERVRGHFVRIEWFETPDVVRAGGLPGQYLWESGGPEYLAGVRHILSEPRFANAAGPSLLVFEDAWPMDESAWAALASSPTPLGDGSKLLLTCRDADLARLGTADPVVLHRLQREEYWYYFKAFAFGGADPRDHPRVAAVAREISEHLERTFLDARVLGTLLRANFDARFWRRVLAAIVSCERRPMHVGVLLELLPVRGRLQSYGYCRSPPKFTVQDVLTARPSGRDGGSGSGSEEGFTVHLCKETLYMDHWYSITFKNDVRVVTFIVGVSTPGGPWSDE

SEQ ID NO: 69887 - protein, 145 aa, Zea mays
  Coding DNA Sequence Number=SeqID_28108
  Subcellular localization annotation: CTP_CleavageSite=76; ConfidenceScore=5.26e-01
MAIAGLTLGGLPPLAAAAVPVRPSADVPVRRRLDAEPLSACPAGASLCPSAAPPLCLRPPRRRAAVRLRAAGLSLRAPSAEAEPLCLPASPSAEQVRPTIPIRMKAAPNFYSMSPRPPRVLRLLHLFGSSSSPPPTTPEEPDDYE

SEQ ID NO: 69888 - protein, 286 aa, Zea mays
  Coding DNA Sequence Number=SeqID_28109
  Gene Ontology: Mol. function=sequence-specific DNA binding; Cellular component=nucleus; Biological process=regulation of transcription, DNA-dependent
  Homolog annotation: Hit_ID=Q6Z433; Match level="QueryCoverage=52%, HitCoverage=48%, E-value=2e-43, Identity=61%"; Hit description =Putative GATA zinc finger protein
  Pfam annotation: Domain name=CCT; Domain location=198-236; Score =67.6; E_value=4.1e-17; Accession=PF06203.4; Description=CCT motif
  Pfam annotation: Domain name=Zim; Domain location=133-168; Score =53.6; E_value=6.5e-13; Accession=PF06200.4; Description=ZIM motif
  Pfam module annotation: Pfam domain module=CCT::Zim; Domain location =198-236::133-168
MSHHDGSKPYQPRRGPERHPQPADGIAAPPPAAVAPSVEHLVAAAAEAEALNRFAAEQQQQLQGHEQEVGEEEEEEDEQEDEMEEEDEDEHEGQHGGIGGEHVPMDADAAAAAAAAAVSQMDPHSALVAGTVPPMATNQLTLSFQGEVYVFDSVSPDKVQAVLLLLGGRELSSLGGASSSAPYSKRLNYPHRVASLMRFREKRKERNFDKKIRYSVRKEVALRMQRNRGQFTSSKPKPDEIAASEMASADGSPNWALVEGRPPSAAELPCTSVMNSRFSSFAGSGG

SEQ ID NO: 69889 - protein, 170 aa, Zea mays
  Coding DNA Sequence Number=SeqID_28110
MATLSARLPHENVRYDLGYGHEQLTYGMCDLMGREMARSPYCAQVVTWVVLVGDNGGAWLMADGGKLMRHGAQLVIIVEDHTDLGATLATPSAPNVGELPRILSEWRSQGSPMVVARKLRELNVMWLPRARLSPPMNVEVRAIGVEDVTSHANGPLPSVPNVAVSKTRGQ

SEQ ID NO: 69890 - protein, 187 aa, Zea mays
  Coding DNA Sequence Number=SeqID_28111
MTGKKDGKGRRKAKGKKRKRPPTPPLEDSGDSEPSDDRTPPPPRLPDICLHGRLHGAVSEERAYLHDMEHTGLNDSKKSEEGIRTTMMGITTATQAFFYRDIRNHARSQLILVGAPAQRVVYRRAKYQTSNSIESHEPSPHSNGSRSIFLTGGKGGCDGNNSGGSNSGDDGKGCNGDGDAGGEAPPC

SEQ ID NO: 69891 - protein, 375 aa, Zea mays
  Coding DNA Sequence Number=SeqID_28112
  Homolog annotation: Hit_ID=Q3LHL0; Match level="QueryCoverage=30%, HitCoverage=17%, E-value=2e-31, Identity=55%"; Hit description=TATA binding protein associated factor
  Pfam annotation: Domain name=CBFD_NFYB_HMF; Domain location=244-308; Score=10.7; E_value=0.016; Accession=PF00808.13; Description=Histone- like transcription factor (CBFNF-Y) and archaeal histone
  Pfam annotation: Domain name=Histone; Domain location=241-311; Score =1.1; E_value=0.095; Accession=PF00125.14; Description=Core histone H2AH2BH3H4
  Pfam annotation: Domain name=TFIID_20kDa; Domain location=247-314; Score=157.9; E_value=2.6e-44; Accession=PF03847.4; Description =Transcription initiation factor TFIID
  Pfam module annotation: Pfam domain module=CBFD_NFYB_HMF::Histone::TFI ID_20kDa; Domain location=244-308::241-311::247-314
  Subcellular localization annotation: CTP_CleavageSite=40; ConfidenceScore=5.63e-01
MSSSSSAATAAASSASVPAASSSAPPIPRGGVVLGVPAPRSAQTPAGYTGFLVLDGLQFRQPSPGTQNIGIVGSLNTSQISPGTISGPQKPRPGLPSSTPIPSGSQMPGSQRPPSQSLMRPVTVSSPSLASQQTPQSSSSTFRPQQRPQVSQPRPQQSQLVTPPQQNTILTQQQQQQKQQQSASHQNQQIAAPKNQPQLSQHPTARTPISMTPKPDLPAIQNVAVLQSVDTAATDANASETGTRLLTKRSIHELVAQIDPNEKLDPEVEDVLIDIAEDFVESVTTFACSLAKHRKSSTLEAKDVLLHAERSWNITLPGFSGDEIKLYKKQHINDIHRERLALIKKSMATDTRNSAAQAAANQKNQTPKPPAPASP

SEQ ID NO: 69892 - protein, 44 aa, Zea mays
  Coding DNA Sequence Number=SeqID_28113
MAIIFQHKIALRPGSRDGNGYPKPEYPTGFTRYEGGYGMISLPT

SEQ ID NO: 69893 - protein, 1062 aa, Zea mays
  Coding DNA Sequence Number=SeqID_28114
  Gene Ontology: Mol. function=DNA binding; Cellular component =chromatin; Biological process=chromosome organization and biogenesis (sensu Eukaryota)
  Homolog annotation: Hit_ID=Q5N909; Match level="QueryCoverage=92%, HitCoverage=64%, E-value=1e-100, Identity=36%"; Hit description=AT hook motif-containing protein-like
  Pfam annotation: Domain name=AT_hook; Domain location=134-146; Score =18.4; E_value=0.016; Accession=PF02178.9; Description=AT hook motif
  Pfam annotation: Domain name=AT_hook; Domain location=174-186; Score =13.6; E_value=0.1; Accession=PF02178.9; Description=AT hook motif
  Pfam annotation: Domain name=AT_hook; Domain location=267-279; Score =19.5; E_value=0.0099; Accession=PF02178.9; Description=AT hook motif
  Pfam annotation: Domain name=AT_hook; Domain location=33-45; Score =12.7; E_value=0.15; Accession=PF02178.9; Description=AT hook motif
  Pfam annotation: Domain name=AT_hook; Domain location=357-369; Score =7.7; E_value=1.1; Accession=PF02178.9; Description=AT hook motif
  Pfam annotation: Domain name=AT_hook; Domain location=524-536; Score =3.9; E_value=4.9; Accession=PF02178.9; Description=AT hook motif
  Pfam annotation: Domain name=AT_hook; Domain location=53-65; Score =8.5; E_value=0.78; Accession=PF02178.9; Description=AT hook motif
  Pfam annotation: Domain name=AT_hook; Domain location=73-85; Score =15.9; E_value=0.042; Accession=PF02178.9; Description=AT hook motif
  Pfam annotation: Domain name=WD40; Domain location=882-922; Score =20.0; E_value=0.0088; Accession=PF00400.22; Description=WD domain, G- beta repeat
  Pfam annotation: Domain name=WD40; Domain location=932-974; Score =12.9; E_value=1.1; Accession=PF00400.22; Description=WD domain, G -beta repeat
  Pfam module annotation: Pfam domain module=AT_hook::AT_hook::AT _hook::AT_hook::AT_hook::AT_hook::AT_hook::AT_hook::WD40::WD40; Domain location=134-146::174-186::267-279::33-45::357-369::524 -536::53-65::73-85::882-922::932-974
MPLTGRGIIQVWCLLAPFEDSHSHQPVNAFNNGKQRGRPRKIPCSDKLVPVPKGPRGRPKKRSYDDQLEPVPKRPRGRPRKYPLPVAKFEGSSQNGESQDIILFDPLSTSSFIPDDLSLASVMPTEKSVQSTPKRGRGRPRKNPSDKLTDSSGIVSEDVCTALPPTTAISTKPKRPRGRPRKYPIPMNDGSVSGADVELGKETTCQTASFGCSLDHTACTEFNAKLCIVAVDAALPPIDKLTCSPGTVSGDVCTAPTLTTAICTKPKRPRGRPRKYPVQINGRSVSGTVAELGQESTCQPVSFGHTVCTEFNANLSIVPVDAALPIVDKLCSSSGTVVKESVCTEPSPATATRKQPKRTRGMPRKYSDTMIDLGKDTTGHPVLFGRSMDHTACTESNSSFSIVAVDASSLFASSSTATCDDKSKGQSIRGKDKKKTISNALYCPVVSGVESQSICSTEILPNDPAVSVENALPSAQNTVSMNELCSASLLNREGNACKSALSDDSELPIHISPKSSNKRESSGRRGRGRPKTIPLSAGTGHFVASVASLPKTTCVLTSSSNLTSLNKSGGKFIVSSVSSCGCDVEKCSVHSGVLLSDDAPPAHGLQNTNCKEESNTKIGKAGSRNKPVAVEHNHFTDLNVKEQKVQTTPMSGDPVILVENCMEGQGPRKAGGQLQRIPASNKSSGASVGGGTYKIETLSTPMTKGSSKNNDMAYGAGLNQSQNAIVGCEGMEVIESNTANYTSHCNENARANQVAPSFKNSDRVIDETEAAELGPLKEPREDDNLFTCVNSNSASITSDIAQPRVVLCLAHNGKVAWDIKWKPPLLSQPEQKSRLGFLAVLLGNGALEVWEVPSPCMIQKIYSPSKVEGSDPRFLKLQPVFRCVKVKCRNRQSIPLTVDWSPSPPHDMILAGCHDGTVALWNFSMNLPTQDSKPFMCVTADSVPIRALSWAPYISEESTDTFVTAGEDGLKFWDLRVASFGDWWRHTNGAVSGPSPTSQGLNSVIVLGAWSLWGHRNRCVFDGASPNLSGLVIQVSEELDRWSLAGAKGVSHLAAWTLELST

SEQ ID NO: 69894 - protein, 99 aa, Zea mays
  Coding DNA Sequence Number=SeqID_28115
MVMRRSAGVLCLVGRLVLTTATATPPSYVPSPVRSALVDPHWCRAMEEEYEALMANYTSDLVLCPLTPTWPRGHRQAVHQLNVNNVFLHGTLTETMSCN

SEQ ID NO: 69895 - protein, 936 aa, Zea mays
  Coding DNA Sequence Number=SeqID_28116
  Gene Ontology: Mol. function=ATP binding; Cellular component =membrane; Biological process=defense response
  Homolog annotation: Hit_ID=Q84YX3; Match level="QueryCoverage=91%, HitCoverage=92%, E-value=1e-131, Identity=37%"; Hit description =Putative disease resistance gene homolog 9N
  Pfam annotation: Domain name=LRR_1; Domain location=612-634; Score =0.2; E_value=2.6e+02; Accession=PF00560.23; Description=Leucine Rich Repeat
  Pfam annotation: Domain name=LRR_1; Domain location=636-657; Score =9.0; E_value=5.9; Accession=PF00560.23; Description=Leucine Rich Repeat
  Pfam annotation: Domain name=LRR_1; Domain location=659-680; Score =8.0; E_value=9.1; Accession=PF00560.23; Description=Leucine Rich Repeat
  Pfam annotation: Domain name=LRR_1; Domain location=805-827; Score =1.7; E_value=1.4e+02; Accession=PF00560.23; Description=Leucine Rich Repeat
  Pfam annotation: Domain name=NACHT; Domain location=206-355; Score= -39.0; E_value=0.063; Accession=PF05729.3; Description=NACHT domain
  Pfam annotation: Domain name=NB-ARC; Domain location=168-462; Score =54.3; E_value=9.5e-14; Accession=PF00931.13; Description=NB-ARC domain
  Pfam module annotation: Pfam domain module=LRR_1::LRR_1::LRR_1::LRR _1::NACHT::NB-ARC; Domain location=612-634::636-657::659-680::805 -827::206-355::168-462
MAEAIIGPLVGRLQEVAVGEARALVGVNADIHRLRDKLMWLQAFLREADTRRRAVTDEITRVWTLQTRDAVFDAEDALDHYHLRADMSRYLQATEPSMAELLLQQTFTTQIRMRRGLSRKIRAINMRLDGIIENKDKYKIEDSNTKTGVTWKPSTSTSIRYTHRKLDDVHDADAVIYMEEHDKLEDALVNNNLAEHQDGKDDHYPVMITVSGESGIGKTTLVRDIYKKMENQKVFEVQAMESFAPYLTAPNILQQITQQLTQDDTNCPKEMAQEMLQSRLRGKKYLLVIDGEVSGTEWKHFLTSIPVGARGSRVVHITQGKPEEPPSSYHHVTIELKKLTEDAAMALFRQRLPKELQDKNLSKYRKSVFKITQGLPLAVVLLSGLVQTKVFPGEWVKVFHYLKSKPSTANLESMLSVCFDDLPHELKCCFLYFAALPTNTTVEARSLVFMWVAEGFLSSKGGKTMEKIGFVYLSELISRNLVNRAKMNDDSSFGSMLVTIQTKVHDFLQIEAHEASFVEVHSNDDIPTLTSARRLSLQNYTDKYAVLAHPLPKLRSIFSQYEQEPNKGDRGHHHRSKGSRAYMFRLSQQRAISKMKRDIRSHIKDLFHGSEFLRVINLQGIEIGETLTSAIGDLVHLQYLGITSCSLRHVPWSIGGLTSLQTLDVRETNVRELPRSFWMIKTLRHVLGFVLKLPKQIGNLKQLHTLDSIDLEQVSEETDLVETLGEMIHLEFLSIWHVSHANVKALSAAMEKLESLRTLILEGKIIPSNVFTTASLRRVKFMFLSGDLLRSSDLDDGGESFILPNLAMLSLEKTYVTQEFISKLSELPSLTTLALYPGSYRDKKLVFASAKFPRLKRIKTVDVEVLESVEVEVSKVPELKELEIHSYFTGGYHHIDLGSERRKRSRKTRIVVDLKKVNGAVHEENADTSGWWMIFS

SEQ ID NO: 69896 - protein, 472 aa, Zea mays
  Coding DNA Sequence Number=SeqID_28117
  Gene Ontology: Mol. function=phospholipase A1 activity; Cellular component=spliceosome; Biological process=lipid metabolic process
  Homolog annotation: Hit_ID=UPI0000DA43ED; Match level="QueryCoverage =51%, HitCoverage=95%, E-value=4e-13, Identity=28%"; Hit description =PREDICTED: similar to keratinocytes proline-rich protein
  Pfam annotation: Domain name=AT_hook; Domain location=232-244; Score =1.2; E_value=14; Accession=PF02178.9; Description=AT hook motif
  Pfam annotation: Domain name=AT_hook; Domain location=270-282; Score =4.6; E_value=3.7; Accession=PF02178.9; Description=AT hook motif
  Pfam annotation: Domain name=AT_hook; Domain location=308-320; Score =8.2; E_value=0.88; Accession=PF02178.9; Description=AT hook motif
  Pfam annotation: Domain name=AT_hook; Domain location=327-339; Score =3.4; E_value=6.1; Accession=PF02178.9; Description=AT hook motif
  Pfam module annotation: Pfam domain module=AT_hook::AT_hook::AT _hook::AT_hook; Domain location=232-244::270-282::308-320::327-339
MEAQAHTSCNRHAGYYVQETAPPLAPDRRHLWQAKQATLHLRHNDRVKKGIGKRDTPKGILLREGSGPRAPLLIRGSKAGPSEGFNSRLRALGLCAHYWSEGSDSGSASEDDELRLARPQGSDSGSAPEDDELRLARPQGSDSGSAPEDDELRLAQPQGSGSAPEDDELCLARPQGSDSGSAPEDDELRLARPQGSDSALASDDSLRLARPRARTWARPRKTTNSASPDPRARTRARPWKTTNSASPDPRAQTRARLRKTKNSASPDPRARTRARPQKMPNSVSPDPRARTRAQPRKTTNSASPDPRARTRARPRKTTNSASPDPRARTRARPQKTTNSASPDPRARTRPWPWTTVSASPDLGLGLGLGPGRRQTLPRPTLGLGLGLGPGRQRTPPRPTPGLGLGLGPGRRRTSPRPTPGLGLRLGSGRRRTPPRPTPGLGLGLGLGRRSPPRPTRGSDSTSTSEEHPPRPT

SEQ ID NO: 69897 - protein, 904 aa, Zea mays
  Coding DNA Sequence Number=SeqID_28118
  Gene Ontology: Mol. function=protein binding; Cellular component =membrane; Biological process=defense response
  Homolog annotation: Hit_ID=Q6YYL2; Match level="QueryCoverage=79%, HitCoverage=71%, E-value=7e-97, Identity=33%"; Hit description =Putative RGH1A
  Pfam annotation: Domain name=LRR_1; Domain location=305-325; Score =2.1; E_value=1.2e+02; Accession=PF00560.23; Description=Leucine Rich Repeat
  Pfam annotation: Domain name=LRR_1; Domain location=350-371; Score =8.2; E_value=8.5; Accession=PF00560.23; Description=Leucine Rich Repeat
  Pfam annotation: Domain name=LRR_1; Domain location=373-394; Score =6.9; E_value=15; Accession=PF00560.23; Description=Leucine Rich Repeat
  Pfam annotation: Domain name=NB-ARC; Domain location=2-204; Score= -15.0; E_value=2.5e-09; Accession=PF00931.13; Description=NB-ARC domain
  Pfam module annotation: Pfam domain module=LRR_1::LRR_1::LRR_1::NB -ARC; Domain location=305-325::350-371::373-394::2-204
MARWDLEQFKNELDEFLKGQELYSLVSIIYRYLIVVDDIWDVDSWEAIRYVLKDNNCGSRIIMTTRNSGVVTKVEEVYRLKPLSTENSEKLFYKRIESQEGESLDGELSSKIIHKCGGIPLAIIAIASLLVERSREEWPEVYDKIGLGNEDNTTKIMLYSYYDLPPYLKPCLLQLSIFPEDCFIDTKAVIWMWIGEGLVHLEKEEGSLFEVGERYFKELVNRSMIQPIEEKYHWFVERFCIHDIMFDLICKLSKDEDFITLSGQHSSQSLQSLFNLRSDCKLRRLAVRNQRVQRFPEETMDMPEVLRSLSIIDCNIEVMAPIDSFRVCRVLHIENNYVPISLKHLGKLLHLKFLEIFDTTIDELPREIGHLRSLQTLVLVSTGLDELPVAVCSLTRLMCLIAYGFERLPADRIGNLTSLEELQLHRVVGRSATQDLVAELGKLTRLRVVRITFSEQLEESSQEALVQSLSNLRLLQELVLFSEMPERGSDMWGDWELPRQLRRLIIEGIVFSRQPRWINRSCLPRLYSLYLMVHAVEAQDLDNLARLPELQYLMLFGFSWPPRYTVGPDDFRNLRFCEVGTTFEFRKGAMPRLEVLRFGVCVPFEQFPTKDVIEDLDFDLDNVILLQQVRVKVNCAGATVTQVEEVEAVVMRAVENHANRPTIKMDRVYEQNILSDEEREALLQRHIEKDCCVRTMKDKSDAFFISQLRRYRHLQKAIIFIDCSGASMCEVQKVEAAYRHAAEVHPNHPSIELIRTNTDGMASSSSDHPNTEVNIRMILSLYLNSRCLNEVIILDGDKYGQQRVAWRSIWVSGLFFYRSGARRPALCICRKAVTTDQWTESGGAAECTGLWRLKQIVSVFEILSRRMRLKQIGEAKELPSNILDNKEKTLYKNWHKKGANTKKH

SEQ ID NO: 69898 - protein, 140 aa, Zea mays
  Coding DNA Sequence Number=SeqID_28119
  Gene Ontology: Mol. function=protein binding
  Homolog annotation: Hit_ID=Q75KA7; Match level="QueryCoverage=70%, HitCoverage=21%, E-value=5e-23, Identity=57%"; Hit description =Expressed protein
MHRHLVSCVTARLLVVVGRGATLPSRETRWLQHGCRCFDRAAVEDGIEQTVLTPDATTGGAAGRATSVAGQVPQGRRRRVPQQAAGVRGVVEEDLHQAVRRAAWEWEIIVVVVVAAALTVIQWLAGNDNSPCDAVSFKFQ

SEQ ID NO: 69899 - protein, 227 aa, Zea mays
  Coding DNA Sequence Number=SeqID_28120
  Gene Ontology: Mol. function=protein binding
  Homolog annotation: Hit_ID=Q75KA7; Match level="QueryCoverage=74%, HitCoverage=30%, E-value=8e-29, Identity=50%"; Hit description =Expressed protein
MRRWERGSGAGAWAWWGTTWWLARSCKLLTRGRAALGGLRSMVCRGWATQRWVGARAVGLRKGSSWKLHGEDHRANPVLRRVTSDTLANPPNDTLAHIIELVLKSSEDRGRREMKSLVLKLFKESSNGSANSSSADSSCITTLYECFQNCQDSLLVLPREATGADELAVEEDLSSGSKVQAFRKIGKIDLEADNLLWLAEILSDRHAVDELASIWARQTELGRGATH

SEQ ID NO: 69900 - protein, 52 aa, Zea mays
  Coding DNA Sequence Number=SeqID_28121
MVAQIDSEHRTQNLPVKPIEVSASNRSNRLPTAKRPDPAHKELFNQVPATAD

SEQ ID NO: 69901 - protein, 102 aa, Zea mays
  Coding DNA Sequence Number=SeqID_28122
MQGARVRGIFDGVGAHWLCGARCGGTGCNPPGPAGTYKSGIESLVHEGCDHVAHLSSSDFGANENLYPRLARLLSVAADEMLIACGSPFSAEVCLQALCGGA

SEQ ID NO: 69902 - protein, 155 aa, Zea mays
  Coding DNA Sequence Number=SeqID_28123
  Subcellular localization annotation: CTP_CleavageSite=85; ConfidenceScore=5.08e-01
MAGNDAYRKSFLVSAVVHYTRGAVFATVATQIGVTAVAGHLGTHSALLFLTGAGMSAAPSSASVPVFTSTPTPVRFLRNAWVMFMASHGGDLWLMRSVSLTIVVQCHGSAPLREHTAGVVLLKSPWGLDELTRSPHCGKPESGKYFELAPAFLCF

SEQ ID NO: 69903 - protein, 76 aa, Zea mays
  Coding DNA Sequence Number=SeqID_28124
MDKNLEQGGSADWGWNRGNHMVWGAARSPMVEDERREASCASRASWRSRARERSWVAGHEGDEGEKSSTWDGVRGY

SEQ ID NO: 69904 - protein, 153 aa, Zea mays
  Coding DNA Sequence Number=SeqID_28125
MAKRATRPGLVKLGPFWARPARHATLKIHMDNRPWDGELFRWPWNLTEPPLCCIVIISPPSSPEPSRSDPCRCLFASGGGHSSRAAEAPPPPPPPRHEPDQVVSGPPPAADGASGYSSPLPEVIHPAPAPETNGQTVRKQAGSRSTTPLGPCK

SEQ ID NO: 69905 - protein, 772 aa, Zea mays
  Coding DNA Sequence Number=SeqID_28126
  Gene Ontology: Mol. function=ATP binding; Biological process=apoptosis
  Homolog annotation: Hit_ID=Q2R1P5; Match level="QueryCoverage=95%, HitCoverage=67%, E-value=2e-81, Identity=49%"; Hit description =Leucine Rich Repeat family protein, expressed
MAELAAGAVGSLLGVIRNEMSLLGSVRGDVQFIKEEMESMNSFLLHLARTAPPGGEHDEQVRTWMNRVRMLAQDCNNCLDLYLYRGNPDIHRARGGVRRYLWCWWVPWFLQKLVGQHRAAVQLGLLKLRARDVGERRLRYGVEIPGKSSPPVAGAAAATPPPLPSSSSWDSVQAAAPAPDGYDDEEDGDPQLAVAAMATADRNAFIEACTLVDYFQAKLVEWVESLQIDASETFSISVLVPEREPQHMMADAIALAQEALIFPSAGGFLDNLGYNRAVLIDIPAVHLDMLPLGPNEALYYILRQLKLESQSHPQDKSGQGEDVNDGLDSWQVYCRKLGIYHEKKLMLREIKEKIKEMKIDDKLDKIKSAIRDRRSKGAHLQQLLQLELQQKKDVEQLDLDLLLHLLLQSQSASSAQDQRKDDEGMDKLPEWDDKVIAKIARKLKKHMEATGEEEAKELNKEQQTGTEEEQEGNRQVARQQQHIAPICLPEDQYKQILLEVFPKAGSSEQQRDRPAVKQEATEATALTTVGNHAVTTSELGPNGKAVFETTVDQKMAKIKQKLKERLKSYALATKIKEHLNYVCPLIILIVNEKMDGSTWTETRNALSLLACGTDAMIVTTTRSAQWAKEYCYPQREPIEYSLAGRYYSTVLQLASRCLVYPVDTSATGKVKSCMAGAPVHQIITKIARNQHILETRLSHHLARYFSIFNDLRLRGSETISTFFQDLSKSSQVSLLKGRALLRSRLPQDAAAQVSEPKENKSTKAAQRNQQSA

SEQ ID NO: 69906 - protein, 115 aa, Zea mays
  Coding DNA Sequence Number=SeqID_28127
  Subcellular localization annotation: CTP_CleavageSite=85; ConfidenceScore=5.07e-01
MAGNDAYRKSFLVSAVVHYTRGAVFATVAAQIGVTAVAGHLGTHSALLFLTGVGMSAAPSSASVPVFTSTPTPVRFLRNAWVMFMASHGGDLWPMRSVSLTIVVQCHGSAPLREH

SEQ ID NO: 69907 - protein, 100 aa, Zea mays
  Coding DNA Sequence Number=SeqID_28128
  Subcellular localization annotation: CTP_CleavageSite=64; ConfidenceScore=5.03e-01
MALHKLCDDGGPQLSYGSRATSARTRPLQQLSLRQAPSHLRQPRHHASKDKSETQGTLKRFLRRAQNEFCNTPGVTKTEIWHNIMCISISVILMTLECLY

SEQ ID NO: 69908 - protein, 194 aa, Zea mays
  Coding DNA Sequence Number=SeqID_28129
  Subcellular localization annotation: CTP_CleavageSite=35; ConfidenceScore=5.36e-01
RSIIPPSVADLEAAKAQPKRGPKTQRRVRNGTFCCLSLLSNTGSTVHRHTAARPPGARTGTATEGAPTARTRHSAPVHRATGSTLPSRPGSMGSGVSSSMALALAGFCFSVLFIVFVCTRLACALVRRRRRQARARLAAAPPLPHYAHGYADPDPFPSFRAAPPPPPRPRASIPPPSPPAPTPPHKPPTPTTAP

SEQ ID NO: 69909 - protein, 104 aa, Zea mays
  Coding DNA Sequence Number=SeqID_28130
MGGRSVIIHRTVRCASGATATSLQRSTANAFNALQCAPESEHAQLAHRTVYRTCPVHHQTAQRPHQSELQRSIRPKSPKDVNVKAENAPSSAEKKTGKKLQSRS

SEQ ID NO: 69910 - protein, 130 aa, Zea mays
  Coding DNA Sequence Number=SeqID_28131
MPDSGWVHDDEDMVDGSLSIQLGLPTVSSTLSLTFSFLNLKVIGLISLGDFLELHRWFLLHNVEYYRASSQTKIHDGSLLQCRRSSRQRYTLKITTMNAEAIAEEYQLRLKVVSKSKHDAELKRKRLISS

SEQ ID NO: 69911 - protein, 114 aa, Zea mays
  Coding DNA Sequence Number=SeqID_28132
MAVRTGNSALAARVHDEQAGTSACSSERIPGRAGEKDGVEDVGTRQSRAGAKNAVRTGSTRDGQQRRLRAGGKGAAHAVEEQAGREKLRAQGNSTAGHVARRLQGASRRPPWES

SEQ ID NO: 69912 - protein, 552 aa, Zea mays
  Coding DNA Sequence Number=SeqID_28133
  Gene Ontology: Mol. function=transferase activity; Cellular component= membrane; Biological process=protein metabolic process
  Homolog annotation: Hit_ID=Q7PC69; Match level="QueryCoverage=99%, HitCoverage=71%, E-value=0.0, Identity=75%"; Hit description =Cellulose synthase-like C3
  Pfam annotation: Domain name=Glycos_transf_2; Domain location=62-237; Score=6.9; E_value=0.00038; Accession=PF00535.16; Description =Glycosyl transferase
MVQSVDRIVQCLACFWIKIRGIKPRIPASAGGKPRGGTTGRKRVDDVENGDADDDRYFPMVLVQMPMCNEKEVYETSISHVCQMDWPRDRLLIQVLDDSDDEVCQMLIKAEVTKWSQRGVNVIYRHRLSRTGYKAGNLKSAMACDYVKDYEFVAIFDADFQPNPDFLKLTVPHFKENPELGLVQARWSFVNKDENLLTRLQNINLCFHFEVEQQVNGVYLNFFGFNGTAGVWRIKALEDSGGWMERTTVEDMDIAVRAHLNGWKFIFLNDVKVLCELPESYEAYRKQQHRWHSGPMQLFRLCIPTVFRSKIPFWKKANLVMLFFLLRKLVLPFYSFTLFCVILPLTMFVPEAELPIWVICYIPVLMSILNILPAPKSFPFIIPYLLFENTMSVTKFNAMVSGLFQLGSSYEWIVTKKAGRTSSASDILALAEADAHAHAPAPAAKLVRGVSEGGLQEWGRLREQEAAEWANKEDAAAALAAAAAPATPKKSSNKAKKPPNRIFKKELALACLLLTAATRSLLSKQGLHFYFLLFQGVTFLAVGLDLIGEQVS

SEQ ID NO: 69913 - protein, 86 aa, Zea mays
  Coding DNA Sequence Number=SeqID_28134
  Homolog annotation: Hit_ID=O99012; Match level="QueryCoverage=34%, HitCoverage=12%, E-value=1e-07, Identity=93%"; Hit description=ATP synthase CF0 A chain
  Subcellular localization annotation: CTP_CleavageSite=58; ConfidenceScore=5.51e-01
MTGIGTTKGTKETRTTTTNSSANIFPKSRKLSDNGFVKSSRMLIGTKEAGLRQRESVKGFKKGVQRSMLAIGLTFRILLPVLAMFG

SEQ ID NO: 69914 - protein, 172 aa, Zea mays
  Coding DNA Sequence Number=SeqID_28135
  Gene Ontology: Mol. function=binding; Cellular component=thylakoid; Biological process=photosynthesis
  Homolog annotation: Hit_ID=Q84YE0; Match level="QueryCoverage=100%, HitCoverage=40%, E-value=2e-76, Identity=82%"; Hit description =Ankyrin-like protein-like protein
  Pfam annotation: Domain name=Ank; Domain location=24-56; Score=16.1; E_value=0.13; Accession=PF00023.20; Description=Ankyrin repeat
  Pfam annotation: Domain name=Ank; Domain location=58-88; Score=20.6; E_value=0.0056; Accession=PF00023.20; Description=Ankyrin repeat
  Pfam module annotation: Pfam domain module=Ank::Ank; Domain location =24-56::58-88
MENQGAVMKILLDNNADCNKEVPPMFTPLFTALKARSLSCVKHLIKAGADVMKGVHKCTPLILAANEGLTDFYECLLEAGADPNVPDDSGLLPIEIAAFKNRRKDVEILLPVTSRIPSVHDWSVDWLIAYVKSLSTDEDDPVYKMNLADLKSEASKAYNEKDYPTAVKFYSV

SEQ ID NO: 69915 - protein, 130 aa, Zea mays
  Coding DNA Sequence Number=SeqID_28136
  Gene Ontology: Mol. function=binding
  Homolog annotation: Hit_ID=Q84YE0; Match level="QueryCoverage=78%, HitCoverage=25%, E-value=6e-29, Identity=64%"; Hit description =Ankyrin-like protein-like protein
MAPPHFCGGRLDRRLLLAAANDDLRGFKRSARALDGGKGRIREAVETAAMISAAAALGALHVAAANGSTRVCAYLVEELEMDVNATAVGSVRSKKNVDAVRYLLDHDADPNKRVHHGCTPLTIAVGKGVV

SEQ ID NO: 69916 - protein, 182 aa, Zea mays
  Coding DNA Sequence Number=SeqID_28137
MAVWGLCRRCGAALSSLPPLPSRPCLLLWAGRQPCDGEERRIWLLSGGVWRRHVGCSGPNGVCGGVCANGSGVATEVRLGHVVAFGGCFRLSGPGLRVEVEACTVKSKLLRQGMWLGNDDMGRTPLLRGLVCFEDEAFGGGEAVDQGFGSVAGEESELSRVGYLVAWQRRRATVFLLFCRCL

SEQ ID NO: 69917 - protein, 42 aa, Zea mays
  Coding DNA Sequence Number=SeqID_28138
MSKQPQECDEESIRFILELEQAAFLFQCVAEAEKYTNIQTRK

SEQ ID NO: 69918 - protein, 89 aa, Zea mays
  Coding DNA Sequence Number=SeqID_28139
MAVRRGVPALELPRNCSGFSEAMINFNLYFVDQPYTSHELPYLMVNTRKGGGIDLPTNPHNRRVLRQQQEEEMNPPNPPPVVTDLVVAA

SEQ ID NO: 69919 - protein, 58 aa, Zea mays
  Coding DNA Sequence Number=SeqID_28140
MGKGLSALLDAEACRLLLPYWPEGCFRQGEAMNCLKLSRAMAKLSELSLAQKNIMQQD

SEQ ID NO: 69920 - protein, 937 aa, Zea mays
  Coding DNA Sequence Number=SeqID_28141
  Gene Ontology: Mol. function=protein binding; Cellular component =membrane; Biological process=defense response
  Homolog annotation: Hit_ID=Q6YYL2; Match level="QueryCoverage=91%, HitCoverage=83%, E-value=1e-141, Identity=37%"; Hit description =Putative RGH1A
  Pfam annotation: Domain name=LRR_1; Domain location=565-585; Score =2.6; E_value=93; Accession=PF00560.23; Description=Leucine Rich Repeat
  Pfam annotation: Domain name=LRR_1; Domain location=610-631; Score =12.0; E_value=1.6; Accession=PF00560.23; Description=Leucine Rich Repeat
  Pfam annotation: Domain name=LRR_1; Domain location=633-654; Score =8.5; E_value=7.4; Accession=PF00560.23; Description=Leucine Rich Repeat
  Pfam annotation: Domain name=NACHT; Domain location=203-352; Score= -34.0; E_value=0.026; Accession=PF05729.3; Description=NACHT domain
  Pfam annotation: Domain name=NB-ARC; Domain location=155-457; Score =171.1; E_value=2.7e-48; Accession=PF00931.13; Description=NB-ARC domain
  Pfam module annotation: Pfam domain module=LRR_1::LRR_1::LRR _1::NACHT::NB-ARC; Domain location=565-585::610-631::633-654::203 -352::155-457
MELALGAMASLAPKLGDLLMEEYVVHKGLKPDIESLSDELVMMNAALLDASRIPPDQLTAVEKLWARKVRDLSYDMEDAIDDFILRVAGGDNSATDSKLLKKILVKVKDVMSIKKLKDRRQISDKVKDIKKLSSELAELRAKYTVRGAGADLAASIGIDPRVINLYKKESDLVGIQESRDKVIRMLSLGTKYDDAHASHQDLKIVSIVGVGGLGKTTLAKTVHDMLKKQFSPSAFISVGRTPNLNRTFEKILVELDAKYKQVDMTRWDLEQFGKELHEFLQNKRYLIVVDDIWDVGSWEAIRYGLKNNNCGSRIIMTTRNFELVTKVEEVYRLKPLSNENSKKLFYKRIQSQEGESLDDELSTEIIDKCGGIPLAIIAIASLLVERPCEEWSKVYHSISLGNGDNTTKILSYSYYDLPSYLKPCLLQLSIFPEDYQFDTNAAIWMWIGEGLVHLEKEEGSLFVVGERYFKELVNRSMIQPIEDKYDRLVEVFRIHDIVFDLIRKLLKDEDFITLLDSGGQHSPQASLRREKKTCVPRSDCKLRRLAVRNHHVQRFPEDIMDIPEALRSLNIIYCNIAIMTPLHSFRVCRVLCIEYSYVPISLKHLGKLLHLKYLELYGTPVDELPKEIGHLRSLQTLLLVNTGLDELPPAVCSLTRLMCLMAEGFKRLPADKMGNLTSLEELRLESIVGQSATQALVAELGKLTRLRVVNITFSEELEESLQEALVQSLFNLWGLQELALSSKWSQQGSAMWGDWEPPRQLRRLIIKGIIFSRQPRWINRSCMAHLCFLSLAVHAVEAQDLDNLARLPELRYLKLDGVSWPPRYDTGPDDFRNLRFCDVGTMLVFHMGAMPRLEELVFGVCAGYWSWEHNGVLLEQCPTMDVIEDLDLGLDNLLSLEQVTVVVDCSGATAAKCRRGGRGHACHENHATVHHKNGTSM

SEQ ID NO: 69921 - protein, 51 aa, Zea mays
  Coding DNA Sequence Number=SeqID_28142
  Subcellular localization annotation: CTP_CleavageSite=29; ConfidenceScore=5.26e-01
MASRVPSPMRQQPLPSHSTVGKQPFPMAVAMRLRKKKGGKHSMRFTYVTTN

SEQ ID NO: 69922 - protein, 222 aa, Zea mays
  Coding DNA Sequence Number=SeqID_28143
  Gene Ontology: Mol. function=peptidyl-prolyl cis-trans isomerase activity; Cellular component=mitochondrial matrix; Biological process=protein folding
  Homolog annotation: Hit_ID=Q6ESK5; Match level="QueryCoverage=56%, HitCoverage=71%, E-value=2e-51, Identity=90%"; Hit description =Putative peptidyl-prolyl cis-trans isomerase NIMA-interacting 4
  Pfam annotation: Domain name=Rotamase; Domain location=56-150; Score =60.1; E_value=7.1e-15; Accession=PF00639.11; Description=PPIC-type PPIASE domain
MGKDSKPKDAKGKGKQAAGSSGGDDGGGKGGKGKGKGKGGKSADGLGTCTYVKARHVLCEKQGKINEAYKKLQDGWLNNGDKVPPAEFAKVAQEYSECPSGKKGGDLGWFPRGKMAGPFQEVAFNTPEGTVSAPFKSTLLIGSHLLSASYHDTVSCAGTGITLSSAKEGRTDLEMSVGETASSGCMRRNANYSPSLISAGHVYFVLGYSHSVPNKLPKQKNV

SEQ ID NO: 69923 - protein, 122 aa, Zea mays
  Coding DNA Sequence Number=SeqID_28144
MEGPRSVHRGGAGREDGKERDGRWVPRQRQRWATAHARDRHGRTEPWGTQRTCVWADRGTTTQGMAAVVAGKRARASEASEQGPGSRRGWGAEPGCRGAGVGQGEMGRAQAAKEGVSGPKGQ

SEQ ID NO: 69924 - protein, 181 aa, Zea mays
  Coding DNA Sequence Number=SeqID_28145
MSDNGSHKSEKVLSGEKQKEKIEECASSKSSKPYKRKDGKKKKIKKIIYCENDTSTSRTTSSNSESTSKHHHQRKMVKLLKRDSMILPFLAIQLLITFGSTWEEYNKVNPRYKKMTPEEVFGKFLIHRRLGPREHHLHLATTIDIFGLNVNEMSLIIKIFWQIPRNQKYKDYKPHDKMVKD

SEQ ID NO: 69925 - protein, 115 aa, Zea mays
  Coding DNA Sequence Number=SeqID_28146
  Pfam annotation: Domain name=zf-CCHC; Domain location=44-61; Score =24.6; E_value=8.6e-05; Accession=PF00098.13; Description=Zinc knuckle
MVVQNTTRTLVSPQIHNKAIPMLTIDHSSSTQTIREKSTLCSQRACFKCGKTGHFIENCPYAKYDDGREEEKKGKKKFGNNKFYKKKGGEAHIDKECDSDESFSDSDDDGVAPPL

SEQ ID NO: 69926 - protein, 208 aa, Zea mays
  Coding DNA Sequence Number=SeqID_28147
  Gene Ontology: Mol. function=protein dimerization activity; Cellular component=nucleus; Biological process=regulation of transcription
  Homolog annotation: Hit_ID=Q8W1M6; Match level="QueryCoverage=29%, HitCoverage=12%, E-value=5e-11, Identity=49%"; Hit description=WRKY -like drought-induced protein
  Pfam annotation: Domain name=WRKY; Domain location=58-117; Score =42.4; E_value=1.5e-09; Accession=PF03106.6; Description=WRKY DNA -binding domain
MENKSDDLQHEHGMPDQTSRPFTSLLLSATSVAQAAQQDTGSDIKSLSLLHGSSLLPPDDGYIWKARAQNIVPGCEYPTMYYKCAQDNCNTNKLVVCSADGHQVLETVLSGCHNHPRQQDCDLPIPKVSKTDTSMPVSREGDDEQLSSSSDSDEDDVDQARVEDMCHIQLKGSLHKLELQILTDSMHQSAFFDLHFLSPYVAAGVVHI

SEQ ID NO: 69927 - protein, 187 aa, Zea mays
  Coding DNA Sequence Number=SeqID_28148
  Gene Ontology: Mol. function=protein serine/threonine kinase activity; Cellular component=integral to membrane; Biological process=protein amino acid phosphorylation
  Homolog annotation: Hit_ID=Q2QW32; Match level="QueryCoverage=60%, HitCoverage=11%, E-value=9e-12, Identity=41%"; Hit description =Leucine Rich Repeat family protein, expressed
MKVKLRYKESKSITCQGLQVYPKQPESRLIAARTQEPDSDVLLPSPIHQVNGLRSSKTSIQEFSVALEGSQQLTEKSDAYSIGVLMLEEWRWSRRGSRWRAATGRYIVRDEGGAGPDQGSVRPARAAGPGGGGLEQYMDLVLRCVEEAGADRPSMGEVDGEIEQVLKMAGGTGLHPYAESAASIPTP

SEQ ID NO: 69928 - protein, 192 aa, Zea mays
  Coding DNA Sequence Number=SeqID_28149
MTWGWTEPGKTWRTSSEFGYHHNSLGVGGEAPRVLGHEQWRFGGDGERGQKEGEHGRGNEAVGESAPELWISPVIEDPATYHKRCSRMGKEIRVRGRKGLRAIEGKRKGVSACSTSGKESVGGGLVWAARHGEVRRGRGGVEEGEQGRLAAGPQTSERGREKKGGVGAGLLGQKRPRAGGEEEIPFFSFSEF

SEQ ID NO: 69929 - protein, 243 aa, Zea mays
  Coding DNA Sequence Number=SeqID_28150
MTSDWNHLMPHYGHLLSQAEVDSFDPQQIGNPKCQNYAEGSRPPPVANNATQRANLANFFADEMLGFVVLGLQFTALEKNPFHFLHCRSILKDEPKWTDHHIGQQKPNLALIANDSNTIDLDPKESLPSSFASKLPLDRDLSKEKAKKTQSMDTSSTDSEYLTRLGDLSLERLSVYKLVASVEERKLEAYDKIHRQKLIIEEKLNLEHVRTDMQKENEDKEEKDMILSMDLNKCNMLLREYTK

SEQ ID NO: 69930 - protein, 177 aa, Zea mays
  Coding DNA Sequence Number=SeqID_28151
PHRRPQTPSDRACPVFDDFATAEEATPVTELQNLVHPIATVRPRSNGLNLRISTAVARLPLGPAINACTPWRWADCRLRRMSRASRGSRRPRSSRQRAPSGNNPCIEVVGLTVHEAVDVGLGQVWFSITTTTVLVARAMSAFAAHRDASFFTPPTLPQSCWQPPQESPQAVRVQTVP

SEQ ID NO: 69931 - protein, 118 aa, Zea mays
  Coding DNA Sequence Number=SeqID_28152
MSELRNAKDQSMTQAFRQYHLGKDRQDLAPPYLLNQTRSSLGTRQSNDHVFDALWTRQSTPDARPACPVTRQRPAGAMAHARAYKAPRGLDRTPPHALDLTGALTHWRHPVKLTVPLD

SEQ ID NO: 69932 - protein, 53 aa, Zea mays
  Coding DNA Sequence Number=SeqID_28153
MAALLDAGLFGPAQTLGCFLVSSAGAGNDAGMSMKVESLVSSRFPEQQLRTRC

SEQ ID NO: 69933 - protein, 181 aa, Zea mays
  Coding DNA Sequence Number=SeqID_28154
MAIELLGPFITLQGFVIEFGHLDILQWENKHKTMHTYSSVNGGRQDGFGKLDGSTKSLSQGAAMDSFYSTFHTNLERRKFSKEEYATFARLEMKEAMKQLLSSPDFNRWALANANKISCGSDRRKLQHQQQPTTTSFLGTILICVWHQKEPSGRSGPGAGRSAVRTVRACGPNGPCLRRIG

SEQ ID NO: 69934 - protein, 75 aa, Zea mays
  Coding DNA Sequence Number=SeqID_28155
  Gene Ontology: Mol. function=Rab GTPase activator activity; Cellular component=intracellular; Biological process=regulation of Rab GTPase activity
  Homolog annotation: Hit_ID=Q5QMF8; Match level="QueryCoverage=92%, HitCoverage=8%, E-value=4e-19, Identity=70%"; Hit description =RabGAP/TBC domain-containing protein-like
MKFSEGPTLVTTKDAGDAVALLQILSGCTFDSSQLVLTSRVGYQSVNETILQELSNKHYPPIISAIEERAKCLGV

SEQ ID NO: 69935 - protein, 197 aa, Zea mays
  Coding DNA Sequence Number=SeqID_28156
MTASEKGPGKGDTPKRILPREGTRLRASLLIRGSKAGPSEGFDSRLRSCGLYTHYWSEAGPRRVHSRLRHRARDDHGYVRYITKARAALLRARTRAKSRKTANSAPPDPGLGLGLSPGRRRTPLRPTQGSDLGSAPEDDELRFARPRARTWAQPQKTTNSASPDPRARTPPWPQPTVSASPDPGARTRPRPRKTDST

SEQ ID NO: 69936 - protein, 85 aa, Zea mays
  Coding DNA Sequence Number=SeqID_28157
MGKPEPDYSIHEMTIAHWEWRDGESGTYPPDKGLPKKGAPQLGINRFGSPNFSDMKTGSSTLIVTSHLIVIGVKRRWARPSYKSK

SEQ ID NO: 69937 - protein, 105 aa, Zea mays
  Coding DNA Sequence Number=SeqID_28158
MTRGNYAVRRGSLVSHNHEQVTRAVDDQTMWRNCSRGSTTFMARGKEQLAAGGRTSSTESELEFAATGSRARCWGKLRAQGAGHGQRPASTTSRQGRARTTTSGH

SEQ ID NO: 69938 - protein, 32 aa, Zea mays
  Coding DNA Sequence Number=SeqID_28159
MASSGRNRLAGVRRGLFLVVDFALRNRALEIC

SEQ ID NO: 69939 - protein, 58 aa, Zea mays
  Coding DNA Sequence Number=SeqID_28160
MGVAGGGMVAVVMQLAEAVGGGAVMARLMAAYSTVIGVVVVVWLLAAERWFSCVDMVA

SEQ ID NO: 69940 - protein, 52 aa, Zea mays
  Coding DNA Sequence Number=SeqID_28161
MAQQSDLETGEVGRERNGNAQRITEQSLGWIRTHATCRDKVEASGLQSVERV

SEQ ID NO: 69941 - protein, 35 aa, Zea mays
  Coding DNA Sequence Number=SeqID_28162
MASNGSDVVMMYWTRRCWSRPSSPSQLLSASRKQK

SEQ ID NO: 69942 - protein, 329 aa, Zea mays
  Coding DNA Sequence Number=SeqID_28163
  Homolog annotation: Hit_ID=Q9FMZ7; Match level="QueryCoverage=35%, HitCoverage=38%, E-value=2e-19, Identity=41%"; Hit description =Arabidopsis thaliana genomic DNA, chromosome 5, P1 clone:MJB21
MSPRRRTVESGRRAVAVKQWLVVERRSERRRIAGIAIPEKEWVRLFRKNSARSNQNSSDSIHTMIRPSFPKWYFVHEVPEQFPNSDVTAIVDETWQIGDRVDWLKEGCYWSGTITKIINEDLVEIELPAPPIGEGKCYKAKCSDLRPTLEWSLARGWMVPLSQANGKGWHAARLLQHYKSESDDDNDDNDSWDARQTVCRASNTPEEAPGPMVPAPPSATNNAPSHMYQKDAAVTSTEDLLKPSSTSKSPDPRHDAQASTQPAGTGVSMKPEPVIGVSTIKKEDSSLTEGEVDGGTEECLEKLGAIKARLKYLMQGTRLEHERSATFRG

SEQ ID NO: 69943 - protein, 86 aa, Zea mays
  Coding DNA Sequence Number=SeqID_28164
MELSMPAPTNVAHHDLLLTPPWCLTLPATLADQTTTPPTTVVGQPVKCVRFSDTMQVAITLGASPLLVLLDSGSTHDFISESVARL

SEQ ID NO: 69944 - protein, 179 aa, Zea mays
  Coding DNA Sequence Number=SeqID_28165
  Gene Ontology: Mol. function=nucleic acid binding; Cellular component= cytoplasm; Biological process=RNA processing
  Homolog annotation: Hit_ID=Q84LL8; Match level="QueryCoverage=53%, HitCoverage=47%, E-value=2e-37, Identity=76%"; Hit description=Salt tolerance protein 4
  Pfam annotation: Domain name=RRM_1; Domain location=27-98; Score =67.1; E_value=5.6e-17; Accession=PF00076.12; Description=RNA recognition motif. (a.k.a. RRM, RBD, or
MQVGEALKFNVGGERLDVATAIEGWIVLVTGVHEEAQEDDLQNAFQEFGQVKNLHLNLDRRTGFVKGYALIEYEKFEEAQAAIKELDGAELYEQKMSVDWAFSSGPAKRRFTRKRVEIGMQILEHIKILETKTGRAKTYLPFHFCLVTFALALALIQYQSVSCFRFPKIYGEVAYLLDS

SEQ ID NO: 69945 - protein, 205 aa, Zea mays
  Coding DNA Sequence Number=SeqID_28166
  Subcellular localization annotation: CTP_CleavageSite=51; ConfidenceScore=5.12e-01
MDAIHDKALSAQGTRSRLDRAQPRAGTADLGGFTPRPRASSSNGHTFDSPEAQLGQASRRSNLGQDHLASCWGPSASEGAIGSSASLDPRARTQPRPRTTDSASPDPRARTQPRPRTTVSASPDPRARTQPRPRTTDSASPDPRARTQPRPRTTVSASPDPRARTQPRPRTTVSASPDPRARTQPRPRRSLRLARPWARTDHVAG

SEQ ID NO: 69946 - protein, 137 aa, Zea mays
  Coding DNA Sequence Number=SeqID_28167
MAGCKGGKGKCHSSEGKRKHPPSPPTEDFGGSEFSEEEFSSEYDGSPAPMSPMVLSDDLDDSMGLSVADRAYIQSIECTGLEGSDDSEEDSSENSEEGSGSGSGSEGDSGNGNNDGDGGDGEGNDDGDNADGKMPPT

SEQ ID NO: 69947 - protein, 74 aa, Zea mays
  Coding DNA Sequence Number=SeqID_28168
MGRLVVGRIKETSRGKLVLIRKRPTSELAATGARVHRDRNQHFIIGSCFRDQHSVVKDSLGAPEVHPMGVAPEL

SEQ ID NO: 69948 - protein, 151 aa, Zea mays
  Coding DNA Sequence Number=SeqID_28169
RGRGRTEGCPELPGDVAELTEATDAVRAQPRSWNGRQASVSGNEAVWLHAQGERGGQRARMRAQVSRGKWASEVRALKRRGHAEVVEKHVDVGVSTMGVRGREVRDGGSDWWGSRASERGGALLKENGADRLGPPGNGRGRGGRERAGGVD

SEQ ID NO: 69949 - protein, 71 aa, Zea mays
  Coding DNA Sequence Number=SeqID_28170
  Homolog annotation: Hit_ID=Q6Z5N1; Match level="QueryCoverage=78%, HitCoverage=9%, E-value=2e-10, Identity=76%"; Hit description =Putative potyviral helper component protease-interacting protein 2
  Subcellular localization annotation: CTP_CleavageSite=46; ConfidenceScore=5.04e-01
MDRINASEIFSKCPPLVPHILSVVLRRVPDQDSSVRVALVDTGRIVAAASPPPRFSLSRTRSSTSRTSARS

SEQ ID NO: 69950 - protein, 60 aa, Zea mays
  Coding DNA Sequence Number=SeqID_28171
MAGVCRSARQGTVLQPKGLNTQKKVGQFGADEAIWKDQYLARDTQAICPDRAPKLEQFRR

SEQ ID NO: 69951 - protein, 119 aa, Zea mays
  Coding DNA Sequence Number=SeqID_28172
  Homolog annotation: Hit_ID=Q6K2L9; Match level="QueryCoverage=74%, HitCoverage=19%, E-value=7e-20, Identity=51%"; Hit description =Putative Poly(A)-binding protein binding protein
  Pfam annotation: Domain name=Ataxin-2_N; Domain location=1-67; Score=- 8.1; E_value=0.00038; Accession=PF06741.3; Description=Ataxin-2 N -terminal region
MDYVDDNVEQQYVILSWDQFETNAALFGAKSTFNEEIYTTKLERGERLIPGDDLDHDEEIKYPAVRRDTDNSKYKPPFTKVPSSTCHVASFNRTVNIDPNDSLACSSTMVDYDEIAIWR

SEQ ID NO: 69952 - protein, 139 aa, Zea mays
  Coding DNA Sequence Number=SeqID_28173
  Homolog annotation: Hit_ID=Q10C08; Match level="QueryCoverage=61%, HitCoverage=24%, E-value=2e-26, Identity=70%"; Hit description =Targeting protein for Xklp2 containing protein, expressed
SSQALLFQKGLGSENVVITQFYTKLEEKHKALEAEKDEAEARKKRNPCQASIKKGPPPKAELKKVPPTRAKSPKFTSSRRRSCSDTLLTPDGENTNATSTQPHRHSIRSPKDANRVQQCSPKSGVATKTRSVKAELKAL

SEQ ID NO: 69953 - protein, 116 aa, Zea mays
  Coding DNA Sequence Number=SeqID_28174
  Subcellular localization annotation: CTP_CleavageSite=9; ConfidenceScore=5.06e-01
MKPWKETSRSSKTTTSSRRGLAATPSRLLVKAAFIYVSFPHFDFYFLSYRTKWPTGWKREWFYLKADEKKREKLMTMVMSPLSLSIGKKWVRSMDLFDLLTVLSLKTIQEALAKNG

SEQ ID NO: 69954 - protein, 299 aa, Zea mays
  Coding DNA Sequence Number=SeqID_28175
  Homolog annotation: Hit_ID=Q6AUW7; Match level="QueryCoverage=37%, HitCoverage=24%, E-value=5e-20, Identity=47%"; Hit description =Putative betanidin-5-O-glucosyltransferase
  Subcellular localization annotation: CTP_CleavageSite=78; ConfidenceScore=5.03e-01
MPRRIRMRQQPTPCLTVHARYLPLPPPPLRKALHYPHAGSPSTPILPVSTLSSPPPRSWWPRKAQQEGRAGDPPPRSRCSGFLSEVELRLLCCNLPAHPRLRPQSFPLPLHIYSLATASALAGVEPTIARQLSTPLQILDRTSRQQEMATKTAIPRKKMCIPLMPFFATSHIAPFTDLTFHLVTARPDDVEATVAVTPAKALVVQSALARRGASHLATVKVATYPFPSVDGLPPEWRTTPRISHASALYRPMIRQSEMDTSNPEALVDAKNLNMFVGQRMRAVVQVQHNEGWSACRTVL

SEQ ID NO: 69955 - protein, 50 aa, Zea mays
  Coding DNA Sequence Number=SeqID_28176
  Homolog annotation: Hit_ID=Q5W7C9; Match level="QueryCoverage=67%, HitCoverage=24%, E-value=7e-07, Identity=51%"; Hit description =Unknow protein
MGESLMEQCRMEVEGLRVVNFFSRRRNNDVHRQIPGLNPGQAVETTKLEY

SEQ ID NO: 69956 - protein, 43 aa, Zea mays
  Coding DNA Sequence Number=SeqID_28177
MAMTAAMIGYFIFVDACLRWIAILALLPLLYASNGCDVNGFFM

SEQ ID NO: 69957 - protein, 104 aa, Zea mays
  Coding DNA Sequence Number=SeqID_28178
MEVGALLGGPSHYDDAQACSNVPTQRDELASDPTTLVVPSKTRVEVIEAGRDEGGAAQVTLFRLVWPNIASRRNLRELSPPRRKQHRGWYPSGTASACAPNDGS

SEQ ID NO: 69958 - protein, 70 aa, Zea mays
  Coding DNA Sequence Number=SeqID_28179
MRIASPRPNNSWTRPPWPSSERWQRRIRGGDLSSKSDKEPVGASEGGGGRMWYADGSSGDGGIEWRRQRI

SEQ ID NO: 69959 - protein, 75 aa, Zea mays
  Coding DNA Sequence Number=SeqID_28180
MKNEVKSCGLAIVAPGTSLATRLGAGVCEKICSVVWARLVTIADQLGLITRSCKTLSQLQSKNDKLKLEMARVKA

SEQ ID NO: 69960 - protein, 107 aa, Zea mays
  Coding DNA Sequence Number=SeqID_28181
MSSGKVFFGSSALGMAMGWVRIGLLSVARDAALLMLAVVGPCPLPARSTRDKDHGGETHWRRNSSGEVVVDVGEVTTVTWRWLELVRLRVQAGELIGDEDSGLTEST

SEQ ID NO: 69961 - protein, 116 aa, Zea mays
  Coding DNA Sequence Number=SeqID_28182
MVKWDAFGQVIRKSRERPERGKRGGVDAEYREVYIGPVVRGAISMMTMGQRTVCRSKARCQQGVESIVEVTTTSGVTSDGSGDPSFRLLILRKLSTMGVPPAGAQRKGALRTPPPA

SEQ ID NO: 69962 - protein, 139 aa, Zea mays
  Coding DNA Sequence Number=SeqID_28183
MSALQEQIAEEWRRKEKKGSCSGSATTSGLLAEMQAVERAARELNIVLEEIAKEEEEEEEDEGRRRQGIVDEERAREVMERAEELAAACRTLEETGSALWRPALCGPCWTSWPTQRERGIRGGLRPFSRVPLHKDLFVE

SEQ ID NO: 69963 - protein, 102 aa, Zea mays
  Coding DNA Sequence Number=SeqID_28184
MGVKLGKQNDELVKTNMTLSGIGSDSSIKMMIARTWTVRPLMPDGLRYTRERHKMKTLPRMVQPLRWNSPTFPQIVWSLSPDSLQLLERETKLVHYSGRFDL

SEQ ID NO: 69964 - protein, 263 aa, Zea mays
  Coding DNA Sequence Number=SeqID_28185
  Gene Ontology: Mol. function=nucleoside-triphosphatase activity; Cellular component=membrane; Biological process=transport
  Homolog annotation: Hit_ID=Q6EQ63; Match level="QueryCoverage=99%, HitCoverage=61%, E-value=1e-126, Identity=80%"; Hit description=PDR -type ABC transporter-like
  Pfam annotation: Domain name=ABC2_membrane; Domain location=1-204; Score=204.4; E_value=2.6e-58; Accession=PF01061.14; Description=ABC -2 type transporter
MSYWRNPPYTGVKYFYTTVIALLFGTMFWGVGRKRDSQQDLFNAIGSMYASVIFMGVQNSGSVQPVVSVERTVFYRERAAHMYSPLPYALGQVVIELPYIFVQSLIYGVLVYAMIGFEWTADKFFWYLFFMYFTLAYYTFYGMMVVGLTPNYNVSSVASTAFYAIWNLFSGFLIPRTRIPVWWRWFYWICPIAWTLNGLVTSQFGDVTETFSDGGVRISDFVEDYFGYHHDLLWVVAVVVVAFPVLFALLFGLSLKIFNFQKR

SEQ ID NO: 69965 - protein, 650 aa, Zea mays
  Coding DNA Sequence Number=SeqID_28186
  Gene Ontology: Mol. function=nucleoside-triphosphatase activity; Cellular component=integral to membrane; Biological process=transport
  Homolog annotation: Hit_ID=Q6EQ60; Match level="QueryCoverage=99%, HitCoverage=83%, E-value=0.0, Identity=45%"; Hit description =Putative PDR-type ABC transporter 9
  Pfam annotation: Domain name=ABC2_membrane; Domain location=285-498; Score=218.5; E_value=1.5e-62; Accession=PF01061.14; Description=ABC -2 type transporter
  Pfam annotation: Domain name=ABC_tran; Domain location=1-183; Score= -22.5; E_value=1.7e-05; Accession=PF00005.17; Description=ABC transporter
  Pfam annotation: Domain name=PDR_assoc; Domain location=503-568; Score=134.3; E_value=3.4e-37; Accession=PF08370.2; Description=Plant PDR ABC transporter associated
  Pfam module annotation: Pfam domain module=ABC2_membrane::ABC _tran::PDR_assoc; Domain location=285-498::1-183::503-568
MDEFEARRSAAYVSQHDLHMGELTVRETVNFSARCQGSGHRYDLLVELSRREKDAGIIPDKETDTYMKAAATGDQKADVVTNHILKVLGLDVCADTIVGNNMLRGISGGQKKRVTTAEMLVTPGRAVFMDEISTGLDSSTTFQIVNSIRETIHIVGGTAVIALLQPAPETYDLFDDIILLSDSQVVYSGPREYVLEFFESVGFKCPQRKGVADFLQEVTSKKDQRQYWKHGDDTYRYVPVKEFAEAFQSFHVGEAIRNELAVPFDKSTSHPAALKTSRYGASVKELLKANIDREILLIKRNSFVYIFKAVQLTLMALITMTVFLRTNMHRDSISDGRIYMGALFFGVLMVMFNGLAEVGLTIAKLPVFFKQRDLLFYPAWTYSLPSWIIKTPLSLLNVTIWVFITYYVIGFDPNVERLFRQFLLLLLMNEASSGLFRFIAGLARHQVVASTLGSFGILICMLLGGFLLARENVKKWWIWGYWISPLMYAQNAISVNEFLGSSWNKQVIPGSAEPLGKLVLESRGLFPEAKWYWIGVGALLGYVLLFNILYTICLTFLKPFDSNQPTISEEALKIKHANLTGEVLEASSRGRVASTTTTGTLDESNDEAASNHATVNSSPVNKGMVLPFVPLSITFDDIRYSVDMPEVFTF

SEQ ID NO: 69966 - protein, 144 aa, Zea mays
  Coding DNA Sequence Number=SeqID_28187
MELGFVIYSDEGERTVPEEEERSDLQGAVDGMHQWRGEWGGSNVRVDASLTRGDERIGARRESVRLLGRSASGSGLLGLCCVGVGCGSSGRRRQRAVGLGTGHSAQGLRRGVGLWLGSKLRGGAVGLGRAGRSGKLLGAWRGSG

SEQ ID NO: 69967 - protein, 141 aa, Zea mays
  Coding DNA Sequence Number=SeqID_28188
  Gene Ontology: Mol. function=asparaginase activity; Biological process=glycoprotein catabolic process
  Homolog annotation: Hit_ID=Q8H2A9; Match level="QueryCoverage=64%, HitCoverage=32%, E-value=3e-11, Identity=41%"; Hit description=L -asparaginase
MAYLVLQMVDLVAVFSGTASPEDDGNGDAAKALELAQMVVGLAAGVHYYARSSTMPRQGLRPAPTGRVDVGVCDGHVHRRLISKILGRIGDSPLIRFGTYTCDACAVSGTLKWDMATVMEYKGLPLQQVVDYYVRGTMQNI

SEQ ID NO: 69968 - protein, 68 aa, Zea mays
  Coding DNA Sequence Number=SeqID_28189
MEKGFGCPPWLPGSQARQGFAPGAEHGRSGRGRRFGEDGGQVGLLDGIHGKAGVAGLEKGRKPDGRGS

SEQ ID NO: 69969 - protein, 207 aa, Zea mays
  Coding DNA Sequence Number=SeqID_28190
  Gene Ontology: Mol. function=nucleic acid binding; Cellular component= mitochondrion; Biological process=DNA integration
  Homolog annotation: Hit_ID=Q8W0X5; Match level="QueryCoverage=88%, HitCoverage=58%, E-value=4e-91, Identity=86%"; Hit description =Putative pol protein
  Pfam annotation: Domain name=RVT_2; Domain location=1-58; Score= -178.7; E_value=0.0046; Accession=PF07727.4; Description=Reverse transcriptase (RNA-dependent
MTQKFEMSMMGELNSFLGFQVRQLKDGTFISQIKYTQDLIKRFGMKDAKPAKTPMGTDGHTDLNKGDSDYAGCKVDRKSTSGTCQFLGRSLVSWNSKKQTSVALSTAEAEYVAAGQCCAQLLWMRQSLRDFGYNLSKVPLLCDNESAIRMADNPVEHSRTKHIDIRHHFLRDHQQKGDIEVFHSRRRFEREKVDLDHERLPLHFDER

SEQ ID NO: 69970 - protein, 189 aa, Zea mays
  Coding DNA Sequence Number=SeqID_28191
  Pfam annotation: Domain name=zf-CCHC; Domain location=42-59; Score =28.9; E_value=1.7e-05; Accession=PF00098.13; Description=Zinc knuckle
MTMMMKIISPQHHPLRTKIQFKGSERWRISFLPLTKKNKEKKGCFTCGEKGHISDNCPNKTTPKKRRSKGKTCTTIKAWEDSSSEDEAPPRSHDHHCSSSCSTSRSSHKCLMAQGNTIDSSSIEYDSYNDSSDEKTSIYELVDAVKFLGGVVLLRSCVGALLIVNASKRLRVVGCLVEMPSLTSEDLRA

SEQ ID NO: 69971 - protein, 252 aa, Zea mays
  Coding DNA Sequence Number=SeqID_28192
MALPVDVADLCPRQGDVGLLRSRGRVCLPLPRPSPSPRVGRGGDRLAEARAESEPWGRARRRFAVFRVLARVRALGSGGAEFAVFRVLARVRALGSGGAEFAVFRVLARVRVLGSGGAEFAVFRVLARVRALGSGGAEFAVFRVLARVRALGSGGAEFAVFRVLARVRALGSGGAEFPMAPLAGPDCLSDSLCRVALQSEWRRRRCPSVRLLYADGGYQLRIRRLEGTPNYGPRQYLKGKCALGPFLSILVI

SEQ ID NO: 69972 - protein, 70 aa, Zea mays
  Coding DNA Sequence Number=SeqID_28193
  Subcellular localization annotation: CTP_CleavageSite=50; ConfidenceScore=5.16e-01
MAMMGSTSEKMYLCQVRKQQNFAVFALRWCPRTWCQRTNLNSNVVARGMLASLLKNNILLCGRGFCLPRL

SEQ ID NO: 69973 - protein, 115 aa, Zea mays
  Coding DNA Sequence Number=SeqID_28194
MACPIPLRRSREDASAKRGPYGSDFQIECVGLGGSDDSKEASSKEVEDSPDSEEWSGGEGDSSSSDDDSKGSGDDGGGGSDNGDSGEGDGKGGKGDDKGDGDGGDDKADGIMLPA

SEQ ID NO: 69974 - protein, 103 aa, Zea mays
  Coding DNA Sequence Number=SeqID_28195
MARLSLSRAPGTNHRVTIYDTILPQKHHEGTPGGNLPSVMPDNGETDAGMCGDITKLENGAQCNSYLGTKPQKWEKLLMKEHTEKDATTTATIADRLKKESEI

SEQ ID NO: 69975 - protein, 233 aa, Zea mays
  Coding DNA Sequence Number=SeqID_28196
MKEIVEGACSAVHVREGIRGGSFPGWLHAYHTGNSISGTHEQIFQVVDDGTHYSIGKLVLGTQPSTQARRPGRNVSPERDRQRSPAGVRRSGRSLARAQSTRRRNEGAHGGPDATAHTTSQWRGYGGAYQPRRQRRAPARRLRRGQRATTGQGKRCAAMANVECAGSGTTVIAGRGATSPMMAYWPRAGIRWQEESGMGELGTRQQGRCGGERLDRRLLFSQLLRALGEVGKG

SEQ ID NO: 69976 - protein, 134 aa, Zea mays
  Coding DNA Sequence Number=SeqID_28197
  Subcellular localization annotation: CTP_CleavageSite=73; ConfidenceScore=5.32e-01
MGWFQPIRPNPERKAPAPARAGGFAKIPSGFSLTGIRSFYCFPVSLTLCTEALKVLFLRSGRSTTAFTPRRAPASTYAGRLGLRLGSPSGGHEIGATTIISPNPIALMINYGALATVAVSIVARQPCSRRWVAV

SEQ ID NO: 69977 - protein, 36 aa, Zea mays
  Coding DNA Sequence Number=SeqID_28198
METKSNCGAKSKRREKKEDNMETEIQIAATAMQLDA

SEQ ID NO: 69978 - protein, 85 aa, Zea mays
  Coding DNA Sequence Number=SeqID_28199
MVGQGQVGGLAPHIGMDVEPVLEECLHLGLSNTGLPIWYIKIGSLVNPGSAIVDKDNDDEVNGRLRFESLITFLGIQFNEGFDLC

SEQ ID NO: 69979 - protein, 54 aa, Zea mays
  Coding DNA Sequence Number=SeqID_28200
MARRARVRLTYWTHMSAPSLEPGRASEKGTIWGGIQQPSWIVRPIAAPVQPPPC

SEQ ID NO: 69980 - protein, 76 aa, Zea mays
  Coding DNA Sequence Number=SeqID_28201
MALSHAATAPFPNRPVATTVIAERVVRAAVREEKGRAVGALPRILVAGGIQAPARLFGCGTILTATGERDNWMDAS

SEQ ID NO: 69981 - protein, 191 aa, Zea mays
  Coding DNA Sequence Number=SeqID_28202
MGVNDLLIFLEIYTALEVFATVRFIDKNTMPRGKGGKGKHGKKDQGGKRKHPPTPPSEDFGDSEFSEEKFLSEGEESPPTVPVSSLSEGLDDSMGLSTVERAYIRSIEWVGLKGSDDSEEDDSSEDGSSEEDSEEEDGSGNDGGDEAVVVVAKATATVMTAATTAAMRAATARTTMASAVTSVARCHQRKN

SEQ ID NO: 69982 - protein, 993 aa, Zea mays
  Coding DNA Sequence Number=SeqID_28203
  Gene Ontology: Mol. function=RNA-directed DNA polymerase activity; Cellular component=intracellular; Biological process=RNA-dependent DNA replication
  Homolog annotation: Hit_ID=UPI00005A975E; Match level="QueryCoverage =99%, HitCoverage=57%, E-value=0.0, Identity=88%"; Hit description =PREDICTED: similar to Retrovirus-related Pol polyprotein from transposon 297
  Pfam annotation: Domain name=RVT_1; Domain location=56-225; Score =149.8; E_value=7.1e-42; Accession=PF00078.17; Description=Reverse transcriptase (RNA-dependent
  Pfam annotation: Domain name=RnaseH; Domain location=455-582; Score =0.4; E_value=5.3e-05; Accession=PF00075.14; Description=RNase H
  Pfam annotation: Domain name=rve; Domain location=780-939; Score =119.4; E_value=1e-32; Accession=PF00665.16; Description=Integrase core domain
  Pfam module annotation: Pfam domain module=RVT_1::RnaseH::rve; Domain location=56-225::455-582::780-939
MPDIPRDVAEHSLDIRARARPVRQPLRRFDEEKRRVIGEEIHKLMAAGFIKEVFHPEWLANPVLVRKKGGKWRMCVDYTGLNKACPKVPYPLPRIDQIVDSTAGCETLSFLDAYSGYHQIRMKESDQLATSFITPFGMYCYVTMPFGLRNAGATYQRCMNHVFGEHIGRTVEAYVDDIVVKTRKASDLLSDLEVTFRCLKAKGVKLNPEKCVFGVPRGMLLGFIVSERGIEANPEKIAAITSMGPIKDLKGVQRVMGCLAALSRFISRLGERGLPLYRLLRKAECFAWTPEAKEALGNLKALLTKAPVLVPPADGEALLVYVAATTQVVSATIVVERQEEGHALPVQRPVYFVSEVLSETKIRYPQVQKLLYAVILTRQKLRHYFESHPVTVVSSFPLGEIIQCREASGRIAKWAVEIMGETISFAPRKAIKSQVLADFVAEWVDTQLPTALIQPELWTMFFDGSLMKTGAGTGLLFISPLGKHLRYVLRLHFPASNNVAEYEALVNGLRIAIELGVRRLDARGDLQLVIDQVMKNSHCRDPKMEAYCDEVRRLEDKFFGLELNHIARRYNETADELAKIASGRTTVPLDVFSRDLHRPSVKIEDAPEPEAPSAQAEAPSARPEVPSAQPEVPSAPEGETLDVEEEQSGAMPDRDWQAPYLQYLRRGELPLDQVEARRVARRAKSFVLLGDEEELYHRSPSGILQRCISIAEGRELLQEIHSGACGHHAAPRALVGNAFRQGFYWPTAVVDATRIVRTCEGCQFYAKQTHLPAQALQTIPITWPFAVWGLDLVGPLQKAPGGYTHLLVAIDKFSKWIEVRPLNNIRSEQAVAFFTNIIHRFGVPNSIITDNGTQFTGKKFLDFCEDHHIRVDWAAVAHPMSNGQVERANGMILQGLKPRIYNDLNKFSKQWMKELPSVVWSLRTTPSCATGFTPFFLVYRAEAILPTDLEYGSPRTRAYTDQSNQASREESLDQLEEARDRALLHSARYQQSL

SEQ ID NO: 69983 - protein, 1031 aa, Zea mays
  Coding DNA Sequence Number=SeqID_28204
  Gene Ontology: Mol. function=nucleic acid binding; Cellular component= intracellular; Biological process=chromatin modification
  Homolog annotation: Hit_ID=Q2QTX9; Match level="QueryCoverage=99%, HitCoverage=73%, E-value=0.0, Identity=50%"; Hit description=JmjC domain containing protein, expressed
  Pfam annotation: Domain name=zf-C2H2; Domain location=912-934; Score =7.9; E_value=1.5; Accession=PF00096.16; Description=Zinc finger, C2H2 type
  Pfam annotation: Domain name=zf-C2H2; Domain location=935-959; Score =9.8; E_value=0.9; Accession=PF00096.16; Description=Zinc finger, C2H2 type
  Pfam annotation: Domain name=zf-C2H2; Domain location=965-989; Score =19.7; E_value=0.01; Accession=PF00096.16; Description=Zinc finger, C2H2 type
  Pfam annotation: Domain name=zf-C2H2; Domain location=995-1021; Score= 19.9; E_value=0.0092; Accession=PF00096.16; Description=Zinc finger, C2H2 type
  Pfam module annotation: Pfam domain module=zf-C2H2::zf-C2H2::zf -C2H2::zf-C2H2; Domain location=912-934::935-959::965-989::995-1021
MVSHYQLLYELALSLHLREPKNSHMPRSSRLRDKKKNEENNSFLSTLLDKSSCIIIPEIEFPLPSVPTTRAPEVSDKQGLIAGPCSISQQKAEETLVYGDEIDEIKEVENMSESTTSSACNQRKFYETKFGIVSSTAFCLSTSDIQIGVIGKGRSHQGGGLLDQGRLPCVQCGILSYACVAIIQPKEAAVQYVISRECMSSSAIHREIMESDDTSNRMVIAHQQGYAHQTDDNTIQNVSAAQVSDRCRQLYSSSTHGCTSALGLLASAYESSESDEEADAPNNISNNCENNNAANGATNIQSSRTSVQDENTNLQLYEEENNSRAIASLMQPVEDKSTAMTPVSMETNIIHLADQGESLTFHEQWHAYLDFDDLTASGVKASPNTSLGTAKAAMKTDALTLFKYSKDSCRMHVFCLEHALETWTRLEQIGGANIMLLCHPEYPRAESAAKVIAEELGMKHAWKDITFKKATREDTGRIQLALQDEDAEPTSSDWAVKMGINIYYSAKQSKSPLYSKQVPYNSIIYKAFAQENPDSFADGQRSSTTKKKVAGWWCGKKWMSNQVHPLLACEQVEQNHETVYSKTMLSASCDRMQEQSTRSTTLINQNSSKKITRRKEGDSVEKSRGKKKRCSASASDEAALHCSVYDQPVNSDNHAKYEDGDESVEARNTRHHQQYESLNKKSSLKRRKDNNRSNSFHELHKDNVDIDCRFDTDGTENTSIGDWDNSPPQGGDVKAVKSGARLLGTKRFSKEKGSNGLSNVNKKLVKMGKKISTKKQKNDKTNRQFQENHKKADIVDLLHEDDGDEGTYIDCNEIRKQKTDDVRVKSRGKMQSGKKKVSRCQASDGSHNGGKEMKLSSDIEVCNRRGDGTTAANFEEIPKEKADAVKVKPKMQGDKKKTSKHQAGDGDKGAKFSCDIEGCDMSFSTQHDLSLHKRDICPVKGCKKKFFCHKYLLQHRKVHLDERPLMCSFPGCAKTFKWPWARTEHMRVHTGVRPYACTEPGCTQTFRFVSDFSRHKRKTGHSCDKKKKRGL

SEQ ID NO: 69984 - protein, 255 aa, Zea mays
  Coding DNA Sequence Number=SeqID_28205
  Gene Ontology: Mol. function=ATP binding; Biological process=defense response
  Homolog annotation: Hit_ID=Q8LLA9; Match level="QueryCoverage=57%, HitCoverage=17%, E-value=2e-12, Identity=28%"; Hit description=RGH1A
MASLATKLGDLLMEEYVVHKALKPDIESLSRELVMMNVALVDVSQVPPDQLTEGIRCHKRQSLQEDPWQDHCRDVDEEVQGWRQISNKVKDIKKLSYQLVELRTKYTIRGAGVDLATSTSIDPCVINLYKKESDLIGIQESRDKVIRACTVSVQSSPFQSSKKHWCGLCSIYRDSRNQRFLLKSGSREAVCGGDWEPPRQLQRLSIKGIVFSRQPRWINHSSLPCLCFLYLSVHAVEAHDLDNLVRLTQLQYLKL

SEQ ID NO: 69985 - protein, 128 aa, Zea mays
  Coding DNA Sequence Number=SeqID_28206
  Homolog annotation: Hit_ID=Q6QP51; Match level="QueryCoverage=62%, HitCoverage=25%, E-value=2e-07, Identity=46%"; Hit description =Putative growth-regulating factor 1
MEGAPIGLDVALAIAAAVHASWHGSDHVDAQHVEADVRQASGATGSSTSPDLGPQPQKEVSASPDLRARPPPQPRKVVSASPDPKARPQPQPRRMVSASPDPRARPQPRPPRMVSASPDPRARPRPRP

SEQ ID NO: 69986 - protein, 229 aa, Zea mays
  Coding DNA Sequence Number=SeqID_28207
  Gene Ontology: Mol. function=RNA binding; Cellular component=nucleus; Biological process=regulation of translation
  Homolog annotation: Hit_ID=Q9T0G5; Match level="QueryCoverage=81%, HitCoverage=24%, E-value=3e-33, Identity=44%"; Hit description =Putative DNA-directed RNA polymerase
  Pfam annotation: Domain name=KH_1; Domain location=128-194; Score =85.3; E_value=1.8e-22; Accession=PF00013.19; Description=KH domain
  Pfam annotation: Domain name=KH_1; Domain location=33-98; Score=69.0; E_value=1.5e-17; Accession=PF00013.19; Description=KH domain
  Pfam annotation: Domain name=KH_2; Domain location=128-180; Score =13.4; E_value=0.003; Accession=PF07650.7; Description=KH domain
  Pfam annotation: Domain name=KH_2; Domain location=33-103; Score=4.0; E_value=0.04; Accession=PF07650.7; Description=KH domain
  Pfam module annotation: Pfam domain module=KH_1::KH_1::KH_2::KH_2; Domain location=128-194::33-98::128-180::33-103
MVVSVSGHGASIPPLSSQSSAPQYSYGGHQGTSKKIEIPNGRVGVIIGKAGETIRYIQLQSGAKIQVTRDHEAEPGALTRQVELSGNPEQISKAEQLIKEVIAEADAGSSGAVSGGRKYNAPQPGAETFQMKIANNKVGLIIGKGGETIKSMQAKSGARIQVIPLHLPAGDTSTERTVHIDGTQEQIEHAKQLVAEVTSEPQHARRLLYDLFPFSEHSLLIVLGKVFMT

SEQ ID NO: 69987 - protein, 39 aa, Zea mays
  Coding DNA Sequence Number=SeqID_28208
MAATEPSCCGISAWRRRRVLQPGPHMVEVVIVTGIIYFN

SEQ ID NO: 69988 - protein, 134 aa, Zea mays
  Coding DNA Sequence Number=SeqID_28209
  Homolog annotation: Hit_ID=Q6H3Y3; Match level="QueryCoverage=52%, HitCoverage=21%, E-value=4e-18, Identity=75%"; Hit description =Chaperone protein dnaJ-like
MSSNQIQMWAPCVGARPSRGERDSTIENTSKNKKVELGFLDEERDQELPDFSSFIPFLPPLSAANLKVYYATRFTIIVGIMVFSGFLAPIKCTQVIHQVKSKTFESSWVICVAIDASESWLICEIHGCRLILSG

SEQ ID NO: 69989 - protein, 704 aa, Zea mays
  Coding DNA Sequence Number=SeqID_28210
  Gene Ontology: Mol. function=protein serine/threonine kinase activity; Cellular component=membrane; Biological process=protein amino acid phosphorylation
  Homolog annotation: Hit_ID=Q1EPA3; Match level="QueryCoverage=52%, HitCoverage=60%, E-value=1e-111, Identity=56%"; Hit description =Protein kinase family protein
  Pfam annotation: Domain name=Pkinase; Domain location=395-644; Score =22.1; E_value=7.1e-10; Accession=PF00069.15; Description=Protein kinase domain
  Pfam annotation: Domain name=Pkinase_Tyr; Domain location=395-644; Score=75.1; E_value=2.3e-19; Accession=PF07714.7; Description =Protein tyrosine kinase
  Pfam module annotation: Pfam domain module=Pkinase::Pkinase_Tyr; Domain location=395-644::395-644
  Subcellular localization annotation: CTP_CleavageSite=54; ConfidenceScore=5.82e-01
MSDIAPSPSSSPSSGGNGGGNNSTAPAPRGSSSSSSPPKPRNGWPSSSPPPTPSSDSEGSRSTPPSDWQDPSSSSSSPPPSRSSPPPPSSQPPPSPPPSPSSWSGGGNSTSSSPPTPPSQPSPPPSGRSSSPPQRSSEGSSPSPQSSSSNQAPPAPSGWSPSPSRESPPQSSSQSPPPQSDVDQPNSQPSNTPQSPPPPPSPPSSSPPAPPTNQSVVIIPVPVPSNNSPPGALPPPGLVPTAPGATVMSSTSVPGSAASSSSQEASTGASNGGGGSTSTRVVGSSHVAAAIAGAAITGLMFALLAVFLVSKRRKKKTGGLVYHNDGSNYNMASGQFMGSNNPSYTQPAAGESADMGGGGGYYHYQNQSGSMDAAAAPGSMASFSYEELTSITSNFSRDNVIGEGGFGCVYKGWLGDGKCVAVKQLKAGSGQGEREFQAEVEIISRVHHRHLVSLVGYCVAQHHRMLIYEFVPNGTLEHHLHGRGMPVMDWPTRLKIAIGAAKGLAYLHEDYFGLAKLTNDTNTHVSTRIMGTFGYLAPEYASSGKLTDRSDVFSFGVVLLELITGRKPVDQARQGEESLVEWARPVLVDAIETGDLGAVVDPRLVDGGAAYDRGQMMVMVEAASACVRHSAPKRPRMVQVMRALDDEGGMSDLSNGVKVGQSRNFDSGHQQAAAIQQLRATAFASEEYTGEFEQSSGMDYLKSG

SEQ ID NO: 69990 - protein, 244 aa, Zea mays
  Coding DNA Sequence Number=SeqID_28211
MEENGDDDDDDEGMEVRMGFSPKAGLWSASASFPWRRWLHRRLPPTCSRYPTQGPQRRRSLSSPRCLPRGKGLEEPEAEVGCGRRAPIRPRAMISPSQGSGYHRLALEGQATQGDTVAEMGASPVAPLVEAVPVSEEETRVADAPSAMASPTVTDLLRAISDTPETTRSPEASNVEEADPSRRPRVSAEEHIIPPAIAKVASDLIHAGLDLSMWGGLTLTWMASEGNPYFVLNDAKEKQIWSEL

SEQ ID NO: 69991 - protein, 64 aa, Zea mays
  Coding DNA Sequence Number=SeqID_28212
MAAGEEECCRRGNSRASPLWAIWASGRLAKLLFIVHVKIIMIIGTWRTTRENSATTRVIWDALG

SEQ ID NO: 69992 - protein, 164 aa, Zea mays
  Coding DNA Sequence Number=SeqID_28213
MCDSAHSDGPRGVRQIKSQHLAPTVRATKTTRDGKRPSLKVAPSIDNTAQAALLAEKKGKALADNTPQEAFKDDAVNSKRQRQDHPTPEGTVRTCSSEGAPQAPPPGFAPPVGEDTIEDGEVIGILAEDQLKLRALRIKNNHLQKQKETLEAKHQRVTMQTKVR

SEQ ID NO: 69993 - protein, 69 aa, Zea mays
  Coding DNA Sequence Number=SeqID_28214
MAAGEEGCCRRGNSRAPALRAIWASARLAGIIMLIGTWRTTRENNATTRVLPERGKGSRGMVSVGRSMG

SEQ ID NO: 69994 - protein, 96 aa, Zea mays
  Coding DNA Sequence Number=SeqID_28215
MGFAPIPAVTEPPKVLGPPTDVLVLRISDSHEETAELTSFITYNNMGLKTLSMECTFASLTRQRKKTLKDMLAFGNQGFSRLEWVHANREHRYSTV

SEQ ID NO: 69995 - protein, 649 aa, Zea mays
  Coding DNA Sequence Number=SeqID_28216
  Gene Ontology: Mol. function=nucleic acid binding
  Homolog annotation: Hit_ID=Q2QX71; Match level="QueryCoverage=93%, HitCoverage=43%, E-value=4e-10, Identity=25%"; Hit description=SAP domain containing protein, expressed
MGSLPNAEESPFGLESLFWQESIHESVEYGAPASATTHTENGFGESKGCHVKSALENTHVSEPFSHHDTEENISKIGGCMHTSQQDNGMEDAIENPLISLSTPGCKHEGALSEEAVHTMKDYAGTCSSNPRVPMQLHDDLAFPGPEKSGDESVNIEVKVHHGSNLSQLGSTDLLDDTELLHQGHNYKDRSNEDMLEQAASEPCTNGDDIVEAAAATKCLESGAMLVPSEERSNLNDRQLTPKLESPDIMESGLNCDKDARNTLDNGSVVAVAGKRTPSGSGHYEHNVYQVSGICATSEAAPVGVVETGIAVETSSLVDDQPNPVLDGDEVEKHSLNCEADTGRILGTGSVTSNTTLVPKDGHTICCQELELPNGLSSFLFPEESGICQYASVSGSGPCLQHVNESTSTQATYNIETLNQQHHEEYDQTARGILASSFPEAVGIEQSGLAPAAEAPVLAVPDGQPNSKLEGNEVDEHSCSYDAEFLNREASNLHKDLFSEDSHRSHLPSLRSPQRSAYFHNGNDSGSVGVCQSSRRGGVDGLRAKRQSFKVSSSIKGSYVAKTSVPRPKPGDSLSQSAIALRGVRKNTTAVEVGGHPVSLKPNAVRSVAKDPSSSRGPPRDSLSQSAIALPKHRKDATAVKSKTNNKPWL

SEQ ID NO: 69996 - protein, 625 aa, Zea mays
  Coding DNA Sequence Number=SeqID_28217
  Gene Ontology: Mol. function=nucleic acid binding
  Homolog annotation: Hit_ID=Q2QX71; Match level="QueryCoverage=54%, HitCoverage=14%, E-value=3e-18, Identity=28%"; Hit description=SAP domain containing protein, expressed
  Pfam annotation: Domain name=SAP; Domain location=3-37; Score=18.1; E_ value=0.0097; Accession=PF02037.17; Description=SAP domain
MEFAAMKRRDLLELCRQHGLAIRGSKADLAAVLAGALSGLGGPYPERGGKDKPKLCYIQGTITAMREITEGPPVAVAAAAESVVGVVVRKGCLKRLGGSASGGTSGASKKVSFALDETPEVKGRRRRSQVILPLVVAKTRGRRKGRKAPSSAAVSGSGRRRKHDGGGGSARGSVTREVGADAPVTRSRMKVASLHSHSGVESQNNPAKAEERGKVVGTATRRKQKRKAHENAGDIANSWAGISRRITRSLSSSAAAVSLPCDAEEERGARKVESSVAADVILATLVGKKRRKTWCRPKAREELPAAALGERGSSQKSDVGGGSVDHGAFQELCADAPVTQHGTKVKWKIQENSEDICARASSGISHRRTRKSSSSPAAVLLSPAAEKMEVADDKDEPGVKELAEVKVFATTAVPIIAESTSKRKEVDHVPAELKPAKVEFYGRTTRSHSTAAAALSPTVIGSKLRKAGDVHTNGEVSKDLEVPRNDAPITRSLRNRVVHINNSAVDGTRARKKLGTKRKPSSRPATHGRQPPVPPVEDKEQVAVPCKFSQHRRSSRNRPRPDELLRNTYLENNKVNGVPVGGKDLSIAHRLTHNAAKASVGDVESLSPGFEDSLTRSNKDDVRTK

SEQ ID NO: 69997 - protein, 154 aa, Zea mays
  Coding DNA Sequence Number=SeqID_28218
  Gene Ontology: Mol. function=protein binding; Biological process =regulation of transcription
  Homolog annotation: Hit_ID=Q53PP5; Match level="QueryCoverage=94%, HitCoverage=33%, E-value=6e-70, Identity=82%"; Hit description=Tub family, putative
  Pfam annotation: Domain name=F-box; Domain location=51-106; Score =36.4; E_value=9.6e-08; Accession=PF00646.23; Description=F-box domain
MSFRSIVRDVRDGFGSLSRRGFEVKFLGHRRGRSHGAVHELRDPAPVIQSSCWANLPPELLRDVIERLEASEATWPNRKSVVSCAAVCRTWREICKEIVKNPEFSGKITFPVSLKQPGPRDVTIQCFIKRDKSTQTYYLYLCLSTDIANNKIMT

SEQ ID NO: 69998 - protein, 118 aa, Zea mays
  Coding DNA Sequence Number=SeqID_28219
MMKRDLMMVSNLLWRLLPRKKYFKLRKQGKSKTLGKTRDSTLNPMTERECVDERELCVVKVEDQSFFYIEEIIENRMIKEKASMTIISVVQGAMGERKLEQEFMNMLGKNVWRWLIVA

SEQ ID NO: 69999 - protein, 140 aa, Zea mays
  Coding DNA Sequence Number=SeqID_28220
  Homolog annotation: Hit_ID=Q10MI6; Match level="QueryCoverage=29%, HitCoverage=15%, E-value=5e-10, Identity=73%"; Hit description =Expressed protein
MIAVLALAAAAAVAFLESAAGGISYAGDGWLHECAKWDAEGGRFLASTFFGGGVAEVRAGEGEAEERVVVADPVAAGRVALGLAVDAPRRRLLLVYADRPPRLGYAALGAYDLGSWRRLFLTRLDVPGVWASRQYGYPVC

SEQ ID NO: 70000 - protein, 278 aa, Zea mays
  Coding DNA Sequence Number=SeqID_28221
  Gene Ontology: Mol. function=DNA binding; Cellular component=nucleus; Biological process=regulation of transcription, DNA-dependent
  Homolog annotation: Hit_ID=Q8S4P4; Match level="QueryCoverage=98%, HitCoverage=32%, E-value=1e-119, Identity=73%"; Hit description =Polycomb protein EZ3
  Pfam annotation: Domain name=SET; Domain location=124-251; Score =155.4; E_value=1.5e-43; Accession=PF00856.18; Description=SET domain
MPEEQDMVARTRIYRRRGRNRKLKYTWKSAGHPTVRKRIGDGKQWYTQYNPCVCQQMCGVRRAAKTSLEAVIVQKVNAEADSAPVLQPVVNVIQMFVGIVGCGDGSLGEPPARGDGYQCGNMKLLLKQQQRILLGRSDVAGWGAFIKNPVNKNDYLGEYTGELISHKEADKRGKIYDRANSSFLFDLNDQYVLDAYRKGDKLKFANHSSNPNCYAKVMLVAGDHRVGIYAKEHIEASEELFYDYRYGPDQAPAWARRPEGSKKDEASVSHHRAHKVAR

SEQ ID NO: 70001 - protein, 46 aa, Zea mays
  Coding DNA Sequence Number=SeqID_28222
MDTPDSPVAHETPTVHCPMPNEIIPIEISILNGILKPDEIPIENPF

SEQ ID NO: 70002 - protein, 263 aa, Zea mays
  Coding DNA Sequence Number=SeqID_28223
  Gene Ontology: Mol. function=DNA binding; Cellular component=nucleus; Biological process=regulation of transcription, DNA-dependent
  Homolog annotation: Hit_ID=Q8S4P4; Match level="QueryCoverage=92%, HitCoverage=34%, E-value=1e-101, Identity=67%"; Hit description =Polycomb protein EZ3
MASSSKASDSSSQRSKRSDQGTGREAAPASVVPIHGNLTQLIRQIKSRRLLYIKEKLEANRKTLQRHSCALFDVAAAAEVASRGSDGGNALSQRAAEGQFRLAGSDLAHGIGERDVVYMQEENLASGTLVLSSSGAAAQRTVVRFVKLPLVERIPPYTTWIFLDKRATQEHGLNREVVNVLCQFIDSTPSEIEERSEVLFEKNEKNSGSSDKIERQLSLDKTMDAVLDSFDNLFCRRCLSEKQPYSFEPDENKKPCGRQCYLR

SEQ ID NO: 70003 - protein, 104 aa, Zea mays
  Coding DNA Sequence Number=SeqID_28224
MVIEEIIKGQHDIEENVRSTQDSIVLNASQGEKGEEGGEKVCRTNDLPGGMVPAKKKKKVEAPQERRVSERLKKDSGIRIEEKNRRMDAKRNLEDIIKVSKNGG

SEQ ID NO: 70004 - protein, 121 aa, Zea mays
  Coding DNA Sequence Number=SeqID_28225
  Homolog annotation: Hit_ID=Q69MJ7; Match level="QueryCoverage=60%, HitCoverage=15%, E-value=2e-14, Identity=54%"; Hit description =Pentatricopeptide (PPR) repeat-containing protein / CBS domain- containing protein-like
MPSTDLRRLTARIVDLPPGSPRSWRTWKQLRGGGFRNTIGMNVVLEACVRCGDVDRALRLFEEIRGPRGCGVDGVLRHPAQGPDTTRLLDKQLVLELQHDGHLDLMDAIWTKREHMDSHLE

SEQ ID NO: 70005 - protein, 123 aa, Zea mays
  Coding DNA Sequence Number=SeqID_28226
  Homolog annotation: Hit_ID=Q69MK0; Match level="QueryCoverage=34%, HitCoverage=26%, E-value=3e-16, Identity=95%"; Hit description =Putative TATA box-binding protein associated factor 10
  Pfam annotation: Domain name=TFIID_30kDa; Domain location=28-73; Score=78.6; E_value=2e-20; Accession=PF03540.4; Description =Transcription initiation factor TFIID 23-
MVPPLPSRLLYFSVSGLTLMLGSVARKIPDELVEHYLGRSGFHCPDLRLTRLVAVATQKFLSDIASDSLQDRGGGGHLGQEPELLPSLLDPTPVAGTELAPVSCDTVNLEGDGSGGQFESTDK

SEQ ID NO: 70006 - protein, 330 aa, Zea mays
  Coding DNA Sequence Number=SeqID_28227
  Gene Ontology: Mol. function=hydrolase activity, hydrolyzing O -glycosyl compounds; Cellular component=cell wall; Biological process= carbohydrate metabolic process
  Homolog annotation: Hit_ID=Q10PC7; Match level="QueryCoverage=58%, HitCoverage=55%, E-value=2e-73, Identity=69%"; Hit description =Xyloglucan endotransglucosylase/hydrolase protein 28precursor, putative, expressed
  Pfam annotation: Domain name=Glyco_hydro_16; Domain location=1-125; Score=121.9; E_value=1.8e-33; Accession=PF00722.11; Description =Glycosyl hydrolases family 16
  Pfam annotation: Domain name=XET_C; Domain location=153-198; Score =46.5; E_value=8.9e-11; Accession=PF06955.3; Description=Xyloglucan endo-transglycosylase (XET
  Pfam module annotation: Pfam domain module=Glyco_hydro_16::XET_C; Domain location=1-125::153-198
MQMQLSNGDVYEKTHDELDFEFLGNVRGREWRVQTNVYGNGSTDAGREERYDLPFDPTDDFHHYSILWTSDRIIFYVDETPIREVVRTAAMGAAFPSKPMSLYATIWDGSAWATLGGRYRVNYKYAPFVAEFADLAIQGCAVDPAADHAVASCGAGLGLAPLAVSAEQRSAMAAFRRAHTSYSYCHDRRRYPVALSECGAGRGAPPPAACLAPDRDEAATGATRGAARGHRGGAPGRLLHVIAGPWPLATSRRRGGDGCTLWIGLDWIGLDWGVGRGLSGMEKLASLYYSRHGSRSCLLPVVGPMSVPTPIASRVAVDEEKAIRWPLFTL

SEQ ID NO: 70007 - protein, 82 aa, Zea mays
  Coding DNA Sequence Number=SeqID_28228
MVQCSDQIAKFRYLTVGDLARRFVPSPRFTPELNTDNDPRVKDLAVDELGSTVRSVIHLFAPATWPSGHHRRVRRSPWGATP

SEQ ID NO: 70008 - protein, 285 aa, Zea mays
  Coding DNA Sequence Number=SeqID_28229
  Gene Ontology: Cellular component=chloroplast
  Homolog annotation: Hit_ID=Q93YW0; Match level="QueryCoverage=57%, HitCoverage=22%, E-value=2e-35, Identity=49%"; Hit description =EXECUTER1 protein, chloroplast precursor
  Subcellular localization annotation: CTP_CleavageSite=22; ConfidenceScore=5.06e-01
MNPANRPPLLQLREPPARRALPQTARSDRSPYPHSRISTPEATTTRTAWAVARRRAVHVPAPQLVIAAQANQCARRPGAGSRPRPRCDRNARGGSPAGNRLVPLILLHVLLVLVGHVVSARINKEVQELLRLTLSKARVKLTDNTFFNWIIMDTNSMDPFNGLYVGAFSPYGPEIVQLRRKFGHWNSFDDVEFFEYVEAVKLTGDLSVPAGQITFRAKIGKGKRLENRGAYPEEIRCGNFCLQIRLFEICSDIASYKGQGRIAQPGFKNPRWVDGELLVLNGKVD

SEQ ID NO: 70009 - protein, 118 aa, Zea mays
  Coding DNA Sequence Number=SeqID_28230
MMCIWIIIILIGFYVFCDGPFSFVRDLSGRMDGPSDNIFGLSGTMHRWVSQVGSMMLLGETSEQSFEPTIEGRFDRYSCDVPNGVTKKCVRADPGANHCYQYRRLRSLRKRGRSAAEG

SEQ ID NO: 70010 - protein, 753 aa, Zea mays
  Coding DNA Sequence Number=SeqID_28231
  Gene Ontology: Mol. function=protein serine/threonine kinase activity; Cellular component=cell surface; Biological process =protein amino acid phosphorylation
  Homolog annotation: Hit_ID=Q8LMB0; Match level="QueryCoverage=96%, HitCoverage=95%, E-value=0.0, Identity=47%"; Hit description =Putative S-receptor kinase
  Pfam annotation: Domain name=B_lectin; Domain location=75-193; Score =92.4; E_value=1.3e-24; Accession=PF01453.15; Description=D-mannose binding lectin
  Pfam annotation: Domain name=Pkinase; Domain location=460-732; Score =167.7; E_value=2.9e-47; Accession=PF00069.15; Description=Protein kinase domain
  Pfam annotation: Domain name=Pkinase_Tyr; Domain location=461-732; Score=90.4; E_value=5.6e-24; Accession=PF07714.7; Description =Protein tyrosine kinase
  Pfam annotation: Domain name=S_locus_glycop; Domain location=210-333; Score=107.2; E_value=4.8e-29; Accession=PF00954.11; Description=S -locus glycoprotein family
  Pfam module annotation: Pfam domain module=B_lectin::Pkinase::Pkinase_ Tyr::S_locus_glycop; Domain location=75-193::460-732::461-732::210-333
MAYLHILIVLLSSLHLILGNHATTTRDTISAGQPLRIHDKLVSQNGRYALGFFEAGSSQNTSNWYLGIWFNSIPKFTVGWVANRDAPMKNHTSLELKISHDGNLVVANRATDSIVWSTEVNMNYRNNTIIAVLLNSSNLVLRDDDASNSSSISIWQSFDHPTDSLFQWAKLGWDNATGLNRRLVSKKNSISPASGLYREELDPSGVNQVVLASLIRSTKPYWASGAWNGNRFNSSPEVSRNVGFLSFVETTHEKYHTYHVSDEVDVYYNLGVSGQVKVFVWPQGSQDWVLAHAEPRSPCDVYAACGPYTVCDDGALPHCTCMKGFTVTSVEDWELDDRSSGCSRNTALDCNLSGESSVRSMDKFLSVPCVSFGQSEHKTDGAKSSAKDIQSLEKSKRVLAIRAAIGTSAAAAVLCLFALIMLIMTWRNRRKSSYGMSQVAQGCNGIITSFRYIDLQRATKNFSEKLGQGGFGSVFKGFLSCSTAVAVKRLNHAHHGEKQFRAEVKSIGIIQHINLVRLVGFCCQGARRLLVYEHMPNGSLDIHLFRSHTTLLKWSTRYQIALGVARGLTYLHEGCRDCIIHCDIKPENILLSDSFAPKIADFGMAKILGRDASRALTTFRGTIGYLAPEWITGVAITPKVDVYAYGMVLLEIISGQRNASVSCSSSISDHDIYYPVHVARVIVEGDVMSLLDHRLNGDADSKQVEIACKVACWCIQDDESNRPTMAEVVKTLEGLLEINKPPMPTLLQAIAGS

SEQ ID NO: 70011 - protein, 71 aa, Zea mays
  Coding DNA Sequence Number=SeqID_28232
MEGVLRAGRGDSGEETRPQGGGIGRAKARTSSSEEGLTQLRAAWTAGTVGADLRRALALEAESEKGRAWAK

SEQ ID NO: 70012 - protein, 260 aa, Zea mays
  Coding DNA Sequence Number=SeqID_28233
  Subcellular localization annotation: CTP_CleavageSite=52; ConfidenceScore=5.33e-01
MAHARTQSTVTCGATRSSYSGERFPTVSPLRGPQITHASSGYSGYDPRSLLRLQSTANGWKGTAAAGFTRGVRGDAVMVARSWRNHREDRRDAARRPYTQVGAWKSGGVGSAHADPLLSAKLRGLRARWAMTCGPRVEVAQGEELIAGTAEWVHVQAEAREWLTRGGHMSARARDKALNPVIDDSHSVTISYNPIHLFADQRLTHIVYLPTANHANDPGPMAESAVAYWVYDSVADTAPICGGKVTGDKADAAIGGVWGH

SEQ ID NO: 70013 - protein, 280 aa, Zea mays
  Coding DNA Sequence Number=SeqID_28234
  Gene Ontology: Mol. function=oxidoreductase activity; Cellular component=cytosol; Biological process=leukotriene metabolic process
  Homolog annotation: Hit_ID=Q2QVJ6; Match level="QueryCoverage=88%, HitCoverage=77%, E-value=1e-84, Identity=58%"; Hit description=NADP -dependent oxidoreductase P2, putative, expressed
  Pfam annotation: Domain name=ADH_zinc_N; Domain location=103-222; Score=-4.6; E_value=0.016; Accession=PF00107.16; Description=Zinc -binding dehydrogenase
DLTDPYSPTLVQIVQVLENFGVCKVIASGHQDFKVGDLVWGMTGWEEYTLIHNPESFFKIKHPELPLSYYTGVLESFTESKCFCVPLKESYLNFFIRTLFFEQHQEPLVSLFGQFAKLTGCYVVGSAGSDEKLCLPPLLRYFPEGIDIYFENVGGSTLEAVLPNMRIHGRIPTCGMISQYNLEEPEGVHNLFEIITKRLRMEGFMVFDYYGQYHKFEQEMVGYLKAGKIAYVEDIAEGLEKAPEALIGLFTGRNVGKQLFCAVRVKCFDFLPFVFWAICV

SEQ ID NO: 70014 - protein, 62 aa, Zea mays
  Coding DNA Sequence Number=SeqID_28235
MQYNGSSSLISYEKQTIRTEFLSLQVTTLVPTITGMGDHVSGRVRGYVRWQVQSGFSNHYAK

SEQ ID NO: 70015 - protein, 186 aa, Zea mays
  Coding DNA Sequence Number=SeqID_28236
MGVTSRKDARPGSQCATCRRTCVRDTKNLCSLQHIIEQAECAKQAAMGAEKIARTAGTETASMVRARRCPRAKKTELGTGQSADGGIRRLREECATMGERQGTSRPRERGENDAVGKNRAAGQTGAEHRQGPSIEIGRPRSRTPAMGSGRGSRHVKEAELQEQGRGAAAPWERTGAEIVRARPRLL

SEQ ID NO: 70016 - protein, 43 aa, Zea mays
  Coding DNA Sequence Number=SeqID_28237
MPKIVELPWINRNNIELHLYLWLDKRHRTQPVQNYIHALYVHY

SEQ ID NO: 70017 - protein, 51 aa, Zea mays
  Coding DNA Sequence Number=SeqID_28238
MGLIVSFVFRGVILELNENIREVCATFARSSTECLIGEPSSPSRLSGRFDQ

SEQ ID NO: 70018 - protein, 102 aa, Zea mays
  Coding DNA Sequence Number=SeqID_28239
MDGARRATQEKQRPSQGHARAALGNSTTMGAGEQGEDGARRAQQGEGEGEEGRERAMGIRKLRALETIRGLRSAKKSEEEKSGGEKSEEWRMKQKIYEERDL

SEQ ID NO: 70019 - protein, 66 aa, Zea mays
  Coding DNA Sequence Number=SeqID_28240
MDANYMVKVQSIIEPQAQAEFKCSLFTNQIRTTGVVLTKTDVHATYRLRFRRSRYHWKAKEISFPT

SEQ ID NO: 70020 - protein, 242 aa, Zea mays
  Coding DNA Sequence Number=SeqID_28241
AEVGFVNPFEDSDNIDIEEDITTIRPTKPSHVDFDKFKFKGGHIEEFLAFKTWPLLIEWEMSKMSEKDASDVEPGLVRLCYKYKFEDEFREPSDGWRRLNRVFDAVDFFYPDYPNMVLDSKNRKRKVTTKRSKVLKMQVESTPQASEEILTDGCNSDTFGDHSSQRERFLQPVSIEDKGKGPVKIEEAKKAIEDDTTFGEGPFDQDLVGRRYRVHHAAGNVMGAKQLAEAIAFAKSWVQSCE

SEQ ID NO: 70021 - protein, 61 aa, Zea mays
  Coding DNA Sequence Number=SeqID_28242
MAWFCCEPFANGEQNKGKEPGRSGGGVVGFIRKRGRGGERGGARAEGARPIDPDPYIVCNL

SEQ ID NO: 70022 - protein, 107 aa, Zea mays
  Coding DNA Sequence Number=SeqID_28243
  Gene Ontology: Mol. function=DNA binding
  Homolog annotation: Hit_ID=Q2QP98; Match level="QueryCoverage=62%, HitCoverage=8%, E-value=1e-23, Identity=65%"; Hit description=HAT family dimerisation domain containing protein
  Pfam annotation: Domain name=zf-C2HC_plant; Domain location=26-82; Score=91.5; E_value=2.5e-24; Accession=PF07567.3; Description =Protein of unknown function, DUF1544
MQVDNPSSVASASITQSTTATIKSDDPAWKHCYCPDLKKKHSLKCNYCDKLINAGITRVKYHLANMAGFNVSKCKKVPTPVKENMVALLTKNCDAKEKMKGKTKGKR

SEQ ID NO: 70023 - protein, 155 aa, Zea mays
  Coding DNA Sequence Number=SeqID_28244
MGKSKKGGGSSHHSGDKRKCEPTPPSEDFGDSEYSEEESSSESEGSPTPVSPSASSDDLNDFQGIAVEVWTYIRTVERARLEGSDESEYSSDEETSSDSSEEGSGDDGGDDDDDGGDGDGGGDSDKGGDGSDKGGSGDGSGGSKGSSKGSSKASD

SEQ ID NO: 70024 - protein, 39 aa, Zea mays
  Coding DNA Sequence Number=SeqID_28245
MTLKILSSTKSVMSSKVEGESFSQHMTNYEAEEKESKNK

SEQ ID NO: 70025 - protein, 52 aa, Zea mays
  Coding DNA Sequence Number=SeqID_28246
MKPPSSYKKMRVVEPIIDRVWWEDVLNIDEAWKLVLKKIEECARVGLSMSTF

SEQ ID NO: 70026 - protein, 34 aa, Zea mays
  Coding DNA Sequence Number=SeqID_28247
MWVGECSANGGGPRGKRRVELLDFSACQDYSVDR

SEQ ID NO: 70027 - protein, 196 aa, Zea mays
  Coding DNA Sequence Number=SeqID_28248
MGNSYSGGGSAPAPAALEVPLHLCFFLLVLLLFLACSWYTSYESAAESFAYQARIVLMASPFALLLAVRLLSSVSGEGAGRSVGHLLAVPMPERDSIHRAGGSPWGVGVLLLLLLVMVSYQSNFREKWFPLASSGWPAQGNKLRAALTLYMLVTVILYFLITETTEGLDAFGKGAMAINMDDPLKNFSGSKEFEED

SEQ ID NO: 70028 - protein, 125 aa, Zea mays
  Coding DNA Sequence Number=SeqID_28249
MWMVSCRGVVQLVLVSAIAWVMLGLVALAFHFQPCISPVAFLSAKNVNHKLAVETNSEFVMFSNYPELLQSHATIHLEQRQTTMLSLPACSPFRLPPTRCDARRKSTTTATITIRSGARTGSQCS

SEQ ID NO: 70029 - protein, 52 aa, Zea mays
  Coding DNA Sequence Number=SeqID_28250
MRVVAFDAIYAQVSGALLWVYKVGDPITTSAFVDELLTSESFGPSERYWTYW

SEQ ID NO: 70030 - protein, 89 aa, Zea mays
  Coding DNA Sequence Number=SeqID_28251
MDIFLIRACLLRLLLVLFAACWRDIADGACWADTSTGGVGDTDTAVFRISRGQLQPLIFRSKVQLHEIILLPGVDPNDPSVKGLCIVMQ

SEQ ID NO: 70031 - protein, 178 aa, Zea mays
  Coding DNA Sequence Number=SeqID_28252
MGVPDLCARWRAINALQPKRIPEAGEFLRPLFLGTPDTVRCTPDSPVYTGQSARIMDPKEKPNVSSSPPTPRLDCIKCFDMLWFCYSPFHQMQNYYRYGEFDTCFGKWGDLMGCLALKTKRKAEVEEILIAREKAKPHIWTYRTVDEASENWWRMYKHAVMMSPLPGSAQLPPRSDES

SEQ ID NO: 70032 - protein, 48 aa, Zea mays
  Coding DNA Sequence Number=SeqID_28253
MQRGRYSRKECMEKKLRWRIRQPDCSCRSLGVDNEPARLGSSEFELAR

SEQ ID NO: 70033 - protein, 88 aa, Zea mays
  Coding DNA Sequence Number=SeqID_28254
MEVAVADLCQHSFVVFIDVGVDEDAIRASSEWSRTPGVRAAAADGLYRLCVRASSGPGTPGPALRLGLRTSGGPGERRCSETTRGFSA

SEQ ID NO: 70034 - protein, 50 aa, Zea mays
  Coding DNA Sequence Number=SeqID_28255
MRCSRGRPTVRMDQAGRIIGLDLGLARWLIAGDGPPGCRVLRRPSDRGRE

SEQ ID NO: 70035 - protein, 44 aa, Zea mays
  Coding DNA Sequence Number=SeqID_28256
MVASLFHARAILKGQRVSAWEPSFPLTVASEEQQALMASSTNPE

SEQ ID NO: 70036 - protein, 456 aa, Zea mays
  Coding DNA Sequence Number=SeqID_28257
  Gene Ontology: Mol. function=transferase activity, transferring hexosyl groups; Cellular component=integral to membrane; Biological process=electron transport
  Homolog annotation: Hit_ID=Q2QXP0; Match level="QueryCoverage=95%, HitCoverage=95%, E-value=1e-169, Identity=63%"; Hit description =Glycosyltransferase 3, putative, expressed
  Pfam annotation: Domain name=Glyco_transf_34; Domain location=152 -396; Score=359.4; E_value=5.8e-105; Accession=PF05637.3; Description= galactosyl transferase GMA12MNN10 family
  Subcellular localization annotation: CTP_CleavageSite=14; ConfidenceScore=5.03e-01
MGVAAGGGARLRASSAKKQRQRTLNNIKITLLCGFITVLVLRGTAGFNLLVSSGDLDGAAADAKVVEDVERILAEIRSDSEADDVVVVVEGGSSSSSSPRNATAASFGNFSASATLVKVREYSLGPPVRGWDAQRREWMAQHPEFPRLHPRGRPRVLLVTGSPPGPCDNPAGDHYLLKATKNKIDYCRLHGIDVVHNMAHLDPELTGYWSKLPLVRRLMLAHPEVEWIWWVDSDAIFTDMAFELPLSRYDGRNLVIHGYPDLLFEKRSWISLNAGIFLLRNCQWSLDLLDAWVPMGPRGPSRVEAGKLLTASLTGRPPFDADDQSALIHLLLVQKERWMDKVHVETEFYLHGFWTGLVDRYEQMMEDNHPGLGDDRWPFITHFVGCKTCGRYEDYPLDRCIRGMERAFNFADNQVLRLYGFRHRSLTTAKVRRVTDPTTNPLEAKEAALNMDAKFT

SEQ ID NO: 70037 - protein, 160 aa, Zea mays
  Coding DNA Sequence Number=SeqID_28258
  Gene Ontology: Mol. function=transferase activity, transferring hexosyl groups; Cellular component=integral to membrane; Biological process=electron transport
  Homolog annotation: Hit_ID=Q2QXP0; Match level="QueryCoverage=71%, HitCoverage=23%, E-value=8e-41, Identity=66%"; Hit description =Glycosyltransferase 3, putative, expressed
MDRVYLENQYYLHGVWTALVGKYEEAMEKHHPGYGDDRWPFVTNFAGCNPCDDGKNCSDEYPLDRCASGMERAFNFADNQVLRLYGFRHESLASAEVRRVANRSTDPLEAKEEALAFLKKPNEPDLWSNDVRKNRKRKGKGDLDSVLARILRRLGWRSKC

SEQ ID NO: 70038 - protein, 106 aa, Zea mays
  Coding DNA Sequence Number=SeqID_28259
  Gene Ontology: Cellular component=chloroplast; Biological process =translation
  Homolog annotation: Hit_ID=Q6YTV7; Match level="QueryCoverage=84%, HitCoverage=46%, E-value=3e-22, Identity=51%"; Hit description =Putative Ribosome recycling factor, chloroplast
  Pfam annotation: Domain name=RRF; Domain location=43-105; Score= -63.9; E_value=0.0073; Accession=PF01765.9; Description=Ribosome recycling factor
MSYFTGCGCLPKQSVMIYSTKFAKPQAGPVDFAERKDGEGNRNVQANFNTVRTGRANPAMLDRIEVEYYGTPVNLKSIAQISTPDVTSLLIQPYDKSRARDHGLMA

SEQ ID NO: 70039 - protein, 322 aa, Zea mays
  Coding DNA Sequence Number=SeqID_28260
  Gene Ontology: Mol. function=DNA binding; Biological process =regulation of transcription
  Homolog annotation: Hit_ID=Q6Z869; Match level="QueryCoverage=99%, HitCoverage=69%, E-value=3e-42, Identity=41%"; Hit description=Myb family transcription factor-like
  Pfam annotation: Domain name=Myb_DNA-binding; Domain location=127 -178; Score=24.1; E_value=0.00049; Accession=PF00249.21; Description =Myb-like DNA-binding domain
MPDWLQSVQLWSNQQQPSASPPQHQDELLLPCRPVALNACRKPGGAFQPFEKEKKKKDKEEKQRAELELPLPAAASSAVVGDSCDRAGATDTDTDTAENNKASSNKGGNDKEAQLSSQSQAPSRKARRCWAPELHRRFLQALQQLGGSHVATPKQIRELMNVDGLTNDEVKSHLQVLTSPFILNILGGPQKYRLHTRRPNSAAAAVQSGGTSVVAPPAAPQFVVVGGIWVPPPEYAAAVAVAAAAAAQPQQVHLAGDASGTTTTAADKVYAPVATTLTPAPRPRPRPRPERQSSSCSGARRSGDACSGSPAVLSSSSHTASA

SEQ ID NO: 70040 - protein, 345 aa, Zea mays
  Coding DNA Sequence Number=SeqID_28261
  Homolog annotation: Hit_ID=Q94GG7; Match level="QueryCoverage=20%, HitCoverage=24%, E-value=2e-12, Identity=53%"; Hit description =Putative transcription elongation factor
  Pfam annotation: Domain name=TFIIS; Domain location=18-104; Score =86.4; E_value=8.6e-23; Accession=PF08711.1; Description =Transcription factor S-II (TFIIS)
MAGGNASCSVRPDHGGNGDVVATLERIGRKLARKQADNQAVVDLIRELQAVPMTYEALEATMIGRTVNGLRKTAPSALARLLADTLYRQWKALAHEWHASSKTPTPMLPEADNGIKEPSYSSPPPPKVDDDKDTKKRSSSPPPPQPLDAQQSAGPEADREMGALPTTASVRKPNILRFRMVTVTEPEKPDQRRVRLIPLATPHPAPPSNDAMQNDSGNKQQACCSATAASHHQGTNADNACVGSTDVAPLTTVVKPSTALSNHIASSGACKRKEEVSTDFDEERLAKARARLHEGYEEASAAREKRKTKLIDVIDVPEKAKRRPAGHRTRKKQPPIRSLNLSQDA

SEQ ID NO: 70041 - protein, 127 aa, Zea mays
  Coding DNA Sequence Number=SeqID_28262
MGKNNKRKRELTPPSEDFGDSEYSEEEFSSESEGSPAPGIAAEVWTYIWAVERSGLEGSDESEYSSDEEDSPEEDDEGDDDDDDGRGDGSDDGDGGSRGGNGGSRSGNGGSKGGDGGSSRGSNRASG

SEQ ID NO: 70042 - protein, 456 aa, Zea mays
  Coding DNA Sequence Number=SeqID_28263
  Gene Ontology: Mol. function=hydrolase activity; Cellular component =extracellular space; Biological process=biological_process
  Homolog annotation: Hit_ID=Q2QXM4; Match level="QueryCoverage=90%, HitCoverage=90%, E-value=1e-160, Identity=69%"; Hit description =Ser/Thr protein phosphatase family protein, expressed
  Pfam annotation: Domain name=Metallophos; Domain location=143-349; Score=50.1; E_value=7.5e-12; Accession=PF00149.18; Description =Calcineurin-like phosphoesterase
MATAALALALLVLALPASLAVTSTYVRPPPRATLSSLLEDDAGADGQTPQQVHISLVGPDKVRVSWITAADAPATVDYGTDPGQYPFSATGNTTAYSYVLYQSGSIHDAVIGPLQPSTNYYYRCSGSSSRELSFRTPPAALPFRFVVVGDLGQTGWTESTLKHVAAADYDALLLPGDLSYADLVQPRWDSYGRLVEPLASARPWMVTQGNHEVERLPLLEPRPFKAYNARWRMPYDYAAADSVAAAPPSDDNLFYSFDVAGGAVHVLMLGSYADYAAGSAQLRWLRADLAALRRRGTPPAFVLALVHVPWYSSNEAHQGEGDAMRDAMEALLYHGARVDAVFAGHVHAYERFHRVYAGKEDPCGPVYVTIGDGGNREGLANKIIDPQPSISAFLEARIGHGRLEVVNATQALWTWHRKDDNQPVVGTKCGSTASRPPQLQPKHQDDVVMGLFHSWG

SEQ ID NO: 70043 - protein, 663 aa, Zea mays
  Coding DNA Sequence Number=SeqID_28264
  Gene Ontology: Mol. function=protein-tyrosine kinase activity; Cellular component=integral to membrane; Biological process=protein amino acid phosphorylation
  Homolog annotation: Hit_ID=Q9AWX9; Match level="QueryCoverage=96%, HitCoverage=96%, E-value=0.0, Identity=62%"; Hit description=Extra sporogenous cells-like
  Pfam annotation: Domain name=LRR_1; Domain location=117-139; Score =14.6; E_value=0.36; Accession=PF00560.23; Description=Leucine Rich Repeat
  Pfam annotation: Domain name=LRR_1; Domain location=141-163; Score =10.7; E_value=2.8; Accession=PF00560.23; Description=Leucine Rich Repeat
  Pfam annotation: Domain name=LRR_1; Domain location=165-187; Score =10.0; E_value=3.8; Accession=PF00560.23; Description=Leucine Rich Repeat
  Pfam annotation: Domain name=LRR_1; Domain location=190-213; Score =14.0; E_value=0.54; Accession=PF00560.23; Description=Leucine Rich Repeat
  Pfam annotation: Domain name=LRR_1; Domain location=69-91; Score=7.8; E_value=10; Accession=PF00560.23; Description=Leucine Rich Repeat
  Pfam annotation: Domain name=LRR_1; Domain location=93-115; Score =8.4; E_value=7.5; Accession=PF00560.23; Description=Leucine Rich Repeat
  Pfam annotation: Domain name=Pkinase; Domain location=387-660; Score =15.3; E_value=1.8e-09; Accession=PF00069.15; Description=Protein kinase domain
  Pfam annotation: Domain name=Pkinase_Tyr; Domain location=387-660; Score=10.8; E_value=3.9e-13; Accession=PF07714.7; Description =Protein tyrosine kinase
  Pfam module annotation: Pfam domain module=LRR_1::LRR_1::LRR_1::LRR _1::LRR_1::LRR_1::Pkinase::Pkinase_Tyr; Domain location=117-139::141
MASARLVALAAFLLLLLFALGPGEARAADDGEVRALLALGAALDPTGRLLPSGRGSPARSRPPVAGLRSLTGLYLHYNALRGGIPRELAALAALTDLYLDVNNFSGPIPSEIGAMASLQVVQLCYNQLTGSIPTQLGNLTRLTVLALQSNRFNGAIPASLGDLPLLARLDLSFNRLFGSIPVRLAQLPCSLVVLDVRNNSLTGSVPAELAAKLQAGFQYGNNSDLCGAGLPALRPCTPADLIDPDRPQPFSAGIAPQVTPSDGRGNGRVPSTRALAAVVVVAVALLLTTGVGLFALSWRRWHRQKVAGASPSTISGGRCSTEVVPSAAKASSARKSASSALASLEYSNAWDPLADARGGLGFVSQDVQLAQSLRISTEEVESATRYFSELNLLGGHGKKAGGLAATYRGTLRDGTSVAVKRLGKTCCRQEEADFLSGLRLLAELRHDNVVALRGFCCSRARGECFLVYDFVPNGSLSQFLDADTTAGGSGRVLQWSTRISIIRGIAKGIEYLHSTRTNKPALVHQNISADKVLLDYAYRPLVSGCGLHKLLVDDLVFSTLKASAAMGYLAPEYTTVGRLSEKSDVYAFGVIVLQVLTGRRKVTATAQLLAGNVDDDELVDGNLQGSYSAAEAAMLAKIGSACTSEDPDQRPTMAELLQELDTI

SEQ ID NO: 70044 - protein, 69 aa, Zea mays
  Coding DNA Sequence Number=SeqID_28265
MATVKLCLRHRQGRTGLCLPFESEADRWRFRAVGAPDTVRHLTDIGLAHRTLSGAPPDSPVHSDRAVFG

SEQ ID NO: 70045 - protein, 60 aa, Zea mays
  Coding DNA Sequence Number=SeqID_28266
MGEESQIKPRRKLVEPPLGRLNRPLTGQQTVCQSDCQTDWQTDLQAGQIGQDRLNRPYGG

SEQ ID NO: 70046 - protein, 173 aa, Zea mays
  Coding DNA Sequence Number=SeqID_28267
MYSRLNLIINELNSIGINKLGDAEIARKIISLLPQPRYGRIITILHNMEELSTLSSTIVIEKITTFEISRKMGQEEPTSLRPYAFACDEKKGKKKAPSPSYSSEEQEEECDDNEDDQPSTSSSEDEETIQRIRKEMGMIRKINLMGVPLQVEVLLFKTLTEKTKKERMLRMWG

SEQ ID NO: 70047 - protein, 72 aa, Zea mays
  Coding DNA Sequence Number=SeqID_28268
MAGEAKKLFFASEVYDVTKFLEDHPGGEDVLLHASGNDRTVTLSVQFRDNCIFGTLNIALRNIAIQKIYFAK

SEQ ID NO: 70048 - protein, 106 aa, Zea mays
  Coding DNA Sequence Number=SeqID_28269
MDTARAQRRPQNRRETTMSDGGAPWVCARCEASDEGYECTSEGRGGRAGIGQLEKGQGGDKRGLSVRRGRGVHGDAWLVRGRFGGEESDRRDPRASDSGRANWRQG

SEQ ID NO: 70049 - protein, 127 aa, Zea mays
  Coding DNA Sequence Number=SeqID_28270
  Homolog annotation: Hit_ID=Q6QP51; Match level="QueryCoverage=48%, HitCoverage=25%, E-value=2e-10, Identity=67%"; Hit description =Putative growth-regulating factor 1
  Subcellular localization annotation: CTP_CleavageSite=57; ConfidenceScore=5.27e-01
MQAARNRAKWTPFSDSQHAQPGGPGPRVMQPGPVKGDTSKRILPREGTRLRASLLIRGSKAGPPEGFNSRLRSRGPYTHYWSEVRRSAPRKGSTAASGYSGFTPITDQGFEGWPPKGSRSPQTPSEG

SEQ ID NO: 70050 - protein, 78 aa, Zea mays
  Coding DNA Sequence Number=SeqID_28271
  Subcellular localization annotation: CTP_CleavageSite=61; ConfidenceScore=5.10e-01
MARVVCTLCGKRLDGGVSVLSVGVNPVRKQQNFAVFALRWCPRTWCQRTNLNSDVVAGGMLASLLKTIYFYAGGGFAS

SEQ ID NO: 70051 - protein, 95 aa, Zea mays
  Coding DNA Sequence Number=SeqID_28272
  Gene Ontology: Mol. function=nucleic acid binding
  Homolog annotation: Hit_ID=Q2QPC0; Match level="QueryCoverage=97%, HitCoverage=7%, E-value=6e-21, Identity=47%"; Hit description =Retrotransposon protein, putative, Ty1-copia subclass
MQDVGGGAPYPMLTRTNYDNWVVMMKVMMDACGLSKAVDTGNVERNEDRWAMETIVRVVPPEMHQSLGVKATTKEAWDILKTMRTGSGLVKRTKM

SEQ ID NO: 70052 - protein, 275 aa, Zea mays
  Coding DNA Sequence Number=SeqID_28273
  Homolog annotation: Hit_ID=Q2QTC2; Match level="QueryCoverage=43%, HitCoverage=9%, E-value=1e-34, Identity=65%"; Hit description =Phosphoglucan, water dikinase, chloroplast precursor
MPKRWCPLCTNEVANRKMNTSLISSLYKGLSYLLEGFLGALFGVVSGATPDTTELHNPLTRSILIYCDNIRIVYLSINPVQNPHTKHVDMDLHFVCEPVAVEDVRVLHILMTSQFADIFTMGFSILGVLGVLVERIAPGSLPSSMKEPVVLVVNKADGDEEVKAAGDNIVGVVLLQELPHLSHLGVRARQEKVVFVTCEDDDTIKNMRLLEGKHVRLGASSNNVDLSVVSNKDDCAAMSSEPSAGGDLFAQQFSLLTTDKKLELSEVNFLLPQIM

SEQ ID NO: 70053 - protein, 187 aa, Zea mays
  Coding DNA Sequence Number=SeqID_28274
MTLGNEERGTRGTPTEQPGGALGPPMASMMTPNMGCWRVVKLDVVMEHRVHDPIKDHKGASEKLAVVKGDAHTIGRHVDSGMAKDGRQQSRCESGHVTARKVPYACAGVGLGKPKFNIAGETVGHNGRHCGREEQWRPTIVGERPTTKPGVVKKLGSIAAIEGGHRVLRGRKRTPNKPDEGVATDAE

SEQ ID NO: 70054 - protein, 130 aa, Zea mays
  Coding DNA Sequence Number=SeqID_28275
MAGDEWRLVLVGSRLGKRECGRENDDAVSEERKRTGAGIRLLYSRLGQGGVEVAAQSQKGTTADVPTAAALSLRAGEEPEDDQCWEGVSQLKGLDTLSQATKQLPPLTPFLSKGMPFRLFDHPIGNIQSN

SEQ ID NO: 70055 - protein, 360 aa, Zea mays
  Coding DNA Sequence Number=SeqID_28276
  Gene Ontology: Mol. function=carbohydrate binding; Cellular component= chloroplast; Biological process=carbohydrate metabolic process
  Homolog annotation: Hit_ID=Q2QTC2; Match level="QueryCoverage=54%, HitCoverage=16%, E-value=2e-65, Identity=65%"; Hit description =Phosphoglucan, water dikinase, chloroplast precursor
MGSYSNNNDLSPEVPIQTWIGDGDEGKNVKPKKSSLLEQLESIEQSLNESGLEALSSFLKTKKNLDQLEDAKDLDENGGVHVLLKTLLSLSYLRSILMKGLESGLRNDAPDSAIAMRQKVLQWRLCEIGLEDYSFVLLSRYINALEALGGSASLAEGLPTNTSLWDDALDALIIGINQVCFSGWKPNECSAIVNELLSWKQKGLSEFEGNEDGKYIWALRLKATLDRTGRLTEEYSEALLSIFPEKVKPKALSTQNDGNVDPFSPVFPYALDGPPPFRKRIIISPRGEVTHPKRSKEMVPELAGEDTISEDVLHRFAFLVTQGATVWVLLEKLAFLISNQRKNLHFCGAQDLKVFSRFQK

SEQ ID NO: 70056 - protein, 170 aa, Zea mays
  Coding DNA Sequence Number=SeqID_28277
  Subcellular localization annotation: CTP_CleavageSite=24; ConfidenceScore=5.67e-01
MAPLALGPVSAPTLASSVRRHAPAASLASSRLRPYRSKLGVPAASSLRGSWGFSFWFLLDGFPHKNLMQDSPIKKHRPLDLLRRIGSRSAIKKKLVFRGISDDNCQIDFVQVGEFKCFVPNPSFNSNLNSNLSLRFGSDGCFPWGDVQKALFANKSYSYVAGAFHDGCDF

SEQ ID NO: 70057 - protein, 110 aa, Zea mays
  Coding DNA Sequence Number=SeqID_28278
MEFLTKVELRFLLVNLWAPFLDFGGSIQTAAAACAILAAASNRRRAAAPPRRRAFPAEPDTAPRSAARPRRPTPPLGARFAHPGRPGATRPSPVPSRRQRTRRPIDARPL

SEQ ID NO: 70058 - protein, 92 aa, Zea mays
  Coding DNA Sequence Number=SeqID_28279
MACRQPPRENNREGRVPCREERGRSAANESCVHHRRGPNCGSGSFTAFLGMRPWPKLGGAVIMASPIAHRSDGFTAEPPCVVAGPPSTPYFR

SEQ ID NO: 70059 - protein, 88 aa, Zea mays
  Coding DNA Sequence Number=SeqID_28280
  Gene Ontology: Mol. function=unfolded protein binding; Cellular component=mitochondrion; Biological process=protein folding
  Homolog annotation: Hit_ID=Q10SR3; Match level="QueryCoverage=98%, HitCoverage=13%, E-value=4e-31, Identity=79%"; Hit description=Heat shock 70 kDa protein, mitochondrial, putative, expressed
VFSTDAGNQTQVGICVLQSEHEMATYNKCLGEIDLMGIPPAPRGLPRIEVTFDIDANGIVTVSAKDKATRKDRNITIRSSSGLSEADI

SEQ ID NO: 70060 - protein, 199 aa, Zea mays
  Coding DNA Sequence Number=SeqID_28281
  Gene Ontology: Mol. function=oxidoreductase activity; Cellular component=membrane; Biological process=response to oxidative stress
  Homolog annotation: Hit_ID=Q6AVZ5; Match level="QueryCoverage=92%, HitCoverage=54%, E-value=3e-62, Identity=67%"; Hit description =Putative peroxidase
  Pfam annotation: Domain name=peroxidase; Domain location=57-199; Score=106.3; E_value=9e-29; Accession=PF00141.13; Description =Peroxidase
  Subcellular localization annotation: CTP_CleavageSite=52; ConfidenceScore=5.36e-01
MAMLMMTWTWTCNAKLLLMTLVFAAALSATVTTSRAQSPPLQYNFYGASCPQAEATVRNVTEGIIANDRTMGAAFMRLFFHDCFVRGCDASILLDPTSSNTQVEKKAIALRGYAAVNTIKAAVEAVCPGVVSCADILAFAARDTAVVSGGFAGFGMPSGRRDGVVSSFIEVLQNIPSPTFKLPDLVSNFAKKGLDVDDL

SEQ ID NO: 70061 - protein, 75 aa, Zea mays
  Coding DNA Sequence Number=SeqID_28282
MPVVSSRRVHHRGKGHAKGRSSGRWPTCAARTRQALPLAYAYAAGMVHDHQGGSPVEPEDLPSRPTVNFDDHPYV

SEQ ID NO: 70062 - protein, 56 aa, Zea mays
  Coding DNA Sequence Number=SeqID_28283
MAKAHPAGKVYHMRAKRQMAQSLGQILRLLSSNVDMSKKKRKAKTDQIPFYSTSES

SEQ ID NO: 70063 - protein, 144 aa, Zea mays
  Coding DNA Sequence Number=SeqID_28284
MEAPTCGPRMSADAWHTCDPAKTDRVATKSYGAVGLAVGWRDSPHSSFAFTIALTSIVDSGSDGCGHIPLQMVDTLICAAEFRSNDRDLVIPLWPVYLAKESPNNLGNNPPSSVVCRSLQSGPNSYGKDLELPDINGRRPLNRE

SEQ ID NO: 70064 - protein, 52 aa, Zea mays
  Coding DNA Sequence Number=SeqID_28285
MARSKMSGEHAKREMVTGEKPESSGKKNKERTPSKEADDKPKEHKEESTGSI

SEQ ID NO: 70065 - protein, 80 aa, Zea mays
  Coding DNA Sequence Number=SeqID_28286
MEGVRRGGCAARWQASGGAPARAFYGDGHVCTGDEGHGGQRGKIKLKLKMALFSQSQLCLGAPDCPVRQADSDELAALGK

SEQ ID NO: 70066 - protein, 274 aa, Zea mays
  Coding DNA Sequence Number=SeqID_28287
  Gene Ontology: Mol. function=oxidoreductase activity; Cellular component=membrane; Biological process=response to oxidative stress
  Homolog annotation: Hit_ID=Q6AVZ5; Match level="QueryCoverage=88%, HitCoverage=72%, E-value=3e-84, Identity=65%"; Hit description =Putative peroxidase
  Pfam annotation: Domain name=peroxidase; Domain location=46-260; Score=251.1; E_value=2.2e-72; Accession=PF00141.13; Description =Peroxidase
MAATSSAALVTMVVVIAAAAISTASGTALLQYNFYGSSCPKAEEAVRNATQKIISDDPTMGAAFVRLFFHDCFVRGCDASILLDQSNSNPQPEKLAIPLRGYAQVNTIKAAVEAVCPGVVSCADILAYAARDSAAASGGFAFAMPGGRRDGSVSNLNDIPGNLPAPNMQVQDLIASFGSKGLSAADLVALSGAHSFGQTHCSFVTPRLYPAVDATMNATFRRGAQGGVPAAFARRGRHRAQQQPCDGPQQAEQPVLHQLGHRAGHVHVGPDADQ

SEQ ID NO: 70067 - protein, 163 aa, Zea mays
  Coding DNA Sequence Number=SeqID_28288
  Subcellular localization annotation: CTP_CleavageSite=69; ConfidenceScore=5.28e-01
MAPRMLCDDDGSQPPYGSKRTSARTQPLRQLSLRQAPSLLRRPRHHISWVPKSLRLPRRHGPLREGRPRGDEDETGARLEAARSLTRVDACNPLLQAHPTWARDEHEGRGIPTSLTLFSGRLASPPFALALALDPSGLGHAATLTRRPKGPPDLETPTFLEYN

SEQ ID NO: 70068 - protein, 57 aa, Zea mays
  Coding DNA Sequence Number=SeqID_28289
MAAGGGAACAPQPDETARVERFRRCPGGDGKSVFVCWQMTVVWYMPMRCHEVGEQVE

SEQ ID NO: 70069 - protein, 168 aa, Zea mays
  Coding DNA Sequence Number=SeqID_28290
MALLDGELVVLLLLRRARRVAKRMRADPDLCLPTNVGTQTKIAIVDGSSGMRGGEKGGEQTMVEVKTKDNVREVVGVKGKCALGPFLSILVIECQHKCLSVNLCQLMDKVQIKSKAKVCLVWVHRIVSGGAPDSVRCQAGSGELAALGTSTAVYYKSPDCPVVHRTVR

SEQ ID NO: 70070 - protein, 80 aa, Zea mays
  Coding DNA Sequence Number=SeqID_28291
  Homolog annotation: Hit_ID=Q2QN72; Match level="QueryCoverage=55%, HitCoverage=7%, E-value=3e-08, Identity=62%"; Hit description =Diphosphonucleotide phosphatase 1, putative, expressed
MEAPKMTDTCRSGNGITEAIPFVEWSEKGGRRFLTPAGILTFNRHSMSGFSGISKSLKTFFDAQVANTGALEAIQIAYPK

SEQ ID NO: 70071 - protein, 784 aa, Zea mays
  Coding DNA Sequence Number=SeqID_28292
  Gene Ontology: Mol. function=zinc ion binding; Cellular component =actin filament; Biological process=protein transport
  Homolog annotation: Hit_ID=Q1RYE4; Match level="QueryCoverage=100%, HitCoverage=80%, E-value=0.0, Identity=68%"; Hit description =Cytochrome cd1-nitrite reductase-like, C-terminal haem d1
  Pfam annotation: Domain name=Clathrin; Domain location=400-541; Score= -12.1; E_value=0.036; Accession=PF00637.10; Description=Region in Clathrin and VPS
MYQWRKFEFFEEKSAGRGGGGGSAAAVPAEIAGRVTCCSGGRGRVAVGCDDGTVGLLDRGFRLSYGFQAYASSVLFLQQLKQRNVLVTVGDDDQSSSQASAICLKVFDLDKVQEEGSSTTTPFCVQILRIFTDQFPQAKITSFMVLEEAPPILMIAIGLDNGFIYCIKGDIARERITRFKLQVEAASDGSTSLPITGLGFRVEGQAHQLFSVTPGSVTLFSLHIQPPRRQTLDQIGCQTNAVAMSDRMDLIIGRPEAVYFYEVDGRGPCWAFDGEKKFVGWFRGYLLCIIEDQRTHKSTLNVYDLKNRLIAHSMPVGDVSHLVCEWGYIILIMSDKKILCIGEKDMESKLDMLFKKNLYTVAINLVQSQQADPASTAEVLRKYGDHLYGKQEYDEAMSQYIHTIGHLEPSYVIQKFLDAKRIYNLTNYLEKLHDRGLASKDHTTLLLNCYTKLKDVEKLNHFIKDEDGVGEIKFDVETAIRVCRAAGYHEHAMFVAKKAGRHELYLKILLEDLGRYDEALQYISGLEANQAGLTVKEYGKILVEHRPAETVEILLRLCTDVGDPTSRRGSNSMHLLMIPSPMDFVNIFVHSPQYLMGFLENYIKTVTDSPAQTEIHNTLLELYISNDLSFPSISQENEYENHYIKEIKGKETANVYRSGIKEKTGLGKEDPKVAKNIVDRRRKGLALLKSAWTSEMEDPLYDVDLALILCNTNAFKDGLLFLYEKLKLYKEVISCYKQAHDHQGLIACCKKLGDSSQGGDPSLWGDLLKYFGDLGEDCSKEVKE

SEQ ID NO: 70072 - protein, 101 aa, Zea mays
  Coding DNA Sequence Number=SeqID_28293
MDPKGKGMVVNDNEKESIFNEPRDDKVNDSSSSQKKKDGKKKRHIRKAGSSEVAALGNLPATYGYNSPDCPVCTGLSGEPTVARANGRPRDLRGTRGRANG

SEQ ID NO: 70073 - protein, 199 aa, Zea mays
  Coding DNA Sequence Number=SeqID_28294
  Homolog annotation: Hit_ID=Q2R1K2; Match level="QueryCoverage=44%, HitCoverage=30%, E-value=4e-24, Identity=62%"; Hit description=TRNA intron endonuclease, catalytic C-terminal domain containing protein, expressed
LDAIPTRVKLANCELDLRFCSATCVDLDSTLNELGDGEDTQGSKEKEKELHALKFLTVESEQGVDGCDGAIRSLVLQLREIHGDVQVVSTPQAEELFVEVVAPEGKAFDTRCTRMKFWSELLCALWDSSSVAKMLLLTISTKSYELGSLDCLEQMIIHEMTITRWIPQSCREQQDKPCKEETNRDRQRQKSCREVLSNE

SEQ ID NO: 70074 - protein, 114 aa, Zea mays
  Coding DNA Sequence Number=SeqID_28295
MSGAPEDSDLIVFALGNFQRPLRYNSPDCLVCTGHVRCSKKERPQELASLGFSRQSLRHNSPDCPVCTGLSGASTGQRLLQAPTATCGAFIARQRAQRSGTPMMAHRTLYSTCL

SEQ ID NO: 70075 - protein, 130 aa, Zea mays
  Coding DNA Sequence Number=SeqID_28296
MWFDSPMRVERRRLKAANAKRAHDAREWKAARAEKQMLGNLAGRLSGRKMATVELMVEEDTSRLSELIALAKAGLHGEEEDDTSRLTELITLAKVGLHAQEEEDEFMSQAVEEVESSYYKQKCDEAKAED

SEQ ID NO: 70076 - protein, 123 aa, Zea mays
  Coding DNA Sequence Number=SeqID_28297
MGGSLACRGGARTAGWRRGLARRDSWRRPPGAEAQPDGRTQTAAQIPGRRSVGWLRARPGAQGLDGGAAWRAGLLAAATRHAEAGPGGGAGGARPGAQGLRAATAWRAGQIPAAAAGEKPRLG

SEQ ID NO: 70077 - protein, 123 aa, Zea mays
  Coding DNA Sequence Number=SeqID_28298
  Gene Ontology: Cellular component=chloroplast thylakoid membrane
  Homolog annotation: Hit_ID=O82230; Match level="QueryCoverage=56%, HitCoverage=34%, E-value=3e-16, Identity=65%"; Hit description =Expressed protein
MAPSTALAPVAFRSAFSTPLASKPTLDAEEEVARGGGSKGVTREDIEKGERDRDVKLTRIFGNMQNLYETVKKAQMVVQVEAVRVQKELAATEIDGYCEGELIKEPWQPHTPVELLKVFNDYN

SEQ ID NO: 70078 - protein, 411 aa, Zea mays
  Coding DNA Sequence Number=SeqID_28299
  Gene Ontology: Mol. function=protein serine/threonine phosphatase activity; Cellular component=protein serine/threonine phosphatase complex; Biological process=protein amino acid dephosphorylation
  Homolog annotation: Hit_ID=Q9FQY2; Match level="QueryCoverage=82%, HitCoverage=93%, E-value=1e-124, Identity=60%"; Hit description =Protein phosphatase type-2C
  Pfam annotation: Domain name=PP2C; Domain location=125-378; Score =85.1; E_value=2.2e-22; Accession=PF00481.12; Description=Protein phosphatase 2C
  Pfam annotation: Domain name=SpoIIE; Domain location=151-386; Score= -33.6; E_value=0.06; Accession=PF07228.3; Description=Stage II sporulation protein E (SpoIIE)
  Pfam module annotation: Pfam domain module=PP2C::SpoIIE; Domain location=125-378::151-386
MGVGSVLPVQVYLGFAVGCLFWSLRYCIVQLLVLVYQGFRGYTYTGLSCQVLDLIISVLLIRMGVYLSTPKTDKLSENGENDRLKFGLSSMQGWRATMEDAVSFLIKAINIILFALAGVKLRSPIDYPVHEGCNFVMSGALRLHSALLDLDSETAFFGVFDGHGGRVVAKFCAKYLHGQVLKSEAYSTGDLGTAVHRAFFRMDEMMQGQRGWRELSALGDKINKFSGMIEGLIWSPRGSDSNNQQDDWASEEGPHSDFAGPTCGSTACVALIRNTQLVVANAGDSRCVISRGGKNKFLPPEKQIVTANPDINVVELCDDDDFVVVACDGIWDCMSSQQLVDFIHERINTESSLSAVCERVLDRCLAPSTIAGDGCDNMTMILVQFKKPVDRNKKAEAAGQSASNVDEAKSR

SEQ ID NO: 70079 - protein, 245 aa, Zea mays
  Coding DNA Sequence Number=SeqID_28300
  Homolog annotation: Hit_ID=Q60DL9; Match level="QueryCoverage=17%, HitCoverage=9%, E-value=4e-10, Identity=72%"; Hit description=RanBP1 domain containing protein
MAVIMATSYMPYLGVGLRPLSICNKHTQCTNLIPFSARFKISCEFLTKLRIPCPRRDVEPEKPSSPSIKRAEEKEVVVVHETKCKVSVEIARNSEPFIGEQLASLLYLEPDSELTAMLIAAEAKQQEEKAKGVSADEHDEATKGWKDIGVGQLSIRSKEGTEKTYKESTPTIVIRNHEGVGICRQGKRSDAARQQGQSSCIKRGFLLQPSAAAAVTTNKAVLDSVISLAAAKKPARTNTYGMPLT

SEQ ID NO: 70080 - protein, 50 aa, Zea mays
  Coding DNA Sequence Number=SeqID_28301
  Gene Ontology: Cellular component=chloroplast thylakoid membrane
  Homolog annotation: Hit_ID=O82230; Match level="QueryCoverage=86%, HitCoverage=24%, E-value=2e-10, Identity=72%"; Hit description =Expressed protein
MLVYIRKKLSGLVNDAYKDAHQRSVQAMKERMADLAQSLGMPAGLGDGLK

SEQ ID NO: 70081 - protein, 75 aa, Zea mays
  Coding DNA Sequence Number=SeqID_28302
  Subcellular localization annotation: CTP_CleavageSite=53; ConfidenceScore=5.30e-01
FWHAAVPRSPPRFGPLGSPLGAAQPPLRVGATCASGWCGRALALLASRPCKIAAATIVERGEPMGRGLCASVKVA

SEQ ID NO: 70082 - protein, 173 aa, Zea mays
  Coding DNA Sequence Number=SeqID_28303
  Gene Ontology: Mol. function=protein translocase activity; Cellular component=membrane; Biological process=protein secretion
  Homolog annotation: Hit_ID=Q8W4F6; Match level="QueryCoverage=35%, HitCoverage=25%, E-value=4e-14, Identity=66%"; Hit description =Putative preprotein translocase SECY protein
MILALPVPRRSSLIHTVIMCPRLPGSGIHAQLCLASAPSSCDASLRAATAPPHVSCKAVIHPPLRGLHCNTLRASPSGRGDDRRARRAGGDPEPEGHGYRNQFLDLARLGAVAEAFFCSEIHRRLAVTIVLIVLSRVGYFIPLPGFSRRRRLIPDSYLSFSTLPAGSNVEAAK

SEQ ID NO: 70083 - protein, 264 aa, Zea mays
  Coding DNA Sequence Number=SeqID_28304
  Pfam annotation: Domain name=TFIIB_Zn_Ribbon; Domain location=3-47; Score=19.8; E_value=0.0018; Accession=PF08271.2; Description=TFIIB zinc-binding
MGSTCLSCGEGAVVADADSGVLVCTSCGIIQDAGGAEFVHQSTFNESGGLDRRVSSLEALRMAKSATDGQLATPGSAFLPALAAACALLVARSHRLPLSLAEAAEAALCSAPALADLVSRVTAQLSLPPLPCFDYTAALDRAVHLSTSLNAAAPDKTDAILAQARFLFRCASKWSLTTGRFPLPLVAALLAFSAEVNGVTSVSLEDIARDISAGLRTSLLRYKELVDALVHVAGHLLPWGADVNAKNLLLNAPVLLRLMEMRGF

SEQ ID NO: 70084 - protein, 167 aa, Zea mays
  Coding DNA Sequence Number=SeqID_28305
MEHAPDQRLQGLVPAVPLAARVGLSAVLPMVGSTHCDAGHSIQSLAAPVGDDLLAARLGDRARPDPPEGGEMASPSLSSWAAWASRVLLGRRLGFVATPTLSAAGYHPCSHMLAARARAPPPQATIAAMPLLDGAEGERVTRGLAKNAPPPPSPRALWQLATEAVNR

SEQ ID NO: 70085 - protein, 103 aa, Zea mays
  Coding DNA Sequence Number=SeqID_28306
MRDKESFLPPNLRDSAFLEWWRMLCTKISGIARDGLNSLVILGVWTLWKQHNGYVFDNKSPSIADAIRRVGLEVDLSEMAGAQKLSLLTAPILGLPASKLTLW

SEQ ID NO: 70086 - protein, 279 aa, Zea mays
  Coding DNA Sequence Number=SeqID_28307
  Gene Ontology: Mol. function=protein serine/threonine kinase activity; Cellular component=cytoplasm; Biological process=protein amino acid phosphorylation
  Homolog annotation: Hit_ID=Q66MH6; Match level="QueryCoverage=80%, HitCoverage=67%, E-value=5e-56, Identity=49%"; Hit description=MAPKK
  Pfam annotation: Domain name=Pkinase; Domain location=38-255; Score =117.4; E_value=4e-32; Accession=PF00069.15; Description=Protein kinase domain
  Pfam annotation: Domain name=Pkinase_Tyr; Domain location=38-255; Score=-36.8; E_value=3.3e-10; Accession=PF07714.7; Description =Protein tyrosine kinase
  Pfam module annotation: Pfam domain module=Pkinase::Pkinase_Tyr; Domain location=38-255::38-255
  Subcellular localization annotation: CTP_CleavageSite=75; ConfidenceScore=5.29e-01
MRSHGHGQASVDMQPTHPPPQPTAAPSTSTSDARLSDYERFSVLGHGNGGTVNKARHRRSAQPVALKLFADGDTSAAREAEILMLAADPPHVVRLHAVIPSAAGEAPAALALELMPGGSLSGLLRRLDRPMGERPIAAVARQALLGLAAVHALRVVHRDLKPSNLLVGADGEVKIADFGAGKVLRRRLDPCASYVGTAAYMSPERFDPEAYSGDYDPYAADVWSLGVAILELYRGHFPLLPAGQRPDWAALMCAICFGEAPGAAGRGVGRVPGFSWRGA

SEQ ID NO: 70087 - protein, 150 aa, Zea mays
  Coding DNA Sequence Number=SeqID_28308
MARAGVVHGAWLDATPTPSAGMAPTARACVDLDESVVRKISVPSTRSTVFCASDAKIGKRSEPPHRRPQPLLHGGPPWASTMLHTRSGGAPTSLPRGSTTDTVEGAQSACQLPCHEVETGGPCACTPVNAIKWNRTSTSECPLLVLSVSQ

SEQ ID NO: 70088 - protein, 56 aa, Zea mays
  Coding DNA Sequence Number=SeqID_28309
MAWQWQALTIRMEMDWQVLMVCLVLMLHRRESKDLISLRPHIDEECALYHVLPFID

SEQ ID NO: 70089 - protein, 201 aa, Zea mays
  Coding DNA Sequence Number=SeqID_28310
  Gene Ontology: Mol. function=catalytic activity; Cellular component =cytosol; Biological process=trehalose biosynthetic process
  Homolog annotation: Hit_ID=Q8H7S6; Match level="QueryCoverage=100%, HitCoverage=23%, E-value=3e-66, Identity=63%"; Hit description =Putative trehalose-6-phosphate synthase
  Subcellular localization annotation: CTP_CleavageSite=68; ConfidenceScore=5.32e-01
MASRSYSNLLDLATGAADQAPAVAALGALRRRLPRVVTTPGLIDDSPASPSTPPRPRTIIVANQLPIRSHRPESPEEPWTFEWDEDSLLRHLHHSSSPLMEFIYIGCLRDDIPQAEQDAVAQALLETHNCVPAFLPTDIAERYYHGFCKQHLWPLFHYMLPLSPDLGGRFDRALWQAYVSANKIFADKVLAVVNPDDDFVW

SEQ ID NO: 70090 - protein, 147 aa, Zea mays
  Coding DNA Sequence Number=SeqID_28311
MAPRRHTDFGCSSPGRERVSWGRRAQTVDLDADDNDQLVESEGIAGGDEDDGFGYDYGNAGDRVCEELLPCAPAGGAPCTSTRVPATGLAVGGDPDDEGDDNSSSHNTDLSEEQEPEGWVARPITRDTARGCHFHDALDTLLCQALD

SEQ ID NO: 70091 - protein, 120 aa, Zea mays
  Coding DNA Sequence Number=SeqID_28312
MDFTLCNPTFMAPFREIGDMVNTRKRGGIDLPTNPFNRSDADAVIDGEHDVGYASTEATGASGDAPREAGDEGGNATRKDGVTATITITSTTTSSTPGQAPRVHEPQATDVHQLSRSSAC

SEQ ID NO: 70092 - protein, 167 aa, Zea mays
  Coding DNA Sequence Number=SeqID_28313
MGSRHSACSAEAGCRGSFVLLLLVTLLQGEVVHIVTTAQEKAKSWKETSRSSKTTTSFRVRLTTAESGLRRHRKLRLTRPRGSAPASTSEDGLRHARPQGSDSSNDGTPRAPMTTAVLSPLRKQGDVNKDPTAPTAVLLQGSSAPPTATTSHEQGTNTSPTATSACT

SEQ ID NO: 70093 - protein, 93 aa, Zea mays
  Coding DNA Sequence Number=SeqID_28314
  Subcellular localization annotation: CTP_CleavageSite=37; ConfidenceScore=5.21e-01
MGTQPHKMKRSGIWCGYSLSSTSHHARTQGNNWFRISCAGAGLRVGRALSSLYCGKQAARPGEAQGKPPAGRQARRRAGLGREQALGGLGGHG

SEQ ID NO: 70094 - protein, 79 aa, Zea mays
  Coding DNA Sequence Number=SeqID_28315
MPWVTRLLLNVVPLDSACLRAIRLDAGAPLVSTLPSVRARAHPAMGQRDGSGRRRGRLDSPVIDHGAESWHSPGSIDGV

SEQ ID NO: 70095 - protein, 99 aa, Zea mays
  Coding DNA Sequence Number=SeqID_28316
MALHGRMDEGEVDFIPRAEGDGASAQLAPHGGETAHPGVHCSDQKCGTRPSVAEREERVVFMWAGQGGKDFGLYRLACMSCGTQPRVVGGGPWSTLVKT

SEQ ID NO: 70096 - protein, 187 aa, Zea mays
  Coding DNA Sequence Number=SeqID_28317
  Gene Ontology: Mol. function=protein disulfide oxidoreductase activity; Cellular component=chloroplast; Biological process=cell redox homeostasis
  Homolog annotation: Hit_ID=Q84Y95; Match level="QueryCoverage=50%, HitCoverage=54%, E-value=1e-34, Identity=71%"; Hit description =CAXIP1 protein
  Pfam annotation: Domain name=Glutaredoxin; Domain location=83-147; Score=114.4; E_value=3.3e-31; Accession=PF00462.14; Description =Glutaredoxin
  Subcellular localization annotation: CTP_CleavageSite=61; ConfidenceScore=5.74e-01
MAASATAARPLAGTAVPLPLSTRTRPARVALLSLIPPAPAQRLALRRGAWLSPPERSRSVRCLAAMSPEMRATLDKVVGSSKVVLFMKGTKDFPQCGFSHTVVQILRSLDVPFETLDVLANEALRQGLKEYSSWPTFPQLYIDGEFFGGCDITVGKLLYIFLVSFTDARGGNFYTFILSSRSHDIGI

SEQ ID NO: 70097 - protein, 95 aa, Zea mays
  Coding DNA Sequence Number=SeqID_28318
  Gene Ontology: Mol. function=metal ion transporter activity; Cellular component=membrane; Biological process=metal ion transport
MVEDLTDMESESSPVASPFPVPNSSKEHELEMTKNSTSVVPEMTSSNSMPNLDAAKDGNTKVLSFEFRALEVCLGPADLWKMEYVLASGSFYQFI

SEQ ID NO: 70098 - protein, 842 aa, Zea mays
  Coding DNA Sequence Number=SeqID_28319
  Subcellular localization annotation: CTP_CleavageSite=69; ConfidenceScore=5.30e-01
MAGSGSDGAPATAGASLMSDYLDGPNAIQRRAASVAIVRSGAWGRGRPARRRRARGGRTGGRSRPDEPRCRYGALGAPATKTAAVDSIPSSVPGAAAPRGWPRNKGSSTAWRSWKPVRALAHLGKRRAGCLFSVEVDAARGVPASMEGFRLAVTVRKAETRDGSVQTLPCRVRGGAADFDETLFVRCNLYFAGGAGTGKPLRLQPRRFVVTVVAVEGRGRGALLGTHTVDVSSLVLESLRKISSEGRRVRWFDETFALSGTAAGGELQLKLGFQLMEDAGLSLYTQAEERDRGSPAPGSSRARAHNRNSFSISSTPKLSPSDASVSPSMRAYKQLVDRLRVDENGDPDHHPAVRSLMPRKPGDDELSASTTDAGDVNSLPEYEVVEKGVETVKEVVHYQAQREVLRELDSIAEQIEAIEALMTNGGKKSPRAAGQQQRLDADEEMVTVEFLRKLEADGVGDKKKLRLPLTPRSEPASPARKAVTTPPVVPDLGRGIGPAVQTRDGGFLVSMNPFDLPLGNRDGPPKLAMQVSRPFVLPGATAATGFDVLQKMAAAGGADEVRDRVASLGGMDDITGKTPEQVGFEGIAAAVIGGRRTEGASSSAARSVRLVRKLAVALSEGRSERVSTGIWSAGDDPETLDEVFAFSLQKLETMAVDALAVQAEMADEDAPFEVSAAAGDTGVFDSLVPSDEWSESGASDGRVTLVAAIQVRDPSRRYEAVGAPMVAVVQSARLLGAAGYSAGRFKVRSLHVGGVQMRCTPSGGGGSARWGAERQKLTAMQWMLAHGPARAGKRAATTTAQAGARVQRPDVVWSLSSRVLAGMWLKTVRNPDVRIGGGGGGT

SEQ ID NO: 70099 - protein, 199 aa, Zea mays
  Coding DNA Sequence Number=SeqID_28320
RERQGAELEDDGTMGERQGTPSRQERGHRGTLRAGMEGRNSARQIAPRPGRAGTRAREIREERAEDGRSSARGKSRDVEQSATGVGSSGKERAPRQQPAKGPEPRPRAMEGIETSGRAAGAHAEETARLGVWPTWELEGGASHGEREEMRGGEEDRTQRSFDGDLEIEDKGTAHVEGDKAEEGISSKIFLSSASAEENR

SEQ ID NO: 70100 - protein, 173 aa, Zea mays
  Coding DNA Sequence Number=SeqID_28321
  Homolog annotation: Hit_ID=Q6Z0E3; Match level="QueryCoverage=43%, HitCoverage=6%, E-value=2e-24, Identity=78%"; Hit description =Putative endoribonuclease E
  Subcellular localization annotation: CTP_CleavageSite=61; ConfidenceScore=5.53e-01
MEAQLLMSLRRLAASTPTGAASSVTQSSASKGFDVGSLSSTKGPPSISISDVPFVPDPTIQLMSASQLIDHDCCVILYPNFCYASVRVPLNNGGSLVIEQTEALVSVDVNGGHSMFGQGTSQEKAILEVNLEAAKQIARELRLRDIGGIIIVDFIDMSDDSIMGQSGMNAVHI

SEQ ID NO: 70101 - protein, 207 aa, Zea mays
  Coding DNA Sequence Number=SeqID_28322
  Gene Ontology: Mol. function=ribonuclease activity; Cellular component=cytoplasm; Biological process=carbohydrate metabolic process
  Homolog annotation: Hit_ID=Q6Z0E3; Match level="QueryCoverage=58%, HitCoverage=11%, E-value=3e-59, Identity=95%"; Hit description =Putative endoribonuclease E
MEWKRRLVLARGPALRRPTMGESLECGGAIKTTTRVTRRSSGGFDQRSVYLLSFQILVSRGNKVGVSKKITGIERTRLKGITKLLRPPGFTLTARTVAAGHSWEELQKDLDGLLSTWKGITEHAQSAALAADEGVEGAVPVMLHRAKGQTLSVVQDDFNEKVKRLVVDSPRTYHESCYFDYEGVLVRGCGNPLLGLNPLMNCATKKV

SEQ ID NO: 70102 - protein, 462 aa, Zea mays
  Coding DNA Sequence Number=SeqID_28323
  Gene Ontology: Mol. function=ribonuclease activity; Cellular component=cytoplasm; Biological process=carbohydrate metabolic process
  Homolog annotation: Hit_ID=Q6Z0E3; Match level="QueryCoverage=99%, HitCoverage=44%, E-value=1e-147, Identity=59%"; Hit description =Putative endoribonuclease E
MSSSSDIIWRPGPVYSLSIPSDGQKKQVIIVKDLWMKTSLPGLPTPTWGSWLMEADSLEGELFDGGNNQNIVKDHSVRDTRNQGLSVGDHIILKLGNGTPLHAKLLSDNQSTIMHNCVTEIPNASYISQYGRPQVVEEPWILESIVSAKKPVAKVKDKKGQKKLVNYKHTLSGVSKNMHEQYQPVEEPWLFQSILELNETIVLADGKVEARDIIRKLRKIEKPLTPLDESKPTGGEPSSRVILMNSSVCTMQRIAVLEDGKLVELLLEPIKNNVQCDSIYLGVVTKLVPHMGGAFVDIGISRPSLMSIKQNRDPFVYPQVFKNRGTDHVGDYCNEENLPAYENDDDMSDDEFADEEAHDGSSFPVENVTDNNVDDDEVDSISVYDVDKDEENDHMEDEYSEGILQGYQSEISNDLKTLSSIQHALRESNDDTNGSRWSQVRKGTKVMVQVVKRRIGYERSNT

SEQ ID NO: 70103 - protein, 184 aa, Zea mays
  Coding DNA Sequence Number=SeqID_28324
  Gene Ontology: Mol. function=zinc ion binding; Biological process =defense response to fungus
  Homolog annotation: Hit_ID=Q9FI29; Match level="QueryCoverage=83%, HitCoverage=24%, E-value=1e-49, Identity=61%"; Hit description =Arabidopsis thaliana genomic DNA, chromosome 5, P1 clone:MDN11
MAVTGDRDGTYSGTLNPGRLMKEKLDKVQKKCHFKNYDLIQPQNRFCFEKRDWMTVQPNELPHGSQLIMGLNPPFGVKASLANKFIDKALTFKPKLIVLIVPKETKRLDQRRTPYDLIWEDSECLSGKSFYLPGSVDLNDKIVEGWNASAPPLYLWSHPGWTKKHMQVAEEHGHTCMGKIALPC

SEQ ID NO: 70104 - protein, 118 aa, Zea mays
  Coding DNA Sequence Number=SeqID_28325
  Subcellular localization annotation: CTP_CleavageSite=43; ConfidenceScore=5.30e-01
MLASSLEAWGASGATGGRPRRRYAVAICAINVASMARSCSKARVAMRSCSQEETTTAWMVVIATTNAEGAGGRADEEGTTLAHVGEARAGKPSGEPRHGFYAVKVVREAPGRGPRPAL

SEQ ID NO: 70105 - protein, 42 aa, Zea mays
  Coding DNA Sequence Number=SeqID_28326
MAAIAGAQLAQEIGRPDLTPSSIDRHSLCRAKILRYVLKFIS

SEQ ID NO: 70106 - protein, 76 aa, Zea mays
  Coding DNA Sequence Number=SeqID_28327
MAGTPKSLFSCLNSDPKAFVDGGNGRISLWNILTEIRRAPRPSHGARRNPVTGDEFRATPRSITPNRSRALHQRPH

SEQ ID NO: 70107 - protein, 139 aa, Zea mays
  Coding DNA Sequence Number=SeqID_28328
  Gene Ontology: Mol. function=zinc ion binding
MMMSDDDDAEPQLNAVEGYYFVDSKNEKEPVCFSTLPFWFGDTDDLPDGKKKLVLRGTGDPGVKVYDEILRVFIEGKSRKKFTEVGADHIDVKQPFITDDEGIDEMNVEDVDNESDEDDDEYLFDSICAICDDGGDILW

SEQ ID NO: 70108 - protein, 190 aa, Zea mays
  Coding DNA Sequence Number=SeqID_28329
  Homolog annotation: Hit_ID=Q8SA97; Match level="QueryCoverage=45%, HitCoverage=16%, E-value=6e-15, Identity=90%"; Hit description =Ornithine carbamoyltransferase
MARSSEAILRGSVQASRLGAAFDGAGAGAALKRGRRGSKMDVNIPVVPEPTSECRCVPQLRWVEHGGEREGGKARRPETGVREVGIPRPSCSSRAQVGVMMAPPVDVAGLRPRLGDVEAPPKPRSSLSSVVEVESEPLGRARRRPLAEARAESEPWVGRSGVRRLPGLSPCPSPGSGRAEFAVFWGSSGT

SEQ ID NO: 70109 - protein, 120 aa, Zea mays
  Coding DNA Sequence Number=SeqID_28330
MRLHSLCYGTSDPFAALMKELLPLWLLGALVSHSMFDIVDFLISDPTSLVPGNSRRHILSFGFYRLALEDTALASATVDPLALELRDEDETIRQFKDQGTATDTSSNSNDEDLRIPPLPP

SEQ ID NO: 70110 - protein, 117 aa, Zea mays
  Coding DNA Sequence Number=SeqID_28331
  Subcellular localization annotation: CTP_CleavageSite=50; ConfidenceScore=5.04e-01
MSQAMDRLPTAVYCDMVTLLSRWRLGGKRQTPARVILTGRRASGSFEEMSEEKVSKVTKVAEETKVVDPFIAGFYESMAKTNTEKITKEIMVDLSEDSDDSDDFDVESGDEDSEDRP

SEQ ID NO: 70111 - protein, 82 aa, Zea mays
  Coding DNA Sequence Number=SeqID_28332
  Subcellular localization annotation: CTP_CleavageSite=65; ConfidenceScore=5.73e-01
MPAFSGVLGAIPPEPPQPPPASAASKPLATRATSCLAPTAVRPPSPPPASSSPLRDRSPHPSLALCASVIALPHPMFNGALK

SEQ ID NO: 70112 - protein, 87 aa, Zea mays
  Coding DNA Sequence Number=SeqID_28333
MGPLSARIILIVSRQQAQGRCFLDLRHLEAYKTFLRIKLVTKNDLAPRRGYYWGTKQLHEYPSSFGSLTFGFVIMYITKWYKAGDVS

SEQ ID NO: 70113 - protein, 73 aa, Zea mays
  Coding DNA Sequence Number=SeqID_28334
MAKLPAPSKEPDAGANADSPWRHTHLHRASSHDDDQRFGGVVGSFQRGGRVCRQRLDLAPGRDPVGKKVLGLI

SEQ ID NO: 70114 - protein, 318 aa, Zea mays
  Coding DNA Sequence Number=SeqID_28335
  Gene Ontology: Mol. function=chlorophyllase activity; Cellular component=chloroplast; Biological process=chlorophyll catabolic process
  Homolog annotation: Hit_ID=O22527; Match level="QueryCoverage=80%, HitCoverage=80%, E-value=4e-63, Identity=48%"; Hit description =Chlorophyllase-1
  Pfam annotation: Domain name=Chlorophyllase; Domain location=16-317; Score=452.9; E_value=4.1e-133; Accession=PF07224.2; Description =Chlorophyllase
MAAPVQTTATTPQVPAAAVVTSVFQPGKLAVEVITVDHDAQPTPPIPILIAAPKDAGTYPVAMLLHGFFLQNRYYEQLLKHVASFGFIMVAPQFHTSLISNSDNDDIAAAAKATDWLPEGLPSVLPTGVEADLSKLVLAGHSRGGHMAFSLALGYAKISSSLSFSALIGLDPVAGTGKNSQLPPAILTYAPSSFDIAMPVLVIGTGLGDERENVLFPPCAPVDVNHTEFYRECRAPCYHLVTKNYGHLDMLDDDAPKLVTCLCKEGNSCKDVMRRTVAGIMVAFLKAVMGEEDGDLKAILTDPGLAPTTLDPVEYRLA

SEQ ID NO: 70115 - protein, 73 aa, Zea mays
  Coding DNA Sequence Number=SeqID_28336
MGVDWEHTYYHVGDLQNCFSLQVVQSPMEDEVPADSTSGTDLLLADYSGDSDADAEDTAFETAAGGEVDAGSA

SEQ ID NO: 70116 - protein, 189 aa, Zea mays
  Coding DNA Sequence Number=SeqID_28337
  Subcellular localization annotation: CTP_CleavageSite=82; ConfidenceScore=5.25e-01
MAFQLQPAARIDGHATALFVPTVARGGLRRDEVRGQSPTYPALKSPRSGPGARNKRLRIPRRSSAMLGGMVEGERLQSGPTRQRYKRERVAGARGPAGRDREGERARDATDSRAPGVSGSARTRGQAVSLAARSRRFESSFNLARFWSRFELQVAFIKFYKFFKNYSGLVLVYVSLSQKLGIRKCYNMT

SEQ ID NO: 70117 - protein, 701 aa, Zea mays
  Coding DNA Sequence Number=SeqID_28338
  Gene Ontology: Mol. function=RNA-directed DNA polymerase activity; Cellular component=intracellular; Biological process=RNA-dependent DNA replication
  Homolog annotation: Hit_ID=UPI00004C1731; Match level="QueryCoverage =99%, HitCoverage=53%, E-value=0.0, Identity=71%"; Hit description =UPI00004C1731 related cluster
  Pfam annotation: Domain name=RnaseH; Domain location=266-371; Score= -22.9; E_value=0.0078; Accession=PF00075.14; Description=RNase H
  Pfam annotation: Domain name=rve; Domain location=453-612; Score =102.8; E_value=1e-27; Accession=PF00665.16; Description=Integrase core domain
  Pfam module annotation: Pfam domain module=RnaseH::rve; Domain location=266-371::453-612
MKESDQIATSFITPFGMYCYVTMPFGLRNAGATYQRCMNHVFGEHIGRMVEAYVDDIVVKTRKASDLLSDLETTFRCLKAKGVKLNPEKCVFGVPRGMLLGFIISERGIEADLEKIAAITNMGPIKDLKGVQRVMGCLATLSRFISRLGERGLPLYRLSRKTECFAWTPEAEEALGNLKALLTNAPILRPVYFISEVLSETKIRYPQIQKLLYMCQEASGRIGKWAVEIMGETISFAPRKAIKSQVLADIVVEWVDTQLPTVRIQPEVWTMFFDGSLMKTGAGAGLLFISPLGKHLRYVLHLHFPASNNVAEYKALLVIDQVMKNSHCRDTKMEAYCDEVRRLEDKFYGLEVNHVARRYNETTDELAKIASGRTTPKAPSAPEGEALRVEEERDGVQPNRDWQTPDAYPSPKARSSYKKYTRGLAVITQRLEPLLETLSDKTHLPAQALQTIPITWPFAVWGLDLIGPLQKAPGGYTHLLVAIDKFSKWIEVRPLNSIRSEQAVAFFTNIIHRFEAPNSIITDNGTQFTGRRFLDFCEDHHIRVDWAVVAHPMTNGQVQRANGMILQGLKPRIYNDLNKFGRRWMKELPSVVWSLRTMPSRATGFAPFFLVYGAEAILPTDLEYGSPRTRAYDDQSNRTNREDSLDQLEEARDMALLHSTRYQQSLRRYHARGVRSRDLQVGDLVLRLRQDARGRHKLTPP

SEQ ID NO: 70118 - protein, 83 aa, Zea mays
  Coding DNA Sequence Number=SeqID_28339
MGSSSPRTERRSRLVGDNEDDGFDYDYGNGFWYSFRMERVAFGATYAEVKKKKASRRISRSSKTSTSSRIRLATSPSQLPMVG

SEQ ID NO: 70119 - protein, 133 aa, Zea mays
  Coding DNA Sequence Number=SeqID_28340
  Gene Ontology: Mol. function=pyruvate dehydrogenase (acetyl -transferring) activity; Cellular component=mitochondrion; Biological process=glycolysis
  Homolog annotation: Hit_ID=Q9ZQY1; Match level="QueryCoverage=63%, HitCoverage=22%, E-value=3e-39, Identity=97%"; Hit description =Pyruvate dehydrogenase E1 beta subunit isoform 3
  Subcellular localization annotation: CTP_CleavageSite=59; ConfidenceScore=5.16e-01
MADGGRVCRRSGGRLAGVFNVGVFSSSPSSHHLRRRTWQTPDKERSEEEMLGQVLRRLRPAVAAEVARGYSAAAKEMTVRDALNSALDEEMSADPSVFLMGEEVGEYQGAYKISKGLLDRYGPDRVLDTPITE

SEQ ID NO: 70120 - protein, 316 aa, Zea mays
  Coding DNA Sequence Number=SeqID_28341
  Gene Ontology: Mol. function=transferase activity; Cellular component= membrane; Biological process=metabolic process
  Homolog annotation: Hit_ID=Q5VNX0; Match level="QueryCoverage=100%, HitCoverage=63%, E-value=1e-166, Identity=88%"; Hit description =Pectin-glucuronyltransferase-like
  Pfam annotation: Domain name=Exostosin; Domain location=50-316; Score= 224.4; E_value=2.5e-64; Accession=PF03016.6; Description=Exostosin family
MAPEEALRYAKKEIRDAEPVLDDPDLYAPLFKNVSQFKRSYELMERILKVYIYQDGRRPIFHTPPLSGIYASEGWFMKLLKESRRHVVADAGKAHLFYLPYSSQQLRLTLYEAGSHNLRPLAAYLRNFVRGLASKYPFWNRTRGADHFLVACHDWGPYTTTAHRDLRKNAIKALCNADSSEGIFTPGKDVSLPETTIRTPRRPLRYVGGLPVSRRSILAFFAGNVHGRVRPVLLRHWGNGQDDDMRVYSLLPSRVSRRMNYIQHMKNSRFCLCPMGYEVNSPRIVEALYYECVPVIIADNFVLPFSEVLDWSAFSV

SEQ ID NO: 70121 - protein, 238 aa, Zea mays
  Coding DNA Sequence Number=SeqID_28342
MAQVHGIRGRCRQPPSSYVFDYRHGRTSHCLTFESEGTSKSEPRTDSMAGPKTRFKVRVLRVLLYTDLKRYSSDGKVPPGVGTTDVKLRNTSRHQHTGNKIQRWPHLWVRRLTRGGPRGHCWYLETRVPTPIGSRPVQRGRWPHEGVSFHVGLTGSPIIGLRSRHVPTYPLPTREQDRTEDKTERGQLQEGEQGWTMSRPKTIPYVDTNNFESRTTQNQEGENDEYMDINYVVKANQS

SEQ ID NO: 70122 - protein, 112 aa, Zea mays
  Coding DNA Sequence Number=SeqID_28343
  Gene Ontology: Mol. function=iron-sulfur cluster binding
  Subcellular localization annotation: CTP_CleavageSite=54; ConfidenceScore=5.31e-01
MAAPARRRSCISSGGAGAPPSAAASPLLRPPPPAARPAQGFRPGQALMLWKCLYGNNVWAHFYDELAGLNKDFRKMITEHADLKALIVKDIHRIEPVRMLQILVSIEDGSVI

SEQ ID NO: 70123 - protein, 445 aa, Zea mays
  Coding DNA Sequence Number=SeqID_28344
  Homolog annotation: Hit_ID=Q8LQ55; Match level="QueryCoverage=94%, HitCoverage=100%, E-value=1e-43, Identity=33%"; Hit description =Integral membrane protein-like
  Pfam annotation: Domain name=DUF588; Domain location=277-429; Score =24.8; E_value=7.6e-05; Accession=PF04535.3; Description=Domain of unknown function (DUF588)
  Subcellular localization annotation: CTP_CleavageSite=40; ConfidenceScore=5.78e-01
MASTPRTPAPDRSPPPPLVTHTMPSTPRTPVSDRSPPPVTHTMPSTPRTPAPDRSPPPVPTPPPPLETPPPPSPSSQPGDEYHTPPPSLADGSPREEASFPSDGAPKSPQLSPMRLAAPRLLPPPSPPTPTAQNGQGEEGGAKAAAREPLRLATGLARSPSSQRSLATATNSLSPSPSPTPPSPLTPAPVVDTSSNNNNNRSGQSTPKRAETKVPLPLPSPAATAAVAVRFDPVEEAVTSPLHLGKARLDQQQEQHAAAAENAGSSVPPDVAAVAAVGERRELSVTLRLATAVLSLAAFSVIASARTSGWAGDYYAHHLQYRYAVAVNVIVCAYSIAQSFGEIRRLISPRFIFRSMSSYYCSLFLDQASAAHLYIPHRNCSCHALAYLLMSASSAAASRNDLWVSRFGTDAFNRKITSALWLSFIAFLMLALNALISTANLFSMV

SEQ ID NO: 70124 - protein, 87 aa, Zea mays
  Coding DNA Sequence Number=SeqID_28345
  Gene Ontology: Mol. function=iron-sulfur cluster binding
  Homolog annotation: Hit_ID=Q00XT4; Match level="QueryCoverage=89%, HitCoverage=14%, E-value=6e-16, Identity=56%"; Hit description =Homology to unknown gene
  Subcellular localization annotation: CTP_CleavageSite=54; ConfidenceScore=5.22e-01
MGQPFHNIDNVIKASAIMVHEQGHFSPRKVTVSTSGFVPQLGTQLLAAASLNARTDEVRNWIMTINRKENLNLLLGTLRVDDAKSLL

SEQ ID NO: 70125 - protein, 187 aa, Zea mays
  Coding DNA Sequence Number=SeqID_28346
  Homolog annotation: Hit_ID=Q8S1Z1; Match level="QueryCoverage=40%, HitCoverage=44%, E-value=6e-20, Identity=52%"; Hit description =Probable U3 small nucleolar RNA-associated protein 11
MGKILLVGQREGVSWPPSGQGNFGDLARADGRRSAAQPPLPSWSCGQSPSGLDHQPLARSPRHRVGIDRRRVSEVQRLVAQLQASSHRRPPSSAETPSAERPSTPVPSAQQASRLQKLKEKAAFRNPDEFYFKMINSRTVGGIHRPKAFKVKKKIEKLSSTLHELDNKPQNKHAYFAEDRKIARAVF

SEQ ID NO: 70126 - protein, 80 aa, Zea mays
  Coding DNA Sequence Number=SeqID_28347
MNQRRASVECEHGEGACRSRQLWRQRDSAIEQGDTLVISKLVPLQTSIENKYQQGPNLRGSIDVHIALPREDLGDNSGYG

SEQ ID NO: 70127 - protein, 714 aa, Zea mays
  Coding DNA Sequence Number=SeqID_28348
  Gene Ontology: Mol. function=RNA-directed DNA polymerase activity; Cellular component=intracellular; Biological process=RNA-dependent DNA replication
  Homolog annotation: Hit_ID=UPI00004C1731; Match level="QueryCoverage =99%, HitCoverage=52%, E-value=0.0, Identity=82%"; Hit description =UPI00004C1731 related cluster
  Pfam annotation: Domain name=RnaseH; Domain location=334-461; Score= -3.5; E_value=0.00012; Accession=PF00075.14; Description=RNase H
  Pfam annotation: Domain name=rve; Domain location=463-638; Score =89.7; E_value=9.1e-24; Accession=PF00665.16; Description=Integrase core domain
  Pfam module annotation: Pfam domain module=RnaseH::rve; Domain location=334-461::463-638
MKESDQLVTSFITPFGMYCYVTMSFGLRNAGVTYQRCMNHVFGEHIGRPVEAYVDDIVVKTRKASDLLSDLEVTFRCLKAKGVKLNPEKCVFGVPRGMLLGFIVSERGIEANPEKIVAITSMGPIKDLKGIQRVTGCLAALSRFISRLGERGLPLYRLLRKAECFTWTPEAEEALGNLKALLTNAPILVPPAAGEALLIYIAATTQVVSAAIVVERREEGHALPVQRPVYFISEVLSETKIRYPQVQKLLYVVILTRRKLRHYFESHPVTVVSSFPLGEIIQCREASGRIAKWAVEIMGETISFAPRKAIKSQVLADFVAEWVDTQLPTVPIQPELWTMFFDGSLMKTGAGAGLLFISPLGKHLRYVLRLHFPVPNDVAEYEALVNGLRITIELGVRRLDARGDSQLVIDQGMKNSHCRDPKMEAYCDVVRRLEDKFYGLELNHIARRYNETVDELAKIASGQTTVPPDVFSRDLHQPSVKIDDTSEPEAPSAQPEKAPGGYTHLLVAINKFSKWIEVRPLNSIRSKQAVPFFTNIIHRFGVPNSIITDNGTQFTDRKFLDFCDDHHIRVDWAAVAHPMTNGQVERANGMILQGLKPRIYNDLNKFGKRWIKELPSVVWSLRTTPSRATGFTPFFLVYGAEAILPTDLEYGSPRTRAYADQSNQASREDSLDQLEEARDMALLHSARYQQYLRRYHARGVRSRDLQVGDLVLRL

SEQ ID NO: 70128 - protein, 296 aa, Zea mays
  Coding DNA Sequence Number=SeqID_28349
  Subcellular localization annotation: CTP_CleavageSite=17; ConfidenceScore=5.27e-01
LFLNFRDVRNIVVPKIGAALPFSVSYSSRQFPQPPLHAPLVLPWPALGSQLAALISLSRSSLASAPIRTAPSAARMLPSCAALLLSLLRALERPALCSPRSLARSMVRSRVLELGFELHLPASRLLFPRVLPAMARFDLCSSGAVESLRARSFLLNGAPPCAQPSPFIAPSRSPFSSAPCSSAPAHRAARPSSFPASMAAAHLPLLGSLSCTYPAMVSSSPDADRCPCRAPCALGPAISMALGRVFLSHSEFLAATVVQWLAGAVSAPLGLLMLVLVSKLVWPRSRQTVKLPRCAL

SEQ ID NO: 70129 - protein, 42 aa, Zea mays
  Coding DNA Sequence Number=SeqID_28350
MHILESLLLCRVRKQPAFVASVLRWYQKKKTRSKAAQGMDPP

SEQ ID NO: 70130 - protein, 142 aa, Zea mays
  Coding DNA Sequence Number=SeqID_28351
MTKANACRRLWKSLEERRITNCVDLLLFFPEFRQVILRYISDINKMTYNSQYIGTFGLLEGRDVNTIQIQREQYGGTVHLFIGNCTASYDITFLPSKIAYKLADSVTAIAFELRLFVSINADVGHLFSNAMNKEQGNTIVKD

SEQ ID NO: 70131 - protein, 96 aa, Zea mays
  Coding DNA Sequence Number=SeqID_28352
MGLGVCGSLCLGGDEDDGYDYGNASPLQPNGTIAEYVDVYSPLLYTPNPQVVHVATTAQEKMKPWRKTSRSSKSTTSFRHGLAATPSRLPMKAACI

SEQ ID NO: 70132 - protein, 55 aa, Zea mays
  Coding DNA Sequence Number=SeqID_28353
MVFSDAAPHLRCHAQQDEVSSLLLFDIVVVLVLCLEIRYGAPILLYRAHDPLGHL

SEQ ID NO: 70133 - protein, 131 aa, Zea mays
  Coding DNA Sequence Number=SeqID_28354
MAMGRPSRELEGEVTGAHQGATGRALGSRAEGGAAGRAMGGEVKAPANQAEERAGSGGRDQNGSREELRVPEERATMDEQCRGCGRARKGARREGGWGRGIPSELAMGELSELERAATLWRRRSLERSQIF

SEQ ID NO: 70134 - protein, 159 aa, Zea mays
  Coding DNA Sequence Number=SeqID_28355
MATPTPDPKRPSTDLRTDFNVAKSATLYDNDGEPRGRILTKGNGVGASVHAARRVTAERVDGKQLPAPGLIPQLGGTAPTPPRVLAKHPDPELGSPIATRGRYGDRFTIPRSDGSWSMGGLRGEKLWWARKEYRGPFRYPKTFLQLRYMEDIMNIRKVI

SEQ ID NO: 70135 - protein, 270 aa, Zea mays
  Coding DNA Sequence Number=SeqID_28356
  Gene Ontology: Mol. function=heat shock protein binding; Cellular component=mitochondrion; Biological process=protein folding
  Homolog annotation: Hit_ID=Q5VRK6; Match level="QueryCoverage=92%, HitCoverage=74%, E-value=7e-75, Identity=52%"; Hit description =Putative GFA2
  Pfam annotation: Domain name=DnaJ; Domain location=38-72; Score=17.5; E_value=8.9e-05; Accession=PF00226.21; Description=DnaJ domain
  Pfam annotation: Domain name=DnaJ_C; Domain location=191-270; Score =22.6; E_value=2.6e-08; Accession=PF01556.9; Description=DnaJ C terminal region
  Pfam module annotation: Pfam domain module=DnaJ::DnaJ_C; Domain location=38-72::191-270
MRLHAGARLALLLARRSLSSSPRIPRVHTGTRPVAARDYYDVLGVSKSASQAEIKKAYYGTLKDEQKRSLYDQVGPDQYEKTASGGGGTGFEGGFGNPFEDIFGGGGGGGGMNDFFRNIFGDRDFRGRDVKVALELSFMEAVQGCSKTVTFQTSVTCEICDIHANRALQDAINLHKMWWFWENCEGLDNEDTIKVVRSGGEDPDGRPGDLYVREDPVFRREKGDIHVDAVLNVTQAILGGTVQVPTLSGDVVLKVKPGTQPGQKVVLRGK

SEQ ID NO: 70136 - protein, 184 aa, Zea mays
  Coding DNA Sequence Number=SeqID_28357
MPLAAPTFQCSDYCTKLLVVYSVMEGYVMRCGGAGTEARPAGASATPTLDEASKRGPRDLLMAAKGMAAGAGYSDSNGKNVMPLAAPTFQCSDYYTELFVVYSATEGYAMRCGGAGTEARPAGASATPTFGQSEQAWPGDLLMAAKGMAAGAGVGTEARTAGANGTPTSKRTVRARPDNLLRKW

SEQ ID NO: 70137 - protein, 181 aa, Zea mays
  Coding DNA Sequence Number=SeqID_28358
  Homolog annotation: Hit_ID=Q6QP51; Match level="QueryCoverage=48%, HitCoverage=32%, E-value=6e-07, Identity=58%"; Hit description =Putative growth-regulating factor 1
PKSGLGRHRKLCLARPQGSAPVSASDDGLRLARPQGSDSASAPEDDELRLARPQGSDSASALEDDELRLARAQGLDSALASDDGLRLARPGARTRPRPRKTDSTSTSEEPPPRPTQGSDRPRHRGAIITLPLASSGYGEQDRRPIWLAPGPPQVETPTGRDVNGTRYPPTDNPWGILLLGY

SEQ ID NO: 70138 - protein, 70 aa, Zea mays
  Coding DNA Sequence Number=SeqID_28359
MTKDELNNVGLQMYLQLEGDESTSVTQKRMPNQREQYGAKGEQDIKIIPECYRREVLEVLHILDGCSYKK

SEQ ID NO: 70139 - protein, 66 aa, Zea mays
  Coding DNA Sequence Number=SeqID_28360
MGSTDQRAYELCKHRARVFYEGIGKTASDTEGGRAALCDRPNREMKPPSSGKTWRRPKADFVLSRA

SEQ ID NO: 70140 - protein, 50 aa, Zea mays
  Coding DNA Sequence Number=SeqID_28361
MKLVVYAHLFLPHRDPGRGDFEDLRHRQCLLKDDGKGVGESLDEVVCVCL

SEQ ID NO: 70141 - protein, 309 aa, Zea mays
  Coding DNA Sequence Number=SeqID_28362
  Gene Ontology: Mol. function=protein-tyrosine kinase activity; Biological process=protein amino acid phosphorylation
  Homolog annotation: Hit_ID=Q9FIL1; Match level="QueryCoverage=97%, HitCoverage=57%, E-value=1e-118, Identity=68%"; Hit description =Protein kinase-like protein
  Pfam annotation: Domain name=TPR_1; Domain location=238-271; Score =10.4; E_value=0.31; Accession=PF00515.18; Description=Tetratricopepti de repeat
  Pfam annotation: Domain name=TPR_1; Domain location=272-305; Score =6.3; E_value=0.95; Accession=PF00515.18; Description=Tetratricopeptid e repeat
  Pfam annotation: Domain name=TPR_2; Domain location=238-271; Score =13.0; E_value=1; Accession=PF07719.7; Description=Tetratricopeptide repeat
  Pfam annotation: Domain name=TPR_2; Domain location=272-305; Score =10.0; E_value=2.3; Accession=PF07719.7; Description=Tetratricopeptide repeat
  Pfam module annotation: Pfam domain module=TPR_1::TPR_1::TPR_2::TPR _2; Domain location=238-271::272-305::238-271::272-305
MKNSRDGKSYSTNLAFTPPEYMRTGRITPESVIYSFGTLLIDVLSGKHIPPSHALDLIRDRNFNMLLDSCLEGQFSNEEGTEMVRLASRCLHYEPRERPNVRSLVQVLTPLQRDVERPRRPLNLCPTLTQGHCCPTPSYVLMGIPRGGASSTEPLNLSPLAEACSRKDLTAIHEILEKTGYKDDEGTANELSFQMWTNQMQDTLNSKKKGDNAFRQKDFTAAIDCYSQFIEVGTMVSPTIYARRCLSYLMNGMPQEALNDAMNALVISPTWSTAFYLQAAALLSQGMENEAQEALKDGCNLEQSSSGGH

SEQ ID NO: 70142 - protein, 36 aa, Zea mays
  Coding DNA Sequence Number=SeqID_28363
MACRLIHLVYGPYSDSNIEIPHTDAWRVHMAESKVM

SEQ ID NO: 70143 - protein, 167 aa, Zea mays
  Coding DNA Sequence Number=SeqID_28364
MGKVDYSAVVLMRPEQGYVYLGCRDFEPPDPWFWKTQLLRRGEGYRPITDVCGGAVGTEEPEAETYRRAHLRVEPGTIVAKAVPVRTMSPMEAITVSYRVEAELGDTVPSAVSPMVSDLLRAIPDSPEVAPCSRAGVVEELRLNVLVLFPGLEKDLEAAAQTSRTLS

SEQ ID NO: 70144 - protein, 86 aa, Zea mays
  Coding DNA Sequence Number=SeqID_28365
MDDSTGGFCVCHAHALNWIYGGNIGGADPPPINDGNHSPQHTQEDREGGGDGPSLQDVVAMMDRNNNDDTDWYSRDVGVDPKHQRF

SEQ ID NO: 70145 - protein, 76 aa, Zea mays
  Coding DNA Sequence Number=SeqID_28366
RTWFAEGLPSKTGCDTAPPFAPTGADCGAALAPVPTGDGWDQTVALFLWMALFLQWSLLLVGNQQPSPLPTTQGWE

SEQ ID NO: 70146 - protein, 441 aa, Zea mays
  Coding DNA Sequence Number=SeqID_28367
  Gene Ontology: Mol. function=protein kinase activity; Cellular component=integral to membrane; Biological process=protein amino acid phosphorylation
  Homolog annotation: Hit_ID=O81106; Match level="QueryCoverage=93%, HitCoverage=55%, E-value=0.0, Identity=83%"; Hit description=Leucine- rich repeat transmembrane protein kinase 2
  Pfam annotation: Domain name=LRRNT_2; Domain location=3-40; Score =17.5; E_value=0.013; Accession=PF08263.3; Description=Leucine rich repeat N-terminal domain
  Pfam annotation: Domain name=LRR_1; Domain location=116-138; Score =17.9; E_value=0.036; Accession=PF00560.23; Description=Leucine Rich Repeat
  Pfam annotation: Domain name=LRR_1; Domain location=140-162; Score =20.2; E_value=0.0076; Accession=PF00560.23; Description=Leucine Rich Repeat
  Pfam annotation: Domain name=LRR_1; Domain location=164-185; Score =10.6; E_value=2.9; Accession=PF00560.23; Description=Leucine Rich Repeat
  Pfam annotation: Domain name=LRR_1; Domain location=186-210; Score =4.7; E_value=37; Accession=PF00560.23; Description=Leucine Rich Repeat
  Pfam annotation: Domain name=LRR_1; Domain location=67-91; Score =10.0; E_value=3.9; Accession=PF00560.23; Description=Leucine Rich Repeat
  Pfam annotation: Domain name=LRR_1; Domain location=92-114; Score =11.2; E_value=2.3; Accession=PF00560.23; Description=Leucine Rich Repeat
  Pfam module annotation: Pfam domain module=LRRNT_2::LRR_1::LRR_1::LRR_ 1::LRR_1::LRR_1::LRR_1; Domain location=3-40::116-138::140-162::164 -185::186-210::67-91::92-114
MHVNVLNTLFTSLNSPGQLRAWQANGGDPCGQSWQGITCSGSGVTKILLPNLSLTGNLAYNMNNLGSLVELDLSQNNLGGGGQIQYNLPNVKLEKLNLAGNQFGGNLPYSISTMPNLKYLNLNHNQLQGNITDVFSNLYSLSELDLSFNSLTGDLPQSFTGLSSLKRMYLQNNQFTGYINVLANLPLETLTISHNLLVSRNVGNNHFTGWIPSQLKKINNLQTDGNSWSTGPAPPPPPYTAPPPPNHWNGAGQNDDGSSSSGGRPGIGGGGVAGIIISLLIVGSVVAFFLIKRRKHKAIMEEQFEQHQPFTSFPSNEVNDMKPIYESTTVDIESLASPASINLKPPPKIEQNKSFDDDDDFSNKTAANRSNITPMKATVYSVADLQMATDSFSFDNLVGEGTFGRVYRAQFNGGKGCLHIYRLRNHNSKWTSSGGAKGAYP

SEQ ID NO: 70147 - protein, 281 aa, Zea mays
  Coding DNA Sequence Number=SeqID_28368
  Homolog annotation: Hit_ID=Q10QS1; Match level="QueryCoverage=35%, HitCoverage=80%, E-value=5e-48, Identity=92%"; Hit description =Expressed protein
MVDAWWSLLGAAFPALVAGQFIRTKRRRDEEQRLKAARGREKSSDEVFVCERVCTSKRMLNKVGAFSKDPIPETCVTVCGVSELDACADACARTVCVNQHQEFDARVKGSHLANKKIKYWVQQKSKGITEGSSGLAHRTVRCTPDSVRCTRGLKLKLVTFGKIQRHSAIIHRTVRCTPDSVRCSKEERPQELASFGNSQRLVRYNSPDMSGAHRTVRCDIEATATSAPTATCSALNARQRAEVRHAHAGAPNTLQYMFGAPPDIQAGPEDSAPTVESQRLR

SEQ ID NO: 70148 - protein, 535 aa, Zea mays
  Coding DNA Sequence Number=SeqID_28369
  Gene Ontology: Mol. function=protein binding; Cellular component =integral to membrane; Biological process=protein amino acid phosphorylation
  Homolog annotation: Hit_ID=Q10QT0; Match level="QueryCoverage=86%, HitCoverage=93%, E-value=0.0, Identity=70%"; Hit description=Leucine- rich repeat family protein, putative, expressed
  Pfam annotation: Domain name=LRRNT_2; Domain location=372-411; Score =13.8; E_value=0.031; Accession=PF08263.3; Description=Leucine rich repeat N-terminal domain
  Pfam annotation: Domain name=LRR_1; Domain location=417-438; Score =14.1; E_value=0.51; Accession=PF00560.23; Description=Leucine Rich Repeat
  Pfam annotation: Domain name=LRR_1; Domain location=440-462; Score =6.6; E_value=16; Accession=PF00560.23; Description=Leucine Rich Repeat
  Pfam annotation: Domain name=LRR_1; Domain location=464-486; Score =17.7; E_value=0.042; Accession=PF00560.23; Description=Leucine Rich Repeat
  Pfam module annotation: Pfam domain module=LRRNT_2::LRR_1::LRR_1::LRR_ 1; Domain location=372-411::417-438::440-462::464-486
  Subcellular localization annotation: CTP_CleavageSite=45; ConfidenceScore=5.39e-01
MASRIASFPSFLAFVVVTVATLFPSSSSQQQPAAAVPQPRGFYISCGSDKDVQVGSIKWAKDEGFTAVGNASAINKPHLLPLLAALRYFPDATARKYCYQLPVVKGTRYLVRTTYFYGGFDGGKEPPVFDQIVDGTLWSAVNTTDNYRRGMSTYFEMVAQGQGKTMSVCLARRPDTASSPVISALEVIDLADSMYNTTDFSRFTMTTVVRSRFGSKGDIVSYPDDPYNRYWAPFADANPMVESHSSISPDDFWNQPPAKALKAGITTSRGKKLAVQWPTTELPAATYYVALYFQDPRTASPFSWRVFDVAVNGNDFFRGLNASAAGVMVYSSMMQLSGKTEILLTPNETSPVGPLINAGEIYQIVPLGGRTATRDVVAMEDLASSLKNLPPDWAGDPCLPQQHSWTGVECSQGSPVRVLSLYLSGNNLSGPIPDLSSMHALTAVRLDSNQFSGTINPSMEKLANLKELHLNNNNLTGKIPDGLKNKAGLDLRCKEQLRGTNLNEADKEEIMSTMLHPCTQFNDEGRGLKTSKFVR

SEQ ID NO: 70149 - protein, 170 aa, Zea mays
  Coding DNA Sequence Number=SeqID_28370
  Homolog annotation: Hit_ID=Q9ZQY1; Match level="QueryCoverage=26%, HitCoverage=12%, E-value=5e-16, Identity=93%"; Hit description =Pyruvate dehydrogenase E1 beta subunit isoform 3
MDPDIAVERLISQENEVLAIDHIINSAAKSNYMSAGQISVPIVLRGPNGAAAGVGAQHSQVFAQTCLYMVALLLLLELVPNTHRSSTVFPSKCFSPLYLFGPSWAVRWGTYGSVNLVLSYDGKPTSQFVVVEPSKKGRYLTKKRLKLQRKRIKNERKEANKNDQQSIRRK

SEQ ID NO: 70150 - protein, 103 aa, Zea mays
  Coding DNA Sequence Number=SeqID_28371
MALGAHQALLHIRLCRALTAVMWSPWAPAPPSLPACSEAPHCRALSLKQLVCDGSSLTVALPWLPVATLGEAKPDDILAIDPRCSSAVVEVTRTGGNFLPIYQ

SEQ ID NO: 70151 - protein, 327 aa, Zea mays
  Coding DNA Sequence Number=SeqID_28372
  Gene Ontology: Mol. function=serine carboxypeptidase activity; Cellular component=cellulose and pectin-containing cell wall; Biological process=proteolysis
  Homolog annotation: Hit_ID=Q69ME0; Match level="QueryCoverage=99%, HitCoverage=65%, E-value=1e-120, Identity=63%"; Hit description =Putative serine carboxypeptidase
  Pfam annotation: Domain name=Peptidase_S10; Domain location=1-318; Score=353.3; E_value=4e-103; Accession=PF00450.12; Description =Serine carboxypeptidase
ANVIFLESPAGVGFSYSNTSSDYDLSGDQRAADDAYLFLVNWLERFPEYKSRPFYISGESYAGHYVPELAATILIQNSYDDAKTAIINLRGILVGNPLLDWRMNFKGQVDYYWSHGLMSDEVFANITRHCDDDSDSDVGACDGAVQAVDAGQLDYYNIYAPVCVDAANGGSYYPTSAQLPDPCSYHYTYSYLNDPAVQVALHARPTTWSGCANLNWTDSPASMVPTISWLVENKLPVWIFSGDFDTVCPLPATRYSIRDLKLRITTPWRPWTVNMEVGGYVQQYKGGFTFASVRGAGHMVPSSQPERALILLDSFLKGVLPPYVPEQ

SEQ ID NO: 70152 - protein, 1091 aa, Zea mays
  Coding DNA Sequence Number=SeqID_28373
  Gene Ontology: Mol. function=protein serine/threonine kinase activity; Cellular component=integral to membrane; Biological process=protein amino acid phosphorylation
  Homolog annotation: Hit_ID=Q652D9; Match level="QueryCoverage=97%, HitCoverage=96%, E-value=0.0, Identity=73%"; Hit description =Putative Receptor-like protein kinase
  Pfam annotation: Domain name=APH; Domain location=767-950; Score= -8.2; E_value=0.022; Accession=PF01636.13; Description=Phosphotransfer ase enzyme family
  Pfam annotation: Domain name=LRRNT_2; Domain location=33-73; Score =55.5; E_value=1.8e-13; Accession=PF08263.3; Description=Leucine rich repeat N-terminal domain
  Pfam annotation: Domain name=LRR_1; Domain location=102-124; Score =13.3; E_value=0.87; Accession=PF00560.23; Description=Leucine Rich Repeat
  Pfam annotation: Domain name=LRR_1; Domain location=126-148; Score =15.7; E_value=0.17; Accession=PF00560.23; Description=Leucine Rich Repeat
  Pfam annotation: Domain name=LRR_1; Domain location=150-172; Score =10.9; E_value=2.6; Accession=PF00560.23; Description=Leucine Rich Repeat
  Pfam annotation: Domain name=LRR_1; Domain location=174-196; Score =17.8; E_value=0.038; Accession=PF00560.23; Description=Leucine Rich Repeat
  Pfam annotation: Domain name=LRR_1; Domain location=198-221; Score =3.4; E_value=67; Accession=PF00560.23; Description=Leucine Rich Repeat
  Pfam annotation: Domain name=LRR_1; Domain location=223-245; Score =4.6; E_value=40; Accession=PF00560.23; Description=Leucine Rich Repeat
  Pfam annotation: Domain name=LRR_1; Domain location=247-269; Score =1.6; E_value=1.4e+02; Accession=PF00560.23; Description=Leucine Rich Repeat
  Pfam annotation: Domain name=LRR_1; Domain location=271-293; Score =16.0; E_value=0.14; Accession=PF00560.23; Description=Leucine Rich Repeat
  Pfam annotation: Domain name=LRR_1; Domain location=295-317; Score =11.0; E_value=2.5; Accession=PF00560.23; Description=Leucine Rich Repeat
  Pfam annotation: Domain name=LRR_1; Domain location=319-341; Score =15.7; E_value=0.17; Accession=PF00560.23; Description=Leucine Rich Repeat
  Pfam annotation: Domain name=LRR_1; Domain location=343-365; Score =16.8; E_value=0.08; Accession=PF00560.23; Description=Leucine Rich Repeat
  Pfam annotation: Domain name=LRR_1; Domain location=367-389; Score =9.7; E_value=4.4; Accession=PF00560.23; Description=Leucine Rich Repeat
  Pfam annotation: Domain name=LRR_1; Domain location=391-413; Score =2.3; E_value=1.1e+02; Accession=PF00560.23; Description=Leucine Rich Repeat
  Pfam annotation: Domain name=LRR_1; Domain location=415-437; Score =16.6; E_value=0.09; Accession=PF00560.23; Description=Leucine Rich Repeat
  Pfam annotation: Domain name=LRR_1; Domain location=439-461; Score =10.6; E_value=3; Accession=PF00560.23; Description=Leucine Rich Repeat
  Pfam annotation: Domain name=LRR_1; Domain location=463-485; Score =15.7; E_value=0.16; Accession=PF00560.23; Description=Leucine Rich Repeat
  Pfam annotation: Domain name=LRR_1; Domain location=487-509; Score =11.5; E_value=2; Accession=PF00560.23; Description=Leucine Rich Repeat
  Pfam annotation: Domain name=LRR_1; Domain location=511-530; Score =11.8; E_value=1.7; Accession=PF00560.23; Description=Leucine Rich Repeat
  Pfam annotation: Domain name=LRR_1; Domain location=533-555; Score =14.2; E_value=0.49; Accession=PF00560.23; Description=Leucine Rich Repeat
  Pfam annotation: Domain name=LRR_1; Domain location=557-579; Score =14.6; E_value=0.35; Accession=PF00560.23; Description=Leucine Rich Repeat
  Pfam annotation: Domain name=LRR_1; Domain location=581-603; Score =14.6; E_value=0.36; Accession=PF00560.23; Description=Leucine Rich Repeat
  Pfam annotation: Domain name=LRR_1; Domain location=605-628; Score =3.3; E_value=69; Accession=PF00560.23; Description=Leucine Rich Repeat
  Pfam annotation: Domain name=LRR_1; Domain location=630-651; Score =13.4; E_value=0.82; Accession=PF00560.23; Description=Leucine Rich Repeat
  Pfam annotation: Domain name=LRR_1; Domain location=653-674; Score =11.8; E_value=1.8; Accession=PF00560.23; Description=Leucine Rich Repeat
  Pfam annotation: Domain name=Pkinase; Domain location=765-1045; Score= 102.6; E_value=1.1e-27; Accession=PF00069.15; Description=Protein kinase domain
  Pfam annotation: Domain name=Pkinase_Tyr; Domain location=765-1045; Score=43.3; E_value=4e-15; Accession=PF07714.7; Description=Protein tyrosine kinase
  Pfam module annotation: Pfam domain module=APH::LRRNT_2::LRR_1::LRR _1::LRR_1::LRR_1::LRR_1::LRR_1::LRR_1::LRR_1::LRR_1::LRR_1::LRR _1::LRR_1::LRR_1::LRR_1::LRR_1::LRR_1::LRR_1::LRR_1::LRR_1::LRR
  Pfam module annotation: Pfam domain module=LRR_1::Pkinase::Pkinase _Tyr; Domain location=767-950::33-73::102-124::126-148::150-172::174 -196::198-221::223-245::247-269::271-293::295-317::319-341::343
  Pfam module annotation: Domain location=:415-437::439-461::463 -485::487-509::511-530::533-555::557-579::581-603::605-628::630 -651::653-674::765-1045::765-1045
MPPRSRAAAPRLAFLVPLAFAFALLLVPPCHCVNEQGQALLRWKDTLRPAGGALASWRAGDASPCRWTGVSCNARGDVVGLSITSVDLQGPLPANLQPLAASLKTLELSGTNLTGAIPKEIGEYGELTTLDLSKNQLTGAVPAELCRLAKLESLALNSNSLRGAIPDDIGNLTSLTYLTLYDNELSGPIPPSIGNLKKLQVLRAGGNQGMKGPLPQEIGGCTDLTMLGLAETGVSGSLPETIGQLKKIQTIAIYTTLLSGRIPESIGNCTQLTSLYLYQNSLSGPIPPQLGYLKKLQTLLLWQNQLVGAIPPELGQCKELTLIDLSLNSLTGSIPASLGGLPNLQQLQLSTNQLTGTIPPELSNCTSLTDIEVDNNLLSGAISIDFPRLRNLTLFYAWKNRLTGGVPTSLAEAPSLQAVDLSYNNLTGPIPKALFGLQNLTKLLLLNNELTGLIPSEIGNCTNLYRLRLNGNRLSGAIPAEIGNLKNLNFLDMSENHLVGPVPAAISGCASLEFLDLHSNALSGALPDTLPRSLQLIDVSDNQLTGPLSSSIGSLPELTKLYMGNNRLTGGIPPELGSCEKLQLLDLGGNAFSGGIPSELGMLPSLEISLNLSCNRLSGEIPSQFAGLDKLGSLDLSHNELSGSLEPLAALQNLVTLNISYNTFSGELPNTPFFQKLPLSDLAGNRHLVVSDGSDESSRRGVISSFKIAISILAAASALLLVAAAYMLARTHRRGGGRIIHGEGSWEVTLYQKLDITMDDVLRGLTSANMIGTGSSGAVYKVDTPNGYTLAVKKMWSSDEVTSAAFRSEIAALGSIRHRNIVRLLGWAANGGTRLLFYSYLPNGSLSGLLHGGRAAKGSPADEWGARYEIALGVAHAVAYLHHDCVPAILHGDVKSMNVLLGASYEPYLADFGLARVLAAASSMLDTGKQPRIAGSYGYMAPEYASMQRISEKSDVYSFGVVLLEILTGRHPLDPTLSGGAHLVQWLREHVQAKRDASELLDARLRARAGEADVHEMRQVLSVATLCVSRRADDRPAMKDVVALLKEIRRPAAVDDAKQRPPTAAAPVSPVSAHSRGQSSSCSFAVSEYSA

SEQ ID NO: 70153 - protein, 113 aa, Zea mays
  Coding DNA Sequence Number=SeqID_28374
MGISSMPEPRDSLLGYLVYNAVVSIAALAGLVRAALVFLDLQAAQLPGGAGAGADDDRLAASGPGLGLAERFLRAFRPALYGVLVSTACGAAEAAAGDDDCSVCLGRVRGGGR

SEQ ID NO: 70154 - protein, 239 aa, Zea mays
  Coding DNA Sequence Number=SeqID_28375
  Gene Ontology: Mol. function=peptidase activity; Cellular component =cytoplasm; Biological process=proteolysis
  Homolog annotation: Hit_ID=Q2L3T0; Match level="QueryCoverage=97%, HitCoverage=34%, E-value=1e-103, Identity=77%"; Hit description =Subtilisin-like protease
  Pfam annotation: Domain name=PA; Domain location=3-81; Score=31.8; E _value=2.4e-06; Accession=PF02225.12; Description=PA domain
KKGIGGSLDKAKVKGKIVVCVRGKNARVEKGEAVHRAGGAGMVLANDEVAGTRLMPEPLFDGPFAHFGLMLASGYITVPYTALDAKPAPFMAAFSSQGPNTVTPEILKPDITAPGVSILAAFTGEAGPTGLAFDDRRVLFNAESGTSMSCPHVAGIAGLLKAVHPDWSPAAIKSAIMTTARVQDNMRKPMSNSSFLRATPFGYGAGHVQPNRAADPGLVYDANTTDYLSFLCALGYNSS

SEQ ID NO: 70155 - protein, 289 aa, Zea mays
  Coding DNA Sequence Number=SeqID_28376
  Homolog annotation: Hit_ID=Q2L3V3; Match level="QueryCoverage=43%, HitCoverage=17%, E-value=5e-55, Identity=77%"; Hit description =Subtilisin-like protease
  Pfam annotation: Domain name=Subtilisin_N; Domain location=127-215; Score=66.3; E_value=1e-16; Accession=PF05922.7; Description =Subtilisin N-terminal Region
MLTVKYIDPSYMVRAVAADNLCCTLLAHSAIDGAMAGYTGYVPGLINGNYGYIPVVEVAEARNPVDTSGLGSGQDSPPCRVMPLPPILGSCSCLYNTNSAEARTSTLHHHHRAPASSKLLTPSPLQASYVVYLGGHAHGRAGAALASCRARARSSHRALLGSVLRSEARARDAIFYSYTRYINGFAATLEEDEAAEVSRHPRVVSVFPNRGHPLHTTRSWEFLGMEEEGGRVRPGSIWAKARFGEGVVIGNLDTGVWPEAGSFRDDGMGPAPPGWRGICQDQQASDDAQ

SEQ ID NO: 70156 - protein, 118 aa, Zea mays
  Coding DNA Sequence Number=SeqID_28377
  Subcellular localization annotation: CTP_CleavageSite=32; ConfidenceScore=5.45e-01
GHVRCTSDCVAPNPSDTSAPTATSSVLNARQRAQKSGTPILAHRTLYSTCPVRHWTSRRAQETELQRSEPNDFGDVAGAPNMSGMLQDMVDGVTWPSTLPPGWTVEWDAASTGEDQEE

SEQ ID NO: 70157 - protein, 119 aa, Zea mays
  Coding DNA Sequence Number=SeqID_28378
MADLVVPLILVMPLRLRLGYLDLGNPRRAPNLTLNLSGARENPVLVEGVLPQAQSCAAAVESGLDYYYVICLHVWCDVNFSFILCFFVLWRVEEPMAEDPGAQQIEVVEQELIEGKLCH

SEQ ID NO: 70158 - protein, 103 aa, Zea mays
  Coding DNA Sequence Number=SeqID_28379
MERHAQKQAPLVLALSCLLLLAPALVSAVPTPRSLRLGGQQQHPPALKLTSSQVGDFVLIGAQQEAAIAAAMNMGRPTARVAVEVNDYQPSGPNNRHDPPKGP

SEQ ID NO: 70159 - protein, 103 aa, Zea mays
  Coding DNA Sequence Number=SeqID_28380
  Gene Ontology: Mol. function=DNA binding; Cellular component=nucleus; Biological process=regulation of transcription
  Homolog annotation: Hit_ID=Q10M30; Match level="QueryCoverage=89%, HitCoverage=26%, E-value=1e-38, Identity=80%"; Hit description =Transfactor, putative, expressed
  Pfam annotation: Domain name=Myb_DNA-binding; Domain location=27-78; Score=45.1; E_value=2.4e-10; Accession=PF00249.21; Description=Myb -like DNA-binding domain
MEQHPFLRGGNAQGDSGLVLSTDAKPRLKWTPELHQRFVDAVNQLGGEEKATPKTVMRLMGIPGLTLYHLKSHLQKYRLSKNLQAQANASTSKNGFPEQPQQQ

SEQ ID NO: 70160 - protein, 123 aa, Zea mays
  Coding DNA Sequence Number=SeqID_28381
MTSYQNRLGSARVRLASRLELAREPVRPSQYNSGQAEGGGQAGGGWRQAACRRGRVRVRTWRGAVYRTPDRTGARQQQHDRTAGLATVAARTRGGQARASVAVEHERLPGCRGAVEHRRGAED

SEQ ID NO: 70161 - protein, 109 aa, Zea mays
  Coding DNA Sequence Number=SeqID_28382
  Gene Ontology: Mol. function=nucleic acid binding; Biological process= DNA integration
  Homolog annotation: Hit_ID=O24587; Match level="QueryCoverage=46%, HitCoverage=4%, E-value=3e-18, Identity=82%"; Hit description=Pol
MEKKKKYRKAKGEAHINKEWDSDCSSSDSNDEGLAASAFDKSSLFPNEHHTCLMAKEKKVYASGGTSWIIDNRCTNHMTGENKMFTCYVKNKDSHDTIIFGDENQGKVK

SEQ ID NO: 70162 - protein, 67 aa, Zea mays
  Coding DNA Sequence Number=SeqID_28383
MVASFRARSIRESRLLGLERKEFIPAKEVSGGDWKARGSSLSSRSSCPLSGYPSAIGLWGMDIPRIC

SEQ ID NO: 70163 - protein, 120 aa, Zea mays
  Coding DNA Sequence Number=SeqID_28384
MAHGGDEPPGGAVRATGRGRGGWGRACWRRTPLVPSAPVRQPRCHGLRKAVEYDIQLETEECVRKHNVLKESNKGGGRYNVISGLCRLQLKFVKKLKISCAKQGQCSTDSICWFCRVTRK

SEQ ID NO: 70164 - protein, 100 aa, Zea mays
  Coding DNA Sequence Number=SeqID_28385
MVRALRLRVDDYGEKELRPVGPHVRECKCAKEYGPLGDEGGADDMTKISRSLLVVIALVLLGPHLPPSEALTPKQGVRSKTFPVPAHPCFARGDVAQQFD

SEQ ID NO: 70165 - protein, 407 aa, Zea mays
  Coding DNA Sequence Number=SeqID_28386
  Gene Ontology: Mol. function=DNA binding; Cellular component =mitochondrion; Biological process=DNA integration
  Homolog annotation: Hit_ID=UPI00004C1732; Match level="QueryCoverage =94%, HitCoverage=29%, E-value=1e-156, Identity=67%"; Hit description= UPI00004C1732 related cluster
  Pfam annotation: Domain name=RnaseH; Domain location=17-140; Score= -16.8; E_value=0.0021; Accession=PF00075.14; Description=RNase H
  Pfam annotation: Domain name=rve; Domain location=142-317; Score =74.6; E_value=3.1e-19; Accession=PF00665.16; Description=Integrase core domain
  Pfam module annotation: Pfam domain module=RnaseH::rve; Domain location=17-140::142-317
MGRHPAPDGSDPTGALDHVFDGSLMKTGAGAGLLFVSPLGKHLRYVLCLHFLASNNVVEYEALVNGLRIAIELGVRRLDARGDSQLIIDQVMKNSHCRDPKMEAYCDEVWRLEDKFYGLELNHIARRYNETADELAKIASGRTTVPPDVFSRDLHQPSVKTEDTPEPEAPSAPPEAPSAESEKAPGGYTHLLVAIDKFSKWIEVRPLNSIRSKQAVAFFTNIIHRFGVPNSIITDNGTQFTGRKFLDFCEDHHIRVDWAAVAHPMTNGQVEQANGMILQGLKPRIYNDLNKFGKWWMKELPSVVWNLEYGSPRARAYTDQSNRANREDSLDQLEEARDMTLLHSARYQQSLRRYHVRGVRSRDLQVGDLVLRLQQDARGRHKLTPPWEGPFVIAKVLKPGTYKLANS

SEQ ID NO: 70166 - protein, 576 aa, Zea mays
  Coding DNA Sequence Number=SeqID_28387
  Gene Ontology: Mol. function=RNA-directed DNA polymerase activity; Cellular component=intracellular; Biological process=RNA-dependent DNA replication
  Homolog annotation: Hit_ID=UPI00004C1733; Match level="QueryCoverage =98%, HitCoverage=45%, E-value=0.0, Identity=84%"; Hit description =UPI00004C1733 related cluster
  Pfam annotation: Domain name=RnaseH; Domain location=312-439; Score =0.7; E_value=5e-05; Accession=PF00075.14; Description=RNase H
MPFGLRNAGATYQRCMNHVFGEHIGRTVEAYVDDIVVKTRKASDLLSDLEVTFRCLKAKGVKLNPEKCVFGVPRGMLLGFIVSERGIEANPEKIAAITSMGPIQDLKGVQRVMGCLAALSRFISRLGERGLPLYRLLRKAERFTWTPEAEEALGNLKALLTKAPILVPPAAGEALLIYVAATTQVVSAAIVVERQEEGHALPVQRPVYFVSEVLSETKIRYPQVQKLLYAVILTRRKLRHYFESHPVTVVSSFPLGKIIHCREASGRIAKWAVEIMGETISFAPRKAIKSQVLADFVAEWVDTQLPTAPIQPELWTMFFDGSLMKTGAGAGLLFISPLGKHLRYVLRLHFPASNNVAEYEALVNGLRIAIELGVRRLDARGDSQLVIDQVMKNSHYRDPKMEAYCDEVRRLEDKFYGLELNRIARRYNETADELAKIASGRTTVPPDVFSRDLHQPSVKIDDTPEPEAPSAQPEVPSAQSEAPSARPEAPSVRPEKAPGGNTHLLVAIDKFSKWIEVRPLNSIRSEQAVVFFTNIIHRFGVPNSITDNGTQFTGRKFLDFCEDHHIRVNWAPWLIP

SEQ ID NO: 70167 - protein, 70 aa, Zea mays
  Coding DNA Sequence Number=SeqID_28388
MEMTIYRLMASWATCAYSIRAFIHFGRDQFTSLPAWLGYGNQAAWSQAKEVQHEFDWFVVSVKREITSLA

SEQ ID NO: 70168 - protein, 52 aa, Zea mays
  Coding DNA Sequence Number=SeqID_28389
MGCTSPMPGRNKELHSHDITVNVSRRGQQSRAWERGREIGSRLREDARLKER

SEQ ID NO: 70169 - protein, 69 aa, Zea mays
  Coding DNA Sequence Number=SeqID_28390
MEMSLRERTNADLGELHGTYGRTRRAPELVGEAANRELTEAFVGLTGSSRQMQRSYWEVSNGGVRVEGG

SEQ ID NO: 70170 - protein, 136 aa, Zea mays
  Coding DNA Sequence Number=SeqID_28391
MVRSRPSRARSTRPAPRASAKESSDATVAQISHSRSGDSDGTVRRGHSRAEGRHYAQRSWSDSAARWSSSGQPWPDPRGPAPKPSGASRVERHQGDGWLALEIDGGHGGTRQGETEQRLGEDRDAGKKAKPELRSV

SEQ ID NO: 70171 - protein, 334 aa, Zea mays
  Coding DNA Sequence Number=SeqID_28392
  Gene Ontology: Mol. function=protein dimerization activity
  Homolog annotation: Hit_ID=Q2R0X2; Match level="QueryCoverage=60%, HitCoverage=31%, E-value=3e-61, Identity=72%"; Hit description=HAT family dimerisation domain containing protein
MERFIIKEPQVSSPNNQAIDQDTAQVVKNAQRAIYKECWNMIDSPIGHFLLKDGDNTTSFLEVNDTTGQGLFDALDKELKHLGLDIDNVRGQGYDNGSNMKGKHQGRIYTIFANSTKKWQILKENIEGLILKPVSATRWESRVGSVKTIRFEYANIREALLQVSDSDNDPLTSSEAKSLVTNELGEFEFILAIVIWYEILYHVNYVSKDLQAKGMLIDAAIQKVQGLISFFNRYRESGFLNTLEEAKGIAREMEIDTSFHKKRQIKRKRHFDENPDDTNVGTQSEEESFRINYFIPIVDQAISSQGDLNNMKVIRKYLVSYLLLIHYDHWIMTT

SEQ ID NO: 70172 - protein, 136 aa, Zea mays
  Coding DNA Sequence Number=SeqID_28393
MAERENPSAGASSGNGRPSWGLGRARTGEPAREQRWPTEKLAHAEAPPAGRARQPWQTGAVSRSACRPGRIDGGRGRGQRNSTGEVGRRASSAARREEHRRAGSGRNAGELVAPGSRARRWRASRARLPGRAQGGR

SEQ ID NO: 70173 - protein, 67 aa, Zea mays
  Coding DNA Sequence Number=SeqID_28394
MDACWRLGSGRASIAGSQGEVVVMVNWYRAENDEEAAVIFEGNTQGIPIDDDSLDRRAMVPISSADT

SEQ ID NO: 70174 - protein, 97 aa, Zea mays
  Coding DNA Sequence Number=SeqID_28395
KETTNSSPFAALDNELDPRNAQRLLNAEEGEGSIPEKDDVIAEAEHTIAEAASDDEEDDGILSPSKPCHIEFGISNVKAENLVLMKKLGYFGKMMMS

SEQ ID NO: 70175 - protein, 163 aa, Zea mays
  Coding DNA Sequence Number=SeqID_28396
  Subcellular localization annotation: CTP_CleavageSite=90; ConfidenceScore=5.55e-01
MADLGPLPAASRRFLSLLLESVVPAVSPFLVASLFFPIQSLFFSPRCPQSNAPLSTASSPARPSLRPSQAAAAPPLYTLPPLKPWWPRALASARPCALLPHGKLALPNLTPAIAIIGFCVSPTFLLALVLAPHLLHHAAPCLLAGRPYALLPYVEDEQHTGSM

SEQ ID NO: 70176 - protein, 151 aa, Zea mays
  Coding DNA Sequence Number=SeqID_28397
MGEVGWGLRAETRESGVLLVLDIEEQGIWPTSKETGSSMGRASSSWGRSALRGEQILGRVATRALAVARRIEEEQRLLARVLNRGEPASLQWTTTRWTEGVAMTWAEERRPDGEKQRGDQEGAHDGDDRLQEQRRETTTGCRKGPEICHGK

SEQ ID NO: 70177 - protein, 57 aa, Zea mays
  Coding DNA Sequence Number=SeqID_28398
MNVDEDEGTKERFDEGGAGELRGVLASGWNVLESSYGGNSKGRRGYAAYFFLKWIDI

SEQ ID NO: 70178 - protein, 104 aa, Zea mays
  Coding DNA Sequence Number=SeqID_28399
  Subcellular localization annotation: CTP_CleavageSite=25; ConfidenceScore=5.10e-01
MADPRAPGPPTWPRPARRLPGRAPRAAPGRAVLGRTLVPDNGQLVKTEGVAGEDPEQQSVGEGGDKDDGYDYAYGNGCPRCNHYSGEDEVVEEDFQEFQEYDEF

SEQ ID NO: 70179 - protein, 193 aa, Zea mays
  Coding DNA Sequence Number=SeqID_28400
  Homolog annotation: Hit_ID=Q75IM5; Match level="QueryCoverage=41%, HitCoverage=33%, E-value=3e-26, Identity=58%"; Hit description =Putative senescence-associated protein
  Subcellular localization annotation: CTP_CleavageSite=19; ConfidenceScore=5.42e-01
TSASSPFPPDTTLPLPLLGSDAVGSRRRRTLRSSLHLIPFPCSPSHDVRRCEDRPWHQRPRCLEQCREEEREKRQERSRHEADDRSGEGSSEDEREQEKEEKQKDRRPYEQSGCCKPPTACQYSGGMPVGAQDEDCYRASVMEQVRQDWHKIFVLDVVVLAALVCICSCGCCAFRNARRSRSQYPYGVAMMGW

SEQ ID NO: 70180 - protein, 90 aa, Zea mays
  Coding DNA Sequence Number=SeqID_28401
MSLPSPPPRVDCGSHNTRAAELLTSIEIRGACAGLESSGGRGRIAQCLRRGSCLETPWCAGGTPPIPDRGWSSEATTAVLAAGHNLAAPA

SEQ ID NO: 70181 - protein, 51 aa, Zea mays
  Coding DNA Sequence Number=SeqID_28402
MAMRRTNGMTRLSTMEVTIDSWSHFALAPHATYGIAQCTIKHNFWMQETYR

SEQ ID NO: 70182 - protein, 145 aa, Zea mays
  Coding DNA Sequence Number=SeqID_28403
MNLVKKSGNGLKKFLLSLAKTCIGLWCTRLSGVYRTVSGAQAGSAAKTLLSGIGEGDMAKNHRTVRWCTGLSGEPSAPALNTRRRTRRSRKFTEGAVAEIHRTVRCALDCLGERLQLMEIPHKRETSLKKKTVVFKWIIGSLERG

SEQ ID NO: 70183 - protein, 156 aa, Zea mays
  Coding DNA Sequence Number=SeqID_28404
  Subcellular localization annotation: CTP_CleavageSite=87; ConfidenceScore=5.06e-01
MVVMACGLFLFLFGHGVMAVPNNAKAGMPAAAAVVQSVAVAGQAIQDGQNEMLAQRAVPPQSTAASVGGTVAAPGPPLLFSEQWSTVAAAPAATMHCHGPPTDAVICHPTARSSYRVVYLAVTAKAGAAAPTTAVERESQGSGRNHKGLIERAKMQ

SEQ ID NO: 70184 - protein, 135 aa, Zea mays
  Coding DNA Sequence Number=SeqID_28405
  Subcellular localization annotation: CTP_CleavageSite=46; ConfidenceScore=5.31e-01
MAQLGAVGALRAGNCSLSYYAAAGPPSSVDNTNQASVTGEFRCTVSATTYPSILCTVELGLGPEASVGRHPGEAPPWGGIAAVPAGRGRGDGLGLCDQDLAIAISARWPSISDRADAVRPARFKTLAIGSRSEDL

SEQ ID NO: 70185 - protein, 76 aa, Zea mays
  Coding DNA Sequence Number=SeqID_28406
MGSSSLWAERESQLVGKVHNLCRVFETDISAALTVAMRLMVLGFDSGNGCQHCNPCSEEDEAVEGDHQEFQDCDEF

SEQ ID NO: 70186 - protein, 78 aa, Zea mays
  Coding DNA Sequence Number=SeqID_28407
MADTPCDLISMDISKLLGFILVADGASLFCRHATILLEELTMVGVPSTTTFHAGAANSSGLKPPTHVPLTLASMALLP

SEQ ID NO: 70187 - protein, 170 aa, Zea mays
  Coding DNA Sequence Number=SeqID_28408
MPHRVAALLLLPLAAASEAPGPAAEAALLERHEVQLAKLEEVAESLARSVHALESALARSADPDPSQPVALAAAVGDRPTAASSSSPPALLELEASAASPRSSSTFRRGAANICRLLRCSPLRPPLQPPLPSSSRLLPSLSSRRCPAAAAAPSPAPAPIAPRRSASSHRG

SEQ ID NO: 70188 - protein, 196 aa, Zea mays
  Coding DNA Sequence Number=SeqID_28409
MGDLPRPFRVDRLGQCRGKTRVEGAADASLVLLSQIRTLLGASPSCEKGASGRVVLIQQLWVAEFLAGDVKPPWVRLTSRVELLRGKFVVRTPPMTSSWLPLRVDASGGIFWGWHHCLAGFGNVAASMALGAAVLHRWGRGRRSVIVRAGVERRYVKFGSWISNPRGPITYRFVNMERPPGKTVLPQGWYGTPLAD

SEQ ID NO: 70189 - protein, 55 aa, Zea mays
  Coding DNA Sequence Number=SeqID_28410
MSLTHVDPHTLPGGPVPSVTAPPDRRQWRDCGTDVRAVAQIPEHYAPICGTRVLG

SEQ ID NO: 70190 - protein, 83 aa, Zea mays
  Coding DNA Sequence Number=SeqID_28411
  Homolog annotation: Hit_ID=Q9ZU41; Match level="QueryCoverage=67%, HitCoverage=15%, E-value=2e-12, Identity=58%"; Hit description =Predicted by genscan and genefinder
  Pfam annotation: Domain name=DUF789; Domain location=1-76; Score= -163.5; E_value=0.00069; Accession=PF05623.3; Description=Protein of unknown function (DUF789)
MRGWRIGDVTNSRPYFCLGDLWEAFNEWSFYGAGVPLVISGSESVIQYYVPYLSAIQLYADPLKLPSRIRYNFLFFNSLALEM

SEQ ID NO: 70191 - protein, 176 aa, Zea mays
  Coding DNA Sequence Number=SeqID_28412
  Subcellular localization annotation: CTP_CleavageSite=91; ConfidenceScore=5.10e-01
MAGPSGASSSSRGGGGGGVDRFYSPPHVRRQQQEEQLQRLKGLAQGQRTSSPAAGTLTPRAARQKTPPAETPAPVNESERRVDASSKPPVSATASTAKAAATADAVTTSPPAPAVLDEVGNLDRFLISTTPSVPVHYLPKVFASSDFLFLFRRNLSCVLAFACTRCLARACVRCLV

SEQ ID NO: 70192 - protein, 41 aa, Zea mays
  Coding DNA Sequence Number=SeqID_28413
MGLLDGCSMLRIEIGEEDYQTPVEMVWTCLTEISRGTRLLI

SEQ ID NO: 70193 - protein, 108 aa, Zea mays
  Coding DNA Sequence Number=SeqID_28414
MRVPRAPAQSLFGISAAGGRESCESHTPSTQSTQHSSEHPEHKPLWSSVLPPNNRYPRNRGQSLSPSLASMTPAPSSLVLLPLCNVCAMLYAICAEVEKPASAKHCQW

SEQ ID NO: 70194 - protein, 170 aa, Zea mays
  Coding DNA Sequence Number=SeqID_28415
  Subcellular localization annotation: CTP_CleavageSite=22; ConfidenceScore=5.12e-01
MQAACNRAKWTHPFDSNAPSMEAQAHSSCNRRAGCYVRATAPPLAPLPRLLDCGTSTATQGKPAHDPTVPARRVGHGSVSCGRRRDGRYGQKWAGRTGKGGYPERDPSPRRKRAPSPPTDQRFEGWPLGGVQQPPQSARAPRPLLVRGSRAGPSEGFNGCLRPLGLRAHY

SEQ ID NO: 70195 - protein, 387 aa, Zea mays
  Coding DNA Sequence Number=SeqID_28416
  Gene Ontology: Mol. function=structural molecule activity
  Homolog annotation: Hit_ID=Q5JMK3; Match level="QueryCoverage=81%, HitCoverage=80%, E-value=9e-78, Identity=53%"; Hit description =Putative VAP27
MGRWCPRCHYLPEGVAFEICLGHDVALRLLLSLLGVLYAGGGAVLQLKSELLRQGCGSTTMTRVTMQALRTAPPDMQLKDKFLVQTTIVPYGTSDEELVPAFFSKETGRYIEESKLRVVLVSAYQSLEEQPTNKIHDTEPVVEVPVLKEVPNIENEVPDAAKEVPAPLVQAPAIVTGIPSPVEETPGLREFRVPLNEAPAVLAESPSAQKDPSVITVEHASTVIIEHSPAISIESPPLKQSVTVFKESPPSKQSIAAFKEYPPPSKQSIAVFKESPPLEETSPKEAVVLSDRGLFSVQNHQLSHVTEDVQNLKSKLNNLESKLEEAGKMIIRLKEESRSTTQERDKLQQEMVFLRKKGTPRSQVGFPLLFVVYVALLGTLLGYLLRL

SEQ ID NO: 70196 - protein, 191 aa, Zea mays
  Coding DNA Sequence Number=SeqID_28417
MTSTHKYRHVRKTADAEERKQQPKGDVVAETNFKSDTFRKVVTSGTPPSHVREGPGFHPRKPVLRRVTPSTGKAAPMGVTVAEAFVQEAPSTNARPRPRDTTGYLRHRQCPDIPHKPSQKGIDTPAGYHSSRRATTDTTPSGRAHGAMRRASHCRRPGSLHACTPRRQQGNREQAEHRARGPQKQRIKLDS

SEQ ID NO: 70197 - protein, 61 aa, Zea mays
  Coding DNA Sequence Number=SeqID_28418
MAPWYWARASVPRMLEFAERAPSSSDASRFHKREISQARLQKYHGVTNLDMTSGGSFIATG

SEQ ID NO: 70198 - protein, 766 aa, Zea mays
  Coding DNA Sequence Number=SeqID_28419
  Gene Ontology: Mol. function=potassium ion transporter activity; Cellular component=membrane; Biological process=potassium ion transport
  Homolog annotation: Hit_ID=Q06XL4; Match level="QueryCoverage=99%, HitCoverage=100%, E-value=0.0, Identity=76%"; Hit description =Potassium transporter HAK4
  Pfam annotation: Domain name=K_trans; Domain location=24-766; Score =1345.6; E_value=0; Accession=PF02705.7; Description=K+ potassium transporter
MDAEAGVAGADQLPRRQYYLNLLLLAYQSFGVVYGDLSTSPLYVYKSTFSGKLRHYQDEETVFGVLSLIFWTFTLIPLLKYVIIVLSADDNGEGGPFALYSLLCRHAKLSLLPNQQAADEELSSYYRNGFAPRNGSSPWSRRFLEKHKKMRTLFLLIVLCGASMVIGDGVLTPAISVLSSMSGLHVRATGLHHSSVVLLSCIVLVGLFALQHRGTQKVAFMFAPIVIIWLLSIGGIGLYNILHWNPNVYQALSPYYMVKFFRKTGSEAMFADLGHFTSASVRVAFITVIYPCLMLQYMGHAAFLSKNTFHMPTGFYDTIPEPVFWPVFVVATLAAVVGSQAVISATFSIVKQCHALGCFPRVKVVHTSRWIYGQIYIPEINWILMVLCVAVTIAFRDTTLIGNAYGIACMTVMLVTTFLMALIVIFVWQRNIIFSLVFLVFFGSIEAVYLSSSLMKVPQGGWVPLVLAFIFMSVMYIWHYGSRRKYQFDLQNKVSMRSILSLGPSLGIVRVPGVGLIYTELVTGVPSIFSHFVTNLPAFHEVLVFLCVKSVPVPYVSPDERYLVGRIGPKEYRMYRCIVRYGYKDVQRDDDNFENMLVMSIAKFIMMEAEDASSASYDIANEGRMAVITTTDASGSPLAMRDFDGLADSMSTRSSKSESLRSLQSSYEQESPSVNRRRRVRFEVPEEDGMGQQVKEELTALVEAKHAGIAYIMGHSYIKARRNSNFLKKFAIDVGYSFLRKNCRGPSVTLHIPHISLIEVGMIYYV

SEQ ID NO: 70199 - protein, 954 aa, Zea mays
  Coding DNA Sequence Number=SeqID_28420
  Gene Ontology: Mol. function=nucleic acid binding; Cellular component= intracellular; Biological process=protein amino acid phosphorylation
  Homolog annotation: Hit_ID=Q8S1U2; Match level="QueryCoverage=71%, HitCoverage=93%, E-value=1e-158, Identity=45%"; Hit description=PPR -repeat protein-like
  Pfam annotation: Domain name=PPR; Domain location=419-453; Score =17.4; E_value=0.051; Accession=PF01535.11; Description=PPR repeat
  Pfam annotation: Domain name=PPR; Domain location=523-556; Score =36.7; E_value=8.1e-08; Accession=PF01535.11; Description=PPR repeat
  Pfam annotation: Domain name=PPR; Domain location=557-591; Score=8.0; E_value=0.84; Accession=PF01535.11; Description=PPR repeat
  Pfam annotation: Domain name=PPR; Domain location=624-658; Score=2.9; E_value=3.4; Accession=PF01535.11; Description=PPR repeat
  Pfam annotation: Domain name=PPR; Domain location=696-730; Score=1.0; E_value=5.7; Accession=PF01535.11; Description=PPR repeat
  Pfam annotation: Domain name=PPR; Domain location=777-811; Score =23.7; E_value=0.00065; Accession=PF01535.11; Description=PPR repeat
  Pfam annotation: Domain name=PPR; Domain location=812-846; Score =11.4; E_value=0.33; Accession=PF01535.11; Description=PPR repeat
  Pfam module annotation: Pfam domain module=PPR::PPR::PPR::PPR::PPR::PP R::PPR; Domain location=419-453::523-556::557-591::624-658::696 -730::777-811::812-846
  Subcellular localization annotation: CTP_CleavageSite=32; ConfidenceScore=5.02e-01
MARARLPLLLLLLVAFLAGTGSTAARHAAPAPASAPRASPSISAAPEYGAPLPRLPNQHQRPSALAPSQALAPDIMPVLPSPAEDGAAPPPDADEPTIPSSPSPPNPDALEPAWALAPFGSAPAVAAQSPAAAPAPASALVLLAVPWLLLVVVGARKKVVLAGWSASAGLAGSAARLAATTLCVLVKNCCFCCYISSAFTSLYLLGDYYLGDSCRAAPQPPPKLDAPRRWMRRHTPGLLAANLLRASSLLRPPSVLAARAALLHHAPDDAHRLLDETPRGRAAAIVRALTSAPSSSSGDTACIACLHCAALKSGAVLDPPVRTSLLAAYARAGRGAGAGAGAGAALALFREAVAPDVILWNAAVGALTTSSPLHGMAAKSCLGAHCLGAWNALVDMYAKCGEFRSAEVVFHSMPCRDTTSWNSVISGSIFNGLAEVSACYFREMSCSIFQPDEVSLSSVLSACSRLDDLFSFGESVHSCAVKLGYEDTASCSVANSLVTFYSEFGMPEAAKKVFASNLNRNLVSWNAMIKGLVQNERVTEALAVLRQMRLENQPDVATLVTIVSGCADQGLLSEGETLHGYVIRKGLLREEPSMGNSLLDLYLKCDEPSNAGLLFMTMPRRDLISWNTMISGYSRYGPLREEAQLMFKGLLSEGSSCSLATMLAVIPSCSIPEELSFGKALHSFSLKCGFTSSGVSAVNALIHMYMSCGDPLAAFSLIERIIPNNKGWRALQFYQKMEDFEPNEISVVASLVDMYCKCGRLDIAVRVFEASAEKSIAGWNSLISAFGFHGHGMKSIDLFWKMHDSGMKATKSTFIALLSACSHSGLVDEGWKYYCLMSEKFGITPAPEHHVCIVDMLGRAGRLQEAHKFVESLPSQQTHGIWGALLNACSSRSELKMGESIAKHLLHLEPGNSGYYVTAANLYAYKDMWSGVAQVRSVLQDKGLVKPHGRSTVG

SEQ ID NO: 70200 - protein, 391 aa, Zea mays
  Coding DNA Sequence Number=SeqID_28421
  Gene Ontology: Mol. function=protein serine/threonine kinase activity; Cellular component=membrane; Biological process=protein amino acid phosphorylation
  Homolog annotation: Hit_ID=Q8RYK7; Match level="QueryCoverage=82%, HitCoverage=85%, E-value=1e-79, Identity=49%"; Hit description =Putative disease resistance protein kinase
  Pfam annotation: Domain name=APH; Domain location=92-264; Score= -16.7; E_value=0.089; Accession=PF01636.13; Description =Phosphotransferase enzyme family
  Pfam annotation: Domain name=Kdo; Domain location=70-272; Score= -84.6; E_value=0.057; Accession=PF06293.4; Description=Lipopolysacchar ide kinase (Kdo)
  Pfam annotation: Domain name=Pkinase; Domain location=90-356; Score =46.4; E_value=2.5e-11; Accession=PF00069.15; Description=Protein kinase domain
  Pfam annotation: Domain name=Pkinase_Tyr; Domain location=90-360; Score=41.1; E_value=5.4e-15; Accession=PF07714.7; Description =Protein tyrosine kinase
  Pfam module annotation: Pfam domain module=APH::Kdo::Pkinase::Pkinase_ Tyr; Domain location=92-264::70-272::90-356::90-360
  Subcellular localization annotation: CTP_CleavageSite=35; ConfidenceScore=5.07e-01
MTLPTPVVAGVAAGAAALLLAAALAVAWWWLVIVRRRRRRDRSSDTGSSSEAPPPTLAEWGRCGRTSSAPEFHGARQFSLEELAHATNGFAEANLVGAGAFGLVYKGLLLDGTVVAIKRRAGAPRQDFANEIRRLSEIWHRNVVTLIGFCQEGGLQMLVFEYLPNASVSGHLYDTGKETMTRLEFKQRLSIAIGAAKGLSHLHSLAPPLIHRDFKTSNVLVDENFIAKVSDAGIHRLLRGPDGGAVAALASRGVFQDPEVHSSAQAQLSETESSDVYSFGVFLLELVTGREAAGLMPPGSSKDSLAQWMEARFASNELVDPRLGGSFTSEGMAEVVGLASSCLSPSARRRPRMRLVAAELDRILEKEMALTTVMGDGGTVIFTLGSQLFTS

SEQ ID NO: 70201 - protein, 106 aa, Zea mays
  Coding DNA Sequence Number=SeqID_28422
VLSLAPQTLQVHVWDFSGQENLILMNEWNGLHDYFHADQAVASAAISDPSICHLRSFKAPCLHVIQNLLLAIVPEQPLILFLECTPDSSNGIMDNRLCSCVGYELQ

SEQ ID NO: 70202 - protein, 53 aa, Zea mays
  Coding DNA Sequence Number=SeqID_28423
MAKVKIMRVRANRLGAMKDERWDFTKGPESPAKIGLTPIRASGRLTGPSFVQW

SEQ ID NO: 70203 - protein, 60 aa, Zea mays
  Coding DNA Sequence Number=SeqID_28424
MGADWAWEMWAVKHVGPSGIQAPCLARFVTDYHALAGKPVQAALLLNYAPSGPSRLLPVV

SEQ ID NO: 70204 - protein, 605 aa, Zea mays
  Coding DNA Sequence Number=SeqID_28425
  Gene Ontology: Mol. function=hydrolase activity, hydrolyzing O -glycosyl compounds; Cellular component=chitin- and beta-glucan -containing cell wall; Biological process=carbohydrate metabolic process
  Homolog annotation: Hit_ID=Q5W708; Match level="QueryCoverage=94%, HitCoverage=98%, E-value=0.0, Identity=61%"; Hit description ='putative glucan 1,3-beta-glucosidase'
  Pfam annotation: Domain name=Cellulase; Domain location=274-591; Score=-19.1; E_value=4e-06; Accession=PF00150.8; Description =Cellulase (glycosyl hydrolase family 5
  Subcellular localization annotation: CTP_CleavageSite=41; ConfidenceScore=5.28e-01
MAQGHISLSALHVAARGDRPMGFRGGLRPPVTRVCFVLLCLCASLSEAKRTPQPAPTTGKKQQPPAASSSQQSPAVSYPALPVRAVCLGGWLVTEGWILPSLFDGIPNKDLLLQFKSALRKTYLTADNGGGGAVVANRTQASDWETFKVRSDNDAGLRLENSSYLINGGSMQLWRLNDTTFNFRTSGNQFVGIGASDGIIVATATTPGLPETFQIVRCPFDKNRVRIKAANGYFVQAIATGEVIADYGEPTRWSDFDASVFLMTTVGQQLQGEYQLCNGYGADKAAPLLREHWSTYIVEDDFKFFASSGLTAVRIPVGWWIASDPSPPAPYVGGSLQALDNAFRWAEKHELGVIVDLHAAPGSQNPWEHSSSRDGTQEWGTTDASIAQTVQVIDFLASRSETNKHHARILSPNPPNDRRYTHARRYATSPRLLAVELLNEPLAPGATLDSLTRYYRDGYAAVRKHAPAAYVVMSNRLSSGNSTELLWFAGRGFPGAVVDVHYYTVFNSLFGNFTAQQNIDFVRTNFSGELAAVTTRDGPLTFVGEWVAEWKVPNATKEEYQKYAAAQMNVYGQATFGWAYWTAKNANNHWDLEWMIRNGYISLKG

SEQ ID NO: 70205 - protein, 439 aa, Zea mays
  Coding DNA Sequence Number=SeqID_28426
  Gene Ontology: Mol. function=RNA-directed DNA polymerase activity; Cellular component=mitochondrion; Biological process=RNA-dependent DNA replication
  Homolog annotation: Hit_ID=UPI00004C1733; Match level="QueryCoverage =88%, HitCoverage=25%, E-value=0.0, Identity=86%"; Hit description =UPI00004C1733 related cluster
  Pfam annotation: Domain name=RnaseH; Domain location=1-123; Score= -6.8; E_value=0.00025; Accession=PF00075.14; Description=RNase H
  Pfam annotation: Domain name=rve; Domain location=250-408; Score =88.6; E_value=1.9e-23; Accession=PF00665.16; Description=Integrase core domain
  Pfam module annotation: Pfam domain module=RnaseH::rve; Domain location=1-123::250-408
MFFDGSLMKTGAGAGLLFISPLGKHLRYVLRLHFPASNNVAEYEALVNGLRIAIELGVRRLDARGDSQLVIDQVMKNSHYRDPKMEAYCDEVRRLEDKFYGLELNHIARRYNETADELAKIASGRTTVPLDIFSRDLHQPSVKIDDTPEPEKPSAQPEVPSAQSEAPSAQSEAPSAQSEAPSARPKAPSVQPEVPSAPEAPQALVGNAFRQGFYWPTAVADATRIVRTCEGCQFYARQTHLPAQALQTIPITWPFAVWGLDLVGPLQKAPRGYTHLLVAIDKFSKWIEVRPLNSIRSEQAVAFFTNIIHRFGVPNSIITDNNTQFTGRKFLDFCEDHHIRVDWAAVAHPMTNGQVERANGMILQGLKPRIYNDLNKFGKRWMKELPSVDARGRHKLTPPWEGPFVIAKVLKPGTYKLANSQGKVYNNAWNIQQLRRFYP

SEQ ID NO: 70206 - protein, 112 aa, Zea mays
  Coding DNA Sequence Number=SeqID_28427
  Gene Ontology: Mol. function=3-dehydroquinate dehydratase activity; Biological process=aromatic amino acid family biosynthetic process
  Homolog annotation: Hit_ID=Q25CI3; Match level="QueryCoverage=98%, HitCoverage=17%, E-value=4e-26, Identity=56%"; Hit description =Hypothetical protein osysl3
MDATIGESAPSVERAFEGQPHPGFWGLVTPRSMAVAVVYAFVFSMVSMRIYMIVGLVGAFNMPSNILCFVTLRGLVSLLRRCGIAAAPFTRQENVFLQTSVITCVNVAVASE

SEQ ID NO: 70207 - protein, 244 aa, Zea mays
  Coding DNA Sequence Number=SeqID_28428
MEMAREIGSGGVREEAATSCEEEVVSRVPSASLRRVTGMRDVAKGEMRLERVLGQEVVKRRFLLHSGYGAVDVNVERLGDLICPLIFLESGTAAVDARASSGSWSGSTEAGLLLAASSSRRCRWRLETMNGCSSSCPAVDRSSEHRVRLAPAQEVLGLRGQPPGHLQYGEAHRGEHVGDNASPRRATSVHLEDGALLYIFLKNACAEPVVDDPYIYLQTAVQAAGSTDVQTELPYKISDVLHEI

SEQ ID NO: 70208 - protein, 83 aa, Zea mays
  Coding DNA Sequence Number=SeqID_28429
MDTGRAPWAGVVADVLAAVRLAVLEVPWWLSAEAKDFLGRCQPDAMLRRPVHGGAAARAPVHRLQSPPAPPTAGRRQEQAVVA

SEQ ID NO: 70209 - protein, 372 aa, Zea mays
  Coding DNA Sequence Number=SeqID_28430
MVGSIQEEPKAEHHLRVEKARGSLRCYLTEVQAARMRNTLLPISAEYLSIAGVHKLEMSRGQWSVSSPVDLVVVELIQPDCGSWACLAKQVIGRLTKRAMEHFCAPARGETEICLLSEVGLGASVVRWPWVRQNNISGPRLAPGEMEKRLPSEVGLGQEGTSYPIRGWPQGRWNYVSRLRLASGEMEQHLSFKHVMSNGRARNNNSHLRLASDETEQCLPSEDKAYSGAPSLYWLVGRGTNIGALKSNDRLVLGREDKKGSAEGGSVMNAGGQSDAAVPNENRELVAGNLEALRSRDEEKGNVVNMDERDRGCLLHDEADPRWTKVASKKLKKKYKRKILALATRASSRIARDGIPILEKATKRAQGKDYPQ

SEQ ID NO: 70210 - protein, 232 aa, Zea mays
  Coding DNA Sequence Number=SeqID_28431
  Subcellular localization annotation: CTP_CleavageSite=51; ConfidenceScore=5.59e-01
MTRSFGLRLPGSSSSNLVVHALLGKSSGGPPSGPWTVSALPPEASLERVVTVSHVRSWLRASQNYLPSEVDLERYRIVSPVRGWPHARQNSISRPRLASGKTEHRLPPRVGLGQTEQCLLSEVGLEQDGTTSLIQGWPRARWNNMSRLRLASGQTEQHLPPKAGPGEIEQCRPPEVVLRRDELCLSSEVGLKQDGTSSSLRGWPRARWNNISHSRLASSDMEQHLLPRAGLE

SEQ ID NO: 70211 - protein, 61 aa, Zea mays
  Coding DNA Sequence Number=SeqID_28432
MEKRFPKSPHEILYNAISFLQKWKSLLKQKDLEKGEVFDQLPEEFGCVISNQPLGEVSDIR

SEQ ID NO: 70212 - protein, 98 aa, Zea mays
  Coding DNA Sequence Number=SeqID_28433
MARLRCTARKSVIPFLPSRLVERPLRRTVTGGGFWEVALPTPQPEMPPALPQGIPTAGGDPDGDDDNDGSLSHNMELLEEQEPEGLWRNRPNYSSLSA

SEQ ID NO: 70213 - protein, 83 aa, Zea mays
  Coding DNA Sequence Number=SeqID_28434
MEAETWLYGEESDEREQRKTEGEGVNQGVSQVDGVEAELIGATDIAGSRWWPRNRSETTADGGEAPWVCVRCEASAGVLRVCE

SEQ ID NO: 70214 - protein, 103 aa, Zea mays
  Coding DNA Sequence Number=SeqID_28435
  Subcellular localization annotation: CTP_CleavageSite=92; ConfidenceScore=5.37e-01
MPSQQFDPRTSLYSAATPPRFPLSVLLPTTASIAPHRDGYCSPEWPLVRPRSPSAICPSQPRSCDPGFAIVFARSSPTSLASQTTPAPLEILVSLTSSGTTLG

SEQ ID NO: 70215 - protein, 69 aa, Zea mays
  Coding DNA Sequence Number=SeqID_28436
MGVTVTKQCVAPVSNNTFAEWDYIENEGKVPGCSGGIAAAAEGTASDTTAGVDADAGAGASADVLEIWG

SEQ ID NO: 70216 - protein, 178 aa, Zea mays
  Coding DNA Sequence Number=SeqID_28437
MAGGIELAGAKERWLAGEVFELGIKVNIPDLWLKGAEVFSKHYSITERDTVVAAIQDAARRALLQYCSLFSRVADSLDLKYYPRCSTGSAGGVIVSPVGEGNPRLISMVNLVAVLNTKLDHALDELGKARAEIAELHAEHAEHRHQEDGSPLLSGFSTLIARRPVVIMLMAPLTVGPR

SEQ ID NO: 70217 - protein, 66 aa, Zea mays
  Coding DNA Sequence Number=SeqID_28438
MAALPDFTMEVRRRRWCGHSVATREVQIKEKPKSSSARLTGLSGGAPDSVWCARLASGEQAALEKV

SEQ ID NO: 70218 - protein, 68 aa, Zea mays
  Coding DNA Sequence Number=SeqID_28439
MVAHSTLMVALLSRVVTPQAGPYREPSGPSVKGASAEDGESTLTERAQRQRTWALTGGPGRQARVREA

SEQ ID NO: 70219 - protein, 52 aa, Zea mays
  Coding DNA Sequence Number=SeqID_28440
MQRGCKMDTSKDGFSDRSAISDVALTQQGQVPYDQTSHCVNYPSERLPSVAV

SEQ ID NO: 70220 - protein, 35 aa, Zea mays
  Coding DNA Sequence Number=SeqID_28441
MEPKGKGKVTDEKEKIPIDHKPKDDENYNEVEVEE

SEQ ID NO: 70221 - protein, 274 aa, Zea mays
  Coding DNA Sequence Number=SeqID_28442
  Gene Ontology: Mol. function=protein serine/threonine kinase activity; Cellular component=membrane; Biological process=protein amino acid phosphorylation
  Homolog annotation: Hit_ID=Q00GA6; Match level="QueryCoverage=100%, HitCoverage=79%, E-value=1e-127, Identity=79%"; Hit description =Putative Pti1-like kinase
  Pfam annotation: Domain name=Pkinase; Domain location=68-271; Score =43.6; E_value=3.7e-11; Accession=PF00069.15; Description=Protein kinase domain
  Pfam annotation: Domain name=Pkinase_Tyr; Domain location=66-272; Score=20.7; E_value=9.7e-14; Accession=PF07714.7; Description =Protein tyrosine kinase
  Pfam module annotation: Pfam domain module=Pkinase::Pkinase_Tyr; Domain location=68-271::66-272
MSCLACCGGEDTQRTPDNGGPYPGGYPPRDDAYRTADPTPRGAQPLKMQPITVPTIPVEEIREVTVAFGDEALIGEGSFGRVYFGVLKNGRSAAIKKLDSSKQPEQEFLAQVSMVSRLKHGNVVELLGYCVDGNTRILAYEFATMGSLHDMLHGRKGVKGAQPGPVLSWTQRVKIAVGAAKGLEYLHEKAQPHIIHRDIKSSNVLLFDDDVSKIADFDLSNQAPDMAARLHSTRVLGTFGYHAPDFGVVLLELLTGRKPVDHTLPRGQQSLVTW

SEQ ID NO: 70222 - protein, 1253 aa, Zea mays
  Coding DNA Sequence Number=SeqID_28443
  Gene Ontology: Mol. function=ATPase activity, coupled to transmembrane movement of substances; Cellular component=integral to membrane; Biological process=transport
  Homolog annotation: Hit_ID=Q8GU69; Match level="QueryCoverage=95%, HitCoverage=96%, E-value=0.0, Identity=66%"; Hit description=MDR -like ABC transporter
  Pfam annotation: Domain name=ABC_membrane; Domain location=67-346; Score=179.1; E_value=1.1e-50; Accession=PF00664.13; Description=ABC transporter transmembrane region
  Pfam annotation: Domain name=ABC_membrane; Domain location=712-987; Score=160.9; E_value=3.4e-45; Accession=PF00664.13; Description=ABC transporter transmembrane region
  Pfam annotation: Domain name=ABC_tran; Domain location=1037-1222; Score=205.3; E_value=1.4e-58; Accession=PF00005.17; Description=ABC transporter
  Pfam annotation: Domain name=ABC_tran; Domain location=418-602; Score= 228.8; E_value=1.2e-65; Accession=PF00005.17; Description=ABC transporter
  Pfam annotation: Domain name=SMC_N; Domain location=408-606; Score= -131.8; E_value=0.059; Accession=PF02463.9; Description=RecFRecNSMC N terminal domain
  Pfam module annotation: Pfam domain module=ABC_membrane::ABC _membrane::ABC_tran::ABC_tran::SMC_N; Domain location=67-346::712 -987::1037-1222::418-602::408-606
  Subcellular localization annotation: CTP_CleavageSite=65; ConfidenceScore=5.08e-01
MPESWRPAEADALQPAAGTASASGPSARSPGNGAKGRGAGEPPGAAATRVPFHRLFAFADSADVALMLLGALGAVANGAALPFMTVLFGNLIDAFGGALSVHDVVSRVSMVSLDFVYLAMASAVASFVQVTCWMITGERQAARIRNLYLKTILRQEIAFFDKYTSTGEVVGRMSGDTVLIQDAMGEKVGKFVQLLVTFFGGFIVAFAQGWLLTLVMMATIPPLVLAGAVMSNVVTKMASLGQAAYAESSVVVEQTIGSIRTVASFTGEKRAVDKYNMSLKNAYKSGVREGLATGLGMGTVMVLLFCGYSLGIWYGAKLILEKGYTGAKVMNVIFAVLTGSLALGQASPSMKAFAGGQAAAHKMFETINRTPEIDAYSTTGRKLEDVRGDIEFRDVYFSYPTRPNEQIFKGFSLAIPSGTTIALVGQSGSGKSTVISLIERFYDPQLGDVLIDGVNLKEFQLRWIRSKIGLVSQEPVLFAASIKENIAYGKDNATDQEIRAAAELANAAKFIDKMPQGFDTSVGEHGTQLSGGQKQRIAIARAILKDPRILLLDEATSALDAESERIVQEALDRVMTNRTTVIVAHRLSTVRNADTIAVIHQGTLVEKGPHSELLRDPEGAYSQLIRLQEANQQNNGKVDANARPGKQISINKSASRRSSRDNSSHHSFSVPFGMPHGIDIQDGSSNKLCDEMPQEVPLSRLASLNKAEIPVLILGSIASVISGVIFPIFAILLSNVIKAFYEPPHLLRRDSQFWASMFLVFGAVYFLSLPVSSYLFSIAGCRLIRRIRLMTFEKVVNMEVEWFDHPENSSGAIGARLSADAAKVRGLVGDALQLVVQNSSTLVAGLVIAFVSNWELSLIILALIPLIGLNGWIQMKFIHGFSADAKMMYEEASQVANDAVGSIRTVASFSAEEKVMDLYKKKCEGPLRTGIRTGIISGIGFGVSFFLLFGVYAASFYAGARLVEDRKTTFPKVFRVFLALAMAAIGVSQSSTLTSDSSKAKSAASSIFAIVDRKSRIDPSEDAGVTVEALQGNIVFQHTVALVGESGSGKSTAISLLQRFYDPDVGHILLDGVDIQKFQLRWLRQQMGLVSQEPALFNDTIRANIAYGKDGQATESEIISAAELANAHKFISSALQGYDTVVGERGAQLSGGQKQRVAIARAIVKDPRILLLDEATSALDAESERIVQDALDRVMVNRTTVIVAHRLSTIQNADLIAVVRNGVIIEKGKHDALINIKDGAYASLVALHSAASS

SEQ ID NO: 70223 - protein, 170 aa, Zea mays
  Coding DNA Sequence Number=SeqID_28444
  Subcellular localization annotation: CTP_CleavageSite=25; ConfidenceScore=5.34e-01
MADAITGELQTRTPAPQTSNPTVLRVAERESRRMGVVLPLIGAVTSLPTRDVFLVTLRSSTTLPQDPNGDVAEGRLRRRSPLPSRCYGGDTVSARASLQKQEERSARVLGTPYRREVAEVGNDLSGFDGERPPLSGGLLKGDRAYPVPPGSLNAEGKILLSGPTSKRLHA

SEQ ID NO: 70224 - protein, 223 aa, Zea mays
  Coding DNA Sequence Number=SeqID_28445
MKTEVGVKDGEKAWASMFLKLLAMVRMRMTDDTCMVHNIATPGWVCTKYGATQHDIPSEELDTMASWRPTESSARGKELDVHRETETELSSTSDKTLRMSRPWEKPWRGHGQRAEGRDGLRIEGEEARPARLAGGAGDCAGGCARRGSAAGNREQRLMLHDLNGEEARNRLELTATRESTFRPSTMVDDIHGEQSTASRELSRQQREPERDDLGAHQGSSAGR

SEQ ID NO: 70225 - protein, 66 aa, Zea mays
  Coding DNA Sequence Number=SeqID_28446
MPPISRPKRFAFRCPSILSPTPRSFHIRQYTVITIREWKRGAIDDAITHREDNGRSRHRLSIPTLP

SEQ ID NO: 70226 - protein, 85 aa, Zea mays
  Coding DNA Sequence Number=SeqID_28447
MEGASCSRVKMEGGTGCTGRMRLAGVGRHPWERDVGTSGAVAGTAGAATFVGARATRAGRVGKSRAMDADFTLLIECEHIRFITF

SEQ ID NO: 70227 - protein, 350 aa, Zea mays
  Coding DNA Sequence Number=SeqID_28448
  Pfam annotation: Domain name=UEV; Domain location=29-152; Score=72.0; E_value=1.9e-18; Accession=PF05743.3; Description=UEV domain
MAMAAATGTVVLVDAALAPYEHPDLRWLVRKHVLAVLQDFPTLSPSVDTYTSDSGASAVLLNARGLLTVSPALPPVPLTLWLPLEYPYLPPLVYVFPAAPPASLARDHPFVDHRTGRVRQTLPYLEDWAVPRSSVAGLVRSLVGALRMCHPLTSRFGSVVHATATARATTTTTPTPEEEEQERMHAALLDELVSRLGRDAAAFRGHVDEDIHALSSSQGNLRARADAMDRAVRDLEGERMRLERAVTASLSHRGELLSWLHKTSCAPDDAGAALLLAPHGAAGGDAPRWLESKASELAMDDTVDALGRALEDGERVIGFHEYIKRVKVLAREQFFHCYAASTSMSKVTKY

SEQ ID NO: 70228 - protein, 566 aa, Zea mays
  Coding DNA Sequence Number=SeqID_28449
  Gene Ontology: Mol. function=tetrahydrofolylpolyglutamate synthase activity; Biological process=folic acid and derivative biosynthetic process
  Homolog annotation: Hit_ID=Q2QLY6; Match level="QueryCoverage=97%, HitCoverage=84%, E-value=1e-133, Identity=71%"; Hit description =Folylpolyglutamate synthase
  Pfam annotation: Domain name=Mur_ligase_C; Domain location=370-464; Score=13.1; E_value=0.013; Accession=PF02875.11; Description=Mur ligase family, glutamate ligase domain
  Pfam annotation: Domain name=Mur_ligase_M; Domain location=158-346; Score=-50.5; E_value=0.021; Accession=PF08245.2; Description=Mur ligase middle domain
  Pfam module annotation: Pfam domain module=Mur_ligase_C::Mur_ligase _M; Domain location=370-464::158-346
MVSQIIAGRRGPHLLTIRERISVGNDGGPVPVRLLSDLFDEAKKAIDEAIESENGSLTHFEVFTALSFLLFSQQNVDIAIIECWRNDVEATEKVEDMLKILDWMTNVTEGVGGGLYALVAVDGSVALLHGVELMAEEDGLRILVGSPNLLHKVLKWDAHLVGLLHRQCHGDVGLDVGSGIVVGDHHRLLLVVGGMSSVVDVAGLGGARDATNVIRSTELAASVITTVGREHLVALGGSLQSIAIAKSGIIKQGRPVVIGGPFSEDIEQIIRDRAFLTQSPVISACGHGIKSFTKCIDWDNGKPYQRCYISIKISRDVPLSIEMHDINLQLLGDHQRQNAVTAACAALCLCSQGWDISDASIQAGLEETQLPGRSQFLTAEEASALGFDSASTVLIDGAHTEESAKALSGVIKTVRPEGPLALVVGMASDKEHLAFAEQLLSGQTPDVVLLTEASVAGGTSRAMPASSLKEVWIAAARDRGIEYVDIGGVSGAETPEHISDLLDCSPSSNSGRKPMVIGCQDVAPFSSNLIVAASQLLESRGTAPGLICVTGSLHLVGAVLPQLGRH

SEQ ID NO: 70229 - protein, 251 aa, Zea mays
  Coding DNA Sequence Number=SeqID_28450
  Homolog annotation: Hit_ID=Q2ACC1; Match level="QueryCoverage=27%, HitCoverage=7%, E-value=4e-24, Identity=94%"; Hit description =Histidine kinase
  Pfam annotation: Domain name=HATPase_c; Domain location=157-228; Score=5.6; E_value=0.022; Accession=PF02518.16; Description =Histidine kinase-, DNA gyrase B-, and HSP90-like ATPase
MNRPRLETQYAVNGCGGEQVRRDSQLMRKVLSFGGGILQWQMEAPKEHNLDGNLSATMELTPNNSAHGGICAGAAGEGELCDGAGGREVVKGEGRGRDQGKGSGSAIGSSHQKGGRRNENRVRWPLAINKKWHRRVWESESGTEQKLPKTKSQQGNGYFSRLMDDNIMGDLQSQAWERWLIVQLQGIMVGTGIGLSISKCLAELMGGQISFVSRPFVGSTFTFSATLKRSYKDTSVDSSRSLSEARTTNCF

SEQ ID NO: 70230 - protein, 198 aa, Zea mays
  Coding DNA Sequence Number=SeqID_28451
MATTFSSSSSSLEEELLEYSISSFAPTILPVAIGMLLLCSLLVVCRLLALVLRCPTPASSPQSAPADPTTAQALTQHLSVSRGKEHLRVTSAIARSTSPPAAAARPRRMLGHRFPTALRLPHGLLQRRSIMARRGLTIMAGGEAEGPLAGFFDYMERLRNYERSGVPRGAGTDSDDGFDLGRMRRLLRRLGDPHTHFP

SEQ ID NO: 70231 - protein, 78 aa, Zea mays
  Coding DNA Sequence Number=SeqID_28452
MPGSEDNTSEIASAAVTTNPNVALEQKLDTMTKVFADLTTKVSGLSLHVFDIDNRTTNIVALISTPPYNLPGYGASLT

SEQ ID NO: 70232 - protein, 58 aa, Zea mays
  Coding DNA Sequence Number=SeqID_28453
MRRRAVVDVETQGQTRDGEVLREAMSDHCQELESVWTEATWWCLTSVNGKSDPYQLGH

SEQ ID NO: 70233 - protein, 90 aa, Zea mays
  Coding DNA Sequence Number=SeqID_28454
MKSIKRSKRLLKEQRKKSETAVPVVCSDNYLCDANRSCELPNNLYLLVAQFFLVEVWALDTMVVNSLEKGVLFPFFFGRQSGLEPGVPDF

SEQ ID NO: 70234 - protein, 81 aa, Zea mays
  Coding DNA Sequence Number=SeqID_28455
  Gene Ontology: Mol. function=protein dimerization activity; Cellular component=nucleus; Biological process=regulation of transcription, DNA-dependent
  Homolog annotation: Hit_ID=Q4U0Z7; Match level="QueryCoverage=59%, HitCoverage=4%, E-value=3e-16, Identity=71%"; Hit description =Cellulose synthase BoCesA4a
MDSDAAAICGHGVGTTADGDLCTFCGFPMCRPCYEYNRKDDTQACPQCKANKRHQGRGLEVKPRPTVKCVLGHDFILHFPV

SEQ ID NO: 70235 - protein, 140 aa, Zea mays
  Coding DNA Sequence Number=SeqID_28456
MREKGPAVVDVLCLGRCSESSVWSWMFDQMYGACSMWLWTVRGRNYLAIARRRVVIFTSPHLAMRSALRAALSGAIGSSGSRHRFPGHGAVISLVGAAVKLAGKWRMHRWPSIWGPVVVIRGVVPFRIGVISGVRSRLGG

SEQ ID NO: 70236 - protein, 88 aa, Zea mays
  Coding DNA Sequence Number=SeqID_28457
MAAKSRYTRRLPLRREVAITVANPDGFAYMHLAIDVGFALATSVVGHVDIAAVGPTGRWEKTRMPLIYGGRRGLNDVVTVDRNVDDSD

SEQ ID NO: 70237 - protein, 204 aa, Zea mays
  Coding DNA Sequence Number=SeqID_28458
CLLARLRDSSPAWFFSLETYPDVSAFRIVADAESESHITYLPGLYSLLTFGGRYVEEWVRVFYATIWIDPDHQWMRFRFDREDITLHTTQIRELFGFPESTKRFHNLFYGTSDPPRCPHDRVAPGTAHVATLFRPPFSDGSRCSSVDFTPATKFLYELMRCTLLPRMGYRKATTRIQLRVLGALVSITPGFGRQTECEPCTCQD

SEQ ID NO: 70238 - protein, 1033 aa, Zea mays
  Coding DNA Sequence Number=SeqID_28459
  Homolog annotation: Hit_ID=Q2QV86; Match level="QueryCoverage=90%, HitCoverage=84%, E-value=0.0, Identity=44%"; Hit description =Expressed protein
  Subcellular localization annotation: CTP_CleavageSite=11; ConfidenceScore=5.12e-01
RSARTTSAGCKATEASELLCFYPRQLFRRSRRIEPLRPRRARVRERRREALRETTGTPTALGSEAGSASGLVPAAGYRGARGPERLVERTAGGRRAPKVETENFLLEPSEDFDDSIGSASKLSYFPEVKLGVNIPAHGESHNLLNADDNKNDYEWGRAQSKPVQTSRSSTMDNSQRASRSSASPSRLSPSPRSMGRTRSSSSASRSSPPLAVQTQMPSQRSSAPPIAKTLTPPRRSPSPVSRRMSTGSSRPTLNETRGASPVKPNHRSSQKLHGWQSNVPGFPYDAPSNLRTSLTDRPVCRSRGGSPSSFSGLEKGSRSRRQSMSPTPPRRASSSHSIERDRMSSYSKASATSSGEDDLDSMQSVPISYSSSPVVKKSLVVMKTRTMAPSKNLSKNFTPSSVPKRTFDSALWLMDHRKAPQDRFRPLLSGAPASTFGSGNGNDVHKPMFSHNSSLTTSSNASSYHGATFGSYMHGSQEQHDLVGEWEADDSSRGHEDIFMFDKLDELNKEDIHYKSTGSTDNSLVIVKHLVSSRHDLEGSSRPNQSLCHSADSSQVGNSKNANCSRCGKFFDAMDVDEEGVYCDVCASMIGNILTSPIVQPIGEENQQFDKTTNLKHCIASDPPIPTGCIGYSKEVSLDHQLVNSESYTDCLDQVPPIHSMGHTPQEMLLGREEKIDAEHRKKHVGDSLGNTNDIVFHQSNVTECEQIEPTSVGHDLFIRDQMDNHNHGSSQYNETISETVTSDSSHQPGSTTYQNPKLETTEEPYYARDGVSMMKRSFGLDSTSAASSSDLGSSRQSIICFERLRSGKRGDFEKSQISSTMSRQSIASVSDMSICSSSASLCPQIGAVGDSCFPIDTLESSTSRTLISSEENDAFCKDALPSDMECLSPQVIADDDSHVDLKIQSYLSEVGDTTVENHSAGRMPDMDHTSTNMYSLDTEMPSDTRESSGLEESCLPETEEDAYAINQCNKGSAREHSSDENNFDDIQMQSEIVQGLAEENRLDDCCMSAISEEDVLISGREADIRELPNDGT

SEQ ID NO: 70239 - protein, 339 aa, Zea mays
  Coding DNA Sequence Number=SeqID_28460
  Gene Ontology: Mol. function=DNA binding; Cellular component =mitochondrion; Biological process=DNA integration
  Homolog annotation: Hit_ID=UPI00005A975E; Match level="QueryCoverage =86%, HitCoverage=18%, E-value=1e-156, Identity=90%"; Hit description= PREDICTED: similar to Retrovirus-related Pol polyprotein from transposon 297
  Pfam annotation: Domain name=rve; Domain location=51-210; Score =107.1; E_value=5.2e-29; Accession=PF00665.16; Description=Integrase core domain
MAYRTVRNAFRQGFYWPTAVANATRIVRSCQGCQFYARQTHLPAQALQTIPITWSFAVWGLDLVGPLQKAPGGFSHLLVAIDKFSKWIKVRPLTSIRSEQAVAFFTNIIHCFGVPNSIITDNGTQFTGKKFLDFCEDHHIRVDWGVVAHPMTNGQVERANGMILQGLKPRIYNDLNKFGRRWMKELPSVVWSLRTTPSRATSFLSFFLVYGAEAILPTELEYGSPKTRAYVDQSNQTSREDSLDQLEEARNTALLHSARYQQSLRRYHARGVRPRDFQVGDLVLRLRQDARGRHKLTPPWEGSFIIAKILKPGTYKLANDQGEVYDNAWNIQQLRRFYP

SEQ ID NO: 70240 - protein, 98 aa, Zea mays
  Coding DNA Sequence Number=SeqID_28461
MANGGSTMTLGSFARLSCAPKDLMPIYALVHIPLDLAMLPYSPQGLATNPIVTSSSKKQKESTTTNYFPKPCNERVHLQFSWTGSITHGTKIRDVQKP

SEQ ID NO: 70241 - protein, 879 aa, Zea mays
  Coding DNA Sequence Number=SeqID_28462
  Gene Ontology: Mol. function=structural constituent of ribosome; Cellular component=mitochondrion; Biological process=translation
  Homolog annotation: Hit_ID=Q6EPV3; Match level="QueryCoverage=85%, HitCoverage=89%, E-value=0.0, Identity=51%"; Hit description =Putative pentatricopeptide (PPR) repeat-containing protein
  Pfam annotation: Domain name=PPR; Domain location=224-258; Score =33.5; E_value=7.3e-07; Accession=PF01535.11; Description=PPR repeat
  Pfam annotation: Domain name=PPR; Domain location=259-293; Score =29.1; E_value=1.5e-05; Accession=PF01535.11; Description=PPR repeat
  Pfam annotation: Domain name=PPR; Domain location=325-359; Score =27.5; E_value=4.7e-05; Accession=PF01535.11; Description=PPR repeat
  Pfam annotation: Domain name=PPR; Domain location=360-394; Score =49.7; E_value=9.5e-12; Accession=PF01535.11; Description=PPR repeat
  Pfam annotation: Domain name=PPR; Domain location=395-429; Score =49.4; E_value=1.2e-11; Accession=PF01535.11; Description=PPR repeat
  Pfam annotation: Domain name=PPR; Domain location=430-464; Score =28.9; E_value=1.8e-05; Accession=PF01535.11; Description=PPR repeat
  Pfam annotation: Domain name=PPR; Domain location=465-499; Score =48.2; E_value=2.8e-11; Accession=PF01535.11; Description=PPR repeat
  Pfam annotation: Domain name=PPR; Domain location=500-534; Score =42.4; E_value=1.6e-09; Accession=PF01535.11; Description=PPR repeat
  Pfam annotation: Domain name=PPR; Domain location=535-569; Score =19.4; E_value=0.013; Accession=PF01535.11; Description=PPR repeat
  Pfam annotation: Domain name=PPR; Domain location=570-604; Score =26.0; E_value=0.00013; Accession=PF01535.11; Description=PPR repeat
  Pfam annotation: Domain name=PPR; Domain location=605-639; Score =31.4; E_value=3.1e-06; Accession=PF01535.11; Description=PPR repeat
  Pfam annotation: Domain name=PPR; Domain location=640-674; Score =21.4; E_value=0.0032; Accession=PF01535.11; Description=PPR repeat
  Pfam annotation: Domain name=PPR; Domain location=726-760; Score =24.0; E_value=0.00053; Accession=PF01535.11; Description=PPR repeat
  Pfam annotation: Domain name=PPR; Domain location=761-795; Score =36.5; E_value=8.9e-08; Accession=PF01535.11; Description=PPR repeat
  Pfam annotation: Domain name=PPR; Domain location=796-830; Score=7.9; E_value=0.86; Accession=PF01535.11; Description=PPR repeat
  Pfam annotation: Domain name=PPR; Domain location=831-865; Score =23.7; E_value=0.00065; Accession=PF01535.11; Description=PPR repeat
  Pfam module annotation: Pfam domain module=PPR::PPR::PPR::PPR::PPR::PP R::PPR::PPR::PPR::PPR::PPR::PPR::PPR::PPR::PPR::PPR; Domain location
  Pfam module annotation: Domain location=570-604::605-639::640 -674::726-760::761-795::796-830::831-865
  Subcellular localization annotation: CTP_CleavageSite=59; ConfidenceScore=5.21e-01
SNCTSAHEIPNNCDGAVPASLILDVQTNPPGGPVVIVTAASTTSSSISGIPRNVSTPPMASPPPSPSPAALIAHLAAVLSSPDWRFHPSLPQLPALLAPSLPRTLLVPLPLRLAAAVARAAAPVPPPPRHLTPGRAPPPRPLPAAAPSILRPSLPLPPHPLLPLRADAAHAPAVRPHVPPRPRLHPRVLPTMHSSVPSARRADLRHAQRYLSLMVRSGWRPDAFTFNSLILGYCRTQQLEVAHDLFCKMPFRGFSQDAVSYAALIEGFCEAGRIDEALELFREMTQPDMYTHAALVKGLCDAGRGEEGLCMLQKMKELGWRPTTRAYAALVDLWCREQKAEEAEKILNEMFDSGLMPCVVTCTIVVNAYCREGRMSGAVRVFESMRFKGCEPNVWTYNAIVQGFCNAGKVYKAMALLDQMRECGVEPDVVTYNLLIRGQCIDGHIGSAFRLLRLMEGNGLAADQYTYNVLIDALCKTGKVDEACSLFDGLEYRGIRPNSVTFNTVINGLCKAGKFDVACTFLENMISAGYAPDTYTYSPFIENLCKTKGSQEGLFFIDEMLQKDVKPSTVNYTIVINRLFNERNYGLATRIWGQMVSQGCSPDVVTYTTSVRAYCNEGRLDEAENVVTEMKKCRTIVDAMAYNTLIDGHTSIGQTDRAVTILKHMTGVASMPNHFTFFILLRHLLQRRLAEHVPLKATSVWKTIELADVFELFELMKKNSVPSSARTYLSILEGFSEERRLDEVTSLVSLMKEENLPLNEDIYNALVNCFCKLRMYSDAWALLCSMIGHGFLPNLIFYQYLLSGLTAEGQADRAKEIFRSSRWKEYNTDEIVWKVIIDGFIRKGHADMCHDMISMLEQMKCKPSDETYAMLTEELPTRE

SEQ ID NO: 70242 - protein, 705 aa, Zea mays
  Coding DNA Sequence Number=SeqID_28463
  Gene Ontology: Mol. function=RNA-directed DNA polymerase activity; Cellular component=nucleus; Biological process=RNA-dependent DNA replication
  Homolog annotation: Hit_ID=Q8S472; Match level="QueryCoverage=99%, HitCoverage=65%, E-value=0.0, Identity=80%"; Hit description =Putative gypsy-type retrotransposon RIRE2
  Pfam annotation: Domain name=Retrotrans_gag; Domain location=193-284; Score=72.6; E_value=1.3e-18; Accession=PF03732.7; Description =Retrotransposon gag protein
MRPSPASSGVGQNLAAAAMLLRALPEPSTTEGRRIQEELKNLLEDAAVRRAESSASRRQGYPSEHHAATSRFMREASVHTGRTRNTAPAAPGRLGSEHHHRDRRAHLDERVHRGYHPRRGGRYDSGEDRSPSPESPGPHAFSRAIRRAPFPTRFRPSTTITKYSGGTRPELWLADYRLACQLGGTDDDNLIIRNLPLFLSDTARAWLEHLPPGQISNWDDLVQAFAGNFQGTYVRPGNSWDLRSCRQQPGESLRDYIRRFSKQRTELTNITDSDVIGAFLAGTTCRDLVSKLGRKTPTRASELMDIATKFASGQEAVEAIFGKDKQPQGRPPEEASEASTQRGAKKKGKKKSQAKRDAADVDLVAAAEYKNPRKPPGGANLFDKMLKEPCPYHQGPVKHTLEECVMLRCHFHRAGPPAEGGRAHDDDKKEGHQAGEFLEVRDCFMIYGGQAANASARHRKQERREVCSVKVAALVYLDWSDKPITFDQADHPDHVLSPGKYPLVVDPVIGDVRLTKVLMDGGSSLSIIYAETLGLLRFDLSSVRAGAAPFHGIIPGKRVQPLGQLDLPICFGAPSNFRRETLTFEGVGFRGTYHAVLGRPCYTKFMVVPNYTYLKLKMSGPNGVITIGPTYRHAFECDVECVEYAEALAESEALIADLESLSKEVPDVKRHAGNFEPAKTVKSVPLDPSGDASKQVRIGSELDPK

SEQ ID NO: 70243 - protein, 302 aa, Zea mays
  Coding DNA Sequence Number=SeqID_28464
  Homolog annotation: Hit_ID=Q6QP51; Match level="QueryCoverage=32%, HitCoverage=58%, E-value=6e-15, Identity=46%"; Hit description =Putative growth-regulating factor 1
  Subcellular localization annotation: CTP_CleavageSite=15; ConfidenceScore=5.03e-01
MTASKKRAPSPLLIRGSKAGPSEGFNSRLRALGLRAHYWSEVRRLAPRKGSTAASGHSGSAPTTDQGFVGWHPKGSTAASDAERGMTLATKSGFGRHRKLRLARPQGSDSALALEDDELRLARPQGSDSASALEDDELRLARPQGSDSASAPEDDGLRLARPQGSDLALASDDGLSYERVGRAGERDGAYRPLAPSHADACNPLLQAHTTWAQDNTKAAGTPRGRNADTGLGSPSVSRLKPYDGGSPFLPLPQCRALGWLNDQGSWICGFGAQGAHIYTLEAGSSTKFGGWLWGSWPWLEWQ

SEQ ID NO: 70244 - protein, 54 aa, Zea mays
  Coding DNA Sequence Number=SeqID_28465
MALRHDLQMEEERKASISHGSKATTDKGMREKMKALESQWYEYNKEWSYVQAYT

SEQ ID NO: 70245 - protein, 133 aa, Zea mays
  Coding DNA Sequence Number=SeqID_28466
MELMLQACDFWEAIDSDDVNNFDGKMRPSFGLYRHILCIIAKKTMKQDRNAIKTMCMDSDHATRQDCPPIEVPNDPVDDDKVIAKYLRVVSSKFAQIVLSIETLLNSMMMSIMEVIKGDEGPPQARPSVASTS

SEQ ID NO: 70246 - protein, 149 aa, Zea mays
  Coding DNA Sequence Number=SeqID_28467
  Subcellular localization annotation: CTP_CleavageSite=69; ConfidenceScore=5.70e-01
MAALSSVFLAILTKNPYRAAAVSPAATPSSPTAASRRRLPLQPRRALLLLSPRRALLLLPRRSLLPPPSSPAARGLAPQPHCALPCAACSTAAPPLHHPGRATASPPHRIFTESAKLPNEALLECFCVVSQLSLFASRRPCTSTIAPLP

SEQ ID NO: 70247 - protein, 224 aa, Zea mays
  Coding DNA Sequence Number=SeqID_28468
  Gene Ontology: Mol. function=nucleic acid binding; Biological process= DNA integration
  Homolog annotation: Hit_ID=Q2QTN6; Match level="QueryCoverage=79%, HitCoverage=33%, E-value=5e-52, Identity=57%"; Hit description =Expressed protein
CRDNHRSTSVYVVFLGANLISWPSKRQSVISRSSAEAEYRAVANEVGKVLVYDPVSLRIILVPVQEYPITTEEKENKDESDMLVDLSPYKEDGSLEIEYSSLVDVRLLKGIETCNEVGSAPAGRPVTLHKNEGNIESQKSPLVSNNTKGEERALGKSESTVWEKNGEPSDKVDLLQNGWATWKQNASTSAWSYRALRSSALGPTMAILRGKNSQSKPPNRKNSK

SEQ ID NO: 70248 - protein, 100 aa, Zea mays
  Coding DNA Sequence Number=SeqID_28469
MHPSPPPIALGSLAGDLTAESARHLTMVRPPRAPSGLIGPSIMIPYPRPLPFLWHVGLRHGAVPAPSPRCFSRWRAEWAACPRGRALARARWAKNPTQPS

SEQ ID NO: 70249 - protein, 92 aa, Zea mays
  Coding DNA Sequence Number=SeqID_28470
  Homolog annotation: Hit_ID=Q1HTV4; Match level="QueryCoverage=52%, HitCoverage=33%, E-value=1e-08, Identity=37%"; Hit description=Green ripe-like 1
MKPDKGSHVQDIPLQGAIIGNLVQAARHKRVAVAGLLAYMCCKINGKTALGTERNKGDFDDPSAWMLQSPNILPTTSIFSSSGSTVRSTTSG

SEQ ID NO: 70250 - protein, 567 aa, Zea mays
  Coding DNA Sequence Number=SeqID_28471
  Homolog annotation: Hit_ID=Q9FQZ2; Match level="QueryCoverage=27%, HitCoverage=39%, E-value=2e-31, Identity=45%"; Hit description =Avr9/Cf-9 rapidly elicited protein 137
  Pfam annotation: Domain name=DUF668; Domain location=404-493; Score =179.7; E_value=7.3e-51; Accession=PF05003.3; Description=Protein of unknown function (DUF668)
  Subcellular localization annotation: CTP_CleavageSite=53; ConfidenceScore=5.53e-01
MVAEPLVHKVLSMATSSSSSSKKARPAAASANKGGAAAAGDGRLGILSLEVANAMSRAANLYRSLSDAEAARLLGPLCLGSRAVRALVPGDDARLLALALAEKLDALNRVAAVASRLGRRCTAPPLVGFDHVYADLLAGRSGATGALFAVASASDAASLVRRLDRLAAATAALYAALEALTELEQSARKLPTDEARRALEQRARWRRHDVRRLRDASLWNWTYDKAVLLLARAACAIYARIRLVFGDPMLGLDLLLATPSSESSRQCDQSRRLSGPITANSGPVRSDLSDCGNSGPVSRVDPDMSRPVNLRSGCGASPGKMLMECLSLSSSASWNDGFEDEFLEDSSRISTIRSGMLVPFSSEQGLSTTTTMTTTPPSKSGRITRKAARFGPKSTVTSLAPPSTVGGSALALHYANVVIIIEKLLRYPHLVGEEARDDLYQMLPSSLKAALRRSLKTHAKSVAIYDAFLAHDWREALEKTLAWLAPMAHDTVRWQAERNFEQQQIVMKGNVLLLQTLYFADRETTEAVLCELLVGLNYICRYEQQQNALLDCSSSLDLDDCVEWQVQ

SEQ ID NO: 70251 - protein, 83 aa, Zea mays
  Coding DNA Sequence Number=SeqID_28472
MPVQQMCQPEKEIKEVHGCWTKMVGGWLRRRERRSRTTDEAQQDDDIQQQAAQQDDDDQQQDDNDAQQDASGSGASGRLEGGE

SEQ ID NO: 70252 - protein, 51 aa, Zea mays
  Coding DNA Sequence Number=SeqID_28473
MSEDKKVVAESKLSLSEEMHLGPVAIGADRRDRLISLSSARSGYTIVALWG

SEQ ID NO: 70253 - protein, 86 aa, Zea mays
  Coding DNA Sequence Number=SeqID_28474
  Subcellular localization annotation: CTP_CleavageSite=42; ConfidenceScore=5.03e-01
MPWFMASSLLSRHARKSSDNALQVPVRDLGRSLVLTEGVQVLVVYGWSPGNGELLVGVLSSAAGRAVHGQVLSMPRQPVYGIGCRR

SEQ ID NO: 70254 - protein, 89 aa, Zea mays
  Coding DNA Sequence Number=SeqID_28475
MPWFMASSLLSRHARKSSDNALRVPVIDLGRSLVLTEGVEVLVVYGYSPGNGELLVGVLSSAAGRAAHGQVLSMPRQPDLKASSAYRFT

SEQ ID NO: 70255 - protein, 76 aa, Zea mays
  Coding DNA Sequence Number=SeqID_28476
MATRGAQGEEAEEDPIRRQATIRTEQGGGGKEVPAGWASRWPPHPLARPARRRRPWRAAGSDSSPPRSICAGDTEI

SEQ ID NO: 70256 - protein, 141 aa, Zea mays
  Coding DNA Sequence Number=SeqID_28477
  Gene Ontology: Mol. function=nucleic acid binding; Cellular component= intracellular; Biological process=chromatin modification
  Homolog annotation: Hit_ID=Q39261; Match level="QueryCoverage=23%, HitCoverage=22%, E-value=2e-08, Identity=73%"; Hit description=Zinc finger protein 2
  Pfam annotation: Domain name=zf-C2H2; Domain location=39-61; Score =22.7; E_value=0.0013; Accession=PF00096.16; Description=Zinc finger, C2H2 type
MDPNKGETAGGGGGGEGDLDLNLSLQPMLAPEPEPPGYFSCTYCDKKFYSSQALGGHQNAHKFERSVAKRARELAAAGRAGHGGERASGAEEEARSVIGKEMGIARSVSAPSSSSSHQIRAPPEASRNNNLADDIDLSLKL

SEQ ID NO: 70257 - protein, 57 aa, Zea mays
  Coding DNA Sequence Number=SeqID_28478
MWSYFYRITYSPPLGGFNAFQEVIADFHPDCGEEGVKNAQGPYLSYKLLEFRTSSDK

SEQ ID NO: 70258 - protein, 53 aa, Zea mays
  Coding DNA Sequence Number=SeqID_28479
MAPSPLLLAESVLGSEQEGDCLTTGEPAPSLDRYSESGDGRGVYDMGGQWGSL

SEQ ID NO: 70259 - protein, 207 aa, Zea mays
  Coding DNA Sequence Number=SeqID_28480
  Homolog annotation: Hit_ID=Q6QP54; Match level="QueryCoverage=38%, HitCoverage=34%, E-value=2e-18, Identity=57%"; Hit description =Putative kinase
MGMMGTVWGDDDEVGGGELEPQGRDSRADEESPEDDELRSTRPRARTRAMSRKKANSAPPDPGLGLGLSPRRRRTPLRPTQGSDSGSAPKDSELRSARPRARTRAQPRKTANSAPPDPGLGLGLSPRRRRTPLRPTQGSDLGSALEDDELRLARPRGSDSTSATEDILDLGFGGASTSPNLGRRPATSTGGAIITLPRADSGRREQD

SEQ ID NO: 70260 - protein, 161 aa, Zea mays
  Coding DNA Sequence Number=SeqID_28481
  Gene Ontology: Mol. function=DNA binding; Cellular component=nucleus; Biological process=regulation of transcription
  Homolog annotation: Hit_ID=Q6Z538; Match level="QueryCoverage=98%, HitCoverage=41%, E-value=1e-83, Identity=88%"; Hit description =Putative NAC domain protein
  Pfam annotation: Domain name=NAM; Domain location=17-145; Score =292.9; E_value=6e-85; Accession=PF02365.6; Description=No apical meristem (NAM) protein
MEGERNDINVQRSDEILMPGFRFHPTDEELVSFYLRRKIQQKPISIELIRQLDIYKYDPWDLPKLASTGEKEWYFYCPRDRKYRNSVRPNRVTAAGFWKATGTDRPIYSSEGTKCVGLKKSLVFYRGRAARGMKTDWMMHEFRLPSLTDPKRPVDKTIPLN

SEQ ID NO: 70261 - protein, 217 aa, Zea mays
  Coding DNA Sequence Number=SeqID_28482
MWQRGAIAGVHAFGSQCIHGIAKKRLYETGERAITGYRPHSSPTMVSNDDHLCLRTPTSNSCHPMHHPVLDGKGLDPSDPAHAPITNWPLITGASKLHVRRHPSFSIPSSTQSLTPSVLSLLRIKVDTEIGMAERPKQPPQPSFIPRGLQRIRAQHNRILFTACAICGGDRVDQYDPRGGVSTTAHGCQMSDRPCGPTCQYPTLAPAIWAERVLGGT

SEQ ID NO: 70262 - protein, 56 aa, Zea mays
  Coding DNA Sequence Number=SeqID_28483
MGRPKGAMWQGKTAHPNGVKVIQQAARLLGLLANRVTKAKDGGSSIKRRWKPGVGT

SEQ ID NO: 70263 - protein, 116 aa, Zea mays
  Coding DNA Sequence Number=SeqID_28484
  Homolog annotation: Hit_ID=Q6H536; Match level="QueryCoverage=52%, HitCoverage=8%, E-value=8e-16, Identity=71%"; Hit description =Putative hexose transporter
MSGAIMVHTSEMPPKGSRWKDMFEPVVRRAQLVGVGIQILQQFVCYKMVFYTTPRKFSRMPVTETKGMLLEVITEFFGVGSKKRLQKTNSFGTNFCTMDCIDLEGSHQEALVTFDL

SEQ ID NO: 70264 - protein, 125 aa, Zea mays
  Coding DNA Sequence Number=SeqID_28485
  Gene Ontology: Mol. function=chorismate mutase activity; Biological process=aromatic amino acid family biosynthetic process
  Homolog annotation: Hit_ID=Q6Z9E6; Match level="QueryCoverage=69%, HitCoverage=30%, E-value=3e-20, Identity=60%"; Hit description =Putative chorimate mutase
MAVRAIDTPLLLCTMVVVLTGLVSPSTAGLSLDTVRDFLTREEDTIVFSLIERAKYPLNRPAYDPLHSAAGRRLNASFVELFIRESEAVQSKPGKYSRNRIQFLFSRTVKKNRSLLSSILFRAAD

SEQ ID NO: 70265 - protein, 175 aa, Zea mays
  Coding DNA Sequence Number=SeqID_28486
MGRFLPFWPIYPCSPPRCPPGSQLRSLVHRHAGHLGFHHPIPLRAHLFGVRCLTNGPRWELGTEHWARCGGRCGGRNQGMPPSQWPKSAPPGDSQTVARMLKTHSQLQGAFVFFLLADYSLVRLELWLGGWPRAGDGLPWPVLARRSGGFAVVGWAALPPGRSGVGGDYAGSSDR

SEQ ID NO: 70266 - protein, 98 aa, Zea mays
  Coding DNA Sequence Number=SeqID_28487
MPSSSLSSPLCSTDEPKEFSSFEETSDPSSLARSTERMYVHTSAASPWESPESSKDVGERREPAIPQTRRKPPPPSTQNLRSPLREDIVGNLFSNASD

SEQ ID NO: 70267 - protein, 105 aa, Zea mays
  Coding DNA Sequence Number=SeqID_28488
MGKDKRSRGSPRRAGDKRKRDPSPPSKDFGDSEYSDEENSIGSFEERSGDDSDDEGDGGGDDSGDGDDDSGKGGEGDDGGDGDGGGGGGKDGSGGGKASGKAPLV

SEQ ID NO: 70268 - protein, 122 aa, Zea mays
  Coding DNA Sequence Number=SeqID_28489
MSRGGALTDLGEVGNWEALVDNSRQGLVANSGKAIWTSREASGYGGQHLVSSMVKIFSPRCVIRAPPGTNRIAGANPGAGVTGGKVHCTTIFISYYTIKTLFSLSDRAICRALISDFYVATR

SEQ ID NO: 70269 - protein, 61 aa, Zea mays
  Coding DNA Sequence Number=SeqID_28490
MKVSVLTPFWLLTSLRLVVVVEAVAKMLGVDLPKQQKLQGDCQHILEYKASASAISFGSGW

SEQ ID NO: 70270 - protein, 192 aa, Zea mays
  Coding DNA Sequence Number=SeqID_28491
MDRRAAHEIRRLEDTPHTSVSNKWLRGHRSLPTAPREASLRLGNSDWRCARGGELVQRRVTGGGFLCTRCTAAIEFGLVVRRKRVLSKRGRSSVLVAEARRTVAKSAGSNGDLGHGWYSVNAPRLLGEIYSGPEPTRQWRRKPGQAAVRPGPCDREGDRGQLGRFVRDSVDASALFAETTDLTTDPTCKRLG

SEQ ID NO: 70271 - protein, 80 aa, Zea mays
  Coding DNA Sequence Number=SeqID_28492
MTTSRNGRLQKRGDQMNSEEQCAQSQSRRYRALLPQSIRFSHFPRLTTYYFYLWQKVENLDVLNVGWLGYFSSGVKVILE

SEQ ID NO: 70272 - protein, 86 aa, Zea mays
  Coding DNA Sequence Number=SeqID_28493
  Subcellular localization annotation: CTP_CleavageSite=39; ConfidenceScore=5.58e-01
MSRPPPAVARLFISAARNNGPASDMGPGPTSHTADVQVSGSRRRPPPPVFVARVAPTTSDADPHTDVTVVTSRTSLTTPPELYCRR

SEQ ID NO: 70273 - protein, 254 aa, Zea mays
  Coding DNA Sequence Number=SeqID_28494
  Gene Ontology: Mol. function=nucleotidyltransferase activity
MPYGKGEEDVQDGDVEYRPRGTHGFIKRVYGAANKLSTEIEIGVLKSHFERKICPQLVVHLMLHYSLDHDLAAFFHGPIQGITKLKVLYLSSLDIELRLTSMNESDRESFIKYICQRRVVVVDDWRNTYGFVRGVYDALFDEQKQAVRLIKKGIAKLACIIWKEKQVASVEIYEDVPCNDNQFTEVLSMLALLMRCEDENFSLVEVLNDSSRACGVLSGSQTIKMADPDRGVCLLLTSMNTKFTKLAIVQKSRN

SEQ ID NO: 70274 - protein, 156 aa, Zea mays
  Coding DNA Sequence Number=SeqID_28495
  Gene Ontology: Mol. function=protein-tyrosine kinase activity; Biological process=protein amino acid phosphorylation
  Homolog annotation: Hit_ID=Q10H77; Match level="QueryCoverage=49%, HitCoverage=36%, E-value=1e-29, Identity=72%"; Hit description=Zinc finger, C3HC4 type family protein, expressed
  Pfam annotation: Domain name=zf-C3HC4; Domain location=106-146; Score= 37.2; E_value=5.7e-08; Accession=PF00097.15; Description=Zinc finger, C3HC4 type (RING finger)
MGVCVSKVACCCCYRRREPHNGVTNDRTDAGFAVENIVSEQGEKAPNVVYKGKLDAQRIAVKRFNRSAWPDPRQFLVSGSSAKHHSEGSRIDGIQFCDSSDSEDDCPVCLEEYDFENPKIALQCKHNFHLSCIYEWMERSQACPVCAKIMLFNEDE

SEQ ID NO: 70275 - protein, 98 aa, Zea mays
  Coding DNA Sequence Number=SeqID_28496
MEESEFQKHMESARLATQVSVASPSSSQGLPTYARANQEETDMADVREKMKRAISVQRYVHYIVYAIAIAININLRNFINSGNTTLENASCVSASQPV

SEQ ID NO: 70276 - protein, 62 aa, Zea mays
  Coding DNA Sequence Number=SeqID_28497
  Homolog annotation: Hit_ID=Q1HTV4; Match level="QueryCoverage=77%, HitCoverage=33%, E-value=3e-08, Identity=38%"; Hit description=Green ripe-like 1
MKPDKGSHVQDIPLQGAIVGKPVQTARHKQVPVAGLLAYMCCKINGKTTLGNERNKGLIKRK

SEQ ID NO: 70277 - protein, 66 aa, Zea mays
  Coding DNA Sequence Number=SeqID_28498
CGVPSISTPPTTALLALRRRPPSRCRCGGLSLEFRSKADCLDDLDFAIMHEMSKLSYRVMEEDVIR

SEQ ID NO: 70278 - protein, 148 aa, Zea mays
  Coding DNA Sequence Number=SeqID_28499
MSSEDFSSCLDYTYLKGLFLSKALKNKRNVEEFENEVNKVRQASTETSIDLSTAQVRIDDLKDEVNHMRQLNENYRILVANCYTLGNRCYNEILDGNCKARKPKVIIEVQHTKAKAKDDPIEAKIVAVRAAKKAVDDVVLKICEQISK

SEQ ID NO: 70279 - protein, 624 aa, Zea mays
  Coding DNA Sequence Number=SeqID_28500
  Gene Ontology: Mol. function=two-component response regulator activity; Cellular component=nucleus; Biological process=two -component signal transduction system (phosphorelay)
  Homolog annotation: Hit_ID=Q689G8; Match level="QueryCoverage=93%, HitCoverage=87%, E-value=1e-176, Identity=56%"; Hit description=Two -component response regulator-like PRR37
  Pfam annotation: Domain name=CCT; Domain location=577-615; Score =75.6; E_value=1.5e-19; Accession=PF06203.4; Description=CCT motif
  Pfam annotation: Domain name=Response_reg; Domain location=7-127; Score=50.4; E_value=5.8e-12; Accession=PF00072.14; Description =Response regulator receiver domain
  Pfam module annotation: Pfam domain module=CCT::Response_reg; Domain location=577-615::7-127
MWLGQSHVGAWSGTRRARQGGSGDGPLGVYSYMGDAVISAKNGQQAWAYLEDKGNNIDLVLTEVFMPGVSGISLLSRIMRHNIFKNIPVIMMSSSDDMSTVFKCLSKGAVDFLVKPIRKNELKNLWQHVWRQRCHSSSGSGSESGIQTQKCAKSKGVNESGNNSGSNDDEAGMGLNARDDSDNGSGTQDLNDLVGLGGVQRMAQNSWTKLAVEIDSPQATSLDQLADPPNSTCAQVIHSKSEICSNRWLPDKSNRNCKKPKNTNDDFKGKDLEIGGPENLYMGHQSSPNGRSIKAADHENNSKESMMENLEEPTVRAADLIGSMAKNMDTPQAARAAEDTPNFSSKVPEGKVTTFIARYHTSAASNQGGTGLVGSCSPHDNSSEAVKTDSTYNMKSNSDAAPIKQGSNGSSNDNDMGSTTKDVVTKPMLPSAIKANGYTSAFHPVQQWMVPANATAGKTKADENTARNHCVHFENGGSGALQCGSSNVFDPPLEGQATNNYGGVKAGSNSGSNKGQNNGSTAAANAGLAETEIQAMDKSGVGGGNGNGNGSGSGSGNDTYVRRLAANMTPRQAQLKKYREKKKDRNFGKKVRYQSRKRLADQRPRVRGQFVKQAVQNQDGARER

SEQ ID NO: 70280 - protein, 231 aa, Zea mays
  Coding DNA Sequence Number=SeqID_28501
MERVCHVIHLMIVLDDRAVALHEGGVEVQSMGLSCRGTIPLDGNLGLAHNATTLMDDILELYRNGPQDLGQDYTIHPSQGGYVVSVRTWSPRAKRCKGGGRGRANRCRRLGRGGQELARDQMFYIPVAWAWRMATTTTLYATGGSTTVPIGRLLAGWGVEGTMETDMTLTVAAESKAKVGIEGSIGGSCPSTEVKAEAVKYDNGWLAPGPTPDAGAHHSCGSVGEERAANG

SEQ ID NO: 70281 - protein, 88 aa, Zea mays
  Coding DNA Sequence Number=SeqID_28502
MGDLMGDGGIAHHITRNNSTTWGMVGATWSAEAASGFAGALGPQAGAVEATNLQGKNRGGYLEGDMGSVSRKTSSSMRRSSGLRDDYR

SEQ ID NO: 70282 - protein, 105 aa, Zea mays
  Coding DNA Sequence Number=SeqID_28503
  Homolog annotation: Hit_ID=Q689G8; Match level="QueryCoverage=38%, HitCoverage=5%, E-value=8e-10, Identity=73%"; Hit description=Two -component response regulator-like PRR37
MPANDHHPNGLLQESAPGLQHDDMENQQQQVCWERFLLKDTLNVLLVESDASTRQVVSALLRCCMYQGLPFSSRSVGARHAELSAMRKEEGVGIVVLSSFLPLSH

SEQ ID NO: 70283 - protein, 132 aa, Zea mays
  Coding DNA Sequence Number=SeqID_28504
MVHDSKKRKRKVTTKQSKVPKIQAESTPQVSEKILATPDAKVAAEVEELPSMEAGETKIREAIALIAQKVTPLELLLESEEEEEEERIAPVMSPFFDIDEDESEDIVCTILALKGSTSPAANVIIPSSSEFS

SEQ ID NO: 70284 - protein, 94 aa, Zea mays
  Coding DNA Sequence Number=SeqID_28505
  Subcellular localization annotation: CTP_CleavageSite=37; ConfidenceScore=5.35e-01
MTFHIMRAPSFLPSSDIPFVFSALILFFLPNLLPPPTVAAVSRPTLVDVGMGQVGHAPGHSPCVSSRRAWWRLPHLGYLGNEESGSKILDNQGP

SEQ ID NO: 70285 - protein, 104 aa, Zea mays
  Coding DNA Sequence Number=SeqID_28506
MVAKSRTEETSPELPTGTHGGAATEWEKTACARGRRVANVGRRGDQRKGGWHARRKKMKQGMATGLPTCRDKDCKNQWQTKVYPCQNMSNDFKSLPTFYMVYLK

SEQ ID NO: 70286 - protein, 91 aa, Zea mays
  Coding DNA Sequence Number=SeqID_28507
  Gene Ontology: Mol. function=binding; Cellular component =mitochondrial inner membrane; Biological process=transport
  Homolog annotation: Hit_ID=Q10R11; Match level="QueryCoverage=64%, HitCoverage=14%, E-value=2e-10, Identity=65%"; Hit description =Mitochondrial carrier, putative, expressed
MLRCRRHGGGERRGGGGRSGGGDPVAAGPVGTERSESCACLMAVQGASTALAGGTAALVTMPLDTVKTRLQVMEADAAARPTLASTVRGLL

SEQ ID NO: 70287 - protein, 477 aa, Zea mays
  Coding DNA Sequence Number=SeqID_28508
  Gene Ontology: Mol. function=nucleoside-triphosphatase activity; Cellular component=integral to membrane; Biological process=transport
  Homolog annotation: Hit_ID=Q9FTG6; Match level="QueryCoverage=98%, HitCoverage=74%, E-value=0.0, Identity=74%"; Hit description=ABC transporter-like
  Pfam annotation: Domain name=ABC2_membrane; Domain location=265-471; Score=182.1; E_value=1.3e-51; Accession=PF01061.14; Description=ABC -2 type transporter
  Pfam annotation: Domain name=ABC_tran; Domain location=8-180; Score =114.1; E_value=4.1e-31; Accession=PF00005.17; Description=ABC transporter
  Pfam module annotation: Pfam domain module=ABC2_membrane::ABC_tran; Domain location=265-471::8-180
MIIITNNSLLSVLAGSADPARVAAGEVLVNGLPMDAAMFRRVSGHVPQDDALLPGLTVEESLVYSARLRLRSGGTSSGAEDRARELMAELGLGHVAASRVADVSGGERRRVSIGVELVHDPAVLLLDEPTSGLDSGSALHIVKMLRDMAAAHAKTVVLTIHQPGFRILELIDRVVLLADGAVRHHGSLDFLHSRLVATGHALPAHVNVLEYAMETIDSLKPDVAVATAVTAITAASSANRDDDVAPVLTVPSSARRAGYANSPAAEARILAGRFAKTMLRTPQLFAARMAQSVLAGAFLGSIFLGTTDLQSRLGFFAFTLTYLLSSTTEALPVFLQERRTLEREISRGAYRVSSYVASNAGVFLPFLLAAAVLYAAPVYWLVGLAREPAAFAYFVLVVWLVMLTANSFVACLGALVPNYIVGNSVVAGLIGCFFLFSGYFVAGKNIPRYWVFMHYASLFKYPFEALVVNEYGGARGA

SEQ ID NO: 70288 - protein, 89 aa, Zea mays
  Coding DNA Sequence Number=SeqID_28509
MATKWFVLHPIMQLEFSVYRQLNKLNHLLHHRYTCDQRGGIPVPIIIRARGYPLFSIGYLYVYFPFPSKKPLKAGPEVLSDLHYKKVSF

SEQ ID NO: 70289 - protein, 814 aa, Zea mays
  Coding DNA Sequence Number=SeqID_28510
  Gene Ontology: Mol. function=solute:hydrogen antiporter activity; Cellular component=integral to membrane; Biological process =regulation of pH
  Homolog annotation: Hit_ID=Q6ATD0; Match level="QueryCoverage=94%, HitCoverage=96%, E-value=0.0, Identity=61%"; Hit description =Putative sodium/hydrogen exchanger
  Pfam annotation: Domain name=Na_H_Exchanger; Domain location=36-436; Score=270.4; E_value=3.6e-78; Accession=PF00999.11; Description =Sodiumhydrogen exchanger family
MAAAAMCPGPMKATSQGAFQGENPLDYALPLAILQICLVVVVTRGLAYLLRPLRQPRVIAEIIGREATTRREENEKGGILLGPSALGRSHRFLHAVFPAQSMTVLDTLANIGLLFFLFLVGLELDISAIRRTGKKALAIALAGISAPFALGIGTSFAFRATIVKGTPQGPFLVFMGVALSITAFPVLARILAELKLLTTDLGRMAMSAAAVNDVAAWILLALAIALSGSGSPIVSLWVLLTAAGFVVAVSLFLRPVLAWMARRSPEGEPVKEVYICATLAIVLAAGFVTDTIGIHALFGAFMVGIVVPKDGPFAGVLIEKVEDLISGLLLPLYFVSSGLKTDVATIKGAKSWGLLVLVIANACLGKIGGTVITSLLVKIPVREAVTLGFLMNTKGLVELIVLNIGRDRKVLNDEAFAILVLMALFTTFITTPIVMAIYKPARRAVPYKRRTVECAAGDADGELRVLACFHTNRHIPTLLNLVEASRGTARRRLTMYAMHLVELSERSSAISLVQRARRDGMPFFSGGKEQRAEQVVVAFEAFQQLSSVRVRAMTAISDLDTIHRDVIDSAADKRAAIVVMPYHRALGHDGSFASLGSAYHAVNKRVLREAPCSVAILVDRGLGGHAPGVDPRTCPSPSPCSSSAGPDDREALAYATRMAEHPGVAVTLARLQPSRPPLLDEAESAADEAAVEAFKARVGAVKDGSVRFEEPEACTREQVLETIESLSGFNVFVVGRMPPVAPLVERPDELGPVGSYLVSPEFRTSASVLVIKRYDPATNPKSKRFDPKAGPPVATEEDVLDEEMGMGRATVVPV

SEQ ID NO: 70290 - protein, 795 aa, Zea mays
  Coding DNA Sequence Number=SeqID_28511
  Gene Ontology: Mol. function=solute:hydrogen antiporter activity; Cellular component=integral to membrane; Biological process =regulation of pH
  Homolog annotation: Hit_ID=Q6ATD0; Match level="QueryCoverage=93%, HitCoverage=95%, E-value=0.0, Identity=57%"; Hit description =Putative sodium/hydrogen exchanger
  Pfam annotation: Domain name=Mem_trans; Domain location=81-412; Score= -129.8; E_value=0.088; Accession=PF03547.8; Description=Membrane transport protein
  Pfam annotation: Domain name=Na_H_Exchanger; Domain location=27-414; Score=285.4; E_value=1.1e-82; Accession=PF00999.11; Description =Sodiumhydrogen exchanger family
  Pfam module annotation: Pfam domain module=Mem_trans::Na_H_Exchanger; Domain location=81-412::27-414
MAKVASNGAFQGDNPLDFALPLIILQICLVLVVTRGLAYLLRPLRQPRVIAEIIGGILLGPSALGRSTKFLHTVFPPASMTVLDTLANLGLLFFLFLVGLELDIAAIRRTGRKALAISLSGIALPFALGVGTSFAFRATVVKDARHAPFLVFMGVALSITAFPVLARILTELKLLTTDLGRLALSAAAVDDVMAWILLALAIALSGSGSPIVSLWVLLTAAAFVAAAFLLLKPALAWMARRCRDGEPIKELHVCATLAIVLAAGFVTDVIGIHALFGGFVVGVVVPKDGPFAGMLIEKVEDLVSGLFLPLYFVSSGLKTNVATISGAKSWGLLVLVIANACIGKIGGAVATALLVKIPVREAVTLGFLMNTKGLVELVVLNIGRDRKVLNDEAFAIMVLMALFTTFITTPIVMAVYKPARPSVPYKRRTVDCAPGDAAADGELRVLACFHTSRSIPTLLNLVEASRGTGRRRLVMYAMHLVELSERSSAVTMVQRARRNGLPFFNSADREGQMVVAFEAFQQLSSVRVRAMTAISDLDTIHRDVIDSAAGKRAAIVVMPYHKALQQDGSFQSLGSAYHAVNKRVLREAPCSVAVLVDRGLGGPAQVSAKNVSFSVAMLFFGGPDDREALAYVTRMAEHPGVAVTLARFRPHSDEESADDEAAVDAFKSKVDGMVKDGSVHFEERQGYTKEEVVETIDSLSKVNVFVVGRMPPTAPLVENPDELGPVGSYLASPESRTSASVLVIKRYDPATNPKSKRFDPSARPPAATEEDVLDEEMGSRSTVVPVPWSPMNDVA

SEQ ID NO: 70291 - protein, 270 aa, Zea mays
  Coding DNA Sequence Number=SeqID_28512
  Gene Ontology: Mol. function=protein binding; Cellular component =spliceosome; Biological process=mRNA processing
  Homolog annotation: Hit_ID=UPI0000DA43ED; Match level="QueryCoverage =83%, HitCoverage=99%, E-value=1e-23, Identity=33%"; Hit description =PREDICTED: similar to keratinocytes proline-rich protein
MAPPVDVVGPCPGLGDVEAPPRPRSSLSSEAEVESEPPGRARQRPSAKARAESEPWGRAKRGSSSSGAEPESEPWGRPKWSSSSSGAEPESEPWGRAKRSSSSSGAEPESEPWGRAKRSSSSSGAEPESEPWGRVKRSSSSSGAEPESEPWGRAKRSSSSSGAELESEPWGRAKRSSSSSGAEPESEPWGRAKRSSSSSGVELESEPWGWVKRSFLWRLRLGLAAVSFTLSSGTAVGAAQAALSSCQTGQWSGEVTTVTSALSTGGRASG

SEQ ID NO: 70292 - protein, 583 aa, Zea mays
  Coding DNA Sequence Number=SeqID_28513
  Gene Ontology: Mol. function=RNA-directed DNA polymerase activity; Cellular component=mitochondrion; Biological process=RNA-dependent DNA replication
  Homolog annotation: Hit_ID=UPI00004C1733; Match level="QueryCoverage =99%, HitCoverage=43%, E-value=0.0, Identity=81%"; Hit description =UPI00004C1733 related cluster
  Pfam annotation: Domain name=RnaseH; Domain location=219-346; Score= -2.3; E_value=9.4e-05; Accession=PF00075.14; Description=RNase H
  Pfam annotation: Domain name=rve; Domain location=454-582; Score =73.6; E_value=6.4e-19; Accession=PF00665.16; Description=Integrase core domain
  Pfam module annotation: Pfam domain module=RnaseH::rve; Domain location=219-346::454-582
MLLGFIVSERGLEANPEKIAAVTSMGPIKDLKGVQRVMGCLAALSRFISRLGERGLPLYRLLRKAECFTRTPEAEEALGNLKALLTNAPILVVSAAIVVERREEGHALPVQRPVYFISEVLSETKIRYPQIQKLLYTVILTRRKLRHYFESHPVTVVSSFPLGEIIQCREASGRIAKWAVEIMGETISFAPRKAIKSQVLVDFVAEWVDTQLPTAPIQPEFWTMFFDGSLMKTGAGAGLLFISPLGKHLRYVLRLHFLASNNVAEYEALVNGLRITIELGVRRLDARGDSQLVIDQVMKNSHCRDPKMEAYCNEVRRLEDKFYGLELNHIARCYNETVDELAKIASGRTTVPPNVFSRDLHQPSVKTDDTPEPEKASAEPEAPSAQSEVPSARPEAPSAQPEAPSAQPEAPSVRPEVPSAPEVTDATRIVRTCEGCQFYARQTHLLAQALQTIPITWPFAVWGLDLVGPLQKAPGGYTHLLVAIDKFSKWIEVRPLNSIRSEQAVAFFTNIIHRFGVPNSIITDNGTQFTGRKFLDFCEDHHIRVDWAAVAHPMTNGKVERANDMILQGLKPRIYNDLNKFGK

SEQ ID NO: 70293 - protein, 69 aa, Zea mays
  Coding DNA Sequence Number=SeqID_28514
MEHSVGPRHAMNGVLCYEIVNNNLPTRFALIFTSRSINGRVSGVRIHRDGVSPMLSSSQGFRFNARRRK

SEQ ID NO: 70294 - protein, 79 aa, Zea mays
  Coding DNA Sequence Number=SeqID_28515
MATSCGGCVRCACAAALCWARAADVRRADDRWVDRGGLLAGPWAMSREFGIWAGLVNSFGKFRILNLPVADFYAVYRIA

SEQ ID NO: 70295 - protein, 173 aa, Zea mays
  Coding DNA Sequence Number=SeqID_28516
MSTCIDNTTSYALILEAFMALPSSARPQGRRGHANLGAGDTGSADRRQQAAGIPQAYHEGTADPGTVDACIHTRGQAAGRDTGFSGLADACIHIRGDEGEHPLTGSLDIKHDILVCFTPCPPQIYRYAQNLVADNQRKGLAKEGVNDMATGPLLTTTTRLTGMRPVRFFVRNN

SEQ ID NO: 70296 - protein, 800 aa, Zea mays
  Coding DNA Sequence Number=SeqID_28517
  Gene Ontology: Mol. function=nucleic acid binding; Cellular component= beta-galactosidase complex; Biological process=DNA integration
  Homolog annotation: Hit_ID=Q8W0X4; Match level="QueryCoverage=99%, HitCoverage=51%, E-value=0.0, Identity=97%"; Hit description =Putative pol protein
  Pfam annotation: Domain name=RVT_2; Domain location=362-617; Score =535.1; E_value=7.2e-158; Accession=PF07727.4; Description=Reverse transcriptase (RNA-dependent
  Pfam annotation: Domain name=rve; Domain location=4-149; Score=104.2; E_value=3.9e-28; Accession=PF00665.16; Description=Integrase core domain
  Pfam module annotation: Pfam domain module=RVT_2::rve; Domain location=362-617::4-149
MTGEKKMFTSYVKNKDSQDSIIFGDGNQGKDKSETQGTLKRFLRRAQNEFELKVKKIRSDNGSEFKNLQVEEFLEEEGIKHEFSAPYTPQQNGVVERKNRTLIDMARTMLGEFKTPECFWSEVVNTACHAINRVYLHRLLKKTSYELLTGNKPNVSYFRVFGSKCYILVKKGRNSKFAPKAVEGFLLGYDSNTKAYRVFNKSSGLVEVSSDVVFDETNGSPREQVVDCDDVDEEDVPTAAIRTMAIGEVRPQEQDERDQPSSSTMVHPPTEDDEQVPQVEALDQGGAQDDQVMEEEAQPAPPTQVRAMIQRDHPVDQILGDISKGVTTRSRLVNFCEHYSFVSSIKPFRVEEALLDPDWVLAMQEELNNFKRNEVWTLVPRPKQNVVGTKWVFRNKQDEHGVVTRNKARLVAKGYAQVAGLDFEETFAPVARLESIRILLAYAAHHSFRLYQMDVKSAFLNGPIKEEVYVEQPPGFEDERYPDHVCKLSKGLYGLKQAPRAWYECLRDFLIANAFKVGKADPTLFTKTCDGDLFVCQIYVDDIIFGSTNQKSCEEFSRVMTQKFEMSMMGELNYFLGFQVKQLKDGTFISQTKYTHDLLKRFGMKDAKPAKTPMGTDGHTDLNKGVATPCFGLWYPKGSTFDLVGYSDSDYAGCKVDRKSTSGTCQFLGRSLVSWNSKKQTSVALSTAEAEYVAAGQCCAQLLWMRQTLRDFGYNLSKVPLLCDNESAIRIAENPVEHSRTKHIDIRHHFLRDHQQKGDIEVFHVSTENQLADIFTKPLDEKTFCRLRSELNVLDSRNLD

SEQ ID NO: 70297 - protein, 84 aa, Zea mays
  Coding DNA Sequence Number=SeqID_28518
MAAASACGNGAHSHVWYILGGVEAESADEKAESTEEKATAVMERLAVATRAFFASASGGGNGGEGSTDWASMVEFRDELMKGFG

SEQ ID NO: 70298 - protein, 107 aa, Zea mays
  Coding DNA Sequence Number=SeqID_28519
MAGVALDVNCDDLNGEEKMQQHEMTNTKNDDGVTTLLPTIVACSLPCLEVLIEMKVVAAKMKVVVAASKEKVQQDEPKAAISDVKCDNPKEEGNVQQTKSCCLKCEM

SEQ ID NO: 70299 - protein, 403 aa, Zea mays
  Coding DNA Sequence Number=SeqID_28520
  Gene Ontology: Mol. function=hydrogen ion transporting ATP synthase activity, rotational mechanism; Cellular component=proton -transporting two-sector ATPase complex; Biological process =intracellular signaling cascade
  Homolog annotation: Hit_ID=Q5ZDY2; Match level="QueryCoverage=71%, HitCoverage=73%, E-value=1e-116, Identity=58%"; Hit description=Leaf senescence related protein-like
  Pfam annotation: Domain name=DUF231; Domain location=269-396; Score =60.7; E_value=4.8e-15; Accession=PF03005.6; Description=Arabidopsis proteins of unknown function
MKPPASGSMCALACLFLLSAGILLAAAVYRPFQSRAAASWDPFSRVQQKEEAPAPPPLARRGSYRAAPPAPDAVSPSAGGPADWSPDDDDDADAGPPSPAPAPSEEGWGDGDEDAQCDLFDGEWVEDAAGYPLYDAAECPFLSDQVACRRNGRPDSGYERWRWQPRGCGGTTRLGGAEALELCRDKRLVLVGDSLNRNMWESLACILYAAVPDRLRTRLIDDAGSEYMIFRAMDYNCSVEFFWSPFLVKLETKDNKTKALELDQLPPMLQRTLGADVLIFNTGHWWTHTGKLRAVNWCYNQTAPISRGNIAPWFPQSLIDIIEKNIKRMKTPIVYMNITRLSELRIDAHPSIYTITHEGKPLSKEQRQQPLTYSDCSHWCLPGLPDTWNMLLFNFLIRPLPST

SEQ ID NO: 70300 - protein, 105 aa, Zea mays
  Coding DNA Sequence Number=SeqID_28521
MAETGVRREIPAALAMDSWWPVLDHFLLSQRDPPNTKPRTNRRLTGDLLAAALCLSSVGQLRGDQRCEWYGGVARREMAGKGGYRLIKGHTTPIFVEDSMNDHLQ

SEQ ID NO: 70301 - protein, 47 aa, Zea mays
  Coding DNA Sequence Number=SeqID_28522
MPKLSCAQLRLRAILRTPSRASSRCGFNLSPKVLTERYSGKSLSPLK

SEQ ID NO: 70302 - protein, 126 aa, Zea mays
  Coding DNA Sequence Number=SeqID_28523
  Subcellular localization annotation: CTP_CleavageSite=69; ConfidenceScore=5.17e-01
MPLLSSCEPFLRPPSLPEPRPPWPAPHSHFQATSVTQLASPVALEAFQALGPGRTSTETRDRPRRTSVARRHVWAEKSDCNIADGEYVLIPEQGAIHEEDQEQAPETAIENLPTAPAIEGKPRFYA

SEQ ID NO: 70303 - protein, 55 aa, Zea mays
  Coding DNA Sequence Number=SeqID_28524
TVDLVTEVGTMDLGAYLGAKIYGAESSRQKAHRTVNRDCPVRHRTIRCHKKTKLQ

SEQ ID NO: 70304 - protein, 373 aa, Zea mays
  Coding DNA Sequence Number=SeqID_28525
MAASGYSGSAPITDQGFEGWPLKEGQRRLRHSDCSATRQSKSDRQSGLAKGATAKSAPPDPRARTRAKTRKTANSAPPDPRARTRAKTRKTANSAPPDPRARTRAKTQKTANSAPPDPRARTRAKTRKMANSAPPDPRARTRAKTRKTTKLRLARPQGSDSALASAERLPPRPTPWLGLGHGNRRQTQPRLRRKPHVALPRAQTATSTGGAIIIPPRIDSGQRQQGLDRSNSCPSIRLRRTSDSHDITPAGCPDLSGCHIGMAFSEKVGRAGPRTGQALSWGRSLPSPAWTLVTPLLQAHLTWARDEHEGRGTSTSLTLGSGHLASPPFALAHALDPSGLGHAAHSLVGLGTPLSRNADTYGEELGEGEWSVK

SEQ ID NO: 70305 - protein, 37 aa, Zea mays
  Coding DNA Sequence Number=SeqID_28526
MDASSKILLVQAPSQAARLLPPNASPTPMAAPSLFCG

SEQ ID NO: 70306 - protein, 447 aa, Zea mays
  Coding DNA Sequence Number=SeqID_28527
  Gene Ontology: Mol. function=transferase activity, transferring glycosyl groups; Cellular component=cytoplasm; Biological process =metabolic process
  Homolog annotation: Hit_ID=Q5VME5; Match level="QueryCoverage=98%, HitCoverage=98%, E-value=1e-156, Identity=59%"; Hit description =Putative UDP-glycosyltransferase
  Pfam annotation: Domain name=UDPGT; Domain location=18-445; Score= -114.9; E_value=7.8e-05; Accession=PF00201.9; Description=UDP -glucoronosyl and UDP-glucosyl transferase
MAPPATNSPGEVDSGGRPHVMFIPSAGMGHLIPFFRFIAALAGQSVDISVVTVLPTVSAAEEDYFTSLFAALPRVRRVDLHLLPFDASKLPSNDRDPFVLRWEALRRSAHLLGPLIAGAAPRVSAVITDVTLTSHVIPIAKELGVQCHVLFPSSATMLSLLAYTPVHIDKKAEQGSDIGDVDIPGVCRIPQSCLPQVLLHLDKLFTKQFIANGREIINADGFLQNSVDEGGKEEGSGSPVAWLDEQPARSVVYVAFGNRCAVSHDQIREIAAGLEASNCRFLWVLKTTTVDRDDSAVLTELLGEEFLERVQGRGLVTKAWVDQEALLKHPAMGLFLSHSGWNSVTEAAAASVPLLAWPRGGDHRVNAMVTVSGGVGMWMEHWSWDGEDWLVTGVEIAKKVKEVMSDEAVRARTTRTAEEAAKAVAEGGTSYRSMEEFISSVKATVAS

SEQ ID NO: 70307 - protein, 152 aa, Zea mays
  Coding DNA Sequence Number=SeqID_28528
  Gene Ontology: Mol. function=transition metal ion binding; Cellular component=endoplasmic reticulum; Biological process=electron transport
  Homolog annotation: Hit_ID=P49100; Match level="QueryCoverage=98%, HitCoverage=95%, E-value=1e-60, Identity=77%"; Hit description =Cytochrome b5
  Pfam annotation: Domain name=Cyt-b5; Domain location=4-97; Score =85.8; E_value=1.4e-22; Accession=PF00173.18; Description=Cytochrome b5-like HemeSteroid binding doma
MSKVFTLDAVAKHNSKEDCWLIIGGKVYDVTKFLVDHPGGDDVLLSSTGMPSCLCVPLNQCLAKVAKGKDATDDFEDVGHSNTARAMMDEYLVGEIDASTIPSRTKYVPPKQPHYNQDKTPEFVIKILQFLVPLAILGLAVAVRMYTKSESA

SEQ ID NO: 70308 - protein, 108 aa, Zea mays
  Coding DNA Sequence Number=SeqID_28529
  Homolog annotation: Hit_ID=Q1SAU7; Match level="QueryCoverage=54%, HitCoverage=6%, E-value=9e-15, Identity=62%"; Hit description=Paired amphipathic helix
  Pfam annotation: Domain name=HDAC_interact; Domain location=17-83; Score=-24.4; E_value=0.039; Accession=PF08295.2; Description=Histone deacetylase (HDAC) interacting
MNQLRIGILMNLQKVEQRHTDVDAEVCCRDDRLLKGIYADGVPYAHCRWFELDMLLESVNAATKRVEELIEKMQDNSVKPESPIRMDEHLTPLNLKCIERLYCDHVLN

SEQ ID NO: 70309 - protein, 143 aa, Zea mays
  Coding DNA Sequence Number=SeqID_28530
  Gene Ontology: Mol. function=L-lactate dehydrogenase activity; Cellular component=cytoplasm; Biological process=tricarboxylic acid cycle intermediate metabolic process
  Homolog annotation: Hit_ID=Q7DNA0; Match level="QueryCoverage=81%, HitCoverage=32%, E-value=1e-49, Identity=83%"; Hit description =Lactate dehydrogenase
  Pfam annotation: Domain name=Ldh_1_C; Domain location=7-141; Score= -0.9; E_value=1.4e-06; Accession=PF02866.8; Description=lactatemalate dehydrogenase, alphabeta C-t
MESSTGVCRARRTSGVVASASVASPTSHRCFDEEVLEGIRRAVVDSAYEVISLKGYTSWAIGYSVASLAASLLRDQRRIHPVSVLARGFHGIPDGNDVFLSLPARLGCVGIQGVTEMELNEEEAKRLRRSARTIWENCQLLGL

SEQ ID NO: 70310 - protein, 175 aa, Zea mays
  Coding DNA Sequence Number=SeqID_28531
MTKQRTEQGIAAVGPACLARGRRRNHPERETRADGVGHMSQGERAPRVARGGPTDSRRELNGADREELGVLELEAKPDEMGRAFQGGTSGGGALGDGLSELEQAGSLKASSTTRGKERGGHQGREHRKQERAPWLEAESEPEQPGKELRTTNSEEGCPATRTWRVAERMGTRQRR

SEQ ID NO: 70311 - protein, 265 aa, Zea mays
  Coding DNA Sequence Number=SeqID_28532
MASSVCLLARLRDSSPAWFFSLETYPDQEEQGGQLRIASNQIAFRVRRLSSRARSTPARFDPSVLVTTTLASSTMPAPAALEPSTTPTVPPASTTPASTAPAPSSAPPIPPPRFRDRNETEVCPLAVDPCLLVLQRATATRVRQFRHVPVESWLPTKRDPAVAPLFHTRTQESFYRAQLTTQIAPRIHRCLDLSSFRSIAGAESEGHITYLPGLYSLLSFGGWYVEEWIRVFYAIVWIDPDHQWMRFRFEHEDVTLQTAQIRKLF

SEQ ID NO: 70312 - protein, 42 aa, Zea mays
  Coding DNA Sequence Number=SeqID_28533
MGMGFMMGKKRQRLSRGPTCAGRVLSVQMEMGFHERNVGKYG

SEQ ID NO: 70313 - protein, 63 aa, Zea mays
  Coding DNA Sequence Number=SeqID_28534
  Subcellular localization annotation: CTP_CleavageSite=24; ConfidenceScore=5.45e-01
MDGSLRLGPSFQRALSLLAALSARSRSARDFLSPGSMQPRPCCRPHSLPMSRLAHLEFDESPE

SEQ ID NO: 70314 - protein, 74 aa, Zea mays
  Coding DNA Sequence Number=SeqID_28535
MWQQGVHGVQDNVEQMKNKRTATLGDVLASAQVDLCNTDDDIEAYVYVPEADILSVLDVPPGKWASYWQKRGQQ

SEQ ID NO: 70315 - protein, 83 aa, Zea mays
  Coding DNA Sequence Number=SeqID_28536
MREAQEMGAILALATMEVLAPAARAASAPTRLAGDKAKNEEPGSRIDGVMKWEHGTRLFSRSQERGQVLRSWFLSPELMCDVI

SEQ ID NO: 70316 - protein, 1082 aa, Zea mays
  Coding DNA Sequence Number=SeqID_28537
  Gene Ontology: Mol. function=aminoacyl-tRNA ligase activity; Cellular component=cytoplasm; Biological process=tRNA aminoacylation for protein translation
  Homolog annotation: Hit_ID=Q01B72; Match level="QueryCoverage=95%, HitCoverage=97%, E-value=0.0, Identity=49%"; Hit description=[J] KOG0437 Leucyl-tRNA synthetase
  Pfam annotation: Domain name=Anticodon_1; Domain location=788-925; Score=54.8; E_value=2.8e-13; Accession=PF08264.3; Description =Anticodon-binding domain
  Pfam annotation: Domain name=tRNA-synt_1; Domain location=46-750; Score=-347.9; E_value=6.1e-05; Accession=PF00133.12; Description =tRNA synthetases class I (I, L, M and V)
  Pfam annotation: Domain name=tRNA-synt_1e; Domain location=494-749; Score=-224.9; E_value=0.067; Accession=PF01406.10; Description=tRNA synthetases class I (C)
  Pfam annotation: Domain name=tRNA-synt_1g; Domain location=72-762; Score=-259.3; E_value=0.00053; Accession=PF09334.1; Description=tRNA synthetases class I (M)
  Pfam module annotation: Pfam domain module=Anticodon_1::tRNA-synt _1::tRNA-synt_1e::tRNA-synt_1g; Domain location=788-925::46-750::494 -749::72-762
MDSVNYNQTVMVYLVINKGLFLKMSTNPDEPKSRARTDFLLNNELEVQKFWDENTVFQADPGNDSPSPGEKFFGNFPYPYMNGLLHLGHAFSLSKLEFGAAYHRLRGSNVLLPFAFHCTGMPIKASADKLAREIQQYGYPPVFPVAEGSSAAVADATQADQADVVAPDKFKGKKSKATAKAGAQKYQWEIMKSFGLDDEEIARFQDPYHWLTHFPPLAKEVLKKFGLGCDWRRSFITTDMNPYYDAFVKWQMRKLKKLGKVVKDMRYTIYSPLDGQPCADHDRATGEGVQPQEYVLIKMEVISPFPPKLKSLEGRKINDTDVFILTARSAFNLAYQHLSRVPEKPTCLCELSGSDLIGLPLKSPLAFNETIYALPMLTVLTDKGTGIVTSVPSDSPDDFMALQDLVTKPALRAKYGVKDEWVLPYEIIPIIHIPEFGDKSAEKVCHDLKIKSQNDKEKLAEAKRMTYLKGFTDGTMIVGEFSGRKVQEAKPLIKSKLLEEGTAVLYSEPEKKVMSRSGDECVVALTDQWYITYGEAEWKQKAVKCLDRMNTFSTETRNGFEHTLGWLNQWACSRSFGLGTRIPWDEQFLVESLSDSTLYMAYYTVAHLLQNGNMYGKEISSVRPEEMTDEVWDFVFCDGPAPKSEIPAALLNKMKQEFKYWYPFDIRVSGKDLIQNHLTFCIYNHTALLPEHHWPIGFRCNGHLMLNSEKMSKSTGNFLTLEDAIKKYSSDATRFALADAGDGMDDANFVTETANSAVMRLTKEISWMEEVTAAESKLRTGPPTTYADRVFSNEMNIAIKETEKSYNAFMFRDALKSGFYDLQLARDEYRLSCGAAGMNRDLLWRFMDVQTRLITPICPHYAEHVWQKIMKKEGFAIKAGWPVADTPDPTLRIANKYLQDSIVLMRKLLQKQESGSKKPKKGAAPAPPSEEKKMSIGLIYVNEHYSGWKEQCLRVLQSKFDSQSRSFSPDQEIAEALKECPIGQEMNLKQVQKLCMPFIKLKKDEAKEVGPQALDLKLPFGEMDVLRENLELIKRQLGLEQVEVLSASDEAARAKAGEHASLLEKNPPSPGDPIAIFLSKQS

SEQ ID NO: 70317 - protein, 72 aa, Zea mays
  Coding DNA Sequence Number=SeqID_28538
MALHKLYDDDGPQLSYGSRTTFTSLPTQGHRRLTHAAAGQSRYVLQVVPKSDDKEGPGGAGAHRESPRQQVY

SEQ ID NO: 70318 - protein, 260 aa, Zea mays
  Coding DNA Sequence Number=SeqID_28539
MSTCPSCIVYCDFGFCCGGASDDGGLECHAPPQQLLPPPPPRLPPCHGHTEVTTVVNATVQLPPPPPPPPPCHGHKEVITTVVNAPTMQPPPLPLHPHVLVPYSNQLPPPVPAPPHPPRPPTITVYDTPPPLQAIVPRRQCVPPPPPLPPPAKAYDAGSCSPLPPVSKSTQLAKPDGDVPSSRRYETDDDPSSSSALSMVVPTATKAPPTPPAASDVAPPRALQHPVEPSGRDFEFGMEYYSQSQQHRRQEYFLMQGRRS

SEQ ID NO: 70319 - protein, 89 aa, Zea mays
  Coding DNA Sequence Number=SeqID_28540
MALRSDGRRVGARGGRRHRIGLIVDHFLHFLLLVATPVRLDAGENLTDPNTAEAHHNRREVYVGALSAIRDVSARRGYADPFLRKKPGV

SEQ ID NO: 70320 - protein, 627 aa, Zea mays
  Coding DNA Sequence Number=SeqID_28541
  Gene Ontology: Mol. function=triacylglycerol lipase activity; Biological process=lipid metabolic process
  Homolog annotation: Hit_ID=Q5ZBH3; Match level="QueryCoverage=96%, HitCoverage=95%, E-value=0.0, Identity=61%"; Hit description=Lipase class 3 family protein-like
  Pfam annotation: Domain name=Lipase_3; Domain location=320-461; Score= 104.0; E_value=4.4e-28; Accession=PF01764.16; Description=Lipase (class 3)
  Subcellular localization annotation: CTP_CleavageSite=32; ConfidenceScore=5.51e-01
MAAATVAAAGTAAPAAAMHAGIRRSRSEPHLRCPRRAGAALTTSRSIGVFPFQLGAAPLRPPPLPDGGADGSRLLTVADDDPPEEPGPEMPPARRPEAHWLGRLLELRSRFHDPTKRDVLDDDDDDLYRLDADHHDGGCGVSYDDEEEDARWDRHSFAKLLARAPLGDARLFAQLAFLCNMAYVIPEIKKKAEAGIISAKLDADSTRPRTAPAYEVASGPQPRRPIRPHLAYEVAASAANYVRARARGLLSFGTPQAQLQAGHGRLYNSGVAAYMAASTVTAVVAAEDEARQEAARDLRSPLSSPCEWFVCDEADARTRCLVIQGSDSLASWQANLLFEPTEFEGTGVLVHRGIYEAAKGIYEQVVPEVEAHLRRARAGRAPRLRLTGHSLGGSLAVLVSLMLLARGVVTPEALHPVVTFGAPSVFCGGNRIMEALGVGEAHVRSVAMHRDIVPRAFSCRYPGQAIALLKRLNGVLRAHPCLNTHRSLYMPMGATYILQPDSSVSPRHPFLPEGAALFRLDSERSPTALVASALRAFLYSPHPLETLSDLSAYGAGGAILRDHESSNYFRALSALARAPPRRRKQPEIVWQLPGVERLQQYWWPGIAGTVIPAPVAVLSNKELVSEA

SEQ ID NO: 70321 - protein, 518 aa, Zea mays
  Coding DNA Sequence Number=SeqID_28542
  Gene Ontology: Mol. function=nucleoside-triphosphatase activity; Cellular component=membrane; Biological process=protein catabolic process
  Homolog annotation: Hit_ID=Q6A167; Match level="QueryCoverage=99%, HitCoverage=61%, E-value=1e-175, Identity=66%"; Hit description=Ftsh- like protease
  Pfam annotation: Domain name=AAA; Domain location=81-290; Score =135.8; E_value=1.1e-37; Accession=PF00004.19; Description=ATPase family associated with various cellular activities (AAA)
  Pfam annotation: Domain name=Peptidase_M41; Domain location=297-498; Score=272.4; E_value=9.2e-79; Accession=PF01434.8; Description =Peptidase family M41
  Pfam module annotation: Pfam domain module=AAA::Peptidase_M41; Domain location=81-290::297-498
MGAAALQKYIGSLGGIGASGAGSSSSYSPKEMNKDMMPEKNVKTFKDVKGCDDAKKELEEVVEYLKNPSKFTRLGGKLPKGILLTGAPGTGKTLLAKAIAGEAGVPFFYRAGSEFEEMFCWCWCSESEVIVSSCKEERIIAITLTASYRCIHITTACHFTLQVQRIEQIRQSGWEQGRRMRVEHCRGGGQADWRMRSAELRRRALGIIVMAATNLPDILDPALTRPGRFDRHIVVPSPDVRGRQEILELYLQDKPVANDVDINAIARSTPGFNGADLANLVNIAAIKAAVEGADKLNAVQLEFAKDRIIMGTERRSMFISDESRKACLFLLTYLFGNGHAIVALNTQGAHPIHKATILPRGSALGMVTQLPSQDETSISKKQLLARLDVCMGGRVAEELIFGEDNVTTGARNDLHTATELAQYMVSNCGMSDAIGPVHVKERPSIEMQSRIDAEVVKLLREAYGRVKRLLRKHEKQLHALANALLERETLTADEINKVVHPYQEEPHLSFQDEEFALA

SEQ ID NO: 70322 - protein, 323 aa, Zea mays
  Coding DNA Sequence Number=SeqID_28543
  Gene Ontology: Mol. function=nucleoside-triphosphatase activity; Cellular component=mitochondrion; Biological process=PSII associated light-harvesting complex II catabolic process
  Homolog annotation: Hit_ID=Q9FGM0; Match level="QueryCoverage=72%, HitCoverage=28%, E-value=2e-71, Identity=59%"; Hit description=Cell division protein FtsH protease-like
  Pfam annotation: Domain name=FtsH_ext; Domain location=38-209; Score=- 15.0; E_value=0.046; Accession=PF06480.5; Description=FtsH Extracellular
MGWWPFWRSEHRLQRLIDEADANPNDAAKQSALLHELNKLSPEDVIKRFEERSHAVDSRGAAEYLRALILTNTIADYLPDEQSGRSASLPALLQELKQRVSGNEDKPFMNPGISEKQPLHVVMVDPKSTGRSTRFAQEIFSTILFTIAVGVMWVMGAAALQKYIGSLGGIGASGAGSSSSYSPKEMNKDMMPEKNVKTFKDVKGCDDAKKELEEVVEYLKNPSKFTRLGGKLPKPQGSWEPLSAFQEGNSCLLSTGALDSPVHLRTLSGADFFPVLAQPTVESLEPLAHRTVRCPLHTVGLATRHARIARPTVGSPDSSVHTG

SEQ ID NO: 70323 - protein, 180 aa, Zea mays
  Coding DNA Sequence Number=SeqID_28544
MWELRASFSMFAMRCRAPLRPATYERGSEWKTPGGEVEDDVEDDGHGAFVNRRCTPYMVRQLSVFGADGALRGIPYRAFGRMVALISNRLFVPGTMEHNGLYRFEPPRYVMPYVLYGKSCRDFLYLLMDFRRQANKGYAFVNFITLEVAYQPWGPRGPPRALVGFQGQRQDLTYYRTSWR

SEQ ID NO: 70324 - protein, 136 aa, Zea mays
  Coding DNA Sequence Number=SeqID_28545
  Subcellular localization annotation: CTP_CleavageSite=24; ConfidenceScore=5.08e-01
MAPPASSPPHSRSTRGHFWYLKTRVSTPAGPRRDPCDYPWSHSRRWSTLAQNKGLFDEAISTPARPRRDPCDYLWSHSRRWSTLAQNKGPSDEAIGLKWGKLPHRALRISSSGAPKPPCAPSMGNPFSCLGGSNPL

SEQ ID NO: 70325 - protein, 104 aa, Zea mays
  Coding DNA Sequence Number=SeqID_28546
MAACRPHNTMRPRLWWLGAGAAQGRQQWCWGSSPPAIKTKSRDTWVTKAYTDKRSLTRVEHSVLPQQSSSFSRKLSVADPHLGIYKEEVSQETREIHTRQDQKT

SEQ ID NO: 70326 - protein, 218 aa, Zea mays
  Coding DNA Sequence Number=SeqID_28547
  Gene Ontology: Mol. function=nucleoside-triphosphatase activity; Cellular component=nucleus; Biological process=DNA metabolic process
  Homolog annotation: Hit_ID=Q60F40; Match level="QueryCoverage=84%, HitCoverage=51%, E-value=2e-82, Identity=82%"; Hit description =Putative DNA repair protein RAD51
MAGRILVMRPTSLADFTKSLEEMKVTLLQHDVKLLIVDSVAALMSMENEKATAGFRQHPLRWSLSFLKSIAEFSRIPVVVTNQVRSQSNDDGYHFSFEVDRKDGSNCAERFDSHLVAALGIQWAHAVTVRLVFESHSGHRFIKVAKSPMSPAVAFPFAVESSGITLLSDESIDVTGPDITSIRCQGFFALSVLDDDTCRFRLPQQNTRYGNFYSRALS

SEQ ID NO: 70327 - protein, 49 aa, Zea mays
  Coding DNA Sequence Number=SeqID_28548
MTRTTTRAFKIANLRRRAGMGFRRPLSPLTVEYKNISFTVWGVRGQDKA

SEQ ID NO: 70328 - protein, 254 aa, Zea mays
  Coding DNA Sequence Number=SeqID_28549
  Gene Ontology: Mol. function=polynucleotide adenylyltransferase activity; Cellular component=nucleus; Biological process=RNA polyadenylation
  Homolog annotation: Hit_ID=Q9LMT2; Match level="QueryCoverage=32%, HitCoverage=11%, E-value=1e-15, Identity=54%"; Hit description =F2H15.20 protein (Hypothetical protein At1g17980) (At1g17980) (Poly(A) polymerase)
  Pfam annotation: Domain name=PAP_RNA-bind; Domain location=1-67; Score=-49.4; E_value=0.015; Accession=PF04926.5; Description=Poly(A) polymerase predicted RNA binding domain
MGLWRKQTTQAQETEQFDIRGIVNEFKNTICAYQHQKEGMDIEVSHVKRKEIPLFVFPGGVRPSRTSRTTHKNSRAIPTRDVSADDQVGNLLGVASCSDAQHVPCKGSYMKQPEPDFAGGFQLPGSISLLPPSLPNKVVLNGSANFHAESIESEHPEHYQESGAANNLLKLSPAIPATPDELDELIGSENNLEQICSLRPQESNNNLKRKVNQELEHSRVGVGRLEDSITVGDGAISGGRGCNVLADNGLKNTG

SEQ ID NO: 70329 - protein, 66 aa, Zea mays
  Coding DNA Sequence Number=SeqID_28550
MGERQTPEYTVRTPKVGPGPLRVQARPLECEPDPPKIEIISNYKCTFGSEGDENTSMTQKQNAQSA

SEQ ID NO: 70330 - protein, 341 aa, Zea mays
  Coding DNA Sequence Number=SeqID_28551
  Gene Ontology: Mol. function=ubiquitin-protein ligase activity; Cellular component=ubiquitin ligase complex; Biological process =protein ubiquitination
  Homolog annotation: Hit_ID=Q6EUK7; Match level="QueryCoverage=98%, HitCoverage=49%, E-value=6e-88, Identity=52%"; Hit description =Putative Avr9/Cf-9 rapidly elicited protein
  Pfam annotation: Domain name=U-box; Domain location=267-341; Score =66.7; E_value=7.7e-17; Accession=PF04564.6; Description=U-box domain
  Subcellular localization annotation: CTP_CleavageSite=45; ConfidenceScore=5.19e-01
MAAQASSPIEFLLRRPLPRQRRRLPLAGAFFAPTGLSGAPLLRALASLAADLLGTPAPRREAAFSDAANLCFRELYVVLFRADLLVSYVASAARAWALLRAPQLAASFRDLDAELAVVLDVLPAASLRLSLDAAQYLDLLRARCRRRAPAHYHDPAEAALGDLLLAALRHFEVGQPPDPSMLRSLLLQIGISDAASCRSEIEYLEEQILSQEEDADLPLIGGVVALLRYCLFSLFDPSNTKTLRVWLSAGNRQRLLSWSCSDDSSFSVPKEFSCPISLDLMRDPVVVSTGQTYDRTSIIQWIEEGHSTCPNSGQALADNRLVPNRALRSLISQWCGVQAFS

SEQ ID NO: 70331 - protein, 157 aa, Zea mays
  Coding DNA Sequence Number=SeqID_28552
  Gene Ontology: Mol. function=catalytic activity; Biological process =cellular metabolic process
  Homolog annotation: Hit_ID=Q6EUK5; Match level="QueryCoverage=75%, HitCoverage=20%, E-value=1e-32, Identity=63%"; Hit description =Putative UOS1
  Subcellular localization annotation: CTP_CleavageSite=64; ConfidenceScore=5.79e-01
MNCSSCCAAATPSSPALLARPRGGLAASCSTTTANQKVLFLGSKQFPRITYSRASSRLSRREVIAFAGQQPWDIGRFVKTLYFFNGPPNLLKIVESIISSFTGPASSEVPKKMETSDVVLVTGATGGVGRRVVDVLQKKGVPVRVLVFYCQPYSHWP

SEQ ID NO: 70332 - protein, 111 aa, Zea mays
  Coding DNA Sequence Number=SeqID_28553
  Subcellular localization annotation: CTP_CleavageSite=74; ConfidenceScore=5.34e-01
MVVINTAPSDMATPNMDHVRPAHLFVSVESFSGMFQSSSPLLRKSEPPVQVQDTIITAWTIRQPTRNRNDPIARAELYQLSYIPPEPSGVCMKESDASSILFPGAVGPSCT

SEQ ID NO: 70333 - protein, 32 aa, Zea mays
  Coding DNA Sequence Number=SeqID_28554
MAYSSCLNRSLKPNKLLLRRIDGVIQGPGDWI

SEQ ID NO: 70334 - protein, 425 aa, Zea mays
  Coding DNA Sequence Number=SeqID_28555
  Gene Ontology: Mol. function=transcription factor activity; Cellular component=nucleus; Biological process=regulation of transcription, DNA-dependent
  Homolog annotation: Hit_ID=Q2TQ39; Match level="QueryCoverage=83%, HitCoverage=83%, E-value=1e-108, Identity=59%"; Hit description =Transcription factor AP2D4
  Pfam annotation: Domain name=AP2; Domain location=178-243; Score =100.9; E_value=3.8e-27; Accession=PF00847.10; Description=AP2 domain
  Pfam annotation: Domain name=AP2; Domain location=76-149; Score =125.7; E_value=1.3e-34; Accession=PF00847.10; Description=AP2 domain
  Pfam module annotation: Pfam domain module=AP2::AP2; Domain location =178-243::76-149
MESSGMMLVKSEIESCYPGPSAAAPSVVIGGAPDGVEGGHRHQVVRRRRREPPLLAPIGGGGGIGKPLPSITVKRSSRFRGVSRHRWTGRFEAHLWDKNSWNPTQRKKGKQVYLGAYDEEEAAARAYDLAALKYWGPTTYTNFPVMDYEKELKVMENLTKEEYLASLRRKSSGFSRGVSKYRGVARHHQNGRWEARIGRVFGNKYLYLGTYSTQEEAARAYDIAAIEYKGVNAVTNFDLRSYITWLKPSAPPAAFNREALVAQAAPAEQLQLHHHPAETAQMLPRGNPFLLDHMTSSGGGQEASMSTVSPGGMRRRGSSTALSLLLKSSMFRQLVEKNSDAEEGAGDGEAAAAAGSGHPGPGDAYEYHNFFQGEAPPDMCDLFSSGGGGGGGHARVAGFHRDIAACYDGEGLDGWSGFGNMPSLQ

SEQ ID NO: 70335 - protein, 53 aa, Zea mays
  Coding DNA Sequence Number=SeqID_28556
  Homolog annotation: Hit_ID=Q1RTV3; Match level="QueryCoverage=75%, HitCoverage=23%, E-value=5e-08, Identity=62%"; Hit description=Ras GTPase; Sigma-54 factor, interaction region
MARYVSKKFCQQYKARILIGDRLVTLQIWDTAGRYRFHSLGENLDGDAAQERE

SEQ ID NO: 70336 - protein, 226 aa, Zea mays
  Coding DNA Sequence Number=SeqID_28557
  Homolog annotation: Hit_ID=Q2HS71; Match level="QueryCoverage=24%, HitCoverage=5%, E-value=1e-07, Identity=51%"; Hit description =Methyltransferase small domain, putative
MVAPPSHVSLLPYHSSQSSLGEGDKGGWEPSPRIASCPPPPPVAGAQPGHGLVPLSASDRHQMAGRQEPNASACINGEARGAPSGAKKGLPRKGKASSGRTLNTTQIPLVASHPDVYEPCGLNGRQVIDRILPAVREMLSERRWLHMVALEDNDPSDICHLMSEMGHSERIKNQPSLIGLPQLVTRKRVRKKGTTHFNKSKDQNANSSYGTHDIVIGSTWLDYLSC

SEQ ID NO: 70337 - protein, 80 aa, Zea mays
  Coding DNA Sequence Number=SeqID_28558
  Homolog annotation: Hit_ID=Q9M4U5; Match level="QueryCoverage=29%, HitCoverage=7%, E-value=7e-07, Identity=100%"; Hit description =Histone deacetylase 2b
  Subcellular localization annotation: CTP_CleavageSite=65; ConfidenceScore=5.07e-01
MAQRLSGQPGTFLASLGRAWTHVLARDPNRHGPSQQRAGPGTTLFVPCLTGLGPGLEVKPGSTVKCEPGHGFILHVSQPE

SEQ ID NO: 70338 - protein, 87 aa, Zea mays
  Coding DNA Sequence Number=SeqID_28559
  Subcellular localization annotation: CTP_CleavageSite=62; ConfidenceScore=5.62e-01
MGKSPAKWIKSVLFGKKSSSRSGSTKAKDLSKGASNKGAAAAGKEPVFSESSPVISEPVLVSAHNNETVREVAKELYPLFVAVIKHP

SEQ ID NO: 70339 - protein, 89 aa, Zea mays
  Coding DNA Sequence Number=SeqID_28560
  Subcellular localization annotation: CTP_CleavageSite=46; ConfidenceScore=5.02e-01
MRVKLLVGWRGKFLPWLGWTAMPLGIGQAPSTASTTCWSAARVKPPCAVGSVLSWPKEWTGCQGIEDDHLFVDPWMDDTDLIPRKQFRR

SEQ ID NO: 70340 - protein, 119 aa, Zea mays
  Coding DNA Sequence Number=SeqID_28561
MAVGAPGEPWSSGITPPLVMHQCCSCDDSWRNWRVEGGDLAGWEAPMRCEAPGRLAGEVLAMAGLDSDAAGHWASSLHCFNDSKSAANRPPCHPQSMSRFSVSAGPLQGLNHRALLALS

SEQ ID NO: 70341 - protein, 107 aa, Zea mays
  Coding DNA Sequence Number=SeqID_28562
MVVCSLLGHWELTAAELLSSGNATPSGLVLHSGNILGLLLALGLSNYSDWVLGQEAEVPGCSVSSIGFLPVGCSGGTVAAVVDGTASKIDVDADVDSGADIPEDDSA

SEQ ID NO: 70342 - protein, 398 aa, Zea mays
  Coding DNA Sequence Number=SeqID_28563
  Gene Ontology: Mol. function=transferase activity, transferring groups other than amino-acyl groups; Cellular component=cellular _component; Biological process=biosynthetic process
  Homolog annotation: Hit_ID=Q8LIL0; Match level="QueryCoverage=95%, HitCoverage=97%, E-value=1e-109, Identity=53%"; Hit description =Putative chalcone synthase
  Pfam annotation: Domain name=ACP_syn_III; Domain location=176-269; Score=17.5; E_value=2.2e-05; Accession=PF08545.1; Description=3 -Oxoacyl-[acyl-carrier-protein (ACP)
  Pfam annotation: Domain name=ACP_syn_III_C; Domain location=302-391; Score=-10.6; E_value=0.00018; Accession=PF08541.1; Description=3 -Oxoacyl-[acyl-carrier-protein (ACP)
  Pfam annotation: Domain name=Chal_sti_synt_C; Domain location=251 -393; Score=200.3; E_value=4.4e-57; Accession=PF02797.6; Description =Chalcone and stilbene synthases, C-te
  Pfam annotation: Domain name=Chal_sti_synt_N; Domain location=16-242; Score=431.6; E_value=1.1e-126; Accession=PF00195.10; Description =Chalcone and stilbene synthases, N-te
  Pfam module annotation: Pfam domain module=ACP_syn_III::ACP_syn_III _C::Chal_sti_synt_C::Chal_sti_synt_N; Domain location=176-269::302 -391::251-393::16-242
MTSLLLGNQIARSAVGLCSDRRRELRADGPATVLAIGTANPPNCVRQEEYADYYFRVTKSEHLTSLKDKLKRICHKTAIKKRYFHHTEELLRGHPALIDRSMPSLHERQDIMASAVPELAAAAAVDAIAEWGRPATEITHLVVTTYSGAHMPGVDWLVASLLGLRSTVRRTMLYMNGCSSGCVALRLAKDMAENNRGARVLVACAELTLAHFRAPHEAHVDTLILQSLFGDGAGAVIVGADPVSVEEPDFEMLSASQTMIPESKQVAAGQLCEDGFHFNPSRDIPSLVRENIEQCMVDALSLLGIGGSWNDLFWAVHPGGRAFLDSVEAGLRLEPHKLEASRRVLSEYGNMSGPSVIFVLDELRRQQERKGMGVILGLGPGVSVETMVLQATDSQKKI

SEQ ID NO: 70343 - protein, 213 aa, Zea mays
  Coding DNA Sequence Number=SeqID_28564
  Subcellular localization annotation: CTP_CleavageSite=15; ConfidenceScore=5.46e-01
MKDAGGGTPFAIPPCVDIKSSVASLTFLKLVVPFWQLQPYGSLLTMSRTSASAPCTLFTTTATMDLTSPNNTSGTATNTNQPPPVSHPDLRGTKTPGCAGRTRGNRRAGEIAWIPRHAPRGFLSCELEGGFEVRERPGNATPPSSDRACDKEGVQMANMVHTTTEQVTRLRVSKHSGSGARMAVKQMTEGPQLSAQHSWAERAGKSGSSVTRD

SEQ ID NO: 70344 - protein, 61 aa, Zea mays
  Coding DNA Sequence Number=SeqID_28565
MGALSVLEFNAGLMEHGDAHATVREVQPTMPMNEGGIRWRWIWASVLKPSKGKGAALCRER

SEQ ID NO: 70345 - protein, 512 aa, Zea mays
  Coding DNA Sequence Number=SeqID_28566
  Gene Ontology: Mol. function=binding; Cellular component=kinesin complex; Biological process=defense response
  Homolog annotation: Hit_ID=Q6K715; Match level="QueryCoverage=68%, HitCoverage=55%, E-value=9e-85, Identity=46%"; Hit description =Kinesin light chain-like
  Pfam annotation: Domain name=TPR_1; Domain location=176-209; Score =10.9; E_value=0.27; Accession=PF00515.18; Description=Tetratricopepti de repeat
  Pfam annotation: Domain name=TPR_1; Domain location=386-419; Score =9.5; E_value=0.4; Accession=PF00515.18; Description=Tetratricopeptide repeat
  Pfam annotation: Domain name=TPR_1; Domain location=428-461; Score =22.5; E_value=0.0015; Accession=PF00515.18; Description =Tetratricopeptide repeat
  Pfam annotation: Domain name=TPR_2; Domain location=110-143; Score =3.6; E_value=13; Accession=PF07719.7; Description=Tetratricopeptide repeat
  Pfam annotation: Domain name=TPR_2; Domain location=176-209; Score =9.1; E_value=2.9; Accession=PF07719.7; Description=Tetratricopeptide repeat
  Pfam annotation: Domain name=TPR_2; Domain location=218-251; Score =0.6; E_value=28; Accession=PF07719.7; Description=Tetratricopeptide repeat
  Pfam annotation: Domain name=TPR_2; Domain location=338-371; Score =3.1; E_value=15; Accession=PF07719.7; Description=Tetratricopeptide repeat
  Pfam annotation: Domain name=TPR_2; Domain location=386-419; Score =13.3; E_value=0.9; Accession=PF07719.7; Description=Tetratricopeptide repeat
  Pfam annotation: Domain name=TPR_2; Domain location=428-461; Score =21.8; E_value=0.0024; Accession=PF07719.7; Description =Tetratricopeptide repeat
  Pfam annotation: Domain name=TPR_2; Domain location=68-101; Score =2.4; E_value=17; Accession=PF07719.7; Description=Tetratricopeptide repeat
  Pfam module annotation: Pfam domain module=TPR_1::TPR_1::TPR_1::TPR _2::TPR_2::TPR_2::TPR_2::TPR_2::TPR_2::TPR_2; Domain location=176 -209::386-419::428-461::110-143::176-209::218-251::338-371::386
  Subcellular localization annotation: CTP_CleavageSite=60; ConfidenceScore=5.03e-01
MRRLAKSLLLASLSRTLRHRPQLPLLHPWPPQPRRPEPRLLPFSTQTLAPGPAPPPALVAASTGEPTGLALLESAELHESEGDHQEALGLALKALAPLQASHGGWSLPVARALRLAGAAATRAGSLSDGLESLGAAADILARAKMAIGRRWDAVGDLQRALDLKTLFLEAGSAELGNAYRDVAEAYAGVLDFDKALPLCSKALGIAERRFGEDSAEVAKLRRLLMSVYTGLGRHEEALAQIELAKVVYERLGLNVELSQAEIDGANIRILLGRSEEALNNIKRVMQRADKESEERALAYVTMAKILMSEDTVLDSKRCLEIAQGIIDAKDSIDPGRFAEAYAEISMLYESLANFETSSGSFEMASNLMKKTLAILESAKEMHHIEGSISARLGWLLLYIKNVDESVQYLERAVDKLKNCFGPRHFGLGFAYRNLGQAYLEMNQHQSAVEFFKLALDIIEATFGPLHDDTIDTKQCIANAYGLMKRHAILTLNYCLLRPADRAYGGAKHCFAL

SEQ ID NO: 70346 - protein, 286 aa, Zea mays
  Coding DNA Sequence Number=SeqID_28567
  Gene Ontology: Mol. function=zinc ion binding
  Homolog annotation: Hit_ID=Q10RQ6; Match level="QueryCoverage=78%, HitCoverage=80%, E-value=9e-45, Identity=49%"; Hit description=Zinc finger, C3HC4 type family protein, expressed
  Pfam annotation: Domain name=zf-C3HC4; Domain location=109-143; Score= 14.9; E_value=0.0045; Accession=PF00097.15; Description=Zinc finger, C3HC4 type (RING finger)
MDAAAGAPIPAPSDAGQGTAAAFPIAIVIAIGFMVTTLILISYYFLVVRCWLRGGGPGGLLHRARREDDRGGLAERVSAVFFADHDAAELPGGLDPDVVAALPVVRYYRRRASGLKLLPGCSHAFHIDCIDTWLHHNVSCPLCRAVVTAVGVLARHDHDASCRDLLQLGGGDARRVVDAAARVGYGSSCRFPTKAAPAVAQEPIARSFSMDCFAGGLGRKPQEKEPAAGSCGEAGPSLAVAAAGGSSDVADRGAGETSGRFRRLLSSFGLGRSSRSTVLPIHLDNP

SEQ ID NO: 70347 - protein, 343 aa, Zea mays
  Coding DNA Sequence Number=SeqID_28568
  Homolog annotation: Hit_ID=Q5UG13; Match level="QueryCoverage=70%, HitCoverage=99%, E-value=7e-46, Identity=52%"; Hit description =Adventitious rootless1
  Pfam annotation: Domain name=DUF260; Domain location=143-207; Score =30.8; E_value=8.2e-09; Accession=PF03195.5; Description=Protein of unknown function DUF260
  Subcellular localization annotation: CTP_CleavageSite=5; ConfidenceScore=5.17e-01
MATVPAGQFRHCSSERSCSGFRFVYLGLFQVRVLPAPVSDARQINASSQRMSKPAGLNKRWGRERAALVVIVGANRVENTKAPGAWGHSTAQRCSAKRDDGVRVTVRGVQVPAPQVRARLRLRALIITRAGRGALSRHPQGVRRPATCPSCSRTCRSPDRAEAAVTISYEAQARLRDPIYGCVAHIFALQQQVMTLQAQLASLKAQAAQGQQGVHEDAKGYVGSAAAEQLGYGYPWCSGNGGAAAAAAGAVGAPAAQPGAYGNGAHESLTALLGSSDYMQQSLYHAFEQAGADDDDGRQGYAFEAAAESSSLGAEESGWRSSSGYQDCEDLQSVAYAYLNHRS

SEQ ID NO: 70348 - protein, 116 aa, Zea mays
  Coding DNA Sequence Number=SeqID_28569
MAGDGSHMLMLGLLLRLGPAVGGRNDAMALWHGLPWFGNTALFEQQPDSTSFVKGKPRVGRVVVVNKAIRIYNFCPQAATAPSHSQHKDKAAGFPDRIYERDLGRLALHWDMLFMS

SEQ ID NO: 70349 - protein, 281 aa, Zea mays
  Coding DNA Sequence Number=SeqID_28570
  Gene Ontology: Mol. function=metal ion binding; Cellular component =integral to membrane; Biological process=ubiquitin cycle
  Homolog annotation: Hit_ID=Q9LSW9; Match level="QueryCoverage=60%, HitCoverage=51%, E-value=7e-18, Identity=30%"; Hit description=RING -H2 finger protein ATL5K
  Pfam annotation: Domain name=C1_4; Domain location=105-149; Score= -11.3; E_value=0.06; Accession=PF07975.2; Description=TFIIH C1-like domain
  Pfam annotation: Domain name=PHD; Domain location=105-150; Score= -1.1; E_value=0.073; Accession=PF00628.19; Description=PHD-finger
  Pfam annotation: Domain name=zf-C3HC4; Domain location=106-147; Score= 35.2; E_value=2.3e-07; Accession=PF00097.15; Description=Zinc finger, C3HC4 type (RING finger)
  Pfam module annotation: Pfam domain module=C1_4::PHD::zf-C3HC4; Domain location=105-149::105-150::106-147
MVIITVVGILAAFALLASYYAFVTKCQLLRAVWSRQPPWHRRVRGAGGGGLTGRRDEPSSVVRGDGRRGLGLPLIRMLPVVKFTAASCDAGAGAGGVAPRISVSECAVCLSEFVERERVRLLPNCSHAFHIDCIDTWLQGSARCPFCRSDVTLPAIPSARRAPAAAAAVLPTSRRRDDALASESIVIEVRGERERWFSSSHGTTTTTPRRQPPKQPAPRCSKAAESVGDEAIDTRKTDAEFAVQPLRRSVSLDSSCGKHLYVSIQELLATQRQVRDPSVRS

SEQ ID NO: 70350 - protein, 189 aa, Zea mays
  Coding DNA Sequence Number=SeqID_28571
  Gene Ontology: Mol. function=aminoacyl-tRNA ligase activity; Cellular component=extracellular space; Biological process=tRNA aminoacylation for protein translation
  Homolog annotation: Hit_ID=Q2R1C1; Match level="QueryCoverage=93%, HitCoverage=34%, E-value=1e-86, Identity=90%"; Hit description=Seryl- tRNA synthetase family protein, expressed
  Pfam annotation: Domain name=Seryl_tRNA_N; Domain location=6-75; Score=-9.5; E_value=0.016; Accession=PF02403.12; Description=Seryl -tRNA synthetase N-terminal domain
MATIPNYDRWQEVERLRAERNAVANKMKGKLDPSVRQALVEEGKNLKEGLIALEEDLVQLTDKLQLEAQSIPNTTHPDVPVGGEESSVLRKEVGSQRSFNFAIKDHLQLGKELDLFDFDAAAEVSGSKFYYLKNEAVLLEMALVNWAISEVSKKGFTPLITPEIVRSSVVDNCGFHPRASDTQLFGILD

SEQ ID NO: 70351 - protein, 51 aa, Zea mays
  Coding DNA Sequence Number=SeqID_28572
MTSWAHTLVAQGANDVHAWAAQRESVELGRKWDPRPRIKDVSKAWIGLGRM

SEQ ID NO: 70352 - protein, 51 aa, Zea mays
  Coding DNA Sequence Number=SeqID_28573
MAKNRLIGWFSFLWGTGRSSVPYDRWPWSTWQMDVKLPFLNGELEEETYMD

SEQ ID NO: 70353 - protein, 292 aa, Zea mays
  Coding DNA Sequence Number=SeqID_28574
  Homolog annotation: Hit_ID=Q2R127; Match level="QueryCoverage=87%, HitCoverage=83%, E-value=7e-71, Identity=53%"; Hit description=Plant viral-response family protein, expressed
  Pfam annotation: Domain name=DUF716; Domain location=111-268; Score =218.4; E_value=1.6e-62; Accession=PF04819.3; Description=Family of unknown function (DUF716)
MGDFVGHVLPGTLLLAVGLWRVWASVARFAADPAAFRVRAWNPVPAAGPRLLELHVVAGGAFLDMCVELYYANPLRVLTGGGVDPGHLGGLEHASMLLMFFLFGALALVSEKTRYLPLSDDALSLVFASAFTAEFLLFYFHSTTHAGLEGYYHRLLLAVLALCIAALVAGALLPASFPADLGAGVLIAVQGLWFYQAALALYGPMLPAGCVRHFDSPHSDARIECHGGTAQERAEQLANFQLFGLVFLAFVYALGCYAVAAARVRRAGEYMNGWAVQKKLECDLTYHMDLSL

SEQ ID NO: 70354 - protein, 553 aa, Zea mays
  Coding DNA Sequence Number=SeqID_28575
  Gene Ontology: Mol. function=nucleoside-triphosphatase activity; Cellular component=integral to membrane; Biological process=defense response
  Homolog annotation: Hit_ID=O24367; Match level="QueryCoverage=92%, HitCoverage=74%, E-value=0.0, Identity=55%"; Hit description =Pleiotropic drug resistance protein TUR2
  Pfam annotation: Domain name=ABC_tran; Domain location=186-390; Score= 54.7; E_value=3.1e-13; Accession=PF00005.17; Description=ABC transporter
MEDDSRRVDTMQMGSNLDGSLLRRSSSWWASRGNNAFWWPAREDDDEEALRWAAIEKLPTYDRMRKGILTAVGDGIQEVDIQGLNMQERKCLIQRLIRIPEEDNERFLLKLCERMERVGIQNPTIEVRFEHLTIDTEIYVGKQGVPTFTNFFSNKVRDALIALHIISSGKRPICILHGISGIVRPNRMSLLLGAPGSGKTSLLLALAGKLDSTLKMSGRVTYNGHAMDEFVPQSTSAYIGQHDVHIGEMTICSLNSQEEKNMPKLSQILTFDVYMKAISQEGQENFITDYVLKILGLDICADIMVGDSMIRGISGGQKKRVTIGEMLVGPANTLFMDEISNGLDSATAYQIVNSLRQSVHILGATALISLLQPAPEIYELFDDIVLLAEGQIVYQGPRENVLEFFEAMGFRCPDRKGVADFLQEVTSRKDQYQYWCTRDEPYRYISVNDFVDSFKAFHVGHALQSELELPFDRTKNHPAALTTSKFGISKMELLKACFCREWLMMKRNSFVYIIKIVQIVIDSDGCHILVPAHNPRNHYNDGLPAHKNASTQC

SEQ ID NO: 70355 - protein, 120 aa, Zea mays
  Coding DNA Sequence Number=SeqID_28576
MEAAEARNASFWKILVVVHFSEERTGAGDGAGAGGWRRPRVLFCLITHKLRSVPAAVAAAGGRRLDPRKKAMLGLAKCIKNLIYTAIVAEKDPLAAEVHRSRRQLRKGLRTIEAYRSAGG

SEQ ID NO: 70356 - protein, 73 aa, Zea mays
  Coding DNA Sequence Number=SeqID_28577
  Homolog annotation: Hit_ID=Q2R1C4; Match level="QueryCoverage=72%, HitCoverage=13%, E-value=9e-17, Identity=75%"; Hit description=St12p protein, putative, expressed
MLFKKIAYLMLILASKGKHSCRLYRWESQEGEGPQRLALEPDQDALAELKDVGLQLAVSFSGEGSILAIGGEV

SEQ ID NO: 70357 - protein, 170 aa, Zea mays
  Coding DNA Sequence Number=SeqID_28578
  Homolog annotation: Hit_ID=Q2R1C4; Match level="QueryCoverage=18%, HitCoverage=7%, E-value=2e-08, Identity=75%"; Hit description=St12p protein, putative, expressed
  Subcellular localization annotation: CTP_CleavageSite=63; ConfidenceScore=5.29e-01
MQGTGSKDMIQGYESACLQPLGKAQNTPSPRGWTAILYGTSSSLFTSTTCPPPRNAKSARDTQARPRSERDLGGRIAHRIGGESRRGLFPGGEGRHHELVRHPAPALPATAPEDSHRKRGGGGGGVIRIRLGSGRVGLDDVGEREPGGAVDRGSRRTGYRRRELPSRQRR

SEQ ID NO: 70358 - protein, 124 aa, Zea mays
  Coding DNA Sequence Number=SeqID_28579
MASAGGTLLSADPVRVCGMRGGTVDLSVPESFATVDNRVKLSVRRGRRWECEQSVVAPSIELRKRDLGLRLLTWGVSSGGCVRDRINREFVCRVTTDFSSKIISAADPHSAVANDLCYVTTSEF

SEQ ID NO: 70359 - protein, 93 aa, Zea mays
  Coding DNA Sequence Number=SeqID_28580
MASAGGTLLSADPVRVCAKRGSCCESIADRINREFVCRVTTDFSPKIISATDPHSAVANDLCYVTTNEQTTVESEDQQVEIAEQELIEGKLCP

SEQ ID NO: 70360 - protein, 66 aa, Zea mays
  Coding DNA Sequence Number=SeqID_28581
MEIRSWCIVEGVLVLEVLAPLVILLHLAINGVAPSWIDAEDSFRVDPFTCAISGWIHVRTIGLLDR

SEQ ID NO: 70361 - protein, 95 aa, Zea mays
  Coding DNA Sequence Number=SeqID_28582
  Gene Ontology: Mol. function=transferase activity; Cellular component= membrane
  Homolog annotation: Hit_ID=Q5VNX0; Match level="QueryCoverage=83%, HitCoverage=18%, E-value=7e-11, Identity=42%"; Hit description =Pectin-glucuronyltransferase-like
MNENNKVPTPTFFFYLCHPLCIFPSSYLLFVVVLPFSEVLDWSTFSVVLAERRAYRRTSRTSCGTPHATPIKYDFFHMILHSIWLSRANQVELDG

SEQ ID NO: 70362 - protein, 1018 aa, Zea mays
  Coding DNA Sequence Number=SeqID_28583
  Homolog annotation: Hit_ID=Q2QVD9; Match level="QueryCoverage=89%, HitCoverage=39%, E-value=0.0, Identity=70%"; Hit description =Expressed protein
MQFLGEDVGELRGRRHVKDTDINKCNVLSDEVKIDLHMFGALMLNGIGCNVFKSSSRPSWHASNQIEAIGHTSNKENREEKTPPRAKVGSRASCSVRACSSAIWKARECLNLLPNSKNVQAETDIIDALTVRLPYLGVTILPLQFRQVKDPMDIIRMVITCQAGAYLHFEEIIDVAKLLGLRSEEEVADVEEAIAREAVVNGDLQLALDICLNLTKKSHGAVWDLCAAIARGPPLDNLDTGTREKLLGFALSHCDDDSVGELLNAWKELHAQGTFEKLMITTATNPPNFLIDGSSITPLPVQSVQDILDLRDDNGHDRRSDLVGIVKDMLSKVCLDFSNGDTHNWESMLEENRKLCALEHCNEACDGEIMDHLTRRCRFSTKVKAATSIIYWLVINGLAPNDNIIMILAKSIMEPPIDEEFDVLGCSVLLNLMDPFNGVKIIEEELKRRESYQEISSIMSVGMLYSSLNNSKKECSTPEQRRNLLLHKFHEKFTSADTDDLDQVDMANTTFWREWKSKLEEDKQLADQARMLKQILPDIDTSRFLSGDVNYIKIVVYSFVNSVKMEKKHILKEAGRIAEAYGLQRTEVLLRFLACSLVSEYWDNNDILNEISEFREDIVSSAKGVIDMIYSDVYLEIDGYNKQRLSYIYGILSACHSYLKRTNEIELRYPVHVHTHKLEPFQYYKVLEEECKKVCFIDGLNFKNIAGLDNLNFEHFNDEVCKNIHASTVTAIADMVQSLVSMYVDVLAKGLISQQGVYKHYVLGLLASLEGRSEAQSNNTDYEKLQASLCEFELNYDSCREYIQALPATDISYIVRRYCTLCFPSNLARSHPQEPSWRKPLATLLEFWSKVVDDIPGDSIDACSYGRTDYLNSNRLSLCMRAFRQLLIIDEIALHQGCSFESVVEVYFGGQGQLGSENADPSNYLDLLELYNAATEKCLSDLSEESCEYRILLHNLLSSLSRSTGKHAGALEMVRSGVWGKLIRYSEDMQLESQFRVYALQVMQCLTGRNLKSLPNEK

SEQ ID NO: 70363 - protein, 102 aa, Zea mays
  Coding DNA Sequence Number=SeqID_28584
MTEPPISPSAPGADVDAHRTAEEHARTEQEARDPTLARGGDPALARALKADRKATVVKKEIEAAFERLRAAQEHMQPTSGPRLHHFGLRISLPMERLMSRHF

SEQ ID NO: 70364 - protein, 523 aa, Zea mays
  Coding DNA Sequence Number=SeqID_28585
  Gene Ontology: Mol. function=structural constituent of ribosome; Cellular component=intracellular; Biological process=translation
  Homolog annotation: Hit_ID=Q2QVD9; Match level="QueryCoverage=77%, HitCoverage=16%, E-value=1e-170, Identity=72%"; Hit description =Expressed protein
MVLLCRYAAGEYSKFRSMPLVETAIALAESGKIGALNLIFKRHPYTVSSDILRVLSAIPETLAVQTYSQLLPGKSLPSVVILRAGDWVECEQMASYINNCPAELDKVEEIKTEILVKHSKGFSWPSVAELCEWYKNRARDIDCLSGQLENSLAMIELACQKGIVELQPFFDDIKCLYQVVYSNELNEFTMNLLTWEDLPDYEKFKIILKGVKEDTVVQRLEENAIRFMKKLYEHKQESYLVSWLKEVAAKNELLICLAVIENGCGESPIYGLFKDLAEMIETSVHCIYMCSATNQWNTMSSILSKSLYKTKREKSLVASEEDCNLKDAKHALGSSMVSYEEMQCVCADILSGLGNAPEDFYHYDSVPDKPNDVKYLDILEKRLKVAEGHVEVGRLFAYYQSAITVRILMDFHSLWDIVNSVELQPDVDDQPENRSKNQSCCGGCWSVMVWKLAASLLILALRQRGMDGCRRDAPLTSPLARRIDDVGLRRLLWLVGRLRAWRCQGSSVHGPSHMLMAPVHEFW

SEQ ID NO: 70365 - protein, 174 aa, Zea mays
  Coding DNA Sequence Number=SeqID_28586
  Gene Ontology: Mol. function=protein serine/threonine kinase activity; Cellular component=membrane; Biological process=protein amino acid phosphorylation
  Homolog annotation: Hit_ID=Q9C660; Match level="QueryCoverage=81%, HitCoverage=20%, E-value=3e-45, Identity=63%"; Hit description=Pto kinase interactor, putative
MGTFGYMAPEYAQSGKLTDRSDVFSFGVVLLELITGRKPVDASQPLGVESLVEWTDDFREVADPALECRFSKTEMRRMVEAAAACVRHSAAKRPRMVQVWRSLDVDECSSDLTNGVKLGQSMAYDSTRYSADIELFRRMAFANDLSTAELGVVDEDDHRYHNSSKASSSSRRYK

SEQ ID NO: 70366 - protein, 47 aa, Zea mays
  Coding DNA Sequence Number=SeqID_28587
VVGSLTGTRRPRLIKNTTVIFATAPSTLVGWDNKSARTLMYDLAGRE

SEQ ID NO: 70367 - protein, 233 aa, Zea mays
  Coding DNA Sequence Number=SeqID_28588
MPPAAIPSVVMMDEENTGSMKPATTDNMGKGPVEIEDAKKAIEYDTPLGEDQEFGGWGGPEVYLHCFPDSLETEVCRYMVDNISFSEARGHIINDALRRFFRLPRLHAFEGLNFEQDAKEQEKILRAKLPRRKLSKGVKEISIEESIKNKEKLFAGSKGSREGRIYPINLQPKGAEAIIEFKQPEAEDEAKPTTTEAEAAVTKAEVEAAEAAKKVADEKKLEYCEQIYDEVMH

SEQ ID NO: 70368 - protein, 170 aa, Zea mays
  Coding DNA Sequence Number=SeqID_28589
  Homolog annotation: Hit_ID=Q2QVD9; Match level="QueryCoverage=97%, HitCoverage=8%, E-value=5e-18, Identity=65%"; Hit description =Expressed protein
MLEEEVSSPISPCKVQFLRFETFTNPSIQDVALTICFFMLPPTTLEGVSKLKEKWDRYRVLGKSRQRKKGDGVALFVSPNAEYVSVTVGNHIIILRKADGYASPCGVYTSQVSTFLQVTAWFIDLITLKNLRHVYAKFPYQLKMQCQLGLSSYLEVYRALITINVTRYLS

SEQ ID NO: 70369 - protein, 556 aa, Zea mays
  Coding DNA Sequence Number=SeqID_28590
  Gene Ontology: Mol. function=transporter activity; Cellular component= integral to membrane; Biological process=transport
  Homolog annotation: Hit_ID=Q5TKJ2; Match level="QueryCoverage=88%, HitCoverage=87%, E-value=1e-168, Identity=84%"; Hit description =Putative cellular retinaldehyde-binding/triple function
  Pfam annotation: Domain name=CRAL_TRIO; Domain location=279-465; Score=46.7; E_value=7.6e-11; Accession=PF00650.10; Description =CRALTRIO domain
  Pfam annotation: Domain name=CRAL_TRIO_N; Domain location=101-266; Score=32.4; E_value=1.6e-06; Accession=PF03765.5; Description =CRALTRIO, N-terminus
  Pfam annotation: Domain name=EMP24_GP25L; Domain location=470-551; Score=65.8; E_value=1.4e-16; Accession=PF01105.14; Description =emp24gp25Lp24 family
  Pfam module annotation: Pfam domain module=CRAL_TRIO::CRAL_TRIO _N::EMP24_GP25L; Domain location=279-465::101-266::470-551
MAEETQPEAAAEAEVVVTEPAPAPAEAEVPAAADAEAVTETEKKADEPAVTADDAGKGTGSFKEESNLVEDLPDPEKKVLDEFKHLIAAALAAGEFNLPPPPPPPKAKEEPKAEETKTEESKTEDPAEEEPKAESAAEEPKAEVAANAPDEEVKTEVPPVEEAKAETVAVEAKPAEPEPQEKTVVVAEEEPATKTVEAIEESVVSADEAAAPEPVLVWGVPLVGDDERTDTVLLKFLRAREFKVKEAMAMLKSAVLWRKRFGITSLLDADLGLPELENVVFYRGADREGHPVCYNVYGEFQDKDLYEKAFGDDEKRERFLKWRIQLLERGILSKLDFSPNGICSMVQVTDLKNSPPMLGKHRAVTRQAVTLLQDNYPEFIAKKVFINVPWWYLAANKMMSPFFTQRTKSKFVFASPAKSAETLFRYIAPEQVPVQFGGLFKEDDPEFTTLDTVTELTIKPSSKETIEIPVTENSAIVWELRVLGWEVSYSAEFTPDTEGGYTVIIQKTRKVPANEEPIMKGSFKVGEPGKLVLTVNNPASKKKKLLYRSKVKSISE

SEQ ID NO: 70370 - protein, 61 aa, Zea mays
  Coding DNA Sequence Number=SeqID_28591
  Subcellular localization annotation: CTP_CleavageSite=38; ConfidenceScore=5.04e-01
MAFAAIDIDGFVKSKTLPRTGTTVATCAGLQAHAAECLAVIVRSRRPNRTDRFSEATASNS

SEQ ID NO: 70371 - protein, 213 aa, Zea mays
  Coding DNA Sequence Number=SeqID_28592
MVVVVATAGVVVANSPLEGVRPLPDRGGCTLGHAPVLRTALGGLAADVAIWSPSASAGLHRLSTVRRIFRQRSRRRRLRHRLHCAPTVCLWGSCALTVDIPGAVGALSGGCTGALVKGKCALGPFLSILVIECQHKCLSVNLCQLMDKVQIKSRGEINLEMTWLIQPKSAQSGCTGQCPVRQAGSGELAALGTSTAVYGYKSPDCPVEHRTVR

SEQ ID NO: 70372 - protein, 202 aa, Zea mays
  Coding DNA Sequence Number=SeqID_28593
  Gene Ontology: Mol. function=5-formyltetrahydrofolate cyclo-ligase activity; Cellular component=nucleus; Biological process=folic acid and derivative biosynthetic process
  Homolog annotation: Hit_ID=Q2QX67; Match level="QueryCoverage=64%, HitCoverage=37%, E-value=4e-63, Identity=89%"; Hit description=5 -formyltetrahydrofolate cyclo-ligase family protein, putative, expressed
  Pfam annotation: Domain name=5-FTHF_cyc-lig; Domain location=1-142; Score=6.9; E_value=5e-06; Accession=PF01812.10; Description=5 -formyltetrahydrofolate cyclo-ligase family
  Subcellular localization annotation: CTP_CleavageSite=69; ConfidenceScore=5.06e-01
MLGRLDIFQKSHCVKVNPDTPQKQVRFLTLSGDKKLLTPQPRLRTGFFSVMDSQMIPVGCIPEACTSVGAAKYGRPIGLDESLKVDLIVIGSVAVDPSSGARLGKGEGFAELEYGMLRYMGAIDDSTMIVTTGCHGLSQPTGDDSSNCDFCCHACLVGMPGGTVGLLELDHQHTARLPDCPHTWHTRCHGHHRERDATARLG

SEQ ID NO: 70373 - protein, 197 aa, Zea mays
  Coding DNA Sequence Number=SeqID_28594
  Gene Ontology: Mol. function=5-formyltetrahydrofolate cyclo-ligase activity; Biological process=folic acid and derivative biosynthetic process
  Homolog annotation: Hit_ID=Q2QX67; Match level="QueryCoverage=68%, HitCoverage=29%, E-value=3e-37, Identity=79%"; Hit description=5 -formyltetrahydrofolate cyclo-ligase family protein, putative, expressed
MTLLRYANLFKGPLSDLVIKALVAHSGLNRPAMSGQIKPRLDGCQGLWLLFTVGSQSCSLLLVISSAMRTCVHDKQLVDDIPVEKLLVHDVPVDIICTPTQVIFTKTTIPKPQGSEIFVCSDFLYELVLCDQILENFICRDLLGKVISRKIGPNPNSKRAEATYRARDRNYASLWTFGEATANSSEKAEVAAATMRL

SEQ ID NO: 70374 - protein, 129 aa, Zea mays
  Coding DNA Sequence Number=SeqID_28595
MASSSALNGDVTREKSERGKEGNGSINALTNGHETSGVAVGQGTLDWARGFGAHGAVSWAARASRAGARPCVSARLRGLGRVAGGRGAAGGLSARGGLGAGAGRSEHGCDVQRREGQASSALAGNETIW

SEQ ID NO: 70375 - protein, 115 aa, Zea mays
  Coding DNA Sequence Number=SeqID_28596
  Homolog annotation: Hit_ID=Q2QX67; Match level="QueryCoverage=32%, HitCoverage=10%, E-value=2e-13, Identity=91%"; Hit description=5 -formyltetrahydrofolate cyclo-ligase family protein, putative, expressed
  Subcellular localization annotation: CTP_CleavageSite=15; ConfidenceScore=5.58e-01
MPLLFPATPPLPLCRAARVSRRATASVASAARSSSSSSASFDAAAFEAERLRLDAAARAGMESTAAAAEAGPRAWKWAIRKRVWDALEAEGIARDPRPVHHRIPNFDGAPAAADA

SEQ ID NO: 70376 - protein, 63 aa, Zea mays
  Coding DNA Sequence Number=SeqID_28597
MAMGTCYPEIRGYEKLVGYPKPALYGFRQVIPNGFLSITISIYTVVAPSHLLFGSPQTEAPSR

SEQ ID NO: 70377 - protein, 217 aa, Zea mays
  Coding DNA Sequence Number=SeqID_28598
  Gene Ontology: Mol. function=ubiquitin-protein ligase activity; Cellular component=ubiquitin ligase complex; Biological process =protein ubiquitination
  Homolog annotation: Hit_ID=Q6H593; Match level="QueryCoverage=64%, HitCoverage=24%, E-value=5e-37, Identity=60%"; Hit description=Arm repeat-containing protein-like
  Pfam annotation: Domain name=U-box; Domain location=48-120; Score =64.2; E_value=4.3e-16; Accession=PF04564.6; Description=U-box domain
  Subcellular localization annotation: CTP_CleavageSite=45; ConfidenceScore=5.48e-01
MGAARPRRWKLPFHRTVSAVGGGGGAPCSPSSRSSSSPARSEAWAAEAVPEEFLCPISGALMADPVILPSGKTFERACLQACAELAFLPPGVEAGDADTVIPNSALKAAICTWCARSGREVPAPPSAEAARQAVQRAMPPAAAKSVRTTTTRRAVVMAASTSNSSTSSYGSASEITAAEDEAKAKEEAPRRRTVKEAEVEPAAAPPADPLEDDVVGK

SEQ ID NO: 70378 - protein, 174 aa, Zea mays
  Coding DNA Sequence Number=SeqID_28599
  Gene Ontology: Mol. function=DNA binding; Cellular component=beta -galactosidase complex; Biological process=DNA integration
  Homolog annotation: Hit_ID=O24587; Match level="QueryCoverage=94%, HitCoverage=19%, E-value=1e-63, Identity=64%"; Hit description=Pol
MGTYGHLDLNALYIKRFQSDPKECYLVTVKRILRYLVHMPHIRFWYLKGSTFDFIGYSYSEYAGCKVDRKSTSGTCQFLGRSLVSRSSKKQTSVTLYTTEAEYVAVENPVEHGRTKHKDIRHHFLRDHQQRGDIVVCHVSTDHQLDDIFTKPLDEKRLCKLRSELNVLDSRNLD

SEQ ID NO: 70379 - protein, 575 aa, Zea mays
  Coding DNA Sequence Number=SeqID_28600
  Gene Ontology: Mol. function=ATP-dependent helicase activity; Cellular component=nucleus
  Homolog annotation: Hit_ID=Q6H601; Match level="QueryCoverage=37%, HitCoverage=66%, E-value=4e-99, Identity=81%"; Hit description =Putative RNA helicase RH22
  Pfam annotation: Domain name=DEAD; Domain location=104-361; Score =93.8; E_value=5.1e-25; Accession=PF00270.19; Description=DEADDEAH box helicase
  Subcellular localization annotation: CTP_CleavageSite=59; ConfidenceScore=5.31e-01
MALHHLRLAPLALLRAASLPPLASSRIAARGHRRVLLFAPPSWPWRLLSPGARPRALATAAAEADDATSGSGNEFFAESTSWASLGVSERLASALCSAGLSRPSLVQATCIPHVLMANDVIVAAETGSGKTHGYLVPLIEKLCSKSSTTKDDNCQDTTPGAHDMVLVLCPNVMLCEQVVRMANSLLDESGKPLKRAAAVCGPNGWPAVHPDILVATPAALLNYLFDYDPEKRRRERFMRNVKFVVFDEADMLLCGSFENQVIRLINMLRFDEKLLSRAQDSGKDISLGSDDEYHEDSKFETAEFGSSDKEIEDNIVEDRLVKLENSHVGAHKDWRRVRKIYRRSKQYVFVAATLPQSGKKTAGGVLQRMFPDAVWVSGTYLHRHNPRSVKESVGSAPDSVPVDSNTDPMADPKRRAKSCKTVTTGGIKRQDSHGSNSNIVLESLCGSLLGSMLEDIGKLNDFKKTIALAKRVTTFIYRHGRILSEMREQISGMVLVRPGATRFATCFLTLKSLHKHRDPLKGLFLSDAWKSNKLSKAEVGKGVYDIVLASTFWSTIEDSSALSKNSSLLVFVQPK

SEQ ID NO: 70380 - protein, 75 aa, Zea mays
  Coding DNA Sequence Number=SeqID_28601
  Homolog annotation: Hit_ID=Q3LRV2; Match level="QueryCoverage=69%, HitCoverage=22%, E-value=1e-18, Identity=77%"; Hit description=Gag
MKKKKMKKVVYYKSDSSTPSTFGKPQYFDGEDYCMWSDKMRHHLTSLHESIWDIVEFGAQAPQVGDEDYDSDEAA

SEQ ID NO: 70381 - protein, 396 aa, Zea mays
  Coding DNA Sequence Number=SeqID_28602
  Gene Ontology: Mol. function=protein binding; Cellular component =protein complex; Biological process=biological_process
  Homolog annotation: Hit_ID=Q6H592; Match level="QueryCoverage=99%, HitCoverage=100%, E-value=1e-175, Identity=76%"; Hit description =Proteasome protein-like
  Pfam annotation: Domain name=PCI; Domain location=293-384; Score=7.2; E_value=0.031; Accession=PF01399.17; Description=PCI domain
MAAYLSMGEAQRRIGDYLSRVTNAISCSDAAALASLLSVSSAPASTPLSDALAAIPDFPRLAGDRYPDLADLLVPLLRAIHFHSIQRFADAYSSFEKASKFVPHLPDSVQSIGVFEDVTNWETPWAMEAMHTVALEIRLIAEKADRELATNGKNPDKLQAAGSFLMKVFGTLAVKGPKRIGALYVTCQLFKIYFRLGTVNLCRSVIRSIETARNFDFEDFPVKDKVTYMYYTGRLEVFNENFLVADQKLTYALMHCNPQSESNLRRILKFLIPVKLSIGVLPKRTLLERYSLLEYADVVTALKRGDLRLLRQALDRHEDHHIIQRQKEPAKAHQIKLDVVVKALKWLEIDMDVDEVECIMACLIYKNLIKGYFAHKSKVLVLSKQDPFPKLNGKPV

SEQ ID NO: 70382 - protein, 934 aa, Zea mays
  Coding DNA Sequence Number=SeqID_28603
  Gene Ontology: Mol. function=RNA-directed DNA polymerase activity; Cellular component=intracellular; Biological process=RNA-dependent DNA replication
  Homolog annotation: Hit_ID=Q8S463; Match level="QueryCoverage=92%, HitCoverage=48%, E-value=0.0, Identity=90%"; Hit description =Putative prpol
  Pfam annotation: Domain name=RVT_1; Domain location=41-210; Score =140.7; E_value=4.1e-39; Accession=PF00078.17; Description=Reverse transcriptase (RNA-dependent
  Pfam annotation: Domain name=RnaseH; Domain location=440-567; Score =9.1; E_value=8.2e-06; Accession=PF00075.14; Description=RNase H
  Pfam annotation: Domain name=rve; Domain location=718-875; Score =105.9; E_value=1.2e-28; Accession=PF00665.16; Description=Integrase core domain
  Pfam module annotation: Pfam domain module=RVT_1::RnaseH::rve; Domain location=41-210::440-567::718-875
MPGIPRDVAEHSLDIREKRRVIGEEIHKLMAAGFIKEVFHPEWLANPVLVRKKGGKWQMCVDYTGLNKACPKVPYPLPRIDQIVDSTAGCETLSFLDAYSGYHQIRMKESDQLATSFITPFGMYCYVTMPFGLRNAGATYQRCMNHVFGEHIGRTVEAYVDDIVVKTRKVSDLLSDLEVTFRCLKAKGVKLNPEKCVFGVPRGMLLGFIVSERGIEANPEKIAAITSMGPIKDLKGVQRVMGCLAALSRFISRLGERGLPLYRLLRKTECFAWTPEAEEALGNLKALLTKAPVLVPPADGEALLVYVAATTQVVSAAIVVERQEEGHALPVQRPVYFVSEVLSETKIRYPQVQKLLYAVILTRRKLRHYFESHPVTVVSSFPLGEIIQCREASGRIAKWAVEIMGETISFAPRKAIKSQVLADFVAEWVDTQLPTAPIQPELWTMFFDGSLMKTGAGAGLLFISPLEKHLRYVLRLHFPASNNVAEYEALVNGLRIAIELGVRRLDARGDSRLVIDQVMKNSHYRDPKMEAYCDEVRRLEDKFFGLELNHIARRYNETADELAKIASGRTTVPPDVFSRDLHQPSVKIDDAPEPEAPSARPEAPSVQPEVPSAPEAEALNVEEEQSGAAPDRNWQAPYLQYLRQGELPLDQAEARRVARRAKSFVLLGDEEELYHRSPSGILQRCISIAEGQELLQEIHSGACGHHAAPRALVGNAFRQGFYWPTAVADATRIKAPGGYTHLLAAIDKFSKWIEVRPLNSIGSEQAVAFFTNIIHRFGVPNSIITDNGTQFTGKKFLDFCEDHHIRVDWAAVAHPMSNGQVERANGMILQGLKPRIYNGLNKFGKRWMKELPSVVWSLRTTPSRATGFTPFFLVYGAEAILPTDLEYGSPRTRAYTDQSNQASREESLDQLEEARDKALLHSARYQQSLRRYHA

SEQ ID NO: 70383 - protein, 253 aa, Zea mays
  Coding DNA Sequence Number=SeqID_28604
  Gene Ontology: Mol. function=ubiquitin-protein ligase activity; Cellular component=ubiquitin ligase complex; Biological process =protein ubiquitination
  Homolog annotation: Hit_ID=Q6H593; Match level="QueryCoverage=98%, HitCoverage=43%, E-value=1e-95, Identity=75%"; Hit description=Arm repeat-containing protein-like
  Pfam annotation: Domain name=Arm; Domain location=18-60; Score=24.3; E_value=0.00042; Accession=PF00514.13; Description=Armadillobeta -catenin-like repeat
KSEDKNHAAEALFVLALNEDNRAAFGVLGAVPPLLDLLTSPTHAPRARRDAGMALYHLTLAAVNQSKVARFPGAPKALLAVASGAAEPGPIRRLALMVACNVAACAEGRNALMDAGGVASVSGILLSPSHDTTNGGGGTADLEEWCLSAMYAMSRGSLRFRGLALASGADRALRRVVADEGGGVRREIARKTLRAMRSDLDEDGGEYNDLTGSSAECGDGEDCGGSIVSDGLMSFRRRQRELGVSSCGNTAEF

SEQ ID NO: 70384 - protein, 82 aa, Zea mays
  Coding DNA Sequence Number=SeqID_28605
MRSQLCASAGKAKLKVACWCKLCTDEDDEYRRLNRVHRAVWYGRMGLWLRAEARGGERSGWTARRSKGQGRIKAEMVTILLE

SEQ ID NO: 70385 - protein, 79 aa, Zea mays
  Coding DNA Sequence Number=SeqID_28606
MAGGNELAGAKERWLAGEGFELGIKVNIPDLWLKAVLQFKDVCLVVRESKDMVVRKGLGQAHESSNIGSDPIEDSSNRL

SEQ ID NO: 70386 - protein, 253 aa, Zea mays
  Coding DNA Sequence Number=SeqID_28607
  Gene Ontology: Mol. function=tyrosine decarboxylase activity; Cellular component=cytoplasm; Biological process=metabolic process
  Homolog annotation: Hit_ID=Q8RUN2; Match level="QueryCoverage=74%, HitCoverage=88%, E-value=6e-62, Identity=63%"; Hit description =Expressed protein
  Pfam annotation: Domain name=Lysine_decarbox; Domain location=94-207; Score=170.1; E_value=5.5e-48; Accession=PF03641.4; Description=Lysine decarboxylase family
MDAAEHHVEETKEEEAAQVMETTTAHSRFGRICVFCGSSQGKKKSYQDAAVELGEELFQLPPPHGNNVIMAADKIRYVSRNIDLVYGGGSVGLMGLVSRAVYNGGRHVMGVIPKTLMPREITGETVGEVKAVAGGYGTLEELLEVITWAQLGIHDKPVGLLNVNGYYNSLLSFIDKAVEEEFISPTARHIVVLAPTPKELLDKLEEYSPRHEKLGRAEDEVGDGAADEQLQELRGPAGAQAQRWEADRPGAES

SEQ ID NO: 70387 - protein, 596 aa, Zea mays
  Coding DNA Sequence Number=SeqID_28608
  Gene Ontology: Mol. function=binding; Cellular component =intracellular; Biological process=metabolic process
  Homolog annotation: Hit_ID=Q654C7; Match level="QueryCoverage=99%, HitCoverage=94%, E-value=1e-169, Identity=46%"; Hit description =Putative pentatricopeptide (PPR) repeat-containing protein
  Pfam annotation: Domain name=PPR; Domain location=127-161; Score =25.3; E_value=0.00021; Accession=PF01535.11; Description=PPR repeat
  Pfam annotation: Domain name=PPR; Domain location=230-264; Score =42.5; E_value=1.5e-09; Accession=PF01535.11; Description=PPR repeat
  Pfam annotation: Domain name=PPR; Domain location=25-59; Score=5.0; E_ value=1.9; Accession=PF01535.11; Description=PPR repeat
  Pfam annotation: Domain name=PPR; Domain location=347-381; Score =44.4; E_value=3.8e-10; Accession=PF01535.11; Description=PPR repeat
  Pfam annotation: Domain name=PPR; Domain location=418-452; Score=6.5; E_value=1.3; Accession=PF01535.11; Description=PPR repeat
  Pfam annotation: Domain name=PPR; Domain location=484-518; Score=5.5; E_value=1.7; Accession=PF01535.11; Description=PPR repeat
  Pfam module annotation: Pfam domain module=PPR::PPR::PPR::PPR::PPR::PP R; Domain location=127-161::230-264::25-59::347-381::418-452::484-518
MYDRCRRPQIPHAWCSTGCSTGNPVSWAAVIAAHAQNSRCADAMGLFSSHVAVGDRARTSLRSAAPVRACAELGDLGLGRQVHAQAIKSDNGGHLIVQNALVTMYSKSGSVGDGFALFERIRDKDLFSWGSIIAGLAQQGREMDALHIFREMIAEGMHHPNEFHFGSVFRACSVVINSLEYGEQIHGLCVKYKLDRNSYAGCSLGDMYARCNKLDSAMKVFYRIESPDLVSWNSLINAFSADGLLSEAMVLFSEMRYSSLKPDGITVMALLCACVGCDALRQGRSIHSYLVKLGLGGDVMVHAYAFKVGLVSDAILSNALIDTYAKCGSLDDANKLFEIMGTGRDVFSWSSLIVGYAQFGYAKEALDLFARMRNLGVKPNHVTFVGVLIACSRVGLVDEGCYYYSIMEPEYGIVPTKEHCSCVIDLLARAGRLSEAAKFVDQMPFEPDIIMWNTLLAASRTHNDVEMGKRAAEGVLNIDPSHSAAYVLLCNIYASSGNWNEFARLKKDMRSSGVQKSPGKSWIKLKGELKVFIVEDRSHPESDEMYTMLDLIGFEMVKAGYIPELSCYSRKYISSDHTYYDLLSEEMLAEYGVSSQ

SEQ ID NO: 70388 - protein, 198 aa, Zea mays
  Coding DNA Sequence Number=SeqID_28609
LTPEADQKVFRSKMFRPGPAHFSCGIVGTGTHKKRVRPKAHRTVAGIAVGEPLPSLASPGTPPRFIHNHNHLPTNLVLQRGLFVFGVALGRDGSLVMQSGWVDCCPVQLKMHGLLLKTHVSGYGGMSVPVVWKLPGDPELMAPTRVKSVKALFRQSDRKEICCGGSVPAQGTKSGGKSLEKRKDQGTGEEVAATAQVS

SEQ ID NO: 70389 - protein, 70 aa, Zea mays
  Coding DNA Sequence Number=SeqID_28610
RGGSERSNRKKDTEEVALPPIEHVEADGDIVEVDLAPDPVHPLPRDVRRRSSPRPDPKGAAPLMLYDYEG

SEQ ID NO: 70390 - protein, 295 aa, Zea mays
  Coding DNA Sequence Number=SeqID_28611
  Homolog annotation: Hit_ID=Q53JG2; Match level="QueryCoverage=37%, HitCoverage=31%, E-value=5e-14, Identity=43%"; Hit description=AP2 domain, putative
  Pfam annotation: Domain name=AP2; Domain location=102-166; Score =149.4; E_value=9.4e-42; Accession=PF00847.10; Description=AP2 domain
MCCAPKVANAEGRGPCLCCAGGEEDDEDGQQPAAAWRMLSGYERSREASMMVDALATVVAGGATPPATAAEHGAARIPATAASPSSSSQPPSPSSTGSGTPRRRYRGVRQRPWGKWAAEIRDPHKAARVWLGTFDTAEAAARAYDVAALRFRGSRAKLNFPESATLAAPPSAAAVPPPPSPPPQRPEALLESQALALAGGQEYSEYARFLQCPADPPRLYDQAPAATVPSAASGSASSSFPVLFRFGGGGESSGVASSQWWTQGSRSVSQEGAGSPPASWADSAWWPAPPRDPPR

SEQ ID NO: 70391 - protein, 213 aa, Zea mays
  Coding DNA Sequence Number=SeqID_28612
  Gene Ontology: Mol. function=aminoacyl-tRNA ligase activity; Cellular component=cytoplasm; Biological process=tRNA aminoacylation for protein translation
  Homolog annotation: Hit_ID=Q2QS12; Match level="QueryCoverage=85%, HitCoverage=37%, E-value=1e-100, Identity=95%"; Hit description =Bifunctional aminoacyl-tRNA synthetase, putative, expressed
  Pfam annotation: Domain name=tRNA-synt_2b; Domain location=3-161; Score=9.7; E_value=2.9e-06; Accession=PF00587.15; Description=tRNA synthetase class II core domain (G, H, P, S and T)
MDLLELLMVVSTSSQGMHLWILSTGIFYSVAWVTKSGKSDLEAPIAIRPTSETVMYPYFSKWIRSHRDLPLRCNQWCNVVRWEFSNPTPFIRSREFLWQEGHTAFATKEEADEEVLQILELYRRIYEEFLAVPVSKGRKSEMEKFAGGLYTTSVEAFIPNTGRGIQGATSHCLGQNFAKMFDITFENEKGVREMVWQNSWAYTTRSVLLTPLI

SEQ ID NO: 70392 - protein, 150 aa, Zea mays
  Coding DNA Sequence Number=SeqID_28613
  Gene Ontology: Mol. function=nucleotide binding; Biological process =translation
MGRRGGAAATVSSPIDRAGEGREGTTERGGSGASVGDAERHAEVRPREEDGKARVGPTCHREKLMVLRCYSQQLLEHALLDHDATIDGMTPRRCPRRRARRRCRVFERSDACLVPNAWRGTPPTDTVTMELSVARKARRSTYSLPTGPAS

SEQ ID NO: 70393 - protein, 118 aa, Zea mays
  Coding DNA Sequence Number=SeqID_28614
MERRGLGGVVRPAWAHVGRDGPGWRLQRARTTPASTTIDDRHPVIPGNGATKVERVRGILTLGRGGLWPPSLEQKSAWGSGWQNVLQALSRQNVLQAVQAVATLSRSVQVAVSLVDLS

SEQ ID NO: 70394 - protein, 115 aa, Zea mays
  Coding DNA Sequence Number=SeqID_28615
  Gene Ontology: Mol. function=structural constituent of ribosome; Cellular component=intracellular; Biological process=translation
  Homolog annotation: Hit_ID=Q1T0D3; Match level="QueryCoverage=45%, HitCoverage=86%, E-value=9e-22, Identity=90%"; Hit description =Ribosomal L29e protein
  Pfam annotation: Domain name=Ribosomal_L29e; Domain location=51-89; Score=68.5; E_value=2.1e-17; Accession=PF01779.7; Description =Ribosomal L29e protein family
GFCGRIDGVVCSSVDACWPRAYSGEMETSPETEVGVIGGAGVRDPEEMAKSKNHTAHNQSYKAHKNGIKKPKRHRQTSTKGMDPKFLRNLRYSRKGNKKSACRYRCCLGARETVT

SEQ ID NO: 70395 - protein, 110 aa, Zea mays
  Coding DNA Sequence Number=SeqID_28616
MDIQRHQAFFYLARRPTPLWRPDFLPDGTPITIPSTQMKKAGRQPQCPSGIYGAGDGSLLQSAGLEEKEKMATEIRAGTRNSRRDFRREIDVLLRRPKQREQGNVPLGGG

SEQ ID NO: 70396 - protein, 488 aa, Zea mays
  Coding DNA Sequence Number=SeqID_28617
  Gene Ontology: Mol. function=DNA binding; Biological process =regulation of transcription, DNA-dependent
GKPQIPEKSLKQKFVFQFDFVKGQLQRFFPEDYDSEKIKKNNIESPNLSDQPLQRDLIVAPVKRRLVDEFKSCDLSHRQKRKVKLQGNSLQTQTPRRSPRLVNVNNTCNKNKKVSKGRAKVLKTPPDATDQVKDRAHKSCLLDEKLDNALKAVHEEATGSLSQDLRKLDSPRCEVGLSKEHGHDQGDTGKMLDEVSDVENSKEHVGSDAMGNSESYMSTYCVEPLPTNSRLTAYSRINELSFTWKHSQHASSLEKVLLDIQRDNFVNTIARIQKIVRDDPSDVLSADVIEATVQIEILKWGLCLQDKCAHKIVNTMLDYAKKVKGRHNFNTEMRKEEFSAKLQDLLKWQLKELEFKYTSLESDYKKAMADASNFFSTFEEHRKKLHAIKDGIKDLQQACMTKDDEMQKLALQVAEHATAYQKSIMEKVRVKMALKSHEQTLGYIKEQLASAESGSIDVGALVKIEMDNMSREIELSKQNLLNINFKKE

SEQ ID NO: 70397 - protein, 334 aa, Zea mays
  Coding DNA Sequence Number=SeqID_28618
  Homolog annotation: Hit_ID=Q6ER21; Match level="QueryCoverage=26%, HitCoverage=35%, E-value=2e-29, Identity=70%"; Hit description =Putative ZF-HD homeobox protein
  Pfam annotation: Domain name=ZF-HD_dimer; Domain location=193-254; Score=135.6; E_value=1.4e-37; Accession=PF04770.3; Description=ZF-HD protein dimerisation region
MSPKFPPYLTSSLAEPRPDNTVHFREKTETNKRRQEGDQSGGAAGACCSDRMAGDQDASSGDAVLSLQFRAAGGEPALRYKRQRVQAEDGRRGHSSGVCGGEDGIPGDGNDKGEEDGTGALAVAVTHHCRHRRQKIKGKKKLWMTVVTPSLSEKKGARERMEATVDLKYEPLFPNGGVSSATKKTRLRVAAGGETWVYRECLKNHAASLGGHALDGCGEFMPSPEADRADPSSLRCAACGCHRNFHRRLVELPLPPPLLALPPPLAPAPAVASHVMRDSRRTMRGEEARLPAAFDDEAEESDASSDFYEDRPLSPMPAQAANCDAREPPGHDVG

SEQ ID NO: 70398 - protein, 84 aa, Zea mays
  Coding DNA Sequence Number=SeqID_28619
MDRARSGAGSWRVAASACLALGVARVRDARMRVGAHCPGAMAGGCWPPGVRLKQGKGEIEKRGKRAGEREMGASGGWLQGARDG

SEQ ID NO: 70399 - protein, 149 aa, Zea mays
  Coding DNA Sequence Number=SeqID_28620
  Subcellular localization annotation: CTP_CleavageSite=65; ConfidenceScore=5.42e-01
MAAHLRSAAVRLGALWPKMRGGASRRSPNWRRAAAPYRPMPAAMYRRLLVVAPLSPPAAPPGPCQAPAARSPEPPRRAFHCSTAPLGFRSTPASWAGPCPGEGEGEGVDTGAEKGLEIARLGTSPRIVEKLAARGITRLFPIQVLPPSW

SEQ ID NO: 70400 - protein, 154 aa, Zea mays
  Coding DNA Sequence Number=SeqID_28621
MTFRKYVFKDKRYRRSTCSGILAARYIICCCCQPTIAAFSASKALFGLLLSCNLCDLQASCSKLTIVTSLDVVGKTEEVLAIESGALLIVDEDKALIDEGGVEDILADFAEEESRVDSDKFEFEEYNSDTRQSKPSHVCLEKSTMKKGHVEAMK

SEQ ID NO: 70401 - protein, 147 aa, Zea mays
  Coding DNA Sequence Number=SeqID_28622
MGKGKRGKGWPHRADGKRKRPTSPPSEYFGDSDYSEEVSSKYDRSPTPASPVASSDDSDDYMGLSIVARAYWRSIERTGLGGSSNSEEWRGGDGDGKGGSDGEDGDGEGDGNSKGDGDDSSKGDGKGDDDCKGDGDDNKANNITSLA

SEQ ID NO: 70402 - protein, 84 aa, Zea mays
  Coding DNA Sequence Number=SeqID_28623
MVVVGESEAIRMACSRSSMVVQKILGEGGGDVERDGKLELLNAELRFTQFVPSHLYGMIAWAICRYMEGSYEKIGPQQLATHAA

SEQ ID NO: 70403 - protein, 57 aa, Zea mays
  Coding DNA Sequence Number=SeqID_28624
MGEEGGLTWGPQLEASRVEEHDTVTGPDLRVPCVNGLGGGRQALIVGARLWSGRCQI

SEQ ID NO: 70404 - protein, 81 aa, Zea mays
  Coding DNA Sequence Number=SeqID_28625
  Subcellular localization annotation: CTP_CleavageSite=36; ConfidenceScore=5.61e-01
MSSSPSGQVVQAAGVSASLLLFPSYPGMLSFSLLCFCSAPPSLLFYTFIDYSRFSATSDQPRIHIIVVGTGKSASAHRMMA

SEQ ID NO: 70405 - protein, 660 aa, Zea mays
  Coding DNA Sequence Number=SeqID_28626
  Homolog annotation: Hit_ID=Q2QNA3; Match level="QueryCoverage=99%, HitCoverage=96%, E-value=1e-169, Identity=70%"; Hit description=GRAS family transcription factor containing protein, expressed
  Pfam annotation: Domain name=GRAS; Domain location=252-561; Score =262.3; E_value=9.9e-76; Accession=PF03514.5; Description=GRAS family transcription factor
MGSSCDPSPSPGADDLFLSLSDLGPTSPSAYLDLPPTPQPQQGIKGPTQDLLLPYISSMLMEDDIDDTFFYDYPDNPALLQAQQSFLDVLSDDATVPTTTTTHSSASVNHHHSSSSSDASASGPLTPAAVDSYAPAPAAQFDSFDFDPAAFFSNGANSDLMTSAFLKGMEEANKFLPTQDKLVIDLDPPDDPKRFVLPTPAADKLAPGLNAAAPTVHVAVAVKEEEAILAAPDAAPGSGGAVLGRGRRNRFDDEEDLELQRRSSKQSALEGDGDERDVFEKYIIASPEMCTEQMQKLRIAMQEAAAKREAAAGENGKAKGRRGGREGLQARLAGTGSMVYQSLMAKRTSATDILQAYQLYMAAICFKKVVCLFSNHTIYNAGLGKKKIHIVDYGIQYGFQWPCFLRWIADREGGPPEVRITGIDLPQPGFRPTQRIEETGRRLSKYAQQFGVPFKYQAIAASKMESIRVEDLNLDPEEVLIVNCLYQFKNLMDESVVIESPRDIVLNNIRNMRPHTFIHAIVNGSFSAPFFVTRFREALFFYSALFDALDATTPRDSNQRMLIEENLFGRAALNVIACEGTDRVERPETYKQWQVRNQRAGLKQQPLNPDVVQVVRNKVKDCYHKDFVIDVDHRWLLQGWKGRILYAVSTWVANDAPSYI

SEQ ID NO: 70406 - protein, 154 aa, Zea mays
  Coding DNA Sequence Number=SeqID_28627
MGGAHVRAPGADRARKGGAGRAGSHGWKPTRPRDWGAAAMDWSRQPWMEALWARFAADLADWRFAAMDVICGQCRISISRRARNGGAGRGQPWMEANEAGGPGRGCHGLVAVAMDGSIVGEIRGGDSRPWMQAQRTGKGREAEPCTNFLYGGLR

SEQ ID NO: 70407 - protein, 104 aa, Zea mays
  Coding DNA Sequence Number=SeqID_28628
  Gene Ontology: Mol. function=hydrolase activity
  Homolog annotation: Hit_ID=Q84MH2; Match level="QueryCoverage=61%, HitCoverage=20%, E-value=2e-23, Identity=81%"; Hit description =Putative inosine-uridine preferring nucleoside hydrolase
MAVVEGTKKKVIIDTDPGIGRAQKATKLRIASFVHGTDGLGNQDFPRPATKPVDQSAAVFLVEQTNLYPGQVTVVTLGPLTNLALIVWIVSYTLLCFSFLLGFN

SEQ ID NO: 70408 - protein, 181 aa, Zea mays
  Coding DNA Sequence Number=SeqID_28629
  Pfam annotation: Domain name=DVL; Domain location=160-178; Score =42.3; E_value=1.6e-09; Accession=PF08137.3; Description=DVL family
MDKNVRAAEDPWTTVVNTGRHGQDERWRQPPRGRERDEANEDQIVIETKIQYPIEMWLNPDNELQINAPEDGVAPPRAAAVSAGLPPPPSVFHDPSRDQEKGRGSTESRETERIMNDKSKKGRRRSTPGSPGCPAAGLKSRGSRAPPGRSVPGRLASLVKEQRARLYIVRRCVTMLLCWRD

SEQ ID NO: 70409 - protein, 118 aa, Zea mays
  Coding DNA Sequence Number=SeqID_28630
MGDLLPPRAESAVVKLEPLCALLYLSHQPSTDLRATITVEFVRTGKNLARSPPPSISVRTRCPDYYYVFCLHVWCDVNFLFILCLFVLWRVEESVAEDTSVQKIEVAEQELIEGKLCP

SEQ ID NO: 70410 - protein, 179 aa, Zea mays
  Coding DNA Sequence Number=SeqID_28631
MEARRDSRYQVHVRRSKRPRNPKPGVKKKTCKVKVDRVEKRYGKSSQKLKSNGGRLEEKALSVLLAGAQDSEYFLHGYLSSVPLRDGIVLSVSLCTLEVIFRMAHQAGLSVESSTHQGIKSAVKVTTTSGVTSDGSGDPSFPLLLLRRLCAVARAATIIVSVGVSSSSWGALWWCRGHL

SEQ ID NO: 70411 - protein, 86 aa, Zea mays
  Coding DNA Sequence Number=SeqID_28632
MAPRWTIIIELESEGGRTIVIIPDFTSWYHQDQLILIIINSSLTQDVLATSTCNAWSPGGRWRRCLRKAPRRTWSFDEKEMYFVKI

SEQ ID NO: 70412 - protein, 518 aa, Zea mays
  Coding DNA Sequence Number=SeqID_28633
  Homolog annotation: Hit_ID=Q942M1; Match level="QueryCoverage=99%, HitCoverage=100%, E-value=0.0, Identity=69%"; Hit description=STAM binding protein(Associated molecule with the SH3 domain of STAM)- like
  Pfam annotation: Domain name=Mov34; Domain location=337-446; Score =74.1; E_value=4.6e-19; Accession=PF01398.11; Description=Mov34MPNPAD- 1 family
MGPPQPARPGVINIEACARPIAVDHRISLPYYFRIAGSLLRQANIYRNESNFLDLYVILLRYSSLLCETIPRHRDYHAFKLREKAFFDKLVDVIKELETLKPVVQRQIADHNRGGTVESNMNSLNGDNGTTHRIEQHTPSSYTPQPFVGSTNGASQKSFHAGRQVASLLSVQKQYMNLPYPKEETLARHSILGPNGLNGRWNGPVTGIKALSYAFTYCSLQVQYPSNFELTQNDITSLVPSILNQDDPQGPSTAPPPPDSPSNDNDDMKSVLSLDDGRWSVSADEHTSFTSANLEEELLQLNIKQPSPPPVLAEVQRPISPSRVADPTPGLPTSGTARFQNLHVPIKLMDCFLRVAESNTKRSLETCGVLAGTLKNRTFYVTTLIIPKQKSTSVTCEATNEEELFEVQDMGSLFTLGWIHTHPTQSCFLSSVDLHNHYSYQVMLPEAIAIVMAPTDTTRKHGIFHLTDPGGMGVIHDCQERGFHPHKAPLDGSPIYKQCSHVYMDTDIKFDMIDLRER

SEQ ID NO: 70413 - protein, 150 aa, Zea mays
  Coding DNA Sequence Number=SeqID_28634
MDKGCTQPISSDHKDLLEFHSSSLYQYSICGEYPQLGVSQNLTQDENHNSDRQAPLPAVPPRPRQWYSSEQLLFDVPANACAGWWAQQVRCDDGEIFVSVEPATLVRLCGGDAAAGDLPGQRQQLSPGLLDLHAFDTELIPDVRPIICIL

SEQ ID NO: 70414 - protein, 161 aa, Zea mays
  Coding DNA Sequence Number=SeqID_28635
  Gene Ontology: Mol. function=microtubule motor activity; Cellular component=microtubule associated complex; Biological process =microtubule-based movement
  Homolog annotation: Hit_ID=Q9AVP4; Match level="QueryCoverage=49%, HitCoverage=11%, E-value=1e-26, Identity=73%"; Hit description=BY-2 kinesin-like protein 10
  Pfam annotation: Domain name=Kinesin; Domain location=3-161; Score= -171.3; E_value=0.0014; Accession=PF00225.13; Description=Kinesin motor domain
MAFQVPGIYDGAQTFGYGGGLDESDMRFTSNKLMSKSTIFPNGNYLKAFTKKEKAAHVVKIKVVGFQLYVSFFEVYGGKLFDLLNDRSKLCMREDGKQKVCIVGLQEYRVSDIETIKELIEKGSATKSTSTTGANEESSRSHAIYYRTSVVDIFVMLSNVV

SEQ ID NO: 70415 - protein, 389 aa, Zea mays
  Coding DNA Sequence Number=SeqID_28636
  Gene Ontology: Mol. function=RNA-directed DNA polymerase activity; Cellular component=intracellular; Biological process=RNA-dependent DNA replication
  Homolog annotation: Hit_ID=UPI00004C1734; Match level="QueryCoverage =77%, HitCoverage=83%, E-value=1e-122, Identity=77%"; Hit description= UPI00004C1734 related cluster
  Pfam annotation: Domain name=RnaseH; Domain location=202-320; Score= -9.0; E_value=0.0004; Accession=PF00075.14; Description=RNase H
MKESDQLATSFITPFGMYCYVTTPFGLRNAGATYQRCMNHVFGEHIGRTVKAYVDDIIVKTRKASDLLSDLGTTFWCLKAKGAKLNLEKCVFGVPRGMLLGFIVSERDIEANPEKIAAITSMGPIKDLKGVQRVMGCHAALSRFISCLGERGLPLYRLLRKTECFTWTSEAEEALENLKALLTNAPILVPPRCRRSPLDLRRRYHSGGAGVGLLFISPIGKHLRYVLRLHFPASNNVAEYEALVNGLRIAIELGVRRLDARGDSQLVIDQVMKNSHCRDPKMEAYCDEVRRLEDKFYGLELNHIARRYNETADELAKIASGQTTVPPDVFSRDLRQPLVKTNDTPEPKKVSALHEAPSAQPEAPSAPPEAPSPTEGEALRIEDVLFGHA

SEQ ID NO: 70416 - protein, 210 aa, Zea mays
  Coding DNA Sequence Number=SeqID_28637
TDAWDLTTCSGQVPRPPAVAPLASTAVAHRRRGRERVGVPGRAQGGSGECGEHDHGHNIGTRALEGADRGRVAQWWRGLAPASNRAKDRETNGEIRAWGGCSPREESLECLSNDGTQGDLRSMTVGLRLQGENIDEHGPGETEVLGANQRVSRVAGEYAELTEATDATDARRQPRNGGGSRRSSTGASDTERGLPGKYPDIQVGYGYPEF

SEQ ID NO: 70417 - protein, 110 aa, Zea mays
  Coding DNA Sequence Number=SeqID_28638
  Gene Ontology: Mol. function=transcription factor activity; Cellular component=nucleus; Biological process=regulation of transcription, DNA-dependent
  Homolog annotation: Hit_ID=Q6J832; Match level="QueryCoverage=96%, HitCoverage=45%, E-value=9e-17, Identity=49%"; Hit description =Ethylene-responsive element binding factor
MPLPPSLELDLFHRRAAAGTGTGATAVRFPFGNIPVTHPYYFFRQDATAAAAEAGCRVLKLASADTVAQSDSDCSSVVDLSPSPPTAVSARKPAVFDLDLNCSPPTEAGA

SEQ ID NO: 70418 - protein, 164 aa, Zea mays
  Coding DNA Sequence Number=SeqID_28639
MAVHPGIDGRGVVFSTASFAACACSGDTAPPAGCPQMRTDAHPIASPGSTLCVDKHRTNTVVCFLPELDAQSSRLRRPAARRCVREQRWRGPGAQHGDAEDDVHCAKNTAGPRVLKNLGLLPPAPELSLSLSFLDGRGSGSTGPASLWENRAKESRPAVAALRL

SEQ ID NO: 70419 - protein, 59 aa, Zea mays
  Coding DNA Sequence Number=SeqID_28640
MEADCHGGSEHRGEGGREAVKSVLVPVEKDSGRHLLGLCLDVDIESRGIEMGAISILSA

SEQ ID NO: 70420 - protein, 186 aa, Zea mays
  Coding DNA Sequence Number=SeqID_28641
  Homolog annotation: Hit_ID=Q5I6E9; Match level="QueryCoverage=27%, HitCoverage=13%, E-value=3e-11, Identity=43%"; Hit description =AvrPto-dependent Pto-interacting protein 3
MGKPELNYSLCKKTITHWELTGEMALLAQGVPPPRARWAWACRGRSATPDKRPVDALEERLLPLFTLRDLELLADDVKHHGTEDVERPPVHRATVALATVRPHDTHFCVVPPHAADIPLSSPPSYSVMHSCSRYRSEGPGWKKKRGKKKEAMAMDGVDLWRGRDRSRVIRRDADQDHLYELGESKR

SEQ ID NO: 70421 - protein, 44 aa, Zea mays
  Coding DNA Sequence Number=SeqID_28642
MFLLKAFDDDCVLVSDVKAYQSLVGALQYIAFTWPNIAYAVHQR

SEQ ID NO: 70422 - protein, 57 aa, Zea mays
  Coding DNA Sequence Number=SeqID_28643
MLPAGPIAVAVVRLGLLDLSWAGRMASPRESEPKPFLEKPELCQRGPKSLSDLNIHI

SEQ ID NO: 70423 - protein, 71 aa, Zea mays
  Coding DNA Sequence Number=SeqID_28644
MDPWRCVVYEMEIGISINVRILCQAFERTKHMPRNMVNRFSGRHGCWRDLAVHLATGLDSRVEPYLSIGGA

SEQ ID NO: 70424 - protein, 57 aa, Zea mays
  Coding DNA Sequence Number=SeqID_28645
DPGATLAHACVNSSDLTAVERSRATRNHNEQSEVPGCVVGDLPEQQPGEGKCPEPGV

SEQ ID NO: 70425 - protein, 135 aa, Zea mays
  Coding DNA Sequence Number=SeqID_28646
MLPFLRITKVMEFPLDTQGSESRLDADERAKQCHVVVDTLHVLARFGPSDPDTASPRYPHGWTHQPSTTSGGLGCLTGCNGQEQEAWDDNLDDPPRDENGTDTARYMISYPNKKKKWVPEFWVLVSDPNIRVFTG

SEQ ID NO: 70426 - protein, 92 aa, Zea mays
  Coding DNA Sequence Number=SeqID_28647
  Subcellular localization annotation: CTP_CleavageSite=37; ConfidenceScore=5.24e-01
MKDATWRALSQYCSLFSRVADSLNLRYYFRRSTGYTRSVIVSPVGEGNPWLSSIVNLVVVLNTELGHTLDELSRARAEIVELRVERAERCHQ

SEQ ID NO: 70427 - protein, 79 aa, Zea mays
  Coding DNA Sequence Number=SeqID_28648
  Subcellular localization annotation: CTP_CleavageSite=56; ConfidenceScore=5.02e-01
MWWCRGRLQRGHKGETPPLAKVGKKNPTTPSSVADVPAPQVGGGVASSSDSTDQSMCSEAEAPQDKRAGKESLICVLCA

SEQ ID NO: 70428 - protein, 52 aa, Zea mays
  Coding DNA Sequence Number=SeqID_28649
  Homolog annotation: Hit_ID=Q75M17; Match level="QueryCoverage=90%, HitCoverage=22%, E-value=1e-07, Identity=66%"; Hit description =Putative GTP-binding protein
DSSLILGDIYRAVSRRGPYEVGAGQGGVKEGKTIDVATGADAAAHKKQCCSA

SEQ ID NO: 70429 - protein, 79 aa, Zea mays
  Coding DNA Sequence Number=SeqID_28650
MAVGEAVCRWAHRTVRNAYTRGYPDTALRAKGSTQTNKKIKDRVQNKGAKETEENPGLAHRTVSGAPGAIDLNSSPSGF

SEQ ID NO: 70430 - protein, 452 aa, Zea mays
  Coding DNA Sequence Number=SeqID_28651
  Gene Ontology: Mol. function=translation initiation factor activity; Biological process=multicellular organismal development
  Homolog annotation: Hit_ID=Q6EU14; Match level="QueryCoverage=62%, HitCoverage=28%, E-value=4e-98, Identity=65%"; Hit description =Putative argonaute protein
MVRKKRTGPGESSGESSGAPGHGSSQRPQATQQGTRGGGQHQGRGGYLGPGVPPSQHPGGGPPEYHQPLDYQGRGGYQGRGGPPSQHPGGGTPPGSQPRGYQGHGGYQGRGGPPSQYPGGGTPPGSQPRDYHGRGGPRPRGGMPQSYRGGHVGGSVVPSVPSGPSRPVPELHQAPDVQHQAPVVATPSSPGAGSSSQPGKAEVSAGQVQQQFQQLAIRNQSLASQAGQMAPASSKSVRFPLRPGKGTHGSRCIVKANHFFAELPNKDLHQYDVSITPEVTSRGVNRAVMAELVKLYRHSHLDGRLPAYDGRKSLYTAGALPFASKTFEITLQDEEDSLGGGQRRQRVFRVTIKFAARADLHHLAMFLAGRQPDAPQEALQVLDIVLREMPTAKYCPVGRSFYSPKLGRPQQLGEDMSSTAFFEALPVIDFVSQLLNRDISVRPLSDSDRVKV

SEQ ID NO: 70431 - protein, 200 aa, Zea mays
  Coding DNA Sequence Number=SeqID_28652
  Gene Ontology: Cellular component=endoplasmic reticulum
  Homolog annotation: Hit_ID=Q2VCI0; Match level="QueryCoverage=77%, HitCoverage=76%, E-value=7e-41, Identity=51%"; Hit description =Translocon-associated protein beta family protein-like
  Pfam annotation: Domain name=TRAP_beta; Domain location=8-198; Score =149.0; E_value=1.2e-41; Accession=PF05753.5; Description=Translocon -associated protein beta (TRAPB)
MARCLALVALLVLGLAAAASAADAPFVVAHKKISLSRPKPGVERVAVSLDLYNQGSATAYDVSINDDSWPTEVFELVTGEKSKTLERLDPKVNDYLDSFSGATASHTYVLETKTQGRFQGSPAIITYRVPTKTALQEAYSTPIFPLDILAERPPEKKFEWAKRLVMKYGSLVSVVSFVGLFIYLVASPSKSSSKASKKRR

SEQ ID NO: 70432 - protein, 96 aa, Zea mays
  Coding DNA Sequence Number=SeqID_28653
MARGEGTRHGEGKRRGRSTRLLGVGAAWGGGSINLQAYLRLLDKGRYEGSSKAKRHKAMALEKKDFSPYSDGQNPRHCKIDQSYLLRGTIGYPAYF

SEQ ID NO: 70433 - protein, 428 aa, Zea mays
  Coding DNA Sequence Number=SeqID_28654
  Gene Ontology: Mol. function=pepsin A activity; Cellular component =endoplasmic reticulum; Biological process=proteolysis
  Homolog annotation: Hit_ID=Q2QN11; Match level="QueryCoverage=93%, HitCoverage=91%, E-value=5e-96, Identity=48%"; Hit description =Eukaryotic aspartyl protease family protein, expressed
  Pfam annotation: Domain name=Asp; Domain location=70-424; Score= -138.3; E_value=1.9e-05; Accession=PF00026.14; Description=Eukaryotic aspartyl protease
MARTLLWLALLCAALAFCTRAAGLRLELTHVDAKQNCSTEERMRRATERTHRRLASMGEASAPVHWAESQYIAEYLIGDPPQQAEAIIDTGSNLIWTQCSTCQPAGCFSQNLSFYDPSRSRTARPVACNDTACALGSETRCARDNKACAVLTAYGAGVIGGVLGTEAFTFQPQSENVSLAFGCIAATRLTPGSLDGASGIIGLGRGNLSLVSQLGDNKFSYCLTPYFSQSTNTSRLFVGASAGLSSGGAPATSVPFLKNPDVDPFSTFYYLPLTGITVGDAKLAVPEAAFDLRQVATGLWAGLVDVAYQALRDELVQQLGASIVPPPAGAEGLDLCAAVAHGDVGKLVPPLVLHFGSGGGDVAVPPENYWGPVDDSTACMVVFSSGGPNSTLPMNETTIIGNYMQQDMHLLYDLDFGMLSFQPADCSF

SEQ ID NO: 70434 - protein, 58 aa, Zea mays
  Coding DNA Sequence Number=SeqID_28655
  Subcellular localization annotation: CTP_CleavageSite=38; ConfidenceScore=5.21e-01
MSVCVLSSFGDNSATGAATPRLVPRFSWGPSPVTSIIRIMWQQGGTGHLNYVVPFSPK

SEQ ID NO: 70435 - protein, 196 aa, Zea mays
  Coding DNA Sequence Number=SeqID_28656
  Pfam annotation: Domain name=DUF588; Domain location=29-166; Score =25.5; E_value=6.7e-05; Accession=PF04535.3; Description=Domain of unknown function (DUF588)
  Subcellular localization annotation: CTP_CleavageSite=53; ConfidenceScore=5.04e-01
MPPQNGAWVAEAQAQRGTKQPAARGRRPGAALLLLLLLLRVGALCASAAAAALAAAATPRRRAPFRFLLAADAIVAVYSALEAAAAAWEAARGATPLPEAVQLWFDFGHDQGFGYLALAGAAAAARDVAGCGRGREGWTSGGGGAGAAACVRADVAVGLGFAGFAFLALAALVTGFRLACFLATGSRFPPTQPASY

SEQ ID NO: 70436 - protein, 219 aa, Zea mays
  Coding DNA Sequence Number=SeqID_28657
  Gene Ontology: Mol. function=protein serine/threonine kinase activity; Cellular component=integral to membrane; Biological process=protein amino acid phosphorylation
  Homolog annotation: Hit_ID=Q2QMB2; Match level="QueryCoverage=48%, HitCoverage=40%, E-value=1e-37, Identity=70%"; Hit description =Receptor-like serine/threonine kinase, putative, expressed
MEALVIGYRLLKFRFSYTFLTRTCLIQGTWLMCSSSRGYLAPEYTIQGQLNKKSDVYSFGVLLLEIVSGRCHTDPRLPVDEQFLLEKVWTLYEFDDLESIIDRTLKRDFDTEEALWLLKVSLVCIPDSPKIKSSMSMVAKMLQGSSIKVEWMQSKLEGCAPSRITAAKAIVKAGIVVMAPQAISVLGGFRPQGKTIDNVVKVVETTLAMQEAGCFSVVY

SEQ ID NO: 70437 - protein, 211 aa, Zea mays
  Coding DNA Sequence Number=SeqID_28658
  Gene Ontology: Mol. function=kinase activity
  Homolog annotation: Hit_ID=Q1KL28; Match level="QueryCoverage=100%, HitCoverage=67%, E-value=2e-66, Identity=58%"; Hit description =Choline kinase
  Pfam annotation: Domain name=Choline_kin_N; Domain location=1-48; Score=44.7; E_value=3.2e-10; Accession=PF04428.5; Description =Choline kinase N terminus
  Pfam annotation: Domain name=Choline_kinase; Domain location=83-211; Score=31.2; E_value=3.1e-09; Accession=PF01633.10; Description =Cholineethanolamine kinase
  Pfam module annotation: Pfam domain module=Choline_kin_N::Choline _kinase; Domain location=1-48::83-211
MVAIENQSQAAVAAEAVAAPASRIPREARRLLHELAAAWADVADCRALEVVPLKGAMTNEVYQARWLTAGPAGQKEEPRAEREVRKVLVRIYGDGVDLFFDREDETLSAADLRDPEISALVASKLREFHNLDMPGPKSVLIWDRLRNWLRTAKSLCPPEEAKEFRLDSLENQITALENECSGDYQWIGFCHNDLQYGNIMIDEETNVLTII

SEQ ID NO: 70438 - protein, 244 aa, Zea mays
  Coding DNA Sequence Number=SeqID_28659
  Gene Ontology: Mol. function=nucleoside-triphosphatase activity; Cellular component=membrane; Biological process=cell division
  Homolog annotation: Hit_ID=Q7X9L0; Match level="QueryCoverage=46%, HitCoverage=99%, E-value=1e-52, Identity=82%"; Hit description =Mosaic virus helicase domain binding protein
  Pfam annotation: Domain name=AAA; Domain location=48-192; Score=-2.4; E_value=0.00032; Accession=PF00004.19; Description=ATPase family associated with various cellular activities (AAA)
MDAAGSAPSPAAVVRERVAVKLRGYFDLAKEEMDKAVRAEEWGLPDDATAHYRNAMRVMLEAPGPRASLMPSPSSERGQVRVYQEKIAKWQAQVEERLRVLGQRSAEGATAAVVPKKIVLSAIKTGATNKPQELDDAVLRRLVKRIYVPLPDPNVRRLLLKNQLKGQAFKLSRYSGSDLRAVCEEAAMMPIRELGPQSILAIKANQLRPLKYEDFKNAMAVIRPSLQKSKWDELEKWNEEFGSS

SEQ ID NO: 70439 - protein, 70 aa, Zea mays
  Coding DNA Sequence Number=SeqID_28660
MQERYIAAHSANGGKEIREEGGQQWRRMEAQEKNGTLPLDSGTREKGRVAAPSDACTKRRGGQQRRRTQH

SEQ ID NO: 70440 - protein, 96 aa, Zea mays
  Coding DNA Sequence Number=SeqID_28661
MNHDIARNSSNHEPYKNKGSLENYLPSTKDDQSTSERKVREALVEVILGFLLMMLLVEEALVGEPYAASRDRKGSSLMSTIEQQQIYMRAMTLILL

SEQ ID NO: 70441 - protein, 136 aa, Zea mays
  Coding DNA Sequence Number=SeqID_28662
  Homolog annotation: Hit_ID=Q2QY96; Match level="QueryCoverage=56%, HitCoverage=26%, E-value=2e-08, Identity=38%"; Hit description =Expressed protein
MEEAEEIVDSVNERNDDLLSAWCEMVNNKVTPLPATPLHILPAITTFCVSGYECYHLRYWTEITSETDPDHPYFKPCEMMQVFSLGLSSPLTHPVNIYGYFSVRDNWEPLRNYLFKRSRADPAMISQASDACSCSE

SEQ ID NO: 70442 - protein, 45 aa, Zea mays
  Coding DNA Sequence Number=SeqID_28663
MREPRARRRFSRASVLTKTDLGRGGMWSFEKTPEVDLVRGDVLCF

SEQ ID NO: 70443 - protein, 367 aa, Zea mays
  Coding DNA Sequence Number=SeqID_28664
  Gene Ontology: Mol. function=glutathione transferase activity; Cellular component=cytoplasm; Biological process=auxin mediated signaling pathway
  Homolog annotation: Hit_ID=Q9FQB5; Match level="QueryCoverage=64%, HitCoverage=99%, E-value=1e-132, Identity=99%"; Hit description =Glutathione S-transferase GST 24
  Pfam annotation: Domain name=GST_C; Domain location=234-333; Score =35.2; E_value=2.3e-07; Accession=PF00043.15; Description=Glutathione S-transferase, C-terminal domain
  Pfam annotation: Domain name=GST_N; Domain location=138-211; Score =76.2; E_value=1.1e-19; Accession=PF02798.10; Description=Glutathione S-transferase, N-terminal domain
  Pfam module annotation: Pfam domain module=GST_C::GST_N; Domain location=234-333::138-211
  Subcellular localization annotation: CTP_CleavageSite=65; ConfidenceScore=5.11e-01
MRTKTSGASSASLDAQLNLERKLHLARTRPRYWLSLESRGGSLSRLWHASSSLKTRLGRNLGRTSASPEFGSSLDIFDRGLPNVIKNSGVTHPTDRDSQQRCDCVNIEESTDPFLGDDRRQLAIFDRPCAVSNRSAAPPVKLITAFGSPFAHRVEVALALKGVPYELVVEDLANKSELLLTHNPVHQSVPVLLHGDRAVCESLVIVEYVDETFHHGAAPGILPADPYDRATARFWADFIDNKCLKPMWLSMWTDGEAQARFVRETKESLGVLDAQLQGKRFFAGDALGFVDLAACTLAHWLGVLEEVAGVHLIAADGEYPALRRWAKEYVSDEVVSRSLPDRDELVAFFTASKERYKSWVRAEVERH

SEQ ID NO: 70444 - protein, 79 aa, Zea mays
  Coding DNA Sequence Number=SeqID_28665
MTCVSASSWCDRNVLIRPVSLTPGRQHGCVASKPIRRRETRWRLSEDRKRVRNHSSSGWDWDASPANHQRPARMEMGST

SEQ ID NO: 70445 - protein, 115 aa, Zea mays
  Coding DNA Sequence Number=SeqID_28666
MDLDVVVEEEERRLENHNEAEDARFFICFDETHGDPIEIDTVAGSGIGTGTCSTSPVESVPDLDAGDSNLNSKKRSKYWNDFDELTKIMNGKKVKNVARCKHLRYIISDNLNHVL

SEQ ID NO: 70446 - protein, 41 aa, Zea mays
  Coding DNA Sequence Number=SeqID_28667
MGFALKTSHGPTDTASFKNMFWFVHQEYFLSEFTRGMQELG

SEQ ID NO: 70447 - protein, 199 aa, Zea mays
  Coding DNA Sequence Number=SeqID_28668
  Gene Ontology: Mol. function=RNA-directed DNA polymerase activity; Cellular component=plastid chromosome; Biological process=RNA -dependent DNA replication
  Homolog annotation: Hit_ID=Q5QN90; Match level="QueryCoverage=85%, HitCoverage=31%, E-value=5e-19, Identity=31%"; Hit description=Leaf protein-like
  Pfam annotation: Domain name=PPR; Domain location=11-45; Score=35.7; E_value=1.6e-07; Accession=PF01535.11; Description=PPR repeat
  Pfam annotation: Domain name=PPR; Domain location=118-152; Score =33.1; E_value=9.9e-07; Accession=PF01535.11; Description=PPR repeat
  Pfam annotation: Domain name=PPR; Domain location=46-79; Score=9.3; E_ value=0.6; Accession=PF01535.11; Description=PPR repeat
  Pfam annotation: Domain name=PPR; Domain location=83-117; Score=22.4; E_value=0.0016; Accession=PF01535.11; Description=PPR repeat
  Pfam module annotation: Pfam domain module=PPR::PPR::PPR::PPR; Domain location=11-45::118-152::46-79::83-117
MKERGICPTVATYTSVIKCLSSCGRLEDGEILLDEMVAEGVCPSPATYNCFLKEYRGRKDVTAALELYNKMKAPGSLTAPDIHTYNILLGMFSKLNRHGTVMDIWSDMCESTVGPDLDSYTLLIHCFCDSQKWREACQFFMEMIEKGFLPQKITFETLYRGLIQADMLRTWRRLKRRVDEEAAKFGDEFKLYHMKPYKR

SEQ ID NO: 70448 - protein, 145 aa, Zea mays
  Coding DNA Sequence Number=SeqID_28669
MWSPGVSLTLSLLCHWGPPVSRYPATGACADMWDTLSATPYPDLCADLWNQDVRRSFTTGVPRMAAACRDPWPRADLSTNLAKSTAAELLQRGERVSERGSREIEGKGANRGVSQVAGDEAKLTEATDTVRARQRRGEEGVGCGC

SEQ ID NO: 70449 - protein, 104 aa, Zea mays
  Coding DNA Sequence Number=SeqID_28670
CAAAARPCGCVTACPPTSGVLPSLASLGALGSPPLARTGDPPDLSLWIEEPPPPCHRSGNRRCDLGSRNRRHRMSGSGSHHHRNRRPGVHLRARSRATAAVARV

SEQ ID NO: 70450 - protein, 671 aa, Zea mays
  Coding DNA Sequence Number=SeqID_28671
  Homolog annotation: Hit_ID=Q1SVS0; Match level="QueryCoverage=47%, HitCoverage=31%, E-value=1e-78, Identity=50%"; Hit description =Bromodomain
  Pfam annotation: Domain name=Bromodomain; Domain location=347-436; Score=112.4; E_value=1.3e-30; Accession=PF00439.15; Description =Bromodomain
MGVYMKPVIDELVYAWKEGGLCMASDPPGDGAGGEEPTPGPAPAVEVLAAPAVPLRPRWATEIKVYTRKHPRKTPKPPPEPAPAPASVPAPALAPAPAPNPLSETLSSIRRSIRRADTVGAAARPDPAAPASVPARGPPGERGAASGDPSSEVNRVGGGISNGHGDDRAAAAAEKSEKARKRRVRSELRRRLAGELDQVRVLSKRLKEAAEALAQQEASEPAPLPMVVLPTQQQVVDAGYVQLQFSAGDMAVPMSAQIAAAVTPARSMLQRRPLTVSVVHNEAFEKVKRTPKANQLYQNSEFLLAKDRIPPSDSHVRKKSKHHKKKHRSLESRGADFDAERRLYSHAFKKSSSLLSRLMKHKFGWVFNKPVDPVALGLHDYFTIIKHPMDLGTIRGRLSRGQYRNPKEFAEDVRLTFHNAMTYNPKGQDVHFMAEQLSGIFEAQWPEIEAEVNYLASCPPLPKKFPPPPIDLHFLERSDSMRHHMALDTNSRPISHTPTYTRTPSMKKPRAKDPNKRDMTIDEKRKLSENLQNLPPEKLDAVVQVIKNKNLSVMQHDDEIEVEIDSMDAETLWELDRFVANYKKNLSKQKRKAERAMLARQDAELRAQRLIQQPQPTPVPQEPVGEKSLKQVAKGEQLPTSASEKNDENRQNVSGSSNSSSSSSDSGSSSS

SEQ ID NO: 70451 - protein, 100 aa, Zea mays
  Coding DNA Sequence Number=SeqID_28672
MEAQAHASCNRRAGCYVRATALPLAPLPHLLDCRTSTATRGNPVHDPAAPAWHDGQYGQKWADSNGGGRRAGAAVTSDRERGIPRKGSFSVKEPGSEPPY

SEQ ID NO: 70452 - protein, 62 aa, Zea mays
  Coding DNA Sequence Number=SeqID_28673
  Subcellular localization annotation: CTP_CleavageSite=23; ConfidenceScore=5.07e-01
MSRYNSLSSISFSFLWEGSQKICTQNYKSLRSPRTLQDNTSAGFWKWTMGFMLHNMDGRTTV

SEQ ID NO: 70453 - protein, 505 aa, Zea mays
  Coding DNA Sequence Number=SeqID_28674
  Gene Ontology: Mol. function=nucleic acid binding; Cellular component= intracellular
  Homolog annotation: Hit_ID=Q6H4V9; Match level="QueryCoverage=88%, HitCoverage=47%, E-value=1e-150, Identity=62%"; Hit description =Putative RNA-binding protein 10
YDAIGWAPKEYNPDDKQNSNFESQKDDGSGTAQSGFVWDEKSGYYYDSASGFYYDGTTGLYYDSNSGVWYSYDQQTQQYVPCTDQSNTKAAGETSSENMISDSICGKKVVISAPAATIKQNKKTSLPDAVQAAANAALAAEKREKEKAKEIKLASKSSLIANKKKMNNVLAMWKQRNQEGQAARIVIDDKEPPNSDDRFNHSHSGTGFSSKSKPNFEFENAMDNSVRQGIASTQMLDSDVKPRPVSNSLGTTVMGVIRGSTRGVIKSDTTFHALSDAGSTDSRTTIITRSNGLMTSPVELVTPAPYKTDVSALVSNTSSGVSGSGKRRFSEAPGQSQYRDRAAERRNLYGSSLRTDAVGLDSTGHYPSRKGPSEIGSMPFPPGVGERSNGEIGNNENYEVITADSAIDESNVGNRILRNMGWQEGLGNIALRTKWWKLKGKTTEAFKERVIKEGTRKKTNNNWEKMATCIRKVALKVRGASEQPKGVEAKLKFFGGGMRKSKGTY

SEQ ID NO: 70454 - protein, 89 aa, Zea mays
  Coding DNA Sequence Number=SeqID_28675
  Homolog annotation: Hit_ID=Q9FUL7; Match level="QueryCoverage=33%, HitCoverage=21%, E-value=3e-08, Identity=96%"; Hit description=40S ribosomal protein S24
MDAHYTAATEAIHLLEFLCLYCQNGLATKVEKSRKQMKERKNRAKKIRGVKKLCHLQANPFCHAVVICSPLIHISFDRAAFAPVNSDCS

SEQ ID NO: 70455 - protein, 41 aa, Zea mays
  Coding DNA Sequence Number=SeqID_28676
MTDDNITQMQEAHKAAICSIRKQHCDCETLYYADGIAKPNK

SEQ ID NO: 70456 - protein, 283 aa, Zea mays
  Coding DNA Sequence Number=SeqID_28677
  Gene Ontology: Mol. function=DNA binding; Cellular component=nucleus; Biological process=regulation of transcription, DNA-dependent
  Homolog annotation: Hit_ID=Q5JMA5; Match level="QueryCoverage=71%, HitCoverage=66%, E-value=2e-60, Identity=58%"; Hit description=Blind- like
  Pfam annotation: Domain name=Myb_DNA-bind_2; Domain location=13-70; Score=-8.8; E_value=0.092; Accession=PF08914.1; Description=Rap1 Myb domain
  Pfam annotation: Domain name=Myb_DNA-binding; Domain location=14-62; Score=37.9; E_value=3.6e-08; Accession=PF00249.21; Description=Myb -like DNA-binding domain
  Pfam annotation: Domain name=Myb_DNA-binding; Domain location=68-106; Score=12.6; E_value=0.28; Accession=PF00249.21; Description=Myb-like DNA-binding domain
  Pfam module annotation: Pfam domain module=Myb_DNA-bind_2::Myb_DNA -binding::Myb_DNA-binding; Domain location=13-70::14-62::68-106
MGRSPCCDKTRVKRGPWSQEEDAVLRSFVQRFGNAGNWIALPQRAGLKRCGKSCRLRWLNYLRPELRHGGFTDEEDRLILSLYGEIGSKLPGRTDNDVKNYWNTKLKKRYLASSSTSTTQGRSPPPPSPPPAPAPPSGDNSSNAAAAADIHHTHQDEKPCLPPTPPALTEFDTTFADDTLLFKSEQLYAELVGLIGKQSSSTGDRDEASTPSSSSSAARPRRLAAQVAALCGPWTVDVRDTAALLSEPTTALLDAYGAADDAFGPALSACSFQDLLASSYVDL

SEQ ID NO: 70457 - protein, 210 aa, Zea mays
  Coding DNA Sequence Number=SeqID_28678
  Subcellular localization annotation: CTP_CleavageSite=16; ConfidenceScore=5.02e-01
GDVGVPPKPRLSLPSVAVAEPEPWGRARRKSFGRGQGGVRALGSGEAEFRRLPGLSPSPSPGVGRSGVRRLPGLSPSPSPGVGRSGVRRLPAEFAVFRVLARVRALGSGGAEFAVFRVLARVRALGSGGAEFAVFRVLARVRALGSGGAEFAVFRVLARVRALGSGGAEFAVAPLARPDCLSDSLCRVALQSEWRRRRCPSVRLASGAVE

SEQ ID NO: 70458 - protein, 80 aa, Zea mays
  Coding DNA Sequence Number=SeqID_28679
MTDQDHGLDQDLLVREVMVGTKEMACMMIIDLTEEGNMIGMIGGMAPSATVVVKGLSMKTNDDDLYQILVQVLHNFLHRF

SEQ ID NO: 70459 - protein, 231 aa, Zea mays
  Coding DNA Sequence Number=SeqID_28680
  Gene Ontology: Mol. function=nucleic acid binding; Cellular component= intracellular
  Homolog annotation: Hit_ID=Q6H4V9; Match level="QueryCoverage=65%, HitCoverage=27%, E-value=6e-72, Identity=61%"; Hit description =Putative RNA-binding protein 10
  Pfam annotation: Domain name=RRM_1; Domain location=66-139; Score =80.4; E_value=5.7e-21; Accession=PF00076.12; Description=RNA recognition motif. (a.k.a. RRM, RBD, or
  Pfam annotation: Domain name=zf-RanBP; Domain location=22-52; Score =21.1; E_value=0.0023; Accession=PF00641.9; Description=Zn-finger in Ran binding protein and others
  Pfam module annotation: Pfam domain module=RRM_1::zf-RanBP; Domain location=66-139::22-52
MGGSSPGQENLTRPTYGPRTVAALCDWICSICGCMNFARRTSCFQCNEPRAEDALPADATGPTHVLVVRGLDENADEEMLRYEFAKHAPLKDIRLVRDKFTHVSRGFAFVHFHSVEDATKALEATNGITLEKNGQVLRVAYAKSTHGPASGGSQSNSLAAAAIEAASFAQQEAEKDLHMVFIDLEKAYDKIPLNVVLWALDKHNVPTKYVGIIKNVYNYVTSVRTRIKLDS

SEQ ID NO: 70460 - protein, 304 aa, Zea mays
  Coding DNA Sequence Number=SeqID_28681
  Gene Ontology: Mol. function=transporter activity; Cellular component= membrane; Biological process=oligopeptide transport
  Homolog annotation: Hit_ID=Q9FU86; Match level="QueryCoverage=87%, HitCoverage=46%, E-value=6e-47, Identity=41%"; Hit description =Putative peptide transport protein
  Pfam annotation: Domain name=MFS_1; Domain location=41-288; Score= -52.0; E_value=0.076; Accession=PF07690.6; Description=Major Facilitator Superfamily
  Pfam annotation: Domain name=PTR2; Domain location=103-304; Score= -70.2; E_value=0.0025; Accession=PF00854.12; Description=POT family
  Pfam module annotation: Pfam domain module=MFS_1::PTR2; Domain location=41-288::103-304
MEMSTQLNSLWPAYALLYARDDVVNNGDGWARTCIYIPHTSSANNCFQFIAYFGVSTNLVNYLKDRLHEGSKAAANGVTNWMGTCAITPLVAAFLADAFLGRYWTVALFLAISVVAYVVLAVSAAAAAQGSAGFYAGLYLLALGSALQPVLSSFGADQFDFDDDDDDHDDERGRRQSSFFNWFYLSINVGSLVGGTVLVWVQSSVGWGLGYAIPVLFSVLAVAAFLAGTATYRRHQPPAGSPFTRVAQVVVAAVRKCGVEVPEDASALHECEDADGMSAIQGSRRLAHTDQFRAAFSSRRLKSL

SEQ ID NO: 70461 - protein, 57 aa, Zea mays
  Coding DNA Sequence Number=SeqID_28682
MAFVPTFSGRIRTDDISLGDLTVGEFVLFRRCPASRMFISLVGVESELSYGSISRMN

SEQ ID NO: 70462 - protein, 293 aa, Zea mays
  Coding DNA Sequence Number=SeqID_28683
  Pfam annotation: Domain name=CDI; Domain location=163-209; Score =60.6; E_value=5.1e-15; Accession=PF02234.9; Description=Cyclin -dependent kinase inhibitor
  Subcellular localization annotation: CTP_CleavageSite=64; ConfidenceScore=5.51e-01
MGKCVRIRGSSKPRAAAAAAASCLTLCSGRRVPPSEASAACSPRTRSRPRRHRGAGLRRWCGAKESAYGGSPRRHRGEGEADARSPRGRVLGVGARQQQLCADDGLGQQHEEEASATMAGDCDDGAGVAKVNKANKHENDECGCRVVGGVASQTPSPSPSPPPPPTETEIEAFFADAELAERRRFAEAYNYDVALDRPLEGRFEWVPLPLTGGRRWMIHWRTLSDELPMLLELCLSTSSATRDLSFSSIVCLLVFWSKLGQAGERRASIRSWYILGGHGSSTGTKSLVVERNA

SEQ ID NO: 70463 - protein, 65 aa, Zea mays
  Coding DNA Sequence Number=SeqID_28684
MAYSMSSMVVQKNLGEEEADEERDGRLLRLIYDIINKGEEKALVVVVWLVAHARGPRTWHFMSLE

SEQ ID NO: 70464 - protein, 487 aa, Zea mays
  Coding DNA Sequence Number=SeqID_28685
  Gene Ontology: Mol. function=DNA-directed RNA polymerase activity; Cellular component=nucleus; Biological process=transcription
  Homolog annotation: Hit_ID=Q2R177; Match level="QueryCoverage=92%, HitCoverage=81%, E-value=1e-136, Identity=57%"; Hit description =Expressed protein
  Pfam annotation: Domain name=RNA_pol_I_A49; Domain location=74-487; Score=15.5; E_value=4.7e-09; Accession=PF06870.3; Description=A49 -like RNA polymerase I associated fa
  Subcellular localization annotation: CTP_CleavageSite=51; ConfidenceScore=5.37e-01
MADLETLATPAPASASTKKKKKHSKKHKAASDAPTNVTVDASLMGGSSYVAAAPVVGYFPSGYDPLTTAAGAESAPGTQLFRHEKHPTWVDLVVRSPGGGHDFVGRSYAGEAAVPQVCDYALGVLDKASGTLRIVPIAGKKILRLEPHLEVQHPAHSQHSEVASEAASAAGNDELKVQDLTMMYGAKTDRDKLKTNSCKTIWNKRNESATIISPVCLCFLGNSVSKRRLQHSLQFQKDNKWRSLKEQRNDPSAYEDIDLGISETNVNANDRQEPVLVRNIPPYDPTADTSENAYLLDEIIPKSMREHLLEIVRHFESGEISSKGYGSFVSKRVHKLKELQGEDKKRFAWILSYIQHLLSLLARNGSMSNRKWKGRNENQISHGPATPQAVYRRLLFMFTEPGSSVMPTEKKELLTNYILVLTLFADDFRSNPSDICEDLKMTRQNLKPYYDQLGCKSVTEGAFKSTFMTLPAPLKFPKEVTRKRRRQ

SEQ ID NO: 70465 - protein, 302 aa, Zea mays
  Coding DNA Sequence Number=SeqID_28686
  Homolog annotation: Hit_ID=Q2R179; Match level="QueryCoverage=94%, HitCoverage=73%, E-value=1e-127, Identity=74%"; Hit description =Expressed protein
  Pfam annotation: Domain name=DUF829; Domain location=24-258; Score =7.8; E_value=1.2e-06; Accession=PF05705.5; Description=Eukaryotic protein of unknown function (DUF829)
MWGRHYWGGGRRPSWAPGGNGAGTGGVVVMFAWLSSQERHVRAYVELYAAHGWACLVCHSDFLTLFFPEKAAMLADRVIGELVKVLKITPVPVVFASFSGGPKGCTYKVLQDEYQLVRDCLCGQMYDSSPVDFVSDLGTRFLLDPSVLKMSEPPRVLSWMTKGIASGLDVLFINKFEEQRKDYWETLYSSVHFGPILILCSEDDQLATYSVVQNFGQHLLELGGDVSLIKWHSSPHVGHYKHHPEEYRAAVTELLKKASTLYASRRQLNGHAVGTSEHTDAPRACIHLQVQPTQRCRELCRS

SEQ ID NO: 70466 - protein, 94 aa, Zea mays
  Coding DNA Sequence Number=SeqID_28687
  Gene Ontology: Mol. function=serine carboxypeptidase activity; Biological process=proteolysis
  Homolog annotation: Hit_ID=Q9XE80; Match level="QueryCoverage=91%, HitCoverage=17%, E-value=2e-15, Identity=60%"; Hit description =Serine-type carboxypeptidase
MNVGNGLTDDRTDMTGMFEYLWHHGLTSDETLVSAGGVPGDLPDPPLAGVQGGVGRGHQGARQTSTATASTRRAPCEKGTPYAYERIFEKGAAA

SEQ ID NO: 70467 - protein, 190 aa, Zea mays
  Coding DNA Sequence Number=SeqID_28688
  Subcellular localization annotation: CTP_CleavageSite=61; ConfidenceScore=5.69e-01
APTPMSSSASTDPSSRLHYGSTSLKADDMTASSPGRSRTASRASVPSLLRRRLEAEGQWVLAQSASRDAAGGGQASQGQDGAAVEEEDSGGGDYDTVLKAHARSGGGDYGAVLKARARSGASDGGCVCFIPSTLVSILHSSRCCHLVLSFTSFWIIGEFSSSLETAGGHWRVDCLLRAKGMPSYFAVLDQ

SEQ ID NO: 70468 - protein, 130 aa, Zea mays
  Coding DNA Sequence Number=SeqID_28689
MSPPLTSSSRPWRHDKEEVMRQLAERRDKEDEEVLRQLAERCDKEDEEVRQQLAERREKAKEKYQSYFTVDRYQNIIRRGEIDMESLLPSPQAPIPSPPVTRPTLDTSRQSVGHLGQSGYIVDHPMYFAG

SEQ ID NO: 70469 - protein, 128 aa, Zea mays
  Coding DNA Sequence Number=SeqID_28690
MVIRQPIKAPCLAHRGWSGVSARTVWSPRGQSGSEQRPQQKGEIQVLHGEEDLCAVADRPATRKEGAAPTPRSRTVRTRDTDRPRSRREHTARWFISSDWCTGRTSTQKLYSGGSKHIYTGVFQYRQC

SEQ ID NO: 70470 - protein, 109 aa, Zea mays
  Coding DNA Sequence Number=SeqID_28691
  Subcellular localization annotation: CTP_CleavageSite=10; ConfidenceScore=5.06e-01
MGRGNSFAFCLSLVVSPRLLLPPLRNDRQQTQTDAGACTVVTCLPTLGVQVGSGNCDQQFSTKEELESHQVAASIQSNDSKPIGRLGLIDWNGTGREEGESSASISSLQ

SEQ ID NO: 70471 - protein, 628 aa, Zea mays
  Coding DNA Sequence Number=SeqID_28692
  Gene Ontology: Mol. function=voltage-gated potassium channel activity; Cellular component=integral to membrane; Biological process=potassium ion transport
  Homolog annotation: Hit_ID=Q652U9; Match level="QueryCoverage=94%, HitCoverage=95%, E-value=0.0, Identity=57%"; Hit description =Putative potassium channel
  Pfam annotation: Domain name=Ion_trans; Domain location=87-289; Score= 87.6; E_value=3.7e-23; Accession=PF00520.21; Description=Ion transport protein
  Pfam annotation: Domain name=Ion_trans_2; Domain location=198-295; Score=53.2; E_value=8.9e-13; Accession=PF07885.6; Description=Ion channel
  Pfam annotation: Domain name=cNMP_binding; Domain location=389-467; Score=31.3; E_value=3.4e-06; Accession=PF00027.19; Description =Cyclic nucleotide-binding domain
  Pfam module annotation: Pfam domain module=Ion_trans::Ion_trans _2::cNMP_binding; Domain location=87-289::198-295::389-467
MARTPGADQAGSWALPSIGRRGGGVSGDLLPAFGELSPTGGNSNTINPYDCRYRWWQSFLIGPVLYSAWSSPFELALDRAATTPVVVASLVMDAFFAADIAVSFFVAYFDRSANLFVDDRRKIATRYLKRPSFAMDVASTIPFNVIYQLVSGRSTGWFRYLNLLRLWRLQRVSKLFARLEKDIRFDYFYTRLIKLCGVTLLALHSSACIFLWMAFHHGDREHTWLGSQVRDFADGSVWVNYTYAVYWSITTLATVGYGDLHAVNPGEMVFATCYMLFNIGLTSYIIGNTTNLVVHAATNTFKMRDMVRRVSMFGSVNRLPPELREQMMASAQLRFSTAEVIQQQLLSDLPTALRSRVAHHLFRDAVQRCYLFQGVSDDLVVRLVSEMRAEYFPPQADIILQKVTSTACYIIVSGSALVMKIGPHGMAGEMGVILGVPQPFSVRSRRLTQALCISHSHLLGILRSNTADANTVCANFVKQLKSLKELQVAEDAPFFEETFSKTSMDELQIGSIFQQLLNDGDAARMIPRQNQKATFGTEQHEETAPCMLPRRQGGLRVVIHDRFPSDGAEKNLGHAAGKLVLLPDSLQELMKVAEVKFGKAPRRVLTVEGAEVDDVAVLRDGDHLVLCC

SEQ ID NO: 70472 - protein, 257 aa, Zea mays
  Coding DNA Sequence Number=SeqID_28693
  Subcellular localization annotation: CTP_CleavageSite=50; ConfidenceScore=5.22e-01
MVTIKTGVRGIKNMHTSAQSHQQHILSGTIIRGTLKTPNLSWKLRLARPRARTRARSQKTTNSASPDPGLGLGLGPRRRRTPPRPTQARTRARPRKTTNSASPDPRARTRAQPRKTTNSASPDPRARTQPWPQPTVSASPDPGLGLGLGPGRRRTPLRPTPGLGLGLSPGRRRTPHHPTPGSDSALASADGLRLARPRGSDSTSTSEDRLDLDLGGASTSPNPGLGSTTSQEAPSLSCPKLTQATGNKTGVPSGSPR

SEQ ID NO: 70473 - protein, 385 aa, Zea mays
  Coding DNA Sequence Number=SeqID_28694
  Gene Ontology: Mol. function=calcium ion binding
  Homolog annotation: Hit_ID=Q5JMC7; Match level="QueryCoverage=94%, HitCoverage=95%, E-value=1e-107, Identity=73%"; Hit description =Violaxanthin de-epoxidase-related-like
  Pfam annotation: Domain name=VDE; Domain location=162-365; Score= -37.9; E_value=0.0049; Accession=PF07137.2; Description=Violaxanthin de-epoxidase (VDE)
  Subcellular localization annotation: CTP_CleavageSite=77; ConfidenceScore=5.73e-01
MATALPASASAACLLQLSRRGLPGTSSVLSPLRTATFRWHGACNVACSCSPGPRPAVPAERRDGVAGHATSPEGTVRIVAVVGEGSISPIKDAPWEEVMRHTADRLKWVDEGFEMLVFTDNLVGHDNLRKELLSHCDMLVNVAITNQDAVQWLINNSKHISNKNNCLDLNAEIPSKPNVMPLTMFREQKLSHEIAEDLFVGWLDSMEWSWRVAAGQNPAYDQFPCQYQLFYRGKAKGSFWYEPVFQVKTLEGELVWRRRRYRVRRASTPGTFYFSVLDNGVISKEYWTIVDVAEDFSWGLFHYHGAAQAAGLSYTGAVLVTPDGSYPDLEDPRLASALENCAIKKWELYTVDNCSCMGAPLGTPEGSKLHHQISPGKESSVLQRR

SEQ ID NO: 70474 - protein, 76 aa, Zea mays
  Coding DNA Sequence Number=SeqID_28695
MDKAVRAGCIFMKRPGVMVPDDIIPDVLAALDTSSKAPASEIKEFCTGEVRSQVSDDVIGYLESEDNFLDELYRFG

SEQ ID NO: 70475 - protein, 197 aa, Zea mays
  Coding DNA Sequence Number=SeqID_28696
MENIKCIGTCRIRVVDRYRRKTAKKHSRHQISEQLLSSIQYLTDLAVSTDGDVGKFTDTVKEFAVAKTGRGTGGQRPPPPKCSRKFSLQLRLLGASAGDGLTAECCLLVCSSAVCSPAPARHFGFGSFQFQFNKDMKSQKRLRTTLHRSFKPVDSSTLVAADVHAETESPTNPTNATATAQVKADVATALPETKDSN

SEQ ID NO: 70476 - protein, 374 aa, Zea mays
  Coding DNA Sequence Number=SeqID_28697
  Gene Ontology: Mol. function=zinc ion binding
  Homolog annotation: Hit_ID=Q338Y6; Match level="QueryCoverage=94%, HitCoverage=98%, E-value=1e-102, Identity=80%"; Hit description =Expressed protein
  Pfam annotation: Domain name=DUF641; Domain location=39-176; Score =217.4; E_value=3.3e-62; Accession=PF04859.3; Description=Plant protein of unknown function (DUF641)
DDWANAASLRHLFAGGDDHPPGSKDSQNYDNNNQRVHPQPIDDNMNQNGDSMDTVIGRIFNNISSLKSAYIQLQEAHTPYDPDKIQEADKLVIEELTRLSELKHAYREKHPKPIAASPQDSRLLSEIQEQQNLLKTYEVMVKKFQSQIQSRDTEITHLQQQIDEAKLRKSKLEKKLKQRGLLNRESEESDEEENYFSIELTPSLFTSAVDNAYQSIHDFSKPLINMMKAAGWDLDGAASAIEPGVNPDSVFGKFCRSKYLSLVHQKMEGSFFGNVDQRNYVMSGGHPRTPFYQAFLKLAKSIWLLHRLAHSFDPKAKVFQVKKGSEFSDIHMESVVKDIILEDVAERPKVGLMVTPGFLIGTSIIQSRVYLSGA

SEQ ID NO: 70477 - protein, 797 aa, Zea mays
  Coding DNA Sequence Number=SeqID_28698
  Gene Ontology: Mol. function=small protein activating enzyme activity; Cellular component=cytoplasm; Biological process=protein modification process
  Homolog annotation: Hit_ID=Q2RBM4; Match level="QueryCoverage=99%, HitCoverage=74%, E-value=0.0, Identity=80%"; Hit description =Ubiquitin-activating enzyme E1 2, putative, expressed
  Pfam annotation: Domain name=ThiF; Domain location=230-376; Score =103.2; E_value=8e-28; Accession=PF00899.11; Description=ThiF family
  Pfam annotation: Domain name=UBACT; Domain location=519-560; Score =4.3; E_value=0.0025; Accession=PF02134.11; Description=Repeat in ubiquitin-activating (UBA) protein
  Pfam annotation: Domain name=UBACT; Domain location=596-668; Score =123.9; E_value=4.6e-34; Accession=PF02134.11; Description=Repeat in ubiquitin-activating (UBA) protein
  Pfam module annotation: Pfam domain module=ThiF::UBACT::UBACT; Domain location=230-376::519-560::596-668
MQGSYSFTLEEDTTSYGTYFRGGIVTQVKPPKVLKFKTLKDAIKEPGEFLMSDFSKFDRPPLLHLAFQALDKFRSELARFPIAGSDDDAQKLIDLAISINETLGDSKLEEIDKKLLQHFASGSRAVLNPMAAMFGGIVGQEVVKACSGKFHPLYQFVNIKGHLSRFSLKRTSIRPSVAVYPKFTQKHCFALFRTVRRVEFKIWFFYFDSVESLPVEPLEPSDLKPENSRHDAQISVFGAQLQKKLEQSKIFHGWFWGSWIQNGKLTVTDDDVIEKSNLSRQFLFRDWNIGQPKSTVAATAAMAINPELHVEALQNRASPETENVFNDAFWESLDAVVNALDNVTARMYIDSRCVYFQKPLLESGTLGAKCNTQMVIPHLTENYGASRDPPEKQAPMCTVHSFPHNIDHCLTWARSEFEGLLEKTPTEVNAFLSNPGGYATTARTAGDAQARDQLERVIECLETDKCETFQDCITWARLKFEDYFSNRVKQLTFTFPEDAMTSSGAPFWSAPKRFPRPLEFSSSDSSHLNFLLAASILRAETFGIPIPEGVKIETDEKATSLSSASVDDAAVIEELIAKLQAISKTLSPGFRMNPIQFEKDDDTNFHMDLIAGFANMRARNYSIPEVDKLKAKFIAGRIIPAIATSTAMATGLVCLELYKVLAGGHKVEDYRNTFANLAIPLFSMAEPVPPKTMKHQDMSWTVWDRWTVTGNMTLRELLEWLKEKGLNAYSISCGTSLLYNSMFPRHKERLDKKVVDVAREVAKVEVPSYRRHLDVVVACEDDDDNDVDIPLVSIYFR

SEQ ID NO: 70478 - protein, 210 aa, Zea mays
  Coding DNA Sequence Number=SeqID_28699
  Pfam annotation: Domain name=zf-C2HC_plant; Domain location=31-86; Score=51.4; E_value=3.1e-12; Accession=PF07567.3; Description =Protein of unknown function, DUF1544
MESTGSALASVPVDSNTDPMADPKRRAKSNDPRWNYGYWIEIGNRDKVTCNLCKTVTMGGIKRLKEHLAGGYADTLMCSKTTTEIRKEVKAYLDKNKRTRPTFLDDDDHDGQGQQGEEDSTTSMQQPSSGTTAKRKRAAFQFRTTAQPQTSNKEKKKGKLQPCFEELLNKLWMRGAPQGHTTKPPWKHALSLRLTKIMSTSNELCSSMSV

SEQ ID NO: 70479 - protein, 263 aa, Zea mays
  Coding DNA Sequence Number=SeqID_28700
  Gene Ontology: Mol. function=membrane alanyl aminopeptidase activity; Cellular component=cytosol; Biological process=proteolysis
  Homolog annotation: Hit_ID=Q9SN00; Match level="QueryCoverage=79%, HitCoverage=26%, E-value=6e-55, Identity=49%"; Hit description =Aminopeptidase-like protein
  Pfam annotation: Domain name=Peptidase_M1; Domain location=54-263; Score=-26.8; E_value=1.8e-11; Accession=PF01433.10; Description =Peptidase family M1
KKLEKTAADSLICQESGPLSYSIHVTQDANVETASPPPPALAGSAAQFRGQAQLPRFAAPRRYDLRLRPDLVTCTFSGTAAVTVAVSAPTRFLVLNSADLSIDSASIRFRDLAPKEVVFFADDEILVLGFSKDLVLGEGVLSMKFNGTLNDQMRGFYRSKYQYKGKMKNMAVTQFESVDARRCFPCWDEPAFKAKFKLTLEVNVGMVALSNMPIANQTVAGPIRTVHYVESPLMSTYLVAIVIGLFEYIEGVTPEGTLGVSSY

SEQ ID NO: 70480 - protein, 35 aa, Zea mays
  Coding DNA Sequence Number=SeqID_28701
MAEQRRGRAAECVGDNPKEEGNVQQTKSCCLRCEM

SEQ ID NO: 70481 - protein, 463 aa, Zea mays
  Coding DNA Sequence Number=SeqID_28702
  Gene Ontology: Mol. function=membrane alanyl aminopeptidase activity; Cellular component=extracellular space; Biological process=proteolysis
  Homolog annotation: Hit_ID=Q6K4E8; Match level="QueryCoverage=99%, HitCoverage=60%, E-value=1e-166, Identity=64%"; Hit description =Putative puromycin-sensitive aminopeptidase; metalloproteinase MP100
KALASYIRKFAYSNAKTEDLWAVLEENSGEPIKNMMTTWTKQQGYPVINAKLQGNYLELEQAQFLLDGSSGPRMWIVPITADCGSYYTQKKILLKGKSDRLDIRDIASQCGNQEKGGNFWIKLNINQTGFYRVQYDDKLAAALQNALQAKKLSVMDKIGIVEDSLALSMACKQTLTSLLRLLYAYREEADYSVLSHINTASLSIAKISVDATPGLVGDIKQLLIKLLLPPAVKLGWDLKNGESHLDSLLRPVLLVALVKLGHDKSINEGARRFSIFVHDRNTSLLRPDTRKAAYLAAMQNVTASYRSAYNDLLKVYRESDEAEERGRVLSTLCFCKDENIVLESLNLLFTNEFRKQDAYYVLQGLDVETRDTAWVWLKDNWDRVTRKYGDTQAGGFIRYVVTLFTSNEKAAEFSRFFATRKKPEFERTLKQSLENVRISARWIQGIKSEPRLAQTVQELLRRP

SEQ ID NO: 70482 - protein, 115 aa, Zea mays
  Coding DNA Sequence Number=SeqID_28703
MAPPCGVLAPPVRLAGVADKLFAVDHEICGSDSIRGNVSAENLVAIDLWMDAQESIQYSGIWAVDCVSWVRITYRSVKPGSNLARPIWIVWFRRARTPSPRAFAKETLENQLINL

SEQ ID NO: 70483 - protein, 110 aa, Zea mays
  Coding DNA Sequence Number=SeqID_28704
  Subcellular localization annotation: CTP_CleavageSite=33; ConfidenceScore=5.54e-01
MVGRPPPPPSSAAAGAPFPLLPLSYRATLAMPLAAMYGPARATPAVASCPPSPHPCALLRMTLQPSSPPPGQPLWRLASGPRVLLVLLSRSRRLLIPSSASTPRPTIVSS

SEQ ID NO: 70484 - protein, 81 aa, Zea mays
  Coding DNA Sequence Number=SeqID_28705
MDSQAPTNSDGDQGRYNEEQARVWAETVEEKLGHAGSSQEYPKIIDSLKRALLGLFWASPDRSGGAPDQIRRRLGLGLLAA

SEQ ID NO: 70485 - protein, 249 aa, Zea mays
  Coding DNA Sequence Number=SeqID_28706
  Gene Ontology: Mol. function=DNA binding; Cellular component=nucleus; Biological process=DNA integration
  Homolog annotation: Hit_ID=O24587; Match level="QueryCoverage=95%, HitCoverage=22%, E-value=1e-105, Identity=78%"; Hit description=Pol
  Pfam annotation: Domain name=rve; Domain location=50-213; Score =135.1; E_value=1.9e-37; Accession=PF00665.16; Description=Integrase core domain
HVGMKNLHKLLKGEHVLGLTNVCFEKDRHCATFQEGKQVKGGHHPKNVITTSRPLELLHMDLFGPVAYLSITRSKYGLVIVDDYTCFTWVFFLQDKGKTQGTLKRFLRQAQNEFDLRIKKIRSDNSTKFKNLQVEEYLEEEGIKHEFYALYTPQQNIVVERKNRTLINMARTMLEVYKTPDQFWAKAANIVCHTINRLYLHLLFKKMSYKLLTSNKPNSSYFRVFGSKYYILVKKGRNSMIKDALKDPD

SEQ ID NO: 70486 - protein, 156 aa, Zea mays
  Coding DNA Sequence Number=SeqID_28707
MEIASVPFVTRMNRFNTCFLLVTMPSSCGGVAAICWAIWISRNDLVFDKKPVLTYLQYAANCWGIESLTRWKRNKAYSSSYDGEMDRKEPHWQLNVVVASSAWPYCLGLVVVDEGDRLGVRLLASPTRRRPIRPVVTLAVERGRYFLLMCAKPRWG

SEQ ID NO: 70487 - protein, 380 aa, Zea mays
  Coding DNA Sequence Number=SeqID_28708
MEAEVKTIVPDDVLGKAEARRQHDTAEITGRLHTIDGHMQMGHASDYHELALTVACRSAPLGSASTISDEWVPVRQVRSVSLAHVLLTGSLETRENRLPTATAATSPFCMPSLPSSPSFRVCRRHCPIRGRCHQQQPWRCCPRPRLTQVHALLVSLLSFLPDHPLCDHLVTVVFAFASSLTVPISRDHEDLHLAASYTCSSSPPTAPTTCPTTPRVLACDACAPSMPRYQVSLLRSSGTSTRSPARQSYLLLLASATRHAVRLGRLASSASILAVAGLPIPFIIPSHLLFDHGDDGHSCQGRLGYAVVGTGGAAHIQVQFKGCCIRPTSCCYTRYSLPCSSSRMPLELRMSACEVSPSMKIGVVIFSGSGRMYEYSSPTW

SEQ ID NO: 70488 - protein, 73 aa, Zea mays
  Coding DNA Sequence Number=SeqID_28709
MAWAKMWSHGRTRGGQATSTKSGSLSHRCRGEHGWFEPSELVPFEDRFTEKVAHTEAVDEVASPHRAGAALPV

SEQ ID NO: 70489 - protein, 47 aa, Zea mays
  Coding DNA Sequence Number=SeqID_28710
MRNEKDRTRCRSNLALVLVFNQPISSPHFGLTSSRDVLGGLPTSRQP

SEQ ID NO: 70490 - protein, 302 aa, Zea mays
  Coding DNA Sequence Number=SeqID_28711
  Gene Ontology: Mol. function=exonuclease activity; Cellular component= intracellular
  Homolog annotation: Hit_ID=Q109P8; Match level="QueryCoverage=68%, HitCoverage=77%, E-value=1e-63, Identity=60%"; Hit description =Exonuclease family protein, putative, expressed
  Pfam annotation: Domain name=Exonuc_X-T; Domain location=7-170; Score= 79.7; E_value=9.1e-21; Accession=PF00929.14; Description=Exonuclease
MTMRDEIVFFDVETTAPSAAGPGRWWLLEFGAILVCPRKLVEVGSYDTLIRPGDLSAVSRRFTDDVEAAIMASAPPFKDVADKIFDILDGRVWAGHNIQRFDCPRIREAFADIGRPAPEPVGVIDSLNVLAAHFGRRAGDLKMATLATYFGIGKQKHRGLDDARMNLEVLKHCATVLLLESSLPDVLCAQQSRRAAVTRRTSQAQTIKPPPKHAVHHHLRPGGVVMSQTKLPFTAVTATPAPAAATPCGKRNSLGKVVARAVTAATTAPLSSSSSTSTNTRRPVTATTPFHMILRHSRAILR

SEQ ID NO: 70491 - protein, 214 aa, Zea mays
  Coding DNA Sequence Number=SeqID_28712
  Gene Ontology: Cellular component=peroxisome
  Homolog annotation: Hit_ID=Q657X8; Match level="QueryCoverage=92%, HitCoverage=41%, E-value=1e-15, Identity=29%"; Hit description=PEX14- like
PRFSWYQAFLAAGLLLGFGASAAVFIKKLFLPRLKSWIRNVVAEGNGTEGNQLKPRIDDETADAVKASASAVSAIAKTNQQLLASKDEGFNLYRPFRCFFLANGSTHSNNVILFLLAEKKILVTLTQALDSQAKELKSLTDSIGHTREPINITRDDRFSQYRPLEDHAPTVIRNAVRSSFAPAPAEPTAGSFSRSYGEPSFFHAYEQLTSEDQL

SEQ ID NO: 70492 - protein, 195 aa, Zea mays
  Coding DNA Sequence Number=SeqID_28713
  Gene Ontology: Cellular component=peroxisome
QPMSTAQRSDRSSGSKPWEMHSYSQQRPGYGSNSQLSDDGSYSDAQDSYAPSYHQNGKAPDFQADEPRPLTYNTGVEERPPPQRRWVPPQPPGVAMPEAAAAIRQPKALPKQPSSDASEAAGEMQVNGSSASDAVTEVPVNGATASDAGRRSAKNENESIQVFSRGYFLRLPGMRMNGGVKGGIPPAKEHYPDRG

SEQ ID NO: 70493 - protein, 62 aa, Zea mays
  Coding DNA Sequence Number=SeqID_28714
MGSPPAGSPQTGSDLSHNGSTTNDKTGAEAEGWPRLPKEPRSAGGSADNIGNEGRGRGDGRC

SEQ ID NO: 70494 - protein, 185 aa, Zea mays
  Coding DNA Sequence Number=SeqID_28715
  Pfam annotation: Domain name=PRA1; Domain location=16-168; Score =89.0; E_value=1.4e-23; Accession=PF03208.9; Description=PRA1 family protein
MDWSAVTAEDLVDALREVDWSMPPRPVPEFFSRFTVPRSYSKWTSRLKCNLYYYRTNYFILIMFILGMGFLWKPVAIVAAFMTGLSIAFLNDSFAVTFNEKVTRTVRQFSPHLAAKLRPPITCANTGSGIKFHLTIVFKTDSTCFLGCSELYTLVDLMQSSHSPLGTSHCSIWFMGNEGVWCRCL

SEQ ID NO: 70495 - protein, 205 aa, Zea mays
  Coding DNA Sequence Number=SeqID_28716
  Gene Ontology: Mol. function=beta-amylase activity; Biological process=polysaccharide catabolic process
  Homolog annotation: Hit_ID=Q10RZ1; Match level="QueryCoverage=67%, HitCoverage=25%, E-value=5e-47, Identity=67%"; Hit description=Beta -amylase, putative, expressed
  Subcellular localization annotation: CTP_CleavageSite=25; ConfidenceScore=5.55e-01
MALNLSHQTGAAVAAAPAAPRTAVVAAAATAPRSAIVAAAATVAPPPASAPTPAPALQLQTKTVDPAAAQAPLACQALVEATPEAEHADVAAELRSRAGVPVFVMMPLDTVRKDDNSLNRRKAVEASLAALKSTRVEGIMVDVWWGIAEADGPGQFNFNGYMELMEMARKTGLKVQAVMSFNQCGGNVDDSVTVKLLELEAFQLD

SEQ ID NO: 70496 - protein, 70 aa, Zea mays
  Coding DNA Sequence Number=SeqID_28717
MAFHGAPGGGSPRLGEVGIAALMAGWWRSAWEGDRVGKGGDGVMARVSGDSGMVAQGVGKGNACGRAVMA

SEQ ID NO: 70497 - protein, 225 aa, Zea mays
  Coding DNA Sequence Number=SeqID_28718
  Homolog annotation: Hit_ID=Q8L4K4; Match level="QueryCoverage=40%, HitCoverage=18%, E-value=6e-16, Identity=56%"; Hit description=SET domain-containing protein-like
  Pfam annotation: Domain name=KH_1; Domain location=14-79; Score=50.4; E_value=5.8e-12; Accession=PF00013.19; Description=KH domain
MESASRSVMFVFSLTGTVVNLLLVGVIIGKAGETIRYIQLQSGAKIQVTRDHEAEPGALTRQVELSGKLERISKAEQLIKEVLAEVIPLHLPAGDTSTERTVHIDGTQEQIEAAKQLISEVTSEKEPLILSGELDVDLDDFSLEKYLSAKTLASSRSFQIDSYHGSGMVSLADLWLKYSDDVEEEDDRSDASADDKPTTKNPTSSPLDYIFTIICIFISRIEIYD

SEQ ID NO: 70498 - protein, 155 aa, Zea mays
  Coding DNA Sequence Number=SeqID_28719
  Homolog annotation: Hit_ID=Q84T68; Match level="QueryCoverage=26%, HitCoverage=17%, E-value=1e-14, Identity=88%"; Hit description =Putative exosome component
  Subcellular localization annotation: CTP_CleavageSite=49; ConfidenceScore=5.39e-01
MPSLPLALPPAPALAPLPRRQGPRLLTDRSSLPTDRLVPAILSCKRRATAMQRGALLTRAVVARLYLVVLNIDTHKCWARDYYNNYAQFCWVGDSVHCASAIRSVACAGRQEREYEMTLKRTLQSICLLTVHPNTTTSVVLQVVGDDGSISFHMM

SEQ ID NO: 70499 - protein, 79 aa, Zea mays
  Coding DNA Sequence Number=SeqID_28720
MSTPRNNEDPLLEELLVTTTGEEVDPKILDLAMKITEKMFLKVKEEDAKKKGEEEESRRKAEEDKGKGKIEYNDDFVEL

SEQ ID NO: 70500 - protein, 66 aa, Zea mays
  Coding DNA Sequence Number=SeqID_28721
CSLSLGTEPGIEDERSALGAGWEEDCASARTAVLGLGAWEEPEWSLEEDAVGGRPVGRLGATELGT

SEQ ID NO: 70501 - protein, 221 aa, Zea mays
  Coding DNA Sequence Number=SeqID_28722
MERYRGSVDGEHEFRRVSTDGGTAGSVDGELRNGESARERGRARGGREEGTRPNFIGRGRWGREEKQRAAIDGIHGSSMRERETDALKFPNTEEERSRGWGFGLQLGRRSGRCDIPVAGEGVGHRAVLGRAPGLARRGASVQGQGEVLLGSWRQGGSGRVLTRVQSAACCLGVPGGRSACRGTTGEGASGSAAPGGCAAGRERGEEKRWGRVGRPGGRSGG

SEQ ID NO: 70502 - protein, 39 aa, Zea mays
  Coding DNA Sequence Number=SeqID_28723
MTATIKRTTRVIGWYHSHPHITVLPSHVVKMLKRLEKSK

SEQ ID NO: 70503 - protein, 73 aa, Zea mays
  Coding DNA Sequence Number=SeqID_28724
MPKLRLIFTVILVVSLLFSGQTAATQASDADLSEAVEVERRSGKVLTYVQDYDYGGSNPKHDPRRKPGSGHPP

SEQ ID NO: 70504 - protein, 88 aa, Zea mays
  Coding DNA Sequence Number=SeqID_28725
MTDVYLLLGARAYWLLRRGHAMALLGARRDGRHTHLQRGARVCCACLRAVEKRGQSGSEPSARILQLLLENGIRVNELTRIEVALVVP

SEQ ID NO: 70505 - protein, 159 aa, Zea mays
  Coding DNA Sequence Number=SeqID_28726
MQRNPQSMSTAMQGMSTSHESCKPIFPLTSLIAQPPELPLFHQGVSQPPHGGSARWGLRAAEPPPDLTGSMHTGSQAIYTMNSKSQIHSKFHTVIPVKFSPLKIGKRMDPLVNPLIRRLTVKQWREHMSDLVWKCEENVGAGFKCKYYRETKSGGVVSN

SEQ ID NO: 70506 - protein, 143 aa, Zea mays
  Coding DNA Sequence Number=SeqID_28727
  Homolog annotation: Hit_ID=Q6QP54; Match level="QueryCoverage=49%, HitCoverage=27%, E-value=3e-08, Identity=48%"; Hit description =Putative kinase
  Subcellular localization annotation: CTP_CleavageSite=15; ConfidenceScore=5.10e-01
MASFLHIGRNRGPICAVVNWSSSIACPIFSRSRLKAKQSQIAENSENSAACAAPTAVPLDRVRLTAAKSNLDAGRRTPPRPTPGLGLSLDLGRQTPPRLTPGLGLSLDLGQRTPPRSTPGLGLNLDLGGVIASLDLGLGPTTS

SEQ ID NO: 70507 - protein, 65 aa, Zea mays
  Coding DNA Sequence Number=SeqID_28728
MEMHCGLTLGYMVETLIKSKYMANQKVKDYLSRLGGDWSAVNTLEDVLAIRLKLVGGREGSITLE

SEQ ID NO: 70508 - protein, 110 aa, Zea mays
  Coding DNA Sequence Number=SeqID_28729
  Subcellular localization annotation: CTP_CleavageSite=44; ConfidenceScore=5.11e-01
MGIDSHLSTLCLHSITKILRNGPRAHFPFSRTEVRKTREFPHPCAPSSWSHRASRADPSPRPLPIFIVYLIHMFGAMLIFAILYHYVNWNMENHPGKQCYHKGLWTPLAD

SEQ ID NO: 70509 - protein, 133 aa, Zea mays
  Coding DNA Sequence Number=SeqID_28730
MERPGDLKAAGTRTRAVHDGFACADVSASHFVLIGTWLASYRNPGRPINKQIGGACGCLHEKRPNGAGVFAEQFGRGFASGCTPARRQACDSRLSDGRGPRGGYIRSDRHLTLKIQTGKYYAAVSPGSFLLGL

SEQ ID NO: 70510 - protein, 330 aa, Zea mays
  Coding DNA Sequence Number=SeqID_28731
  Gene Ontology: Mol. function=heat shock protein binding; Cellular component=cellular_component; Biological process=protein folding
  Homolog annotation: Hit_ID=Q688X8; Match level="QueryCoverage=98%, HitCoverage=91%, E-value=1e-124, Identity=71%"; Hit description ='putative heat shock protein, hsp40'
  Pfam annotation: Domain name=DnaJ_C; Domain location=206-328; Score =62.8; E_value=1.2e-15; Accession=PF01556.9; Description=DnaJ C terminal region
MKVGHPEQETPNNKKRRPRTKFKQISEGIRFAVQVLSDPQKRAVYDQYGEEGLKGQVPPPGAGGAGSTFFSTGGDGPTVFRFNPRNADDIFAEFFGGSSPFGGKNGSGMPGMRAGGSRFSSSIFGDDMFGSAFGGGGPDGHGMHTGGRAVKAPAIERKLPCSLEELYKGTTKKMKISREIADASGKTMPVEEILTIDVKPGWKKGTKITFPEKGNETPHTIPADLVFIIDEKPHPVFTRDGNDLVVTQKVPLAEALTGHTARLATLDGRILTVPISSVIHPGYEEVVRGEGMPVPKDPSRKGNLRIKFDIKFPARLSADQKSGVKRLLGQ

SEQ ID NO: 70511 - protein, 395 aa, Zea mays
  Coding DNA Sequence Number=SeqID_28732
  Homolog annotation: Hit_ID=Q5JML5; Match level="QueryCoverage=98%, HitCoverage=77%, E-value=6e-32, Identity=28%"; Hit description =Putative calcium-binding protein
  Pfam annotation: Domain name=DUF1421; Domain location=1-393; Score= -49.8; E_value=4e-05; Accession=PF07223.2; Description=Protein of unknown function (DUF1421)
MPIVQKSVQAVQEKQELAETQKEMTKLQIVHEDSAQKSEGTAPSVFMNRENEVALVPLHQVNAVQSPPVQFQSCSGLILQQLMPVQDQQRSNQTAVYCMRGQSHLEHRQAQMFEAAGQSLQTHTRKTQPPTVVEVSQVTSQAPEFYPHPQHQWQHQTGQQVFSQARQPQPHVLQQQYSNIQQGPAQMVQLQTSSPHAHSTPQVTVVYPPYGPHQSACGNAEARSGGIVVPPSYSTISSSHRKHHEAAPVYVQSNTVSVPLAEQHQQLHSLGNGSFVPQPSKVSPCGLASYTVQGNAQTYSPAYGSPSSNPATIVAVLNQQAHGSSPMVLHHLGPQSVLNHPIDIAEKVTRMGYSKDQVEGLALRMVAAGQPADHNPLHDRLSSVSHGVAPHAWSG

SEQ ID NO: 70512 - protein, 88 aa, Zea mays
  Coding DNA Sequence Number=SeqID_28733
MEASAPCAREEGLELGDGALAAAVWERRQGDGERRDDLMRHRWNSIGRRRGRLALVERSGCRPIGCSAGIGEETSVNDWLRRVTMLIS

SEQ ID NO: 70513 - protein, 105 aa, Zea mays
  Coding DNA Sequence Number=SeqID_28734
  Subcellular localization annotation: CTP_CleavageSite=30; ConfidenceScore=5.09e-01
MVDYATEGKKSAPDSVRLKFYRITYSPPSRCSQERSPSSSGAEPESEPWGRAKRSFLWRLRPGLAACQPHSVEWHSSRCGVGGAVLLSDRSVERRSECGHFGSIV

SEQ ID NO: 70514 - protein, 160 aa, Zea mays
  Coding DNA Sequence Number=SeqID_28735
  Gene Ontology: Mol. function=kinase activity
  Homolog annotation: Hit_ID=Q6QP54; Match level="QueryCoverage=68%, HitCoverage=45%, E-value=7e-14, Identity=53%"; Hit description =Putative kinase
  Subcellular localization annotation: CTP_CleavageSite=65; ConfidenceScore=5.66e-01
MAQGLISLSAPPDPKARTQAQPRKMTNSAPPDPRARTRAQPLKTTNSASPDPRARTQPWPQPTVSASPDPGARTRPRPRKTDSTSTSEEPLHRPTQGTDRPRQQEAPSLPYPKLAQATGNKTGVPSGSLRQKSDSTPSGMPEWPTDLEPREKEEDPTEST

SEQ ID NO: 70515 - protein, 139 aa, Zea mays
  Coding DNA Sequence Number=SeqID_28736
MAIIFKSKITFSLGAVFCFGTISCVADVERTLHCIATPLEKKSSSGAPKGAAAKSRTMPPLTAQRDMVPHEARLGIPQRGGSTPTPHLRVSGEATPLYFTGLSESEQAPEGTPDSEQYMFGAAPDCPVPQVVRAPTVEP

SEQ ID NO: 70516 - protein, 289 aa, Zea mays
  Coding DNA Sequence Number=SeqID_28737
  Gene Ontology: Mol. function=hydrolase activity, acting on glycosyl bonds; Cellular component=intracellular; Biological process =metabolic process
  Homolog annotation: Hit_ID=Q9FLA9; Match level="QueryCoverage=92%, HitCoverage=43%, E-value=1e-102, Identity=65%"; Hit description =Similarity to endo-beta-N-acetylglucosaminidase
  Pfam annotation: Domain name=Glyco_hydro_85; Domain location=51-289; Score=325.2; E_value=1.2e-94; Accession=PF03644.4; Description =Glycosyl hydrolase family 85
MSYPITGLAALASRAYLSAEANFHLPFNRASVPAPASPLPQRRRVLVCHDMEGGYRNDAAPQGGDKPDAYALWHWHLVDVFVYFSHYLVTLPPPCWINAAHLHGVKVLGTFIAEWDEGVKICKEMLATEASAQMYAERLTELAHTLGFDGWLINIEVNLDVHFIDNLKEFVKHLTMTMHDAVPGSLVIWWYDAITVNGDLDWQDKLNKYNKPFFDENDPQDSATVAGDRKYDVYMGIDVFGRNTFGGGQWTTNVALDLLKKVDISAAIFAPGWVYETKQPPDFQRAQNQ

SEQ ID NO: 70517 - protein, 227 aa, Zea mays
  Coding DNA Sequence Number=SeqID_28738
  Homolog annotation: Hit_ID=Q9FLA9; Match level="QueryCoverage=72%, HitCoverage=24%, E-value=6e-18, Identity=33%"; Hit description =Similarity to endo-beta-N-acetylglucosaminidase
DIATFTRKKQNHKYGSYVKADKVELHAPDNHGWVLYKATVSSSAGHTLTGINIVCTLKFTGEISPESEDGSILVEDVDGTSLYQASLGHLSIRNTDKNTEFPPAESWITEGDYISWSKCSNGSELVNLKISWKLKNPDQPQPPFSKYNIYVEKLTADSDLKVPSPKSYLGVASVDAFYVSGLEVSNEVTGLKFFIQAPRDMEPTLVPIGEASVMAAVATGCRTRLND

SEQ ID NO: 70518 - protein, 184 aa, Zea mays
  Coding DNA Sequence Number=SeqID_28739
  Gene Ontology: Mol. function=nucleic acid binding
  Homolog annotation: Hit_ID=Q2QQM2; Match level="QueryCoverage=57%, HitCoverage=56%, E-value=2e-25, Identity=60%"; Hit description =Expressed protein
  Pfam annotation: Domain name=Alba; Domain location=20-100; Score =54.7; E_value=3.1e-13; Accession=PF01918.11; Description=Alba
MSGDTAAAVQAGGDAQQAVGRNRIQVSSSKKPLFFYVNLAKRYMQHHDDDVELSALGLGPKSLSNLLAAISTAVTVAEILKNNGLAVEKKVRTSTVDIKNEISTRSIQKAKIEIVLGKTNKFDELMAANDGDGTAGDGVGKNDKFDELMAANDGDGTAGGGNKQRFVIDFPTIFISSPLLDRSS

SEQ ID NO: 70519 - protein, 218 aa, Zea mays
  Coding DNA Sequence Number=SeqID_28740
  Gene Ontology: Mol. function=nuclease activity; Cellular component =mitochondrion; Biological process=response to DNA damage stimulus
  Homolog annotation: Hit_ID=Q2VZE7; Match level="QueryCoverage=54%, HitCoverage=89%, E-value=1e-24, Identity=47%"; Hit description =Uncharacterized protein affecting Mg2+/Co2+ transport
  Pfam annotation: Domain name=DUF525; Domain location=87-210; Score =173.1; E_value=7e-49; Accession=PF04379.5; Description=Protein of unknown function (DUF525)
  Pfam annotation: Domain name=UVR; Domain location=44-79; Score=19.8; E_value=0.0028; Accession=PF02151.9; Description=UvrBuvrC motif
  Pfam module annotation: Pfam domain module=DUF525::UVR; Domain location=87-210::44-79
MQWAGLRSQAPGSHGGVDGAEAKNREDYKEAARLRDSLRSFEEKEPVLCLRRLMKKAIEEERFEDAAKYRDELKILAPHSLLKCSSDATTLGIRVQVRSVYIESRSQPLKGQFFFAYRIRITNSSQRPVQLLKRHWIVTDGNGRTENIWGVGVVGEQPVIFPKTGFEYSSACPLSTPNGRMEGDFEMKHIDKAGSSTFNVAIAPFSLSILGDDNDVLL

SEQ ID NO: 70520 - protein, 71 aa, Zea mays
  Coding DNA Sequence Number=SeqID_28741
MSGTQFVKTRKIEGARSKVSVAGTIIDHVMRKTSQVDPKCGLLRMVMLKDEPTGSSAKARMIVKWSSPIKH

SEQ ID NO: 70521 - protein, 65 aa, Zea mays
  Coding DNA Sequence Number=SeqID_28742
  Homolog annotation: Hit_ID=Q6ATM9; Match level="QueryCoverage=78%, HitCoverage=11%, E-value=1e-07, Identity=51%"; Hit description =Expressed protein
  Subcellular localization annotation: CTP_CleavageSite=14; ConfidenceScore=5.08e-01
MGSLNQNKDVILTMVSTVQYSRRPTPTNCWRGCFHVFNAGEKLNLVEFKAYFPSKVSSKLLILSR

SEQ ID NO: 70522 - protein, 101 aa, Zea mays
  Coding DNA Sequence Number=SeqID_28743
MTMEDLSKKTTKLSNARVKDADLEPSKREALKEDYKIVSKNYEILTENCKYLKTAVEKAKGLMKSFVSSRKKSSSTPTSETGLVKMPEDHLTHRVEISTGT

SEQ ID NO: 70523 - protein, 68 aa, Zea mays
  Coding DNA Sequence Number=SeqID_28744
MAIPKTLDGDRDVIKWPKKFVLLDTDLFEFDDSRHDTTPEGLSLTNHAGCAIWMDIQTILRKGVVDCQ

SEQ ID NO: 70524 - protein, 362 aa, Zea mays
  Coding DNA Sequence Number=SeqID_28745
  Gene Ontology: Mol. function=identical protein binding; Cellular component=microtubule; Biological process=cell cycle
  Homolog annotation: Hit_ID=Q9FM51; Match level="QueryCoverage=80%, HitCoverage=85%, E-value=6e-77, Identity=49%"; Hit description =Arabidopsis thaliana genomic DNA, chromosome 5, P1 clone:MJH22
  Pfam annotation: Domain name=WD40; Domain location=154-193; Score =21.3; E_value=0.0036; Accession=PF00400.22; Description=WD domain, G- beta repeat
  Pfam annotation: Domain name=WD40; Domain location=200-239; Score =23.4; E_value=0.00082; Accession=PF00400.22; Description=WD domain, G-beta repeat
  Pfam annotation: Domain name=WD40; Domain location=59-97; Score=0.0; E_value=36; Accession=PF00400.22; Description=WD domain, G-beta repeat
  Pfam module annotation: Pfam domain module=WD40::WD40::WD40; Domain location=154-193::200-239::59-97
MDLGSCYLGGNADAVEFCPHRPFRHVLAAATYTLQEQERDRAGSISLFSVDVASEDASRRLQLLYTVETAGIFDMKWSPKSPLLAQADAHGRLALRRLEQEDGSDTGILLTDVSAEDISSSMCLYVDWNQTAESLSVGLSDGSLSLVSVREDRLEISEQWTAHQFEVWTCYFDRTRPHLLYSGSDDCCFSCWDLRESPSNIVFQNKKSHKMGVCCITQNPLEGNMLLTGSYDEFLRVWDMRFMAKPVNQKLINLGGGVWRMKYHPSIADVVLAACMHNGFAIVKVGSGDATLLEDLWLGVIDHGAKMLNTLSYDFNDLRVKEMQRLALSANWALSGKTLDAATIIHQTVRCAPDCSVCQPRV

SEQ ID NO: 70525 - protein, 117 aa, Zea mays
  Coding DNA Sequence Number=SeqID_28746
MATGLVGFKNPWVHMFGYYRNKPVPINPSGAPYGSLHGERGIDNAQLSWRVELPSRLRCFPECDARSEACVRGQMVVFGVTYAQTRMQWNEKTLRVGCSRIEDPVSKCPALQIKLIP

SEQ ID NO: 70526 - protein, 778 aa, Zea mays
  Coding DNA Sequence Number=SeqID_28747
  Homolog annotation: Hit_ID=Q69T67; Match level="QueryCoverage=43%, HitCoverage=40%, E-value=1e-133, Identity=62%"; Hit description =Lustrin A-like
  Pfam annotation: Domain name=DUF231; Domain location=542-706; Score =195.6; E_value=1.2e-55; Accession=PF03005.6; Description=Arabidopsis proteins of unknown function
MAGWRKAWMSVLDRAGGGGSTVSLQGRLHLPSILASYKRGGNKYGNGHVSGKAVAACFSVAVALAFFYASVTGGPAAAGFSSSSYALLLPWLSSNSSSTSPKKSPPTHPPPVSPAVAAGGAADHPTDARNATAVSRRVPSGGAVGGSSGSEVGLGRASSAPRRTGSAQGRLPLQDAGNATVGSDAKPTSNSNRTREDGPQVETAMRMQQWQKADGASRASHDAAVVVGDGGQRAANTTDIATGNSTYTGTSSREETDKDSAVGYVQNLPRRVALPSRPERKAERHRRRRAVRHRHPRRRKETLVSAQDLAARAQRRQDGWRQNQLGRRARERHGRRCETPAWALSVPATTVSCGRPACKTWFPFAKCDVFSGRWVRDESYGFYPPKSCKLIDDDFNCHKNGRSDSDFLRWRWQPHGCDIPRLNATEFLERLRGQRIIFVGDSLNRNMWESLVCILRHGVRDRRSVYEASGKNQFKTRGYYSFVFRDYNCSVDFIRSIFLVRETIREGRNGTEDAKLKLDELDATTPAYQTADIVVFNTGHWWTHYKTSRGLNYYQEGNHVYPSLDVLDAYRRALVTWARWVDKNIDPRRTQVVFRGYSLSHFRGGQWNSGGRCHGETEPIFNQTYLTEYPEKMVVLEQVLRQMKTPVIYLNISTLTDYRKDGHPSVYRIRCDTEEERMAMVKKQDCSHWCLPGVPDTWNELLDVQENNAACAAPTAVPPARVRLTAAKSSLGRHRKLRLARPQGSDSTSTSEDGLRLARPQGSDSTSTPEDGLRLARP

SEQ ID NO: 70527 - protein, 152 aa, Zea mays
  Coding DNA Sequence Number=SeqID_28748
MAALGPLTEARGRQQGLDGPDSCPSARLQRSSDGHDITQTGRQNLSDRHDALCYTPHCTPGSSPYAYKRKDQGPLREGWPRGDEDETGARVRPLAPSPVWTLVTPYCKRTRPGRGTNTKAARFPPLSRPSPATSLPPFALGLASTHLGWGTR

SEQ ID NO: 70528 - protein, 93 aa, Zea mays
  Coding DNA Sequence Number=SeqID_28749
MAEPDGGGLPRFASGGGWKKESKGGARGEVGSAFEARATENRGCEVSARIQQLVPTSPATESVAQALRRMEKMALTTRAPRASGKGENAQRRD

SEQ ID NO: 70529 - protein, 137 aa, Zea mays
  Coding DNA Sequence Number=SeqID_28750
MVPAEKTLEPGPPSLMGRSTAHSATAQPEGGYERREQFNCYLPDSSKSLNADLYVEDEDMFYEPQAEKDWQSKHSRSDGNLADENYDGLWRMDEFNSEDHLFTQRDKHVDISGYGFKDGYSPERRNSTRPVTVFENT

SEQ ID NO: 70530 - protein, 71 aa, Zea mays
  Coding DNA Sequence Number=SeqID_28751
MAYSYAHMVRSEDRSCRYAIRRAVEIKRLAAPESACAAVEIEQSTQGRSVQTRKWQMLLPGGWLSYSFVYI

SEQ ID NO: 70531 - protein, 485 aa, Zea mays
  Coding DNA Sequence Number=SeqID_28752
MKDRTCKKQSPSMKNDMNENDEFHIRLDKLDIPNMDAPLHGRSLFNNPEKLDRKETAPRKKLETNWLQSVTGQPRTQEPSCRLSLNEKFSNWDSPTFRSKSTTGLTDKSSCTMLHKDKSSFDAAPDLDMYQTVESTQKRPVSKVHSIYQRPEKPIFEDEIHMQHTVSDMFHDKIELSNPYQNKNLQSDIDMSTFIGQKVEKQEDEFPCFSSSSADTFRAEKAARSVRQTVDRHSTCSQPSGRDSFRHGFSPGFNFQESEPNTFWADSYVCNGTFQAGLEFSGVVARKDSDKNEVKIEASEKPDTKILTGTCWLSADNRNVINGTETCSDGSEAFNCSEAQKETSAVVTQIPANLSSLRETSAELFQVRNHVIPVKREKIDNPGVDFDAVMHSKSKIHDVRDHSKLNTTFRSPFIGEVVGIEKKIVANVSPDNSDVQYQFMLEQRVLRRLCVQKIVVPTPMKDRLDKDTNFTIAEDGSLHVLPKSV

SEQ ID NO: 70532 - protein, 58 aa, Zea mays
  Coding DNA Sequence Number=SeqID_28753
MGSRRSRAQILHRLASCHGRRFRFHSTDVEVKVVLHLRILNLGDNLFFYYGLFLVFYT

SEQ ID NO: 70533 - protein, 266 aa, Zea mays
  Coding DNA Sequence Number=SeqID_28754
MDAKIERLRMLNTEAIRDKSAIENKSSNLLEKVGSLEKGNEGLDRQLSEEKVVVTKELGSLPSIATGLMSYTSLVTYEGAVNALSHVGYRHFEAFDQSNEDFDQGLFQVEDVVLKHSVGALYDRMWGPHGRGVIRERAGRAMAQALRDEEIEDLVGLESSCNTLNLGPCSKINHVHLVPNSKPNGPMDKVAPKYPRHTLVKFYIKPKSFDMICPKICLGGNTADTANLTLQYLLTLTTSTLGSCTAEVELGSVKRPYMGSLLRYTR

SEQ ID NO: 70534 - protein, 85 aa, Zea mays
  Coding DNA Sequence Number=SeqID_28755
MSSPTAPAAADRRMPSRAWANKVVGPKGAKIGEASGELYVDDYLIEDVGMFDTQTVLSAGGAGSGQMVAVPVKPVEERTHAKTVM

SEQ ID NO: 70535 - protein, 137 aa, Zea mays
  Coding DNA Sequence Number=SeqID_28756
MGRFHRLVDQRYPYMRASPGPASVEHKSVGADGAVGCRRVLLLRAELAELRLRPRRGTGNASPRRITRWPGQRSLSPPIRPVASWLGSAPRASGVTGVAPRIPSELRGVGTPGACGRAHQCGQSALRHGHPLGYVLR

SEQ ID NO: 70536 - protein, 86 aa, Zea mays
  Coding DNA Sequence Number=SeqID_28757
MGSPELCWPPGGSPFRTSGLVPHSGNICGLLLALALPGCSDWLLGQEGEVPGCFGGTAVVAEENASNTTAGVGADAGACVLKGDFA

SEQ ID NO: 70537 - protein, 168 aa, Zea mays
  Coding DNA Sequence Number=SeqID_28758
MGHTFCSILDQRFWFHGPHESLSAHLGHPIKTGRLGLGARGFIFSGQPGAALSVVMAAQSPEARETRASKVLGVVWVAREDSTSTMLGTARGGFGWPNDEESRQRQAPTCAGEKVEHGPNRGVKERGNHHGFPVRQAQAKLTVAKPLAEAQQRRWNDKAIEGAALWAG

SEQ ID NO: 70538 - protein, 140 aa, Zea mays
  Coding DNA Sequence Number=SeqID_28759
  Homolog annotation: Hit_ID=Q6QP51; Match level="QueryCoverage=37%, HitCoverage=27%, E-value=2e-13, Identity=74%"; Hit description =Putative growth-regulating factor 1
MAAPPTTRPVALTLRQDRRHLWQAKQATLHLRQHDRVKKGIEKGDTPKGILLREGSGPRAPLLIRGSKAGPSEGFDSRLRALGLRAPPTDQRFKGWPLGRVRQPPQNTRAPRPPLVRGSKAGPSYGFDSRLMPLGLRAHY

SEQ ID NO: 70539 - protein, 111 aa, Zea mays
  Coding DNA Sequence Number=SeqID_28760
MRIMLVSIVIMIMIMVSAFTKHQVAFGAIYAQLDFSVSATDIKEPSAKATALSGNFYSEVWMNGGREMEDEAIKRNEEESHLASEEARKAEEAADRERRIGMHNTLGVTSR

SEQ ID NO: 70540 - protein, 207 aa, Zea mays
  Coding DNA Sequence Number=SeqID_28761
  Homolog annotation: Hit_ID=Q9FN45; Match level="QueryCoverage=99%, HitCoverage=74%, E-value=4e-16, Identity=32%"; Hit description =Genomic DNA, chromosome 5, P1 clone:MYJ24
  Pfam annotation: Domain name=DUF617; Domain location=34-207; Score =45.5; E_value=1.8e-12; Accession=PF04759.4; Description=Protein of unknown function, DUF617
MARFKKGRVNGEEEEVAAPLMGEMSGERKRKGCGRYSCLKVDTRVCPVLLLELAAPTAALVREMVSGLVHIVLECEHARGPPSAAGSGRRLVETVWRAYYNGRGCGGVLMLAFVSVPHSYFALGPPLGTSAVRHRGLGRASRAGARVHGADVIPVASCGGGAGNVMYMCVRLEHIVGSRDSEAFYDMMSPDSGGRAEPELSVYLLRV

SEQ ID NO: 70541 - protein, 493 aa, Zea mays
  Coding DNA Sequence Number=SeqID_28762
  Homolog annotation: Hit_ID=Q9LI74; Match level="QueryCoverage=91%, HitCoverage=51%, E-value=1e-111, Identity=47%"; Hit description =Similarity to pherophorin
MAKQRKGMIRLTILNMYGEKEEEKEEVKTISGIINLARLLDDDDDDVLFEIESLLSGDIEIPIPSDRFNVNGWSRYNTYMANKASEIEGLRSLVKEMEEREAKLEGELLEYYGMKEMEIDVAELQKLLKIKTVEIDMLNNTINSLQEERKKLQDDVERGAVTKKELEVARTKIKELQRQIQVEAGQTKDQLMLLKQQVIGLKAKEEEAVKKEAEVERKLKKLKQLEVEVLELRRKNKELLYEKRDLIVKLDAAEGKITESDVVANAREEINKLRHTNEDLTKQVEGLQMNRFKLRDYQTPSWKVSACDFNRTLSLKSQDRAKQLMLEYAGSERGHGDTDLESVSSVPSSPGSEDFDNISIDSYASRYSFIRKRPNLMQKIKKWGRSKNDSSSLGSLISGSPRRKPKGPLEAVMLKNAGDGTAITTYGKRVPNGVLDDENVVSSFQLMSKTVKGFADEKYPAYKDRHKLATERENAIKEKAGQARAQRFGGGHS

SEQ ID NO: 70542 - protein, 124 aa, Zea mays
  Coding DNA Sequence Number=SeqID_28763
MSGAPTALWLPTVECAIFGRKSGTGQCPGVHRTVRCPVRPRGALPLAARPQAKRPHGGHARWGAGRVVYGHGPCRGGVGVDRFPPLGLGMTGIFPNTFYGKIPQQWCRGFGNRGTMIFVFGRGC

SEQ ID NO: 70543 - protein, 319 aa, Zea mays
  Coding DNA Sequence Number=SeqID_28764
  Gene Ontology: Mol. function=protein dimerization activity
  Homolog annotation: Hit_ID=Q2QNH1; Match level="QueryCoverage=54%, HitCoverage=20%, E-value=8e-45, Identity=55%"; Hit description=HAT family dimerisation domain containing protein, expressed
MAPRKHPSGSKKRKRRKEVEEFIESQRGAMDKFVRTNTRTSSNEDQPNLAIVVVAEQPNTNEEDHDPTFEENVDINTNGNDVTGHDPIFDSSHIENDSFDEQSVPTEDIYDPRNWGNLDNKSRDILVGKGPIREENIVFPLDSNGRHFSYTHYSRKMRNGEVHDRKCFLIQKDVAIIIIKPTTECINRVGINTIIESLNMDQRRSSSEDAIEATRLEEVVARGCPSQARSEDVTRDHHRSLLHNCHLRSHHTSCASAARASAGCPDRSSLPPPLEDPLGSLPPRVPQEGCVVARASRGREGVTTGAAKNLIPSGLGLFL

SEQ ID NO: 70544 - protein, 57 aa, Zea mays
  Coding DNA Sequence Number=SeqID_28765
MVLEVSAIENKYSTRAILASLSDLDHDSDDIASSSSDKETNKQVKDKLNGFATSLTP

SEQ ID NO: 70545 - protein, 87 aa, Zea mays
  Coding DNA Sequence Number=SeqID_28766
  Subcellular localization annotation: CTP_CleavageSite=20; ConfidenceScore=5.20e-01
MGRHGQNSKPRPGDLAHKLNGSTRRGGCGSLPEMRGPNRLSTRTERFTWSSLAGDPATGPIPPGEAVTDLLVDPAIPPARSLGINIG

SEQ ID NO: 70546 - protein, 40 aa, Zea mays
  Coding DNA Sequence Number=SeqID_28767
MARPRRDGAAGLLPGAAARAEPLRAVPHAVHQCALESVKV

SEQ ID NO: 70547 - protein, 336 aa, Zea mays
  Coding DNA Sequence Number=SeqID_28768
  Gene Ontology: Mol. function=protein serine/threonine kinase activity; Cellular component=spindle pole body; Biological process =protein amino acid phosphorylation
  Homolog annotation: Hit_ID=Q75LR7; Match level="QueryCoverage=99%, HitCoverage=100%, E-value=1e-156, Identity=80%"; Hit description =Serine/threonine-protein kinase SAPK1
  Pfam annotation: Domain name=Pkinase; Domain location=4-254; Score =226.1; E_value=7.7e-65; Accession=PF00069.15; Description=Protein kinase domain
  Pfam annotation: Domain name=Pkinase_Tyr; Domain location=4-255; Score=-48.2; E_value=1.6e-09; Accession=PF07714.7; Description =Protein tyrosine kinase
  Pfam module annotation: Pfam domain module=Pkinase::Pkinase_Tyr; Domain location=4-254::4-255
MERYEVIRDIGSGNFGVTKLVRDVRTKELFAVKFIERGQKIDEHVQREIMNHRSLKHPNIIRFKEVISQTSWKGNVLVVLTPTHLAIVMEYAAGGELFERICSAGRFSEDEQVCHRDLKLENTLLDGSVAPRLKICDFGYSKSSVLHSQPKSTVGTPAYIAPEVLSRKEYDGKVADVWSCGVTLYVMLVGAYPFEDPDDPKNFRKTITRILSVQYSIPDYVRVTMECGHLLSRIFVGNPEQRITIPEIKKHPWFLKNLPIEMTDEYQQSMQLADMNTPGQSLEEVMAIIQEARKPGDAMNLAGQLPCLGSVDLDDIDFDDIDDIDTENSGDFVCAV

SEQ ID NO: 70548 - protein, 149 aa, Zea mays
  Coding DNA Sequence Number=SeqID_28769
MAAAAGGNAGEGGSTPPLMSRAGLVESWEYVFDKLGNDKAMEVLMALLLRDARAENARKARKEEEEEEERRARVFEQWQPPPPDSAPPPVAVAAPPRVDQTVVLALAAPPHCCLSITFTGRRSRRRRRTSGVPSNPPRTPAVAACSRLG

SEQ ID NO: 70549 - protein, 80 aa, Zea mays
  Coding DNA Sequence Number=SeqID_28770
  Gene Ontology: Mol. function=serine carboxypeptidase activity; Biological process=proteolysis
  Homolog annotation: Hit_ID=Q10K80; Match level="QueryCoverage=56%, HitCoverage=9%, E-value=2e-20, Identity=86%"; Hit description=Serine carboxypeptidase family protein, expressed
MDRSFSPLLALLSLACIGLSSLRSGSAATTTAGTPDGSELWGYVEVRPKAHLFWWYYKSPQRTATPTKPWPTVLWLQGGP

SEQ ID NO: 70550 - protein, 469 aa, Zea mays
  Coding DNA Sequence Number=SeqID_28771
  Gene Ontology: Mol. function=transporter activity; Cellular component= integral to membrane; Biological process=transport
  Homolog annotation: Hit_ID=Q6ZF47; Match level="QueryCoverage=98%, HitCoverage=85%, E-value=1e-143, Identity=60%"; Hit description =Putative organic cation transporter
  Pfam annotation: Domain name=MFS_1; Domain location=46-466; Score =31.7; E_value=2.6e-06; Accession=PF07690.6; Description=Major Facilitator Superfamily
  Pfam annotation: Domain name=Mem_trans; Domain location=130-457; Score=-127.8; E_value=0.071; Accession=PF03547.8; Description =Membrane transport protein
  Pfam annotation: Domain name=Sugar_tr; Domain location=44-468; Score=- 99.6; E_value=0.00094; Accession=PF00083.14; Description=Sugar (and other) transporter
  Pfam module annotation: Pfam domain module=MFS_1::Mem_trans::Sugar _tr; Domain location=46-466::130-457::44-468
MADTATVPLLTSHKADPAKVPPTSIDDMIEKYIGDTGGAVQLLKAVFVAFAWAFDAQQVFISVFTDAEPQWHCVDVAGGNNSSCTPAAASPCALPPGTWAWDRPAKTSVVSEWALQCAGPALASLPASSFFAGCLVGGFVLTTLADSVLGRKKTLLLSLVSMSVAGLLTALAPNVWAYAALRFVSGFARSTVGTCTLVLSTELVGKRWRHTVSVAAFFCYTIGFLSLPLLAYALREDSWRSMYFWMVVPCLFYAALIHLLAQESPRWLLVRGHKRDAIESLRQIATLDDSGGHTTTNLSMLELELEACVSMHNEDGASSSGSGVFATLQVMWERPWAIRRLAAIMVAGFGVGMVYFGMPLTVGSLGSNLYLSTAYNALAEVPSSILSWLLIARANRRTSVVVLAASAGVLSLACAAMPQRAEAARMAGELLSFFATCTAYDVILVYSIELFPTSVRNSAVGRWCGRRWC

SEQ ID NO: 70551 - protein, 94 aa, Zea mays
  Coding DNA Sequence Number=SeqID_28772
MSPIPTFFLSQEARRDKGCLCERDSAWKVHILLDSQLTSLRCFTGYGDGGSWTRPDVGNESWCLSQRVSIRKLSVTRAARAEAGRDKWWAMKSG

SEQ ID NO: 70552 - protein, 189 aa, Zea mays
  Coding DNA Sequence Number=SeqID_28773
MEPSTFDDSMDYQILACLVTNKTLAKDRSSWDPTDDEVQRVVLSLLEGSKDIDANKLKQYIAEFEMIVKNNWECSERIVANKEMMLDVFDYVVADFVPNFYQEPTLRLPSISPRSNGCWTKEQLFKKLTGPISMNHCTEKLKKCGFSKQQLWDAIDILKADLELRRVFIRLEDSEARGYMIHALRNSNV

SEQ ID NO: 70553 - protein, 296 aa, Zea mays
  Coding DNA Sequence Number=SeqID_28774
  Gene Ontology: Mol. function=serine carboxypeptidase activity; Cellular component=integral to membrane; Biological process =proteolysis
  Homolog annotation: Hit_ID=Q10K80; Match level="QueryCoverage=100%, HitCoverage=64%, E-value=1e-109, Identity=68%"; Hit description =Serine carboxypeptidase family protein, expressed
  Pfam annotation: Domain name=Peptidase_S10; Domain location=1-296; Score=-56.9; E_value=3.8e-10; Accession=PF00450.12; Description =Serine carboxypeptidase
GASGVGLGNFQEIGPLDVNLQPRNSTWLQKADLIFVDNPVGVGYSYVEDDSLLVTTDWQQAADATTLLKALVTEVPTLQSSPLFLVAESYGGKYAATLGASVARAARAGELNITLGGVALGDSWVSPEDFTLSYTPLLLSVSRLDDNAGDEANTMAETVKEQIAAGNFSNAEASWNDLLHFIKHRSGDVDVYNFLDGSLDQGTPAAASSPGTVKALMKYSRYLSGREDLAAGSNNITGIMNGVIKEKLKIIPKDLEWEELNEAVYNALVNDIMKPKIEEIDELLSYGVNVTVYNGQ

SEQ ID NO: 70554 - protein, 477 aa, Zea mays
  Coding DNA Sequence Number=SeqID_28775
  Homolog annotation: Hit_ID=Q6Z1C1; Match level="QueryCoverage=92%, HitCoverage=91%, E-value=1e-100, Identity=50%"; Hit description =Putative RNA-binding protein Virp1a
  Pfam annotation: Domain name=Bromodomain; Domain location=140-217; Score=0.4; E_value=0.0019; Accession=PF00439.15; Description =Bromodomain
  Subcellular localization annotation: CTP_CleavageSite=58; ConfidenceScore=5.01e-01
MTSAVLAGRDEVHHGHPHHRHWGGARAPLMPKPSSNPNPRRYRPGPNPIVSGSPPAPRAGSAVAAEPLPSPLRHVKFRPSELTPAEARHLRERLTGELGRVRAFVSRIDSWQDGRRRGPEPEPEPPARRSSPPPALVEAMRRRCADILTRLRRSKKSVWFNSPVDVEGLKLHDYRAIIRSPMDLGTVKQNLTAGRYPSHEGVRWRRPADLQQRAAVQPSRPPRAQGMYKEAVSWFEQQRQQLEPPMQLDLLPPPPPPQLPVSVPVQAPLRMWGGRRPKPKARQPNKREMDEEEKQKLRVEIENLPEDKVLNVLQIVQKRNRDPALSGEVVELDFDELDIETLWELDRFVVNWRKALKKSQRNSRMNGDAAVMNADAIDATIVPDDDDRVEVAVNPSVVVEIGESETDVPEKNEVEAEMGDEYVDIGDEMLTMNYQSVEIQRDSLAASSSSGPGSGSSSSTDSDLDPESDGDNASAPH

SEQ ID NO: 70555 - protein, 138 aa, Zea mays
  Coding DNA Sequence Number=SeqID_28776
  Subcellular localization annotation: CTP_CleavageSite=26; ConfidenceScore=5.16e-01
MARPCRFISHVAAATQRRRSLPRRKPAATIAGAHGRPHRLPRPTPPEPTTALIRARLVGAHSGPHRLSRPNSSMLALDASDARTRPDPASDDHGPTPKTMAEWSTIYHTEEQYLEEVKTRPYAHGCGGVYVLYGQEMV

SEQ ID NO: 70556 - protein, 453 aa, Zea mays
  Coding DNA Sequence Number=SeqID_28777
  Gene Ontology: Mol. function=DNA binding; Biological process =regulation of transcription
  Homolog annotation: Hit_ID=Q6Z869; Match level="QueryCoverage=79%, HitCoverage=78%, E-value=8e-77, Identity=51%"; Hit description=Myb family transcription factor-like
  Pfam annotation: Domain name=Myb_DNA-binding; Domain location=277 -328; Score=30.9; E_value=4.4e-06; Accession=PF00249.21; Description =Myb-like DNA-binding domain
MEMDPPPPPPLHADRRLRFRDYLLALEEERRKIQVFQRELPLCLDLVTQTIEGMRSHMDSVVVGSEETVSDHGGPVLEEFMPLKPTTLSSSSSQPQSQDDHDSAHYLEHRRAAAATANDVVDADKDDEALGDPETAAASSSRPLPHPETKKAMPDWLQSVQLWSNQQQPSVSPPQHQDELLLPCRPVALNACRKSGGAFQPFEKEKKKEDKEEKQRAELELPLPAAASSAVVGDSCDRAGATDTDTDTAENNKASSTKGGKDKEAQLSSQAPSRKARRCWAPELHRRFLQALQQLGGSHVATPKQIRELMNVDGLTNDEVKSHLQKYRLHTRRPNSAAAAVQSGGTSVVAPPAAPQFVVVGGIWVPPPEYAAAAAAQPQQVHVHLAGDASGTTTTAADKVYAPVATTLTPAPRPRPRPGPERQSSSCSGARRNGDACSGSPAVSSSSSQTASA

SEQ ID NO: 70557 - protein, 342 aa, Zea mays
  Coding DNA Sequence Number=SeqID_28778
  Homolog annotation: Hit_ID=Q94GG7; Match level="QueryCoverage=23%, HitCoverage=28%, E-value=1e-11, Identity=44%"; Hit description =Putative transcription elongation factor
  Pfam annotation: Domain name=TFIIS; Domain location=18-104; Score =85.5; E_value=1.6e-22; Accession=PF08711.1; Description =Transcription factor S-II (TFIIS)
MAGGNASCSVRPDHGGNGDVVATVERISRRLARKQADNQAVVDLIRELEALPMTYEALEATMIGRTVNGLRKTAPSALARLLADTLYRQWKALAHEWHASSKTQPQTAPPEADNGIKKRPSLSSPPPKVDDDKDTRKRSSSPPPPQPVDAQQSAAPEADREMGAPPSTTRAASVIRKPNILRFRMVTVTEPEKPHQRRVRLIPLATPDPAPSSNDAMQNDADNKQQATCCPATAASHQSTSADNEHVGTTDATPLTTVVKPSTALPNSVSSSEACKRKEEAPTDFEEERLAKARARLLEGYEEASAAREKRKTKLIDVIDVPEKARQRPATHRTWKKQPPVP

SEQ ID NO: 70558 - protein, 325 aa, Zea mays
  Coding DNA Sequence Number=SeqID_28779
  Gene Ontology: Mol. function=hydrolase activity; Cellular component =extracellular space; Biological process=biological_process
  Homolog annotation: Hit_ID=Q2QXM4; Match level="QueryCoverage=98%, HitCoverage=71%, E-value=1e-134, Identity=74%"; Hit description =Ser/Thr protein phosphatase family protein, expressed
  Pfam annotation: Domain name=Metallophos; Domain location=95-284; Score=17.7; E_value=0.014; Accession=PF00149.18; Description =Calcineurin-like phosphoesterase
MAMVHISLVGPDKVRVSWITAADAPATVDYGTASGQYPFSATGNTTSYSYVLYHSGSIHDAVIGPLQPSTTYYYRCSGSASRDLSFRTPPAVLPFRFVVVGDLGQTGWTESTLKHVAAADYDALLLPGDLSYADFVQPRWDSYGRLVEPLASARPWMVTQGNHEVERLPLLEPRPFKAYNARWRMPYDYAADGTPPSDDNLFYSFDVAGGAVHVLMLGSYADYAAGSAQLRWLRADLAALRRRGTPPAFVLALVHAPWYSSNKVHQGEGDAMRDAMEALLYHGASTRCSRATSTRTSGSTASTPARRIPAAPSTSPSATAATGRG

SEQ ID NO: 70559 - protein, 87 aa, Zea mays
  Coding DNA Sequence Number=SeqID_28780
  Gene Ontology: Mol. function=translation elongation factor activity
  Homolog annotation: Hit_ID=Q94GG7; Match level="QueryCoverage=70%, HitCoverage=21%, E-value=3e-09, Identity=46%"; Hit description =Putative transcription elongation factor
  Pfam annotation: Domain name=TFIIS; Domain location=5-87; Score=50.2; E_value=6.7e-12; Accession=PF08711.1; Description=Transcription factor S-II (TFIIS)
MSGADTSCSDVLTTVARIDRRLAHEKGNDAVVELIREQQAVDMTYEVLEATKIGHTVSALRKSAPTALAHLLADTLYRQWKVLADDE

SEQ ID NO: 70560 - protein, 181 aa, Zea mays
  Coding DNA Sequence Number=SeqID_28781
  Homolog annotation: Hit_ID=Q6QP51; Match level="QueryCoverage=26%, HitCoverage=22%, E-value=8e-18, Identity=89%"; Hit description =Putative growth-regulating factor 1
  Subcellular localization annotation: CTP_CleavageSite=76; ConfidenceScore=5.12e-01
MAKSGSAVIAETDRRKQLQSPIGSHPLLKWQGSPLPRSKDDTPVFRSSNGSRTRNRRPANRLSRRINSLTGQATPPAGEAGTGKGDISKRILPSEGNGPRALLLIRGSKGCFLRGSATQSTRAPCPLLIRGSKAGPSEGFDSRPRACRVRDDPGYVRYMAEARATLPRYPRTFPRPVGMIL

SEQ ID NO: 70561 - protein, 169 aa, Zea mays
  Coding DNA Sequence Number=SeqID_28782
MVERPMLPARSRTGETRVLDVGDEHAVRYSMVCLLILKNHPALWMTDFAEFGPQNLATAIPKGISGGTWNHNEGFLVCSNDTGLKYTMIWFFDENTIKCLTKVLSVERVLVKNIQSSTQGQRQEGLQGTKRKEKVKRTEVSKAKGKKGFLQEVKVGQAEKRRGALKTMT

SEQ ID NO: 70562 - protein, 122 aa, Zea mays
  Coding DNA Sequence Number=SeqID_28783
MDYSMQGSKDSYSPQGKLTVQFRVLHSVHNHLYPDSQPGLYPPPPQGGYGYGYQYQGYLGESANPPYYYYTGSWPEQPPAPSDGAPFRYRYLQDQDDADCITFLRGCLAGLCCCCLLERCCI

SEQ ID NO: 70563 - protein, 233 aa, Zea mays
  Coding DNA Sequence Number=SeqID_28784
  Subcellular localization annotation: CTP_CleavageSite=10; ConfidenceScore=5.59e-01
SSSAAQLPVRALLPVRTLLPLFSSLLSSSSGYASLLSAFLPALSLLWPWILGSRSSPSSATPISSLEPASRRAPPHVLFPARPWKLRPAFVPIAPIRARQGHLPLPSSTPFPATKFAVCPYVACCLDPSQVDLVMVLELSWIRHVVYLAAPASRIVTLFTPSTPSDAHLRSSPVSYFSQHHILRDALRCRLSRFARPYHLQLSMFTVVHYAQPCDNHAIHGIEVRVVLTTCST

SEQ ID NO: 70564 - protein, 172 aa, Zea mays
  Coding DNA Sequence Number=SeqID_28785
  Subcellular localization annotation: CTP_CleavageSite=73; ConfidenceScore=5.37e-01
METSGAGETSWAEGRPVPSSSAHIGSSSCSTAAAMEGRRSLSSVRAKPPPRDSSAPSPWALHRSTCGSCAGRRASLGMAAIELRRYFPLFVELRRKSSGECLLDWFACVPASHGIPRISVWGAMGRSPIMVPPRDTAGTGMPVCRAGEEGGSDLDGWALIGRLWIELVFRLE

SEQ ID NO: 70565 - protein, 125 aa, Zea mays
  Coding DNA Sequence Number=SeqID_28786
  Subcellular localization annotation: CTP_CleavageSite=54; ConfidenceScore=5.19e-01
MAHRTAERHRTLSGAPATSPGRWISTVGASIFWATGQSGGAPDRRPLVQSSRCSAGTLDSPVRHRTLSGASPDSPVNYSGAASRIPEGEQFGVGVPSAPDTVRWHIGQSGGTPDSPVRQTRAHFG

SEQ ID NO: 70566 - protein, 565 aa, Zea mays
  Coding DNA Sequence Number=SeqID_28787
  Homolog annotation: Hit_ID=Q10RM8; Match level="QueryCoverage=81%, HitCoverage=93%, E-value=0.0, Identity=70%"; Hit description =Expressed protein
  Subcellular localization annotation: CTP_CleavageSite=44; ConfidenceScore=5.06e-01
MGHKEGIFSTKPENSPRGGSNPGLGGATRKRTTRLEVVLQVNVSVNKLEDPVLEVLQFEKSISNNCMPGNLVDGQCDSNDDPCQELLSWLLPLDRTLPPRSLAPPTLNPSVSHKQSYSASGSQIFNFRSYSMPSASSVQTPNNIRPPPISESQEFMPEKPAKTPDIINDGQLSFRGVPLEPERYSVRCGLEGVYLPGKRWRRKVEIIQPIEVQSFAAKCTVENLLCVTVKNIAPTHAKDIVVFIDAITIVFEEASKGGAPLSLPIASIEVGHGHSLPNLALRRGEEHSFILKPATMSSRERKTNSHAPLALSLPTMTGATLNTHTPKAGEPYADLSDQYAVLILTLEATNMTSENLTLTVLAPEASGSSSVVSLNSSPTTPNGSFDGVNESAKRSGVGKDGIGFRRLNSVLATPKEGDNGGNRMSNASGCTHLWLQSAVPLGCVPARSSTTVKLELLPLSDGIITLDTLQITAREKGLAYIPEHSLEIHATSGGKNYVGLPITVISFKAIEFGIPYLIFSGGRAGAHAILTHASARRPSPERLNGEPRGQVLLGAAGCLSQDLGA

SEQ ID NO: 70567 - protein, 269 aa, Zea mays
  Coding DNA Sequence Number=SeqID_28788
MGGGLVKLKGSGASQTYDNAQTREQRTGTDRSWAGDGELGFTVAEIGFGGNSKFKFSGGSQQALKDYAKVFKHPLSQCQVEALAALFGWSVPVEISSQRLIDDLALKEIPLHGPKFTWSNQQAAPVLVKPDRVFCTVDYCPFQTLDLKLKATARGLHAWSAKQPNAQDRHIFSISANRIYSTKDAYEGLFIGSVSFPHHDRVWKTWAPQNVIFPLVLRQAEEECDLWVAAGDKGISLLLAATQVLNGVEYRVKQVQEMQLNCDKAGYNC

SEQ ID NO: 70568 - protein, 269 aa, Zea mays
  Coding DNA Sequence Number=SeqID_28789
  Homolog annotation: Hit_ID=Q2QSV5; Match level="QueryCoverage=56%, HitCoverage=94%, E-value=2e-20, Identity=43%"; Hit description =Expressed protein
  Subcellular localization annotation: CTP_CleavageSite=45; ConfidenceScore=5.57e-01
MIHPSGGIAVARASHPWNPARNGRGRNRRRPAPSVSGRPRLGTSDADLAWPPPATGSRPRHGRRPTRAPSLLSVSPFVARQDDATPADDAPVRARRLWQLPVPGKQSQGQGGRRRQIPAFGRWNQHSVGDEVPITQYFESAVQASLLARPGHCYHDAGAGEVLLFRSSASPPPHKPPKKVRSTTECHGHHQQVQVEEVGSRRRQQQRRRQEPLPPFVSGDVSRAARPRVVRAAVDEDLYKVPSDMLRKKKGRKHVRSVWMGCVGLTCVA

SEQ ID NO: 70569 - protein, 163 aa, Zea mays
  Coding DNA Sequence Number=SeqID_28790
MAGTAPVDRGRDVGARMEGGRSRRRRRRGEDVWRVIGDGGRGIDRRDAVFPFSDTVEHELSVLRGQTILFCGNAGSTSRIPTCVWVGHSLNVRAKLMPIMARGRVEFGGAENEEEVTVEEEETTPSAENPPTGNCFYFDIYGTEPDSPTTQGKPRCICHLLAV

SEQ ID NO: 70570 - protein, 313 aa, Zea mays
  Coding DNA Sequence Number=SeqID_28791
  Homolog annotation: Hit_ID=Q84Z87; Match level="QueryCoverage=26%, HitCoverage=9%, E-value=2e-20, Identity=62%"; Hit description =Putative microtubule-associated protein
MLNDASRNRPYNLAIDATVIDPTFRVLDIGFSAPKVGLDLAPAPKDDNAQCLPCPARPRGKALRSWLSPPAGRGCWFGGRQSNPPAAESGERGCMAEENRQQRRLFANLRSVQWQIDLGIVPASPGASVDKLCHAAADSRRRYVSLRRRLMVDPHLPKEEDRSSNLVVDNPLSQNPGFLEKVASSHLFGSIALLAKSGNLSLTELMLEWSRTSLCFYATSRVDKGLSSELQNQNWRVLSVANECSIEVPGVLNVQRLQQLLLTLATLIKRRCGSVTSVTVAVYGDEDKPALIMFIEMWFCDCCRVLRLYFNRI

SEQ ID NO: 70571 - protein, 185 aa, Zea mays
  Coding DNA Sequence Number=SeqID_28792
MVRTKNVSAPGGGDDEDPPCPFRQVKGKTFYLKQQKCRKKRRMDRATRAALAVAVAAEQAERARVRRFRHIPVESWLPAQRDPATADLFSAKIQESFYRAQLSAQIALGRGSVLSERMSLYMSARFASCLDFQSHRLTFTVCAMVHQILLDALTAESLLPLLTSRPCSYRFSQMGRNALQQTSPL

SEQ ID NO: 70572 - protein, 66 aa, Zea mays
  Coding DNA Sequence Number=SeqID_28793
  Gene Ontology: Mol. function=rRNA binding; Cellular component =ribonucleoprotein complex; Biological process=translation
  Homolog annotation: Hit_ID=Q7XYE4; Match level="QueryCoverage=71%, HitCoverage=69%, E-value=2e-09, Identity=70%"; Hit description=40S ribosomal protein S9
MVLVYLIRVGRQIVNVPSFMVRVEFEKHIDFSLSSPFGGGPPGRVKRKNQKKASGGGGGDGDEDEE

SEQ ID NO: 70573 - protein, 93 aa, Zea mays
  Coding DNA Sequence Number=SeqID_28794
  Gene Ontology: Mol. function=DNA binding; Cellular component=nucleus; Biological process=regulation of transcription, DNA-dependent
  Homolog annotation: Hit_ID=Q2QWZ2; Match level="QueryCoverage=79%, HitCoverage=12%, E-value=8e-16, Identity=49%"; Hit description=SWIRM domain containing protein, expressed
MEGMEMVAFLAAEVGPRVAASCASATLSILTWDDSRMHAEGIDAMGHATQLNYAAATKSKLFVDQEEHEFQRLSATIINHQACCNKMVADSAI

SEQ ID NO: 70574 - protein, 228 aa, Zea mays
  Coding DNA Sequence Number=SeqID_28795
  Subcellular localization annotation: CTP_CleavageSite=26; ConfidenceScore=5.80e-01
MRASQHHAPPQPLPLPPPPLSLPSPSAAPRRGRHSSTHSSSSSSSSCISGPSPSSAPFPHASTTSSLVPFSWERHAGVPKNSSRHPWRAASPTCTPLPPPPPLRPAPRRRRAKAPATSSSDAKEDPFVAAFAECTRDDDYAADVDGDSNKLAPVPAKKAAVVSPGRAERRRWMAGGGGLVAFLDMHGCKSAMDVVVADGTFQPRAGSSLLRIIDPRPRRPGEPQPQAK

SEQ ID NO: 70575 - protein, 116 aa, Zea mays
  Coding DNA Sequence Number=SeqID_28796
MDDSSLAFRRGNKTHIFLVVVGVFKQIIINKTLHVGSEMGTAAHSALGLGGARARGRGRRRSGSRTGTAALRLGDGDGGALGAGARRRSGSGTGTGAALGLVDGHGSLAAQLCEST

SEQ ID NO: 70576 - protein, 285 aa, Zea mays
  Coding DNA Sequence Number=SeqID_28797
  Gene Ontology: Mol. function=nucleoside-triphosphatase activity; Cellular component=membrane; Biological process=proteolysis
  Homolog annotation: Hit_ID=Q1SJW8; Match level="QueryCoverage=89%, HitCoverage=94%, E-value=1e-52, Identity=71%"; Hit description =Chaperonin clpA/B; Checkpoint protein Rad24; DEAD/DEAH box helicase, N-terminal
  Pfam annotation: Domain name=AAA; Domain location=57-274; Score=10.3; E_value=3.5e-05; Accession=PF00004.19; Description=ATPase family associated with various cellular activities (AAA)
  Pfam annotation: Domain name=Rep_fac_C; Domain location=185-274; Score=113.5; E_value=6.2e-31; Accession=PF08542.1; Description =Replication factor C
  Pfam module annotation: Pfam domain module=AAA::Rep_fac_C; Domain location=57-274::185-274
MGSDHLSGDRCVLSVDCLLLCARDSPLFRPRQVKDVAHQEEVIRVLNNTLQTADLPHMLFYGPPGTGKTTTALAIAYQLYGPELYKSRVLELNASDDRGINVVRTKIKNFAAVAVGTARKAGYPCPPYKIIILDEADSMTEDAQAMSTLSVISQGDLRRAITYLQSAARLFGSSISSSDLISVSGVIPEDVVKSLLAACRSGEFDVANKEVSSIIADGYPVSQLMAQFLDVIVSADDIPDDQKARICKKLGETDKCLVDGADEYLQLLDVASETIRSLFNMPRTL

SEQ ID NO: 70577 - protein, 71 aa, Zea mays
  Coding DNA Sequence Number=SeqID_28798
MAQGHISLSARTRGAEDQGIPPSVCSVIVESSGITGRPFASTIADEQATVDSEVQQVEVAEQELIECKLCP

SEQ ID NO: 70578 - protein, 127 aa, Zea mays
  Coding DNA Sequence Number=SeqID_28799
  Subcellular localization annotation: CTP_CleavageSite=46; ConfidenceScore=5.36e-01
MHSQGTSTTSSFTRPFIATGLGSIYAPDTTPSKSNVHTTKPVTTPLAAKPSNETQDGAKEHVYGASNNAGSLINAHNSPTNIEIQQRTTKKERLQRGYLQKNLEVETLLTRPAVQLNEIAQKMGYRF

SEQ ID NO: 70579 - protein, 125 aa, Zea mays
  Coding DNA Sequence Number=SeqID_28800
MALPTRSGGPMLLKVLRRAIAGVTVPHNTPDGHPHFRDAQPNALGHTPRPIGGAGAIPPAAGLGPPYSKRRWRSVLRARDNGRGEESHGVPELYPQMPRSTDPDFTGVVAVMAASSSRFGERKKR

SEQ ID NO: 70580 - protein, 452 aa, Zea mays
  Coding DNA Sequence Number=SeqID_28801
  Gene Ontology: Mol. function=nucleic acid binding; Biological process= DNA integration
  Homolog annotation: Hit_ID=Q7XBC6; Match level="QueryCoverage=99%, HitCoverage=26%, E-value=0.0, Identity=70%"; Hit description =Putative copia-type pol polyprotein
  Pfam annotation: Domain name=rve; Domain location=157-307; Score =110.1; E_value=6.5e-30; Accession=PF00665.16; Description=Integrase core domain
MPQDNEGYILYPAGYPESKIKKIHSRKSHSGPNHAFIYKGETSSSRQPTRAKLPRKKTPIASNDHSISFKTFDASYVLTNKSGKVVAKFVGGKHKGSKTCVWVPKVLVSNAKGPKTVWVYASGGSSWILDSGCTNHMTGEKKMFSSYEKNQDSQRAITFRDGNQGVTVFRRSDDSIAFKGVLEGQLYLEKSHTQETLKGFLRRAQNEFDLRIKKIRSDNGTEFKNSQIEGFLEEEGIKHEFSSPYTPQQNGVVERKNQTLLDMARTMLDEYKTPDRFWAKAVNTACYAINRLYLHRILKKTSYELLTGKKPNISYFRVFGSKCFILVKRGRKSKFAPKTVEGFLLGYDSNTRAYRVFNKSSGLVEVSCDVVFDETNGSQVEQVDLDEIGEEQAPCIALGNMSIGDVCPKESEEPPHAQDQPSSSTQASPPTQNEDEAQVDEGEDQNDEPPQR

SEQ ID NO: 70581 - protein, 367 aa, Zea mays
  Coding DNA Sequence Number=SeqID_28802
  Gene Ontology: Mol. function=nucleic acid binding
  Homolog annotation: Hit_ID=Q6F3B9; Match level="QueryCoverage=64%, HitCoverage=75%, E-value=6e-44, Identity=42%"; Hit description =Putative DNA-binding protein
  Pfam annotation: Domain name=zf-CCHC; Domain location=136-153; Score =37.7; E_value=3.9e-08; Accession=PF00098.13; Description=Zinc knuckle
  Pfam annotation: Domain name=zf-CCHC; Domain location=285-302; Score =35.8; E_value=1.5e-07; Accession=PF00098.13; Description=Zinc knuckle
  Pfam annotation: Domain name=zf-CCHC; Domain location=323-340; Score =37.2; E_value=5.7e-08; Accession=PF00098.13; Description=Zinc knuckle
  Pfam annotation: Domain name=zf-GRF; Domain location=188-254; Score =60.8; E_value=4.3e-15; Accession=PF06839.3; Description=GRF zinc finger
  Pfam module annotation: Pfam domain module=zf-CCHC::zf-CCHC::zf -CCHC::zf-GRF; Domain location=136-153::285-302::323-340::188-254
  Subcellular localization annotation: CTP_CleavageSite=48; ConfidenceScore=5.77e-01
LSSLSLRGSDAALAPSLSSSWLSPRTKPSPKPKRFSPSRPVLDHVGVRRGRRRGLPHRPRRRGGRRAGLLQAPPPLHHLVLTDPPQPHPPHRGGPTWPRSREVHSSTWKQQLQDLGYAHKRPDGSKSLAPGTGASGSCFKCGDPGHWARECPQSVPNTGGGGQIGGGGGGGGGGGGGYVNAGVEVEDKACPCGVGSCLVLTSNTPKNPGRKFYKCPMRIRSQNIKLDIIEENSDKSKEGGGGGSCGFFKWCDELQPRVGAPLQASAQYQADSMPSIQNPSQRSSSSCFKCGQENHWARDCPNQPSDPYPDKGGRPVAPAGSPGACYNCGRSGHWSRDCPTSNSGGGGTGTSRARSSSALSSWNSQRY

SEQ ID NO: 70582 - protein, 228 aa, Zea mays
  Coding DNA Sequence Number=SeqID_28803
  Homolog annotation: Hit_ID=Q10CE2; Match level="QueryCoverage=24%, HitCoverage=18%, E-value=2e-22, Identity=84%"; Hit description =Expressed protein
  Subcellular localization annotation: CTP_CleavageSite=34; ConfidenceScore=5.17e-01
MEVRLVTPNEDSVVGTAGCYSRSVAQFTAGTSVSVAVKGSALAFPGLGSPLSQAVSFPPSYKYPDMDDDDDSPPHESAAAAAADLSLTLAPAPALAPPAPPPALPAVASDGGVATARVDGKDVRLFPCLFCNKKFLKSQALGGHQNAHKKERIVGWNPYFYMTPPHPQPNAAPASPTAPPPAYAAGGLLPAPYAAHVYAPVPAAPPPPSFPIASHGSSGGLRYYAPSH

SEQ ID NO: 70583 - protein, 107 aa, Zea mays
  Coding DNA Sequence Number=SeqID_28804
MPRALGANCVPRDRQGGEVSHGRHPGFTGYELCGLDLGPGHYAVSRGRPDSSPPLLIAVKPPQSLRPLVAVGSFTTATISSMDCAPRFTNSSASSRIYQSRESRIGV

SEQ ID NO: 70584 - protein, 107 aa, Zea mays
  Coding DNA Sequence Number=SeqID_28805
MKSAGEGRTGQSDSRCSAGTPDSSVRHRTLSGATPDSPVNYSGGAPVKPEGEEFELVHPGTPDTVRWLTGLSGSLEDMVAGVTWPSILPPGWTVEWDPTSAEEEHEE

SEQ ID NO: 70585 - protein, 85 aa, Zea mays
  Coding DNA Sequence Number=SeqID_28806
MVTMSTESSDAPVIFLWEIAHVISVDVLHALGTYVRPLYDTRRVSEPPRACLNTDLDSATLDLSKVHEELEDAHARIAAVEAQLK

SEQ ID NO: 70586 - protein, 82 aa, Zea mays
  Coding DNA Sequence Number=SeqID_28807
  Subcellular localization annotation: CTP_CleavageSite=70; ConfidenceScore=5.28e-01
MEVGKITYSPPSRCSHKRPHLTSLSLTGLCSCPSPESCPHLALPSTLRPRLASPTPPTTPPPSPCLAVPRHSSKVEDNPDFD

SEQ ID NO: 70587 - protein, 41 aa, Zea mays
  Coding DNA Sequence Number=SeqID_28808
MKLPELGIELYLTGDTGSTSPDFSRPPTHVDRAPRQSLQNS

SEQ ID NO: 70588 - protein, 77 aa, Zea mays
  Coding DNA Sequence Number=SeqID_28809
MQFCIKLLLPWSTGQVGCLQKTRSDDGPCSLQVRLDSDVLAQVKLLSGLKNELRISHIEHNEVLMKIILNEHVKSLR

SEQ ID NO: 70589 - protein, 76 aa, Zea mays
  Coding DNA Sequence Number=SeqID_28810
MKMRAPVVAFAALLMLLLVATRAHGIRLDRLLHDVINSSKEGDKLTTGEPAPSQDRYSESGDGRGVYDMGGQRCSL

SEQ ID NO: 70590 - protein, 32 aa, Zea mays
  Coding DNA Sequence Number=SeqID_28811
MVPSKLWKLVRWLNVGTEKKLADARVVIDRRC

SEQ ID NO: 70591 - protein, 95 aa, Zea mays
  Coding DNA Sequence Number=SeqID_28812
  Homolog annotation: Hit_ID=Q9SQZ0; Match level="QueryCoverage=34%, HitCoverage=5%, E-value=4e-08, Identity=81%"; Hit description =Putative amino acid transporter; 33388-30195
  Subcellular localization annotation: CTP_CleavageSite=40; ConfidenceScore=5.58e-01
MRVAAPAPASISCSHAPQQPPVSRPNPRRHARSLVGLGLGGMVGAGVFVTMGHAARLYVGPSLVVSYAIGGLCALLSAFCVRLRGHGRRRAGGPR

SEQ ID NO: 70592 - protein, 126 aa, Zea mays
  Coding DNA Sequence Number=SeqID_28813
  Subcellular localization annotation: CTP_CleavageSite=98; ConfidenceScore=5.13e-01
SGRTEAGSCLPLPPTTTEPQRFMSGSGPWHPRRISAAAVSYRSSPLAGSRPGAHGGADGSGLLWLRSLVRRAAQRILLALALGCRNRPSLPESPPLPPAAADVTYDYRPRFVYRVLVFQQWLGVWF

SEQ ID NO: 70593 - protein, 139 aa, Zea mays
  Coding DNA Sequence Number=SeqID_28814
  Homolog annotation: Hit_ID=Q2QLQ5; Match level="QueryCoverage=39%, HitCoverage=5%, E-value=1e-11, Identity=75%"; Hit description =Leucine Rich Repeat family protein, expressed
MKPRSTDSTPLEVVSPSSVLTGNLDWKRIEKLIKELPTAPSDLSNAEVPDSDTGTPRGYTGVVVGIQCVIRRDELPQDELLGRATRDPGCADRQENHGARRLWDHVQDRASSGELVAVKKLWVSSSKWLLCGTSNRQID

SEQ ID NO: 70594 - protein, 55 aa, Zea mays
  Coding DNA Sequence Number=SeqID_28815
MAVRRRIPALLFLETVAGQEQVPHDEAHEGCCDEFVRGLGRLLPVNIRLLDRCLH

SEQ ID NO: 70595 - protein, 44 aa, Zea mays
  Coding DNA Sequence Number=SeqID_28816
MARISSSQRPNELHRSVFPTSNDATRIQEKYNSRRSNLTVNLVT

SEQ ID NO: 70596 - protein, 55 aa, Zea mays
  Coding DNA Sequence Number=SeqID_28817
  Homolog annotation: Hit_ID=Q94KE5; Match level="QueryCoverage=84%, HitCoverage=9%, E-value=1e-10, Identity=76%"; Hit description =Cytochrome P450-like protein
MSLRLTSPITPRSYMDLLLGEDIFNTDDELWRKQRKTTIFKFTSKTLRLSVGQRW

SEQ ID NO: 70597 - protein, 107 aa, Zea mays
  Coding DNA Sequence Number=SeqID_28818
MELRLESAHKGGDGALARADTTAALPFERMRESMEFLEVGHADDIWWEGFVLHLESFSNGQKTSAFEWSGERKTLRAIGSTGTTTRFTGRMGKKPSKHRDLSCGVVC

SEQ ID NO: 70598 - protein, 146 aa, Zea mays
  Coding DNA Sequence Number=SeqID_28819
AHVGIRFPGYFFMHSGRSLCHRDLIADSWGRERSCNERVMVGLGSWIDGGELELSVMVVLVNSNPVTILADSGLAVDPPTRSSLVAESSHLSSLPMHANSPLLQQPKRWPRRCAATRTPEYGNSGKWRRSSFPATGDRVLGGESST

SEQ ID NO: 70599 - protein, 324 aa, Zea mays
  Coding DNA Sequence Number=SeqID_28820
  Gene Ontology: Mol. function=hydrolase activity; Biological process =aromatic compound metabolic process
  Homolog annotation: Hit_ID=Q5N8H1; Match level="QueryCoverage=80%, HitCoverage=69%, E-value=4e-42, Identity=37%"; Hit description =Hydrolase-like protein
  Pfam annotation: Domain name=Abhydrolase_1; Domain location=96-316; Score=10.2; E_value=0.0013; Accession=PF00561.10; Description =alphabeta hydrolase fold
  Pfam annotation: Domain name=PGAP1; Domain location=57-237; Score= -93.3; E_value=0.085; Accession=PF07819.3; Description=PGAP1-like protein
  Pfam module annotation: Pfam domain module=Abhydrolase_1::PGAP1; Domain location=96-316::57-237
MAASLRASSSLRSRLLSFSSGCSLCPWRLLLSSPVHSDAPHQTETLAFDEIQLSPEKPATATAFVLHGLLGSGRNWRSFSRALVSELRNRSPSDEWRMVLVDLRNHGRSAGIKGLGPPHNISTAAKDLADLVKARGWPWPDVVVGHSMGGKVALDFAESCSREQLWVLDSVPGQVETENSDGEVEQLLRATRWVVDHMLSLGFSKSLSEWIGSNLKKDNDHVTWAFNLQAAIDMFSSYRERDYWSVLEHPPKDLEIAIVQAEHSDRWVPDDVQRLKALAGRESKPDVGKVSLHVLPNSGHWVHVDNPKGLLEIMVPNFLSAVQN

SEQ ID NO: 70600 - protein, 219 aa, Zea mays
  Coding DNA Sequence Number=SeqID_28821
  Gene Ontology: Mol. function=phosphoinositide binding; Cellular component=multivesicular body; Biological process=cell communication
  Homolog annotation: Hit_ID=Q5N7G9; Match level="QueryCoverage=67%, HitCoverage=45%, E-value=1e-60, Identity=75%"; Hit description =Putative sorting nexin 1
  Pfam annotation: Domain name=Vps5; Domain location=1-149; Score= -70.9; E_value=0.0006; Accession=PF09325.1; Description=Vps5 C terminal like
LGQSLADFGKAIKHLGACEGDLMEKVFSEVGSKSEMLSIKLQREADNLLFNFEEPLKDYVRAVQSIKATMLDRANAFRQHFDLDQERKYKELNLYLKADSEEATKKFEHIVRLMNEELARFQEQKTADIGLAFHEFAKASSQSSKLVPHHKCDLCFLMMFGNGIGGWQLDSILEFIVEDALSSYRDAALNHVPFTERLLMILGPGLPRWLLHRETRQPM

SEQ ID NO: 70601 - protein, 517 aa, Zea mays
  Coding DNA Sequence Number=SeqID_28822
  Pfam annotation: Domain name=Hemerythrin; Domain location=267-339; Score=18.3; E_value=0.027; Accession=PF01814.13; Description =Hemerythrin
  Pfam annotation: Domain name=Hemerythrin; Domain location=348-415; Score=4.6; E_value=7.5; Accession=PF01814.13; Description=Hemerythrin
  Pfam module annotation: Pfam domain module=Hemerythrin::Hemerythrin; Domain location=267-339::348-415
SGEAKFVVFWGRGRDGGRALGSGEAELPMAPEAGLGCCQPHSVEWHSSRSDTILALNAPAIRSVGVAIWPRLLLGEEWASGEPKCTPCLPTSHLPSPTHNHKHSQTLLSAWSHSLRMGNCSPSPRRRRPTEPDSPPLGSTVSAPTVTVNSISVSSYALARSPSVSAAAVDAEDAGVVRVYGSDGCPVAWRLRVSLLYKAAAPLHFTPSEAAPLGRPVLRLSAADPEVCGTADELLRLVDARFEGKPRVAPPERPRAASPSAAAAAEVAELVRLQHRSAERHLEGVAAKVAEMVKKGKKSGKGRNVVEGAEVRRLGKWYGDAMEVMLEHARMEETLIFPDIQRASFPGVCDKVNEQHGRHLPMMNGIKEDIKTLLTLELGSPLFHEVVVNLSVRLKALQDHTKEHFKEEESDLLPRLEQVRRMQREEGKVSDKSSSAWASEAVATMEMTHSKLFPFFMTGLLPQEAMQYLDLVCRCTKNTRHLVSMLRSLAERLEDANPSIIHNNPTKLYEHLLVKSP

SEQ ID NO: 70602 - protein, 129 aa, Zea mays
  Coding DNA Sequence Number=SeqID_28823
  Gene Ontology: Mol. function=hydrolase activity, hydrolyzing O -glycosyl compounds; Cellular component=vacuole; Biological process =carbohydrate metabolic process
  Homolog annotation: Hit_ID=Q8RZ29; Match level="QueryCoverage=99%, HitCoverage=43%, E-value=5e-62, Identity=81%"; Hit description =Putative chitinase
MGKDGDKAVLLSAAPQCPFPDQWDGAAINTGLFDYVWVQFYNNPECQFSSGRNAFLDAWKQWESVPAGQIFLGLPASKDAAGTGFVPAGQLTSQVLPLIKGSPKYGGVMLWSKFYDDRTGYSSAIKSHV

SEQ ID NO: 70603 - protein, 225 aa, Zea mays
  Coding DNA Sequence Number=SeqID_28824
  Subcellular localization annotation: CTP_CleavageSite=51; ConfidenceScore=5.31e-01
MPQVDLESLVCGVSGAGAGAGDRKGSTNPKFAAAAAVANPVAAKTRSNSTRVAGAPPPPAAGTTFFGLPARIRPTFTRRRPSQGRILHGKRAGGGGGGGGEVEPRSPKVSCIGKVLSDRERHGRRRRGWWYGVAAMFRCDGCARVPGGASRKKVALEDDAGRRRQQQQQPGGIAGMRRFKSGRRAASWGDEALAAAATGADPDEGEEEEEPDSKDAVQWSRRPVT

SEQ ID NO: 70604 - protein, 65 aa, Zea mays
  Coding DNA Sequence Number=SeqID_28825
MGIKLHWGLWQYLFSVRVYLDHDDLPYVGSAIIQLRTGRKKEYLQVPLPSSVRYEGVPRSLLVEN

SEQ ID NO: 70605 - protein, 294 aa, Zea mays
  Coding DNA Sequence Number=SeqID_28826
  Gene Ontology: Mol. function=hydrolase activity, hydrolyzing O -glycosyl compounds; Cellular component=vacuole; Biological process =carbohydrate metabolic process
  Homolog annotation: Hit_ID=Q8RZ29; Match level="QueryCoverage=99%, HitCoverage=100%, E-value=1e-142, Identity=80%"; Hit description =Putative chitinase
  Pfam annotation: Domain name=Glyco_hydro_18; Domain location=26-281; Score=184.1; E_value=3.5e-52; Accession=PF00704.18; Description =Glycosyl hydrolases family 18
MANRALAPFLLVTTLLVSLLATCHGGGIAVYWGQNDGEASLSETCASGNYKFVILAFVYKFGKGQTPQLDLASHCDPSSGGCTGLSKDIRSCQNSGIKVLLSIGGGDGSYGLSSEGDARDVAAYLWNNYLGGTSSSRPLGDAVLDGIDFDIELGGAKYWDSLARDLKNKGGKGVLLSAAPQCPFPDEWDGGAINTGLFDYVWVQFYNNPPCQVNAGRGAFMDAWKQWESVPAGQIFLGLPASKDAAGTGFVPADDLNSNVLPLIRGSPKYGGVMLWSKYYDDRAGYSDAIKSHV

SEQ ID NO: 70606 - protein, 678 aa, Zea mays
  Coding DNA Sequence Number=SeqID_28827
  Gene Ontology: Mol. function=zinc ion binding; Cellular component =nucleus; Biological process=cell cycle
  Homolog annotation: Hit_ID=Q1S0W0; Match level="QueryCoverage=100%, HitCoverage=59%, E-value=0.0, Identity=60%"; Hit description=PHD -finger, putative
  Pfam annotation: Domain name=HEAT; Domain location=153-191; Score =6.7; E_value=6.6; Accession=PF02985.12; Description=HEAT repeat
  Pfam annotation: Domain name=HEAT; Domain location=392-427; Score =11.3; E_value=1.8; Accession=PF02985.12; Description=HEAT repeat
  Pfam annotation: Domain name=HEAT; Domain location=434-466; Score =0.5; E_value=37; Accession=PF02985.12; Description=HEAT repeat
  Pfam annotation: Domain name=HEAT; Domain location=505-541; Score =2.2; E_value=23; Accession=PF02985.12; Description=HEAT repeat
  Pfam annotation: Domain name=PHD; Domain location=223-269; Score=8.5; E_value=0.0081; Accession=PF00628.19; Description=PHD-finger
  Pfam module annotation: Pfam domain module=HEAT::HEAT::HEAT::HEAT::PHD ; Domain location=153-191::392-427::434-466::505-541::223-269
LLQLKAIGVICTVFSSYTQHRSYLVDETLHLLRKLQFSKNAVRTYHLADEDQKQIQMITALLVHLVQFSAIVPDSLKGTVDWTTIVDASSDADYYPIQCHEAATEACCRFWTDVLQRFTAAKSQDMSETKGIIDNLVQDFLTILNLPEYPAAASILEVLCVLLLQNAGLKSKDINARCFAIDLLGGIASRLKRDSVVCSEEKLWILQDFTDKGSDGSIFLKNKCCVCLGGRGINIACNECGRCFHSDCMGAGSQDNLQRDSVCPLCFCKQQLNVLQSYCQSQIKENGKKTAASASKKSAKPTEVSAVEIVQQILLSYLQEAGSQDDGNLFTRWFYLCIWNKDDQHSQEKIIYYLARLKSKEILRDSGNGLAISRDSAKKICLALGQKNSFCRGFDKILALLLASLRENSPVIRAKALRAVSCIVEADPEVLGDKRVQYAVEGRFCDSAISVREAALELVGRHIASHPDVGLKYIEKVAERIKDTGVSVRKRAIKIIRDLCASNPNTDTTHAFVEIISRVNDEESSVQDLVCKTFYELWFEEPTGSHKHLVADGSSVPMEIAKKTEQIVDMLRKMPNHQPLITIIKRNLTLDFLPQSTKAAGINSSMVASIRKRCELICKRLLERILQVEEGAANEMEIHTLPYIVALQAFCIVDPTLCIPVTDPSKFVVTLQPYLNIQ

SEQ ID NO: 70607 - protein, 402 aa, Zea mays
  Coding DNA Sequence Number=SeqID_28828
  Homolog annotation: Hit_ID=Q10F41; Match level="QueryCoverage=55%, HitCoverage=36%, E-value=2e-61, Identity=52%"; Hit description =Nodulin family protein, putative
  Pfam annotation: Domain name=MFS_1; Domain location=1-306; Score= -53.7; E_value=0.09; Accession=PF07690.6; Description=Major Facilitator Superfamily
  Pfam annotation: Domain name=Nodulin-like; Domain location=1-108; Score=-138.5; E_value=0.0064; Accession=PF06813.4; Description =Nodulin-like
  Pfam module annotation: Pfam domain module=MFS_1::Nodulin-like; Domain location=1-306::1-108
  Subcellular localization annotation: CTP_CleavageSite=46; ConfidenceScore=5.08e-01
LYRAFDGGGGGEAATLLLLLACLPTAVSLLFSFTVRVIPPRRPPISSSTAERKGVLGFLGVSVLVGVYLLALNVVEVKAATRLPRRFYHVTNTLLVLILVVGPLVVVVKQEYHQQTSSHSHSTLQQDVPRAVPGPGEQEINYSVRQALCSQHMLLLFVATACGIGGIMTVVDNMSQIGQSLGHSQRTITMLVSLVSLANYAGRVLAGLGSDYVVARYRLPRPLALTATLLLAFFGHLLVAAGLRDGVYAASLIMGFCLGSLWTVLFAVVSEVFGLKHFSTLYNLSTLASPVGSYVLSVQVAGRMYDREAQRQGHRRQDELACVGVQCFRASFEIIAGVTLLGVAVSMVMAWRTRAFYHDRTRFLFSAAAADVADTAATTDSSSSRQEDENKTIAASQSIGIC

SEQ ID NO: 70608 - protein, 443 aa, Zea mays
  Coding DNA Sequence Number=SeqID_28829
  Gene Ontology: Mol. function=phosphoric monoester hydrolase activity; Cellular component=cytoplasm; Biological process=dephosphorylation
  Homolog annotation: Hit_ID=Q2QT46; Match level="QueryCoverage=98%, HitCoverage=64%, E-value=1e-166, Identity=68%"; Hit description=PTEN, putative, expressed
GKYKVYNLCSERLYDASLFEGKVACFPFDDHNCPPIQLVISFCHSAYSWLKEDIENVVVVHCKAGKARTGLMISSLLLFLKFFPTAEESIEYYNQKRCVDGKGLILPSQIRYVKYFERILTYFNGENQPPRRCMLRGFRLHRCPYWIRPSITVSNHNGVLFSTKKHPRTKELMSKFTNYYHNFSQKISGLVHQRRGLWFFALPGEPGLAEVAGDFKIQFHDRQGDFYCWLNTTMMENRVTLNPTDLDDFDKRKLPSPGFQIEVVLVDYDGSQPAKPKPGAGPAADKSHADSSASTVAKENSAAPEESNKGTGSNNDRDEVFSDSDGEDGSSNGRKEKTAGGGQSSVNAAKPSQTGNMEEAAASAAASRLDKVAISSEQGTTKAPDGTSLKTEVSSKASSTTAPPPPAADSSSMSEFKAIAADASVFSFGDEDDYETLEINNGN

SEQ ID NO: 70609 - protein, 162 aa, Zea mays
  Coding DNA Sequence Number=SeqID_28830
MADAVSQDVIFLGAPRKVSGAKPTMKEVQGGGNGIRHDRRHLRKHHLAASGGQLVDNLGDGVEGLEPAGAGDRGASEAERARQEGRRGANRGSGWLATEVEEKQYGRERLRQSGIERQLIGNLDEGLRSGVAIETGHVFAPASVSVHRMTGNAEEAGNSSGF

SEQ ID NO: 70610 - protein, 125 aa, Zea mays
  Coding DNA Sequence Number=SeqID_28831
  Gene Ontology: Mol. function=structural molecule activity; Cellular component=protein complex; Biological process=microtubule-based movement
  Homolog annotation: Hit_ID=P29512; Match level="QueryCoverage=91%, HitCoverage=31%, E-value=5e-29, Identity=54%"; Hit description =Tubulin beta-2/beta-3 chain
  Pfam annotation: Domain name=Tubulin_C; Domain location=14-122; Score= 16.7; E_value=0.00012; Accession=PF03953.7; Description=TubulinFtsZ family, C-terminal domain
MSGVTCCLCFSGQLNSDLRRLAVNLIPFPPPCTSFMIWDAKNMMCIVDPPHGCYLTASAMFCDKMSNREVDEQMLNVPNNDSYFVDSISNNVQSTDVPLLRVNYTFTQLGYCVSLDLCLINDFFG

SEQ ID NO: 70611 - protein, 65 aa, Zea mays
  Coding DNA Sequence Number=SeqID_28832
MKARSRSYTGRYIKEAWATSDIHLHDLSTKQTMAKQTESYELHKLRPQVDDLFKEFDALVDRLSG

SEQ ID NO: 70612 - protein, 264 aa, Zea mays
  Coding DNA Sequence Number=SeqID_28833
  Gene Ontology: Mol. function=zinc ion binding
  Homolog annotation: Hit_ID=Q1S0W0; Match level="QueryCoverage=65%, HitCoverage=16%, E-value=4e-30, Identity=41%"; Hit description=PHD -finger, putative
MYKRAPQKLKSKFYRMTIRPAMLYGPFGGPGYHNQEREKHFEHLTPNMSKTRNGSAFSQDEINSHREHFRNELTPDSVASKKPKVRKKEINNSVSTSPHSIPNNQEVIATFCEAVEDFCGKAEIPDDGDGGDWLSIPLDDVKVLVNENYICFDPKGYCMRFLWIQLQGLSIDVKENSDAFDAEPLVFSALESSHAALAIMTHHDMPKQLYREELIERIIDFSRHQITDCMAASNPTFRALYKPAGNVANDGNIKAHADIFPLNM

SEQ ID NO: 70613 - protein, 99 aa, Zea mays
  Coding DNA Sequence Number=SeqID_28834
  Homolog annotation: Hit_ID=Q2QRD1; Match level="QueryCoverage=55%, HitCoverage=5%, E-value=4e-11, Identity=57%"; Hit description=HAT family dimerisation domain containing protein
PRAKLRGFNSALQFLSNVTFTDYSDYYNNVRTELSNVFAKYDSKFGGTRLQRATQSDWQMGDDREQHNLENPELQQAFENQYLDGDGDDNQDAQPVIVA

SEQ ID NO: 70614 - protein, 656 aa, Zea mays
  Coding DNA Sequence Number=SeqID_28835
  Gene Ontology: Mol. function=transferase activity, transferring nitrogenous groups; Cellular component=soluble fraction; Biological process=biosynthetic process
  Homolog annotation: Hit_ID=Q84UX4; Match level="QueryCoverage=78%, HitCoverage=98%, E-value=0.0, Identity=80%"; Hit description=Alanine aminotransferase
  Pfam annotation: Domain name=Aminotran_1_2; Domain location=97-497; Score=40.3; E_value=2.2e-09; Accession=PF00155.11; Description =Aminotransferase class I and II
MARRRPMDYEELNEKVKKAQYAVRGELYLRASQLQKEGKKIIFTNVGNPHALGQKPLTFPRQVRVAISSASHPHGVGCSTTPSLLSYPDGTSSRSRAQVVALCQAPFLLDDPNVGLMFPPDAIVRAKRYLAMAPGGLGAYSDARGIPGIRKEVADFIHKRDGYPSDPELIYLTDGASKGVMQMLNAIIRNERDGILVPVPQYPLYSAIISLFGGSLVPYYLEEEANWNLDFANIRQAVAEARSKGITVRATVIINPGNPTGQCLSEANIRELVRYCYHENLVLLADEVYQQNVYQDERPFISARKVMFDMGPPISREVQLVSFHTVSKGYWGECGQRGGYFEMTNLPPKTVDEIYKVASIVLSPNVPGQIFMGVMVNPPKPGDISYPKFTAESKSILESLRRRARMMTDGFNSCRNVVCNFTEGAMYSFPQIQLPARAIEAAKRAGKAADVFYCLKLLEATGISTVPGSGFGQKEGVFHLRTTILSQPRKTSPTHHVELQEVQRLISWSNTRATPGCDVNMKRSDRATILLLLPILVETVIGALCDIFAAATAALVCYVCVACSERVKKRPIMYILSRAAGRKHFAFKGKGSISSAAAARALDRLNRYLGQSKTVGNKPDRGYFTLEFTWSHWHFAAACIRGEDSERSARSDSVTI

SEQ ID NO: 70615 - protein, 214 aa, Zea mays
  Coding DNA Sequence Number=SeqID_28836
  Gene Ontology: Biological process=regulation of GTPase activity
  Homolog annotation: Hit_ID=Q7XIU9; Match level="QueryCoverage=67%, HitCoverage=88%, E-value=4e-39, Identity=53%"; Hit description=Zinc finger and C2 domain protein-like
  Pfam annotation: Domain name=C2; Domain location=49-128; Score=103.9; E_value=4.9e-28; Accession=PF00168.20; Description=C2 domain
MAGVVVGDVGIDKAIETRNSSNSDYRRVVEMNRSKQRLDSVMDGLVGLLKVRVVRGINLAYRDARGSDPYVVLRLGKKKLKTSVKKRSVNPIWQEELTLTVTDPSQPLKLEVFDKDTFSRDDPMGDAEVDVAPLMEAVSMNPREESLRNGAIIRSERPSARNCLADESHVCWRNGKFAQDMILRLRNVESGEIQLQLQWVNFPPGPGPAAATTR

SEQ ID NO: 70616 - protein, 122 aa, Zea mays
  Coding DNA Sequence Number=SeqID_28837
  Homolog annotation: Hit_ID=Q6Z4F2; Match level="QueryCoverage=86%, HitCoverage=16%, E-value=1e-31, Identity=62%"; Hit description =Putative nodule-specific protein
  Pfam annotation: Domain name=Nodulin-like; Domain location=28-122; Score=-67.2; E_value=6.4e-07; Accession=PF06813.4; Description =Nodulin-like
  Subcellular localization annotation: CTP_CleavageSite=10; ConfidenceScore=5.09e-01
MAAFGCVHAAAATLGGGARFAVRVLCGRWFMLFASTMIMTTSGGAYIFGAYSKALKASLEYDLDTLDTIGFSKNMGISLGIVSGLINEVAPPWVVLVTGAAMNLAGYLMVYLAMSAAAHRPP

SEQ ID NO: 70617 - protein, 67 aa, Zea mays
  Coding DNA Sequence Number=SeqID_28838
  Homolog annotation: Hit_ID=Q7XHN9; Match level="QueryCoverage=96%, HitCoverage=6%, E-value=1e-24, Identity=84%"; Hit description =Tetratricopeptide repeat(TPR)-containing protein-like
SAIKELSVALTYESSSIHCLYLRASSHHAIGEYKAAIKGYDDVLDLELDSMDKFVLQCLSFYQNHID

SEQ ID NO: 70618 - protein, 175 aa, Zea mays
  Coding DNA Sequence Number=SeqID_28839
  Gene Ontology: Cellular component=intracellular; Biological process =RNA processing
  Homolog annotation: Hit_ID=Q6YPH2; Match level="QueryCoverage=75%, HitCoverage=19%, E-value=1e-43, Identity=64%"; Hit description =Putative hepatocellular carcinoma-associated antigen 66
MKLFSHDKVCFEKLVKCAMLSLSLAGGSDSGASVSSAIVGWYLQRDGVKHARRMYKRLLALPRPSLKFMQYCIALEANLASLGDNGALKDARRLYDSALDLYPQEREVWRSYYDLELKMGTSESANAVYSRSLAGLLVMLFLSVEVLWCNSVNCDVNKFWDLEPFVEILKVYWWS

SEQ ID NO: 70619 - protein, 127 aa, Zea mays
  Coding DNA Sequence Number=SeqID_28840
  Subcellular localization annotation: CTP_CleavageSite=71; ConfidenceScore=5.21e-01
MSRAAVTGSENTPADASRIQGLPLPSPALTPSAMPGFMVAQALEASTGGDTVTLPPFDISAPPPRPPSICRSSSPVLASPAIRGGHAPLGRTPSLPLAASCLLPLDRIYLPPWPRYQGSRLPLVHID

SEQ ID NO: 70620 - protein, 150 aa, Zea mays
  Coding DNA Sequence Number=SeqID_28841
  Gene Ontology: Mol. function=phosphoric monoester hydrolase activity; Biological process=dephosphorylation
  Homolog annotation: Hit_ID=Q2QT46; Match level="QueryCoverage=98%, HitCoverage=27%, E-value=4e-26, Identity=45%"; Hit description=PTEN, putative, expressed
  Subcellular localization annotation: CTP_CleavageSite=69; ConfidenceScore=5.29e-01
MEEHQVKPSDLPPTSLHNQDSAATPVTSADPARPAASNDSPSQVASAAPAAVSAPTAAPAEDAAGREASASVFSASGLSSWAKNLKIPQPSPAAQQDEGAEGSTSPTTGQPGVFGSLTKGIVDSSKNAVKAVQVKARHMVSQNKRRYQFL

SEQ ID NO: 70621 - protein, 176 aa, Zea mays
  Coding DNA Sequence Number=SeqID_28842
  Homolog annotation: Hit_ID=UPI0000DA43ED; Match level="QueryCoverage =49%, HitCoverage=62%, E-value=2e-08, Identity=39%"; Hit description =PREDICTED: similar to keratinocytes proline-rich protein
PRPVMRNKDGGGKEGSKGEEEDLLLKQLQEMKKEIVGKCLGLPVAIIEAARGFADLEPLPDDTSPLKPVTSKDIDKDKQLSQANKVGRGGGSSEVEVESEPLGRARRRPSAEARAESEPWGRAKRSSSTSGAEPESEPWGRAKRSSSSSGAEPESEPWGRAMRSSSSSGAEPESEP

SEQ ID NO: 70622 - protein, 59 aa, Zea mays
  Coding DNA Sequence Number=SeqID_28843
MANAGRKLPYVFLLLVALAAGVLSVVVLQKVREQRVFARRLQERDRQLVTLRILLQVAH

SEQ ID NO: 70623 - protein, 63 aa, Zea mays
  Coding DNA Sequence Number=SeqID_28844
  Gene Ontology: Mol. function=heat shock protein binding; Cellular component=integral to membrane; Biological process=protein folding
  Homolog annotation: Hit_ID=Q8RV04; Match level="QueryCoverage=95%, HitCoverage=54%, E-value=6e-19, Identity=75%"; Hit description =Expressed protein
  Pfam annotation: Domain name=DnaJ; Domain location=9-57; Score=-8.3; E_value=0.028; Accession=PF00226.21; Description=DnaJ domain
MARPSVYIGGSRETASAEKVKEAHKRVMVANHPDAGGSHYLASKINEAKDVMTGKTKGGGSAF

SEQ ID NO: 70624 - protein, 85 aa, Zea mays
  Coding DNA Sequence Number=SeqID_28845
MAAKMESDKVATLPGYPTVIAHAEPSVPLDYPVHQRSNGSSAQRSTAKARVRATVRKQCAQESEQSPKAHRTVNITYPVRHRTIR

SEQ ID NO: 70625 - protein, 135 aa, Zea mays
  Coding DNA Sequence Number=SeqID_28846
  Homolog annotation: Hit_ID=Q8SA97; Match level="QueryCoverage=35%, HitCoverage=9%, E-value=3e-07, Identity=61%"; Hit description =Ornithine carbamoyltransferase
  Subcellular localization annotation: CTP_CleavageSite=51; ConfidenceScore=5.69e-01
MDFASPDPRARPPSRPRKMDFASPDPRARPPSRPRKMDFASPDPRARTQPRLRRRRTPPRLTLGLGLSLDSGRRRTPPRPTPGLGLSLSSGRRWTPPRPTPRLGFNLDLGGIATSPKLGSRPATSLGGHHYPAPS

SEQ ID NO: 70626 - protein, 96 aa, Zea mays
  Coding DNA Sequence Number=SeqID_28847
MVGAGDVGADGRWSRRGGGGGAGANGSEKAVSGRLRWREPVAGRKTAGRATAGAGGDGRHGRRRGRWWASVKGWAGIGGEALVTGEMKRRGWGVVA

SEQ ID NO: 70627 - protein, 524 aa, Zea mays
  Coding DNA Sequence Number=SeqID_28848
  Gene Ontology: Mol. function=transferase activity, transferring hexosyl groups; Cellular component=mitochondrion; Biological process= metabolic process
  Homolog annotation: Hit_ID=Q2R047; Match level="QueryCoverage=72%, HitCoverage=80%, E-value=1e-125, Identity=31%"; Hit description=Salt- inducible protein, putative
  Pfam annotation: Domain name=PPR; Domain location=270-304; Score =20.4; E_value=0.0065; Accession=PF01535.11; Description=PPR repeat
  Pfam annotation: Domain name=PPR; Domain location=305-339; Score =10.0; E_value=0.49; Accession=PF01535.11; Description=PPR repeat
  Pfam annotation: Domain name=PPR; Domain location=340-374; Score =25.9; E_value=0.00015; Accession=PF01535.11; Description=PPR repeat
  Pfam annotation: Domain name=PPR; Domain location=416-450; Score =30.9; E_value=4.4e-06; Accession=PF01535.11; Description=PPR repeat
  Pfam annotation: Domain name=PPR; Domain location=451-485; Score=8.9; E_value=0.66; Accession=PF01535.11; Description=PPR repeat
  Pfam module annotation: Pfam domain module=PPR::PPR::PPR::PPR::PPR; Domain location=270-304::305-339::340-374::416-450::451-485
MGDWAVRQPTFLKKEAWKAQLHQLNTNSALLIASSFGDGALQTAVRLGRQLANRRAGGPPDSETSSANASQQAPLTPVVAVPACSSSRVPAARLRRLAAGAEASAGLRRHPQQPGPGPIQHASTVHGSARRRHSKDLSREVPSCNYSVLASVHHDDSSGDERLNYASDNEPIQKQQKSLSSYSVVQALRCLRRKPAVAFAYFKDIHSLGFNHDFSTYSEIIQILSHSFQGKMLVSLFCEILSGTANGDPEILTLIGHLSKTCATSHILSYAVNCLIKAYTNSHDVQETVEMFCHLCRLGFVPTLWACSFLIKFVSQSGDSDMVVRAYDQMKCFQLMLDTQSLNIVIRSFFEVNKAEESFQVWVRMIEMGMKPDAHGYSSFIIGLCDCGKYDLAYNMVSKYTVLHEITQERVAIESIAYNMVIDGLCKEMKLEEAEKVLDIKTRHGSTPDLYGYSYLIRSYCKMGNLEKCLKKLGMISEVIVHFQKFRDLGLHLDGVLYNIAMDAYCKLGNMNEAVLLLTEMMAG

SEQ ID NO: 70628 - protein, 51 aa, Zea mays
  Coding DNA Sequence Number=SeqID_28849
MELDCAVGGLASGLPPLSRVDRFLDNRVMGCMCSSEASWLDKLTEIHVKPK

SEQ ID NO: 70629 - protein, 452 aa, Zea mays
  Coding DNA Sequence Number=SeqID_28850
  Gene Ontology: Mol. function=RNA binding; Cellular component =ribonucleoprotein complex; Biological process=mRNA metabolic process
  Homolog annotation: Hit_ID=Q6ZBV0; Match level="QueryCoverage=99%, HitCoverage=98%, E-value=1e-158, Identity=65%"; Hit description =Putative KH domain protein
  Pfam annotation: Domain name=KH_1; Domain location=115-177; Score =59.4; E_value=1.2e-14; Accession=PF00013.19; Description=KH domain
  Pfam annotation: Domain name=KH_1; Domain location=196-262; Score =60.8; E_value=4.4e-15; Accession=PF00013.19; Description=KH domain
  Pfam annotation: Domain name=KH_1; Domain location=383-445; Score =46.0; E_value=1.3e-10; Accession=PF00013.19; Description=KH domain
  Pfam annotation: Domain name=KH_2; Domain location=115-163; Score =10.9; E_value=0.006; Accession=PF07650.7; Description=KH domain
  Pfam module annotation: Pfam domain module=KH_1::KH_1::KH_1::KH_2; Domain location=115-177::196-262::383-445::115-163
ITGGAEAVKKALFGVSTIIYKHPSKENIPLETSIPDPTPSIIIPSELPVYPASNFYSAPDAAIPSVHPSMSVLGSTRHVPELAVPADDHGRLPIYQSILPVIPTYSAPKCSGELEFRVLCPGGKIGLVIGRGGATIKNIRQESGARIDVDDAKNDKEESIITIISTESTDDVKSAAVEAVLLLQAKINDSEDDRMNLRLLVPNKVIGCLIGRGGSIVNDMRKKTKANILISKGDKPRRASSSDELVEVSGEADKLRDALVQIILRLREAVLKESVESQNSDRDGQLTVAASDSLYGSSLPLPALLPHNQQIAPLGYDRRGEPERALEVFPRTSSYGYSSMQAFLDIYEFILILIVDILDQVTDDGYGGLPSYASKAYEEHVPRLEMTVPASGISKVMGKHGTNLDNIRKISGAHIEIIEPKSSRHEHIAYISGTSEQRHSAENLIKAFIMST

SEQ ID NO: 70630 - protein, 69 aa, Zea mays
  Coding DNA Sequence Number=SeqID_28851
MTPEGLDDALSSLGASKEGDRSRVARVGVEGRRDYLEREEGVPGKGDGDVDLPVITPRIMGDLFSNAMS

SEQ ID NO: 70631 - protein, 66 aa, Zea mays
  Coding DNA Sequence Number=SeqID_28852
MEKDRQDAVRKRWAVTSVTPQSTPDARPACPASRQSPAGAMAIARAYKAPKDFDRTPPHALDLTGA

SEQ ID NO: 70632 - protein, 96 aa, Zea mays
  Coding DNA Sequence Number=SeqID_28853
  Subcellular localization annotation: CTP_CleavageSite=37; ConfidenceScore=5.09e-01
MAEQGTRFIPPLMVQRIPTTMRHGSTAARRQYRPSPAVAQVWPRRHHCWPPVARVHPPSSLSAAQPSLHNGSGGARRRLLQHPHLFLYISLGVAQK

SEQ ID NO: 70633 - protein, 54 aa, Zea mays
  Coding DNA Sequence Number=SeqID_28854
MKHDFAFEAAFLEPKQLFVSVWYDDDDDDPMVTLQYLPARLQQRLLLRQKRLQS

SEQ ID NO: 70634 - protein, 71 aa, Zea mays
  Coding DNA Sequence Number=SeqID_28855
MQDVVDGSTVTTEGSLHDERLLFFQQRPLPHFKNADLPPNILCMIVYPKLCIGHPKLWINGIEKQGVLKEI

SEQ ID NO: 70635 - protein, 349 aa, Zea mays; identical to SEQ ID NO: 51146
  Coding DNA Sequence Number=SeqID_28856
  Gene Ontology: Mol. function=DNA binding; Cellular component=nucleus; Biological process=regulation of transcription
  Homolog annotation: Hit_ID=Q6K539; Match level="QueryCoverage=99%, HitCoverage=95%, E-value=1e-104, Identity=60%"; Hit description =Putative OsNAC7 protein
  Pfam annotation: Domain name=NAM; Domain location=10-142; Score =290.4; E_value=3.4e-84; Accession=PF02365.6; Description=No apical meristem (NAM) protein

SEQ ID NO: 70636 - protein, 108 aa, Zea mays
  Coding DNA Sequence Number=SeqID_28857
MAGEKVASKLALVMASNVPGMIEEALVNESRLLTKAAGPSAVDVLAIRLRAHEANPCAAFQKSTTKGGHIQVLTNTHYISDADLVRLVGEDTTLMLKEDEVVVFPKLS

SEQ ID NO: 70637 - protein, 103 aa, Zea mays
  Coding DNA Sequence Number=SeqID_28858
MASRDFSGGLGAVGGTLGCLATGGGGVTSMASAIEEKCNEILGSYNKEDEALSMAFGGQKNTDLCGAQGLWSMAKVKVVWARVDVLGAVKDECCVLADGSEQT

SEQ ID NO: 70638 - protein, 204 aa, Zea mays
  Coding DNA Sequence Number=SeqID_28859
HFAEQPSSHSNIEIGYEPLEELLGSSTALRLTTGEAQDDNASDAMNRDSFALPSPPLGTPTISACSPATVPSQSPTTLNVVVSFSPVAINGRPLRFPSSGTVTPSLDPSLLLVVLPDRDLLQYCMGHCRVGSACDRAHAQRPNCTVQYVRGSVSGVACATAPFAVITGAPLRQVRLSLCCPASNVVRVRRRKSRILAATSHHHD

SEQ ID NO: 70639 - protein, 88 aa, Zea mays
  Coding DNA Sequence Number=SeqID_28860
MTSAKERRSCTDTPKLLGTSEEVCFNFSHRSQAALTFGLKMLQQSSDEHIVTIYFFYPRTHFPMTKFLLVIPSSQCQDLHQRDRKGGI

SEQ ID NO: 70640 - protein, 60 aa, Zea mays
  Coding DNA Sequence Number=SeqID_28861
MNKDRRRSRTIDDPLRQSLRVGDGGVAPAPPLPLPLEQSNIYAMGHTGPLGSGRHVFGDS

SEQ ID NO: 70641 - protein, 240 aa, Zea mays
  Coding DNA Sequence Number=SeqID_28862
  Subcellular localization annotation: CTP_CleavageSite=68; ConfidenceScore=5.48e-01
MAFLLTLLLPWWPLSPWLSPAAAWFIFFNAVVSAIAVMSTSGSGSGGAGATPPSPTRRLCRSGWSSCRSMKAAVLPRPRTVAGQKQRRRPRLSAIHRLRPQQPARRQRSAAPRNRAPLWRWQQPWSTRLRHRQRRRRGNAEKEQEHDESAISLDEAYALAHRHRTKPLASPPSAAASATAALPTEHKKVVADWRRVPKAGEALEGKAELNARADLFIRQFREELKLQRLNSVLNHTHALG

SEQ ID NO: 70642 - protein, 133 aa, Zea mays
  Coding DNA Sequence Number=SeqID_28863
  Subcellular localization annotation: CTP_CleavageSite=80; ConfidenceScore=5.30e-01
MRYTDADVHRDGFEWGCVYRALAAPASTATSSISRLRFCSLVAPASTATSSISRLRFCSPVSLSRQHQRAFTSSQHQWVSAISAGSIPTGHNGFFLLWDCLSEIVFNAQEIVISGYCMHMTLDVLQDLPLTDL

SEQ ID NO: 70643 - protein, 219 aa, Zea mays
  Coding DNA Sequence Number=SeqID_28864
  Homolog annotation: Hit_ID=Q8SA97; Match level="QueryCoverage=48%, HitCoverage=20%, E-value=7e-14, Identity=56%"; Hit description =Ornithine carbamoyltransferase
  Subcellular localization annotation: CTP_CleavageSite=37; ConfidenceScore=5.09e-01
MRLRRRVYGLGYEQARTRARSRKTANSAPPDPRARTRAKSRKTANSAPPDPRARTRAKSRKTANSAPPDPRARTRAKSRKTANSAPPNAGLGLGLSPGRRRTPLRPTQGSDSGSSLEDDELRFARPQGSDSALASAERPPPRPTQGLGLGLGHGRQTRPRLRRSLHVAQPRAQASHEDVSKDSTAPTAVPPPGSVAPPTATTSHQLGAKISPAATSACT

SEQ ID NO: 70644 - protein, 81 aa, Zea mays
  Coding DNA Sequence Number=SeqID_28865
MESLGVRWRWASVGPLPSRYLPLECFDLNKTPFISSKVPSAAHDYHHSLSCGRQGLVLARCQDTKVVDGEWRLILVHASKY

SEQ ID NO: 70645 - protein, 84 aa, Zea mays
  Coding DNA Sequence Number=SeqID_28866
MAAASDDLNGWGSREWQQPAKEELSIRVRVTGDPKPLASNRWVTRTAQSFIRFAFSFLQHAQSSLLRCNSVLSPLAGAASESVE

SEQ ID NO: 70646 - protein, 93 aa, Zea mays
  Coding DNA Sequence Number=SeqID_28867
MGLGVCDSLCQGGDEDDDYDYAYGNGCPRCNHCSGEDEVMEEDFQEFQEYDEFYVWVSGKPPVGCLCRPCVSMFLFCTLIIVIDYVDVLDIMM

SEQ ID NO: 70647 - protein, 74 aa, Zea mays
  Coding DNA Sequence Number=SeqID_28868
MEARSAIIHQTIRCAIGLSCEPAEQRLSAQPTVDCGDVRAEQYRAEVRTSKSESIGLSGVAPDCPVWHRTVRCS

SEQ ID NO: 70648 - protein, 91 aa, Zea mays
  Coding DNA Sequence Number=SeqID_28869
MVMVIVRGEPSACMKKRINHNGDKERQNSTKMEKGTRPTIMSKVREFLLIGSLREETEALTGDPRPPSSDRVCLTSGNLTATEGATPVTEL

SEQ ID NO: 70649 - protein, 799 aa, Zea mays
  Coding DNA Sequence Number=SeqID_28870
  Gene Ontology: Mol. function=RNA-directed DNA polymerase activity; Cellular component=intracellular; Biological process=RNA-dependent DNA replication
  Homolog annotation: Hit_ID=UPI00004C1733; Match level="QueryCoverage =85%, HitCoverage=50%, E-value=0.0, Identity=91%"; Hit description =UPI00004C1733 related cluster
  Pfam annotation: Domain name=RnaseH; Domain location=334-461; Score =9.7; E_value=7.2e-06; Accession=PF00075.14; Description=RNase H
  Pfam annotation: Domain name=rve; Domain location=541-700; Score =116.8; E_value=6.2e-32; Accession=PF00665.16; Description=Integrase core domain
  Pfam module annotation: Pfam domain module=RnaseH::rve; Domain location=334-461::541-700
MKEFDQLATSFITPFGMYCYITMPFGLRNAGATYQSCMNHVFEEHIGRTIEAYVDDIVVKTRKASDLLSDLETTFRCLKAKGVKLNPEKCVFGVPRGMLLGFIISERGIEANPEKIAAITNMGPIKDLKGVQRVMGCLAALSRFISRLGERGLPLYRLLRKAECFTWTPEAEEALGNLKALLTNAPILVPPAAGEALLIYVAATTQVVSAAIVVERREEGHALLVQRPVYFISEVLSETKIRYPQIQKLLYAVILTRRKLRHYFESHPVTVVSSFPLGEIIQCREASGRIAKWAVEIMGETISFAPRKAIKSQVLADFVAEWVDTQLPAAPIQPELWTMFFDGSLMKTGAGAGLLFISPLGKHLLYVLRLHFPVSNNVAEYEALVNGLRIAIELGVRCLDARGDSQLVIDQVMKNSHYRDPKMEAYCDEVRCLEDKFYGLELNHIARRYNETADELAKIASGRTTVPSDLFSRDLHQPSVKTDDTPEPEKASSLPEAPSAPEGFYWPTAVADATRIVYTCQGCQFYARQTHLPAQALQTIPITWPFAVWGLDLVGPLQKVPGGYTHLLVAIDKFSKWIEVRPLNSIRSEQAVAFFTNIIHRFGVPNSIITDNGTQFTGRKFLDFCEDHHIRVDWAAVAHPMTNGQVERANGMILQGLKPRIYNDLNKFGKRWMKELPSVVWSLRTTPSRATGFTSFFLVYGVDSILPTDLEYGFQGRGPTTTEATRPTEKTPWTSWKRLGTWPYYTRRGISSPCDATTPEWFSPETSRWATWYFDYNKTPEGGTSSRLPGKGHSSSPRF

SEQ ID NO: 70650 - protein, 385 aa, Zea mays
  Coding DNA Sequence Number=SeqID_28871
  Subcellular localization annotation: CTP_CleavageSite=79; ConfidenceScore=5.41e-01
MSGERPRSSLPPRPEPFRFWLPYRSSVGSWRQQPPPPSPVLSTMPSSPRPQPPSPPPPPTPVGPVHQRPAPHTTVEDIPLQAEPSHESDTISVQSSDSSQLRGGRPSTADLELTLSGAPPAGQEQRSGVDDGNRRNDTKIAISGFPRSRLFDGARAPYRREIEDGLKSLAARETPAPRPESGHGYRVITLAGHNVGASMVLGYGGGLTEAPAPLPRAAEPGVPVPGPGSRPSAVAANVNSNVQSVNNSSMEESTCTAGNPGVHVDIKNAREELAAVTPTPIQMEEEKPKEPVRRPPLAVTPQQKSSAAGGAEVAPARPRPRRCLRALMMENGSNTEAARKPRPSACRFQCVTDHAPTATATPSNGGGAGDKNAEDGGKSSTEGAS

SEQ ID NO: 70651 - protein, 92 aa, Zea mays
  Coding DNA Sequence Number=SeqID_28872
MWPTARDISQRSEPDVRPPGYAASAFIEDKARRLSIPLAGAPAVVVPGGPRVLAVHHRAGRLADEHDELEAGQPPVGAQQQIVHDAQQQRLQ

SEQ ID NO: 70652 - protein, 383 aa, Zea mays
  Coding DNA Sequence Number=SeqID_28873
  Gene Ontology: Mol. function=homoserine dehydrogenase activity; Cellular component=chloroplast; Biological process=branched chain family amino acid biosynthetic process
  Homolog annotation: Hit_ID=Q2QYB7; Match level="QueryCoverage=94%, HitCoverage=100%, E-value=1e-114, Identity=57%"; Hit description =Homoserine dehydrogenase
  Pfam annotation: Domain name=Homoserine_dh; Domain location=136-352; Score=117.3; E_value=4.2e-32; Accession=PF00742.9; Description =Homoserine dehydrogenase
MPTPVKSVLPVVLLGCGGVGRYLLRHIVSCRPLHANQVSLFSLPVSAGHCQLFKNPEARGKVIDAATTLGRTTGLVLVDCSATYDTVSLLKDAVDHGCCVVLANKKPLTGAYEDFQKLVSNFRRIRFESTVGAGLPVIASVTRIIASGDPITRIVGSLSGTLGYVMSELEDGKKFSEVVKTAKSLGYTEPDPRDDLGGMDVARKALILARLLGQQISMESINKRCSVHWVAFSLLLVRDMVSDSVTLKILYFSTPQVESLYPSELGPDAVSTKDFLESGLVQLDKSMEERIRAASSRGNVLRYVCEIESAGCQVGLKELPKDSALGRLRGSDNVGAGAGNDTTAAGVLADIIDLQDLFQTMALIVDRHPHQYTILIFARHQSV

SEQ ID NO: 70653 - protein, 346 aa, Zea mays
  Coding DNA Sequence Number=SeqID_28874
  Gene Ontology: Mol. function=protein serine/threonine kinase activity; Cellular component=outer kinetochore of condensed chromosome; Biological process=protein amino acid phosphorylation
  Homolog annotation: Hit_ID=Q9FFG4; Match level="QueryCoverage=88%, HitCoverage=81%, E-value=9e-64, Identity=41%"; Hit description =Arabidopsis thaliana genomic DNA, chromosome 5, P1 clone:MOP10
  Pfam annotation: Domain name=Mad3_BUB1_I; Domain location=9-133; Score=154.1; E_value=3.7e-43; Accession=PF08311.2; Description =Mad3BUB1 homology region 1
MAAAAAEDEKGLLSSVVGDIRCYSGSDPLRPWLRGMRRMERALPPATLREKLPRFLQKCAQEFQDNSRYRDDPRYLRVWIQLMDYVTDAKPLLKTMERNGIGLKRASFYMAYALYYEKHRRFNDAEKMYRLGIQNLAEPIGELHKAHEQFRFRMDSYKKKDKLQERMPRKVGSSATSMNQVKGESRHYKELKSNIKQTSESSSNPSLGPTKVGVLSRGNSGANNNLPRCNSDDTVVVRFIGSALVGKSETEDACHHGLVEPTINTKEALDAINSMFMEPLEPETVLKRQSKRENPNHNQQTRHLVSLLMKMNLVAIILACSRQQYEARHTNESANSDLRSLLMRCS

SEQ ID NO: 70654 - protein, 310 aa, Zea mays
  Coding DNA Sequence Number=SeqID_28875
MLFALADKCTRAAESRAWHSAPQTGVAQSGGSGAIPRDGKKKKKKDHDFQRSRSIALVIAATTGGRGNRNKRPWPQRGSSGPCPMHPNGRHSATECREIIDLTKRVSKRREQSSKDGSPPRRRPGKEKVDDGEVPQLNGTSGMLVYNLNKSSLHPRRAKYQGGIGYATHNRDKCGGNHLYTGQPHQQQRPPLRRATPASGGNNLCNGQPSPAEATTSTPASGGDHLCNGQPPPAEAAISTPVAYRQRRTPQHVQKGPRPRPPARVRTRPSKNVAATSTAHDILYNPPGRHRNSVVDGAGDATGAANLRTV

SEQ ID NO: 70655 - protein, 301 aa, Zea mays
  Coding DNA Sequence Number=SeqID_28876
  Gene Ontology: Mol. function=transferase activity; Cellular component= mitochondrial inner membrane; Biological process=transport
  Homolog annotation: Hit_ID=Q9D081; Match level="QueryCoverage=60%, HitCoverage=91%, E-value=1e-19, Identity=33%"; Hit description=10 days embryo whole body cDNA, RIKEN full-length enriched library, clone:2610041M24 ...
  Homolog annotation: Hit description=product:hypothetical UDP -Glycosyltransferase/glycogen phosphorylase structure containing protein, full insert sequence
  Pfam annotation: Domain name=Alg14; Domain location=86-251; Score =223.5; E_value=4.7e-64; Accession=PF08660.1; Description =Oligosaccharide biosynthesis protein Alg14 l
  Pfam annotation: Domain name=TFIIA_gamma_C; Domain location=5-53; Score=32.6; E_value=1.4e-06; Accession=PF02751.5; Description =Transcription initiation factor IIA, gamma subunit, beta-barrel domain
  Pfam module annotation: Pfam domain module=Alg14::TFIIA_gamma_C; Domain location=86-251::5-53
MAFLITVQGHLHTNRVCDNVWTFILTDATFKSAEIQETPSKMGLNAVVAACYVFPVLVSVLAVRFFYVLWHSGQPESRLCATRLRCLIVLGSGGHTAEMMNIVTTLQKDRFTPRYYVAALTDNMSLQKAQVYEQSLIQVESNGTKAGESAHFMQIYRSREVGQSYVTSIATTLLATLHAMWLVIRIRPQVVLGLGWSSIFYIESIARVKKLSLSGLLLYKLRIADQFFVQWPQLQHEYPRACYAVFSISEIQNTVAIYAHFDKCKLLKSGGACCRTGDVSVMNKCMRAVTAYGLKIYLINF

SEQ ID NO: 70656 - protein, 83 aa, Zea mays
  Coding DNA Sequence Number=SeqID_28877
MDLGSEGLHCVPVHAEPRSNLSPPFLIGRLSFARTPSLYRFAEETLENLGINPPSWGRYSLSLWFLAPESLRFLEIEAQSREL

SEQ ID NO: 70657 - protein, 120 aa, Zea mays
  Coding DNA Sequence Number=SeqID_28878
MAHNLLRVAIVLRIRSSPSCVRQIWAAIADEAIDCQGEHIVRDVIQNVITPPQVVAMVSFAVDRSNCVVPGRSNARTEDLEELPTKVVKIQEVVPEGLLNKVYSSACSSSGWELSNWLSW

SEQ ID NO: 70658 - protein, 285 aa, Zea mays
  Coding DNA Sequence Number=SeqID_28879
  Gene Ontology: Mol. function=protein serine/threonine kinase activity; Cellular component=integral to membrane; Biological process=protein amino acid phosphorylation
  Homolog annotation: Hit_ID=Q208N4; Match level="QueryCoverage=91%, HitCoverage=49%, E-value=1e-128, Identity=89%"; Hit description =Putative calcium/calmodulin dependent protein kinase
  Pfam annotation: Domain name=efhand; Domain location=162-190; Score =19.4; E_value=0.013; Accession=PF00036.22; Description=EF hand
  Pfam annotation: Domain name=efhand; Domain location=198-226; Score =31.3; E_value=3.5e-06; Accession=PF00036.22; Description=EF hand
  Pfam annotation: Domain name=efhand; Domain location=240-268; Score =38.6; E_value=2.2e-08; Accession=PF00036.22; Description=EF hand
  Pfam module annotation: Pfam domain module=efhand::efhand::efhand; Domain location=162-190::198-226::240-268
MKRVYSKLLTFTCFSKFQFQGELSFQDHTWKTISSSAKELMSSLLSVEPYKRPTASDLLGHPWVIGDYAKQDLMDAEVVTKLQRFNARRKLRAAAIASALSSKVALRTKRLMNLLGRHDLSSEELDNLRAHFARICADGENATLAEFEQVLRAMRLEALVPLAPRVFDLFDNNRDGTVDMREILCGLSSLRNSRGDDALRLCFQMYDADRSGCISKDELASMLRALPEECLPGDITEPGKLDEVFDEMDANSDGKVSFDEFKAAMQKDNALQDVVLSSLRPPPPP

SEQ ID NO: 70659 - protein, 107 aa, Zea mays
  Coding DNA Sequence Number=SeqID_28880
  Gene Ontology: Mol. function=O-methyltransferase activity; Biological process=lignin biosynthetic process
  Homolog annotation: Hit_ID=Q8LI64; Match level="QueryCoverage=90%, HitCoverage=28%, E-value=3e-29, Identity=64%"; Hit description =Putative o-methyltransferase
MTKLRPYPMLQNVLHDWSDKDCVIILKRCKEAIAASGKVIVIDIVLGSSSLAICNETQLWLDLFMSTVTTGKERREEEWYRLFKEAGFSAYKISPVLGLLSIIEVFL

SEQ ID NO: 70660 - protein, 267 aa, Zea mays
  Coding DNA Sequence Number=SeqID_28881
  Gene Ontology: Mol. function=O-methyltransferase activity; Biological process=RNA-dependent DNA replication
  Homolog annotation: Hit_ID=Q8LI64; Match level="QueryCoverage=89%, HitCoverage=71%, E-value=2e-39, Identity=40%"; Hit description =Putative o-methyltransferase
  Pfam annotation: Domain name=Dimerisation; Domain location=33-81; Score=28.4; E_value=2.5e-05; Accession=PF08100.2; Description =Dimerisation domain
  Pfam annotation: Domain name=Methyltransf_2; Domain location=88-263; Score=26.9; E_value=1.5e-10; Accession=PF00891.8; Description=O -methyltransferase
  Pfam module annotation: Pfam domain module=Dimerisation::Methyltransf_ 2; Domain location=33-81::88-263
MEPQCNVGMFTRAELLEASVELRHHALGCVKSTALRCAVKLGVANAIQRRGGRASVEDLLTELSLDASRLRCLHSVMRALAALGVFKEGSDGEYGLTAISSLLVDDDSSVRVLNLADWALAGVDGSDDDNNCSARGTAFKMTHGEDVWDVLARDAFLGDFFNGALASETRFLMDIAIRGSPQVFEGIASLVDAGGGTGAAAQAVAAAFPDTRCTVLELPQVVDAAPIDGPVRFVGGDMTKFIPPADAVLLKVICNLYLVLITENRMG

SEQ ID NO: 70661 - protein, 110 aa, Zea mays
  Coding DNA Sequence Number=SeqID_28882
  Gene Ontology: Mol. function=cytochrome-c oxidase activity; Cellular component=mitochondrial envelope; Biological process=electron transport
  Homolog annotation: Hit_ID=P92683; Match level="QueryCoverage=50%, HitCoverage=33%, E-value=1e-26, Identity=91%"; Hit description =Cytochrome c oxidase subunit Vb
  Pfam annotation: Domain name=COX5B; Domain location=1-96; Score=42.8; E_value=1.2e-09; Accession=PF01215.9; Description=Cytochrome c oxidase subunit Vb
MQEQQGSQQERYLVRKALKSALSHLKADHAGDFLSCHGQREEPSVVESYYNKRIVGCPGGEGEDEHDVVWFWLKKDEPHECPVCSQYFVLKVIGDGGDPDGHGDEDDGHH

SEQ ID NO: 70662 - protein, 62 aa, Zea mays
  Coding DNA Sequence Number=SeqID_28883
MDEGELATAAVLWGREEEQGRAPATAMGRAGARGGGAIVRRRSEVEEKGGVSMEQGIGAPCA

SEQ ID NO: 70663 - protein, 139 aa, Zea mays
  Coding DNA Sequence Number=SeqID_28884
MAPPCNLSPWLVDGMPVGNIVLCAAPLATSSFTPGEEPLVFRGGEGKPLNAHRMFGAMRKSETPSFFQTPIGFVYDEVEMFRWFLSYNRAMDAHVGGVIEEVCSVKRESRVKSSSAHVMPKLKCKLLGEKRFDIHVYQI

SEQ ID NO: 70664 - protein, 59 aa, Zea mays
  Coding DNA Sequence Number=SeqID_28885
MARPLCLARSCCWEEDLTSSTPVSVKVNDEAGPRDSDTSKTVWKRMTGCVVEFQAGPIW

SEQ ID NO: 70665 - protein, 76 aa, Zea mays
  Coding DNA Sequence Number=SeqID_28886
MEGPQRREMGAHRGEPGSSGRAQEHAMGAEERVRWKLDGGRGFRERKPSTRESSRGRGRARTGAPQQGKALKRASR

SEQ ID NO: 70666 - protein, 126 aa, Zea mays
  Coding DNA Sequence Number=SeqID_28887
  Subcellular localization annotation: CTP_CleavageSite=3; ConfidenceScore=5.02e-01
MGRAGARGGGAAAGRWPERRGSRLASLRKKKGRRGARPWGSSRIVHCRGWSLRPWSREGSRPRRSDEGKEEGLLEMWRPGGEEELLLAYTIGAEERKPWEEGSSLRTEQRRRELCVRGKRRRESGS

SEQ ID NO: 70667 - protein, 223 aa, Zea mays
  Coding DNA Sequence Number=SeqID_28888
  Gene Ontology: Mol. function=transferase activity
  Homolog annotation: Hit_ID=Q9LGQ6; Match level="QueryCoverage=51%, HitCoverage=29%, E-value=1e-20, Identity=53%"; Hit description =Putative taxadien-5-alpha-ol O-acetyltransferase
MAGFKVTRISEGPVKPASATPEETRQSWRGYLAVRRRCRLLGAGEAPAVIRAALAKALAFFYPLAGRIMDGEQPGRPAIRCTTDGVYFAEAEADCNLEDVRFLEQPLLLPKEDLVSALRTREGSVVRRARSGHARAVDLGSTAPLQPGEGSKPQVREGMLTIATSTRFWGRGRVCKNHGWKGVVRAAETSRRILRGGGGWDPRLRSRTGAMAEPCTKCCGRLH

SEQ ID NO: 70668 - protein, 88 aa, Zea mays
  Coding DNA Sequence Number=SeqID_28889
MKHLRTSPQQRRYECQSLPSKTSPDDVESKRDEDFKVKNATHLQFLTSNSRLVEGVGNRKFTADEVVFPTVVVLVQIYTNEHDSNKIE

SEQ ID NO: 70669 - protein, 79 aa, Zea mays
  Coding DNA Sequence Number=SeqID_28890
  Subcellular localization annotation: CTP_CleavageSite=38; ConfidenceScore=5.12e-01
MTKKFEYKFITNLKFKNNKKERKSEMSQGGSSALGVAVCVRNWKEKPRNRGNFSSSIDFRRGQPRTATGCYSVKADRIS

SEQ ID NO: 70670 - protein, 80 aa, Zea mays
  Coding DNA Sequence Number=SeqID_28891
MKQPTTVLLAIALLWGALLVPAADAARQLPPEGRVAVENHEAAAAATAYTTLRERAWSKTTAMAWTQQLPSGPSPRGPGH

SEQ ID NO: 70671 - protein, 59 aa, Zea mays
  Coding DNA Sequence Number=SeqID_28892
MAYAISFSYYDVILVALKGARAVSRVPLRGDEEDGYDYAYGNDEVVEEDFQEFQEYDES

SEQ ID NO: 70672 - protein, 456 aa, Zea mays
  Coding DNA Sequence Number=SeqID_28893
  Pfam annotation: Domain name=DUF295; Domain location=335-385; Score =53.5; E_value=7.2e-13; Accession=PF03478.8; Description=Protein of unknown function (DUF295)
MAPLRRWADLPADLLCRIGDRLDLKCLSSSPAHRLGKPLQLAPATAGSRSPSSSSTGKTVFVLLNPIAAVEILLPPLIYESRWVSKVVFTPSPAKDDFAAAAICDIDRIAYVTAGARRWAVMDPVRLTCGDQLTDVVYTDKGKVFCLTKCGDVHVLRLPERRRRKPANADEAGSSEPEFSVLQSPQPNERTITFRPLRWQHQRNFRMMRYEQARPRDQDLTIPLRVTFCAETLIPYKKVPPESQGPHLNAPATVEPLLSEANLPFNPATVFAPPYDTVSSFTSAKNLVFCEGNLYQVWRNASCTVTLQLPAGGQHRVAENEILVLRYYPRRRPCWDVVKDLGGHSLFVGRNNAVSMYGEGVPGLRGNCVYWIGGRGRDQGMVFDMESGRSTPCRVPPVGFLPGHPHSTICWYFLSDVMSINNCYSNSVSSSNSSGGRKIYQTRARARADLAQDMEE

SEQ ID NO: 70673 - protein, 215 aa, Zea mays
  Coding DNA Sequence Number=SeqID_28894
  Subcellular localization annotation: CTP_CleavageSite=66; ConfidenceScore=5.01e-01
MATSSSARPKPLLSAAPQQVALADGSATAADRADADRCRGQRSGSSSSFAPPAWDYTQDLPRRDPRARLRVTLAHRPQRLLTLDGGRHHRLSLDARAALGNAAPRCSHGGADSLSDYGVVAVTETYYVVGRRVGVWGGGVHRGDEICALVVGDPLMAPQMAWGEGWGGGVRRGAGIYALGEVRRGEGARGQTAVQRQNAGRVWTPTIRPYRVVKI

SEQ ID NO: 70674 - protein, 156 aa, Zea mays
  Coding DNA Sequence Number=SeqID_28895
  Gene Ontology: Mol. function=transporter activity; Cellular component= integral to membrane; Biological process=transport
  Homolog annotation: Hit_ID=Q5TKJ2; Match level="QueryCoverage=98%, HitCoverage=38%, E-value=2e-51, Identity=60%"; Hit description =Putative cellular retinaldehyde-binding/triple function
  Pfam annotation: Domain name=CRAL_TRIO; Domain location=5-145; Score=- 16.5; E_value=0.00027; Accession=PF00650.10; Description=CRALTRIO domain
MAMLKSAVLWRKRFGIDELLRVDLGLPELEKVTDLKNSPPMLGKHHGVTRQALALLQDNYPEFVAKKVFINVPWWYLVANKVMSPFLTQRTKSLTYIHPHTFDNRYVAPEQVPVRFGGLYKEDDTEFSASDAVTELTVKPSSKETVEVPATEGSTC

SEQ ID NO: 70675 - protein, 107 aa, Zea mays
  Coding DNA Sequence Number=SeqID_28896
MGLCSLICPHLLPEPSPLLLLASPDAESGPQVQTSASPDAEFGHRRNLRLARRLVQPQVIRRPCPSTASATCSTVNPASGHSADCGTCQGMAQPMPREGFRLARAGL

SEQ ID NO: 70676 - protein, 1163 aa, Zea mays
  Coding DNA Sequence Number=SeqID_28897
  Gene Ontology: Mol. function=structural constituent of ribosome; Cellular component=intracellular; Biological process=translation
  Homolog annotation: Hit_ID=Q9DGL1; Match level="QueryCoverage=23%, HitCoverage=34%, E-value=1e-08, Identity=22%"; Hit description =Retinitis pigmentosa GTPase regulator-like protein
  Pfam annotation: Domain name=DUF1666; Domain location=879-1128; Score= 304.3; E_value=2.3e-88; Accession=PF07891.2; Description=Protein of unknown function (DUF1666)
MDAGAGVSAPTAAADGAYGLARIVAWCSSSPLFFWLLTVVLVAAIHIASGSRPSGSRTHGKEREKEEEEEEEEKARRDRFAAAEEREVSGRRDDRVLEMMRSFSFMKATEEDFMEGMTAYECNGRGVDAGFAHGLVAPEPFAPPPALMATSLSFKFHHQIPEIPTETTVVSREFTAAREEDGQERVEEKEPQIPLESLVPLQSADKQEHRREAEETEFLVDEQVEEQSREAAPPKIVATTHNYQFLTERDFRGFVRGPEAMTVRVQESFVPPSPPAAHQPEERRVVDVSSRTGRFLTERDFRPANDPDVCESVASSGKRTPSLQSKPASSPSVAYMGGAAVGGRTSFASEFSGFGDSDSESSASDGYSVKDLAVDSDSDWFLSEKDFPASARDSGNLKSYKAKVLKAIEALETAAAAKREPPYQDSATTLSPGSVRQDSPDTIPDGSPKFPEDMWSRSPSPDVEYKEDEEKVTREAEAQYDGDIEQRSTAEDEGGVDMSDDEHSSGGEKGESAPVYDLAPVADNCMDHSEKEIIALNDHSGGEAASDAQRSPEAVSARQLAAVPSDQAAGPAKRSPEPSEQEFVGIVDHSLEHSSDDRKETASESDQSYEIVFDDKRKPEPPETGFLDTAEEEYGGTNDRSNHLISYEKKKVSFSTTDDRPYAAVADEKSVPETPEQGFSLTDHRDGVAPDATNISETREDEEQDSAARQAYVSVAGKAKVYDEDGEDPEVRWKDLSAEEEDELESLWEHQDLIEQLKLELKKVRSIGLPTILEESETPKAPMEDLKPWRIDAKFLREDPMDELNKFYKSYRERMRKFDILCYQKMYAIDFLQLRGPQQSSNSLKSLSPTVASILSHNFRSSRRRSPEDPSERFLRELRYDLETVYVGQTCLSWEFLRWQYEQARDLPESDPYHSHQYNQVAGEFQQFQVVVQRFVEDESFKGPRLPNYINNRCVLRSLLQVPVIKEDSLKDRMEDQRKGNYVITSEELEDVMEEAMHILWEFIKADRVETTTTAASVLKGLSSAHVELQDPSDHDLMAHIHSTLQKKEKRLKDLLRTGNCIVKKFKKPKEDRSNQNLFFSQVDMKLVARVLRMPRITSEQLQWCKAKLDKIVLATVYGAHGASMIPTLPRNYNHAHFQSFTTGPSRLCRKAIFNCPAIPGPG

SEQ ID NO: 70677 - protein, 57 aa, Zea mays
  Coding DNA Sequence Number=SeqID_28898
MSVDLWFGGLGLKTTQHYGWRVLLSLGFKTRRWRFWRESVAVRDMIAQGVSRRSNSV

SEQ ID NO: 70678 - protein, 88 aa, Zea mays
  Coding DNA Sequence Number=SeqID_28899
  Subcellular localization annotation: CTP_CleavageSite=54; ConfidenceScore=5.10e-01
MGAGATEIQAPSFVLLACCVLPTHSLSYCRLQLLVVGPGVSRAISRAVSTVGVSGKHGVVAVRCLYPELFYNRARELFGFTFGVSRKT

SEQ ID NO: 70679 - protein, 96 aa, Zea mays
  Coding DNA Sequence Number=SeqID_28900
KCARFHCPCLEHHGGGGSVSGTVLADDGIDDDELGARQVEGHPGSPEQLVLLEITRRFVVVVRFFWGSHCRRFVAQEAMLKTSVSFVVDGGLDTLF

SEQ ID NO: 70680 - protein, 69 aa, Zea mays
  Coding DNA Sequence Number=SeqID_28901
MSRSFPAAFTGGTAAFPMRHCSRDEKGSVMSFTGLRRLPNTSDTEPYKYQNKELTYQHKLSKFTIETIV

SEQ ID NO: 70681 - protein, 80 aa, Zea mays
  Coding DNA Sequence Number=SeqID_28902
MKIADKATTRAVAKDAFMNKDLIKSLELSRKNLDIQSVKSSFVSNHMSVPDSDMDNIIHNEDEGNNLTDLENVMVLRKRS

SEQ ID NO: 70682 - protein, 479 aa, Zea mays
  Coding DNA Sequence Number=SeqID_28903
  Gene Ontology: Mol. function=DNA binding; Cellular component =mitochondrion; Biological process=DNA integration
  Homolog annotation: Hit_ID=UPI00004C1731; Match level="QueryCoverage =91%, HitCoverage=33%, E-value=0.0, Identity=82%"; Hit description =UPI00004C1731 related cluster
  Pfam annotation: Domain name=RnaseH; Domain location=37-164; Score =10.5; E_value=6.1e-06; Accession=PF00075.14; Description=RNase H
  Pfam annotation: Domain name=rve; Domain location=191-350; Score =118.3; E_value=2.1e-32; Accession=PF00665.16; Description=Integrase core domain
  Pfam module annotation: Pfam domain module=RnaseH::rve; Domain location=37-164::191-350
MGETISFAPRKAIKSQVLANFVAEWVDTQLPTAPIQPELWTMFFDGSLMKTGAGAGLLFISPLGKHLRYVLCLHFPASNNVAEYEALVNGLRIAIELGVRRLDARGDSQLVIDQVMKNSHCRDSKMEAYCDEVRRLEDKFYGLELNHIARRYNETADELAKIASGIVRTCQGCQFYARQTHLPAQALQTIPITWPFAVWGLDLVGPLQKAPGGYTHLLVAIDKFSKWIEVRPLNNIRSEQVVVFFTNIIHCFGVPNSIITDNGTQFNSRKFLDFCEDHHIRVDWAAVAHPMTNGQVERANDMILQGLKSRIYDDLNKFGKRWMKELPSVVWSLRTTPSRATGFTPFFLVYGAEAILPTDLEYGSPRTRAYADQSNRSNREDSLDQLEEARDMALLHSARYQQSLRRYHARGVRSRDLQVGNLVLRLRQDARGRHKLTPPWEGPFVVAKVLKPGTYKLANSQGEVYSNAWNIRQLRRFYP

SEQ ID NO: 70683 - protein, 87 aa, Zea mays
  Coding DNA Sequence Number=SeqID_28904
  Subcellular localization annotation: CTP_CleavageSite=49; ConfidenceScore=5.04e-01
MGARQRGENGQPGSKIRPIIGHSTAVHVRGPARDTASGACGRGPCLRPRARRRTRVEGTGGSLAVGGTGAGPALVGGVGARAARDLF

SEQ ID NO: 70684 - protein, 241 aa, Zea mays
  Coding DNA Sequence Number=SeqID_28905
MAASQPKGRRFFLGWSFLRDFGYGRRKRPKLAAGSWKGGRKMHALPAAAAALPAARQACERQEQMGTTRRRVIRGRNRTISAKLDQRTRNPLILDHEIQECGRARMCGPRENHTDAARLLDADPTVAAAEKNACSMGGKRERKRTSDSAEEKEASTSRKSGTFPRFLSPVLCSLSGSVGGNWTTPEPRAQAGETDTRGGRRYGLGESISHTQFHGGIKGLFGWAVAVEKVVVGCELWKKLL

SEQ ID NO: 70685 - protein, 72 aa, Zea mays
  Coding DNA Sequence Number=SeqID_28906
MEEAMREQQERFRKEGSGVLSHNTPPLVIPAPGQACGGEETTTEETPNQIDDFVNNFFASGGSGHNSNDPYM

SEQ ID NO: 70686 - protein, 190 aa, Zea mays
  Coding DNA Sequence Number=SeqID_28907
  Homolog annotation: Hit_ID=Q6I5X8; Match level="QueryCoverage=32%, HitCoverage=12%, E-value=8e-12, Identity=62%"; Hit description ='putative lipase class 3 family protein, PF01764'
  Subcellular localization annotation: CTP_CleavageSite=29; ConfidenceScore=5.27e-01
MALVLPPQAVHAGCRVRPSVSSTTSAPLSQAAASEPGIITQPLPLGAVAPFSASVRLQGPTALDVPPPLRPQPPWPIDSTAVVGPPPHHLSTIVASPMRATGPLRGPDALDVRPSFASSTVAFVNPDLKDGERVRGAVHEQGPDCRFCRYSSREQVLGEVRKLVELYYRRGEQVSVTVKGNSVGSVLAMM

SEQ ID NO: 70687 - protein, 145 aa, Zea mays
  Coding DNA Sequence Number=SeqID_28908
MDKKLSEHFSAYDEYRNFNNWLSVMNFISRLLFKELVCTNKNNSQFAFLNVSASFFGELIRKKIVRFTVTVNDMKRTLQLKGALKFRLWDVKQELPFCQPFVCTISTSRQLEAKRDLVAGVVYGTDFFTKRKIQDSRGILIGQIE

SEQ ID NO: 70688 - protein, 156 aa, Zea mays
  Coding DNA Sequence Number=SeqID_28909
  Homolog annotation: Hit_ID=Q2QNS5; Match level="QueryCoverage=98%, HitCoverage=63%, E-value=5e-39, Identity=57%"; Hit description=Fiber protein Fb2, putative, expressed
  Pfam annotation: Domain name=Di19; Domain location=1-151; Score=-2.5; E_value=6.7e-09; Accession=PF05605.3; Description=Drought induced 19 protein (Di19)
MVCPICTDKVDMNLIVHISSQHRGFLKIKLSYLTPEIHVQDKWRNQQGSSGVRYSTLALLKKDLHERISGSSRAAPVSTVPDPLLSSFVGSFYEVDLPKDAKKESLVETEVRSDNIEQRAAESFDEPLLPEVKEEKTRRSQFVQGLVLSLMFDDIL

SEQ ID NO: 70689 - protein, 97 aa, Zea mays
  Coding DNA Sequence Number=SeqID_28910
MFRGTSTTDTQEQLADFMKDQFDILTKQKVITYAKLYPKEFDKMPLPPKFKEDGDYPFQVNMVDISSINKGKGVVDPCNGPLEFNLEEHTSAEVKDR

SEQ ID NO: 70690 - protein, 56 aa, Zea mays
  Coding DNA Sequence Number=SeqID_28911
MKGDREMADEAIKKNEKESHDAREEAKQAEEATERAMIIADLSPPPEHTILKQTRL

SEQ ID NO: 70691 - protein, 139 aa, Zea mays
  Coding DNA Sequence Number=SeqID_28912
MDMEVYERLTAETSHYRGTRFDALIGLDEVEPSDEEEDEEEEERAAGAGAGDELLCPFCSEELDAVGLWCHMDDEHRAEVNAGLSILDLTRIVVIFRTSRVLLFAYSVEQGAYAYVPNIVWRLLLVVKIEILAANVVFF

SEQ ID NO: 70692 - protein, 96 aa, Zea mays
  Coding DNA Sequence Number=SeqID_28913
MRLDNPFQLRHPMGPKEQRPARRNPKTPRWKGPKEPNKPSLPKTRLIASLYPWIRFSKAINDAPGGRRRVGPDQGDDQRRTDHKILDDLAVVNTDT

SEQ ID NO: 70693 - protein, 180 aa, Zea mays
  Coding DNA Sequence Number=SeqID_28914
MASPTPANGGDTCFSFDYLSQEGFPSILWEVLSAARYPTPPLYTVQLYEEHRVPRCSETVGFRVDDTTEAAPLKALTTFCGYHSLEMMMHPLGLFPAEKMDDLMWCDRVATPRMCGMHTDLVGRIIIQCMSVLYRLQALQSDVMAHLTVLAQTAKMTLDDMDVFMVDLSFKLVDKDLQIE

SEQ ID NO: 70694 - protein, 153 aa, Zea mays
  Coding DNA Sequence Number=SeqID_28915
MEAYEDSEEDPEEIEIASSLDTAQSRGQRCLCYSGLPGAILSLKLKIKIYVAIYLTMIKLLCKTWVLSIIVERNSYFTNGTKSAPRGKMSKFPTTVAGSNDVWTNGLAEQNSAIVGAASAPASVFQWWEQQRSQAASTYDGFLSTQPSLFTKG

SEQ ID NO: 70695 - protein, 89 aa, Zea mays
  Coding DNA Sequence Number=SeqID_28916
MAAERAPATWWRGRAGGLVAGPGGGGLAAIPGGGCARAAAWWGAAGAGGRQCRRGGQGNDDGGLTARWRRPRCRSGSTAASTRASEEED

SEQ ID NO: 70696 - protein, 45 aa, Zea mays
  Coding DNA Sequence Number=SeqID_28917
HPWTITSIYWEPLGSHREKRRGEEVHFVRCRSAPSKRSLDVQGGK

SEQ ID NO: 70697 - protein, 177 aa, Zea mays
  Coding DNA Sequence Number=SeqID_28918
  Homolog annotation: Hit_ID=Q8LMP5; Match level="QueryCoverage=97%, HitCoverage=74%, E-value=2e-29, Identity=40%"; Hit description =Expressed protein
MHEYEICGKIVNDAKVWRKFCHSPASTGFEVAGHSFLSSLVNLGASNKVVACLVTLCLETWEVAAQVVKDEEDAKQKLCDDLNHLVQESAASQYARLEELKKRLESLNPIRDSVNVSGVYTAQHATLNSVPQQPTAQNPADVTGPSDIATKPASMQQQPIPAEAEKEERPSNSARGK

SEQ ID NO: 70698 - protein, 125 aa, Zea mays
  Coding DNA Sequence Number=SeqID_28919
  Subcellular localization annotation: CTP_CleavageSite=48; ConfidenceScore=5.07e-01
MGKKQEKMVAFRITPATSASASRLLPRRTSATQNDSQGITAEVWTYIRAVERAGLEGLDESEYSSNEENSSDPSEEGSSGDGGDDDGGDGDGGGDGGKGGDDSDKGGSDDGGSKGSSKGSNKASG

SEQ ID NO: 70699 - protein, 141 aa, Zea mays
  Coding DNA Sequence Number=SeqID_28920
MAHQTGLEHQSKAYKAKISFDWWGIYRFSQLVIGGTPVAHRTGLEHQPKAYKAKISFDWWGYLYSIHQPHSLSRTGCCEKDSYALFGNALSVLPIEKYDHIVTVLRQMDLSTTMPTQILGKINAHEMYMHINDKGSSSSKM

SEQ ID NO: 70700 - protein, 58 aa, Zea mays
  Coding DNA Sequence Number=SeqID_28921
MTRPVALTPRRDRRHLWQKKRATLRLHHNDRVSKGTGKGGYLEKGSFPVKEPGSEPPY

SEQ ID NO: 70701 - protein, 481 aa, Zea mays
  Coding DNA Sequence Number=SeqID_28922
  Gene Ontology: Mol. function=diacylglycerol kinase activity; Cellular component=integral to membrane; Biological process=intracellular signaling cascade
  Homolog annotation: Hit_ID=Q2QVN0; Match level="QueryCoverage=100%, HitCoverage=77%, E-value=0.0, Identity=72%"; Hit description =Diacylglycerol kinase 1, putative, expressed
  Pfam annotation: Domain name=C1_1; Domain location=88-149; Score =41.7; E_value=2.5e-09; Accession=PF00130.12; Description=Phorbol estersdiacylglycerol binding
  Pfam annotation: Domain name=DAGK_cat; Domain location=275-404; Score= 131.9; E_value=1.8e-36; Accession=PF00781.14; Description =Diacylglycerol kinase catalytic domai
  Pfam module annotation: Pfam domain module=C1_1::DAGK_cat; Domain location=88-149::275-404
MARLLDPSGLHFVGWLVTAGSIGLAALIYALLRLQREAALYWTKATREKRAAWRRLRCPSSCHSWSEDYFHEKDCKCVAQAGASPLLHHWSERWVELDDNPEISSSCYYCDEPCGVPFLGVSPIWRCLWCQRQIHVDCHAKLLKETGNTCDLGLLRRLIVPPQSVKEIGQGSGISGMLNSIKDGFANSTVGNRRRSRNKKRMNNHPGGKINSIPTKFSVIDSVLEGFARLKGLDGKYALAKPLSQHSVKQTYRSVIPNGRVRKYELVDLPQDSRPLLVFINGKSGGRNGPSLRRRLNMLLNPIQIFELSASQAPEVGLQLFHNVKHFRILVCGGDGTVAWVLDAIEKQNYESPPPVAILPLGTGNDLSRVMRWGGGLSSVERQGGIYALLNDVDHAAVTVLDRWNVTIKEKNGTEGIGCDAKVAYDFHTTREEKPDKFCSQFVNKLIYAREGAKDMMDRSCSDLPWHVSLEVDGKNIEIPE

SEQ ID NO: 70702 - protein, 82 aa, Zea mays
  Coding DNA Sequence Number=SeqID_28923
  Subcellular localization annotation: CTP_CleavageSite=31; ConfidenceScore=5.38e-01
MVYRSSVALRCVTPYVLVMLRKSPFCTVGLRTSLGAPKVIPMSVTSTFESIFANNPLESHLFKIYLKSLSSSTCAFQRSALS

SEQ ID NO: 70703 - protein, 125 aa, Zea mays
  Coding DNA Sequence Number=SeqID_28924
GRDLSQALGQDSYVLAAQQREEQGQKQRATCSTRSELARARPTRAPACPASRQSQAGAMAHARAYKAPRDFDRTPPHALDLTGAQNHRHLPVHGVPAAARFPFTVDRPTEPFPTPSNPRRRLCTP

SEQ ID NO: 70704 - protein, 408 aa, Zea mays
  Coding DNA Sequence Number=SeqID_28925
  Homolog annotation: Hit_ID=P15718; Match level="QueryCoverage=25%, HitCoverage=17%, E-value=4e-22, Identity=53%"; Hit description =Putative Pol polyprotein from transposon element Bs1
MEPNLQSALEEQTKILRALSARLAAQEARWRSWESKVAHHSVSIHDLEVAVATVPSATLRSERDAQVAATRECLAVVADDWGGLFGTGDGCIVADNWGGLFEYPAHFQEEQDIDNCIPINDGTRFTEEDDDNHPATLEPLLTDTTTAAEVDSIANTDDVEADSLASASTVGVATSQAAEMQLHVGWARWLEGQADYLRHDRMLHSNLDSLTSSNHPLLQDASATNNSPTQYSTECFSHDIVLLRTISAAPTSEDRALQQRRLECLVAWPEWRRIGGRNYIMLEHHPNRMFDACDRFWHCVFALYDFGSVQGLQRKLERLCLAGSAPDLEVLAVLSGLRARSLSDQRAANHTRTSMRSISTTATPFRLCSTRSGYIASGTSTGTTCSTRSQSWISSEFEHSSIPTPNQK

SEQ ID NO: 70705 - protein, 172 aa, Zea mays
  Coding DNA Sequence Number=SeqID_28926
MEATTGLILANDGFHPVVPGGREPRRLQRPPICCANRGEPVGYAIRTARGQRSRELRHFGTDERQLTCGSPASATNRGHRRGSWCVVRRARPPAESARQPAWSESCARGEDGPAQGSHLPVSQRRISASARGESPLDDRAQEISEVSEGKRIGPRSGMVGCGRRKLGLFPVN

SEQ ID NO: 70706 - protein, 187 aa, Zea mays
  Coding DNA Sequence Number=SeqID_28927
  Homolog annotation: Hit_ID=Q337K5; Match level="QueryCoverage=20%, HitCoverage=3%, E-value=7e-09, Identity=73%"; Hit description =Expressed protein
  Subcellular localization annotation: CTP_CleavageSite=34; ConfidenceScore=5.04e-01
MAPRSGTGSLEDSMSYGFCPPLPPNLSLKWYEARAFTAARHLSTTSLSCTRQMRWGSLVSPKSGEWSYVLQTDSVTKKGLNAYKDLITTGLNKKFSQPLQQLFKELANGTKRRGVGVQGGDDDTGRWHGGGDDDATEVTAGVERDDEDGGGDDDTAEVDDEDGGGEDNTAGRERRSKIAWAPCRTGG

SEQ ID NO: 70707 - protein, 235 aa, Zea mays
  Coding DNA Sequence Number=SeqID_28928
  Subcellular localization annotation: CTP_CleavageSite=91; ConfidenceScore=5.75e-01
MEGAIQGSSAAVVPPSSPRPTAFLRETNGVKARAGSANAARSPPQSLSTGAAWSPSYLRSAFATCRVVFPTPVLVVDLRRVVIPTPVLVVPLDARRDLRRVIIPTPVPSTRVVIPPLAIGSRSSKAPLESASTTYPLSSKPTSKLGVTALFHGVTLKLTRRKRLGVARRNALGDRQPIAPRVVDLHNGASAPCRELESSSAPDSDVVERLPVPDLGAMDLDPEGIFRDDSDEDED

SEQ ID NO: 70708 - protein, 60 aa, Zea mays
  Coding DNA Sequence Number=SeqID_28929
  Subcellular localization annotation: CTP_CleavageSite=39; ConfidenceScore=5.13e-01
MALGFSMAWIVASGYQKLLQTTKRLAFQSVVRHFVGPSTAGAAANDIEPMALGTLRGNYI

SEQ ID NO: 70709 - protein, 207 aa, Zea mays
  Coding DNA Sequence Number=SeqID_28930
  Gene Ontology: Mol. function=kinase activity
  Homolog annotation: Hit_ID=Q6QP54; Match level="QueryCoverage=57%, HitCoverage=44%, E-value=3e-09, Identity=56%"; Hit description =Putative kinase
  Subcellular localization annotation: CTP_CleavageSite=76; ConfidenceScore=5.58e-01
MTDSASPDPRARTQPRRRMTDSASPDPRARAQPRRRMTDSASPDPRARTLPQPRTTVSASPDPRARTLPRPRTTVSASPDPRARTQPRPRRSHRLARPWARTDHATRGAIITLLLASSGYGEQDRRPIWFAPKCRVQRLRNLEEAEARYLEVLKKACPDLAIKFHAPKPEDPSVAQMDLGSQPVVLKKPTEKGYKHLKVLYLKGYIN

SEQ ID NO: 70710 - protein, 119 aa, Zea mays
  Coding DNA Sequence Number=SeqID_28931
  Gene Ontology: Mol. function=hydrolase activity; Cellular component =nucleus; Biological process=ATP synthesis coupled proton transport
  Homolog annotation: Hit_ID=Q6ER78; Match level="QueryCoverage=78%, HitCoverage=18%, E-value=2e-44, Identity=91%"; Hit description =Putative metallo beta subunit lactamase
MELIKKRLKEFGIFLSSRLKVLRIKKRFQAGPFEVEPIRVTHSIPDCCGLVLRCGDGIIFHTGDWKIDESPVDGKKFDRQALEELSKEGVTLVFVGMSLRTYLEAAFKDGKAPLDSFTL

SEQ ID NO: 70711 - protein, 74 aa, Zea mays
  Coding DNA Sequence Number=SeqID_28932
DWTLVALEFLAWRVASPRDRPVPWAVGLQGADLANTGGLTTAWVGGATVGPRWEEDRPGPSDPNREDRIRSSRG

SEQ ID NO: 70712 - protein, 65 aa, Zea mays
  Coding DNA Sequence Number=SeqID_28933
MAQSVFFFAADLDLTFLKGPRRGGEILGILTDSTHARTVRATNADRLASGPDCPRGHFLCSRVRV

SEQ ID NO: 70713 - protein, 155 aa, Zea mays
  Coding DNA Sequence Number=SeqID_28934
MGAPDSPVRHRTLSGEPATSAVDRWRLVFKWHRTVWCRTGYALFTIWCASDFCALTLRALFFTVQRSARLLQSTIARVAFAPLVHRTVWWSVHASTSSTAQKAKRAKVLTRRPKPIGTAEVLMLIESAEATPLATETAPAMPIEASVGPVKEPES

SEQ ID NO: 70714 - protein, 156 aa, Zea mays
  Coding DNA Sequence Number=SeqID_28935
MELRHGGREHARDSRRIAELSAEVERLQREIVERHRAIDWAINSRSIAWDCEVTARTQVEELSIALENLQVYNNALHEEVHLLYDQLHPNVPPEVAAMGAGAAGAAGRGPYGELNLFRAPPSMNNMDDRPPEARSGAGAAKDTTDPFIVVVGCFLM

SEQ ID NO: 70715 - protein, 211 aa, Zea mays
  Coding DNA Sequence Number=SeqID_28936
MGMGHARPCDQRECRGYRGAVWPGRSSRRWSWKRLRPWGKQGAGEELGWEELDAMEHGGRRGVHAMVAQERAPAARVGLEHRAGSRRAERGDRGRWRSSAERHRGEPREKGSRGRELAAHAAVASRARRARASRESRGDPADGVVGRAKRAAQRRLHWRMSRENKGAGREISRAGAREYDRAEQDAERREMRGGSSSSAGDRGAAGKIRLL

SEQ ID NO: 70716 - protein, 50 aa, Zea mays
  Coding DNA Sequence Number=SeqID_28937
MAAPSLEERQTGALRALGVGLDSWTGLRRQTAEGESSANQRTLQRAIARD

SEQ ID NO: 70717 - protein, 62 aa, Zea mays
  Coding DNA Sequence Number=SeqID_28938
MAGERLFGHTVVLPNSNLCYTERMERMVLTERYSENNPSPLKYHRIIIGITSSYHKYSHHGH

SEQ ID NO: 70718 - protein, 86 aa, Zea mays
  Coding DNA Sequence Number=SeqID_28939
MVGGWLRRSRTTEEAQQDDDVQQAAQQDDDDQQQAAQQDDDDGQHDTSSSGASGSRNVYLRGPASLPQRPILRDRRPLIRPDVERH

SEQ ID NO: 70719 - protein, 35 aa, Zea mays
  Coding DNA Sequence Number=SeqID_28940
MTAPSPGATTAARPGLDAPVSARPRIIPYLLRRLS

SEQ ID NO: 70720 - protein, 155 aa, Zea mays
  Coding DNA Sequence Number=SeqID_28941
MAPGIVRRLSNPGWKIRAWPWKTCKHITISCTRRCMCCMISYTQTYHLKLQRWVLASREQMPTRTCGHDGAGTSRGSGDETPIPPPIPPTLAEDIAALLNTTADNTQFLQEMAGNQIHQQGGRCQNQAPRDTTYMEFSETRPPIFIKAEEPLEAD

SEQ ID NO: 70721 - protein, 80 aa, Zea mays
  Coding DNA Sequence Number=SeqID_28942
  Homolog annotation: Hit_ID=Q7XBD3; Match level="QueryCoverage=96%, HitCoverage=15%, E-value=1e-22, Identity=66%"; Hit description=Zeon1 gag protein
MMKGFRPEPFAFARKPLQSLEKLLRKMDEYIRANNDFCQRRKDAQRYVEMTRGFGGRFHSKHITKIHNSSQHEDKTSQPQ

SEQ ID NO: 70722 - protein, 268 aa, Zea mays
  Coding DNA Sequence Number=SeqID_28943
MVALAKFVWATASYGGEPLVEVFAKNYCLHWQKKVMVARLHSLVHAHSCQGTGKTSGEVAELVPCAKNKWGNWLNRVFEVNGLRYGPYPEEESAEAGDERGKKKVATRVGEGCSKGKAVITATRKKQKVEVEVKGENIGAIVTVVMEKKHQESARKKRKAPLRFMDPQRNVKAPRPSAKGSTAAAMMPLPAVAARRVPSPARADEVMGAKWAKIGEASQELSMVDYLIEDVGMFFYDGARSGQVVAIPAKPVKERAQVKTAMVTLLDP

SEQ ID NO: 70723 - protein, 42 aa, Zea mays
  Coding DNA Sequence Number=SeqID_28944
MKCSLESAVKKLRLWLNFLTAQQCNVNECCGGKVNRQIAYTR

SEQ ID NO: 70724 - protein, 159 aa, Zea mays
  Coding DNA Sequence Number=SeqID_28945
MVSYSPLRSPQRAGSFPTLILHKPTTKRGGDTNFLELSTTLETPKQPQSIKELEGSKNNKFTKEVFAKISRDEKERGEQNKFENHKHKPHTKGSSIKRFRSDLGCVREGTFGFRIKSIHEEKSMIVTKVVIASKLCARELRLNRGKRNRLKGEKTIQSS

SEQ ID NO: 70725 - protein, 129 aa, Zea mays
  Coding DNA Sequence Number=SeqID_28946
MGKSKKGSGSSHHSGDKRKREPTPPSEDFGDSEYSEEFSSGSEGSPAPVSPPASSDDSDDSQGIVAEVWTYIRAVERAGLEVSDSSEEGSSGDGGDDGGDGHGGGGRGGDGGSKGGNGGGSKGSNKASG

SEQ ID NO: 70726 - protein, 631 aa, Zea mays
  Coding DNA Sequence Number=SeqID_28947
  Gene Ontology: Mol. function=RNA-directed DNA polymerase activity; Cellular component=intracellular; Biological process=RNA-dependent DNA replication
  Homolog annotation: Hit_ID=UPI00004C1733; Match level="QueryCoverage =99%, HitCoverage=50%, E-value=0.0, Identity=80%"; Hit description =UPI00004C1733 related cluster
  Pfam annotation: Domain name=RnaseH; Domain location=295-422; Score= -32.7; E_value=0.064; Accession=PF00075.14; Description=RNase H
  Pfam annotation: Domain name=rve; Domain location=502-630; Score =69.1; E_value=1.4e-17; Accession=PF00665.16; Description=Integrase core domain
  Pfam module annotation: Pfam domain module=RnaseH::rve; Domain location=295-422::502-630
MKESNQLATSFITPFGMYCYVIMLFGLRNAGATYQRCMNHVFGEHIGRTVEAYVDDIVVKTRKASDLLSDLETTFWCLKAKGVKLNPEKCVFGVPRGMLLGFIVSERGIEANPEKIAAITNMGPIKDLKGVKRVTGCLAALSRFISRLGERGLPLYRLLRKAECFAWTPEAEEAIGNLKALLTNAPILVPPAAGEALLIYVAATTQVVSAAIMVERREEGHALPVQRSVYFISEVLSETKIRYPQIQKLLYAVILTRRKSRHYFESHPVTVVSFFPLGEIIQCREASAPNSSDSTGTLDHAFRRVADEDRGRRGLLFISPLGKHLRYVLRLHFPASNNVAEYEALVNGLRIAIELGVRRLDARGDSQLVIDQVMKNSHCRDPKMEAYCDEVRRLEDKFYGLELNHIARRYKETADELAKIASGRTTVPPDIFSRDLHQPSVKIDDTPEPEKASAQPEAPSAPEGFYWPTVVADATRIVRTCEGCQFYAKQTHLPAQALQTIPITWPFAVWGLDLIGPLQKAPGGYTHLLVAIDKFSKWIEVRPLSSIRSEQAVVFFTNIIHRFGVSNSIITDNGTQFTDRKFLDFCEDHHIRVDWAAVAHPMTNGQVERANSMILQGLKPRIYNDLNKFGK

SEQ ID NO: 70727 - protein, 254 aa, Zea mays
  Coding DNA Sequence Number=SeqID_28948
  Gene Ontology: Mol. function=aminocarboxymuconate-semialdehyde decarboxylase activity; Biological process=metabolic process
  Homolog annotation: Hit_ID=Q682E0; Match level="QueryCoverage=65%, HitCoverage=46%, E-value=4e-57, Identity=65%"; Hit description=MRNA, complete cds, clone: RAFL21-86-C08
  Pfam annotation: Domain name=Amidohydro_2; Domain location=63-231; Score=-11.9; E_value=0.0068; Accession=PF04909.4; Description =Amidohydrolase
MGLAKAELREPSTLQVEASAAGRIGPLVANASPVYDVPSFDVIISSASLSFSLFGIVANLLERYMLRHVLEKCMSEAGVDGAVIVQPINHMFDHSLVTSVLKKYPSKFVGCCLANPADDGTGIKQLEHLIVQEKYRAVRFNPNLWPSGQKMTNEVGRSLFSKAGELGVPFGIMTMKGVGPYIQEIEELCRDYPATTVILDHMAFCKPPTLCVALTYRNDEEEKAFSSFLSLSRFPQMNMIMKNIIPYPSKPSSV

SEQ ID NO: 70728 - protein, 75 aa, Zea mays
  Coding DNA Sequence Number=SeqID_28949
  Gene Ontology: Mol. function=aminocarboxymuconate-semialdehyde decarboxylase activity; Biological process=metabolic process
  Homolog annotation: Hit_ID=Q682E0; Match level="QueryCoverage=56%, HitCoverage=12%, E-value=2e-11, Identity=72%"; Hit description=MRNA, complete cds, clone: RAFL21-86-C08
MAASSSCKVIDSHLHVWATPQQAKEEYPYFPGQEPTLRGDADFLLEVFTPANPTRGSGDGFSSGDGEFRISVTLI

SEQ ID NO: 70729 - protein, 80 aa, Zea mays
  Coding DNA Sequence Number=SeqID_28950
MVVVAVERSSRLLVAVVAKERMSREAVVARGHRNLHGATTGDDDDKAIESSQAATAHRPLATATSHSAPVSGTRGTGGQR

SEQ ID NO: 70730 - protein, 185 aa, Zea mays
  Coding DNA Sequence Number=SeqID_28951
MAFVEERLGRRRVGGEGGGVEDPARGIGFAEAGVAGDEEGREVAIGGETRDDGERVGSSRVGGVRGGGDGGGEGFLEGLVADIHLTVTLMPPNPIVGRQRQPPCHDGAISGARTEAPFPCLISNPNAVTSSSDNWGSPRKVLTEIQGMMNPTHDVRRSRVPGDEFRPPKWSILSSPATNDNQITQ

SEQ ID NO: 70731 - protein, 570 aa, Zea mays
  Coding DNA Sequence Number=SeqID_28952
  Gene Ontology: Mol. function=hydrolase activity; Cellular component =intracellular; Biological process=metabolic process
  Homolog annotation: Hit_ID=Q8W0Q5; Match level="QueryCoverage=98%, HitCoverage=78%, E-value=4e-73, Identity=28%"; Hit description =Putative vegetative storage protein
  Pfam annotation: Domain name=PPR; Domain location=181-215; Score =16.6; E_value=0.08; Accession=PF01535.11; Description=PPR repeat
  Pfam annotation: Domain name=PPR; Domain location=288-322; Score =33.1; E_value=9.5e-07; Accession=PF01535.11; Description=PPR repeat
  Pfam annotation: Domain name=PPR; Domain location=389-423; Score =30.2; E_value=7.2e-06; Accession=PF01535.11; Description=PPR repeat
  Pfam annotation: Domain name=PPR; Domain location=424-458; Score=2.8; E_value=3.5; Accession=PF01535.11; Description=PPR repeat
  Pfam annotation: Domain name=PPR; Domain location=528-562; Score=0.7; E_value=6.2; Accession=PF01535.11; Description=PPR repeat
  Pfam annotation: Domain name=PPR; Domain location=79-113; Score=30.3; E_value=6.8e-06; Accession=PF01535.11; Description=PPR repeat
  Pfam module annotation: Pfam domain module=PPR::PPR::PPR::PPR::PPR::PP R; Domain location=181-215::288-322::389-423::424-458::528-562::79-113
MLASGSCAPDRHTYHLAATACARAPDLGLGRRFEAAAAACGLAASDLLVATALIGMHAEAGDMGAARRVFDGMPCRDAVAWNAVIGGYARAGHLSEAVELFGMMRSAVGACPTEATLVSLVSGYAVFGSWKGHGMMHAAVIKSGFQRSLFVSNALLEMYTELGCLSEALLVFRQMEVKDSVTWSSMIGGLVRSNKPGYAVRLFHWMLSKSEVLVTRSILLNVILACSELGDWREGKWIEENFVMCNGSEFKRDPSVVTRLIYMYAKCGQLGSSETLLHESTEVRCDVVAWNALIKACGELGLVEKAIGFAIQMHRTGIYPDNVTFLEILHMISLIPSLKKGMEVHAHIVKRGFQNERAIANSLIYMYGRCGSLSLSVNAFTGIMDKDAISWASMMQVYAWSGLAPEVVKLFEMMKKTKVQPNHYTLIAVLTAYKNTGLVEEGMGLLKCMKEQYGLEPFIEHVSCVVDMLCRTGRLSDAYHLIQSSHSEHARNPKLWGTLLSGSRYWGDLVIGEAAARHLSSLDPGSNANYKMLADIYVSTGRRDRAEDVLRMSMSKELDLRPGCSWTEGG

SEQ ID NO: 70732 - protein, 361 aa, Zea mays
  Coding DNA Sequence Number=SeqID_28953
  Subcellular localization annotation: CTP_CleavageSite=56; ConfidenceScore=5.66e-01
MTTAVLNPLRKQGDVSKVPTTPTAVLLQGSSAPPTATTSHAQGTSTSPTTTLAWPSYEEVAAREDGLADKLSPSPSRTLAVANPAAADDDDDEAAAAAQALRRVAHAHPVLPRSEGTATAIQLHDSRLQWNKQRRSNRSVSRVPGLTPIWSSGFTGVVAAARPRTRARRGLCHHPDQTPEELLSVRLSALHLGVLFRPSRIRSQAGLCAPLPRAAYYGAIPALETQPFVHLQMARIKMAARLATPTSSSVVDKVETRTTKTTLEVSTVTAATRVEAQAEEEKAKNVLAGLDKDESDKGSEEEAVFEEDGNDIRLYMSKRAMYIGQPMARYVFGPSRARHDSVVGRPRPTRPVIHVMLGSLV

SEQ ID NO: 70733 - protein, 290 aa, Zea mays
  Coding DNA Sequence Number=SeqID_28954
  Gene Ontology: Mol. function=kinase activity
  Homolog annotation: Hit_ID=Q2HUI1; Match level="QueryCoverage=52%, HitCoverage=29%, E-value=4e-09, Identity=34%"; Hit description =Phytochrome kinase substrate 1-like protein, putative
YINENREKTLTADKALAAASAPNRSADVPFTAYTNPDTGRRVRSSGGFTFPELSLSAGILDEPPRVSLEVFRPIDEDSVMPADPPLAAAAVPRVGLPPRAPPAALVDEEAMSDASSDLFDLESFAASSSYPTTYRGRGSRRNSADDDPPYVSAAAAAEPALSECMYPASEASVVWSVATAEGGAFDAGSVANFSSAASACCVDDLRYVVPESPEAGFTAAMSRSARRKKSGGGGGGGFLNSCRCEKAVSVGPTPVRVVRPPAHPGAAAKMSSGDGASRYHRGHAHVPVRT

SEQ ID NO: 70734 - protein, 88 aa, Zea mays
  Coding DNA Sequence Number=SeqID_28955
MVNPRPQIASSLLPMILLLPDGSRCLCGNPFVCFVYPLLPLLAETSSWTVPPLVRDSFSMIGSALGGIAGAFYGFNHAHYVYVIVICE

SEQ ID NO: 70735 - protein, 208 aa, Zea mays
  Coding DNA Sequence Number=SeqID_28956
  Gene Ontology: Mol. function=drug transporter activity; Cellular component=membrane; Biological process=multidrug transport
  Homolog annotation: Hit_ID=Q5GAV3; Match level="QueryCoverage=90%, HitCoverage=14%, E-value=1e-36, Identity=47%"; Hit description =Putative integral membrane protein
MASPVDAQLTQALEQQTRAILTELDKRFSAIDSKWELRVGALESQAADFARHSDEFASAIRADVEAHLSAADADLTDRVRYWEATTGARVTSLESALHGFEAWRPRMESSIDALQSTMDSVHAELSKVEIQWSHGARVEGFTKPGILGARGSAPVGSSATVDHADGSRFGPRFASSHRECGFGPPVADLHYPVKGSCGAFSSAGVGSG

SEQ ID NO: 70736 - protein, 71 aa, Zea mays
  Coding DNA Sequence Number=SeqID_28957
MGKNKKGGSSSHHSGDKRKREPSPLLEDFSDSEYSEEEFSSESEGSPVSSSRGVGSRVCLTSEWSAALPPN

SEQ ID NO: 70737 - protein, 85 aa, Zea mays
  Coding DNA Sequence Number=SeqID_28958
MVLLVRPFASMCAPFKGEHAIIERLLGGTLRVCIRPHSMLMMHRLLPRSLQIDTSSLLLSELVAPTIKACYNAIDLVMDSWEQVG

SEQ ID NO: 70738 - protein, 130 aa, Zea mays
  Coding DNA Sequence Number=SeqID_28959
MAEGSKSEDLALASHITLGNQLWKEVILKLRKERSKEEKCFKTPFECFEAEKSENSGKLAKPYYTKRATVISVFSTIKAGKGKKSKRREVTIIPTQDEVPLASMELTVSSNEQEQPKLTSTAIRSPQKGK

SEQ ID NO: 70739 - protein, 75 aa, Zea mays
  Coding DNA Sequence Number=SeqID_28960
MRKLVPNRHSGLHSGSKRFTVLLEVLVPGSEEINHEWRSEFFTGHQGPPRLVGRELYGTNHGEEASSEFVLSFFA

SEQ ID NO: 70740 - protein, 138 aa, Zea mays
  Coding DNA Sequence Number=SeqID_28961
MGKSNKRKREPTPPSEDFGDSEYSEEEFSSESEGSPVTVSPPASSDDSDDSQGLAAEVWTYIRAIERSGLEGSDESEYSSDEEDSSEEGGGGDGGDDDDGDGDGGSRGGNGGSKGGNGGSSRGNNGGGGSKGSNKASG

SEQ ID NO: 70741 - protein, 516 aa, Zea mays
  Coding DNA Sequence Number=SeqID_28962
  Gene Ontology: Mol. function=DNA binding; Biological process=DNA integration
  Homolog annotation: Hit_ID=Q339K7; Match level="QueryCoverage=32%, HitCoverage=46%, E-value=7e-64, Identity=72%"; Hit description=Zinc finger, C3HC4 type family protein, expressed
MSIGDVCPKESEEPPHAQDQPSSSTQASPPTQDEDGAQNDEGENQDVEPHQEESNDQGGDAHNQDEEDEQVPRPPHPRVHQAIQRDHPVNSIPGDIQKGPHMVEEALQDSDWVVAMQEELNNFTRNGPAGHGLIRDLGVQGEWVGGGTKSSSLGPATRVYCFVHQVPVCGVCICFPEHQLCVIWPPSSIKDTGSRLHTELKEAIVQTGMEKNVFGNHYVTIAKADTQTPPAFASDPLKTLSNRDDREFNSANAAKDAALPSTLHSGMYSSAVGSETTIHVDPEIVEIEGSSPVSTQFSVQDSNFIRSPSPHGPGAMTRKGANTVDRQNSEISYYADDEDGNRKKYTKRASPIRLFAFDGLQSKLILYSNYGAMVVERGQWGLQGRVFLGSLADDLLEGGMAVACDHEVWSSWGALLWSRVARLGAVEVAWSPVAAAHDAIFYQSSFIIALAKVWGLVVVCGLHADELVLPSQPSWPSLAAKTSGLGGRDDSCNLPSSRYAHIACDCNNCKEEDADC

SEQ ID NO: 70742 - protein, 139 aa, Zea mays
  Coding DNA Sequence Number=SeqID_28963
  Subcellular localization annotation: CTP_CleavageSite=58; ConfidenceScore=5.70e-01
MELPAASVAPVSSALSPATWNAPWFAFSPSGSSGLRSPEHFLRSQRTAVVDPRPRLARAFIREPLSLHLRSPQPPQLSGLTPNAIRTLVCLASDDGVVVPTGRRRLWMTGEGNISDAHLNPSFLIRRPDFNKPDLTQAI

SEQ ID NO: 70743 - protein, 60 aa, Zea mays
  Coding DNA Sequence Number=SeqID_28964
MGLGVRPSLCPPGSAGVRRYPLKRVVVCCAGQWGVALGTPSRYHCVTADPPFATIGACFT

SEQ ID NO: 70744 - protein, 56 aa, Zea mays
  Coding DNA Sequence Number=SeqID_28965
MTTKRRVGYGETRERHLTTARRTDGLNRGSLQSAIDFGQRPDEAQGHHTKDWVDGK

SEQ ID NO: 70745 - protein, 172 aa, Zea mays
  Coding DNA Sequence Number=SeqID_28966
  Subcellular localization annotation: CTP_CleavageSite=45; ConfidenceScore=5.42e-01
MRLRGGATSAEASPPTISSCRCNKKPPRPQQPSSHTLGICRLSPCAYKTWGRALGRARRVPNHRETRHHLRVLREKRLGVDDAFLASCALAATGLESITVGEACAEVSLCVGRLESTLWRQNSSPRQFIHRAAWVERGTHGITRCTGVAIPWQMGNMTCGYMVQPLQSVKLV

SEQ ID NO: 70746 - protein, 158 aa, Zea mays
  Coding DNA Sequence Number=SeqID_28967
  Homolog annotation: Hit_ID=Q2QTT0; Match level="QueryCoverage=47%, HitCoverage=17%, E-value=2e-30, Identity=88%"; Hit description =Expressed protein
MADWRPMPWLPGGWVALITSIGVGGPHWAPIAGIAMATMNSAHFYITQNNRTALCSMSAYSSTNTMVLYCRLLNIQIGEASRRAWLGEEADPQYSDRLLRPYKRPVEVYMDQQDSRWFISKDAIVSGLGLLGIKQGGPETTLSKPRRKRVVRKKVASG

SEQ ID NO: 70747 - protein, 236 aa, Zea mays
  Coding DNA Sequence Number=SeqID_28968
MARVSLRGFSLESSLRKCWKWSNCIRHTYRNQLIVQTTGSDCIKLSCSNSIATKEEGQGGLGIGAAWTARYAPARLHGRSEHCRAVDGPASAKARTTERALLREGGRGKRGTGARGRVHGVALVPGGAVSAVEVGPAGASGEAAGAPGGLEVLGAGCRARLLGAVGAGALGRCPGSAPGREKRGGGERGERGGGWLGEGVRGKLTSQGAAAVRGAGAALGLGVGDVGPWWALGIFI

SEQ ID NO: 70748 - protein, 260 aa, Zea mays
  Coding DNA Sequence Number=SeqID_28969
RKGRVVSAEVLRGRRGTLRRGSTGGPSTAGQWMVQRRRRRGRRNVLYCEKEEGARWLGLSADDGARAPTSYVRRPTNTSGRGSDGEKLGQGREKTEELGGFYRERERDVGSAGVRNGRAALGVAWSSVVARWLGFMAARHMGAGSGCRARLLGAVGAGALGRCPGSAPGREKRGGGERGERGGGWLGEGVRGKLTSQGAAAVRGAGAALGLGVGDVGPWWALGWVERVGEREGGRGEAAGAERERGGSPAAFVFVPRPGQ

SEQ ID NO: 70749 - protein, 76 aa, Zea mays
  Coding DNA Sequence Number=SeqID_28970
  Subcellular localization annotation: CTP_CleavageSite=25; ConfidenceScore=5.16e-01
MPPKRKSPATIAPAAGSPRKTRSMVAAAAAGKRATEPAPAKAVPAKKEDEAAVAELNGRKRGKKEAEAVTVATTNL

SEQ ID NO: 70750 - protein, 60 aa, Zea mays
  Coding DNA Sequence Number=SeqID_28971
MAVRRGIPALLFLETVAGFLKLVVLYKGEEQVVQEEPYNEEYDLIQVASPSQLYDAMDGH

SEQ ID NO: 70751 - protein, 181 aa, Zea mays
  Coding DNA Sequence Number=SeqID_28972
  Homolog annotation: Hit_ID=Q2QS65; Match level="QueryCoverage=88%, HitCoverage=91%, E-value=4e-20, Identity=39%"; Hit description =Expressed protein
MRFRRGSKSSSKAKKGAAAAPWQNGERKVDGGGPGSNSRQVAPDDDTGIVGNVDDGSSRDETFYEATAWLESDCEDDFYSVNGDLTPARSFASRSSGRNTPPPRPRDLPTLAAILKAEPLKPQRRLGDLLREAQDDDDDDNDTAVDGLSRDDSLRMGAEANRCCVPRLARAISCNGRTQRK

SEQ ID NO: 70752 - protein, 111 aa, Zea mays
  Coding DNA Sequence Number=SeqID_28973
  Subcellular localization annotation: CTP_CleavageSite=34; ConfidenceScore=5.09e-01
MAEASPSLVGHDRDFVWTDYVPGSRGSVWGVCVLTSMASPFPGRATVRRWPMWEGCIMALRFGMCNRRLMTPYPFAMEARASLDSVWMDGIRSRNPLQAINSIPSIRRSVV

SEQ ID NO: 70753 - protein, 167 aa, Zea mays
  Coding DNA Sequence Number=SeqID_28974
MASQTTAEAQRLDGATVADSGCARKRSGEHGPGAAGRERGHRRVSRVADSKAKFTVALDGTRAQRRPRNKRWASVGSGGALGSRGQSEREGEGAGQRAQMREGRWASRVWGSKGARGLGRGWGTRGRGRVHGEEIVGERVFNSNSIQVLNSNQIKYMQQFKEYLGSI

SEQ ID NO: 70754 - protein, 77 aa, Zea mays
  Coding DNA Sequence Number=SeqID_28975
  Homolog annotation: Hit_ID=Q6QP51; Match level="QueryCoverage=34%, HitCoverage=12%, E-value=2e-07, Identity=92%"; Hit description =Putative growth-regulating factor 1
MQAACNCTTGMHPFDFDASSMKAQAYASWTEKGDTPKGILLCEGSGPRALLLIRGSKAGPSVGFDSHPRALGLCVHY

SEQ ID NO: 70755 - protein, 135 aa, Zea mays
  Coding DNA Sequence Number=SeqID_28976
  Gene Ontology: Mol. function=ubiquitin thiolesterase activity; Cellular component=intracellular; Biological process=ubiquitin -dependent protein catabolic process
  Homolog annotation: Hit_ID=Q6H7H9; Match level="QueryCoverage=94%, HitCoverage=58%, E-value=3e-51, Identity=74%"; Hit description =Carboxyl-terminal proteinase-like
  Pfam annotation: Domain name=Peptidase_C12; Domain location=4-135; Score=46.0; E_value=1.4e-11; Accession=PF01088.11; Description =Ubiquitin carboxyl-terminal hydrolase, family 1
MVKRWLPLEANPDVMNQFMWGLGVPEDVGFCDVYGLDDELLAMVPQPVLAVLLLYPQDRSKESQASATSSVETKEPSKNVYFTKQTVGNACGTVGIIHALGNATSRIKLGEGSYFDRFYKRTADMDPIQVYILSG

SEQ ID NO: 70756 - protein, 149 aa, Zea mays
  Coding DNA Sequence Number=SeqID_28977
  Gene Ontology: Mol. function=RNA-directed DNA polymerase activity; Biological process=RNA-dependent DNA replication
  Homolog annotation: Hit_ID=UPI00004C1733; Match level="QueryCoverage =61%, HitCoverage=17%, E-value=2e-20, Identity=89%"; Hit description =UPI00004C1733 related cluster
MPDIPRDAAEHSLDIRAGARPVKQPLRRFDEEKRRAIGEEIHKLMAVGFIKEAKGVKLNPEKWVFGVPRGMFLGFIVSKRGIEANLEKIATIAQHPEPLLGTPGGYTHPWEGPLVIAKVLKPGTYKLANSQGKVCGNAWNIQQLRRFYP

SEQ ID NO: 70757 - protein, 65 aa, Zea mays
  Coding DNA Sequence Number=SeqID_28978
MGMRWFCWLFLVWSLSYFRELLGLVAPRISLEAGWSAVCAEICSPGARKQVAVENCLGIRQETTQ

SEQ ID NO: 70758 - protein, 171 aa, Zea mays
  Coding DNA Sequence Number=SeqID_28979
  Subcellular localization annotation: CTP_CleavageSite=29; ConfidenceScore=5.25e-01
MAGADACEPVLAFSFLFALPPSLSIRRPRARARPPQSWDPHAAASGLYPSPRWLPSSPSALPHRIRHRWPLACLRARQRSSGGGRANLPAALVRPPALQRSTAAAGELFPATSPSPLLPGTPDGPSSTSVPPTRSAPQPSYASCAPLPPTRSAPGLPVRPTRAALLIALAT

SEQ ID NO: 70759 - protein, 462 aa, Zea mays
  Coding DNA Sequence Number=SeqID_28980
  Gene Ontology: Mol. function=hydrolase activity, acting on acid anhydrides, catalyzing transmembrane movement of substances; Cellular component=integral to membrane; Biological process=calcium ion transport
  Homolog annotation: Hit_ID=Q9LF79; Match level="QueryCoverage=91%, HitCoverage=41%, E-value=1e-158, Identity=64%"; Hit description =Calcium-transporting ATPase 8, plasma membrane-type (EC 3.6.3.8) (Ca(2+)-ATPase isoform 8)
  Pfam annotation: Domain name=E1-E2_ATPase; Domain location=24-245; Score=170.2; E_value=5.4e-48; Accession=PF00122.10; Description=E1 -E2 ATPase
  Subcellular localization annotation: CTP_CleavageSite=37; ConfidenceScore=5.11e-01
MSKAALKHGHVVFHGFPSYYSTQSLCSDTFFTTFLATSDYRQSLQFQHLNEEKRNIQVEVIRGGKRLVASIFDLVVGDVVPLKIGDQVPADGILIYGHSLAIDESSMTGESKIVNKDQRAPFLMSGCKVADGYGSMLVTGVGINTEWGMLMANLSEDIGEETPLQVRLNGVATLIGIVGLSVAGAVLVILWLSYANLNACFLQVTIVVVAVPEGLPLAVTLTLAYSMRKMMRDKALVRRLSSCETMGSATTICSDKTGTLTMNKMTVVEAYLGGEKMDTYDNASTMCTSVTALLIEGIAQNTTGTVFMPEDGGAAEITGSPTEKAILSWGLMIGMDFKDVRSKSSVLHVVPFNSEKKRGGVALQVSDTEVHIHWKGAAELLLASCRSWLSTDGSIQQMNSIKHNEFKERIDDMAMSSLRCVAFAYCPWEPKMVPMESLDKWKLPEDDLTLIGMVGIKRCRCD

SEQ ID NO: 70760 - protein, 341 aa, Zea mays
  Coding DNA Sequence Number=SeqID_28981
  Gene Ontology: Mol. function=ATPase activity, coupled to transmembrane movement of ions, phosphorylative mechanism; Cellular component=membrane; Biological process=metabolic process
  Homolog annotation: Hit_ID=Q94IM5; Match level="QueryCoverage=93%, HitCoverage=55%, E-value=1e-79, Identity=46%"; Hit description=P -type ATPase
  Pfam annotation: Domain name=Cation_ATPase_C; Domain location=166 -330; Score=-14.7; E_value=0.0011; Accession=PF00689.11; Description =Cation transporting ATPase, C-terminus
VRMVTGDNVETAKAIAVECGILDAKDAASEPNVIEGKVFREMSETAREDIADKITDLYATVDFIYINNNILKSMERLLRTRDLVMGRRGHVVAVTGDGTNDAPALHEVFSMGISGTEVAKESSDIIIWDDDFTSVVKVVRWGRSVYANIQKFIQFQLTVNVAALVINVIAAVSSGDVPLNAVEALYQIAVLLIFNFDGKRILRLQNGSWEHAEKTKNTFVFNAFVFCQIFNEFNARKPEEKNVFKGVANNHLFVAIVGATTVLQIARDHSPINTLHSTCSQTSPKYYTPSQILIIEFLGKFFDTARLDWRLWLLSVAIGAVRGGVVKRLMAQVSLDKSSTG

SEQ ID NO: 70761 - protein, 96 aa, Zea mays
  Coding DNA Sequence Number=SeqID_28982
  Subcellular localization annotation: CTP_CleavageSite=65; ConfidenceScore=5.40e-01
MGDKPSKSLLRALWCVSEPFPVGGSRSANLAIFPRRRFVSPFRKDASIFLSLAKEMLFRYLTFTSVMPISYSNASATLGRDRGNKLGIGIDSGSCR

SEQ ID NO: 70762 - protein, 61 aa, Zea mays
  Coding DNA Sequence Number=SeqID_28983
MAHSWLLSSILSYYADAFLGQMIEALRTVEVQCQFQEMRIEIPVSGWYWLRAQLHLRTALL

SEQ ID NO: 70763 - protein, 175 aa, Zea mays; identical to SEQ ID NO: 41781
  Coding DNA Sequence Number=SeqID_28984

SEQ ID NO: 70764 - protein, 71 aa, Zea mays
  Coding DNA Sequence Number=SeqID_28985
  Subcellular localization annotation: CTP_CleavageSite=50; ConfidenceScore=5.12e-01
MRQAAKSCVHIHRRLSVSPRFTVGGRRPFVNQLHRGRGPEKVQFTIKCFSCYMRRSGFHPDMIRRDVRVQL

SEQ ID NO: 70765 - protein, 108 aa, Zea mays
  Coding DNA Sequence Number=SeqID_28986
MGGERDETAGDCGRVRLASRKWRGTSNQAALPKQEAKPTSVRRDAVTWPPANPAGAPPHLAAKGKANPGARRSRSRTYDTTMRAARSSIALTSVLISYTVLPKRATHA

SEQ ID NO: 70766 - protein, 217 aa, Zea mays
  Coding DNA Sequence Number=SeqID_28987
MKTVVAGEAAQTNEKGQRCHWVRTCEQVGGRRSRGGERWEEAELLEEERRLSRDFTGEGRTGGRRPSRDDGAGGAREEVEEPGAATGSTERPTWTPGFAARTTSRGSDSWARDVRNHRQGARRAQGWAAANRKWPTAGEGQRSRPDGKYAWITVAYATNAVFGMGATNSSMMGMQQQQQGLYGNMQAGAQNVPQGMAGLQNQTQNPNFTQQRQQNQQ

SEQ ID NO: 70767 - protein, 329 aa, Zea mays
  Coding DNA Sequence Number=SeqID_28988
MTHPPGIRSLETLNLIPSPSPVAPTSCSLVTDEISPLPPTATEVFLLAVVLSRRLRCSGCAGTPVVGEEPSVYGMDDDLHPTVVDEEHRLEYHNKAEDARILFGSSVAINIDNDDDVPGAATGGQAGTGSTSPTPTGTSTAATSSTWATGQSSFTVWCAFWRCSDSAHLSGTIIRGTLKTPNSQLVTPISVKLQRPDGATRQSESDRQSGLAKGATANSAPPDPRARTRAKARKTANSAPPDPRARTRAKTRKTANSAPPDPRARTRAKTRKTANSASPDPRARTRAKTRKTTKLRLARPQGSDSALASAERLPPRPTPWLGLGLGNRG

SEQ ID NO: 70768 - protein, 176 aa, Zea mays
  Coding DNA Sequence Number=SeqID_28989
  Gene Ontology: Mol. function=receptor signaling complex scaffold activity; Cellular component=holo TFIIH complex; Biological process =two-component signal transduction system (phosphorelay)
  Homolog annotation: Hit_ID=Q6ZEY8; Match level="QueryCoverage=79%, HitCoverage=20%, E-value=1e-51, Identity=68%"; Hit description=DNA repair/transcription protein Mms19-like protein
MRRGSKGRVKEKALELVEHLRAVGETNALFQRNPDGEQLYGICEAIDEEKDPECLMLSFHVVEVVMELFPDPSGLAAQFTGDVFEILSKYFPVYFTHGVGNGLDTTQEDLSIALMHVFCSTQFFEPFVIPLLLDKLSSSLPLAKFDSLKYLDKCIRFYGADRMVRHASTVWYKLKE

SEQ ID NO: 70769 - protein, 131 aa, Zea mays
  Coding DNA Sequence Number=SeqID_28990
  Gene Ontology: Mol. function=dihydrolipoyl dehydrogenase activity; Cellular component=cytoplasm; Biological process=cell redox homeostasis
  Homolog annotation: Hit_ID=Q94CN9; Match level="QueryCoverage=74%, HitCoverage=17%, E-value=4e-46, Identity=94%"; Hit description =Putative dihydrolipoamide dehydrogenase
MPANCALMLANCAMSRSSLAEKDVVGLGTPPAILAKLAQRILISPRKIDYHTGVFASKITPAKDGKPVLIELIDAKTKEHKETLEVDAALIATGRAPFTKGLGLENINVVTQQGFVPVDERMQVMDATGNV

SEQ ID NO: 70770 - protein, 63 aa, Zea mays
  Coding DNA Sequence Number=SeqID_28991
MKEDEAKNKIEEENDRWRPNNESTSSQDENDSESETEDDEENESDIEDDDDLQQFFTQLSKKN

SEQ ID NO: 70771 - protein, 176 aa, Zea mays
  Coding DNA Sequence Number=SeqID_28992
  Homolog annotation: Hit_ID=Q10KE4; Match level="QueryCoverage=86%, HitCoverage=25%, E-value=6e-29, Identity=54%"; Hit description =Expressed protein
MELLPTDQICSGHENIDMGIEMLSLGSFKTGAILSKLKHAVASEKIQGVIPGTNSSAPQKYNSENIQHENKIVSQNINSAGDCIGDCKNSSNAFSSREENTIAETRCPTDNSNSCQFALSNGSPILNNHSAPQDSLTYGDNDLKYIDWPGIDNFEDVDTLFSKGFDSALFPNYDFS

SEQ ID NO: 70772 - protein, 373 aa, Zea mays
  Coding DNA Sequence Number=SeqID_28993
  Gene Ontology: Mol. function=hydrolase activity, hydrolyzing O -glycosyl compounds; Cellular component=cellulose and pectin -containing cell wall; Biological process=carbohydrate metabolic process
  Homolog annotation: Hit_ID=Q8W012; Match level="QueryCoverage=93%, HitCoverage=45%, E-value=1e-172, Identity=84%"; Hit description =Alpha-L-arabinofuranosidase/beta-D-xylosidase isoenzyme ARA-I
  Pfam annotation: Domain name=Glyco_hydro_3; Domain location=2-216; Score=119.3; E_value=1.1e-32; Accession=PF00933.12; Description =Glycosyl hydrolase family 3 N terminal domain
MASGSRGTGTCAAAQADKGHTLEISVVSNEARAMHNVGLAGLTFWSPNINIFRDPRWGRGQETPGEDPLLTSKYAVGYVTGLQGAVSGAGALKVAACCKHYTAYDVDNWKGVERYTFDAVVSQQDLDDTFQPPFKSCVVDGNVASVMCSYNQVNGKPTCADKDLLSGVIRGDWKLNGYISSDCDSVDVLYNNQHYTKTPEDAAAISIKAGLDLNCGTFLAQHTVAAVQAGKLSESDVDRAVTNNLVTLMRLGFFDGDPRELPFGNLGPSDVCTPSNQELAREAARQGIVLLKNTGKLPLSATSIKSMAVIGPNANASFTMIGNYEGTPCKYTTPLQGLGANVATVYQPGCTNEGAAATACSSTRPPRPRPALT

SEQ ID NO: 70773 - protein, 132 aa, Zea mays
  Coding DNA Sequence Number=SeqID_28994
MDMFFVLVERVTGYGGHAEDDQKDASDHIGAVTSPIPQRPDQITRRSHWSSRKPYPYPGPVIPDARSQALSVSPSLAAAPHSPLPDASLARPRPRSSTLAWGRDAQTPAALLLCDSAIRFGKERTDKERTGD

SEQ ID NO: 70774 - protein, 53 aa, Zea mays
  Coding DNA Sequence Number=SeqID_28995
MANLQGSLPATANCPAFWMVLTYTKFEESIGAESSITYYNLQQKEPCLITSGS

SEQ ID NO: 70775 - protein, 181 aa, Zea mays
  Coding DNA Sequence Number=SeqID_28996
  Gene Ontology: Mol. function=DNA-directed RNA polymerase activity; Cellular component=nucleus; Biological process=transcription
  Homolog annotation: Hit_ID=Q07DU9; Match level="QueryCoverage=91%, HitCoverage=14%, E-value=6e-93, Identity=96%"; Hit description=RNA polymerase IV second largest subunit
  Pfam annotation: Domain name=RNA_pol_Rpb2_7; Domain location=80-179; Score=118.2; E_value=2.4e-32; Accession=PF04560.10; Description=RNA polymerase Rpb2, domain 7
MAETHNFLCILLHCRAGYSRWGAENVLNGRTGERMKSLVFMGPTFYQRLIHMSEDKVKYRNTGPVHPLTRQPVADRKRFGGVKFGEMERDCLLAHGSAANLHERLFMLSDFSQMHICQTCERVANVVMRSVPGGKKIRGPYCGFCKSSENIVRINVPYGAKLLYQELFSMGICLKFETEVC

SEQ ID NO: 70776 - protein, 155 aa, Zea mays
  Coding DNA Sequence Number=SeqID_28997
  Gene Ontology: Mol. function=DNA-directed RNA polymerase activity; Biological process=transcription
  Homolog annotation: Hit_ID=Q07DU9; Match level="QueryCoverage=55%, HitCoverage=7%, E-value=2e-40, Identity=93%"; Hit description=RNA polymerase IV second largest subunit
MEELQKDSALPSNSSDSEPEAMELDDNGAGKSHSIEGNRDSPIDTDEGQPSMDVDIKGKSSLNDDVNGKSSSEPFSNPPINMSVESLEKFCKEASRSFFDEVGLISHQINSYNEFVSHGLQELFDSLGEVIVEPGYDPSKKGSGGYFLVKGMEKV

SEQ ID NO: 70777 - protein, 147 aa, Zea mays
  Coding DNA Sequence Number=SeqID_28998
MGPRGGQARSSDPRPPSPAHLAPTPPIPLLLKIIFPIREDICYASGLLHQVIVSKYYVTGNDAGRRNKERKGLPWGAPSPLHMTRACSPPLRGQLQKLPVRSASLTPTLPHTHTPLHCLLNLYLSNGYVFSSGSDPKSQIHWYWSVT

SEQ ID NO: 70778 - protein, 245 aa, Zea mays
  Coding DNA Sequence Number=SeqID_28999
MMIEVAIAKPIPWVMPHHPRPRRSCGLVVSLPWENNIVESGGCELEVGPHLVLVEQVVEAFGAVGARRSWQRRLRQRDRRRRREPLTPPNSLLPRCEDELRHGRLHFCPFPGVPGIYLSASGASFSIGDRSAHRACGGLVERGSRHRGSAARLSSSMVVWGGAWDLGTGRGRQQLLHRRCTCGTWIWPSRGATLIVVDECVGDLGTGGGAERWIGLVGDVAEGKRSPKFRRENRVQPIVRGFWLG

SEQ ID NO: 70779 - protein, 96 aa, Zea mays
  Coding DNA Sequence Number=SeqID_29000
MGGLSGLSSHRLQLEEEEEQSSMHLRVMLFDPKVLILQIPLSPSPPSRFFYSSELLEFGPDFETCRVAVWGLKEMTCIAVAGSSDRPQPTVLVNII

SEQ ID NO: 70780 - protein, 212 aa, Zea mays
  Coding DNA Sequence Number=SeqID_29001
  Subcellular localization annotation: CTP_CleavageSite=54; ConfidenceScore=5.06e-01
MPGLKVGSWGTDTGGPGAPARRPVGSQERSARKMGKGDEETSAAAVCARNVRVNCGTVSHVSHTAVDVAVAVEAMPGLKVGSWGTDTGKGGVHALLPTIPESPNRVAMYVPVHKNKGAFDFRKGGGAFDIPTIERSNLQCIDSAIFLTTRRLLLLFTRWRGATCHTDRQTDRQTDRHVLRMLYGMVPGKGNGIKLQTKLPYDSYSYRRIDGY

SEQ ID NO: 70781 - protein, 538 aa, Zea mays
  Coding DNA Sequence Number=SeqID_29002
  Gene Ontology: Cellular component=cytoplasm; Biological process =apoptosis
  Homolog annotation: Hit_ID=Q69JW8; Match level="QueryCoverage=23%, HitCoverage=42%, E-value=7e-48, Identity=53%"; Hit description =Loricrin-like protein
  Pfam annotation: Domain name=PDCD2_C; Domain location=189-336; Score=- 28.4; E_value=5.3e-05; Accession=PF04194.4; Description=Programmed cell death protein 2, C-terminal putative domain
MAEVHLGLPGPWAADYREMADHYTTKIGGVPDWPTGDMGFKPETLQCSLCGTKLCLVAQIRDGTKRFWKVLRVQKCHNVMQTEGGGDELGQPNGPSSTSLPEEQNDKNKIPETNDDDFDLDALAEALEQAATLASNSKKKNKSKHANAPVKRPVLKEQACDLSIPGEDNFETTRYHELYGGKGAVGSSSSELVLDKEIMDAANDEEEKWEGEKYEYDRAIGADRTFLKFKKRLDAYPQQCFRYSYGGKPLLATTKLQDPGTCRLCGSPRQYELQLMSPLSYFLHEAGDGSSNYAPSSWTWLTVIIYTCPKIPSCPLGTLLVILVTAILKAQWAATCTCLDCQLQSRVAMLRLSIKGYDPQQGNKVLPLLFVPRSGDFCFNRTSPDTDGQQHEGTGCGTESDHDRSLNHHEVQGVHQEFAFLMAVGRGCNKGAESRTTFCKAHGGGRRCQELGCTKSVAGKTEFCIAHGGGRWCGIKECSSAARGKSGFCLKHGEGKRWRIEGCTRGAEGHSGLCISHGGGRRCQHPNCGKGAQGSTIS

SEQ ID NO: 70782 - protein, 75 aa, Zea mays
  Coding DNA Sequence Number=SeqID_29003
MKSRICLGGQDPLVTETGTRRALLDRWPASAFSDTFYEPPPTTAHCRRSPETRCTASCPPSPADPGLPQLPLHPP

SEQ ID NO: 70783 - protein, 177 aa, Zea mays
  Coding DNA Sequence Number=SeqID_29004
MSRSAWAVLPNLVTRRTKSTKRPERSKRRGISNWQVLPPPGNGGLKYYGCDLIVLGADLIVMAISVVDGWTNADTKLMEHVLLVVLKRARMERMKALEKMMNSKSASSIANLVALIISVIFCFFILWQGRAYCGGYKGPMFLCGGDNDTVEPRQCQQADFLDWNLWFFLKIEYVLAS

SEQ ID NO: 70784 - protein, 86 aa, Zea mays
  Coding DNA Sequence Number=SeqID_29005
  Gene Ontology: Mol. function=D-alanyl-D-alanine endopeptidase activity; Cellular component=integral to membrane
  Homolog annotation: Hit_ID=Q6ZGL9; Match level="QueryCoverage=62%, HitCoverage=15%, E-value=6e-19, Identity=87%"; Hit description =Putative minor histocompatibility antigen H13 isoform 1
MNGSRDSFFYLFHIVPVNHSLKKKHAIVLFHFLGGLLVYDIFWVFFTPVMVSVAKSFDALIKLLFSTADDARPFSMLGLGDIVIPG

SEQ ID NO: 70785 - protein, 81 aa, Zea mays
  Coding DNA Sequence Number=SeqID_29006
MDLLKAARGLCRSYMLQVPSNSIGFTLKASHRYGMFQEYVLVSVWLTQTCFDKSRAAMLPFRTTTYLNANGSKCLKYQRQG

SEQ ID NO: 70786 - protein, 112 aa, Zea mays
  Coding DNA Sequence Number=SeqID_29007
MGSSPLRAEWESRLVGGYEIDGFGYDYGAASPLQPNRILAEYVDVYSPLLYTPNTPHPQVVSIATTAQEKMKPWKETSRSSKTTTSSRCGLAATPSQLPVKAAFIYVSFSAL

SEQ ID NO: 70787 - protein, 97 aa, Zea mays
  Coding DNA Sequence Number=SeqID_29008
  Subcellular localization annotation: CTP_CleavageSite=45; ConfidenceScore=5.36e-01
MTTMVLSPLRKQGDVSKVPTAPTAVLLQGSSAPPTATIPLGVFVSEGETGKRGPPVGTSGNGEVEPTRGAWLASAWSGREGCTLASPSMQAYGWLPA

SEQ ID NO: 70788 - protein, 82 aa, Zea mays
  Coding DNA Sequence Number=SeqID_29009
MGLSAVERAYIQPVEHAGLGVSNDSEEVSSEEAEDSLDSEKDSNGEGDSGSSDDSSRGGDDSSGGGDGGGVVNDDVDGGGGD

SEQ ID NO: 70789 - protein, 194 aa, Zea mays
  Coding DNA Sequence Number=SeqID_29010
  Subcellular localization annotation: CTP_CleavageSite=48; ConfidenceScore=5.67e-01
MVVPTSAQFPATTPAPDPYSNPLRPALPFPPLVDSSQPTLARALSLPRARRTAAIHRARTSVLPPPLSPHCAHCLGKFRLGVHNSRHASIFPLPLWFSLPVLIRAFPAHPESPPSTQALAVSLSPFKGPESSLKAHDRVRRIPPNLHEPFSASRRAPARSCPRLRWASAMDVSGATAGGRGTWPELTDRSQESV

SEQ ID NO: 70790 - protein, 96 aa, Zea mays
  Coding DNA Sequence Number=SeqID_29011
MAGVRTEGVTAGKALSSNMDEKEEALKGRFKVITDKNVREEVNGHKNKGYKYHKGWVKTGPTGGKEEDTSKGQIGKLPLSIEVEERRFLKGRHKDK

SEQ ID NO: 70791 - protein, 84 aa, Zea mays
  Coding DNA Sequence Number=SeqID_29012
MTKDFTMTAELAPYEDMVDESKVADLLIKFIFSRWWARCLLLLVPYFSDESFIPLIGIDESKDGASCMLMWLWNHRRWAPMLGT

SEQ ID NO: 70792 - protein, 39 aa, Zea mays
  Coding DNA Sequence Number=SeqID_29013
  Homolog annotation: Hit_ID=Q339W7; Match level="QueryCoverage=90%, HitCoverage=8%, E-value=6e-08, Identity=75%"; Hit description =Probable protein LIKE HETEROCHROMATIN PROTEIN1
MVNRSDGEMVFVDDKQLKAKEPLVLIDYYEQHLRYNPTS

SEQ ID NO: 70793 - protein, 151 aa, Zea mays
  Coding DNA Sequence Number=SeqID_29014
  Subcellular localization annotation: CTP_CleavageSite=85; ConfidenceScore=5.30e-01
MTQDQKKPKKIVNKSKKWAANQVSGGASNMSGVHRIVYSESPTNGLSGAIASDCPVCTEQSGQRSSTTLSTVDCCSPQRSADMARASGMSGEHRIARCARRQKQPAFCPTAIIEGETIYTPPTGHLKVWEPKVLEICPRDNHSDEHISLYP

SEQ ID NO: 70794 - protein, 80 aa, Zea mays
  Coding DNA Sequence Number=SeqID_29015
MAPPWQVVRWPELVGRVVTVGSHGNDYYYVFCLHVWCDVNFLFILCMFVLMRVDEQATEDPELQLVETAEQELIKGKLCP

SEQ ID NO: 70795 - protein, 54 aa, Zea mays
  Coding DNA Sequence Number=SeqID_29016
MATPWQVVQRPELVGRVITVGSRVDDHYVNENMENHPGKQCYHKGGMGHPWLIN

SEQ ID NO: 70796 - protein, 75 aa, Zea mays
  Coding DNA Sequence Number=SeqID_29017
MQADARSAVPRTAPSMRNLISVGQADEASSHEYALQKPDRPHTRPMGTRLSTTEVTIDMLIKSLVTSVVYTIQEL

SEQ ID NO: 70797 - protein, 411 aa, Zea mays
  Coding DNA Sequence Number=SeqID_29018
  Gene Ontology: Mol. function=serine carboxypeptidase activity; Cellular component=peroxisome; Biological process=proteolysis
  Homolog annotation: Hit_ID=Q10A76; Match level="QueryCoverage=92%, HitCoverage=75%, E-value=1e-147, Identity=67%"; Hit description =Serine carboxypeptidase family protein, expressed
  Pfam annotation: Domain name=Peptidase_S10; Domain location=3-405; Score=325.7; E_value=8.3e-95; Accession=PF00450.12; Description =Serine carboxypeptidase
MKGLHDDIEDLMTFFTLVTSCGCGVAGPLKFDVAGYTEGTFPRLVYFEDSWTKVSNIIFLDSPVGTGFSYSREEAGLNVSLTESGRQHHVFLRKWLAEHPEFASQPLYIGGDSYSGYTVPVTAMDIATSSRSRDDDDGYPKPNLVGYLVGNPGTDDRYDSGGKVPFMHGMGLISDELYEAARLGCGGDFYKTPDLTNTRCASAMIAIYMVTVGVNPMHILEPFCGPQGPGVRSIFQDNGSRRSMLVQDDVPHPGFFTKQPVECRNNGYRLSNIWADDPEVRDALGIHKASIGSWSRCTMLPYYRHDVSTAIPYHVNLTKAGYRALVYSGDHDLGMTFVGTQEWIRRIGYPIVSDWRPWFVNRQVAGFTRTYAHNLTFATVKGGGHTAPEYRPKECLAMLDRWTSSAAGQLS

SEQ ID NO: 70798 - protein, 85 aa, Zea mays
  Coding DNA Sequence Number=SeqID_29019
MGTSSEGMSHVNTEAMSDAFVVNLADMCGSLMGSTCDTDTDNDTFMKKVVDGIEDSTLFPSPRWRTRARVSLSLSPRKNQVLSMR

SEQ ID NO: 70799 - protein, 144 aa, Zea mays
  Coding DNA Sequence Number=SeqID_29020
  Gene Ontology: Mol. function=serine carboxypeptidase activity; Cellular component=peroxisome; Biological process=proteolysis
  Homolog annotation: Hit_ID=Q7G6W5; Match level="QueryCoverage=53%, HitCoverage=61%, E-value=2e-29, Identity=76%"; Hit description =Putative serine carboxypeptidase
MGGAYCRRRSPLEQQLLPAVLVLLVIVAASSSFWGVAAKETGRNVITHIKGFRGPLPFHLETGYVEVDDENGARLFYYFIESERNPAEDPLILWITGGPGCSALSGLLFEIVGRHEPPMFMMVNRHIQQQPMYMALLPLRMKET

SEQ ID NO: 70800 - protein, 106 aa, Zea mays
  Coding DNA Sequence Number=SeqID_29021
YTLQDPTHGRDTSQKQEERASLPYSENGTMPEVRIQMGSSKIEPPARTYGDFTGIWRRRRRAEVLSGPTISGDSGGEERPKLVPGSSMRSETREWARTVKTTAQEK

SEQ ID NO: 70801 - protein, 376 aa, Zea mays
  Coding DNA Sequence Number=SeqID_29022
  Gene Ontology: Mol. function=metal ion binding
  Homolog annotation: Hit_ID=Q84SC7; Match level="QueryCoverage=79%, HitCoverage=68%, E-value=1e-49, Identity=39%"; Hit description=Zinc finger (C3HC4-type RING finger) protein-like
  Pfam annotation: Domain name=zf-C3HC4; Domain location=171-211; Score= 30.9; E_value=4.6e-06; Accession=PF00097.15; Description=Zinc finger, C3HC4 type (RING finger)
YSWLDGSGEEYTDAPALSAPAPTPVDGHGVSGPQFLMAATGLDGDDLAVPRPVHPSRVAAAAAAAGGLEMVGTSVLGQSTQGATASEAGELRFLRAIRISQQHNIVRSGPASHTQVAASTDAGSLVMAMQHTQSAFEAAADPEGGGDKVRGSDAAEKDGSCDCNCDSSFECNICLERAKQPVVTSCGHLFCWPCLYRWLHAQSPFCDCPVCKGEVLLTSITPIYGRGGDEEGDSGSSAVPDLPPRPQANRRDSLRQQLQTATDARGIAAVLREMIQNQGIVTSVPAGRQRAGSARRQRRQGSNASRSAVVNAGNAAPEGSDPIQPPHSNGGNGEQVVHAAPQQPPPAVVLGEPGPSRRSRHSESAAIRRTRRRPQQ

SEQ ID NO: 70802 - protein, 479 aa, Zea mays
  Coding DNA Sequence Number=SeqID_29023
  Gene Ontology: Mol. function=DNA binding; Cellular component =mitochondrion; Biological process=positive regulation of transcription, DNA-dependent
  Homolog annotation: Hit_ID=Q7F7G0; Match level="QueryCoverage=88%, HitCoverage=75%, E-value=1e-37, Identity=25%"; Hit description =Putative DNA-binding protein
  Pfam annotation: Domain name=PPR; Domain location=147-181; Score=4.9; E_value=2; Accession=PF01535.11; Description=PPR repeat
  Pfam annotation: Domain name=PPR; Domain location=182-216; Score=2.3; E_value=4; Accession=PF01535.11; Description=PPR repeat
  Pfam annotation: Domain name=PPR; Domain location=217-251; Score =18.4; E_value=0.026; Accession=PF01535.11; Description=PPR repeat
  Pfam annotation: Domain name=PPR; Domain location=321-354; Score=3.6; E_value=2.8; Accession=PF01535.11; Description=PPR repeat
  Pfam annotation: Domain name=PPR; Domain location=356-390; Score =10.9; E_value=0.38; Accession=PF01535.11; Description=PPR repeat
  Pfam annotation: Domain name=PPR; Domain location=398-432; Score=8.7; E_value=0.69; Accession=PF01535.11; Description=PPR repeat
  Pfam module annotation: Pfam domain module=PPR::PPR::PPR::PPR::PPR::PP R; Domain location=147-181::182-216::217-251::321-354::356-390::398 -432
  Subcellular localization annotation: CTP_CleavageSite=42; ConfidenceScore=5.05e-01
MLLWRVLLRHRRPPFPVHAAGFFTSSGSNTTAPPPAGAEGLRDEPGEEGSLARRVERAASVGAAMRGWMADGRAVHRGHVFHAINRLRRHRLHRTALQVMEWIVRERPYKLSELDYSYLLEFTAKVHGISEAESLFLRVPQECRKELLYNNLVMAALDLNHIKHSYAYMRKMRELSLPISPYVYNRLIILHSSPGRRKTISKILSQMKADRVVPHTSTYNILLKIQANEHNIDGLARVFNGMKRAKIEPNEITYGILAIAHAVARLYTVCHTYVEAIENSMTGTNWSTLEILLILYGYLGKEKELKRTWEIMQDLPHIRSKSFTLAIEAFGKVGSIDQAEKIWIHIKSTKKLSLTEQFNSMLSVYCRHGLVKEALNTIDMGKKEVVTKKVRSSTPWLETTHLLLENFAEIGDLENAKRLYSELNESKYSLNSFVYNTLLKAYVKAKVYEPDLSRTMILRGAMPDAETYSLLRLIEQFKI

SEQ ID NO: 70803 - protein, 71 aa, Zea mays
  Coding DNA Sequence Number=SeqID_29024
  Gene Ontology: Mol. function=DNA binding
MVQIIEHRNLSPEDFLMEEGASSYMPRGSNRPVPGAAAMHARAAAHARSDLQDSVEGCPWWGIVCSQGVAA

SEQ ID NO: 70804 - protein, 53 aa, Zea mays
  Coding DNA Sequence Number=SeqID_29025
MAIRSTLLPEANFARVSTNIQQWLFGALVPHTVFDIADFLLCEIEDVISDGFH

SEQ ID NO: 70805 - protein, 97 aa, Zea mays
  Coding DNA Sequence Number=SeqID_29026
  Subcellular localization annotation: CTP_CleavageSite=49; ConfidenceScore=5.51e-01
MAPLQAPLQTGSLLSLESQQRVGVVPMAGAPFSPRSSTSPWDPPLLPALASTRPGTRPAAASYCSREKSRKKTPPVHDMYLLDLVDGVTWPSSLPPG

SEQ ID NO: 70806 - protein, 134 aa, Zea mays
  Coding DNA Sequence Number=SeqID_29027
MSELQRSEPNGLVTWLAHRTVSGGAPDCPVHHATAASTKLAIWWRLLSHGAPDSPVRHRTLSGAPATSPGRWVPTVGALTCGPAWLSGGALDKSYRLSELYNIVGRPNEFVYGERGYGSVYEVSLSITLMDVNL

SEQ ID NO: 70807 - protein, 60 aa, Zea mays
  Coding DNA Sequence Number=SeqID_29028
MAYGDSARAYKLTGRMGIGDIPGWGLESHFVGLEGAAAEDWDWGGSGYLSWDLWLHENVG

SEQ ID NO: 70808 - protein, 244 aa, Zea mays
  Coding DNA Sequence Number=SeqID_29029
  Gene Ontology: Mol. function=RNA-directed DNA polymerase activity; Cellular component=nucleus; Biological process=RNA-dependent DNA replication
  Homolog annotation: Hit_ID=UPI00005A975E; Match level="QueryCoverage =96%, HitCoverage=14%, E-value=1e-110, Identity=80%"; Hit description= PREDICTED: similar to Retrovirus-related Pol polyprotein from transposon 297
STEKVCSVKVAAPVYLDWSDKPITFDQGNHPDRVPSPEKYPLVVDPIIGNVTLTKVLMDGGSSLNIIYAETLGLLQIDLSTIRAGAAPFHRIIPGKRVQPLGQLDLPVCFGTPSNFQKETLTFEVVGFRGTYHAVLGRPCYAKFMAVPNYTYLKLKMSGPNGIITVGSTYRHAYECDVECVEYAEALAESEALIIDLESLSKEVPDAKRHAGNFEPAEAVKSIPLDPSNDASKQVRIGSELDPK

SEQ ID NO: 70809 - protein, 96 aa, Zea mays
  Coding DNA Sequence Number=SeqID_29030
MGRSNLAIGVDPSLRTAVVTLFIRRRLPRLTGLKLFENDLLSKLIVAQNRKEFHLSSQKKLSSKRSLLQCLNAYQLGFDANWVILIEGLEFPPATK

SEQ ID NO: 70810 - protein, 104 aa, Zea mays
  Coding DNA Sequence Number=SeqID_29031
MARRGCRRGEDGWVPVSAHTKECGEQRRTSRCSDERGRAVRHAGRLGAAAELEHEAKGERLRKSTSSCCCSTDGENQGVLTVEESGTCDYRLEISSRLARRSLL

SEQ ID NO: 70811 - protein, 100 aa, Zea mays
  Coding DNA Sequence Number=SeqID_29032
MEATKTIGILGCKRGEMIFGRSLNSIDIAIVGLRAPYVIIGKGFASTGLFGRFSRMAGFLPIRGTGFPEVWMEKGIKQRQGRWMEEVTVYSKQLFYVIDI

SEQ ID NO: 70812 - protein, 35 aa, Zea mays
  Coding DNA Sequence Number=SeqID_29033
  Homolog annotation: Hit_ID=Q69LW2; Match level="QueryCoverage=98%, HitCoverage=8%, E-value=7e-09, Identity=79%"; Hit description=Rab3 -GAP regulatory domain-like
ILKLNFHERKENAWEDSSSDDISGVIARFDGADLQ

SEQ ID NO: 70813 - protein, 168 aa, Zea mays
  Coding DNA Sequence Number=SeqID_29034
  Gene Ontology: Mol. function=protein binding
MALAGGGQRGEAVGGWAMPSGYGEGRREKKKDRYNEGLVGVLKQALCQNKIPGPKSYIAHILSMFGLCGFPSKLGGNMRNVVCNGESLSAHAAILSARCPKLLPSKKPFVRDGSVTYEWGRRSCYHVRMSDHVDSHALKKILEYAYTGLVTVDDAIVKPVKHLQSIAI

SEQ ID NO: 70814 - protein, 119 aa, Zea mays
  Coding DNA Sequence Number=SeqID_29035
MAGVVVGGMRWMAGEVIGGLGTRIERSNGRCYTAGTTGGGWGGRLFVGRADGDGYRRIRPVEVAVRRHRREAATTEVEVVVARQERCTRKAAAMVVVVIGGGEVWGGDQSTTVSKKVAT

SEQ ID NO: 70815 - protein, 54 aa, Zea mays
  Coding DNA Sequence Number=SeqID_29036
MGRALRWRAAAFQGAEWREATEQQIRDGAAPMKQGGKAHPWKKKGRGGEVGLLA

SEQ ID NO: 70816 - protein, 166 aa, Zea mays
  Coding DNA Sequence Number=SeqID_29037
MSSGGTGVTEVPERANGLGSGAVQWTGCRGGPARPPEGDHGQGEECSPALAKEEGCLAELEEVMEGEDAMDPRVLEFEGGWALEALSGPEARHAVEAWSRAGGGAPVPAKNPGGQERDSAQAKPRRASVCAWLPPESIPEGWTWVVEHDLGEQWPDDGRSVPTRNP

SEQ ID NO: 70817 - protein, 111 aa, Zea mays
  Coding DNA Sequence Number=SeqID_29038
MVKPQGEQSDPERRYRRGSMADRRVPPRAWFMGGSPVMTMARGKAGPDFYTEAESAFKESMAENLADAVARDPWRVWRCSAARHAVRYEEDATDIPGPRHREAYKWDRPSV

SEQ ID NO: 70818 - protein, 137 aa, Zea mays
  Coding DNA Sequence Number=SeqID_29039
MPSGGTGVTEVPGRLSPPERANEEEGCPAELEEVVEGEDAMDPRELGFEEGWALEALSGPEARHAVEAWSRAGGGAPIPAKNPGGQENDSAQAKPRRASVCAWLPPESIPEGWTWVVEHDLGEQWPDDGRSVPARNP

SEQ ID NO: 70819 - protein, 111 aa, Zea mays
  Coding DNA Sequence Number=SeqID_29040
MVKPQGEQSDPERQYGRGSMADRRVPSRAWFIRGSPVMTMDRGKAGPDFYTEAESAFKESMAENLADAVAQDPWRVWRCSAARHVVRYEEDTTDILGPRHREAYKWDRPSV

SEQ ID NO: 70820 - protein, 124 aa, Zea mays
  Coding DNA Sequence Number=SeqID_29041
MALIMLIGDGSTTCHAVRHLAHALPLVAPIAVSRIYVVPKPSIVPVGTLPLMLAISTIPVVGAMPRIHVVPNTAALPPMLAAVPPIMPKLTLPLMPVVRPKVGDSPPMPVVMPKGANSWRTGSG

SEQ ID NO: 70821 - protein, 134 aa, Zea mays
  Coding DNA Sequence Number=SeqID_29042
MSTKNRGWLRFPDSEEELPEGKHGSTSGLSAIDAGVVQWKGAGLKGAPDQPPMSCQTMQTPDDFGHSCYGSEGGVCGPTRRCPIPRDGRQTRRVRLPKTKRTETRLCAWANVVVPRDNDLTREMREESGWADFA

SEQ ID NO: 70822 - protein, 210 aa, Zea mays
  Coding DNA Sequence Number=SeqID_29043
MVHRNGSIIEESDSYEETQSEEVSVEPPHRSHTKQGHGLGHVEFGGSSSQPQPTQVSHSERTPSCLPRTMSSRSRWAHNQHVDDPTSDYDRLKDNLTNLPRRAVHPYVTSNFIKLGLKNPIEHLVDFSACSGGLLQDISSWDMHVVHPYELWKTTNLQRYYGYLNSLFLSHPDLRDKAGCVSYVCQGRTTHIITECIEINVINIINVPIT

SEQ ID NO: 70823 - protein, 114 aa, Zea mays
  Coding DNA Sequence Number=SeqID_29044
MQGRWLFMPYGHVDENEAQADPWFTPSPGYPVAATEGSQRLGEETPDITGPDVSEGRARLVAAPSVPHVSGRVQRAEHATLGPWRVTEKWVEGRVSAQTEDFLNSQVKILGVTG

SEQ ID NO: 70824 - protein, 137 aa, Zea mays
  Coding DNA Sequence Number=SeqID_29045
MDCYRRLRLRDEDDIQILFSSTVNFQQYSPQVKNRCRKIKNMNVSRGVNVKKLKTRILTKTQCLSSMFETGDYLIGHFNLLNTLIGTMNIFTFPDGSDLCTIRELYAGKFSACDQAKPRPFSGRFAKHISTAIEMTG

SEQ ID NO: 70825 - protein, 56 aa, Zea mays
  Coding DNA Sequence Number=SeqID_29046
MEKTILNISTTDYIDDHNALEAITLEVPPKMQEAIASKASAKIAWDALKKTHLNVD

SEQ ID NO: 70826 - protein, 114 aa, Zea mays
  Coding DNA Sequence Number=SeqID_29047
MVGDVDGRTGRELEEARTVAMARRVWDELDELRHEERGRASSKRVTRAGMGAEQSLGAKEGEAVGLRWGRRGSAGVEDGQREGESGECTAWGAAETRAHGKEIYSGEPIARAKE

SEQ ID NO: 70827 - protein, 54 aa, Zea mays
  Coding DNA Sequence Number=SeqID_29048
MAITILHSDVFLACAYFNRSNYARCCMHWNHLVKVQLGYHTGKPSVYGTYPLAL

SEQ ID NO: 70828 - protein, 158 aa, Zea mays
  Coding DNA Sequence Number=SeqID_29049
  Gene Ontology: Mol. function=protein dimerization activity
  Homolog annotation: Hit_ID=Q2QP98; Match level="QueryCoverage=40%, HitCoverage=7%, E-value=2e-14, Identity=56%"; Hit description=HAT family dimerisation domain containing protein
MRLHGVGTRSLDGAAQVHTKRHNKLLHDRMKDLVFVKFNSRLKQKKDDMDKDPIEKRVHYVVLEDEDNKWITGIEPTKGDEEQEEETETSSQGVAAASQREIEERTKRVNWQKLRSRKRNRLIPSFPTFEEEESSPSSDEEDENDIDMLSRSDSEAEP

SEQ ID NO: 70829 - protein, 969 aa, Zea mays
  Coding DNA Sequence Number=SeqID_29050
  Gene Ontology: Mol. function=protein serine/threonine kinase activity; Cellular component=integral to membrane; Biological process=protein amino acid phosphorylation
  Homolog annotation: Hit_ID=Q4PLL4; Match level="QueryCoverage=98%, HitCoverage=97%, E-value=0.0, Identity=78%"; Hit description=SHR5 -receptor-like kinase
  Pfam annotation: Domain name=LRR_1; Domain location=113-135; Score =7.2; E_value=13; Accession=PF00560.23; Description=Leucine Rich Repeat
  Pfam annotation: Domain name=LRR_1; Domain location=136-158; Score =8.7; E_value=6.7; Accession=PF00560.23; Description=Leucine Rich Repeat
  Pfam annotation: Domain name=LRR_1; Domain location=160-182; Score =6.7; E_value=16; Accession=PF00560.23; Description=Leucine Rich Repeat
  Pfam annotation: Domain name=LRR_1; Domain location=184-206; Score =13.0; E_value=1.1; Accession=PF00560.23; Description=Leucine Rich Repeat
  Pfam annotation: Domain name=LRR_1; Domain location=208-230; Score =16.9; E_value=0.072; Accession=PF00560.23; Description=Leucine Rich Repeat
  Pfam annotation: Domain name=LRR_1; Domain location=232-255; Score =14.0; E_value=0.55; Accession=PF00560.23; Description=Leucine Rich Repeat
  Pfam annotation: Domain name=LRR_1; Domain location=257-279; Score =16.7; E_value=0.083; Accession=PF00560.23; Description=Leucine Rich Repeat
  Pfam annotation: Domain name=LRR_1; Domain location=281-302; Score =8.1; E_value=8.8; Accession=PF00560.23; Description=Leucine Rich Repeat
  Pfam annotation: Domain name=LRR_1; Domain location=303-326; Score =12.8; E_value=1.1; Accession=PF00560.23; Description=Leucine Rich Repeat
  Pfam annotation: Domain name=LRR_1; Domain location=89-111; Score =7.4; E_value=12; Accession=PF00560.23; Description=Leucine Rich Repeat
  Pfam annotation: Domain name=Pkinase; Domain location=635-904; Score =142.4; E_value=1.2e-39; Accession=PF00069.15; Description=Protein kinase domain
  Pfam annotation: Domain name=Pkinase_Tyr; Domain location=635-904; Score=108.6; E_value=1.8e-29; Accession=PF07714.7; Description =Protein tyrosine kinase
  Pfam module annotation: Pfam domain module=LRR_1::LRR_1::LRR_1::LRR _1::LRR_1::LRR_1::LRR_1::LRR_1::LRR_1::LRR_1::Pkinase::Pkinase_Ty ; Domain
  Pfam module annotation: Domain location=281-302::303-326::89-111::635- 904::635-904
MDDSSGCFSRARGWQPREASKQHGLIQPKVPAALSTILGRWGLKASPGWNISGELCSGVAVDDTDVDNSPTINPSIKCDCSYDDNTVCHITKLRVYGLNVVGQIPAELENLTYLSNLNLMQNYLTGPVPSFIGKFPMQYLGISLNNFTGELPPELGNLSKLEQIYFDSSGFSGPFPSTFSKLKNLKILWASDNDFTGKIPDFIGNLTQLEVLRFQGNSFEGPIPKSLSNLTKLTTLILRNCRISDTLATVNFSNLAGLTLLDLSFNNLTGQIPQSILNLDNLGFLFLGNNSLSGSLPDIKSPSLNNLDFSYNQLSGSFPSWATQNNLQLNLVANNFILGSSNNSILPSGLNCLQQDIPCFRGSPEYSSIAVDCGSNKSFRGLDNTFYEMDPTNIGAASYYVTGQTRWGVSNVGKFNEAPNGSYTIDSSEQFQNALDSQLFQTARMSPSSLRYYGIGLENGNYTVELQFAEFAYPESPTWQSTGRRVFDIYIQGGLKEKNFDIRKTAGGKSYVAVYKKYNATVSKNFLEIHLFWAGKGTCCIPTQGYYGPMISALSVTPNFTPTVRNGVPKKKSKAGAIVGIVIGASVLGLAALAGIFMLVQKRRRAAQQQEELYNMVGRPNIFSNAELKLATDNFSSQNILGEGGYGPVYKGKLPDERVIAVKQLSQTSHQGKSQFVTEVATISAVQHRNLVKLYGCCIDSSTPLLVYEYHENGSLDRALFGDSGTILDWPTRFEIILGIARGLTYLHEESSVRIVHRDIKASNVLLDTDLTPKISDFGLAKLFDEKKTHVSTKIAGTFGYLAPEYAMRGHLTEKADVFAFGVLAMETVAGRPNTDNSLEEHRIYLFEWAWELYERDQALGILDARIEESDGEEAVIRVINVALLCTQGSPHQRPPMSRVVKMLTGDIEVPEVVTKPSYITEWQRRGGNSSYVTSGYSGDTTGEFSVQRETTAPLTPSPAMTGVIDDGR

SEQ ID NO: 70830 - protein, 75 aa, Zea mays
  Coding DNA Sequence Number=SeqID_29051
MASLGGGVGAIALVIALQGAVLLHRLVDAAIAGRHSTNELGLKPVPDSSLCEDLVLGLAVGNKFGTVVNCMTSVQ

SEQ ID NO: 70831 - protein, 70 aa, Zea mays
  Coding DNA Sequence Number=SeqID_29052
MGHSGGTTYSRGCMMRKGMMTCTVYGRKKKSLMSEVCLSGRGGAIEIDLHFVRELVALGEVHVLHVPMSS

SEQ ID NO: 70832 - protein, 133 aa, Zea mays
  Coding DNA Sequence Number=SeqID_29053
  Gene Ontology: Mol. function=electron carrier activity; Biological process=electron transport
  Homolog annotation: Hit_ID=Q6ZJV9; Match level="QueryCoverage=48%, HitCoverage=34%, E-value=1e-19, Identity=66%"; Hit description =Putative blue copper binding protein
  Pfam annotation: Domain name=Cu_bind_like; Domain location=15-81; Score=62.7; E_value=1.2e-15; Accession=PF02298.8; Description =Plastocyanin-like domain
MSRAFDDYYIKDYGVISAPKKAFTYSPELHDVVEVTRAGYDACSSANNISAFRTGNDAVPLTAVGTRYFLCGLTGHCGNGMKIRVDVVAAAASPSAPGPAAAAAAPPTTSSPCIVGVVAASLLLLLLHAVVSY

SEQ ID NO: 70833 - protein, 254 aa, Zea mays
  Coding DNA Sequence Number=SeqID_29054
  Gene Ontology: Mol. function=transferase activity, transferring glycosyl groups; Cellular component=membrane
  Homolog annotation: Hit_ID=Q6ZJW6; Match level="QueryCoverage=57%, HitCoverage=30%, E-value=3e-64, Identity=83%"; Hit description =Putative fringe-related protein
  Pfam annotation: Domain name=DUF604; Domain location=172-254; Score= -101.5; E_value=9.8e-07; Accession=PF04646.3; Description=Protein of unknown function, DUF604
  Pfam annotation: Domain name=Fringe; Domain location=32-251; Score= -99.4; E_value=0.076; Accession=PF02434.7; Description=Fringe-like
  Pfam module annotation: Pfam domain module=DUF604::Fringe; Domain location=172-254::32-251
MRAASHRAEELSCPPLSSNLPPPAPKPEETLEPTSLRHVVFGIASSRRTLPLRLPLLRLWLRAPARAFLFLDAPAPAPDARDLPPGLALRVSADASRFPYTHPRGLSSAVRVARIAGELVSGLKQGEGEDVRWLVLADDDTAFVLPNLLHTLRRYDHREHWYLGARSESAAQNAWHAFAMAYGGGGIAVSWPLARRLARVVDSCVLRYPHLYGSDARIYACLAELGVELTHEPGFHQRHRNNLPDGGDIKVFVA

SEQ ID NO: 70834 - protein, 268 aa, Zea mays
  Coding DNA Sequence Number=SeqID_29055
  Subcellular localization annotation: CTP_CleavageSite=38; ConfidenceScore=5.37e-01
MTLQAPSTPPSPCPPPPSSDQISTHHGTFQREVSQSCTADAVVGAKVARLVGGDGSVEQWDAARRSTRGGVSRGASRASQRDGRGRGSIVRLAARITARRTPSVTPRTPPGQGHGSDRLDDRSNQETATRDSSIRGVRSHLGALREGTDEEDGDGDVRFPAAATELRRVSTQRAPNARGGQGRRRRGQEYRTPGRRAGASRVAVAACLGLATRVQVRVVEWESSRRAERRAQSEHGRKKKGQGWRFAYGLWGGVAVRGGMWGGDQQKT

SEQ ID NO: 70835 - protein, 708 aa, Zea mays
  Coding DNA Sequence Number=SeqID_29056
  Gene Ontology: Mol. function=protein binding; Biological process =defense response
  Homolog annotation: Hit_ID=Q2R1P5; Match level="QueryCoverage=47%, HitCoverage=22%, E-value=1e-77, Identity=48%"; Hit description =Leucine Rich Repeat family protein, expressed
  Pfam annotation: Domain name=NB-ARC; Domain location=268-598; Score= -107.0; E_value=0.0018; Accession=PF00931.13; Description=NB-ARC domain
MTPGAAPFWCPRRSLLLLHGKLRLWRRSIWRALGPKNVLYYILREIELKQQKTQADAKSQGWRPIREEKRRRIEEIKNEIEKLKAMDKIQEIKNLIENVKDNNQKLQPYLSKPKRKEDHITKEKIRNKNHALPELLVLLLMSSAAADKTDEKIQWKALEDHYDVILQNAAKSLKEHMDQVNKGAAKGQGIIHNVAQYARILQDVFPSVSSSSNNNSTRQPQDAQEQEATAEATTGKIQIIIDKVKQDILSEVFEAVGGAKAQEATKTDTTTRTTAATTLDEAQVKKMIQEAIHQLKEEKPADKKQETDVSGGQGSTAAAPRQENPDEKKAQPDTTGSSSAQQGSSQGAKASTVDEATKKTGELLVPIIKQTTEKMGDLQRKIKRQLDINGIVAKIRSHLTGQETMIILRVDYQHVDEWEKTRSALSLLPRVAVMMILTKTDRNLERARTEYCHPQGEPMDYTYLAAFYHHIALEITGLHQKSTSSDDDAAQQIRLLRAIFDKCEPYFMCMKIFAQTLYARPRRSKQELQKLYSTLEGLQQRSYRSIAMKMLKFSYRDVKKEYQSSLLYLAIFPPGHRIRRSTLIARWVVERMVTTEDWRWSSAVSIAEQCFDALVIRGLVHPTEISATGRVKSCMVGDVTYDFITKMAKKRRILEPRLSHHLACHFSVFSDLHLSVSDNISNFLNRLSDSSQWPRLKVLDLEGCRTNL

SEQ ID NO: 70836 - protein, 175 aa, Zea mays
  Coding DNA Sequence Number=SeqID_29057
  Homolog annotation: Hit_ID=Q2QMZ1; Match level="QueryCoverage=47%, HitCoverage=9%, E-value=8e-12, Identity=38%"; Hit description=HAT family dimerisation domain containing protein
MEFNSKDPNGTLVKSQYESLFQGRSSEYKKYMKVIQKRMTNLYKSDLRKWCVLVMSDLRYAFEYMTNVGTSAQALVEVDFYERKQGEFGRPLAEKWQRRGSCYEKTSKKGKIAVASDDETDSGDKIPQYQESAGSSSVTSSDDAGGGAGCSDVGATGGGNGGGNGGAEEYNMAQA

SEQ ID NO: 70837 - protein, 387 aa, Zea mays
  Coding DNA Sequence Number=SeqID_29058
  Gene Ontology: Mol. function=transferase activity; Biological process= paclitaxel biosynthetic process
  Homolog annotation: Hit_ID=Q5JNT2; Match level="QueryCoverage=98%, HitCoverage=97%, E-value=1e-131, Identity=56%"; Hit description=3'-N- debenzoyltaxol N-benzoyltransferase-like
  Pfam annotation: Domain name=Transferase; Domain location=1-384; Score=82.2; E_value=1.6e-21; Accession=PF02458.6; Description =Transferase family
RTSRSLVPPASATPRETLRLSVIDRVAGLRHLVRSLHVFAAGGDKKRQQATATPAKALREALGKALVDYYPFAGRFVVVDAEGGGETRVACTGEGAWFVEANAACSLEEARHLDHPMLIPKEQLLPEPSPDVNPLDMPLMMQVTEFSCGGFVVGLISVHTIADGLGAGQFINTVAAYARGATSATPKPVWARDVIPDPPKMPAPPPRLDLLDLRYFTADLSPDHIGKVKARYLESTGQRCSAFDVCVARTWQARVRALRLPDPAAPVHVCFFANTRHLLPTAVTARARLGADFARWAAGGFDRDPYELTFTYDSLFVSDWTRLGFLEADYGWGTPTHVLPFSYHPFMAVAVIGAPPKPKPGARIMTMCVQEQHLPEFQEQMMSQQAA

SEQ ID NO: 70838 - protein, 192 aa, Zea mays
  Coding DNA Sequence Number=SeqID_29059
  Homolog annotation: Hit_ID=Q6QP51; Match level="QueryCoverage=35%, HitCoverage=33%, E-value=8e-12, Identity=64%"; Hit description =Putative growth-regulating factor 1
LDGKLFVNLEQAPTWRANCRSFDPEGSLDRRVNCRRVSQPKWVGTRWNTKGGETAKGETRGLRVVLRPGRVRARGRARREAPPRSRLSPSPGVGRRRRSSSDVEVEVESEPWGRARRSPSSGVEVEPELWGRARRSFLWHPRLNLATVSLTLSSGTAVGAAQAALFSCQVGQWSGEVTAVTSALSTEERASG

SEQ ID NO: 70839 - protein, 64 aa, Zea mays
  Coding DNA Sequence Number=SeqID_29060
MGSRCATCPKVLGAREGLETHHMPGPPHHGRGAPSKGTTLPQTQTTEDTTGTKHKPRTPRQTHT

SEQ ID NO: 70840 - protein, 495 aa, Zea mays
  Coding DNA Sequence Number=SeqID_29061
  Subcellular localization annotation: CTP_CleavageSite=27; ConfidenceScore=5.07e-01
MARLPSRRSSESAKQAVTYLPSRRSVKAYNVGGPDRLFRRKGFESLKTTISFPFSLPPIHSPLALPLSLPAPCSPDYRSSSLAVVHGTHRTVRNRAGASSDHPLGSSVATVRALPCYVQARRAPAHLAGPSEPRPDRPLPAKPAVPSPCLVRASPEFAGQSAPTPGYPPSRTPLEPLHRTSGHSSPFIARSPLEALAEPSLVVRCSRAKRPPVGFMALSLAEAELVRGGELARGLSLGRVRWRACSRAELGSGEAECPMSRPLCLSHMGAPSEGARWRAHTIWHRRNHTAMIRRDCCLIHRCAPLPQRGLAHALNAPAPAYFRAPFSCLYEAGSGETDWAEATSGEAPSSEVDASAAHSSQRVCVSPTRATDRWVHLVSRLPPQIGLTAASGLGASTRHQDGARGLAGLDWHVLHWESLVVVHCCRVFAALRGRWCRLIAPSAEGTQDGIDTDPPGREKPVTGERTSANGLGISLLGLGRGRSALAVQSDVGGGG

SEQ ID NO: 70841 - protein, 178 aa, Zea mays
  Coding DNA Sequence Number=SeqID_29062
  Gene Ontology: Mol. function=aspartic-type endopeptidase activity; Cellular component=lysosome; Biological process=sphingolipid metabolic process
  Homolog annotation: Hit_ID=P42211; Match level="QueryCoverage=98%, HitCoverage=37%, E-value=2e-84, Identity=81%"; Hit description =Aspartic proteinase precursor
  Pfam annotation: Domain name=Asp; Domain location=2-178; Score=49.7; E_value=1.5e-16; Accession=PF00026.14; Description=Eukaryotic aspartyl protease
AVASGVTCKITYGSGSIAGFFSDDDKFIETTRESSITFIIGKFDGILGLGYPEISVGKAPPIWQSMQEQELLAEDVFSFWLNRSPDAAAAGGELVFGGVDPAHFSGNHTYVPVSRKGYWQFDMGDLLIDGHSTGFCAKGCAAIVDSGTSLLAGPTAIIAQVNEAIGADGIISTECKEV

SEQ ID NO: 70842 - protein, 109 aa, Zea mays
  Coding DNA Sequence Number=SeqID_29063
  Subcellular localization annotation: CTP_CleavageSite=30; ConfidenceScore=5.06e-01
MATREWSTVCAAPRCSMRSTTATTFSNALLDMARTPPGLVPIMALGRGKVAVSNIYGRGGGATGESEDPNYPPKSRSPLASVFVPTRKKTSPTKRAPHVINTGFGRARF

SEQ ID NO: 70843 - protein, 219 aa, Zea mays
  Coding DNA Sequence Number=SeqID_29064
  Homolog annotation: Hit_ID=UPI0000DA43ED; Match level="QueryCoverage =44%, HitCoverage=88%, E-value=6e-09, Identity=34%"; Hit description =PREDICTED: similar to keratinocytes proline-rich protein
MAAPRTTRPVALTLQQDRRHLWQEKRATLRLRHNDRVKKKGPGKGDTLKGILLREGNRPRASLLIIGSKAGPSEGFNSRLRALGLRAHYWSEVRRPAPRKGSTAASGHSGSAPTTDQRVRVTAAKSGLRRHRKLRFARPQGSDSGSAPEDDELRFARPQGSDSGSAPEDDELRFARPQGSDSGSAPGDDELRFARPQGSDSGSAPEDDELRFSRPQGSD

SEQ ID NO: 70844 - protein, 383 aa, Zea mays
  Coding DNA Sequence Number=SeqID_29065
  Gene Ontology: Cellular component=nucleolus; Biological process =regulation of transcription, DNA-dependent
  Homolog annotation: Hit_ID=Q1S808; Match level="QueryCoverage=60%, HitCoverage=43%, E-value=7e-54, Identity=42%"; Hit description=Plus-3
  Pfam annotation: Domain name=DUF868; Domain location=1-235; Score =36.9; E_value=2.4e-14; Accession=PF05910.3; Description=Plant protein of unknown function (DUF868)
  Pfam annotation: Domain name=Plus-3; Domain location=169-238; Score =16.6; E_value=3.5e-05; Accession=PF03126.8; Description=Plus-3 domain
  Pfam module annotation: Pfam domain module=DUF868::Plus-3; Domain location=1-235::169-238
MTCHPDHCLCKADIKLWLFSKKKWSRSLDVEDSKVKVFWDLADARFSVEPEPVEGFYVVVVFYLELALLLDDMKKDAYRKTRASQLTMNAPFMARREHIYGKKIHSAKAQFCDNGQFNHISIECDTVSVKDLCLKIRVDKKPMMQVKRLAWKDDEFDESSSRLDPLKFDDRKSITLRRSKLVKWFMEPFFDDLIFECFMWLGIGKTEYGTLSYRMCIVSDSPPKEEEFMEWLQKEDRNGACIPTQQEVLGKKEAIQEAYNFEYSAATVQQMLRDKSVVRHPINIVAEKDRLRSELSMALSRRNEAKAERMRVKQKNLQRRPQPESKDNKVANLESMNWKNRADNFKNALELKLVNISLKAGESGYDPFLRRWTRSRNYYASKP

SEQ ID NO: 70845 - protein, 134 aa, Zea mays
  Coding DNA Sequence Number=SeqID_29066
MVIYVQGIGKWLTVWLGLRAPAVGQKSGDVNLAPPVMWCSIQGLGELRLALGRLAEGLDGVEEGWSGWSTVVGTLAAAGTPCAERTPMNLRLGGAESERGCTVKAVVGFIGAGVGTGSGVAWCGARGAERRGML

SEQ ID NO: 70846 - protein, 67 aa, Zea mays
  Coding DNA Sequence Number=SeqID_29067
MTNINPLYFIQHFWKILNHYDCNLADGEYILILEQGVAQEGVQEAAPEPAIEDLPAPAFEGKPRFYA

SEQ ID NO: 70847 - protein, 67 aa, Zea mays
  Coding DNA Sequence Number=SeqID_29068
MAGASIRRGHGRGQAPAAGEAEGHGSRELDRRAELMRMNAERIPELARVLESRILRWLEIRTREQET

SEQ ID NO: 70848 - protein, 82 aa, Zea mays
  Coding DNA Sequence Number=SeqID_29069
  Subcellular localization annotation: CTP_CleavageSite=45; ConfidenceScore=5.26e-01
MGTGLSAPSAQLLGRCAQGQGEGARGLHAGHRACGTGRRRQQQARAARRRRCVTNCSRARLHVTMVRRAPQTASRSNAARGW

SEQ ID NO: 70849 - protein, 90 aa, Zea mays
  Coding DNA Sequence Number=SeqID_29070
MAALRARRGSGGGAARSEGEKVGDRAVVLLEFRAICSVWGRCTVGRPRRVGPAETDGGGALALHALGHGCVRATRAGPLGRGAGRSRRAR

SEQ ID NO: 70850 - protein, 334 aa, Zea mays
  Coding DNA Sequence Number=SeqID_29071
  Gene Ontology: Mol. function=protein dimerization activity; Cellular component=nucleus; Biological process=regulation of transcription, DNA-dependent
  Homolog annotation: Hit_ID=Q53M48; Match level="QueryCoverage=99%, HitCoverage=34%, E-value=2e-89, Identity=46%"; Hit description=HAT family dimerisation domain, putative
MVDWYKHKVEIVKDAYEKGSKNCQMLSHFIQKDLTKACAEEVTTVIMDEIRGRKFSVLIDESRDISIKEQMAMILSHNLSISMLRGQGYDGASNMRGEFNGVQKMIRDENPYAFYVHCFAHQLQLVVVTISTSSADIADFFNYIPLIVNTVGASCMRKDALLAKHHDVLLEKIENGEIMTGRGLNQESSLARPGDTRWGSHLKTLLRILVMFEAIIDVLEIVKKDSIKPACNGGALGLIGKMESFDFVFILHLMIEILSMTDILSHALQRKDQDIVEAMHLITDVKESLQDMRENGWEPLLKKVKPFCERNEIEVPDMDKEINVRGTSRRRKQK

SEQ ID NO: 70851 - protein, 59 aa, Zea mays
  Coding DNA Sequence Number=SeqID_29072
MPLWTPSSVGIAVAACGSYVGPGRRVDGRQDHYVNWNMELNLRYPCYHKDGMGRPWLTN

SEQ ID NO: 70852 - protein, 94 aa, Zea mays
  Coding DNA Sequence Number=SeqID_29073
MGVSDLLPFLETYAAIEVLATVRWLQGLDDSLEDSEEEDGGGGGDGSGYEGDDEGGNDVNGGGEGDDDNGYDVGNESGGGKGSGDNVGGMAPST

SEQ ID NO: 70853 - protein, 52 aa, Zea mays
  Coding DNA Sequence Number=SeqID_29074
  Gene Ontology: Mol. function=oxidoreductase activity
MKRNKQGLSDVAPLVKKIDDPDMANDKDLLRVVLTLDYACKEVGFFYVLYIN

SEQ ID NO: 70854 - protein, 281 aa, Zea mays
  Coding DNA Sequence Number=SeqID_29075
  Gene Ontology: Mol. function=transferase activity; Cellular component= nucleus; Biological process=flavonoid biosynthetic process
  Homolog annotation: Hit_ID=Q2R3Q9; Match level="QueryCoverage=87%, HitCoverage=54%, E-value=1e-105, Identity=77%"; Hit description =Transferase family protein, putative, expressed
  Pfam annotation: Domain name=Transferase; Domain location=1-276; Score=-91.6; E_value=1.6e-06; Accession=PF02458.6; Description =Transferase family
MAGLAMNHCMFDDIGAMKFINSWAETGRGVAELTVSPFLDRNVLKARDSPVHTFPHHEFAEIPDISDTAALYGAQELQYRSFCFDPDQLERVCGLALADGALGRCTTFKALSGLVWRACTKALGLALGQRTKLLFAMDGRRWFVPPLPRGYFGNDIVLTNALATASELLSVPVSRAVGLVQEAVRMVTEDYMRSAVDYFEATRARSSLACTLLITTWSRLEFHGADFGWGEPVMSGLVTLPEKEVILFHVSRESRGERGSRPQSRLRAVIPHDLGAGLPSM

SEQ ID NO: 70855 - protein, 191 aa, Zea mays
  Coding DNA Sequence Number=SeqID_29076
  Gene Ontology: Mol. function=oxidoreductase activity; Biological process=ethylene biosynthetic process
  Homolog annotation: Hit_ID=Q1ENY0; Match level="QueryCoverage=95%, HitCoverage=71%, E-value=7e-63, Identity=56%"; Hit description =Oxidoreductase, 2OG-Fe(II) oxygenase family protein
  Pfam annotation: Domain name=2OG-FeII_Oxy; Domain location=26-149; Score=42.4; E_value=1.6e-09; Accession=PF03171.10; Description=2OG -Fe(II) oxygenase superfamily
MKIKMTRQSGYRGYQKLGENVTKEKRDMHEAVNCLTPIAPGKYGDLGKTLEGDNLWPEYPSNLKVVLENYISLVKGLVTLVNQDDDICALEVQNRSGVWIRANPIPETFLCNIGDMLQVWSNGIYQPTVHRVINSSHQRRVSAVFFYETDFDAAVEPVELCVEKTGGVAKYDKVVYGERLVRKAFCCFGHL

SEQ ID NO: 70856 - protein, 126 aa, Zea mays
  Coding DNA Sequence Number=SeqID_29077
  Homolog annotation: Hit_ID=Q6QP51; Match level="QueryCoverage=31%, HitCoverage=18%, E-value=2e-08, Identity=70%"; Hit description =Putative growth-regulating factor 1
MAPEAGRSCCQPHSVEWHSSQSGAGSAVFMSGRSVERRSDYGHFDSVDRRARVRIRWQAILALNAPAIRSVGVAIWPRLLLREDWAPGESKVTPISEWSFKVKDDFLIGGCLTSIRGVQGSCRRNP

SEQ ID NO: 70857 - protein, 259 aa, Zea mays
  Coding DNA Sequence Number=SeqID_29078
  Gene Ontology: Mol. function=transcription regulator activity; Cellular component=nucleus; Biological process=regulation of transcription
  Homolog annotation: Hit_ID=Q6ZBT5; Match level="QueryCoverage=40%, HitCoverage=30%, E-value=3e-18, Identity=51%"; Hit description=BHLH transcription factor (BHLH123)-like protein
  Subcellular localization annotation: CTP_CleavageSite=37; ConfidenceScore=5.41e-01
MVPDSHHDDPNHQFLSNLGLELLSSSPTSSSGGFRTSSSLLRSLTEPSAVATGFQQYQQQAVNQAPPESIRDDALQFVNSTPFWSASAVFASAAEGATSRLPASAAGPPSAQSMPANFAVKSALLEGARGDSSSITANKTSTDPTPRLKKSRTGTPSPLPDTFKVRKEKLGDRITALQQLVSPFGKSLSVPYLKKNRQQEVPPHKVLWDGGGEAAGANGELTGRGLCLVPISSTFAVASETTTTPPLDFWTPFGGPAFR

SEQ ID NO: 70858 - protein, 92 aa, Zea mays
  Coding DNA Sequence Number=SeqID_29079
MGFKTLSTECTFASLTGQKKRLSRLRWFEGVKVEIPDHGSGAVAPASLYRPENAMTDTQVRLTPTSTHNDLNPSTNFGVLAPNLSVHGDGAN

SEQ ID NO: 70859 - protein, 115 aa, Zea mays
  Coding DNA Sequence Number=SeqID_29080
MGMSTAAQAYWHSIERAELGGSDDLEEVSSEEVDSSDSSKGWSSGKGDDGEDDGSSGDDDGKDGGGGDGEGDGDGSKGNGDGSKGDGDGIKGDGNGDGDKGDGDGGKASGIMLLV

SEQ ID NO: 70860 - protein, 160 aa, Zea mays
  Coding DNA Sequence Number=SeqID_29081
MADALWGGLLRGRRENKASPFGHLPIYSPPNDPVLAFAPQFTVCHRRDEGSAVGALSSFLSTITARKPWSDLKQTRGGVDREPGSRRARGSSVRRDFSSRSLAPPWNNSSRGRQFIPRYCGFAIICMFVLMRVDEQATEDPGVQQVETVEQELVEGKLCS

SEQ ID NO: 70861 - protein, 406 aa, Zea mays
  Coding DNA Sequence Number=SeqID_29082
  Gene Ontology: Mol. function=metal ion binding; Cellular component =nucleus; Biological process=regulation of flower development
  Homolog annotation: Hit_ID=Q2QPD5; Match level="QueryCoverage=99%, HitCoverage=58%, E-value=1e-170, Identity=74%"; Hit description =Fibronectin type III domain containing protein, expressed
  Pfam annotation: Domain name=fn3; Domain location=44-132; Score=20.3; E_value=0.0015; Accession=PF00041.11; Description=Fibronectin type III domain
MARGIVGRLHVAADVQKLCTLAIEKANEWLSSNIQSETKQNDTLPSACRFKFEDITASSLVLVLKEAVSSQYHAIKGYKLWYWNSREAPFTGEPAVFPKDQRRILISNLQPCTEYSFRIISFTEDGELGHSESKVFTKSVEIIRKNTELGAEGCSSSAKGAGKRQNVRSLGFQVRQLGNVFRKAQTEENGYPSALCKDEIEDSCDQSDSVIPVKDQIPRGASRKLDLNETSVPDLNAEVVMPTECCQNDNGCSSGKNAFTKSNGCGDSETCAEGHVGDAPAMESLSQSRKQASDLEQETCVDDSNLVARAVRLFAPKLGQLDDNYEYCVKIIRWLECSGLIEKDFRMKFLTWFSLRSTEQERRVVITFIRTLIDEPSSLAAQLLDSFEEIVTSKRLRTGFCTKLWH

SEQ ID NO: 70862 - protein, 95 aa, Zea mays
  Coding DNA Sequence Number=SeqID_29083
  Gene Ontology: Mol. function=DNA binding; Biological process=DNA integration
  Homolog annotation: Hit_ID=UPI00004C1733; Match level="QueryCoverage =61%, HitCoverage=4%, E-value=1e-26, Identity=91%"; Hit description =UPI00004C1733 related cluster
MAFFTNIIHRFGVPNSIITDNGTQFTGKKFLDFCEGHHIHVDWAVVAHPMTNGQVERANVSYEWVREHVSGKADQAEGLLRLRDTDTSLITFREK

SEQ ID NO: 70863 - protein, 152 aa, Zea mays
  Coding DNA Sequence Number=SeqID_29084
  Subcellular localization annotation: CTP_CleavageSite=13; ConfidenceScore=5.25e-01
MPATSTEPIKPLRAAAADGTDPYAFSPKAPSCSSRWRELLGLRRASAAQSPSTKASASASPAAAKTPASAARATNSAAARSLKLLLQLTLQLPRGVQVAVPDKITFGGELVHSSFQQKTTHNLTSVVLTGNTTNRSGQCSYRFMPQNQHEKM

SEQ ID NO: 70864 - protein, 70 aa, Zea mays
  Coding DNA Sequence Number=SeqID_29085
  Gene Ontology: Mol. function=protein serine/threonine kinase activity; Biological process=protein amino acid phosphorylation
  Homolog annotation: Hit_ID=Q1SWV5; Match level="QueryCoverage=64%, HitCoverage=7%, E-value=4e-07, Identity=58%"; Hit description =Tyrosine protein kinase, active site
MDVGRERRDVDAPVLGEGPAVMANVEAVAELAFRCVAPDKDDRPDAREVVAELARIQTMLPELPGRIAQN

SEQ ID NO: 70865 - protein, 1033 aa, Zea mays
  Coding DNA Sequence Number=SeqID_29086
  Gene Ontology: Mol. function=protein kinase activity; Cellular component=integral to membrane; Biological process=protein amino acid phosphorylation
  Homolog annotation: Hit_ID=Q2QZC3; Match level="QueryCoverage=92%, HitCoverage=83%, E-value=0.0, Identity=49%"; Hit description=Leucine Rich Repeat family protein
  Pfam annotation: Domain name=LRRNT_2; Domain location=31-71; Score =46.7; E_value=7.8e-11; Accession=PF08263.3; Description=Leucine rich repeat N-terminal domain
  Pfam annotation: Domain name=LRR_1; Domain location=123-145; Score =14.1; E_value=0.51; Accession=PF00560.23; Description=Leucine Rich Repeat
  Pfam annotation: Domain name=LRR_1; Domain location=147-169; Score =15.6; E_value=0.19; Accession=PF00560.23; Description=Leucine Rich Repeat
  Pfam annotation: Domain name=LRR_1; Domain location=172-194; Score =12.5; E_value=1.3; Accession=PF00560.23; Description=Leucine Rich Repeat
  Pfam annotation: Domain name=LRR_1; Domain location=196-218; Score =11.3; E_value=2.1; Accession=PF00560.23; Description=Leucine Rich Repeat
  Pfam annotation: Domain name=LRR_1; Domain location=220-243; Score =10.7; E_value=2.8; Accession=PF00560.23; Description=Leucine Rich Repeat
  Pfam annotation: Domain name=LRR_1; Domain location=245-267; Score =10.5; E_value=3.1; Accession=PF00560.23; Description=Leucine Rich Repeat
  Pfam annotation: Domain name=LRR_1; Domain location=269-291; Score =11.0; E_value=2.5; Accession=PF00560.23; Description=Leucine Rich Repeat
  Pfam annotation: Domain name=LRR_1; Domain location=293-315; Score =6.5; E_value=17; Accession=PF00560.23; Description=Leucine Rich Repeat
  Pfam annotation: Domain name=LRR_1; Domain location=317-339; Score =15.2; E_value=0.24; Accession=PF00560.23; Description=Leucine Rich Repeat
  Pfam annotation: Domain name=LRR_1; Domain location=341-363; Score =16.5; E_value=0.098; Accession=PF00560.23; Description=Leucine Rich Repeat
  Pfam annotation: Domain name=LRR_1; Domain location=365-387; Score =11.8; E_value=1.7; Accession=PF00560.23; Description=Leucine Rich Repeat
  Pfam annotation: Domain name=LRR_1; Domain location=389-410; Score =4.1; E_value=49; Accession=PF00560.23; Description=Leucine Rich Repeat
  Pfam annotation: Domain name=LRR_1; Domain location=415-437; Score =11.2; E_value=2.3; Accession=PF00560.23; Description=Leucine Rich Repeat
  Pfam annotation: Domain name=LRR_1; Domain location=440-462; Score =10.2; E_value=3.5; Accession=PF00560.23; Description=Leucine Rich Repeat
  Pfam annotation: Domain name=LRR_1; Domain location=464-486; Score =14.5; E_value=0.39; Accession=PF00560.23; Description=Leucine Rich Repeat
  Pfam annotation: Domain name=LRR_1; Domain location=488-510; Score =21.9; E_value=0.0022; Accession=PF00560.23; Description=Leucine Rich Repeat
  Pfam annotation: Domain name=LRR_1; Domain location=512-534; Score =16.1; E_value=0.13; Accession=PF00560.23; Description=Leucine Rich Repeat
  Pfam annotation: Domain name=LRR_1; Domain location=536-558; Score =10.1; E_value=3.6; Accession=PF00560.23; Description=Leucine Rich Repeat
  Pfam annotation: Domain name=LRR_1; Domain location=560-582; Score =16.4; E_value=0.11; Accession=PF00560.23; Description=Leucine Rich Repeat
  Pfam annotation: Domain name=LRR_1; Domain location=584-606; Score =13.5; E_value=0.75; Accession=PF00560.23; Description=Leucine Rich Repeat
  Pfam annotation: Domain name=LRR_1; Domain location=608-630; Score =9.8; E_value=4.2; Accession=PF00560.23; Description=Leucine Rich Repeat
  Pfam annotation: Domain name=LRR_1; Domain location=632-654; Score =19.2; E_value=0.015; Accession=PF00560.23; Description=Leucine Rich Repeat
  Pfam annotation: Domain name=LRR_1; Domain location=656-679; Score =6.6; E_value=17; Accession=PF00560.23; Description=Leucine Rich Repeat
  Pfam annotation: Domain name=LRR_1; Domain location=75-97; Score=3.8; E_value=55; Accession=PF00560.23; Description=Leucine Rich Repeat
  Pfam annotation: Domain name=LRR_1; Domain location=99-121; Score =8.6; E_value=7.1; Accession=PF00560.23; Description=Leucine Rich Repeat
  Pfam annotation: Domain name=Pkinase; Domain location=773-1011; Score= 119.7; E_value=8.5e-33; Accession=PF00069.15; Description=Protein kinase domain
  Pfam annotation: Domain name=Pkinase_Tyr; Domain location=773-1008; Score=87.6; E_value=3.9e-23; Accession=PF07714.7; Description =Protein tyrosine kinase
  Pfam module annotation: Pfam domain module=LRRNT_2::LRR_1::LRR_1::LRR_ 1::LRR_1::LRR_1::LRR_1::LRR_1::LRR_1::LRR_1::LRR_1::LRR_1::LRR_1: LRR_
  Pfam module annotation: Pfam domain module=LRR_1::Pkinase::Pkinase _Tyr; Domain location=31-71::123-145::147-169::172-194::196-218::220 -243::245-267::269-291::293-315::317-339::341-363::365-387::389
  Pfam module annotation: Domain location=:464-486::488-510::512 -534::536-558::560-582::584-606::608-630::632-654::656-679::75-97 :99- 121::773-1011::773-1008
MAFFVRVRMVLILLAVAAARSATALTPPPSSATDLAALLAFKAMLKDPLGILASNWTATASFCSWAGVSCDSRQRVTGLEFSDVPLQGSITPQLGNLSFLSTLVLSNTSVMGPLPDELGSLPWLQTLDLSHNRLSGTIPPSLGNITRLEVLDLAYNDLSGPIPQSLFNSTPDLSEIYLGSNSLTGAIPDSVSSLLKLEVLTIEKNLLSGSMPPSLFNSSQLQALYVGRNNLSGPIPGNGSFHLPLLQMLSLQENHFSGPIPVGLSACKNLDSLYVAANSFTGPVPSWLATLPNLTAIALSMNNLTGMIPVELSNNTMLVVLDLSENNLQGGIPPELGQLTNLQFLGLANNQLTGAIPESIGNLSDLTQIDVSRSRLTGSVPMSFSNLLNLGRIFVDGNRLSGNLDFLAALSNCRSLTTIVISNNEFTGMLPTSIGNHSTLLEILQAGNNNINGSIPGTFANLTSLSVLSLSGNNLSGKIPTPITDMNSLQELDLSNNSLSGTIPEEISGLTNLVRLRLDNNKLTGPIPSNISSLSQLQIMTLSQNSLSSTIPTSLWDLQKLIELDLSQNSLSGFLPADVGKLTAITMMDLSGNKLSGDIPVSFGELHMMIYLNLSRNLFQGSIPGSFSNILNIQELDLSSNALSGAIPKSLTNLTYLANLNLSFNRLDGQIPEGGVFSNITLKSLMGNNALCGLPRLGIAQCYNISNHSRSKNLLIKVLLPSLLAFFALSVSLYMLVRMKVNNRRKILVPSDTGLQNYQLISYYELVRATSNFTDDNLLGKGSFGKVFKGELDNGSLIAVKVLNMQHESASKSFDKECSALRMARHRNLVKIISTCSNLDFKALILEYMPHGSLDDWLYSNSGRQLSFLQRFAIMLDVAMALEYLHHQHFEAVLHCDLKPSNILLDKDMIAHVSDFGISKLLVGDDNSITLTSMPGTVGYMAPEFGSTGKASRATDVYSYGIVLLEVFVGKRPTDSMFVSDISLREWVSQAFPHQLRNVVDSSIQEELNTGIQDANKPPGNFTILDTCLASIN

SEQ ID NO: 70866 - protein, 159 aa, Zea mays
  Coding DNA Sequence Number=SeqID_29087
MGLDQGSEPRWSGRARRSRDAHKECVGEETGQLAPVTTSSTKTQEQKRARPCPGAPGRVRAREEVAGGSAATPRAAGRALRAVPRKPRPARAAGVLAGALAGAGSYAWEGPGSRKNRELHWGKRSPRGRRGRGARREGVLAGVRPPESHRLTVASRRAG

SEQ ID NO: 70867 - protein, 62 aa, Zea mays
  Coding DNA Sequence Number=SeqID_29088
WILECKHKRPGLKALQEAIDEFIVAHEEQQEKEKRERPVQQKMDGQLFITRGGKRPQMLKLE

SEQ ID NO: 70868 - protein, 305 aa, Zea mays
  Coding DNA Sequence Number=SeqID_29089
  Gene Ontology: Mol. function=DNA binding; Cellular component=nucleus; Biological process=regulation of transcription, DNA-dependent
  Homolog annotation: Hit_ID=O23892; Match level="QueryCoverage=42%, HitCoverage=46%, E-value=4e-57, Identity=82%"; Hit description=OSMYB4
  Pfam annotation: Domain name=Myb_DNA-binding; Domain location=109 -154; Score=45.0; E_value=2.5e-10; Accession=PF00249.21; Description =Myb-like DNA-binding domain
  Pfam annotation: Domain name=Myb_DNA-binding; Domain location=56-103; Score=46.9; E_value=7.1e-11; Accession=PF00249.21; Description=Myb -like DNA-binding domain
  Pfam module annotation: Pfam domain module=Myb_DNA-binding::Myb_DNA -binding; Domain location=109-154::56-103
MANDDTVAGQTGGGEAVVPSTEPINIDPDTVVVDAEADTPTSSRQRGAGAIRTLKRGAWTPEEDELLARAVAKDGEGRWRTLPRRAGLLRCGKSCRLRWMNYLRPDIKRGPIAADEEDLILRLHRLLGNRWSLIAGRLPGRTDNEVKNYWNSHLSKKLVARGIDPRTHTPLPAAAASLHSHSHRADDDSPAGAAGSSADKTPPPLVEVEPSVAPPPAQPNSSFGDGSSGDFAGGMMGLGSEGFDGVGDPFCAPAPGGFHLGCPVVDDATFSSFLDSLMNEERMRIADYIGDHRDADGGNDQGGAY

SEQ ID NO: 70869 - protein, 300 aa, Zea mays
  Coding DNA Sequence Number=SeqID_29090
  Homolog annotation: Hit_ID=Q9M4C6; Match level="QueryCoverage=78%, HitCoverage=97%, E-value=9e-29, Identity=39%"; Hit description=VIP1 protein
  Subcellular localization annotation: CTP_CleavageSite=71; ConfidenceScore=5.23e-01
MCNLWKKYSDQGIFMGKVHHTGIMAPRVSSVVALLAAPPQQISRTETPKPQRPKLTTSQWRTATKTLASPTAAAETDALNGGVAEEEQVPITHPAKSYVTLADDNPAPNGGVVKEGGGRCPHHREVLRSCRPPKPRSRTSRAAKLDLEEKLAEARRENKSLAEETHRSEGIFTQAREEVTIAEFAATSAEKEVASLRAEVERLDAVLRIEKGEHELDKQRHEKVAKEVDAVRQEKLKLEEEIRALKASATAAATTKEREAAPASEAPKEGEVAWLGMAVAAAAGAAGTAAIMLVYLRLKR

SEQ ID NO: 70870 - protein, 130 aa, Zea mays
  Coding DNA Sequence Number=SeqID_29091
MGYKWWKGVWHMRVQRDGHNKLTRGKAASRALGPVARRGLEAARSGRDPVVMGSGRDPGHSDDYRKEMFLPCADWLAQGIYVFCKIKNNHIGSGEHYGPRLQPKHDTTFLALASIRSSLRPHWRNGLHGV

SEQ ID NO: 70871 - protein, 336 aa, Zea mays
  Coding DNA Sequence Number=SeqID_29092
  Gene Ontology: Mol. function=transcription factor activity; Cellular component=nucleus; Biological process=regulation of transcription, DNA-dependent
  Homolog annotation: Hit_ID=Q5N965; Match level="QueryCoverage=36%, HitCoverage=34%, E-value=9e-21, Identity=58%"; Hit description=AP2 domain transcription factor-like
  Pfam annotation: Domain name=AP2; Domain location=140-194; Score =23.5; E_value=1.3e-06; Accession=PF00847.10; Description=AP2 domain
MADARRQAARWLAAEPEEHDDGGGGGAAAAETAGVLSGEYQALETSTLVSALAHVVASGGEGYPPWSGARRGDDSRRPTATMVAPVGTGGHGYSAATAPTPPAHFFGAGRGGHGGPLLAPRPPPPRRAASGGSAACGSGRGASGRRRSATRTRRPASGSARFDTAEAAARAYDEAALRFRGSRAKLNFPEDARLTTAPSAAVAPAAAGSTTTMAVAASAGGSYQQEASAAVVSADYLQYQMMLLQGATSGQGSSSHGGYPLYYDYGGHGGAGAGAGGGAMSSSYSFPASTVTVASVPSSSASSAPSYGEAAQWAGSWPEGSAWSYPATTAFGVVKP

SEQ ID NO: 70872 - protein, 113 aa, Zea mays
  Coding DNA Sequence Number=SeqID_29093
  Subcellular localization annotation: CTP_CleavageSite=45; ConfidenceScore=5.01e-01
MGLSMMAYITRRRARGSTGSRLVWGVVTGTALPCDSSGPPLARVRVVLGGGPVSSGLAAPDPLRPEVRVGRHEGRGRSRGSGPQAQVPRALVFKTRGKPGPPPLGFQSAGYRG

SEQ ID NO: 70873 - protein, 56 aa, Zea mays
  Coding DNA Sequence Number=SeqID_29094
MAGKRGLDASAGIQGLARTRVDVGLGRMEREIVEWAELKGFGPTRLAQLKVRLHQM

SEQ ID NO: 70874 - protein, 89 aa, Zea mays
  Coding DNA Sequence Number=SeqID_29095
MVCLQLADGGATTTHPPSANIDGGQNSQLLGGDSVMGMLPTDGAHLAVTKRKMPAPGIQGLARTRVDVGLGRVEREIVEWAELKGFGPT

SEQ ID NO: 70875 - protein, 110 aa, Zea mays
  Coding DNA Sequence Number=SeqID_29096
MEFHEKNRCNARRPAVKSSSTAGFDINMLQSSSKVLGSSQNPGDQQKIPSRNQDGFPPETKSRHQRSKTQFQKQTKSLGRLLLDALNDGNSTQWASEYQIRSRGLGLQET

SEQ ID NO: 70876 - protein, 176 aa, Zea mays
  Coding DNA Sequence Number=SeqID_29097
  Homolog annotation: Hit_ID=Q21D92; Match level="QueryCoverage=77%, HitCoverage=23%, E-value=3e-07, Identity=36%"; Hit description =OmpA/MotB precursor
MNVDEQGVVGRVGSGTGGSAGERGRDGERSRDVGGRGRLARSWRGATWRVGRRFRVAVGVGGLRALGAALQGLARGGRTVGQERAQGGRGRTWSSAAQRGRVQGLNAGGASGAFGVLGAAESQGNARSAPRLAAACGAERQGGGESRVGPAREQEAVAARKEQGAAAAPTWGPGGL

SEQ ID NO: 70877 - protein, 50 aa, Zea mays
  Coding DNA Sequence Number=SeqID_29098
MAGKRVPDASAWNPGFSAHQSGRGVGPRGEGNSGVGRAKGIWPNEERCFD

SEQ ID NO: 70878 - protein, 43 aa, Zea mays
  Coding DNA Sequence Number=SeqID_29099
RSNTQSGDHAHPTAHLTVAETLGAIASPELYRGGCLRIELAGQ

SEQ ID NO: 70879 - protein, 73 aa, Zea mays
  Coding DNA Sequence Number=SeqID_29100
MVGRRRCSGVRRLVEKLAAMGGTEGRLDRAENAADDDQGDRAKDAGGLQLASMEGRAQEEAGPSSNRRGLLLP

SEQ ID NO: 70880 - protein, 165 aa, Zea mays
  Coding DNA Sequence Number=SeqID_29101
  Gene Ontology: Mol. function=calcium ion binding
  Homolog annotation: Hit_ID=P94092; Match level="QueryCoverage=46%, HitCoverage=97%, E-value=1e-33, Identity=89%"; Hit description =Polcalcin Cyn d 7
  Pfam annotation: Domain name=efhand; Domain location=41-69; Score =38.6; E_value=2.2e-08; Accession=PF00036.22; Description=EF hand
  Pfam annotation: Domain name=efhand; Domain location=6-34; Score =38.4; E_value=2.5e-08; Accession=PF00036.22; Description=EF hand
  Pfam module annotation: Pfam domain module=efhand::efhand; Domain location=41-69::6-34
MAETADMERIFKRFDTNGDGKISLSELTEALRTLGSTSADEVQRMMAEIDTDGDGCIDFNEFITFCNANPGLMKDVAKPLASSRSGDSGGTRAHVAQTRRPPPPPSLPPKHAAGKPTPVKAATGLTSVSLHQSLEVRQSMFEEMQQTMKLQESQAKHQDLWAKMS

SEQ ID NO: 70881 - protein, 438 aa, Zea mays
  Coding DNA Sequence Number=SeqID_29102
  Gene Ontology: Mol. function=hydrogen ion transporting ATP synthase activity, rotational mechanism; Cellular component=proton -transporting two-sector ATPase complex; Biological process =mitochondrial electron transport, NADH to
  Homolog annotation: Hit_ID=Q9TKI7; Match level="QueryCoverage=81%, HitCoverage=73%, E-value=0.0, Identity=96%"; Hit description=ATP synthase subunit beta
  Pfam annotation: Domain name=ATP-synt_DE_N; Domain location=341-415; Score=19.0; E_value=8.8e-06; Accession=PF02823.6; Description=ATP synthase, DeltaEpsilon chain, beta-sandwich domain
  Pfam annotation: Domain name=ATP-synt_ab; Domain location=63-284; Score=347.0; E_value=3e-101; Accession=PF00006.15; Description=ATP synthase alphabeta family, nucleotide-binding domain
  Pfam annotation: Domain name=ATP-synt_ab_C; Domain location=297-403; Score=98.4; E_value=2.1e-26; Accession=PF00306.17; Description=ATP synthase alphabeta chain, C terminal domain
  Pfam module annotation: Pfam domain module=ATP-synt_DE_N::ATP-synt _ab::ATP-synt_ab_C; Domain location=341-415::63-284::297-403
MEVIDTGTPLSVPVGGATLGRIFNVLGEPIDNLGPVDTSATFPIHRSAPAFIELDTKLSIFETGIKVVDLLAPYRRGGKIGLFGGAGVGKTVLIMELINNIAKAHGGVSVFGGVGERTREGNDLYMEMKESGVINEKNIEESKVALVYGQMNEPPGVRMRVGLTALTMAEYFRDVNKQDVLLFIDNIFRFVQAGSEVSALLGRMPSAVGYQPTLSTEMGSLQERITSTKKGSITSIQAVYVPADDLTDPAPATTFAHLDATTVLSRGLASKGIYPAVDPLDSTSTMLQPRIVGNEHYETAQRVKETLQRYKELQDIIAILGLDELSEEDRLTVARARKIERFLSQPFFVAEVFTGSPGNGQIGVLPNHAPINTAVDMGPLRIRLLNDQWLTAVLWSGFARIVNNEIIILGNDAELGSDIDPEEAQQALEIAEADSDLF

SEQ ID NO: 70882 - protein, 56 aa, Zea mays
  Coding DNA Sequence Number=SeqID_29103
  Homolog annotation: Hit_ID=P56767; Match level="QueryCoverage=55%, HitCoverage=4%, E-value=5e-07, Identity=87%"; Hit description =Photosystem I P700 chlorophyll a apoprotein A2
MEAKPFVVQKRRISSESSFVRTFRRFIMTGAFAHGAIFSLGITIRNRMKIMYWQEC

SEQ ID NO: 70883 - protein, 175 aa, Zea mays
  Coding DNA Sequence Number=SeqID_29104
  Gene Ontology: Mol. function=hydrolase activity, hydrolyzing O -glycosyl compounds; Cellular component=cellular_component; Biological process=carbohydrate metabolic process
  Homolog annotation: Hit_ID=Q2QZT0; Match level="QueryCoverage=88%, HitCoverage=17%, E-value=4e-38, Identity=73%"; Hit description=Beta -D-xylosidase, putative, expressed
MAHRGSRISRVLTGPVQALGLHILVEARDDDDGVRLARRLDGRGDGLVPAARDVGAAGLLHNPRGVRGDALQRHGVAAGLAHVVPNHGNGGVGVRADDDDVVRGGAEREHVPVVLGAAPVLEEHDAVRAASSARSWCSLEHTSAGPRRPNDPAAGSPSNMPSRICTVTVLRSYIQ

SEQ ID NO: 70884 - protein, 593 aa, Zea mays
  Coding DNA Sequence Number=SeqID_29105
  Gene Ontology: Mol. function=RNA-directed DNA polymerase activity; Cellular component=intracellular; Biological process=RNA-dependent DNA replication
  Homolog annotation: Hit_ID=Q6ZFX5; Match level="QueryCoverage=69%, HitCoverage=91%, E-value=1e-65, Identity=36%"; Hit description =Pentatricopeptide (PPR) repeat-containing protein-like
  Pfam annotation: Domain name=PPR; Domain location=274-308; Score =18.5; E_value=0.024; Accession=PF01535.11; Description=PPR repeat
  Pfam annotation: Domain name=PPR; Domain location=344-377; Score=2.8; E_value=3.5; Accession=PF01535.11; Description=PPR repeat
  Pfam annotation: Domain name=PPR; Domain location=381-415; Score =25.3; E_value=0.00022; Accession=PF01535.11; Description=PPR repeat
  Pfam annotation: Domain name=PPR; Domain location=425-459; Score =16.4; E_value=0.085; Accession=PF01535.11; Description=PPR repeat
  Pfam annotation: Domain name=PPR; Domain location=460-494; Score =31.9; E_value=2.2e-06; Accession=PF01535.11; Description=PPR repeat
  Pfam annotation: Domain name=PPR; Domain location=495-529; Score=2.1; E_value=4.2; Accession=PF01535.11; Description=PPR repeat
  Pfam module annotation: Pfam domain module=PPR::PPR::PPR::PPR::PPR::PP R; Domain location=274-308::344-377::381-415::425-459::460-494::495 -529
  Subcellular localization annotation: CTP_CleavageSite=77; ConfidenceScore=5.30e-01
QSVDCPRLRSPSGILAAANISPTTHTENPARTACPIATPSTAPYAGARAWTATSSPTATPSTSSSSTHYTRTPEDAAAATLRAGLDLDCGPFLALYAGSAVAAGKVADTDVDAALLNTVTVQMRLGMFDGDPTAGPFGRLGPADNRRGALSLMITAEEKSPEREEEEEEANPRAEAFLEIICRVPAGEVEAALSACGIGPTAEVEELVLKSRECYKRPKSAVCFFRWAGQSVSHTAYAWNLHVDILGKAAMFEPMWDAIRSMKQEGGGGLVSVATFASVFASYCAAGNIKDAIAALDVMDRYGLKHDSVALNSLLSAICRVEGRAQDAQDVFERTKATIPSDGDTFAILLEAWEKEGNAVRAKSVFGEMVVRIGWDAANVSVYDSFLSTLVRGGLLDEAFKFLQVMRSKGCLPGINFFYSCGSGRPQGAMIGLHCNAGSIDDALGLLDKMPLNGVFANSVTYNTILEGFIKHRKAREAESFLTEMSKNEQLPTSSNCAAAISLFFKEFNPSVAIDVWRCIVEHNITPAEDSAKELIAGLLDFGRFTEVTKRADEMIDMRVELSRSTMENMKRAFAKAGRHQSYDNIARRLKRY

SEQ ID NO: 70885 - protein, 61 aa, Zea mays
  Coding DNA Sequence Number=SeqID_29106
  Gene Ontology: Mol. function=protein binding
  Homolog annotation: Hit_ID=UPI00000481E8; Match level="QueryCoverage =79%, HitCoverage=5%, E-value=1e-09, Identity=59%"; Hit description =ATP binding / protein kinase/ protein serine/threonine kinase/ protein-tyrosine kinase
  Pfam annotation: Domain name=LRR_1; Domain location=2-24; Score=12.9; E_value=1.1; Accession=PF00560.23; Description=Leucine Rich Repeat
  Pfam annotation: Domain name=LRR_1; Domain location=26-48; Score=8.2; E_value=8.2; Accession=PF00560.23; Description=Leucine Rich Repeat
  Pfam module annotation: Pfam domain module=LRR_1::LRR_1; Domain location=2-24::26-48
MNLHRLQIDENNISGPITNSFANLTSIKHFLVDNNNLSGPLPPELADTRSLLAILIPIAAK

SEQ ID NO: 70886 - protein, 258 aa, Zea mays
  Coding DNA Sequence Number=SeqID_29107
MSYASLVTYEGAANALSREGCRHFEAFDQANEDFDRGVFQIEDDVLKCSAGALYDRMWGPHGRDIVREMADRALAHAMREEGPACLESSPAQKDAAVEAGVEEQSLLQGGDAEGPAAADASEQVPTSGPVQANCDDDTNDDILMDGNVVFLSDAFGESNVGSWSSEGEKLGSLFSWTDDKSSEDDLDYFAALDLAVAESPLRVAPLIRRRLQSGQSLVTHWGKKRWGYRNKVSESLCKVLEDIAEWAWRGRVFGSDHG

SEQ ID NO: 70887 - protein, 163 aa, Zea mays
  Coding DNA Sequence Number=SeqID_29108
  Subcellular localization annotation: CTP_CleavageSite=58; ConfidenceScore=5.16e-01
MGLDQGASRAGPGELAGAEAQRGRGGLAPPATLAVSRDRMPGASPRRPTAASRPARGRAAMARGRAGRGGMGGLEPRRGGSPRPQSVAVPSGPALVAAGARPGRRFPGIGPPNGGRGARQGQGPWTWGPPPTVGSGKGDKPVLAVEEGSPGVRWKDPEIGGGG

SEQ ID NO: 70888 - protein, 600 aa, Zea mays
  Coding DNA Sequence Number=SeqID_29109
  Gene Ontology: Mol. function=RNA-directed DNA polymerase activity; Cellular component=mitochondrion; Biological process=RNA-dependent DNA replication
  Homolog annotation: Hit_ID=UPI00004C1731; Match level="QueryCoverage =93%, HitCoverage=37%, E-value=0.0, Identity=76%"; Hit description =UPI00004C1731 related cluster
  Pfam annotation: Domain name=RnaseH; Domain location=99-226; Score =2.7; E_value=3.2e-05; Accession=PF00075.14; Description=RNase H
  Pfam annotation: Domain name=rve; Domain location=299-471; Score =101.9; E_value=1.9e-27; Accession=PF00665.16; Description=Integrase core domain
  Pfam module annotation: Pfam domain module=RnaseH::rve; Domain location=99-226::299-471
MTETKIRYPQVQKLLYTVILTRRKLRHYFESHPVTVVSSFPLGEIIQCREASGRIAKWAVEIMGETISFAPRKAIKSQVLADFVAEWVDTQLPTAPIQPELWTMFFDGSLMKTGAGAGLLFISPLGKHLRYVLRLHFPASNNVVEYEALVNGLWIALELGVRRLDARGDSQLVIDQVMKNSHCRDPKMEAYCDEVRRLEDKLYGLELNHIARRYNETADELAKIASGRTTVPPDVFSRDLHQPSVKIDDSPEPEAPSVQPEVPSAQPEAPSARPEAPSVQPEVPSATEGEALHVEEERSGATPDRNWQTPYLQYLRQGELPLDRAEARRRAPGGYTHLLVAIDKFSKWVEVRPLNSIRSEQAVTFFTNIIHRFGVPNSIITDNGTQFTGRKFLDFCEDHHIRVDWAAVAHPMSNGQVERANGMILQGLKPRIYNDLNKFGKRWMKELPSVVWSLRTTPSRVTGFTPFFLVYGAEAVLPTDLEYGSPRMRAYSDQSNQASREDSLDQLEEARDKALLHSARYQQSLRRYHARGVRPRDLQVGDLVLRLRQDARGRHKLTPPWEGPFIIAKVLKPGTYKLANSQGEVYGNAWNIQQLRRFYP

SEQ ID NO: 70889 - protein, 76 aa, Zea mays
  Coding DNA Sequence Number=SeqID_29110
MFGLQVVMRNDGYDYAYGNASPLQPNMIFAEYVDVYSPLLYTPNPPSSGCPHCDHFSGEDEAVEEDFQEFQEYDEF

SEQ ID NO: 70890 - protein, 109 aa, Zea mays
  Coding DNA Sequence Number=SeqID_29111
MTKPLSVIALRLLGSNLTSLILTTKGKNDDKEHEAEDSDDLEDIAKALGYHAGATILYGSDRDILVYVPNSEETKIGLMLSKALMLQQNMEEQKTKATISSLQSKVKKL

SEQ ID NO: 70891 - protein, 64 aa, Zea mays
  Coding DNA Sequence Number=SeqID_29112
MTKDEQSANHKLRKKKRSGEWLCAAKGCFGLGHRTVRCAPDSVRCARPAWSKPAALGFFFGDFG

SEQ ID NO: 70892 - protein, 151 aa, Zea mays
  Coding DNA Sequence Number=SeqID_29113
MDLRTRTHVREELRVAARDAPGARGADIDHERRDIVARAQTTLISIINTRNDKRLGTRTEIKHNTDGGVSRNSIAVTAPAGFRPRWCRCSWGFCMMTAQSTTSAIHARARQQHNTARVAAIGVRLAARMAQVAYARAPAEECRGKTLAVRS

SEQ ID NO: 70893 - protein, 109 aa, Zea mays
  Coding DNA Sequence Number=SeqID_29114
PQATRRKLMGGGGDVGPCGSDESEKTRWGTPATLLRGTGEKVLVGEEALAGGDVDDGGVRTGSNGADDGPLKGWGLRRRALLGADGAVEVGGWVSREVPTAGEQRTASG

SEQ ID NO: 70894 - protein, 166 aa, Zea mays
  Coding DNA Sequence Number=SeqID_29115
MGKGKRGRGSPRHAGDKQKQDPSPPSEDFGDSEYSEEEVSSESEGSLALTSPPTSSDDSNDSQGIAADVWTYIRSVERAGLEGSNESEVSSDEEDSFGSSEERSGDDSDDEGSGGDDDSDDGDGSEGDDDDGKGGEGDDGGNGGNSGGGSKDGGGGGKASGKAPLV

SEQ ID NO: 70895 - protein, 165 aa, Zea mays
  Coding DNA Sequence Number=SeqID_29116
MDSVVLSWLNDTITVELQDIGDLSVGEYCRQMKSMADSPRPRRAHRRSYRGAEPSACLRPYYGHLKSLIKRIVLFPNFHVVCNELLLEELTMETEAPALAPALYSAPLAVRLLALCRPGLLPDPLPAVPADPCPAPIVDRGRRPHKGGHKSGGSTRGGLSGRGGG

SEQ ID NO: 70896 - protein, 76 aa, Zea mays
  Coding DNA Sequence Number=SeqID_29117
MVELAKFMWVVTTYGGEPLVEIFAKEYCLHWQKKVAGRKIKQFGSCTFTLRTGKTLGEFVELVSCAKNKWGNWCDF

SEQ ID NO: 70897 - protein, 70 aa, Zea mays
  Coding DNA Sequence Number=SeqID_29118
MTHRLCMQCPTDPGCRCAVAALAPTIASMGDLVSGQMRGKSALGFTQEDPRWQALGLAPGLPLGQLLARE

SEQ ID NO: 70898 - protein, 184 aa, Zea mays
  Coding DNA Sequence Number=SeqID_29119
MKIMMVNLMDASLVIPPILAHICYAFGYALKTTCDTTSQALENKQATPKAKGFPTVEETPLAMVVSETKETVASRLLLCTKDEDEEHIALVMSLFFSDNDEDDSAQAKAIIATVMATMDTMHHVVPAIELESQKVQTTPPATILSAIMMAKEKTGSTKPATVGDKGKGPTEIKEAKKAIEITHH

SEQ ID NO: 70899 - protein, 81 aa, Zea mays
  Coding DNA Sequence Number=SeqID_29120
MVDAIPRIKLPGVPNLYPSTRERPTSVPQPIRMDFAEAIAEDGYGKGMELTTKSRKSWRIRIIPLRINELRTKVKDDTITK

SEQ ID NO: 70900 - protein, 47 aa, Zea mays
  Coding DNA Sequence Number=SeqID_29121
MNVCELTLAVSHPTRSRKEVSLVLVSPYALEVSILPLGVDDSLGAPK

SEQ ID NO: 70901 - protein, 66 aa, Zea mays
  Coding DNA Sequence Number=SeqID_29122
MSLLVHPEFFPNPLGGLDVMVSSSPARPHRGNDEQPVVPEHVAKDLPEQQPGEGKCPLTYYVLLTL

SEQ ID NO: 70902 - protein, 175 aa, Zea mays
  Coding DNA Sequence Number=SeqID_29123
  Pfam annotation: Domain name=DVL; Domain location=154-172; Score =35.6; E_value=1.7e-07; Accession=PF08137.3; Description=DVL family
MARWDSNELARDRYKRLRKIEVGPWPTLPTPWIRPWTGGISPRWPSHWRPAPPACSCTRRVARCHRIISCLLLHCCLYTTLQMGTPAIYTAPIGVPIQSFNNTCYLSQQTTHSLSSPLLTWEHPIQPTTLRDCNMKLLAGGQRRRQRGFGKALKEQRARLYIIQRCVVMLLRWHD

SEQ ID NO: 70903 - protein, 43 aa, Zea mays
  Coding DNA Sequence Number=SeqID_29124
MANSIRARTADGGQWRELATEIGRPAAEVKCGEELKRIKLDSR

SEQ ID NO: 70904 - protein, 70 aa, Zea mays
  Coding DNA Sequence Number=SeqID_29125
MAGCWRWMWIDLVGAAADGITWSWPFRCQAISKVNFDPSEEIGACLATQDGPSARFKDVRGMHVLRFDYS

SEQ ID NO: 70905 - protein, 76 aa, Zea mays
  Coding DNA Sequence Number=SeqID_29126
MASVLEKAGCDHAKIVGEVSFGISVDDIKTPWKHVLNAAKRLFFELWNKGGRQLAALEAEEYTRKNKELKKMKKAK

SEQ ID NO: 70906 - protein, 66 aa, Zea mays
  Coding DNA Sequence Number=SeqID_29127
MAYAENKWLIMFLRTFGRGRPPTADIPVSKTLQRLHTLPTSRDPFLPRVDQTLKQYQGPYGEVLEK

SEQ ID NO: 70907 - protein, 139 aa, Zea mays
  Coding DNA Sequence Number=SeqID_29128
MERSRAGGGTTQARAEGELGLELGGINGEETPTHSGGRAGEGRWLLAGRAEASGPGRSLATGREEQGEVVGVQKWPTMGDSEFTARARGRSGHGRAPADNPARGREERGQGGEQGLGTQGAGDSTPWMKEEIFGRAAAG

SEQ ID NO: 70908 - protein, 127 aa, Zea mays
  Coding DNA Sequence Number=SeqID_29129
MRGKANCCCLARVQLSVLHLGDGHAARGPGHVQNGSEDLPVRFGAAAARWCGVGGQVATVVGAEVVVAIGEAASAEAVASVDETVSATCAPGLWLFGFNGWFSSPVMGREQGPSSGSDCPEAIAAAV

SEQ ID NO: 70909 - protein, 120 aa, Zea mays
  Coding DNA Sequence Number=SeqID_29130
MACGPRKRIGVPCADAGDPRVSLTNYLARRDRSRNVVGPYGHSLACHNGLRTSSSAAAPNRHLQAIKDGVKLLVWPVGPWEYRIGCAPVELRRVDWAAPPLWSSGEEPVVALDPGVNGGD

SEQ ID NO: 70910 - protein, 241 aa, Zea mays
  Coding DNA Sequence Number=SeqID_29131
  Gene Ontology: Mol. function=caspase activity; Cellular component =nucleus; Biological process=proteolysis
  Homolog annotation: Hit_ID=Q75LR0; Match level="QueryCoverage=99%, HitCoverage=62%, E-value=4e-96, Identity=76%"; Hit description =Putative metacaspase
  Pfam annotation: Domain name=Peptidase_C14; Domain location=4-236; Score=-1.2; E_value=5.3e-05; Accession=PF00656.12; Description =Caspase domain
MEPGRVPTRANLMRALRWLVDGASAGDSLVFHFSGHGVQKLDRDGDEADGYDEALCPVDFEDPRGGGGVILDDEINATIVRPLGKGVKVARHRRHLPQRPPILDLPYLCRLSRTGYWQWENQQTARLAASGETKCTSGGLAISISGCGDSQTSQDTTALSGSASTGAMTYSFIKAVESEPGTTYGRLLTAMRATIRDNGGEFGIPGPIGTFFRRVITFSCAQEPQLCASETFDIYRKPFLL

SEQ ID NO: 70911 - protein, 332 aa, Zea mays
  Coding DNA Sequence Number=SeqID_29132
  Gene Ontology: Mol. function=caspase activity; Cellular component =nucleus; Biological process=proteolysis
  Homolog annotation: Hit_ID=Q75LR0; Match level="QueryCoverage=75%, HitCoverage=67%, E-value=8e-77, Identity=59%"; Hit description =Putative metacaspase
  Pfam annotation: Domain name=Peptidase_C14; Domain location=75-329; Score=67.3; E_value=5e-17; Accession=PF00656.12; Description=Caspase domain
MNMGGRSPAATTIRCKYCSASLTVCAGERAIQCAQCCGVTRIRRVAVLAAPAAGADEAGFRRGLPAVRRPRQEARRPDRHHLLCQRFAFPSDGIIMLTDDQKDPFRVPTKDNIRMAMQWLVQGCSSGDSLVFHFSGLGAQVADADCDEQDGYDEAICPVDSFQKGPILDDEINETIVRPLVPGAKLHAVVDACHSDSVLDLPFLCNMSRTGNWQWEDHRPPSGVCKGTSGGQAVLISGYSDGKSKFSMTPEACAAVGAMTHSFIKAVECEPQGVTYGRLLTSMKAIMTNAGGCNQQLQGACAPARKVVNFSGVQEPNLSCSEMFDVYRKPFA

SEQ ID NO: 70912 - protein, 67 aa, Zea mays
  Coding DNA Sequence Number=SeqID_29133
MAMMDSTSGKMYLYQVNYVIVIRFRYFLTLAICHISILDHALIRLAQADVPYPVYLFLRITFVTLST

SEQ ID NO: 70913 - protein, 75 aa, Zea mays
  Coding DNA Sequence Number=SeqID_29134
MWGSSGRYSRTCIIIVSESGWDRDPITPCLSAASCGVGSIFLTNNNRMRRGESALNGSDLSTTGVNVALYDGSTM

SEQ ID NO: 70914 - protein, 343 aa, Zea mays
  Coding DNA Sequence Number=SeqID_29135
  Gene Ontology: Mol. function=hydrolase activity; Biological process =aromatic compound metabolic process
  Homolog annotation: Hit_ID=Q10KC9; Match level="QueryCoverage=79%, HitCoverage=87%, E-value=1e-104, Identity=68%"; Hit description =Hydrolase, alpha/beta fold family protein, putative, expressed
  Pfam annotation: Domain name=Abhydrolase_1; Domain location=148-339; Score=42.0; E_value=2e-09; Accession=PF00561.10; Description =alphabeta hydrolase fold
  Pfam annotation: Domain name=DLH; Domain location=107-343; Score= -80.1; E_value=0.089; Accession=PF01738.9; Description=Dienelactone hydrolase family
  Pfam annotation: Domain name=Peptidase_S15; Domain location=103-325; Score=-78.3; E_value=0.00042; Accession=PF02129.9; Description=X-Pro dipeptidyl-peptidase (S15 family)
  Pfam module annotation: Pfam domain module=Abhydrolase_1::DLH::Peptida se_S15; Domain location=148-339::107-343::103-325
  Subcellular localization annotation: CTP_CleavageSite=42; ConfidenceScore=5.40e-01
MAIPFKPAPAPPPILALPASAPAQRSPEPGPPHRSRRRSPIMATTPAEDPEPGLPPPKALCEQPRRRRPCVLLSFSAARDRFLRGRFLSAGLRPFSVRLPSPAGTSTVVHLWAPPRPARRPVLLLHGFGASATWQWAPYLRSLLAAGLDPIVPDLLFFGASSSTVPDRSDTFQARTVKAAMDGMGVRRFAVVGVSYGGFVAYRLAAMYPEAVERVVLVSSGVCLEEGDLAAGLFPVADVGEAAELLVPRRPAEVMGSDHLEEKAELLHALINDRKLSDLPKINQPTLIIWGEQDQVFPMELAHRLERHLGESSRLVVVKNAGHAANLEKSKEEVKPQCDGWKF

SEQ ID NO: 70915 - protein, 413 aa, Zea mays
  Coding DNA Sequence Number=SeqID_29136
  Gene Ontology: Mol. function=oxidoreductase activity; Cellular component=membrane; Biological process=electron transport
  Homolog annotation: Hit_ID=Q8LGN4; Match level="QueryCoverage=45%, HitCoverage=37%, E-value=1e-100, Identity=91%"; Hit description =Cytochrome P450 monooxygenase CYP72A26
  Pfam annotation: Domain name=Kinesin; Domain location=208-385; Score=- 86.9; E_value=8.8e-09; Accession=PF00225.13; Description=Kinesin motor domain
MGMTIEDVIEECKVFYFAGMETTSVLLTWTMVVLSMDPEWQDRAREEVTALFGRDGKPEYDGLSRLKVVTMVLYEVLRLYPPATSVVRQTYKEMELPVLLIHHDPDIWGGDAREFRPDRFSEGVSRASKDPGAFLPFGWGPRICIGQNFALLEAKMALCMILQRFEFGLAPSYAHAPHTVITLHPMHDCKNGIAKQAKISMAYSFIHRPLSDEAHRVSTPVVVTCNDQRREVFVAQNIANKKIDRTVAFDKVLGPKSQQQDVFNHAVVPLVSEVDGYNCTIFAYGQTGTGKTYTMEGGGDKALNADLPTDAGVIPSVVKRIFDILEAQSAEYNMKLIIKKLELPVKFDIRSLLLLLHFVFYDLDLRSRVLMIAIRYHEARRREQGPPLRLLLRQAAAAEGGGEEGQGRGGGTE

SEQ ID NO: 70916 - protein, 40 aa, Zea mays
  Coding DNA Sequence Number=SeqID_29137
MAQRVAFFAADLNPASRKEIPSRRDPTEKSLMGQSVVVDS

SEQ ID NO: 70917 - protein, 161 aa, Zea mays
  Coding DNA Sequence Number=SeqID_29138
  Gene Ontology: Mol. function=phospholipid binding; Cellular component= coated pit; Biological process=endocytosis
  Homolog annotation: Hit_ID=Q8LJJ6; Match level="QueryCoverage=62%, HitCoverage=19%, E-value=2e-31, Identity=70%"; Hit description =Clathrin assembly protein-like
MACEVAEVWELVPRGRSASATETTVAEYVIGKAQQLKHLLGRFIQCRPTGKARTNPVVTAALYRLVKESATMYCELTEVMVVLLDRFADLGTPACVHVHSIFTSTAWNLGMLSSHFTDRTAWNLDHMSGLPIFYMASCWYEDWHSVCEIYGIYFQVKHMPN

SEQ ID NO: 70918 - protein, 107 aa, Zea mays
  Coding DNA Sequence Number=SeqID_29139
  Homolog annotation: Hit_ID=O24587; Match level="QueryCoverage=49%, HitCoverage=4%, E-value=5e-23, Identity=90%"; Hit description=Pol
MADNPVEHSRTKHIDIRHHFLRDHQQKGDIEVYHINTENQLADIFTKPLDEKSLKGALKGKMDLDVAKTSTALRYWCIYFQVHTYALIAFLLLIDNFGEAMGLKGQR

SEQ ID NO: 70919 - protein, 312 aa, Zea mays
  Coding DNA Sequence Number=SeqID_29140
  Homolog annotation: Hit_ID=Q6QP51; Match level="QueryCoverage=28%, HitCoverage=41%, E-value=8e-15, Identity=55%"; Hit description =Putative growth-regulating factor 1
MQAACNYTKGAHPFNFDASSMEAQAHTSCGRRAGYYMQKTAPPLAPVPRILDRGIGAMTRGNPAHGPTVPTRHAGHGDRERGYSKRDPSPRRKRAPSPLLIRGSKAGPPEGFDSRLRALGLRAHNWSEVRRLAPRKGSTAASGHSGSAPTTDQGFEGWPPEGFDSRLRTRRVRDGYGYVRYITKARATLPRVRMTAAKSSLRRHRKLRLARPEGLDSTSTSDDGLCLAPTPGLGLNLDLGRRSLPRPTLGLGLDLDSGRWSPPRPTPGLGLNLDLGRRSPPRSTLGLGLDLDSGRRSLPRPTPGLGLNLDLG

SEQ ID NO: 70920 - protein, 149 aa, Zea mays
  Coding DNA Sequence Number=SeqID_29141
MKLHLKRWRMVAGRRAWMARRGPCACGRFRVTVGVGGFCWSGQGRWVGREAAGRLRGRGASRLVQDRDALGCWHPLGGSWRGGGRAAAGASGQGRSVPGPGAGGTARGDERDAKSQPVTALRLYKQRLLLWLGEWRGDEQASGEETRRL

SEQ ID NO: 70921 - protein, 93 aa, Zea mays
  Coding DNA Sequence Number=SeqID_29142
MKYLRALAPRVEKEIASVGTGEQGIIVAPIESSEASLGAAALEELFPMRERDEGTTRSAMGIWENLGKIAAGGRKLEGGIWVTWRKSRIWGRI

SEQ ID NO: 70922 - protein, 299 aa, Zea mays
  Coding DNA Sequence Number=SeqID_29143
  Subcellular localization annotation: CTP_CleavageSite=47; ConfidenceScore=5.06e-01
MPGDVDDDGPYFFSAPASPVHYILRSPPSSTAAGAASPAASADADCCAAAAGDFEFAAHMADGPGPKGGAAMSSAEELFVAGRIRVGCLSPIRRQEAGREGGSGSGGGEEEEEEAERDRRSPRATRRTRSVSPTRSPRGAAFAEPSDTFASASSSSSSSSSSSSAKNSRRRISLRDLLSRTGGDCAGAADQASSSGTGSAEVTSRPGFWPPSIWPSPRSSSNNLPLPCPAPQPPGRRSASSDRAAAPGGGGGGSARRTTSLPYRQSLVLGCLGFGARSRSYGARQVHAPPLLFTLNTKS

SEQ ID NO: 70923 - protein, 102 aa, Zea mays
  Coding DNA Sequence Number=SeqID_29144
MVQSLAFAVDLRGRDATAFVCEVEAEAVKIVGKELQAELFTFGKTQRRSAIIHRTVRCTPDGGRCSRNESDSELASFGNSLHYNSPDMSGVHRTVPVTVGAK

SEQ ID NO: 70924 - protein, 111 aa, Zea mays
  Coding DNA Sequence Number=SeqID_29145
MTITFNTKEVSYFGSLTCIAGRKGVLYRYRIVDPAEDKSPLKAPIADTDPPHLTSARAIPTNSKARSPRLVPAPESIMVTSARFGAILALMTQPTEAAHSVWRTPFSTSPT

SEQ ID NO: 70925 - protein, 84 aa, Zea mays
  Coding DNA Sequence Number=SeqID_29146
MENKKRLEIMRAEAEHHARWAAKAEADMEWLWTEMKGMPNVIQSLMTFFAHVIYKGNFEALVAKGAATKYSWHQRILSSTPAFI

SEQ ID NO: 70926 - protein, 45 aa, Zea mays
  Coding DNA Sequence Number=SeqID_29147
MACPTVAKLTGASRSDALATLRMSDKEFPKAPTIISVREGTRQLC

SEQ ID NO: 70927 - protein, 134 aa, Zea mays
  Coding DNA Sequence Number=SeqID_29148
MPTTVQKALAKLQWKRICDVLIGYVEQTSKASQEKKQTLSNALLSQMKVDKEVGDKSHNKRVREDPKNRGARHLGMRLEGGKFCGKVIIRALDVVPKGGDFSIMDDTGGDSMTEVEQGQQGGPVGTREVTSEAC

SEQ ID NO: 70928 - protein, 48 aa, Zea mays
  Coding DNA Sequence Number=SeqID_29149
MASCCMLGRFRRYQDVAQATAEKKNDKIDIMQFKVTNYKDIVEPTPQY

SEQ ID NO: 70929 - protein, 39 aa, Zea mays
  Coding DNA Sequence Number=SeqID_29150
MNLPVLDVLAVAVAATAQVALSGKTLPHTTQAPGFMVAH

SEQ ID NO: 70930 - protein, 163 aa, Zea mays
  Coding DNA Sequence Number=SeqID_29151
  Gene Ontology: Mol. function=protein serine/threonine kinase activity; Cellular component=cytoplasm; Biological process=protein amino acid phosphorylation
  Homolog annotation: Hit_ID=Q9LWM4; Match level="QueryCoverage=83%, HitCoverage=27%, E-value=1e-42, Identity=63%"; Hit description =Putative CBL-interacting protein kinase 2
  Pfam annotation: Domain name=Pkinase; Domain location=19-163; Score= -33.1; E_value=1.4e-06; Accession=PF00069.15; Description=Protein kinase domain
  Pfam annotation: Domain name=Pkinase_Tyr; Domain location=27-162; Score=-158.6; E_value=0.0097; Accession=PF07714.7; Description =Protein tyrosine kinase
  Pfam module annotation: Pfam domain module=Pkinase::Pkinase_Tyr; Domain location=19-163::27-162
  Subcellular localization annotation: CTP_CleavageSite=40; ConfidenceScore=5.18e-01
MGPSSLPPPLRSSHLTPAPRRLDPTRSGTFAKVYYARDLSAGAGTGHSCSVAIKVIDKARLRRTEGMVEQLRREISIMRMVRHPNVVGIREVLASRSRVFVVMEYARGGELFAKVARGRLDEDHARRYFQVLVAAVGFCHRRGVAHRDLKPENLLLDEVGRLK

SEQ ID NO: 70931 - protein, 238 aa, Zea mays
  Coding DNA Sequence Number=SeqID_29152
MVHLDCEDAEIPVEDHVVHLPAARHRQHRIGEDVIVESVAVELEQDLVTPARVLLGRVKMRTTEARPRMRREPDDAASPIRGAGKTFPATPVLVGAQEATVTLHGAGMDLFPSPALSPSAHARPGSDPFSPAPPPYTTRARPPSHRRRHERHRDVPTALVVARRRAQAVARAWEHNREAVATLERQLVASVHSFGGVPSHTRPVCSSPITPRAASSPSKDGLHVVHGDLRHLSAVTLQ

SEQ ID NO: 70932 - protein, 112 aa, Zea mays
  Coding DNA Sequence Number=SeqID_29153
MAPLTWTLSNLTMPSCMHVVGRVTITGPASSPKGAEILGEDHVVHLPTAQHRHHRIGEDVIVEDVAVEIEQDPITPARVLGRVQDEDDGGKAPDAGEPAWRLTMKVTQQVHI

SEQ ID NO: 70933 - protein, 120 aa, Zea mays
  Coding DNA Sequence Number=SeqID_29154
MAPLTWTLSNLTMPSCMHVVGRSRTTLHLDCEGAEILGADHIVHLPVAQHRHHRIGEDVIVEDVAVEIEQDPIMPARVQGRGQDEDDGGKAPDAGETAWRLTIMVTQQVKKANRHIAHTD

SEQ ID NO: 70934 - protein, 498 aa, Zea mays
  Coding DNA Sequence Number=SeqID_29155
  Homolog annotation: Hit_ID=Q5JCT1; Match level="QueryCoverage=99%, HitCoverage=99%, E-value=1e-167, Identity=64%"; Hit description =OSA15 protein
MASNMYGTTVACRMCYRDQYRPPPRDFTCEARKSEARRWGNGYHLIPRLCQWKPRGSKSDGSLLGDGHGGRDARCHSCGSHNSCECETRDCDAMEDAAASSYRDFKQHSRGNPQFSDDQVSSKNKSAYASQGLAEACKFVYNDAKFVNERAQNDILLLSRGITRLNKRACQDAAVLGLGFLKLDARARKDTQKIDHTVKERAALLNHFARAFKERAQSDLKKAADKHWSDGALEADLRRADLVVKRRAMEDAFMALKILSSSKPSLWCGGQNVGVTMCGREPNMPYIITPEVIQRNMPTSKFVQDIHDMMVNRLYEQLPKDGSSSRTNSTGFITLEKNGKALELFPGEVSADQIYAIEEAYQSMASAFSEADGIDYTDPEELELLVATLIDLDAMDGKRSVSLIAECSSSPDVNTRKALANALATAPSMWTLGNAGMGALQRLAQDPNYAVARAASRAIDELKKQWELEEGDSLRFVMNQNLASRDTEDDNSPADDAA

SEQ ID NO: 70935 - protein, 399 aa, Zea mays
  Coding DNA Sequence Number=SeqID_29156
  Gene Ontology: Mol. function=serine carboxypeptidase activity; Cellular component=endoplasmic reticulum membrane; Biological process=proteolysis
  Homolog annotation: Hit_ID=Q75HY1; Match level="QueryCoverage=92%, HitCoverage=73%, E-value=9e-84, Identity=50%"; Hit description =Putative serine carboxypeptidase
  Pfam annotation: Domain name=Peptidase_S10; Domain location=29-399; Score=105.4; E_value=1.6e-28; Accession=PF00450.12; Description =Serine carboxypeptidase
MAAPLLLIVVLVATTAAVSAAGSDTTIFPTEALPTKSGYLPIPAANASMYYAFYEATHPLTPPAATPLLVWLEGGPGLSSFASNFLQIGPYVFSSSPADSDTDSSDASSLAPPSLRLRPNPYAWNRRFGLLFLESPLGTGYSAAPSPSAIPTTQPAVAEHVLAALQSFLSSQPDDATFRARPLFLTGESYAGKTIPTVAALILASTSTTSTNPALPEHLSTRMRINLRGVAIGNGFVHPAAQVTTHADVLYFAGLIGAEQRREAAAMQAEAAALAAAGRWREAVDAWFRALSWLRDATGLPSLFDVAAADDASSPLQALTAAGARAAGFMNDAGVRAALGARRDAPAPPWELVSAAVVAALHDDVMKSAKPDLEALLRGPPAPAPSPRVLLYEGVRDAQ

SEQ ID NO: 70936 - protein, 123 aa, Zea mays
  Coding DNA Sequence Number=SeqID_29157
MGMGLGKIFIPVTGYGFFSGAYFFFAGAKGSVQTNKKIKVRVQKKEAKETEENPGLAHRTVRCTRVDRLQTLHLRVSESALRYNSPDCLRHQVVVVLVSGLSDLLIKEKSSLGLGDRLREGKG

SEQ ID NO: 70937 - protein, 109 aa, Zea mays
  Coding DNA Sequence Number=SeqID_29158
MTPRLEFSSDRNQISYLSHLSPHSISELKLYTRLPTVTAKAYGNSFVFPVIGSKGGHGEFRMARWRSENEKSAVARDRWLSPWRGHRRAPDMHKVNYCDVTLSSLTVHL

SEQ ID NO: 70938 - protein, 91 aa, Zea mays
  Coding DNA Sequence Number=SeqID_29159
MAMMGSTLDKMYLCEVPNFGIFKAETGPDDRGPFNWSHASSWVSFASGRPIPERPTRNGSGEMARVACALRGKRLDGGVSVLSVGVNPIWS

SEQ ID NO: 70939 - protein, 102 aa, Zea mays
  Coding DNA Sequence Number=SeqID_29160
MEFPIKGNVEDQWVTQVMVLTRISVGPLEFWLVDTDAVNGLACDVELVFQQNYASNGQTATTAVTLELYDRKGLQVHRALPIWDEEGKTPRILASTDHTGRQ

SEQ ID NO: 70940 - protein, 90 aa, Zea mays
  Coding DNA Sequence Number=SeqID_29161
  Homolog annotation: Hit_ID=Q10ML2; Match level="QueryCoverage=100%, HitCoverage=80%, E-value=8e-13, Identity=46%"; Hit description =Negatively light-regulated protein, putative, expressed
  Pfam annotation: Domain name=Lg106; Domain location=20-85; Score =28.5; E_value=7.5e-06; Accession=PF07844.2; Description=Lg106-like protein
MASFNQESRAGTQREEAPLQGKYGGISPKKALINKDHERAYFDSADWVLGKVANYSSTQLVAAQRPRQQGVSSNSPTTVPAAEPLKPKLQ

SEQ ID NO: 70941 - protein, 158 aa, Zea mays
  Coding DNA Sequence Number=SeqID_29162
MATATCLWTLPSRATSGSGRSRAPWPRVQDQDRWLEFEHKVPYDLFDIRVRLMVRSIQTTHVNINYIPPPRRTPVYPVVVEKVHVNLHHLRVENGVILEDSSEEILVTPTPLSESQAFAARASAQAPALGGDDPDDSGDGGEDDDEEEEDNNNEEARH

SEQ ID NO: 70942 - protein, 143 aa, Zea mays
  Coding DNA Sequence Number=SeqID_29163
MENQVEEKSLENIKVVCEYPDVFLEELPVLEGKSNANHKIRPSQVANWRFATKITRTRRCPKTPQSPPYCHHILLSTEYSGDNLGWVGFKARGQILVINPVITQMYSLQEEIPDIIIITIIIKVSKVHLIKEGPKATPNHEHD

SEQ ID NO: 70943 - protein, 76 aa, Zea mays
  Coding DNA Sequence Number=SeqID_29164
MKETASDEDESVQRAPPGGDHAEQHWEGRAACDAKGGERGAEWLTGRVPRVSAAFLAHGGLRFWGDLGREGGKYFN

SEQ ID NO: 70944 - protein, 47 aa, Zea mays
  Coding DNA Sequence Number=SeqID_29165
MTLEPHPLQPGWRSLDSESFGFRAEDTIESTAKVYEALGFKKNKNNY

SEQ ID NO: 70945 - protein, 57 aa, Zea mays
  Coding DNA Sequence Number=SeqID_29166
MKGKVVAALPHRIESSYISLMASPSNPKILYEKGKKIKFNIVEISMGKFMNRKKVVN

SEQ ID NO: 70946 - protein, 47 aa, Zea mays
  Coding DNA Sequence Number=SeqID_29167
MAVRTELVEVGNVSSGARHWAEAATEEVNEGLGSLYRRYLMETRRWK

SEQ ID NO: 70947 - protein, 91 aa, Zea mays
  Coding DNA Sequence Number=SeqID_29168
MDRVAPTIFDDDPTIDVIPRSYSTSLTTPRECYCLRHKNEKQQATIFLLEYLSSIAPEKNITSPILVRKYSATYPIREIEKTLENYRNLSM

SEQ ID NO: 70948 - protein, 37 aa, Zea mays
  Coding DNA Sequence Number=SeqID_29169
MEELHDMGNDQRLCGWLHLWMIVAHRLMKMEWMCKAN

SEQ ID NO: 70949 - protein, 85 aa, Zea mays
  Coding DNA Sequence Number=SeqID_29170
MEESLALRMSRIALLPLALPKMLSHRGAQLLCTYAFGRIYDTRSCPHARYRLAQSRLNKVPVILGDTDDYMFDEMIDPYMMFCAL

SEQ ID NO: 70950 - protein, 132 aa, Zea mays
  Coding DNA Sequence Number=SeqID_29171
MTKTGSYGREALNQTMEKGLTEERGSNYLLKIQKRLKYLPLIFTLLAMTNLGSDEDWDEVLAGEVWVHGMYRDLVDLGLMTSSVTGDCPVLNQIMEKGLTEERGSSYLLKIQKRLFFMDINNFWFRNAWAVS

SEQ ID NO: 70951 - protein, 232 aa, Zea mays
  Coding DNA Sequence Number=SeqID_29172
QKGAKPRAVVCQGALDRSTTFEALSGLVWRLWRLRQASGAAAARCAGGGADAGGGADVGVRAAARTSTRDVGALCGRRRRTGGGGAVGVRARGCAGVCALCASVRGVTDDVREIALFPTAGRRPSEIRLFPTEDVGQRTVALQQFRALHLYPSPRQRNSQQQQATQTRENNRKAKANTNTATAQRQVERYATESVATGGNGTLLSCGQAAQPFGAAPGPGHLTDILRQGQVA

SEQ ID NO: 70952 - protein, 464 aa, Zea mays
  Coding DNA Sequence Number=SeqID_29173
  Gene Ontology: Mol. function=transferase activity, transferring glycosyl groups; Cellular component=cytoplasm; Biological process =metabolic process
  Homolog annotation: Hit_ID=Q5VRT6; Match level="QueryCoverage=93%, HitCoverage=96%, E-value=1e-119, Identity=52%"; Hit description =Putative glucosyltransferase
MPAMVVEEDLIRGAAPEPEPEPHLLVVTFPAQGHINPARHLARRLLRATGARVTVSTAVSALRKMFPGEQAGAEGHRDAAGVWYVPYSDGYDDGFDRDAHDATHYMEQIKLVGAATLGAVLDRLHGVGRPVTLVVYTLLLSWVADVARARSVPAALYWIQPATVLAVYLHFFRATDGVDRAIAAAGGDPWASVRFPGLPPLRVRDLPSFIVSTPENDPYAFVADAFRELVETLGREDKPSVLANTFDAVEPEAAASLREAGVDVVPVGPVVSFLDDAAAGAGGAKNGGNNNDLFKQDGEGYLDWLDAQAPGSVVYISFGSLSVMSKRQIEEVARGMAESGRPFLWVLREDNRSSEGAGAGAAPLADWEGERGMVVGWCDQWTDQGTNAWLVERIGTGVRAAVSDKDGVLEADELRRCLDFATSEMVRAKAAVWREKARAAASEGGSSEMNLRAFVAKQIAGGKN

SEQ ID NO: 70953 - protein, 579 aa, Zea mays
  Coding DNA Sequence Number=SeqID_29174
  Gene Ontology: Mol. function=nucleic acid binding
  Subcellular localization annotation: CTP_CleavageSite=47; ConfidenceScore=5.01e-01
MSCTLDEDQQQLVTEHASDTVFHAPPQVCSLNLGSSPDSPLDMASASCANPSSSASRESNIAERNVSTECNGSSIGDANIIHRKCEDQNGPCAGPDKSFSSNLSVICSSQKSAESRLSINIDKANDKPLDNDEKEKQPISNLVQELNEHPIGCVTPTAPRTTSHRNRFTSISRAFGDGSKLLPEDHVLTGFAGGSKKPRSQVSYSVSPKSEELGIKNKGHFRKIQSHVSAKINDAKKLPDSSRSGHSSPESLTCVANVLVTVGDRGWREYDTQITMDSDGQSERRICVKLAEGTKYAHKVCQVLQPGATNRYTHAMMWKGGAEWCLEFPDRSQWLIFKQMHDECYSHNIRAASVRNIPIPGVHLVEIHDDNDVVSFVQSEAYLVHIGTDVEIALDQSRVLYDMDSDDEEWISSWRKSLVRDNTTTLQFAEDLFERVMDKLEKFAYSHNCNGLSIDQMKELETDDVPLHTIEVIHAYWQDKRQKRGMPLIRHFQSAMWKIYEQQLHEWESKVCRMQSSSNGYQEKKLPPKPALFAFCLRPRGLHVPYKGPKQRSHKKLMSTGCHSFSREHDGFYRQGNLP

SEQ ID NO: 70954 - protein, 530 aa, Zea mays
  Coding DNA Sequence Number=SeqID_29175
  Homolog annotation: Hit_ID=Q6K431; Match level="QueryCoverage=17%, HitCoverage=9%, E-value=2e-09, Identity=37%"; Hit description =Trithorax-like
MESSGGDKPTATDATESVVGLDGEETLSERESVGARHGPALSNGGGKEAPSSSSSAGNKRKHGILGSNQMELNEPGMPSSSSGDSTWSLDSLDDRHQISLLRSKNEHSEHSVTSAGVTVIRQPRGVLRLRKRDQNVSTESWTGGHNIPQANGVPRSSQLLRRNKKGKSTVFEQNRIGGDEPVSCLRTENGTCDQDTGSKFCSETEFSAEKLSHLSGEAPKAVHVDKGGCDHVKDDDDNICAGSPRKGMKSSDTSSKRCIPQHSNHFKSSNKKIKDVPSPARLLRKRDGKVPFRKRRPRRHFYEVSPSDVDPFCIVKERIRVFWPLDETWYFGLVKEYNPDTRLHHVRYDDKDEEWINLQNERIKLLFLPAEARNRSKCTNSRSVFDLKHEQGDREDMDGSEGNTESSESGPIGSWLARSNQAKSAALCNISKQDHSHSNIVPISFDQKQCRGSDAKESNDYIPCDSFGNGSAKVLKDRTTPEDRRFRFVYSRKRFCRKTNGFLSISEQHSNCQIRARFAMVLAACPGYGI

SEQ ID NO: 70955 - protein, 179 aa, Zea mays
  Coding DNA Sequence Number=SeqID_29176
MGQSIEELDSKVQTTVPGTSGRGSKRSWKQQGRIIVGAAKGIFKEAEAEGSGAEVEAVTGARETAVRDPGIRLTLANLLHAAAAAVGILQAIGVTPPVAASNAEAERPDQPQVNDTCLPPEEGIHEREGGALEPATRWKGTAWAKSGVRADHPIPSCLRHCAAAADADPAGGAHDLRDV

SEQ ID NO: 70956 - protein, 211 aa, Zea mays
  Coding DNA Sequence Number=SeqID_29177
  Homolog annotation: Hit_ID=Q1SW35; Match level="QueryCoverage=91%, HitCoverage=35%, E-value=3e-54, Identity=57%"; Hit description=IMP dehydrogenase/GMP reductase
MDDANNLIAIQVNCCLTVIRVKWSLHAREEILIELLRHLRGNATRAILESIRKCTRDMLEEQEAVRGRLFTIQDVMQSTVRAWLQDRSLRVTHNLAIFGGGGMVLSIITGLFGINVDGIPGAQNTPYAFGLFAGLLFFVGIVLIGMGMLYLGLQNPVNSEKVKVRKLELQHLVSMFQHEAEQHGKVREGVSRHGASPSSSTASDEGYILIS

SEQ ID NO: 70957 - protein, 151 aa, Zea mays
  Coding DNA Sequence Number=SeqID_29178
  Homolog annotation: Hit_ID=Q6QP51; Match level="QueryCoverage=34%, HitCoverage=30%, E-value=2e-14, Identity=79%"; Hit description =Putative growth-regulating factor 1
MQVACNRTAGAHPFGFVAFSIDAQAHTSCNRRAGYYVQETAPPLAPMPRLLDCGTGAATRGNPAHGPTVPIVHIDHGDRERGYFERDPSLRRKRAPSPPTDQGFEVWPLGRVRQPPQSTRDSHSLLIRGSKAGPSEGFDSRLRALGFRAHY

SEQ ID NO: 70958 - protein, 165 aa, Zea mays
  Coding DNA Sequence Number=SeqID_29179
  Gene Ontology: Mol. function=serine-type peptidase activity; Cellular component=mitochondrion; Biological process=proteolysis
  Homolog annotation: Hit_ID=Q8S3I8; Match level="QueryCoverage=82%, HitCoverage=40%, E-value=1e-59, Identity=75%"; Hit description=D1 protease-like protein precursor
MSKYDMTGIGLNLREILMKMGDELLSVNGIDVKGKSAFDASSMLQGPKETFVTIKVKHGDCGPVESMKVQRQLVTRTPVFYRLEKRENNDSSVGYIHITEFNAVAKKDLVSALKRLQKSGASYFVLDLRDNLGGLVQVCHPFSSQLYIIAMLVFGLLYCWMCVED

SEQ ID NO: 70959 - protein, 130 aa, Zea mays
  Coding DNA Sequence Number=SeqID_29180
MLAVDLRRRINRHVNTIKKKVVETSSTKLEVTVVGPPPGPVMPRVARIDPDIARWYSSLIMHEVSSRSWRAHGSSPRTRVAPRPNSSATSSMVFGVAANILHRALPLAFAKAERGAAYPSSQTHNGAQTF

SEQ ID NO: 70960 - protein, 965 aa, Zea mays
  Coding DNA Sequence Number=SeqID_29181
  Gene Ontology: Mol. function=nucleic acid binding; Cellular component= oxygen evolving complex; Biological process=DNA integration
  Homolog annotation: Hit_ID=Q8H6I0; Match level="QueryCoverage=99%, HitCoverage=58%, E-value=0.0, Identity=88%"; Hit description =Putative gag-pol polyprotein
  Pfam annotation: Domain name=RVT_2; Domain location=695-950; Score =508.7; E_value=6.5e-150; Accession=PF07727.4; Description=Reverse transcriptase (RNA-dependent
  Pfam annotation: Domain name=rve; Domain location=320-467; Score =144.5; E_value=2.8e-40; Accession=PF00665.16; Description=Integrase core domain
  Pfam module annotation: Pfam domain module=RVT_2::rve; Domain location=695-950::320-467
CRDIDVDAIHDHMTLIKQQNDHIAKLDAKIAEHNLENEKFKFARSMLYNGRRPGIKDGIGFQRGDNVKLNAHPKNLSNFVKGKAPMPQDNKGYILYPAGYPESKIRRTHSRKSHSGPNYAFMYKGETSSSRQPTRAKLPRKKTPIASNDHNISFKTFDASYVLTNKSGKVYASGGSSWILDSGCTNHMTGEKKMFSSYEKNQDPQRAITFGDGNQGLVKGVTVFRRSDDSIAFKGVLEGQLYLVDFDRAELDTCLIAKTNMGWLWHRRLARVGMKNLHKLLKGEHILGLTNVHFEKDRICSACQAGKQVGTQHPHKNIMTTDRPLELLHMDLFGPIAYISIGGSKYCLEKSHTQETLKGFLRQAQNEFDLRIKKIRSDNGTEFKNSQIEGFLEEEGIKHEFSSPYTPQQNGVVERKNRTLLDMARTMLDEYKTSDQFWAEAVNTACYAINRLYLHRILKKTSYELLTGKKPNISYFRVFGSKCFILVKRGRKSKFAPKTVEGFLLGYDSNTRAYSVFNKSSGLVEVSCDVVFDETNGSQIEQADLDEIGEEQAPCIALRNMSIGDVCPKESEEPSQAQDQPSSSTQASPPTQNEDEARDDEVEDQANEPPQNDGNDQGGDANDQDKKDEEPKPPHPRVHQAIQRDHPVDTILGDIHKGVTTRSRVAHFCEHYSFVSSIEPHRVEEALQDSDWVVAMQEELNNFSRNEVCHLVPRPNQNVVGTKWVFRNKQDEHGVVTRNKARLVAKGYSQVEGLDFGETYAPVARLESIRILLAYATYHGFKLYQMDVKSAFLNEPIKEEVYVEQPPGFEDSEYPNHVYKLSKALYGLKQAPRAWYECLRDFLIANGFKVGKADPTLFTKTLENDLFVCQIYVDDIIFGSTNESTCEEFSRIMTQKFEMSMMGELKYFLGFQVKQLQEGTFISQTKYTQDILNKFGMKDAKPIKTSMGTNGHLDLDTGGKSVDQK

SEQ ID NO: 70961 - protein, 469 aa, Zea mays
  Coding DNA Sequence Number=SeqID_29182
  Gene Ontology: Mol. function=nucleic acid binding; Cellular component= intracellular; Biological process=RNA splicing
  Homolog annotation: Hit_ID=Q9LU44; Match level="QueryCoverage=87%, HitCoverage=55%, E-value=1e-172, Identity=68%"; Hit description =Similarity to transcription or splicing factor
  Pfam annotation: Domain name=KH_1; Domain location=192-266; Score =27.4; E_value=5.2e-05; Accession=PF00013.19; Description=KH domain
  Pfam annotation: Domain name=RRM_1; Domain location=387-458; Score =86.3; E_value=9.3e-23; Accession=PF00076.12; Description=RNA recognition motif. (a.k.a. RRM, RBD, or
  Pfam annotation: Domain name=zf-CCHC; Domain location=299-316; Score =16.1; E_value=0.0022; Accession=PF00098.13; Description=Zinc knuckle
  Pfam annotation: Domain name=zf-CCHC; Domain location=325-342; Score =10.0; E_value=0.022; Accession=PF00098.13; Description=Zinc knuckle
  Pfam module annotation: Pfam domain module=KH_1::RRM_1::zf-CCHC::zf -CCHC; Domain location=192-266::387-458::299-316::325-342
MASAETLARSPSREPSSDPPRAGSSEPHHNGAGDSSRRRRRSRWEQSNDDSANNSGGEGGAVGRKRKTRWAEEEPRPAIALPDFMKDFAAEMDPEVHALNARLLDISRLLQSGLPLDDRPEGARSPSPEPVYDNFGIRINTREYRARERLNRERQDIISQLIRRNPAFKPPSDYRPPKLQKKLYIPMKEYPGYNFIGLIIGPRGNTQKRMEKETGAKIVIRGKGSVKEGKFLQKRDLKPDPSENEDLHVLVEAETQEALDAAAGMVEKLLTPVDEVLNEHKRQQLRELAALNGTIRDDEFCRTCGEAGHRQYACPNKMNTFKSDVQCKICGDGGHPTIDCPVKGTSGSGGSGGASAGTGSNPPWSAGGGAAVIGLNGIKKDYDETNLYIGYLPPTMDDDGLVSLFSQFGDIVMAKVIKDRNTGQSKGYGFVKYSDVSEANAAIAAMNGHHLEVSTTPSSSHPSTRHYIK

SEQ ID NO: 70962 - protein, 76 aa, Zea mays
  Coding DNA Sequence Number=SeqID_29183
  Homolog annotation: Hit_ID=Q9SQH4; Match level="QueryCoverage=50%, HitCoverage=4%, E-value=3e-09, Identity=69%"; Hit description=Actin bundling protein ABP135
MVDLCTYTQGVKSMESSLCPIVSSVFNRYIMKCSSWNINDGQLKLEETSLTKSMLESTKSFLLDCGAKIYVWVGCD

SEQ ID NO: 70963 - protein, 40 aa, Zea mays
  Coding DNA Sequence Number=SeqID_29184
MMVMVENDAIQNGLYAPNDLLLCLSRGPSESVKRRICFYA

SEQ ID NO: 70964 - protein, 261 aa, Zea mays
  Coding DNA Sequence Number=SeqID_29185
  Gene Ontology: Mol. function=zinc ion binding; Cellular component =nucleus; Biological process=ubiquitin-dependent protein catabolic process
  Homolog annotation: Hit_ID=Q5ZCA3; Match level="QueryCoverage=46%, HitCoverage=22%, E-value=2e-12, Identity=36%"; Hit description=SIAH1 protein-like
  Subcellular localization annotation: CTP_CleavageSite=57; ConfidenceScore=5.41e-01
MDMIVLAITNSVVSSSLRYLRQAQSGVVSVQPPSTALQTRMENANESEEEAQRRRVQEEEDSSSRAATRWVAATAVEIELEVLECPVCYRPLKPPVFQRLETQTNTSVSHGALALSFVPWTYAVCSWACGMLVLLRQARRQKLPHVRACGGATGFSRCFALEHVVESVRVPCANARRGCPAKTAYHGKEEHEKACPHAEGEADAGPAIPQRPAEQGGNRGSRARNLVVVVLVLASIPVAIPAVRGIVEHFGLPDPCSCVAT

SEQ ID NO: 70965 - protein, 126 aa, Zea mays
  Coding DNA Sequence Number=SeqID_29186
  Subcellular localization annotation: CTP_CleavageSite=38; ConfidenceScore=5.08e-01
MQAACIRAKWACPFDSNKPSMEVQAHASCNRSSGHVVSQAYVPSRGSEGALSHGMKTAPSLPTDQRFEGRPLGGVQRPPQIDWVLRPLLVRGLMADPSKGSTAASGHSGSAPTTDQGFVGVTPGFG

SEQ ID NO: 70966 - protein, 93 aa, Zea mays
  Coding DNA Sequence Number=SeqID_29187
MGQANRLLGLCDSLFAGGWGWPAMLLDAEEAIRQGGVKVVKVPINEIGEIITPIVVEEMILDPWDPPVSERAKERAPDRCGLLVSPKRQVRQP

SEQ ID NO: 70967 - protein, 78 aa, Zea mays
  Coding DNA Sequence Number=SeqID_29188
MALGPPRCDTYVASPSGSVPQLHGRVCPNMAACAPGAAQRPGVAVGLEQFLEYLSIRTCLLDDRLGQQYIHEGGMGHT

SEQ ID NO: 70968 - protein, 80 aa, Zea mays
  Coding DNA Sequence Number=SeqID_29189
MVTQSRQSMKKVDVEVDIVEPSWPRRAPESEEITREGLHDGCDLQKNDKEGVDAAVVEVDEVDEDERATLTMRLYWTKSK

SEQ ID NO: 70969 - protein, 37 aa, Zea mays
  Coding DNA Sequence Number=SeqID_29190
MDQPMDILTKTLRQVQLRINSIVVRDICHLKDKHMCA

SEQ ID NO: 70970 - protein, 213 aa, Zea mays
  Coding DNA Sequence Number=SeqID_29191
  Homolog annotation: Hit_ID=Q6Z841; Match level="QueryCoverage=86%, HitCoverage=78%, E-value=1e-43, Identity=87%"; Hit description =Pollen Ole e 1 allergen and extensin family protein-like
MAAAPPRWWPLLLQLAIALGILLAAAEAWTGEIRGRVVCDVCGDAAIGPEDHALEVTTTGGRDFRSICRGMSEHSRATGEESGGAGEGMATLEKGARVTDGHTRPAKGVIYATHLINSEGAEVAVLCITKSGEVINYQAFTNSKGVYTVAETMPESDRWDSCLARPMSSFHLHCTRRGDAHSGVKFTYNKSSGNPHTVKPFLYKPATVPLYCS

SEQ ID NO: 70971 - protein, 122 aa, Zea mays
  Coding DNA Sequence Number=SeqID_29192
MPLAEVRSPVTGFSLPGGSTRGKQDVEGLKGPYQCRFHLEFLPRRVQSSGTNFINYSLDSSIGCTMATTTSSTPPSRMSPAVHGENATTTTPRHPRPPRGSWCSVGRSRLPRKQEMKRGGHG

SEQ ID NO: 70972 - protein, 122 aa, Zea mays
  Coding DNA Sequence Number=SeqID_29193
MPLAEVRSPVTGFSLPGGSTRGKQDAEGLKGPYQCRFHLEFLPRRVQSSGTNFINYSLDSSTGCTMATTTSSTPPSRMSPAVHGENATTTTPRHPRPPRGSWCSVGQSRLPRKQEMKRGGHG

SEQ ID NO: 70973 - protein, 45 aa, Zea mays
  Coding DNA Sequence Number=SeqID_29194
MEQLATGQTAGTCQCEHGPGFAVFSSQHRMNTGHHPFGETSFVVK

SEQ ID NO: 70974 - protein, 197 aa, Zea mays
  Coding DNA Sequence Number=SeqID_29195
  Subcellular localization annotation: CTP_CleavageSite=49; ConfidenceScore=5.15e-01
MHAPRRFRKAFTAQLLRSLRAAGQASKSLGLRERRDAVRLSSDVALALAASARAPRSPPAWARALVARHAAERRNEALLRRVLDGAGYELAAARARKDARSRRVVRRSRRVCSRGGGAGRKRRSLLLAAGGGGRCAAMAAARRMVRARLRVLRSLVPGAEAMRGLSLLSETLDYVACLKTQVELMQCLCKGPCSLLR

SEQ ID NO: 70975 - protein, 136 aa, Zea mays
  Coding DNA Sequence Number=SeqID_29196
  Subcellular localization annotation: CTP_CleavageSite=20; ConfidenceScore=5.51e-01
MDAPTTRVSRPLPHAPNPFSGAHTHSLTPLSQLCPQQTPSLLSLAPHAHPWSSTVVCRRASVVFVAPSSDLHRAAGAPPPSTQGLPTFSSLLKRSRVPSRDNEQPVVPECVAEDLPEQQPGEGDSGYFLKYLSIRT

SEQ ID NO: 70976 - protein, 746 aa, Zea mays
  Coding DNA Sequence Number=SeqID_29197
  Gene Ontology: Mol. function=DNA binding; Cellular component =chromatin; Biological process=DNA integration
  Homolog annotation: Hit_ID=Q9XEJ4; Match level="QueryCoverage=99%, HitCoverage=71%, E-value=0.0, Identity=88%"; Hit description=Copia -type pol polyprotein
  Pfam annotation: Domain name=RVT_2; Domain location=503-744; Score =362.2; E_value=8.1e-106; Accession=PF07727.4; Description=Reverse transcriptase (RNA-dependent
  Pfam annotation: Domain name=rve; Domain location=111-274; Score =197.7; E_value=2.8e-56; Accession=PF00665.16; Description=Integrase core domain
  Pfam module annotation: Pfam domain module=RVT_2::rve; Domain location=503-744::111-274
MGYNCLFTDIGVTVFRRSDDSIAFKGVLEGQLYLVDFNRAELDTCLIAKTNMGWLWHRRLAHVGMKNLHKLLKGEHILGLTNVHFEKDRICSACQAGKQVGVHHPHKNIMTTDRPLELLHMDLFGPIAYISIGGSKYCLVIVDDYSRFTWVFFLQEKSQTQETLKGFLRRAQNEFGLRIKKIRSDNGTEFKNSQIEGFLEEEGIKHEFSSPYTPQQNGVVERKSRTLLDIARTMLDEYKTPDRFWAEAVNTACYAINRLYLHRILKKTSYELLTGKKPNISYFRVFGSKCFILIKRGRKSKFAPKTVEGFLLGYDSNTRAYRVFNKSTGLVEVSCDVVFDETNGSQVEQVDLDEIGEEQAPCITLRNMSIGDVCPKESEEPPSTQDQPSSSMQASPPTQNKDEAQNDEEQNQEDEPPQDDSNDQGGDTNDQEKEDEEEPRPPHPRVHQAIQRDHPVDTILGDIHKGVTTRSRVAHFCEHYSFVSSIEPHRVEEALQDSDWVVAMQEELNNFTRNGGTKWVFRNKQDEHGVVTRNKARLVAKGYSQVEGLDFGETYAPVARLESIRILLAYATYHGFKLYQMDVKSAFLNGPIKEEVYVEQPPGFEDSEYPNHVYRLSKALYGLKQAPRAWYECLRDFLIANGFKVGKADPTLFTKTLENDLFVCQIYVDDIIFGSTNESTCEEFSRIMTQKFATSMMGGVEVFSRISKSSNSKRGTFISQNESTLKDILAKFGMKGCQTHQDTHGN

SEQ ID NO: 70977 - protein, 452 aa, Zea mays
  Coding DNA Sequence Number=SeqID_29198
  Homolog annotation: Hit_ID=O80846; Match level="QueryCoverage=16%, HitCoverage=16%, E-value=2e-21, Identity=65%"; Hit description =Expressed protein
IVQAPISALCSMQSSGNTPSVVNSSAEGEMIEPAVDEDAQSSLAQQVDTAVPDEKAQLSTDQPSDMEVSEPSLDEHLVQDENSSLGGKDSDGTLNASKPPKPGKAPSPEKMKYWKEHGFSSLIVAAPGHEVERLVADMLPLLSYSAPFAIYHQHLEPLAKCMHSLQLSKMAIGLQLSEPWLREYQDWTGVACTVVVHVSVFIARLLDSTTAQRTTNPNPERRLCLCGTACVFPPPLAQRSFPAPSSSRRRSPHRLRPPSSSRGRAASVAPCPSRSASPRASSTSAMAQGNGGGAPTPLPQLGARATATLSLPERQATTASTADPTPNHPTSIEDGAGGSSSFTPTPSASPTVVGSSSDTGNKRGRKTTSDVWNDFEQLYKQVNGKKVRVLEERRRCLTSEMVETLTCLKDWQMGDDREQHNLENPELQQAFENQYLDGDGDDNQDAQPVAIA

SEQ ID NO: 70978 - protein, 69 aa, Zea mays
  Coding DNA Sequence Number=SeqID_29199
METAEEERGSYIFGYYKRVWKTWAPPKCHFSFGWLHNTDAGLMTDDERRLWKLARTKGLSFLAEPLLEA

SEQ ID NO: 70979 - protein, 191 aa, Zea mays
  Coding DNA Sequence Number=SeqID_29200
  Homolog annotation: Hit_ID=Q2QPW9; Match level="QueryCoverage=40%, HitCoverage=34%, E-value=2e-20, Identity=66%"; Hit description =Mitochondrial import inner membrane translocase subunit Tim17/Tim22/Tim23 family protein, putative, expressed
MVGGGGDPRPEDEPFSDGDATESDTDESPPQGISARRPGATTNPILTRLAVSRNPSPLAAATAAPGVCLLRFAWESAAGSLVGAVVGYETLSVAWAFVLSERVKNPKIQTICIQYVFNLLCCFVILPALHGGELAVSARMGLLAALSNWGWRAYANDQASYGYVQQREDSVVDVYCRPDFHDITIYLQHTP

SEQ ID NO: 70980 - protein, 85 aa, Zea mays
  Coding DNA Sequence Number=SeqID_29201
MPAGGAMASAEEMTSDHGGFYGMLLTLRARSRRFGDWPVRHPGNHAIVVERAPVPSDEDCAERLTHGPKVSALVQMGWAEWAKKE

SEQ ID NO: 70981 - protein, 155 aa, Zea mays
  Coding DNA Sequence Number=SeqID_29202
  Gene Ontology: Mol. function=protein dimerization activity
  Homolog annotation: Hit_ID=Q7G4F1; Match level="QueryCoverage=83%, HitCoverage=13%, E-value=3e-22, Identity=44%"; Hit description=HAT family dimerisation domain containing protein
  Pfam annotation: Domain name=hATC; Domain location=55-135; Score =87.5; E_value=4e-23; Accession=PF05699.5; Description=hAT family dimerisation domain
MEVVTHLFQAYLDSARESTLVAPNEPIATKTLGVNTVVEDFLYEDGDATNCEISELDVYIKEKPFRWVDPSGKGARFDILSWWKVNQVKYHVLSLLAHDVLVVQVSTVASESAFSSSGRIVTKFRSSLEPEEENLADDEDNGKDSDIDDYMEMDI

SEQ ID NO: 70982 - protein, 111 aa, Zea mays
  Coding DNA Sequence Number=SeqID_29203
MSFLHPLLSITDRVAKIHVALVRYMVDMMSTASGTVGDRYPSSPLGGERPLLGGHIPVVPQGRLDWAGKRTASEMCRLKKAMGPYPDRPWIMRNLKEPSDFPTPGALERQG

SEQ ID NO: 70983 - protein, 203 aa, Zea mays
  Coding DNA Sequence Number=SeqID_29204
MSRGKRDKGWPYHADDKRKHVPSPPSEDFGYSEYSEEASSEYDRSPAPVSPMASSKDLDDSMGLSTAAQAYWRSIERAKLGGSDDLEDVSSKKVDSSDSSEEWSGSEGDGGEDDDDSKGGCGGDGAGGDGEGDGDDDDGKGDGGDGKDDNGKGDGDGGKGDSGDEDDGKGDGGDSKGDEGEGDGDGGKGDGGDDKASGIMLLV

SEQ ID NO: 70984 - protein, 200 aa, Zea mays
  Coding DNA Sequence Number=SeqID_29205
MRDYIGMVMVVEDDWEFQPLEVEPFDECVQLLLLLSEDGFAGKDARLTLVLVFLLLDGGSQVPPFVVALWWRGHEVGSFLRLIEVQDRFYRGTARVILKEIMDGRRLAADDSHHGWWWDCFHPLFSGNGGRIEASLECGGTSFEASFLRLGLGRMPRPQAYVIGLVVGNKAEFAGLLGEEVKGAKGDPASRSKCLTLGRC

SEQ ID NO: 70985 - protein, 78 aa, Zea mays
  Coding DNA Sequence Number=SeqID_29206
MPPDLRSEETPRQPRASLTSQSARSVTLGNYGGGDVIKMRDHPAKGDATTSTNAFGDGMLHTVGQLLWAINQRHFDRR

SEQ ID NO: 70986 - protein, 289 aa, Zea mays
  Coding DNA Sequence Number=SeqID_29207
MPRDAFGSRMAPRGGDFSGCVAILGSFAGCAREGDYQEALISCICVVQVREGRDPGGQTGTSVSLGLQVAVAGEVVPRAASVAILEVVLIDSSSSTSALGELWEAGVVGPTFGSKQHRPWILESAPLRDDATLETIECMLTGFGDARAEALRMTHVGVEQLCVGAAHTVKEESELADDKGSQLGETLHGVKSRVGLAESSSREAEVHLVQASSKLERERDATKGECPSLGKERRAPRAPSGCRHGGGVTLGWMVSHFDDIAATVIAEGDTANRSDKELDAIEEQVRPYA

SEQ ID NO: 70987 - protein, 387 aa, Zea mays
  Coding DNA Sequence Number=SeqID_29208
  Gene Ontology: Mol. function=nucleic acid binding; Cellular component= intracellular; Biological process=chromatin modification
  Homolog annotation: Hit_ID=Q6F2N5; Match level="QueryCoverage=95%, HitCoverage=94%, E-value=1e-100, Identity=54%"; Hit description =Putative zinc finger protein
  Pfam annotation: Domain name=zf-C2H2; Domain location=196-218; Score =20.6; E_value=0.0055; Accession=PF00096.16; Description=Zinc finger, C2H2 type
  Pfam annotation: Domain name=zf-C2H2; Domain location=283-305; Score =13.6; E_value=0.35; Accession=PF00096.16; Description=Zinc finger, C2H2 type
  Pfam annotation: Domain name=zf-C2H2; Domain location=309-335; Score =2.3; E_value=5.9; Accession=PF00096.16; Description=Zinc finger, C2H2 type
  Pfam module annotation: Pfam domain module=zf-C2H2::zf-C2H2::zf-C2H2; Domain location=196-218::283-305::309-335
  Subcellular localization annotation: CTP_CleavageSite=32; ConfidenceScore=5.51e-01
MEGTFGVPYYEWLKPRSSSSTPPPSPSSSSTSSTTVSAPSIDQLAAAAADVVVHDERDAMMCLPLLGRLEGRATTRDLGHNPIKEEEAAGVDLSIGLPAPVTGASGYCSEAAPSSPVDEDEDLEEEEDEKARKRDSDECKVEGAGGERYRSEMVVVSGERPADYMRVGGEEGIVGSRGRRYWIPTPAQILVGPVQFICHVCSKTFNRYNNMQMHMWGHGREYRRGPESLKGTQAATLALLKLPCYCCAPGCRNSVAHPRARPLKDFRTLRTHYRRKHGGDKRFGCRRCAKPFAVKGDWRTHEKNCGKRWFCACGSDFKHKRSLNDHARSFGGGGHFYVTPPGHQQAAVPPLLKPKERIVIRFDQAAAPWNGAHAPICMTDRLTAPHV

SEQ ID NO: 70988 - protein, 50 aa, Zea mays
  Coding DNA Sequence Number=SeqID_29209
MASLGYAGHCRDSGTKAFMTEVVWPHESMKGIVSLLGAPKVHLMDVAPKL

SEQ ID NO: 70989 - protein, 327 aa, Zea mays
  Coding DNA Sequence Number=SeqID_29210
  Gene Ontology: Mol. function=nucleotide binding; Cellular component =endoplasmic reticulum; Biological process=small GTPase mediated signal transduction
  Homolog annotation: Hit_ID=O04834; Match level="QueryCoverage=67%, HitCoverage=100%, E-value=9e-87, Identity=75%"; Hit description=GTP -binding protein SAR1A
  Pfam annotation: Domain name=Arf; Domain location=112-326; Score =331.5; E_value=1.4e-96; Accession=PF00025.11; Description=ADP -ribosylation factor family
  Pfam annotation: Domain name=MMR_HSR1; Domain location=128-266; Score= 14.4; E_value=4.7e-05; Accession=PF01926.13; Description=GTPase of unknown function
  Pfam annotation: Domain name=Miro; Domain location=129-266; Score =3.7; E_value=0.0024; Accession=PF08477.3; Description=Miro-like protein
  Pfam module annotation: Pfam domain module=Arf::MMR_HSR1::Miro; Domain location=112-326::128-266::129-266
MVQSKRVYMQHSLASLRLEWSRHPDPAAAVNRHAPILPQQTQHKQTGRDSDPLVTHPRYPLSLGFLSHHQPPSRLSPPPPALGRRDEGRREAPAGRGGKRSSRAGGEMFLWDWFYGVLASLGLWQKEAKILFLGLDNAGKTTLLHMLKDERLVQHQPTQHPTSEELSIGKIKFKAFDLGGHQIARRVWKDYYAKVELDSSVLIIRAVWSDLCSSLAPLIKNVDAVVYLVDAYDKERFAESKKELDALLSDDSLANVPFLILGNKIDIPYAASEEELRYHLGLSNFTTGKGKVNLGDSNVRPLEVFMCSVVRKMGYGDGFKWVSQYIK

SEQ ID NO: 70990 - protein, 218 aa, Zea mays
  Coding DNA Sequence Number=SeqID_29211
LMRAVAVMAGIEAELEGDVAGAYRPSWGFTASSEGAETRANWRLGGRALGIGSAEQGGTSFGEMGRAEEVPRRIRAREKLGAAARRSMGRKMSRDGRAQAPRRHGRESKPEGAAHSSRRGTKRDHGSEPGARPRDAGNRLGARGRGSRGATAREGARPWGEPRLAGRWDFIPRRLGIFSPQSGGRMKTRNGGDLKNIRARKIVDIFEPKFLVIAKEST

SEQ ID NO: 70991 - protein, 403 aa, Zea mays
  Coding DNA Sequence Number=SeqID_29212
  Gene Ontology: Mol. function=RNA-directed DNA polymerase activity; Cellular component=mitochondrion; Biological process=RNA-dependent DNA replication
  Homolog annotation: Hit_ID=Q8S463; Match level="QueryCoverage=98%, HitCoverage=20%, E-value=0.0, Identity=83%"; Hit description =Putative prpol
  Pfam annotation: Domain name=RnaseH; Domain location=1-108; Score= -28.6; E_value=0.027; Accession=PF00075.14; Description=RNase H
MNHVLRLGKHLRYVLRLHFPASNNVAEYEALVNGLRIAIELGVRRLDARGDSQLVIDQVMKNSHCRDPKMEAYCDEVRRLEDKFYGLELNHIARRYNETVDELAKIASGRTTVPSDVFSRDLHQPSVKIDDTPEPEAPSAHPEVPSAQSEAPSARPEAPSVQPEVPSAPEGETLHVEGERSGVTPDQNWQTPYLQYLHRGELPSDRAEARRVARRAKSFVLLGDEKELYHRSPSGILQRCISIAEGQELLREIHSGACGHHAAPRALVGNAFQQGFYWPTAVADATRIVRTCEGCQFYARQTRMPAQALQTIPITWPFAVWGLDLVGPLQKAPGGYTHLLVAIDKFSKWIEVRPLNSIRSEQAVAFFTNIIHRFRVPNSIITDNGTQFTGKKVPGLLRDQPIR

SEQ ID NO: 70992 - protein, 184 aa, Zea mays
  Coding DNA Sequence Number=SeqID_29213
  Subcellular localization annotation: CTP_CleavageSite=42; ConfidenceScore=5.72e-01
PRKGPPQPRLGLARGHGGSPARGRPGPSLARGMAWRRSSPAPSSAVAAGARPRRPTPPAQRPACPRLGAALRPPYPTSRRGLPVRDRGPTRPTPDVLRSPARHESDLVEEPEELAGEAPEQQLVGGGKIRGVAHFAVVPSMGLGVCGSLCQGGYEIDGFGYDYGAGEDEAVEGDFQEFQDYDEF

SEQ ID NO: 70993 - protein, 106 aa, Zea mays
  Coding DNA Sequence Number=SeqID_29214
MAGIEAELEGDVAGAYRPSWGFTASSEGAETRANWRLGGRALGIGSAEQGGRSFEENGRAKECPANSSKEKLERDTRTWGEDEQMATQLQNRMGRKRPKGRHRARA

SEQ ID NO: 70994 - protein, 400 aa, Zea mays
  Coding DNA Sequence Number=SeqID_29215
  Gene Ontology: Mol. function=cytokinin dehydrogenase activity; Cellular component=vacuole; Biological process=electron transport
  Homolog annotation: Hit_ID=Q8LNV6; Match level="QueryCoverage=95%, HitCoverage=74%, E-value=1e-116, Identity=56%"; Hit description =Putative cytokinin oxidase
  Pfam annotation: Domain name=Cytokin-bind; Domain location=241-400; Score=100.4; E_value=5.4e-27; Accession=PF09265.1; Description =Cytokinin dehydrogenase 1, FAD and cy
  Pfam annotation: Domain name=FAD_binding_4; Domain location=56-209; Score=103.0; E_value=8.8e-28; Accession=PF01565.13; Description=FAD binding domain
  Pfam module annotation: Pfam domain module=Cytokin-bind::FAD_binding _4; Domain location=241-400::56-209
MELNKVLYMYAATVALLLCSSANFIQSPSDVLGSVALQDPTPSAAHDFGAVVSDAPVAVMQPGSPADIARLLSALSSAGPDRRPKAAVAARGAGHSLHGQAQARGGIVVETRALPRLVEVVRRGDGDGDGDGGAAYADVGAGALWVEVLEECLRAGLAPRSWTDYLYLTVGGTLSNGGISGQAFKHGPQISNVLQLEVVTGTGEVVTCSPTQSPELFFAVLGGLGQFGIITRARIPLQLAPPKVRWVRAFYDSFETFTKDQELLVSMPELVDYVEGFVVLNEQSLRSSSVAFPAQVDFSPDFASGAGSNKVVDLVSGQLSYLRPHAYSVQVAYLDFLNRVRMEEESLRSRGLWDVPHPWLNLFVPRHGVARFKDLLMDTITQGDFEFEGPVLVYPLLANS

SEQ ID NO: 70995 - protein, 102 aa, Zea mays
  Coding DNA Sequence Number=SeqID_29216
MGICCCIAAGCRSGWVACLAFLACCWMSLEFGGRGVAKLNSLSSFAIATDQAARASTEREAGLVRDGGKRIGQAERVPLADVRDFWRVGMNDHDTGTSSDVG

SEQ ID NO: 70996 - protein, 401 aa, Zea mays
  Coding DNA Sequence Number=SeqID_29217
  Gene Ontology: Mol. function=nucleic acid binding; Cellular component= chromatin; Biological process=DNA integration
  Homolog annotation: Hit_ID=Q7XBC6; Match level="QueryCoverage=94%, HitCoverage=24%, E-value=1e-180, Identity=75%"; Hit description =Putative copia-type pol polyprotein
  Pfam annotation: Domain name=rve; Domain location=123-273; Score =113.1; E_value=7.9e-31; Accession=PF00665.16; Description=Integrase core domain
MPQDNEGYILYPVGYPESKIKKIHSRKSHSGPNHAFMYKGETSSSRQPTRAKLPKKKTPSASNDHAISFKTFDASYVLTNKSGKVYASGGSSWILDSGCTNHMTGEKKMFSSYEKNQDPQRAITFGDGNQDSLDYNLLSVSQLCQMGYNCLFTDEKSHTQETLKGFLRRAQNEFGLRIKKIRSDNGTEFKNSQIEGFLEEEGIKHEFSSPYTPQQNGVVERKNQTLLDMARTMLDEYKTPDRFWAEAVNTACYAINRLYLHRILKKTSYELLTGKKPNISYFRVFGSKCFILVNRGRKSKFAPKTVEGFLLGYDSNTRAYRVFNKSSGLVEVSCDVVFDETNGSQVEQVDLDEIGEEQAPCIALRNMSIGDVCPKESEEPPHAQDQSSSSTQASPCFNMCV

SEQ ID NO: 70997 - protein, 776 aa, Zea mays
  Coding DNA Sequence Number=SeqID_29218
  Gene Ontology: Mol. function=nucleotidyltransferase activity; Biological process=aromatic amino acid family biosynthetic process
  Homolog annotation: Hit_ID=Q6H7J6; Match level="QueryCoverage=98%, HitCoverage=98%, E-value=0.0, Identity=55%"; Hit description =Oligopeptide transporter OPT-like
  Pfam annotation: Domain name=OPT; Domain location=86-747; Score =458.0; E_value=1.2e-134; Accession=PF03169.6; Description=OPT oligopeptide transporter protein
MAFAHEQARGDAAGGATSSVVADASELRQRGSKGHKKPGTVAEDDDKESGRGAGAGAGAAGGCEVTVTDSIERVFEAEPVPPWPQQVTPRALVTSLFLAVLFSVIVMKLSLTTGIIPSLNVSAGLLGFFLLRVWTAAVKDPRRPFTRQENTVVQTCVVSAYGIAFSGTIRYGAADSCSALLPVPSLPLSLSVCLLGTGSGGFGSYLFGMSETIASQAAEENNAGNVKEPRLAWMIGFLFLVSFVGLFALVPLRKTEKSEKSKTDKKSETDKKALGFAFQVMIIDYRLTYPSGTATAHLINGFHTPDGSERAKSQVLTLIKSSVASFFWGFFQWFYTAGDGCGFGQFPALGLAAYQNRFYFDFSTTYVGAGMICPHTVNVSVLLGGILSWGLLWPLIAQKRGSWFDAKLPDSSLEGMQGYRVFIAIAIILGDGLYKFATVLLRTVASIAASTEKRKFFGALPVNGDGSNGAAAPAPPPSFDDARRTEFFTKGPDPGAGRHRRLEWYHVLAVYLMAPVLAFCNAYGMGLTDWSLASTYGKLAIFAFGAWAGKPHSGVLVGLATCGIMMNIVSTAADLMQDLKTGYMTLASPRSMFVSQVVGTAMGCVVGPSVFWLFYRAFPGVGTHRSAYPAPYALIYRNMAILGVDGFSKLPDNCLTLCCVFFVGAIAVDMARDMAPEKVAKFVPLPMAMAIPFYIGPYFAIDMFLGSVVLFAWEWVDKDQANFFAYAVASGLICGDGVWSLPQALLSLFNVKPPICMKFLSRHMNDKVDDFIATLS

SEQ ID NO: 70998 - protein, 424 aa, Zea mays
  Coding DNA Sequence Number=SeqID_29219
  Gene Ontology: Mol. function=nucleotidyltransferase activity; Cellular component=integral to membrane; Biological process=aromatic amino acid family biosynthetic process
  Homolog annotation: Hit_ID=Q6H7J6; Match level="QueryCoverage=99%, HitCoverage=58%, E-value=1e-168, Identity=69%"; Hit description =Oligopeptide transporter OPT-like
  Pfam annotation: Domain name=OPT; Domain location=1-397; Score=107.9; E_value=2.9e-29; Accession=PF03169.6; Description=OPT oligopeptide transporter protein
TYVGVGMICPYIVNVSLLLGGIISWGLMWPLISTKKGSWYPESLPDSSLHGLNGYKVFITIAVILGDGLYNFLKVFGHTIGALISMYWKKHANRLPVSDNMTPPATVETESFDDKRRIELFVKDQIPKTVALGGYVVLAATSIGCLPLIIPQIKWYQIFVAYIFAPILAFCNAYGSGLTDWSLASTYGKLAIFVIGAWAGASHGGVLVGLAACGVMMSIVGTASDLMQDFKTGYLTLASPRSMFISQVIGTAIGCVTAPCVFWLFYKSFDIGASGGAYPAPYAIMYRNMSILGVDGLSLLPKNCLTLCYIFFAVSFTINLIKDLVPKKVAKFIPIPMAAAIPFYLGPYFAIDMFLGSVILFFWEWKNKAEADSFGPAVASGLMCGDGLWALPQAVLSLANVKPPICMKFLSRSLNAKVDTFLGN

SEQ ID NO: 70999 - protein, 309 aa, Zea mays
  Coding DNA Sequence Number=SeqID_29220
  Homolog annotation: Hit_ID=Q9SHS7; Match level="QueryCoverage=16%, HitCoverage=7%, E-value=3e-18, Identity=88%"; Hit description =Serine/threonine-protein phosphatase BSL3
MECRFYFPVKHKGLAGATADVHCYDVSLNKWSRLTPLGEPPSPRAAHVATAVGTMVVIQPLDRALRATKHPTFLLRPRNLLGGSCRLPWAPSWVKEAPDPLFNAALQELRLDAPPNLSPLSDTDVRGSVAANCRLWDDLYVAALLLGGGSRTGCRAPRRSPRTCAAPRAATSCTAPPPAAGAHAARPRADAAGAAVATWTRPPAGAPGGGEIFRFEARFSEVWKLLLILTNLSKEVWFNSALFVQARATGCLILIQFAGESILWPYYLFSRDDGSSRMVSKPKLDLVEDLSSTYYREAADAGAVGISVY

SEQ ID NO: 71000 - protein, 121 aa, Zea mays
  Coding DNA Sequence Number=SeqID_29221
MSGSTACVTRMTPLDVDLDQAAHQLPAHLVEVARVRTRQRIVGLDGVLSASTSATSPSRSLAKSQASRRRRRAKLREGTKGGLSRRGRGWGRSGNTWGQAQVWAEVEEEDDSGHLARARRR

SEQ ID NO: 71001 - protein, 1031 aa, Zea mays
  Coding DNA Sequence Number=SeqID_29222
  Gene Ontology: Mol. function=ATPase activity, coupled to transmembrane movement of substances; Cellular component=integral to membrane; Biological process=transport
  Homolog annotation: Hit_ID=Q6Y3H9; Match level="QueryCoverage=99%, HitCoverage=99%, E-value=0.0, Identity=82%"; Hit description =Multidrug resistance associated protein 2
  Pfam annotation: Domain name=ABC_membrane; Domain location=103-372; Score=90.3; E_value=5.8e-24; Accession=PF00664.13; Description=ABC transporter transmembrane region
  Pfam annotation: Domain name=ABC_tran; Domain location=404-538; Score= 41.5; E_value=3.6e-11; Accession=PF00005.17; Description=ABC transporter
  Pfam annotation: Domain name=ABC_tran; Domain location=818-1001; Score=143.9; E_value=4.2e-40; Accession=PF00005.17; Description=ABC transporter
  Pfam module annotation: Pfam domain module=ABC_membrane::ABC _tran::ABC_tran; Domain location=103-372::404-538::818-1001
MEEPLLDHESSSLSEATGRRSLFSDAGLFSNITFSWMGPLLDLGKRKTLDLHDVPFLDDSDSVHGITPKFKSKIASISATGQYTDVTTVKLVKSLVLTTWKLIIITAVYALIRTVTSYVGPYLIEHFVDYLNQSTRSTKRGYLLVLAFVAAQLMEGLSSRHLLFRSQQLGLRVHSALIAIIYQKGLALSSQSKQGSSSGELINVVNIDAERVGDFNWSLHELWLLPVQISLAMIILYSTLGLASFAALAACVLTMLANIPLGRIEQNYQEKTMNAKDARMSAMSEILQNMHILKLHGWELVFLSKIKEIRKVEMNWVKKYVYTSSMLISVFFCAPAFVAMITFGTCIIIGIPLETGKVLSALATFRQLQGPIHSLPDAISSIIQTKVSLDRICSFLCLEELASDAVTKLPSGSTDISIKVRNGSFSWQKFSQVPTLQDLDLCVQQGTRVAICGTVGSGERGINLSGGQKQRIQIARALYQDADIFLFDDPFSAVDARTGLHLFKECLLEFLASKTVIYVTHHVEFLPSADLILVMRDGKITQSGDYTEILKSGEDLLELVASHKDALSTLDMLERPIENFESTYHPGGNESNLFIAGDKKDQNEEGDIQNGQLVQEEEREKGRVGFIVYWKYIMMAYNGALVPLILLAQIIFQVLQIGCNFWMAWAAPISENVNPPISSLQMVNVYFALAIVSSLCIFIRSHLLVMTGCKTANILFENMHNCIFRAPMSFFDSTPSGRILNRASTDQSTVDTRIFDLMGYLLFPAIEILGTVILMSHVAWQVFIVFVPIITASLWYQVRYAPQLPFVLKGLTCTLLGGKKTGIVGRTGGGKSTLIQALFRIVDPCIGQVFIDGTDICTIGLHDLRTRLSIIPQDPVMFEGTLRTNIDPLGEYSDEKIWEALDSCHLGDEVRKNELKLDSTVTEKGKNWSTGQRQLVCLGRVILKRRKILVLDEATSSVDPITDSLIQKTLKQQFLKCTMITIAHRITSVLDSDKVLLLDNGEIAEHDAPAKLLEDSSSLILQTVSEYNHGI

SEQ ID NO: 71002 - protein, 233 aa, Zea mays
  Coding DNA Sequence Number=SeqID_29223
  Gene Ontology: Mol. function=ATPase activity, coupled to transmembrane movement of substances; Cellular component=integral to membrane; Biological process=transport
  Homolog annotation: Hit_ID=Q6Y3H9; Match level="QueryCoverage=99%, HitCoverage=37%, E-value=2e-55, Identity=91%"; Hit description =Multidrug resistance associated protein 2
  Pfam annotation: Domain name=ABC_tran; Domain location=91-223; Score=- 12.7; E_value=2.3e-06; Accession=PF00005.17; Description=ABC transporter
MSFFDSTPSGRILNRASTDQSTVDTRIFDLMGYLLFPAIEILGTVILMSHVASQVFIVFVPIITASLWYQVRYAPQLPFVLKGLTCTLLGGKKTGIVGRTGGGKSTLIQALFRIVDPCIGQVFIDGTDICTIGLHDLRTRLSIIPQDPVMFEGTLRTNIDPLGEYSDEKIWEALDSCHLGDEVRKNELKLDSTGEIAEHDAPAKLLEDSSSLFSKLVSEYTMGSDKWRMQESS

SEQ ID NO: 71003 - protein, 583 aa, Zea mays
  Coding DNA Sequence Number=SeqID_29224
  Gene Ontology: Mol. function=structural constituent of ribosome; Cellular component=intracellular; Biological process=translation
  Homolog annotation: Hit_ID=Q2QT41; Match level="QueryCoverage=95%, HitCoverage=80%, E-value=3e-63, Identity=31%"; Hit description =Expressed protein
MSTSSAGTLITAAEVSLACKIIGFFNDWALRLATLASLACTLVLMLLADTRRHNKYPLLVLLVWAAYQVQPQVGGYALTHLTISSATTTTTTTTSSAREQQLVAFWAPLLLLHLAGPDNIVAFTLEDGKLSWRKLLDAIWKIIQALYVMLKYIYLCDSGVLRSASSIMVTLGVARYSESVVALLRGNMDNLWGSASAGDDERKPPQSTGEYGAAAAADKNEKELTTLLYSHTQFLACGRRAMADSSVDTDSPNYAIARNIFSQQDPDGVRKVAGMESSLMYDVLYTKVTVVHTWGGYLLRLVSPVGTATASSLFWLYPKDSEETPDVVITYILLAAAFFLDVVWLVRALGSTWAYSFLNARANMWLHHKLLCSGCWLRLRRILVGLDLLWLLGIRKDPSSRRMWSGRVGRYDLLAECTRRPSMVERLCTWLASNLRLEDIWKEYQHSRAQKVLFERIQQRLSGSADRRYSMEDITTLWGQEAVKRRRKRDKLKGIKLGIFGREFQEDVLLWHIGTTIFLARSDRQLLKDKANKYLGAVEALSDYLMFLLAVRPSMLPGLELRKLFEVTCKALKDSGSVLSKGW

SEQ ID NO: 71004 - protein, 173 aa, Zea mays
  Coding DNA Sequence Number=SeqID_29225
MVRHHGQFLRRRQNFAHPGRVLCPPLAPTPSTGAGKPDDGLQLQTLARFYGGGGTHNSLSAEALGFRVRCWHRLGEGRGPKIYRPGLCQREENGGGESEPTASLGPEIPRVLVRFCYGDFDIGALRGVRSRGARAWGEDGLPVDPVRRCPAVSGAARWRDGLARVKTGGRWAE

SEQ ID NO: 71005 - protein, 44 aa, Zea mays
  Coding DNA Sequence Number=SeqID_29226
MASFSVSLLVTIMLLLLLPSGKDLSNVLQWNAIIPCPTDCNALL

SEQ ID NO: 71006 - protein, 89 aa, Zea mays
  Coding DNA Sequence Number=SeqID_29227
MRERMEASLSKSPESRQERRSRGVAEHSRDSERYRSIQGKGTNRGLSWVTGDEAKLTEATDMARARRRPQNKHGTTTDSDDVFAGARDV

SEQ ID NO: 71007 - protein, 95 aa, Zea mays
  Coding DNA Sequence Number=SeqID_29228
  Subcellular localization annotation: CTP_CleavageSite=44; ConfidenceScore=5.57e-01
MDRDLVLTGAKAMRSRGPRTITGSHPSAASVRRCRPSWSRATPRLAMLSRAVTFLGRPYQDPWSYVGSVVAVTPRRGLVLDLGSHGNEQGGELGE

SEQ ID NO: 71008 - protein, 347 aa, Zea mays
  Coding DNA Sequence Number=SeqID_29229
MERRGHCHGGKPPHPHPPPRRVRTRQPSSGSFSASLLDAIYRSLDDGDGADVVVDAARGSVEEKAAATATAQFWWLNKAAAPKPCRQSSSTADRDRRRREAGVARPRHSGSGYASSTASSSDSSAASYSSLSCSSASTVGIESTCRRHGLPPPRVSLSEESVATDAEETTPPPPNSKPKKKARPCFPVARIRPRASVPPPSSGPQPPSSPATFACALKALFSSARLQRKPKAPAPARTTPPPKISHPPRMSTTSAAKAADAPQPSEPTTVRLHPEAEASVVRRRVEELVRGLEELEEDEERSDASSDLFELESLRGAGADELPVYGTTSLVANRAIAQGPGGQLVNK

SEQ ID NO: 71009 - protein, 252 aa, Zea mays
  Coding DNA Sequence Number=SeqID_29230
  Gene Ontology: Biological process=regulation of transcription
  Homolog annotation: Hit_ID=Q8H485; Match level="QueryCoverage=70%, HitCoverage=53%, E-value=2e-36, Identity=47%"; Hit description =Putative tubby related protein
  Pfam annotation: Domain name=F-box; Domain location=48-103; Score =25.2; E_value=0.00024; Accession=PF00646.23; Description=F-box domain
  Pfam annotation: Domain name=Tub; Domain location=83-244; Score= -94.4; E_value=0.0004; Accession=PF01167.8; Description=Tub family
  Pfam module annotation: Pfam domain module=F-box::Tub; Domain location=48-103::83-244
MPFSSMIQEMKGKIGAISLRGVLRFRPGGHAGAGRAPAAEPDEASREGCWAQLPFELLRMVLVRVEDQEPRWPARSAIVVCACVCRCWRAAVKIVRVPEASGKLTFPISQAGLADDGKFLLAARKCRRPACTEYLISLDAKNTSAGSYIGKLRSNFLRKKFTVYDAHPPCARAAVSKGYIPGPAGEDQAAAGRDRAVAGGGAGHAQRFPGPQPRRDGGQEHPKSDVVRKEGGDTRVEIYCAACTSTVMARGM

SEQ ID NO: 71010 - protein, 569 aa, Zea mays
  Coding DNA Sequence Number=SeqID_29231
  Gene Ontology: Mol. function=RNA-directed DNA polymerase activity; Cellular component=intracellular; Biological process=RNA-dependent DNA replication
  Homolog annotation: Hit_ID=UPI00004C1733; Match level="QueryCoverage =99%, HitCoverage=51%, E-value=0.0, Identity=78%"; Hit description =UPI00004C1733 related cluster
  Pfam annotation: Domain name=RnaseH; Domain location=311-438; Score =0.6; E_value=5.1e-05; Accession=PF00075.14; Description=RNase H
MADVCRLHWSEQSMSEGYHQIRMKESDQFATSFITPFGMYCYVTMPFGLRNAGATYQRCMNHVFGEHIGRTVEAYVDDIVVKTRKASDLLSDLEVTFRCLKAKGVKLNPEKCVFGVPRGMLLGFIVSERGIEANPEKIAAIVSMEPIKDLKGVQRVMGCLAALSRFISRLGERGLPLYRLLRKAECFTWTPEAEEALRNLKALLTNAPILVPPAAGEALLIYVTATTQVVSAAIVVERQEEGHALPVPRPVYFVSEVLSETKIRYPQVQKLLYAVILTRRKLRHYFESHPVLADFVAEWVDTQLPTPPIQPELWTMFFDGSLMKIGAGTGLLFISPLGKHLCYVLRLHFLASNNVAEYEALVNGLQIAIELGVRRLDARGDSQLIMDQVMKNSHCRDPKMEAYCDEVRRLEDKFYGLELNHIARRYNETADELAKIASGRTTVPPDVFSRDLHQPSVKIDDTPEPEAPSAQPEVPSAQFEAPSARPEAPSVQPEKAPGGYTHLLVAIDKFSKWIEVRPLNSIRSEQAVAFFTNIIHRFGVSNFIITDNGTQFTGRKFLDFCEDHHIRVD

SEQ ID NO: 71011 - protein, 109 aa, Zea mays
  Coding DNA Sequence Number=SeqID_29232
MALALMVRTIQTTRVNTNYIPLPRQAPVDPVVEEEVPMDLHHLLVENGVILEDNSEEILVTPTLLLESLAFAVGASSSAPQAPAAQAPAPAGDDPDDSGDGGDDEDEEE

SEQ ID NO: 71012 - protein, 41 aa, Zea mays
  Coding DNA Sequence Number=SeqID_29233
MEVGANGVTLIPIANPPVNALHHIISFFRVTIEVGHHRGGR

SEQ ID NO: 71013 - protein, 58 aa, Zea mays
  Coding DNA Sequence Number=SeqID_29234
  Subcellular localization annotation: CTP_CleavageSite=32; ConfidenceScore=5.11e-01
MSVGALARGAKGCKRGASRIFVVQPSCIPSPMGSLVGRSKLGCGLCPALSFKDFRRPG

SEQ ID NO: 71014 - protein, 79 aa, Zea mays
  Coding DNA Sequence Number=SeqID_29235
MELVGGIDDRVTINCSPEVLSPSWTHLYRGGDPYATNSLVHKGSTQTNKKIKERVQKERSKETQVCPGLAHRIVRCASG

SEQ ID NO: 71015 - protein, 105 aa, Zea mays
  Coding DNA Sequence Number=SeqID_29236
MEKHDIHSPIKTMVVVVMENRSFDHVLGRLRRLRPRPQFRGCQWVDLRFLATYTGLAIGALSELPYRRPAVVSDDLLAEPVTPVQAGLAGNGTAALGFSLTLLAQ

SEQ ID NO: 71016 - protein, 356 aa, Zea mays
  Coding DNA Sequence Number=SeqID_29237
  Gene Ontology: Mol. function=porin activity; Cellular component =integral to membrane
  Homolog annotation: Hit_ID=Q67UZ2; Match level="QueryCoverage=85%, HitCoverage=67%, E-value=2e-93, Identity=60%"; Hit description =Putative nucleoporin p58; nucleoporin p45
DKVRDYRDECERLDQCSRLYDSSISNVNFELDASRIVQELGGTTTVMEREKASIQELMNVVNEMMWNTEFAIRSYLMLRPRFTRTGAGVANGGSSNPSAGAPPNQPVLDFYSGVPKRPSIFMQHTVNRFECYLAECCKWIGELEQLVQIETNKISSDSLDSLPKVMSNVHDYFIYVASKVENLHQYVESMKAEYLNEQRRNGNGSNPFLEANRREAAKQEAAARRVHPTLHLPAPAQPMPQIAAPATSQPQQPSFPSAATSSSAFSTFSTPASAPSSSSLFATPTTPAPSANLFGASGSAQLTTPFGTASTPTLASTPAPGFGTSTTSLGGTSLFSTPFGGGATASGSSFGGASKL

SEQ ID NO: 71017 - protein, 213 aa, Zea mays
  Coding DNA Sequence Number=SeqID_29238
  Gene Ontology: Mol. function=serine-type peptidase activity; Cellular component=integral to membrane; Biological process=proteolysis
  Homolog annotation: Hit_ID=Q67UZ3; Match level="QueryCoverage=94%, HitCoverage=45%, E-value=3e-94, Identity=83%"; Hit description =Chloroplast thylakoidal processing peptidase-like protein
  Pfam annotation: Domain name=Peptidase_S24; Domain location=40-117; Score=58.8; E_value=1.8e-14; Accession=PF00717.13; Description =Peptidase family S24
MSRSNWLSRWVSSCSDDAKTAFAAVTVPLLYGSSLAEPKSIPSKSMYPTFDVGDRILAEKVSYIFRDPEISDIVIFRAPPGLQVYGYSSGDVFIKRVVAKGGDYVEVRDGKLFVNGVVQDEDFVLEPHNYEMEPVVRDVRHIFVGILAFVSLVPEGYVFVLGDNRNNSFDSHNWGPLPVRNIVGRSILRYWPPSKINDTIYEPDVSRLTVPSS

SEQ ID NO: 71018 - protein, 92 aa, Zea mays
  Coding DNA Sequence Number=SeqID_29239
MRTSPQLSPTPLNLERCRRGAWVSAAAVVLQAVGCSAFSGKALRASPIYHGRTFKTHYAWGVLPSSEFFIGAGFVPSSAPHRGHGCRYTKHW

SEQ ID NO: 71019 - protein, 517 aa, Zea mays
  Coding DNA Sequence Number=SeqID_29240
  Gene Ontology: Mol. function=nucleic acid binding; Cellular component= nucleus
  Homolog annotation: Hit_ID=Q5NAV3; Match level="QueryCoverage=80%, HitCoverage=87%, E-value=1e-161, Identity=63%"; Hit description=Zinc finger CCCH domain-containing protein ZFN-like 3
  Pfam annotation: Domain name=zf-CCCH; Domain location=146-172; Score =46.1; E_value=1.2e-10; Accession=PF00642.15; Description=Zinc finger C-x8-C-x5-C-x3-H type (and similar)
  Pfam annotation: Domain name=zf-CCCH; Domain location=190-216; Score =41.8; E_value=2.4e-09; Accession=PF00642.15; Description=Zinc finger C-x8-C-x5-C-x3-H type (and similar)
  Pfam annotation: Domain name=zf-CCCH; Domain location=344-370; Score =46.3; E_value=1e-10; Accession=PF00642.15; Description=Zinc finger C- x8-C-x5-C-x3-H type (and similar)
  Pfam annotation: Domain name=zf-CCCH; Domain location=402-428; Score =30.1; E_value=7.9e-06; Accession=PF00642.15; Description=Zinc finger C-x8-C-x5-C-x3-H type (and similar)
  Pfam annotation: Domain name=zf-CCCH; Domain location=99-125; Score =43.6; E_value=6.8e-10; Accession=PF00642.15; Description=Zinc finger C-x8-C-x5-C-x3-H type (and similar)
  Pfam module annotation: Pfam domain module=zf-CCCH::zf-CCCH::zf -CCCH::zf-CCCH::zf-CCCH; Domain location=146-172::190-216::344 -370::402-428::99-125
MEPYAATKGGESDAGTGLEGTRAARPDLLRAIGVSPLPWGFRRFAFARSLARVLDLPCDCLVPALANRSFGVDAFAESMRKLGLGEDDEAGEEKLPERPGEADCTYYLRTGACGYGERCRYNHPRDRPAPVNGVGKTTGMEYPERPGQPLCEYYAKNGTCKFGSNCKFDHPRESGFVPVALNNSGFPLRLGEKECSYYMKTGHCKFGGTCKFHHPELGFLTETPGMYPPVQPSPISSPHPYPHHSNWQMGRPAVVPGSFLPGPYPPMMLPPTVMPMQGWNPYVSPMNQTTPAGGQQAVPAGPSYGLSHQEPTSAVTYGSHYAQLYSSSGTSSSNIQEYVFPERPGQPECEHYMKTGTCKYGAACKYHHPQYFSGPKSNCILSPLGLPLRPHDRIVAPVPLEMGSQRCAYYAHHGFCKFGPTCKFDHPMGTPNYSLPAPSLTDVPVAPYPHTFSVTPIAPYLLPPDPRPQYTLAKDPSAYPPQAPGTTYGPVGAISKVYARHTLIRSPTSGAAGMQAS

SEQ ID NO: 71020 - protein, 124 aa, Zea mays
  Coding DNA Sequence Number=SeqID_29241
MGQEEEQLVVNEFGSNAAGHGRTESAIGAITPPATLRTPGVIDQINVDASRMAIHQEEEQLNTMRTIGKHEQDTPMVLQSYVLACGLATEARWNIGPILAQLIFSFLYKFKQKLCQQAGFLQQA

SEQ ID NO: 71021 - protein, 193 aa, Zea mays
  Coding DNA Sequence Number=SeqID_29242
MVPTADLFLPLANPTLLGVGGAKEKKGRGLAELHRMRRCEGGSAELVFARWLSWPVLGRTAMAAWPRRLLRRKREVTGVALSPAETSSESVAPHCALLVTTTSPRERRMTLTTWGQPSVPGGMTRSAPCSCRVVPRNIGGNSKERKSKDVERRAFGKRLQRSTSGVLDMAMEWTTAEAKAGNTTDVGGFPACK

SEQ ID NO: 71022 - protein, 90 aa, Zea mays
  Coding DNA Sequence Number=SeqID_29243
  Gene Ontology: Mol. function=3'-5' exonuclease activity; Cellular component=intracellular
  Homolog annotation: Hit_ID=Q2V9B5; Match level="QueryCoverage=90%, HitCoverage=24%, E-value=6e-26, Identity=63%"; Hit description=3'-5' exonuclease domain-containing protein-like
  Pfam annotation: Domain name=KH_1; Domain location=23-83; Score=41.6; E_value=2.8e-09; Accession=PF00013.19; Description=KH domain
MYDCYCNTDDIEADVYVPEADILSVLDVPPGKMGRVIGRKGSTIMAVKECCKVEIHIGGAKGPPDRVFIIGPEKEVRKAEAIFRGRMLEF

SEQ ID NO: 71023 - protein, 55 aa, Zea mays
  Coding DNA Sequence Number=SeqID_29244
MTPYLWPHYPTSPTTRNWNHGGEPPRNLVGGEEGSDPPEIVAPEVGQEPDLSFAL

SEQ ID NO: 71024 - protein, 110 aa, Zea mays
  Coding DNA Sequence Number=SeqID_29245
MGNAWELSTRLPNWELGTLRDPTWTLGKLECPDTSTKIVVDGSLHSISHLNFCITLVVCFTFLAYLARLHNCLMMFGGNWEFNDHPESLWVTQLKVYMARKTKNHLIKSS

SEQ ID NO: 71025 - protein, 121 aa, Zea mays
  Coding DNA Sequence Number=SeqID_29246
  Homolog annotation: Hit_ID=Q9AYP0; Match level="QueryCoverage=42%, HitCoverage=89%, E-value=2e-21, Identity=88%"; Hit description =Mitochondrial ATP synthase 6 KD subunit
MALVMDTIVDKEMINVILQRDRCIHERRSKETPIPVAPIRSSSHQKRSRRREEGDREQPEPEAERMKTFDPWPVFFRREWKRNWPFLTGFAITGFIITKMTANFTEEDLKNSKFVQEHKKR

SEQ ID NO: 71026 - protein, 159 aa, Zea mays
  Coding DNA Sequence Number=SeqID_29247
  Homolog annotation: Hit_ID=Q6Z0Z4; Match level="QueryCoverage=39%, HitCoverage=12%, E-value=1e-20, Identity=77%"; Hit description =Putative HGA1
MEATAEALTQEEVLRRCRRRAARLAGVYCRIYWAMAKEVRARHRQYVWHLARSPLEAEQPSAPLEVSSRRRSGSHQSRHWCQGAPDLGVRAEGGMKSSLRSRQEPRRVSNGVIIGAMLLSLCVLSFVKARYCATPLGKAEDQLEEQMNASIRMQPEESS

SEQ ID NO: 71027 - protein, 276 aa, Zea mays
  Coding DNA Sequence Number=SeqID_29248
  Gene Ontology: Mol. function=transferase activity
  Homolog annotation: Hit_ID=Q6Z0Z4; Match level="QueryCoverage=98%, HitCoverage=58%, E-value=2e-87, Identity=56%"; Hit description =Putative HGA1
  Pfam annotation: Domain name=DUF563; Domain location=1-132; Score= -105.0; E_value=0.014; Accession=PF04577.5; Description=Protein of unknown function (DUF563)
MYHDYTDVLVPLFITTHQFRERVSGMKPCSPRHDVIDVDNDREVHCFPRIVVGATFHRDMGVDPRRSPGHISVVDLKRALRAAFRLKREAASRGGVPQRRHGARQTAAAHHLPVWLTLVPERAGDGARRGRRRVRGAGGGARPATDMATFVALVNSADSMVGVHGAGLTNMVFLPCGVVLVQVVPFGGLEWLTGVTFKEPASDMEVSYMDYNVRLEESSLVDQYPRGHQVLTDPYAVHRQGWDALKTAYLDKQNIQMDLDRFRATLREAMVRLPSP

SEQ ID NO: 71028 - protein, 437 aa, Zea mays
  Coding DNA Sequence Number=SeqID_29249
  Gene Ontology: Mol. function=binding; Cellular component=centrosome; Biological process=aromatic amino acid family biosynthetic process
  Homolog annotation: Hit_ID=Q5N749; Match level="QueryCoverage=90%, HitCoverage=19%, E-value=1e-179, Identity=83%"; Hit description =Putative microtubule bundling polypeptide TMBP200
  Pfam annotation: Domain name=HEAT; Domain location=208-244; Score =12.8; E_value=1.2; Accession=PF02985.12; Description=HEAT repeat
  Pfam annotation: Domain name=HEAT; Domain location=328-364; Score =27.3; E_value=5.3e-05; Accession=PF02985.12; Description=HEAT repeat
  Pfam annotation: Domain name=HEAT; Domain location=50-87; Score=3.5; E_value=16; Accession=PF02985.12; Description=HEAT repeat
  Pfam module annotation: Pfam domain module=HEAT::HEAT::HEAT; Domain location=208-244::328-364::50-87
MGTMKESMEKAVKNKVAKAVVPAIDVMFQALRYVPGWFFFGSLICEFGTKVVPPKKILKMLPELFDHPDQNVRASSKGLTLELCRWIGKDPVKSILFEKMRDTMKKELEAELANVSGFAKPTRKIRSEQEKELEEEAVPETSGANTSEEAVADAPVEIDEYDLVDPVDILTPLEKSGFWDGVKATKWSERRDAVAELTKLASAKKIAPGDFHEICRTLKKLITDVNLAVSVEATQAIGNLARGLRAHFSGNARMLLSVLLEKLKEKKPTMTEALSQTLQAMHKSGCFTLIDVIEDVRVAVKNKVPLVRSSTLTWVAFCIETSNKATVLKLHKEYVPICMECLNDGTPEVRDASFSVLTAIAKMVGMKPLERSLEKLDDVRKKKLSDMIGSSSDTVLSSGTVLYEDVCNLSAFFSQVPIYSSYAALFFLKLPFVIVFC

SEQ ID NO: 71029 - protein, 159 aa, Zea mays
  Coding DNA Sequence Number=SeqID_29250
  Homolog annotation: Hit_ID=Q5N749; Match level="QueryCoverage=77%, HitCoverage=6%, E-value=4e-54, Identity=83%"; Hit description =Putative microtubule bundling polypeptide TMBP200
PAMSTEDEKLLKEAKKLPWDERLQHKNWKVRNDANIDLAALCDSITDPKDARLREFDSNAPVQEKALDALLAFQRAADADASRYAKEVCDAIVAKCLTGRPKTVEKAQAAFLLWVELEAAEVFLSSELELWNRRAGRGAHVTRAGEQLPVFGSSGIGDH

SEQ ID NO: 71030 - protein, 307 aa, Zea mays
  Coding DNA Sequence Number=SeqID_29251
  Gene Ontology: Mol. function=metal ion binding; Cellular component =intracellular; Biological process=protein kinase C activation
  Homolog annotation: Hit_ID=Q1T3L5; Match level="QueryCoverage=79%, HitCoverage=66%, E-value=1e-73, Identity=39%"; Hit description =Tetratricopeptide-like helical
  Pfam annotation: Domain name=PPR; Domain location=11-45; Score=5.4; E_ value=1.7; Accession=PF01535.11; Description=PPR repeat
  Pfam annotation: Domain name=PPR; Domain location=112-146; Score=2.3; E_value=4; Accession=PF01535.11; Description=PPR repeat
  Pfam annotation: Domain name=PPR; Domain location=148-181; Score=9.0; E_value=0.63; Accession=PF01535.11; Description=PPR repeat
  Pfam annotation: Domain name=PPR; Domain location=77-111; Score=36.5; E_value=9e-08; Accession=PF01535.11; Description=PPR repeat
  Pfam module annotation: Pfam domain module=PPR::PPR::PPR::PPR; Domain location=11-45::112-146::148-181::77-111
MQRAKVKPDAVVIASVLSACAHLGALDLGKWIHDYVRRNNIKADTIMENSLIDMFAKCGCVQEALQVFTDMEEKDTLSWNSIILGLANNGFEDEALDIFHSMLTEGPRPNEVTFLGVLIACANRQLVEEGLDHFERMKSVHNLEPQMKHYGCVVDILSRAGQLEKAVSFISEMPLAPDPVVWRILLGACRTHGNVAVAEMATKKLSELDPGNSADSMLLSNIYASADRWSDAMNVRRWTADNAVGESELVPDRDDSVLELGIVRKLTTSCAKAGRSISLALEAFPCDIQEQLNRFMDGRLLQLPYLA

SEQ ID NO: 71031 - protein, 904 aa, Zea mays
  Coding DNA Sequence Number=SeqID_29252
  Gene Ontology: Mol. function=zinc ion binding; Cellular component =intracellular
  Homolog annotation: Hit_ID=Q5N755; Match level="QueryCoverage=91%, HitCoverage=91%, E-value=0.0, Identity=62%"; Hit description =Putative ZnF_RBZ domain protein
  Pfam annotation: Domain name=zf-RanBP; Domain location=260-289; Score= 29.7; E_value=1e-05; Accession=PF00641.9; Description=Zn-finger in Ran binding protein and others
  Pfam annotation: Domain name=zf-RanBP; Domain location=292-322; Score= 18.5; E_value=0.0052; Accession=PF00641.9; Description=Zn-finger in Ran binding protein and others
  Pfam module annotation: Pfam domain module=zf-RanBP::zf-RanBP; Domain location=260-289::292-322
  Subcellular localization annotation: CTP_CleavageSite=90; ConfidenceScore=5.69e-01
MGGTSKLLSSLLLTSSPLRLRPTTAAAAALFLTPPAAASRRLLLLSSPSPPRTLSTSSSSLPHGSSQASPAPSPRAPFPEWSRLVDRLAAAGYGSGAPFAADDLAIALASGCGLSDGALAAVSTCLAFARDRPDLLSSLPRKDVKILVANAAPSLFKDGEASALRLRRYLAGEETDVIVSDRAETVDIVRYLLSYTYGSSVSDSEHKKLIDSAVRNIMAELVSFSGLSQSSTFEESTPNQICSSQLERFSRPPGQNIEMKRGDWICTRCSFMNFARNVRCLECNEQRPKKMLTGGEWECPQCDFYNYGRNMSCLKCDCKRPATIPSIPASVGSGLGGVAQLLSVTSAGKSEIERKLAESDKKAERWLSKVSQLQDSADLSSLAEDEDFPEIMPMRKGVNKFVVSMHKTPLERRLTNAQYRSNNSPPASDPKISQTLDRILGRSTPTTAPNNQSVTSDAPTEALKKSTDHLGGIDPVPFVPLSADLFAKPQTNNGQSNQNGKINAEDDSSMVNNAVPLPERQSTGSLDTAEIWSEKVAEPDNAKDSPSAVSDENFPEIMPIRKGENRFVVSKKKDRSLTSQQYKRRSILEQADSSDFVPFVPFPPGYFAKKDTPIESTTDTGIVPEGSQPKGNLNNGNWNINYNKHQSQSHGAQCRPSGAAYTGTRIMGNSQGNYNGSNGESTYHGANFEQEPYNKGYRNNNYWSSDNNNSNNAWSNNSNFNNNNDWSGNNSYNSSTENGNSSYNSSHGYNYNGTWSDSNHSAWSSSSSNNNQSGSFVDNNSVTSSRSSMNDANHVSHSSGYGGSSNRGYTGKSLEGSAVKDPDPLDMSEEAKAERWFRRAAQIKDISELANIPDEDFPEIMPMRKGVNRFVVSKRKTPLERRLTSPQYRRNLPIVRSETDEDAS

SEQ ID NO: 71032 - protein, 114 aa, Zea mays
  Coding DNA Sequence Number=SeqID_29253
  Subcellular localization annotation: CTP_CleavageSite=45; ConfidenceScore=5.03e-01
MTRLFRCGITQVVVLSAPFHSMAKLCWIRSWAPTSLRNLKERTTRCGSGPPLIVSFLNHETDSDALNLNFRSGQNGNENMRYEEKNVRLGRVVWQLQSHPSEGSGKETNRSSTC

SEQ ID NO: 71033 - protein, 461 aa, Zea mays
  Coding DNA Sequence Number=SeqID_29254
  Gene Ontology: Mol. function=transferase activity; Cellular component= intracellular; Biological process=protein kinase C activation
  Homolog annotation: Hit_ID=Q1RWB4; Match level="QueryCoverage=90%, HitCoverage=91%, E-value=3e-98, Identity=42%"; Hit description =Tetratricopeptide-like helical
  Pfam annotation: Domain name=PPR; Domain location=172-206; Score =31.7; E_value=2.5e-06; Accession=PF01535.11; Description=PPR repeat
  Pfam annotation: Domain name=PPR; Domain location=274-308; Score =50.7; E_value=4.7e-12; Accession=PF01535.11; Description=PPR repeat
  Pfam annotation: Domain name=PPR; Domain location=309-342; Score =12.8; E_value=0.23; Accession=PF01535.11; Description=PPR repeat
  Pfam annotation: Domain name=PPR; Domain location=94-128; Score=0.8; E_value=5.9; Accession=PF01535.11; Description=PPR repeat
  Pfam module annotation: Pfam domain module=PPR::PPR::PPR::PPR; Domain location=172-206::274-308::309-342::94-128
MTWLHPFHLLRQRSPPFRPVSNPRLRDLIALLLRHQDRRSHLLQIHTQFIAHQVFDQSPAPWRAFLKAYSHGPFPLEALHLFKHARQHLADDTFVFTFVLKACAGLGWHRAGAQLHALVVQKGCLVEARKVFDEMPVKNVVSWNVMITGFAGWGEVEYARLLFDQMPCRNVVSWTGLIDGYTRACLYAEALTLLRHMMAGGISPSEITVLAVIPAISNLGGILMGEMLNGYCEKKGIMSDARVGNSLIDLYAKIGSVQNSLKVFDEMLDRRNLVSWTSIISGFAMHGLSVEALELFAEMRRAGIKPNRITFLSVINACSHGGLVEQGLAFFKSMVYEYNIDPEIKHFGCIIDMLGRAGRLCEAEQIIEGLPMEVNVTVWRILLGCCSKYGEVAMGERAIKMISDLERESGGDFAVLSNVLTELGRFSDAEQARKLLDQRKIVKEAGEVNLMSSSCSSLTSN

SEQ ID NO: 71034 - protein, 298 aa, Zea mays
  Coding DNA Sequence Number=SeqID_29255
  Gene Ontology: Mol. function=DNA binding; Cellular component=nucleus; Biological process=regulation of transcription, DNA-dependent
  Homolog annotation: Hit_ID=Q52QH4; Match level="QueryCoverage=99%, HitCoverage=99%, E-value=1e-105, Identity=62%"; Hit description=NAC domain-containing protein 68
  Pfam annotation: Domain name=NAM; Domain location=19-132; Score =209.4; E_value=8.3e-60; Accession=PF02365.6; Description=No apical meristem (NAM) protein
MVAAAEGSGRRDAEAELNLPPGFRKVARQPVPVPIIAETDLYKFNPWDLPEKALFGRKEWYFFTPRDRKYPNGSRPNRTAGKGYWKATGADKSIVPMGSTRAAGIKKALVFYSGKAPRGVKTDWIMHEYRVAQADHTLGKKGSQKLDEWVLCRLYNKRNNWDKVKVEEQELEAAPRRQHHLQSAEDSMSNSFQTHDSDIDNVFELQNCYGNNMVQGQAMTPRNDIGVVTVKEDNDWFTDMNLDDLQASYNMAHTVNPNPAQTANLVAGQGHGYLQGYGYLQYMNSPSMKMWQTILPPF

SEQ ID NO: 71035 - protein, 336 aa, Zea mays
  Coding DNA Sequence Number=SeqID_29256
  Gene Ontology: Mol. function=protein-tyrosine kinase activity; Cellular component=membrane; Biological process=protein amino acid phosphorylation
  Homolog annotation: Hit_ID=Q6ASV8; Match level="QueryCoverage=91%, HitCoverage=90%, E-value=1e-132, Identity=76%"; Hit description =Putative Pto kinase interactor
  Pfam annotation: Domain name=Pkinase; Domain location=48-310; Score =42.3; E_value=4.4e-11; Accession=PF00069.15; Description=Protein kinase domain
  Pfam annotation: Domain name=Pkinase_Tyr; Domain location=36-310; Score=89.8; E_value=8.4e-24; Accession=PF07714.7; Description =Protein tyrosine kinase
  Pfam module annotation: Pfam domain module=Pkinase::Pkinase_Tyr; Domain location=48-310::36-310
MVTYDGAAQARGPSMPRTGGAAASAAKVLPIDVPAVALSELNRLTGNFGDRALVGEGSYGRVYRATLATGEVAAVKMFDNGSSSGQSEAEFCEQLLGYCLELNNRIVLYQFATIGSLYDILHGKKGVKGAAPGPVLTWIQRARIAYGAARGLEHLHEKARPSIVHRDVRSSNVLVFGGHDAKIGDFNLTNQSPDSATRLHSTKVLGTFGYHAPEYAMTGQLTHKSDVYSFGVVLLELLTGRKPVDHTMPKGQQSLATPRLSEDKVKQCVDPKLKDDYPPKAVAKLAAVAALCVQYEADFRPNMTIVVKALQPLNVASNGLLGLFNHESINRACHCV

SEQ ID NO: 71036 - protein, 71 aa, Zea mays
  Coding DNA Sequence Number=SeqID_29257
  Gene Ontology: Mol. function=peptidase activity; Biological process =lipid transport
  Homolog annotation: Hit_ID=Q852G9; Match level="QueryCoverage=63%, HitCoverage=41%, E-value=9e-09, Identity=64%"; Hit description =Putative root-specific protein
  Subcellular localization annotation: CTP_CleavageSite=30; ConfidenceScore=5.06e-01
VTACSVYTHITATLLGATLLLLASPAVVVRAQQRGGNPCPTSAVADLKVCADVLVLLKLRINVPQGKERRP

SEQ ID NO: 71037 - protein, 101 aa, Zea mays
  Coding DNA Sequence Number=SeqID_29258
MSPHTPAVAPSSHGASPSYKSGTTTDCHEEEKAGGASATPPRSSYGKKLSSLRNGKADGRHASASDGGGDDAWDEGSAAPASTAKRRPEMKEGKRRDKTEL

SEQ ID NO: 71038 - protein, 189 aa, Zea mays
  Coding DNA Sequence Number=SeqID_29259
  Homolog annotation: Hit_ID=Q10FE9; Match level="QueryCoverage=32%, HitCoverage=15%, E-value=1e-17, Identity=71%"; Hit description =Mannosyltransferase family protein, putative, expressed
MAKVPFLHVLPTAGRPREQPQEETNREANANASISSNPLLSSSIMAIISSPAGNRRAKVRLRIRLPARVRGCQDAHLDVDYLVFSDAAASVTGGGSPFARATYLCSPILAFLLLGNSLVHDAWGNLLFSAASSLPCSRIAAVFRTVCLPICCVPSSKEEFGKMGRFILPLFIIHRFELGSSKGSLKSAR

SEQ ID NO: 71039 - protein, 353 aa, Zea mays
  Coding DNA Sequence Number=SeqID_29260
  Gene Ontology: Mol. function=nucleoside-triphosphatase activity; Cellular component=membrane; Biological process=transport
  Homolog annotation: Hit_ID=Q10FF1; Match level="QueryCoverage=99%, HitCoverage=100%, E-value=1e-141, Identity=70%"; Hit description=ABC transporter family protein, expressed
  Pfam annotation: Domain name=ABC_tran; Domain location=143-319; Score= 112.2; E_value=1.5e-30; Accession=PF00005.17; Description=ABC transporter
  Subcellular localization annotation: CTP_CleavageSite=72; ConfidenceScore=5.23e-01
MASPSIPAALRHPHLPADGGLLFHSSGDPTARSSLSFRQNFLSQRLFFPCCHIYFLAPHRETFWIGDMTMRRCQTGPGPVLAARSPGLGNVDNLHESSSLSRSWDLNRQIDDDRDVLIECRDVHKSFGEKQVLRGVSFKIRHGEAVGIIGPSGTGKSTILKVMAGLLAPDKVFQSAALFDSLTVRENVGFLLYENSSLPEDRIGKLVTETLAAVGLKGVEDRMPSELSGGMKKRVALARSIIFDDTKDVVEPEVLLYDEPTAGLDPIASTVVEDLIRSVHMTGRDALGKPGKIASYVVVTHQHSTIRRAVDRLLFLHEGKVVWEGMTHEFTTSANPIVQQFASGSLDGPIKYF

SEQ ID NO: 71040 - protein, 57 aa, Zea mays
  Coding DNA Sequence Number=SeqID_29261
  Gene Ontology: Mol. function=nucleotide binding; Cellular component =intracellular; Biological process=small GTPase mediated signal transduction
  Homolog annotation: Hit_ID=P40940; Match level="QueryCoverage=93%, HitCoverage=37%, E-value=3e-19, Identity=74%"; Hit description=ADP -ribosylation factor 3
  Pfam annotation: Domain name=Arf; Domain location=4-56; Score=-70.7; E_value=0.00026; Accession=PF00025.11; Description=ADP-ribosylation factor family
MGIVFTRLFSSVFGNREARILVLGLDNAGKTTILSIGFNVETVQYNNIKFQVWDLVF

SEQ ID NO: 71041 - protein, 310 aa, Zea mays
  Coding DNA Sequence Number=SeqID_29262
  Homolog annotation: Hit_ID=P40940; Match level="QueryCoverage=14%, HitCoverage=24%, E-value=2e-16, Identity=90%"; Hit description=ADP -ribosylation factor 3
  Pfam annotation: Domain name=Arf; Domain location=207-308; Score= -82.8; E_value=0.0022; Accession=PF00025.11; Description=ADP -ribosylation factor family
  Subcellular localization annotation: CTP_CleavageSite=31; ConfidenceScore=5.41e-01
MDRAFTQGSQCWGVRRPQQGKRRPWTSPSPRLSSKKSPSTNIKPRPRDNAGYLRQRRCPDIPPKPSQRDIDMLATAKLCWMPPPPAGHTESGTTLRRVPHCHRPVSLHPLTTTRRPRAHSPCNLSPPEPPGAPCKRAAKSSQRASQPAGRWHCRPALAPKLTPCPVTARATAHSGAATGRVGRGHLAGEHATAERHAHAASGLVRPAPVRHLRRPRGRTAPPRPPRPCPERGSGRSRRPTSGCLAATVLGVRASIPVCLGVDLPGALDDAAITESLELHKIKSRQWAIFKTSAIKGEGLFEGLDWKKICR

SEQ ID NO: 71042 - protein, 74 aa, Zea mays
  Coding DNA Sequence Number=SeqID_29263
  Subcellular localization annotation: CTP_CleavageSite=21; ConfidenceScore=5.27e-01
MSAAALPDNIATFSKLWHGSVQSTKTKSITRVRGCGNVDQRDVNGPVDGWPWRDVARRDLGRFGGKRKFASYGG

SEQ ID NO: 71043 - protein, 205 aa, Zea mays
  Coding DNA Sequence Number=SeqID_29264
  Gene Ontology: Mol. function=structural constituent of ribosome; Cellular component=ribonucleoprotein complex; Biological process =translation
  Homolog annotation: Hit_ID=Q9LX88; Match level="QueryCoverage=50%, HitCoverage=79%, E-value=2e-44, Identity=83%"; Hit description=40S ribosomal protein S15a-4
  Pfam annotation: Domain name=Ribosomal_S8; Domain location=5-114; Score=64.9; E_value=2.6e-16; Accession=PF00410.9; Description =Ribosomal protein S8
MVRVSVLNDALKSMYNAEKRGKRQVMIRPSSKVIIKFMTVMQRHGYIGEFDYVDDHRARKLVVELNDRLNKCGVISPWFDFGIKKIDGWTARLLPSSQFGYIVLQPCIELCLCAQHPVTGRRTSSSPWRAPLDHRLQQPLLCPTLCAAGGIQCADQTGRKKTLWSLIIQSRARIRLGRNPWLNKSCALVVDPTTDLRQYPFGQSF

SEQ ID NO: 71044 - protein, 556 aa, Zea mays
  Coding DNA Sequence Number=SeqID_29265
  Homolog annotation: Hit_ID=Q2QXR0; Match level="QueryCoverage=96%, HitCoverage=95%, E-value=7e-80, Identity=40%"; Hit description =Expressed protein
  Pfam annotation: Domain name=DUF668; Domain location=389-476; Score =86.6; E_value=7.5e-23; Accession=PF05003.3; Description=Protein of unknown function (DUF668)
MRKLSAPRGGGEKLGVLGFEVAALMSRAAGLWRALDDHHLARLRGEAIRLEGVRRLVADDDAALLALALAEMAAACRDLSRAVARLSARCADPLLRRFDALFAALLKRRAADPHGLRYAARAKMDRKARKMQRLVAATAHLCHELDVLADLEQQQQQQAGTGAGTSNSRAERARRVARQRQEVERIRAASLWPRTFDYAVRLLARSLFTIVARIIEVFDLDYAVDDDEEEEEETASSRASRLSWGSSFVSGSMHMVYPSDVVVAGADAPRTALRRARSGKTAAAATGSKSHMSRSKSLRQQLRWPAAAGKHLIGCVVVTGSSRPQGRDGWIPQSFSYVSDSDDHSSGAGIMSFHSLGDGRQPPPPPPPTTTTSVFDASRDALAHPPEASLGGAGLALHYANLIMFIDRLAAASHHIRADERDALYGMLTGSLRASVGARLRPSFAAAAPRADPALWADTVRRTLAWLAPLARNTARWQAERSFGQRSVAPCGSGGGGAAAVLLLQTLHFADRGKTEAAVTDLLVGLNYVWRDGAAELDAKLGLGSESAAGRRRRLR

SEQ ID NO: 71045 - protein, 569 aa, Zea mays
  Coding DNA Sequence Number=SeqID_29266
  Gene Ontology: Mol. function=zinc ion binding; Biological process =proteolysis
  Homolog annotation: Hit_ID=Q53PX0; Match level="QueryCoverage=94%, HitCoverage=27%, E-value=1e-177, Identity=59%"; Hit description =Expressed protein
  Pfam annotation: Domain name=PHD; Domain location=227-277; Score =17.8; E_value=0.00095; Accession=PF00628.19; Description=PHD-finger
MSCSLDYFVSKFALVIFNKKNCLISHISDTYTLLLSKNNFQKRNLMLTSYNTNASYIQPQQKGNGQQPVTALRVKFKVSSSHSGEPAPKVEAQLVASVKAQPSAKVEAQSSMNVKARPVVNVKTQPFAKVEAQPIMNEKVQPTAKMEVQPLAKMVTQNITGVQALPKTKAKKSKSEKEKKPKKVQAITYFGLVWKKNKTDKDDGSEFRANDVILKSKDSIGSSIRPTCCLCDKAYSPDFLYVRCERCRNWFHGDALQLEEERIGELVAYRCCRCRRRAIPHCPHSDGYTKPEPELSEQTVAASSQSTMLSSEDTYALADQDPLLASYGIVEPIGDDTMDVGLSMNMSSFAPGSNQKLSIRRAQAKSTEYIDQGGRPVSEYNIQNQPPGIGNINLSHTNEISFSEVDSVDASELLGWDLPQGAAYATPLDFTANHQSNDTCCGSFGMDEYEPQTYFSFTELLEADDTQLDNAFGMSAGLQGDCNGTGSFVQQGDGLSFMVEDGASNMNFPTNDPTPDEVACSKCMHTQPPPDLKCAVCDLHIHRQCSPWDQGEEPVDSSNWSCGGCREWR

SEQ ID NO: 71046 - protein, 1028 aa, Zea mays
  Coding DNA Sequence Number=SeqID_29267
  Gene Ontology: Mol. function=zinc ion binding; Biological process =proteolysis
  Homolog annotation: Hit_ID=Q53PX0; Match level="QueryCoverage=87%, HitCoverage=51%, E-value=0.0, Identity=56%"; Hit description =Expressed protein
  Pfam annotation: Domain name=DDT; Domain location=363-422; Score =57.2; E_value=5.2e-14; Accession=PF02791.7; Description=DDT domain
  Pfam annotation: Domain name=PHD; Domain location=560-605; Score =37.3; E_value=5.2e-08; Accession=PF00628.19; Description=PHD-finger
  Pfam module annotation: Pfam domain module=DDT::PHD; Domain location =363-422::560-605
MDAEPRREGSDRAPAADSSAAPDGDEAMARGVAAAEKPTAASEAGAGGDVAAAERGRDGETPAGDPGVVADEGGAVGDQCPAAPQASEVDEGGAAGKERSDGGLANGAVEGSSIAGEVPDVAPVVSEARMDEDGGCSTGNEYSEMKMEVDGGCVAEREGDGQEQEQECTAAAVESEVKTGEGDGGVVNQGTTAHAGGLQVKEEVGEGLVGRYIGRSAPGRTRILIGKVVSYDSTAGVYSLVFEDGHAEELGLPQLQELLMSDDNGALGMKVSCRKRKLDLLVSSGSALEVKEPPSTRQRVDGCEMSARPDELQHSASGSDMSEDVESSSNSSDFTREETSEPCPPVQAVELPPSSGDIPVPEESISSLLSVYNFLRSFSVQLFLSPFGLDDFVAAINCSVQNNLLDAVHVSLLRALRRHLESRSAEGSRSASNCLKYALYQHTLNHRGKSFGRSLLVAEYYKLPVTMKLRVLQILCDDVIESEELKTELENRVGYNEEMEYEIESSAFLEAGSRSVSTRAAKASACKNTNDFHNLLESAPNVTNPETAPAVLSQDGNSDDCRICGMDGTLVCCDGCPWAYHSRCIGQNKAFLPQGDWFCPECMVNKLGPTSSRIERGARGAQMFGIDMCGRLFLGTCNYLLVIETASDAESYARYYNQYDVAKVLQSLAVSDAYVDICKQIKDYWKHLLGIIHNERSTTGKEVGAKVALPQTNAQQKFVANQSAMCSVECLEEQKCKSSLGVVTEKNAEVFKQTVSAQNNIHNAHRNGAFGPSVVSSVSHQNGSIVTGGSNIAQAQPAQSIFHPDPSTVSVTSGSFCPSSLGKHHLQMFPERSGNMSGVKAAKLSSFKPQAYMNLYNHGNIAASAAANIAVITSDDSKVSASQLTAKHRKKMAADNALQLKAFSSAATQFLWPSTEKKLMEVPRDRCGWCLACRSSAIGTKKACFLNMATSNAVKCSARILSVMRVIKNSDSHFPSIVAYLANMEESLRGLLVGSLQDMQQKERWHQQLQEASNCRTVIPLLLEAMPQ

SEQ ID NO: 71047 - protein, 328 aa, Zea mays
  Coding DNA Sequence Number=SeqID_29268
  Gene Ontology: Mol. function=nucleoside-triphosphatase activity; Cellular component=integral to membrane; Biological process=transport
  Homolog annotation: Hit_ID=Q8GU83; Match level="QueryCoverage=79%, HitCoverage=18%, E-value=2e-95, Identity=69%"; Hit description=PDR -like ABC transporter
  Pfam annotation: Domain name=ABC_tran; Domain location=197-327; Score= -29.5; E_value=7e-05; Accession=PF00005.17; Description=ABC transporter
MDHRQDAGDGEEERQQQLGDLETDKEPVQKQGQLSPSSSWRAAAAASIRESLSRSLSSLSHQQEEKDDDEVELRWAAVGRLPTMDRLHTSLQLHAGQRQVVDVRRLGAAERRMVVDALVANIHRDNLRLLRKQRQRMDRVGVRPPTVEVRWRDVRVEAECQVVHGKPLPTIWNAVVSGLSRPRVRILHGVSGVAKPSRLTLLLGPPGCGKTTLLKALAGKLRATGLKVTGEIEYNGVELNNGFVPEKTAAYIDQYDLHVPEMTVRETIDFSARFQGVGNRAEIMKEVIRREKEAGITPDPDVDTYMKAISVEGLERSMQTDYIMKPSV

SEQ ID NO: 71048 - protein, 1019 aa, Zea mays
  Coding DNA Sequence Number=SeqID_29269
  Gene Ontology: Mol. function=nucleoside-triphosphatase activity; Cellular component=integral to membrane; Biological process=transport
  Homolog annotation: Hit_ID=Q8GU83; Match level="QueryCoverage=99%, HitCoverage=88%, E-value=0.0, Identity=53%"; Hit description=PDR -like ABC transporter
  Pfam annotation: Domain name=ABC2_membrane; Domain location=167-379; Score=196.2; E_value=8e-56; Accession=PF01061.14; Description=ABC-2 type transporter
  Pfam annotation: Domain name=ABC2_membrane; Domain location=713-957; Score=170.1; E_value=5.6e-48; Accession=PF01061.14; Description=ABC -2 type transporter
  Pfam annotation: Domain name=ABC_tran; Domain location=532-722; Score= 102.6; E_value=1.1e-27; Accession=PF00005.17; Description=ABC transporter
  Pfam annotation: Domain name=PDR_assoc; Domain location=384-447; Score=96.3; E_value=9e-26; Accession=PF08370.2; Description=Plant PDR ABC transporter associated
  Pfam module annotation: Pfam domain module=ABC2_membrane::ABC2 _membrane::ABC_tran::PDR_assoc; Domain location=167-379::713-957::532- 722::384-447
MIVGPSKALFMDEISTGLDSSTTFQIVSCLQQLAHISESTILVSLLQPTPETYELFDDIILMDEGKIVYHGPKSCIMGFFESCGFKCPDRKGAADFLQEVLSKKDQQQYWSHSEETYNFVTIDQLCDKFRVSQIGQNLAKEISKPCDKSEGLKNALSCSIYSLSKWELLKACSARELLLMKRNAFIYIGKSVQLALVAAITGTVFLRTHMGVDIVLANYYMGSLFYALLLLMVNGFPELSMAVIRLPVFYKQRDYYFYPAWAYAVPAFILKVPISLVESIVWTSLSYFLIGYTPEASRFFRHLLILFLIHTGALSMFRCVASYCQTMVASIVGGTMALLLILLFGGFIIPRSSMPNWLEWGFWLSPLSYAEIGLAETEFLAPRWLKLTASGVTLGRRVLLDRGLNFSVNFYWISIGALIGFIFLCNIGFAIGLTIKKPPGTSRAIISYDKLSRLNRRDQCVLVDTKDGINKQQENSSARSGTGRVVLPFVPLAVSFKDVNYYVDTPAEMREKGYMEKKLQLLHNITGAFQPGVLSALMGVTGAGKTTLLDVLAGRKTGGVIEGDIRVGGYPKVQETFARISGYCEQTDIHSPQITVGESVAYSAWLRLPTEIDSKTRDEFVNQVLETIELTEIRDALVGMPGINGLSTEQRKRLTIAVELVSNPSVIFMDEPTSGLDARAAAIVMRAVKNVANTGRTVVCTIHQPSIEIFEAFDELMLMKRGGQLIYAGPLGYRSSILIKYFQAIPGVPKIKDNYNPSTWMLEVTSTSLEAQLGLDFAQVYMDSSMYKHEQQSLFNILGCMYGTTIFSGINNCQSVMPFVSIERSVVYRERFAGMYSPWAYSLAQVTMEIPYVLVQIVLFMLIAYPMIGYAWEAAKFFWLLYTMFCTLLYFLYLGMLMVSVTPNIQVASILTSLFYTIQNLMSGFIVPGPQIPKWWLWLYYTSPMSWTLNVFFTTQFGYEDQKKIDVFGETKSVAAFLKDYFGFKRELLPLSAIVLAAFPIFFAALFGYSISKLNFQRR

SEQ ID NO: 71049 - protein, 47 aa, Zea mays
  Coding DNA Sequence Number=SeqID_29270
MGTGTGTKSYPQGLFGVARLPPHRASLAAVKLAATTAAAEVWQAVAA

SEQ ID NO: 71050 - protein, 88 aa, Zea mays
  Coding DNA Sequence Number=SeqID_29271
MTPTRWNQGQGDRNGSTSYWPGITHRCLGTAVELLLYVGRAPNVMWDSSFRARDSGTPAYLRRVCLGAAALGNGRMVGEALQSSGTQM

SEQ ID NO: 71051 - protein, 117 aa, Zea mays
  Coding DNA Sequence Number=SeqID_29272
MAKVFKSISRVEKDMQLLHVQEKDMPPQYKKVNFSLMLVGCSHCALMKCKHETGYMSHLFLIMLSFCCIKLVRVEAALTLRALAEVDPTCVGGLVSYGLTTLQALRETVSFDKVFCI

SEQ ID NO: 71052 - protein, 126 aa, Zea mays
  Coding DNA Sequence Number=SeqID_29273
MAKGVGGGDPIPLSRFGALVAQLESVVASARQKTPDALLCFDLLSELSSAIDEAPKETIQLWQRKCEDALQSLLVLGTRRPVRRLASSAMGRIIEKGDVISVYSRASNLQGWLVDVKRAEATACAG

SEQ ID NO: 71053 - protein, 80 aa, Zea mays
  Coding DNA Sequence Number=SeqID_29274
  Gene Ontology: Mol. function=oxidoreductase activity, acting on paired donors, with oxidation of a pair of donors resulting in the reduction of molecular oxygen to two molecules of water; Cellular component=membrane; ...
  Gene Ontology: Cellular component=Biological process=fatty acid biosynthetic process
  Homolog annotation: Hit_ID=Q6ZGW6; Match level="QueryCoverage=58%, HitCoverage=12%, E-value=9e-14, Identity=70%"; Hit description =Putative delta-12 oleate desaturase
MEATRAIRPVLGDYYRSDSTPIAEALWREAKECIYVQRDDQKGVFCYRIGVFIGQSEVGGLNTSLPSVTSYILGIYRATV

SEQ ID NO: 71054 - protein, 130 aa, Zea mays
  Coding DNA Sequence Number=SeqID_29275
MTFPPSTLKAQKDRRWRQRSGDSSRQPHPRPTGDGSQETIERMLGNFEETISVACALMLWDLISYDQASQLRGEVARLHKERNDARHESPLRGESQLQEDLHEAKLWAEEAESSLRKVNARLEETNSELS

SEQ ID NO: 71055 - protein, 108 aa, Zea mays
  Coding DNA Sequence Number=SeqID_29276
MRTVRAHGPDRPLILVSNTCEAERMIKSYAKQHCKVERPNKSPSSKPTRLRGRPSPYRATLRDFVEWFHVFKRLADNNPDLCSEKVDMKKDEDLIVVRRQEDIEMEIE

SEQ ID NO: 71056 - protein, 83 aa, Zea mays
  Coding DNA Sequence Number=SeqID_29277
EVGEDHFNTDERVVAGLNTDLDCATLDLSRVHEDLEDAHARITALEAQLEGRNPPEAQVLAIVVSPPHKRIHYGAPGSITRLL

SEQ ID NO: 71057 - protein, 109 aa, Zea mays
  Coding DNA Sequence Number=SeqID_29278
MSGFEDPSYIEMLVGASTFARNYAPLIACLKARALPGLLRKWAKRRSWAYFGYLVPRYPIDGDTHLRTTRNEGLENSDIKIITKNTIIDVAHKKAAAPWSILETMVGPW

SEQ ID NO: 71058 - protein, 111 aa, Zea mays
  Coding DNA Sequence Number=SeqID_29279
MARAAAARPCGEAQGPPARERGAAGVQGGALPRVRQRPWGKFAAGRTMACAAAARPCGEAQGPPARERGAAGVQGGALPRVRQRPWGKFAAETIQGNTAPSPTAPYTETRN

SEQ ID NO: 71059 - protein, 138 aa, Zea mays
  Coding DNA Sequence Number=SeqID_29280
MEERGISAANELRIHLRWGLDCGSGKLHHVLRHVPMAPPSTFGALGTSNRSPVCCSAAGPLCYVGSVLCVAITGKTLLPGLTPTPSTRSTVDIQVSCAGRTIWAPRQWRCHGPLGLGCWRRVEEDDTGALDLRMNGSD

SEQ ID NO: 71060 - protein, 147 aa, Zea mays
  Coding DNA Sequence Number=SeqID_29281
MAARFDKWEKTCIGCNEMSGGKRITRSFIPPANRISDIRGGGGADAAVFLLREVRGEEIELTKWAHFSSSSGFVLHNRSMHNLLLALELLGYSGWSLGQEGELSGCLDADTDFLPVGSSDGTAATAEETASGTGADADADNLEGDLA

SEQ ID NO: 71061 - protein, 89 aa, Zea mays
  Coding DNA Sequence Number=SeqID_29282
MAADSFFSSAASPYLVEARTMTKAERESPEPPTYTLGSRATLESTNGHGELPSGFRGEENGFRRNHPRKTRPDHWDPLHSDSTRQVQAR

SEQ ID NO: 71062 - protein, 101 aa, Zea mays
  Coding DNA Sequence Number=SeqID_29283
MGVGKGRLDDSQGIAAEVWTFIQAVERAGLEGLDESEYSSDEENSSDSSEEGGGDDDDDNGGNGDGGGDSGEGGDGSDKGGSGDGSGGSKGSSKGSNKASG

SEQ ID NO: 71063 - protein, 77 aa, Zea mays
  Coding DNA Sequence Number=SeqID_29284
RFAKGGLPLGEECGGDEDDGYDYAYGNVDPGDIYPPQAPDLWVDFEIIGPKIPGPWTSLGAPEVHPMGVAPELRVDF

SEQ ID NO: 71064 - protein, 212 aa, Zea mays
  Coding DNA Sequence Number=SeqID_29285
MEFNALVGDLSHNDDMQASSNVPTQKGKFVSDSIMLATLLEVPVEAVETGIDGGGATRAQTFLPVPTVLPSQHTGKEPTRVSSPTTVVALLAADHMVPTTPASTLATSKNMTTQRRSSQYVGSSVSPSSFCHSAFVFVSFFASPDLLALRGISAASVFPLSGASLEGKGVPILLPSPPFLGAFMAISQPKVEPSLVAASFSSRRVVVPSPPG

SEQ ID NO: 71065 - protein, 72 aa, Zea mays
  Coding DNA Sequence Number=SeqID_29286
MRNPYCWLKTSLKNLKMMRKGTKPEKKGFDPKWLGLADCIDRAGRDIERMELLAIQQQGPCNRVLWNPQLEI

SEQ ID NO: 71066 - protein, 43 aa, Zea mays
  Coding DNA Sequence Number=SeqID_29287
MAHRMLRPPPGGALLANTTAWQPSSPYPFSLEIFLKSPSVLLY

SEQ ID NO: 71067 - protein, 351 aa, Zea mays
  Coding DNA Sequence Number=SeqID_29288
  Homolog annotation: Hit_ID=Q6Z9Z3; Match level="QueryCoverage=94%, HitCoverage=97%, E-value=1e-115, Identity=63%"; Hit description =Clathrin-coat assembly protein-like
  Pfam annotation: Domain name=Syntaxin-6_N; Domain location=13-88; Score=77.7; E_value=3.7e-20; Accession=PF09177.1; Description =Syntaxin 6, N-terminal
MAASGGLEQWQKDGFFQAAEEVQESADLMESVYRTWMRERSNGSGSEELEQFERAVSSSNDKYSLEEGTVARRRQFVVAIEDQISRVEKEINGSLMDNGGQGLNWVKLDDEERDDLVAFLSAPAEFYSEMKSTDISDRVLSRQKNVPVGRNDQSDPPLIIKDIYEVARTEISTVKSDVCGLAEELHGLRRNLSSGNDHWKIDIGNKMDDDRKLSTGVQAASQTTPSSSIRRSAESITRVRWFWNSLWKSKRDEQRPLRYDMSYNLDLRVVSLLTQRFNGLAERSRNYLTSWKENSRTSGRTGGLHIQGQQQNIQFGRSIRITLLLVLSIFLIGQCPTCLVLNCGKSDKLLT

SEQ ID NO: 71068 - protein, 84 aa, Zea mays
  Coding DNA Sequence Number=SeqID_29289
MDFRKKANEGYTLVNMTSLEAACRLWGAHGGSPHARDSIYLWSNPVRSTLINPVSGVHRTDLISGESSLGEPLGMEAADVGAKA

SEQ ID NO: 71069 - protein, 328 aa, Zea mays
  Coding DNA Sequence Number=SeqID_29290
  Gene Ontology: Mol. function=transcription regulator activity; Cellular component=nucleus; Biological process=regulation of transcription
  Homolog annotation: Hit_ID=Q2R3F6; Match level="QueryCoverage=58%, HitCoverage=37%, E-value=7e-52, Identity=60%"; Hit description=Helix- loop-helix DNA-binding domain containing protein, expressed
MGLGPGQGHDEQNLLALASAAAMGAGGIFSSPAVLDDDWYFDPVAAAAAAGAQGQLLLAPPGPAPDAGSQMFSLFNVGGAATFDVHGFDLGLGGGGGGDLVPFAGAGNASNSASFSLVPAGNAGGFLGSFGGFGTAPAQMPDFGGLGGFDMFNSGAGSSSAAPPPPASVSLTAPFSGRGKAAVLRPLEIFPPVGAQPTLFQKRALRRNAGEEDDDKKRKVEAVAAAAGASSGGGGDTVLDDADDDDGGSIDASGLNYDSEDARGVEDSGKKDGKDSNANSTVTGGATGDGKGKRKGLPAKNLMAERRRRKKLNDRLYMLRSVVPKISK

SEQ ID NO: 71070 - protein, 162 aa, Zea mays
  Coding DNA Sequence Number=SeqID_29291
MGVGGFFMDAIDASVSKESNGEGRMDALMFLIEEEDEWTRVHGAGTRSGSWRGRHPWRGAVLGARLEWSWLRPGVGLAGLGRDARQSGSQGSSVLGASGVSWRRGLGKQRGRERNGRARLLDIAYFRRRPSEIMLFPTRYDRGTATIGYKSVAIRYKLRSMV

SEQ ID NO: 71071 - protein, 39 aa, Zea mays
  Coding DNA Sequence Number=SeqID_29292
MASPIAHRSDGFTAEPPCVVAGLLRPPISGEYPLPRFAI

SEQ ID NO: 71072 - protein, 129 aa, Zea mays
  Coding DNA Sequence Number=SeqID_29293
SSSTNSSAWIQADDDGQPDRGKDGRKLETSLVRSSGTEVLGGSDEHSRLPAAFAQELGQKNTSTCSTRPGNARARPDAQPRVHRACDYKANPGLDPSPTPAITVDDPPLDVTARTSRISPDPPPDLSHH

SEQ ID NO: 71073 - protein, 185 aa, Zea mays
  Coding DNA Sequence Number=SeqID_29294
  Subcellular localization annotation: CTP_CleavageSite=75; ConfidenceScore=5.36e-01
MQPNRGIAAPTPWARLSVSRACESSLARGPGVTSHPSVARHRCLVGPVGQNRPPRCPWRIAAGEIGRLPANSPGRCSTLGTIKCGSRDPVLPFSRPLAPTSDKPHHKPPSRSSVGRFAVVASDSSLRHQLATGVDSGAFGSVRGSRGRRIELGRSNLGPGFARRRRGVRGIPPCAVVRAPVRIIQ

SEQ ID NO: 71074 - protein, 100 aa, Zea mays
  Coding DNA Sequence Number=SeqID_29295
  Subcellular localization annotation: CTP_CleavageSite=47; ConfidenceScore=5.01e-01
MGGRRCWLHWPRAGSPVARQAAATATGAQGVAPMAIQHGSSPTARRTAGLGSGARHQGPLTAPWERGQGMGGLEPRPGQTTSRHGARHIREWKKRRKAKS

SEQ ID NO: 71075 - protein, 77 aa, Zea mays
  Coding DNA Sequence Number=SeqID_29296
MEHWFTGSSRAGGIAAIVDRAVPRLYIVRVGDESQSWDLNPRGKMRAQVAADLRIGECHTIEIVGPGSGHGCTELDL

SEQ ID NO: 71076 - protein, 79 aa, Zea mays
  Coding DNA Sequence Number=SeqID_29297
MAVMGSTSDKMYLCQLPNFGIENDKDETRRVSFASGRLIPERPTRNGSGEMARVACTLRGKRLDSGVSVLSVGMNPVWS

SEQ ID NO: 71077 - protein, 54 aa, Zea mays
  Coding DNA Sequence Number=SeqID_29298
MSASLNSSKSSMLDPLHNYNELDLVGVGAGKTDQRSRHQKFSIQHSDSAVQHFS

SEQ ID NO: 71078 - protein, 259 aa, Zea mays
  Coding DNA Sequence Number=SeqID_29299
MLEVQGLVTRVVAMSVVDLLGVVVEAILEAASIEDLQERPVKDLVAGMRRTTNEQRKRAMRLMTMARNTKLSCVVRSEENHVSMDCPVFNGSKPSAILCDIMGGESGFFQIPTYGTKDIVVGEGLYEIFFKVDKVCRNEVWEDFKPHENSEGGDKGQHEDLDDEFDGLELEDNQPKPVSNLKDNVMEDSATTGSGNQQTDQRNVEAAQLVLGETLKLTPTVEPWDDTAENNTPSFSQDAGVVAAHASEASGFGVLHSGA

SEQ ID NO: 71079 - protein, 496 aa, Zea mays
  Coding DNA Sequence Number=SeqID_29300
  Gene Ontology: Mol. function=magnesium ion binding; Cellular component=chloroplast; Biological process=metabolic process
  Homolog annotation: Hit_ID=Q2NM14; Match level="QueryCoverage=98%, HitCoverage=92%, E-value=1e-108, Identity=41%"; Hit description =Terpene synthase 10
  Pfam annotation: Domain name=Terpene_synth; Domain location=1-168; Score=146.5; E_value=6.9e-41; Accession=PF01397.11; Description =Terpene synthase, N-terminal domain
  Pfam annotation: Domain name=Terpene_synth_C; Domain location=173 -444; Score=285.6; E_value=9.8e-83; Accession=PF03936.6; Description =Terpene synthase family, metal binding domain
  Pfam module annotation: Pfam domain module=Terpene_synth::Terpene _synth_C; Domain location=1-168::173-444
MKEEVKKMLLDVGSSDLSHKLDCIDTLERLGLDYHYTKEIDELMCNVFEARDQDLDLTTTSQLFYLLRKHGYHISSDVFLKFRDDKGDIVTNDARCLLRMYEAAHVRVNGEEILDNILIHTKRQLQCIVDDLEPTLQEEVRYALETPLFRRLNRVQARQFISTYEKSTTRINMLLEFSKLDFNILLTLYCEELKDLTLWWKEFQAQANTTIYARDRMVEMHFWMMGVFFEPQYSYSRKMLTQLFMIVSVLDDLYDSHCTTEEGNAFTAALQRWDEEGVEQCPTYLRTLYTNIRATIKAIEEDLNFQNNKHAKLVKGLIIDMAMCYNAETEWRDKKYVPATVDEHLKISARSSGCMHLVSQGFISMGDVATSEALEWASTYPKIVRAVCIIARLANDIMSYKREASNNTMVSTVQTCAKEYGTTTVEQAIEKIRELIEEAWMDITHECLRQPQPKALLERAVNLARTMDFLYKDADGYTDSRSIKGILDSLYVHLID

SEQ ID NO: 71080 - protein, 575 aa, Zea mays
  Coding DNA Sequence Number=SeqID_29301
  Gene Ontology: Mol. function=RNA-directed DNA polymerase activity; Cellular component=mitochondrion; Biological process=RNA-dependent DNA replication
  Homolog annotation: Hit_ID=UPI00004C1731; Match level="QueryCoverage =99%, HitCoverage=44%, E-value=0.0, Identity=73%"; Hit description =UPI00004C1731 related cluster
  Pfam annotation: Domain name=RnaseH; Domain location=192-319; Score= -4.8; E_value=0.00016; Accession=PF00075.14; Description=RNase H
  Pfam annotation: Domain name=rve; Domain location=321-521; Score =74.6; E_value=3.1e-19; Accession=PF00665.16; Description=Integrase core domain
  Pfam module annotation: Pfam domain module=RnaseH::rve; Domain location=192-319::321-521
MLLGFIVSERGIEANPEKIAAITNMGPIKDLKGIQRVMGCLAALSHFISRLGERGLPLYRLLRKVVSAAIVVERREEGHALPVQRPVYFISEVLSETKIPYPQIQKLLYAVILTRRKLRHYFESHPVTVVSSFPLGEIIQCREASGRIAKWAVEIMGETISFAPRKAIKSQVLADFVAEWVDTQLPAAPIQPELWTRFFDGSLMKTGTGAGLLFISPLGKHLRYVLRLHFPASNNVAEYEALVNGLCIAIELGVRHLDARGDSQLVIDQVMKNSHCRDPKMEAYYDEVRRLEDKFYGLELNHVARRYNETADELAKVASGRTTVPPDVFSRDLHQPSVKTDDTPEPEKASAQPEAPSAQPEAPSAPEGEALCIEEERSGKAPRGYTHLLVAIDKFSKWIEVRPLNSIRSEQAVAFFTNIIHRFEVPNSIITDNGTQFTGRKFLDFCEDHHIRVDWAVVAHPMMNMQVERANGMILQGLKPRIYNDLNKFGKRWMKELPSVVWSLRTMLSRATGFTPFFLVYGAEAILPTDLEYGSPRARAYDDQSNRANREDSLDQLEEARDMALLHSARYQQSL

SEQ ID NO: 71081 - protein, 173 aa, Zea mays
  Coding DNA Sequence Number=SeqID_29302
  Homolog annotation: Hit_ID=Q6ZT46; Match level="QueryCoverage=62%, HitCoverage=59%, E-value=4e-08, Identity=33%"; Hit description=CDNA FLJ44967 fis, clone BRAWH2016514
MGVTCPRKVMFSRCKIGYLIYIVADSRAIIRHLRLLGGYANSWAGSSPTSPTRYFDSLGARPSPASPTRYFIDSGARPSPASPTHYFHSSGAGPSPASPTRYFNSSRAGPLPASPTRYFDSLGAGPSPASPNRYFDSSGARPSPTSPTRGLGYRPPHRLATSKTQGLSRRPPR

SEQ ID NO: 71082 - protein, 201 aa, Zea mays
  Coding DNA Sequence Number=SeqID_29303
  Gene Ontology: Mol. function=catalytic activity; Cellular component =cytosol; Biological process=cellular metabolic process
  Homolog annotation: Hit_ID=Q69U05; Match level="QueryCoverage=99%, HitCoverage=72%, E-value=3e-77, Identity=64%"; Hit description =Putative cinnamoyl-CoA reductase
  Pfam annotation: Domain name=3Beta_HSD; Domain location=1-199; Score=- 139.9; E_value=0.012; Accession=PF01073.9; Description=3-beta hydroxysteroid dehydrogenaseisomerase family
  Pfam annotation: Domain name=Epimerase; Domain location=1-177; Score=- 11.5; E_value=1.9e-05; Accession=PF01370.11; Description=NAD dependent epimerasedehydratase family
  Pfam annotation: Domain name=NAD_binding_4; Domain location=6-161; Score=-105.9; E_value=0.089; Accession=PF07993.2; Description=Male sterility protein
  Pfam module annotation: Pfam domain module=3Beta_HSD::Epimerase::NAD _binding_4; Domain location=1-199::1-177::6-161
DGKNAHLKTLEDAEERLQLVKADMLDYGSVASAVAGCQGVFHVASPVPSGKSSNPEEDVIAPAVTGTLNVLKACYEAKAKRVVVEWYFLSKTLAEHEAFAYAAKTGLDIVTICPSLVIGPLLQPAVNTSVKVFLSYIKGDQEIVKDGPKNLVDVRDVAGALLLAYENLQASGRYLCSSPAIRVSDIVNILKTEYPTYTYPQ

SEQ ID NO: 71083 - protein, 61 aa, Zea mays
  Coding DNA Sequence Number=SeqID_29304
MAARLIGIDSAPEERRPQSAWPHELAPTTVVAHQRAVALQGIVALDVGKHAVCESRLDVGE

SEQ ID NO: 71084 - protein, 83 aa, Zea mays
  Coding DNA Sequence Number=SeqID_29305
MAKEIWDTLKMVLKGDKVTKITRMEIIKRVLRRFTINKGEGPKRYASNDDRDEDKKGKKKMEKKKFFHKNGDKAHVGKEWDSN

SEQ ID NO: 71085 - protein, 491 aa, Zea mays
  Coding DNA Sequence Number=SeqID_29306
  Gene Ontology: Mol. function=transporter activity; Cellular component= integral to membrane; Biological process=transport
  Homolog annotation: Hit_ID=O64909; Match level="QueryCoverage=63%, HitCoverage=80%, E-value=1e-163, Identity=93%"; Hit description =Glucose-6-phosphate/phosphate-translocator precursor
  Pfam annotation: Domain name=DUF6; Domain location=283-408; Score =32.6; E_value=1.4e-06; Accession=PF00892.11; Description=Integral membrane protein DUF6
  Pfam annotation: Domain name=TPT; Domain location=417-491; Score= -38.4; E_value=0.099; Accession=PF03151.7; Description=Triose -phosphate Transporter family
  Pfam module annotation: Pfam domain module=DUF6::TPT; Domain location= 283-408::417-491
MEAPDCPVCTGHVRCANGSKTTNGRLRHRRKEIGHRTVSGVHRTVRSEQTEEGVEIDSKPRSCSRVKGNFQNPRYTKMSPEEILGKFARGRKMAKEARYVDDIANEPLPHYEPQPVALKATTNKEALLDRVAQIEVVDLNEEEMTLVIMCFKTTVKGRKDYPNKSKSRGNRTCFKCEAMIPSVRLSPGPAAFSGSSLRSKLPSIPSISSLKPSKYVVSSLKPLYLAPLDGPRTAELKSRRQPLEFRCSASAADDKESKTQVVPVQSEGAQRLKISIYFATWWALNVIFNIYNKKVLNAFPYPWLTSTLSLACGSAMMLFSWATRLVEAPKTDLDFWKVLFPVAVAHTIGHVAATVSMSKVAVSFTHIIKSAEPAFSVLVSRFFLGETFPIPVYLSLLPIIGGCALAAVTELNFNMVGFMGAMISNLAFVFRNIFSKRGMKGKSVSGMNYYACLSIMSLVILTPFAIAMEGPQMWAAGWQKALAEVGPNVVW

SEQ ID NO: 71086 - protein, 670 aa, Zea mays
  Coding DNA Sequence Number=SeqID_29307
  Gene Ontology: Mol. function=nucleic acid binding
  Homolog annotation: Hit_ID=Q2QX71; Match level="QueryCoverage=99%, HitCoverage=23%, E-value=4e-19, Identity=27%"; Hit description=SAP domain containing protein, expressed
  Pfam annotation: Domain name=SAP; Domain location=3-37; Score=18.1; E_ value=0.0097; Accession=PF02037.17; Description=SAP domain
MEFAAMKRRDLLELCRQHGLAIRGSKADLAAVLAGALSLQGPPVAVAAAAESVVGVVVRKGCLKRLGGSASGGTSGASKKVSFALDETPEVKGRRRRSQVILPLVVAKTRGRRKGRKAPSSAAVSGSGRRRKHDGGGGSARGSVTREVGADAPVTRSRMKVASLHSHSGVESQNNPAKAEERGKVVGTATRRKQKRKAHENAGDIANSWAGISRRITRSLSSSAAAVSLPCDAEEERGARKVESSVAADVILATLVGKKRRKTWCRPKAREELPAAALGERGSSQKSDVGGGSVDHGAFQELCADAPVTQHGTKVVNLCAESGVESRNNPTEGEEKEEVVEAATYRKQKWKIQENSEDICARASSGISHRRTRKSSSSPAAVLLSPAAEKMEVADDKDEPGVKELAEVKVFATTAVPIIAESTSKRKEVDHVPAELKPAKVEFYGRTTRSHSTAAAALSPTVIGSKLRKAGDVHTNGEVSKDLEVPRNDAPITRSLRNRVVHINNSAVDGTRARKKLGTKRKPSSRPATHGRQPPVPPVEDKEQVAVPCKFSQHRRSSRNRPRPDELLRNTYLENNKVNGVPVGGKDLSIAHRLTHNAAKASVGDVESLSPGFEDSLTRSNKDDVRTKGMHQSVSNREFQNAKGGDVGKQPTGRGCVRRSTRISATSVRI

SEQ ID NO: 71087 - protein, 196 aa, Zea mays
  Coding DNA Sequence Number=SeqID_29308
  Gene Ontology: Mol. function=protein binding; Cellular component =spliceosome; Biological process=mRNA processing
  Homolog annotation: Hit_ID=UPI0000DA43ED; Match level="QueryCoverage =87%, HitCoverage=94%, E-value=2e-12, Identity=31%"; Hit description =PREDICTED: similar to keratinocytes proline-rich protein
MAAPRTTRPVALTPRRDRRHLWQEKRATLRLRHNDRVKKTRAQPRKTTNYASPDPRARTRAQPRKTTNSASPDPRARTRAQPRKTTNSASPNPRARTWAQPRKTTNSASPDPRAQTRAQPRKTTNSASPDPRARTQPWPQPWPQPTVSASPDPGAQTEPRPRKTDSTSTSEGPPPRPTQGSDRPRHRRRHHYPTPN

SEQ ID NO: 71088 - protein, 500 aa, Zea mays
  Coding DNA Sequence Number=SeqID_29309
  Gene Ontology: Mol. function=RNA binding; Cellular component=cell outer membrane; Biological process=carbohydrate metabolic process
  Homolog annotation: Hit_ID=Q1SR54; Match level="QueryCoverage=68%, HitCoverage=45%, E-value=1e-105, Identity=56%"; Hit description =Initiation factor eIF-4 gamma, middle; Initiation factor eIF-4 gamma, MA3
  Pfam annotation: Domain name=MIF4G; Domain location=176-375; Score =11.5; E_value=0.0044; Accession=PF02854.9; Description=MIF4G domain
MEMGGPVSMEEDLEMERKLAKKLKLKKGKLGGPDDGMDDLFADLGFGGDFGSDDGETKAYDWNVVEDTNLDKRKGKKKNKEKKDDTVMEEPDDIDEENGRKKKKKKKKDGMEKEELVDVGEENGQKRKKKKKMKDDSEMDEPDDEGVHMDEENDGAVLESEDGVSNVVELPKESKGKYVPPSLRNASNSESEEIAQMRRRSVPRSDGSQIIGDEVLASCSRGPRGNEQLRVSHQPCMACLVGVDFSAKILASIAKSFEDEYSKEDGLSLRNLTLLFCYLCIFGVTSSDLVYDLLSILSKRLTELDVSTVLTILQCCGMKLRGDDPCAMKDFVLSIQNSVNDLKLHSGVGADGKTDIRSRRMEFMLETICDIKNNKKRPKEDPSHHTRIKKWLQKLKAEDVLLRGLTWSRLLDPDKKGQWWLSGDVPSTVAKIEDVAAVISKDVAETKKLLQLAAAQRMNTDIRRAIFCIIMSAEDYVDAFEKLLRLGLSGKQACINVPED

SEQ ID NO: 71089 - protein, 139 aa, Zea mays
  Coding DNA Sequence Number=SeqID_29310
MDKSKKGGSSSHHSVGKRKREPTPPSEDFGDSEYSEVEFSSESEGSSVHASPPASSNDSDDSQGLAAEVWTYIRAIEHAGLAGSDESEYSSDSSEEGGGDGDGEDDDDGGNGDGGDDSGEGDGGGGSKGSNKGSNKASG

SEQ ID NO: 71090 - protein, 160 aa, Zea mays
  Coding DNA Sequence Number=SeqID_29311
  Homolog annotation: Hit_ID=Q6QP51; Match level="QueryCoverage=32%, HitCoverage=30%, E-value=3e-17, Identity=84%"; Hit description =Putative growth-regulating factor 1
MSTARRIDPFLKAALSTRIPSATGEVSTDELQGSHPPARGLGPTRHASGPETEEAKPLHTKQGKRHLWQAKRASFRLRRDDRVKKGTEKGDILKRILLSEGNRLPSPPTDQGFEGWPLGRVRQLPQSTRAPSPLLIRGSKAGPSEGFDSRPRALGLRAHY

SEQ ID NO: 71091 - protein, 119 aa, Zea mays
  Coding DNA Sequence Number=SeqID_29312
MTSGRMLLPQGPHPRPHSRGEDKQKAVELEPSQAESSPTRSKVLPLRHGGWVPRVMQAGPGQKKKAKPPRAVRTTAQRSRAFLHFRLGQRAKGRAAMQAACNRTKGAHPFDFDASSMEA

SEQ ID NO: 71092 - protein, 151 aa, Zea mays
  Coding DNA Sequence Number=SeqID_29313
  Subcellular localization annotation: CTP_CleavageSite=40; ConfidenceScore=5.28e-01
MSDANASVSCSWCLFKVSRLGPRLGLGRRTPPRPTQGSDSASAPEDDELHLARPRARTRPRPRKTTNSALPDTRTRTWPRPRKTTNSASPDPRARTQPWPQTMVSASTDPGLRLDLDLRRQTRPRPRRSLRLARPRARTDHVTGGPSLPYP

SEQ ID NO: 71093 - protein, 404 aa, Zea mays
  Coding DNA Sequence Number=SeqID_29314
  Gene Ontology: Mol. function=RNA-directed DNA polymerase activity; Cellular component=mitochondrion; Biological process=RNA-dependent DNA replication
  Homolog annotation: Hit_ID=UPI00004C1733; Match level="QueryCoverage =98%, HitCoverage=28%, E-value=0.0, Identity=85%"; Hit description =UPI00004C1733 related cluster
  Pfam annotation: Domain name=RnaseH; Domain location=46-165; Score= -14.5; E_value=0.0013; Accession=PF00075.14; Description=RNase H
  Pfam annotation: Domain name=rve; Domain location=263-395; Score =76.7; E_value=7.4e-20; Accession=PF00665.16; Description=Integrase core domain
  Pfam module annotation: Pfam domain module=RnaseH::rve; Domain location=46-165::263-395
MGETISFAPRKAFKSQVLADFVAEWVDTQLPTVPIQLELWTMFFRRVAVKTGVGAGLLFISPLGKHLRYVLRLHFLASNNVAEYEALVNGLRIAIELGVRRLDARGDSQLVIDQVMKNSHCRDPKMEAYCDEVWRLEDKFYGLELNHVARRYNETADELAKIASRRIAVPPDVFSRDLHQPSVKTDDTPELEKASAQPEAPSAQPEAPSAPEAHRALVGNAFRQGFYWPTVVADATRIVRTCQGCQFYARQTHLLAQALQTIPITWPFAVWGQDLVGPLQKAPGGYTHLLVAIDKFSKWIEVRPLNSIRSEQAVTFFTNIIHRFGVPNSIITDNGTQFTSRKFLDFCEDHHIRVDWAAVAHHMTNGQVERANDMILQGLKPWIYNYLNKFGKRWMKELPWWSGV

SEQ ID NO: 71094 - protein, 300 aa, Zea mays
  Coding DNA Sequence Number=SeqID_29315
  Gene Ontology: Mol. function=RNA-directed DNA polymerase activity; Cellular component=nucleus; Biological process=RNA-dependent DNA replication
  Homolog annotation: Hit_ID=Q8S472; Match level="QueryCoverage=99%, HitCoverage=27%, E-value=1e-138, Identity=79%"; Hit description =Putative gypsy-type retrotransposon RIRE2
MLRRHFHKAGPPAKGGRAHNDDKKEDHKAGEFPEVHDCFIIYGGPVANTLAPHRKQERREVCSVKVAAPVYLDWSDKPITFDQGDHPDRVPSLGKYLLVVDPVIGNVSLTKVLMDGGSSLNIIYTETLGLLRIDLSSVRAGATPFHGIIPRKRVQPLGQLDLPVCFGTPSNFRRETLTFEVVGFRGTYHAVLGRPCYAKFMAVPNYTYLKLKMPGPNGVITVGPTYRHAYECDVECVEYAEALAESEALIADLESLSKEAPDVKRHACNFEPTEMVKSVPLDPNNDASKQIRIGSELDPK

SEQ ID NO: 71095 - protein, 531 aa, Zea mays
  Coding DNA Sequence Number=SeqID_29316
  Gene Ontology: Mol. function=RNA-directed DNA polymerase activity; Cellular component=mitochondrion; Biological process=RNA-dependent DNA replication
  Homolog annotation: Hit_ID=UPI00004C1731; Match level="QueryCoverage =99%, HitCoverage=40%, E-value=0.0, Identity=79%"; Hit description =UPI00004C1731 related cluster
  Pfam annotation: Domain name=RnaseH; Domain location=200-327; Score= -7.8; E_value=0.00031; Accession=PF00075.14; Description=RNase H
  Pfam annotation: Domain name=rve; Domain location=347-506; Score =97.8; E_value=3.2e-26; Accession=PF00665.16; Description=Integrase core domain
  Pfam module annotation: Pfam domain module=RnaseH::rve; Domain location=200-327::347-506
MGCIAALSRFISRLDERGLPMYHLLRKIERFTWTPEAEEALVNLKALLTNAPILVPPAAGEALLIYVAATTQVVSAAIVVERREEGHALPVQRPVYFISEVLSEIKIRYPQIQKLLYAVILTRRKLQHYFESHPVTVVSSFPLGEIIQCREASIRIAKWAVEIMGETISFAPRKAMKSQVLADFVAEWVDTQLPIAPIQPELWTMFFDGSLMKTGAGAGLLFISPLGKQLRYVLRLHFPASNNVAEYEALVNGLRIAIELGVRRLDARGDSQLVIDQVMKNSHCRDPKMEAYCNEVRRLEDKFYGLEVNLVARLYNETANELAKIASGRITVPPDVFSRDLHQPSVKTNDMPEPEGLDLVGPLQKAPGGYTHLLVANDKFSKWIEVRPLNSIRSEQAVAFFTNIIHRFGVPNSIITDNGTQFTGRKFLDFCEDHHIRVDWAAVAHPMTNGQVERANDMILQGLKPRIYNDLHKFGKRWMKELPSVLWSLRTTPSRATGFTPFFLVYGAEAILPTDLEYGSPRTRAYDDQSN

SEQ ID NO: 71096 - protein, 128 aa, Zea mays
  Coding DNA Sequence Number=SeqID_29317
MNVCELTLAVSHPPTGQDQVPQDEAHGGCRGEFVRDCNLADGEYVLIPVRDLSKRRTRSRGVAAIEDLPAAPAIEGKPRLWWVQVRSLHGGSRGTMQEMVDGVTWPTTLPPGWTVEWDVAPAGEEQEE

SEQ ID NO: 71097 - protein, 47 aa, Zea mays
  Coding DNA Sequence Number=SeqID_29318
MAAPDSPPTTSPLCAARSTWQWRRPGFSFLGREALAESYRARDCSWD

SEQ ID NO: 71098 - protein, 61 aa, Zea mays
  Coding DNA Sequence Number=SeqID_29319
MAAPDSPPTTSPLCAARSTWQWRRPGFSFLGREALAESYRTRDCNWGWQQKLQHDASFIEI

SEQ ID NO: 71099 - protein, 712 aa, Zea mays
  Coding DNA Sequence Number=SeqID_29320
  Gene Ontology: Mol. function=phosphatidylinositol phosphate kinase activity; Cellular component=mitochondrion; Biological process =phosphatidylinositol metabolic process
  Homolog annotation: Hit_ID=Q8H3L8; Match level="QueryCoverage=99%, HitCoverage=43%, E-value=0.0, Identity=63%"; Hit description=FYVE finger-containing phosphoinositide kinase-like
  Pfam annotation: Domain name=PIP5K; Domain location=465-700; Score =207.6; E_value=2.9e-59; Accession=PF01504.9; Description =Phosphatidylinositol-4-phosphate 5-Kinase
MDLLHTEVYDALNNLEKSIITDDDSTKTSIQRQIVEMKDLLNVERNEYEVLLLPVIMGSSHSFKPNIDILELNRVRRSLLLDAHTWDRRLCGIDSLEADSHISRTDPFNLEKTQGINEGRSDLLQTVRKHGGTYEEPCPQHSSESPRKSLLSTEGHLNDKKYVMVETDLPVGLVDGDAGLDLIFNKLNTCEEGRCLSKYPSKTGPVERLPSLASILADKIDMAWSGFGELDYNLPHGLSKANENTSLNLFGNPSYKKATGPVRIHSFDTVLRLHQREQTGVIPASLHSALKSIDSFRDLTSLVKDPMTNMRRAFSQISPRTRGNLNTVLTRAPKYITSASRMVNDGARLLLPNISCEGSVFVTVYDDEPTSVVSYAMTSQEYAEHVTHKMNANTSFSDFTSSNGLDGSLSSHEELSNFRGAHFRLSFDDDASPTDSTKFSVTCYFARQFAALRKKCCPSNSDYIRSISRCKRWSAQGGKSNVYFAKTMDERFIIKQVTKTELDSFVEFAPHYFRHLTESLTSRSPTCLAKILGLYQVSIKNSKGGREVKMDLMVMENILFQRSISRVYDLKGSVRSRYNSDASGHNKVLLDSNLIEALHTKPIFLGSKAKQRLERAVWNDTSFLASLDVMDYSLLVGVDEEKKELVVGIIDFLRQYTWDKQLETWVKASGILGGPKNESPTVISPIQYKKRFRKAMSRYFLAVPDQWTSKGG

SEQ ID NO: 71100 - protein, 231 aa, Zea mays
  Coding DNA Sequence Number=SeqID_29321
  Homolog annotation: Hit_ID=Q43600; Match level="QueryCoverage=34%, HitCoverage=37%, E-value=5e-10, Identity=49%"; Hit description=PF1 protein
  Pfam annotation: Domain name=AT_hook; Domain location=122-134; Score =6.0; E_value=2.2; Accession=PF02178.9; Description=AT hook motif
  Pfam annotation: Domain name=AT_hook; Domain location=186-198; Score =10.1; E_value=0.42; Accession=PF02178.9; Description=AT hook motif
  Pfam annotation: Domain name=AT_hook; Domain location=88-100; Score =9.3; E_value=0.58; Accession=PF02178.9; Description=AT hook motif
  Pfam module annotation: Pfam domain module=AT_hook::AT_hook::AT_hook; Domain location=122-134::186-198::88-100
NNYLLPNEEKQAPLSTGGHKGPAAAEESTGVLDVGDDVLLASPLVIDADAVDIDVPAPAPVVTADVDDIDVLAPAPVVSADVNPVHTKRGRGRPPKPKDPVAEGYGGKPATAPVAAAAVPVKRGRGRPPKPGGGGRRGLSSPLRLPSSPLMAMPVPCEACARDAPPKLKDPINVATDQATSGMLSPRGRGRPPKKAKVAVEDPRGEPAAARDVVVDASAVHVKRGRGRPPR

SEQ ID NO: 71101 - protein, 242 aa, Zea mays
  Coding DNA Sequence Number=SeqID_29322
  Homolog annotation: Hit_ID=Q7EYV6; Match level="QueryCoverage=30%, HitCoverage=15%, E-value=5e-26, Identity=77%"; Hit description =Anthocyanin 5-aromatic acyltransferase-like protein
SGGGTLPITARTLETIIRLSTAHAKMKLRHEVLKSDVEAALQVLNFAIYHKELTEMEEREQREMEMKQQAALPPAMEKFDVTPSPAPAAGQPRALPLTFYDLVFLAIPPVQRLFFYDRADLLDVSDFTLGELPRFRDSLAAALHHFYPLAGEANVRAGRRGGRRAAEGTEGPGSAGRRRRDRGSMERRVDGAAEQGASQPGTTGMRQQPSREHREKGAAECRARHRVADAARQRAAAAARRR

SEQ ID NO: 71102 - protein, 132 aa, Zea mays
  Coding DNA Sequence Number=SeqID_29323
MGKSQASETRSDLIPKLKPREVMRALLKMTMETEDTTERLSALAVPSWNLSLTTPSPPRHSKKTTSRVRHRAPIHTGGQHLRGTTTASRITGHNHELVFPAKTTSLIPKNEIQANKDVSGKRAHGCEAKSWI

SEQ ID NO: 71103 - protein, 312 aa, Zea mays
  Coding DNA Sequence Number=SeqID_29324
  Gene Ontology: Mol. function=protein dimerization activity; Cellular component=nucleus; Biological process=regulation of transcription, DNA-dependent
  Homolog annotation: Hit_ID=Q6AT33; Match level="QueryCoverage=86%, HitCoverage=93%, E-value=1e-77, Identity=62%"; Hit description=Auxin- responsive protein IAA19
  Pfam annotation: Domain name=AUX_IAA; Domain location=40-283; Score =238.4; E_value=1.6e-68; Accession=PF02309.7; Description=AUXIAA family
MPPPPPLLEPRDYLGAGATSSCCSSCCSSGREGAGPHLALRLGLPGSDDSPGRGADTEHARAHVDAALTLGPGPGPAPPRGSAKRGFADSLDRSAKLDGVAADDAAGGVTRVAGAAAGAPPAAKDLFMIAFSAMDRAQVVGWPPVRSYRKNTLAASATKTNGGDEGRSEAGCCYVKVSMDGAPYLRKVDLKTYSSYEDLSLGLEKMFSCFITGQNSSCKTSRRDRLTDGSRVDALQDQEYVLTYEDKDADWMLVGDLPWDLFTTFCRKLRIMRGSDAAGMVADHYHLPLVVVYNQLNYAFGHALVLETQNQP

SEQ ID NO: 71104 - protein, 91 aa, Zea mays
  Coding DNA Sequence Number=SeqID_29325
MRPRTHSGDRAGALRPTIATALATQTQNHGDGELSPCGTLRRNGGWRGIGEKEGEEGIRNGSARFIPREGSDLHQARSSHGAAKLAEIPAK

SEQ ID NO: 71105 - protein, 246 aa, Zea mays
  Coding DNA Sequence Number=SeqID_29326
  Subcellular localization annotation: CTP_CleavageSite=54; ConfidenceScore=5.36e-01
MGLWSGPTTAVQSPERGKSQPLPSSGGRGARSYCLRIESTAPPDTRGGRAQRLVAAPAAVCLSLSLLPCAVPSPLFRAGLREPGGAERASQAARRRAHGTARRPPALSWANLARISWRLYRTVAPASPVWPCCIRRCKSSLELINTCNFRGEAKHHLYYYVRGSRALASRCDYYDVPFRYHHRQSDGTHSAQVFDAMGGSELMALVSSSSSSARQYLRCAAQRRQPCTHHRQCQQTTTTAVACRKE

SEQ ID NO: 71106 - protein, 89 aa, Zea mays
  Coding DNA Sequence Number=SeqID_29327
MAVGRTRGMGKAKGKRGNGNGSGRERGDGEWERKVMRMSALTREGNGKGTGARQGNEKGRTGNWNGRTGKLCPSYIGPSTILARVGSLA

SEQ ID NO: 71107 - protein, 118 aa, Zea mays
  Coding DNA Sequence Number=SeqID_29328
MMSDINSTKLSILCSLDRAEVVNNDGGVAQRNKSDDDMVVEAFCVKWSLATAQEKSEAELLELLGRLGQLEFMEDAIRKIVLWFPVPFRRKYGAYIMRLEGGELSSQLHPGTQSFGNS

SEQ ID NO: 71108 - protein, 70 aa, Zea mays
  Coding DNA Sequence Number=SeqID_29329
MQLEPKDPVLSKLDNGEAKNGVPGDIARKFIFLLPQQRYGSIITILHNMEDLSNMTPTIVIVKIAAFEIS

SEQ ID NO: 71109 - protein, 169 aa, Zea mays
  Coding DNA Sequence Number=SeqID_29330
MESQDGYFTSLLNQECVDGFGSYDCVEVDNAVAELPMANEMNLQPIKRGRSKNFSEEEDLMLVSAYMNEVNIFQSYYDAIERKNHSGKMSDDKFAEAKAEFREKQGKTFSVFHEWVILRHEPKWAFRESKLKDHHEANNGNSDAPVNIDISPGRKSREGKSTRERAWCL

SEQ ID NO: 71110 - protein, 124 aa, Zea mays
  Coding DNA Sequence Number=SeqID_29331
MQRGEFVAQRHDALEQTRRSAARASCGEWRTREITRGSHGKFYTIPNPIFDSLGPRDAAGSFVQTMAGAAVGAADGQPPQSIFARGDSGACRRLAQQVEVGVGLLWELELAAPWRAVPPECALH

SEQ ID NO: 71111 - protein, 104 aa, Zea mays
  Coding DNA Sequence Number=SeqID_29332
MAQEGGATALRRVAAGRHRRRVEAEFPACCRGEEGLPGRCFGCSLTAAGKTWGAMAEGVKIWALGAAAAACVVARLGEEEDWEGARLLAMDSREREEGMGGMGA

SEQ ID NO: 71112 - protein, 227 aa, Zea mays
  Coding DNA Sequence Number=SeqID_29333
MEALSPLMEESESGRREKRPGDWARGGIGRGVLEKKDVERDRVFGLLLARLGVTGRRCGVARWLLRSWRGSGHRGSGSDLSGGASGLGVGRPLSSFLAASARREQGRRERNVRRVVAAAKQRSRGARLDLNTKKSKLYRPTTTACKSTITTTTPPKQEDFADQPFQGVFHMITEGSSSEFDTKWQKKDHYRRVNHVALTGPVVQTKWSNVPLTFDASVGDSFSNAMS

SEQ ID NO: 71113 - protein, 127 aa, Zea mays
  Coding DNA Sequence Number=SeqID_29334
MTEVVARAPVVDGGRLSSPEQYMFLTWGDVSTARVSSHTFIAQQVVGNNVHELTYSGAHVKCKDYQRGWLKLSIAFKHKLLQETSSSRYKLLPYDKGIQDEDRSKEVRVNAKAITRWTASARNEDDE

SEQ ID NO: 71114 - protein, 172 aa, Zea mays
  Coding DNA Sequence Number=SeqID_29335
MAWRASLGWRGKRARLHFYRGGEGDERAPGREERAALSTNNGPEKRNGGEGAMEVLSPLMEESEWGEGRNDRVTGREATLGAGCQGSRVSRAVGSSGCSWRGSVSRVGVAASRAGFCGPGASVGRLGVHGTGLGVGALGAIFWRRVGLGRRAGLASSWRRPLGESMGRRERN

SEQ ID NO: 71115 - protein, 53 aa, Zea mays
  Coding DNA Sequence Number=SeqID_29336
MAPHWPPSLTCTTNGCTLCLRASGLRVPSWPSHVLIDCHTRFWKVHKGFNTNQ

SEQ ID NO: 71116 - protein, 81 aa, Zea mays
  Coding DNA Sequence Number=SeqID_29337
MAPKKATSKATTSIDNAAKAALLAEKKGKAALVGDVPHEALEDGAVNSKRHRQENPPTPKGTVRTCNSEGLPRNPPLGFTP

SEQ ID NO: 71117 - protein, 185 aa, Zea mays
  Coding DNA Sequence Number=SeqID_29338
MNLTTLFGLRISPNTCWGIVLHCDWWSETRSQTSMVGDVDGRTGRELEEARTVAMARRVWDELDELRHEERGRASSKRVTRAGMGAEQSLGAKEGEAVGLRWGRRGSAGVEDGQREGESGECTAWGAAETRAHGKEIYSGEPIARAKESACLFASRRLGESLGTLGWVCTDNAPPCGRACAAVLY

SEQ ID NO: 71118 - protein, 60 aa, Zea mays
  Coding DNA Sequence Number=SeqID_29339
  Subcellular localization annotation: CTP_CleavageSite=47; ConfidenceScore=5.07e-01
MSSTAVGLWTNSRLGLRFFVWIGPGVWDVLNFFMFVSRALRMTFIEMASLEESETMPGST

SEQ ID NO: 71119 - protein, 667 aa, Zea mays
  Coding DNA Sequence Number=SeqID_29340
  Gene Ontology: Mol. function=polyamine oxidase activity; Cellular component=nucleus; Biological process=electron transport
  Homolog annotation: Hit_ID=O64411; Match level="QueryCoverage=80%, HitCoverage=99%, E-value=0.0, Identity=90%"; Hit description =Polyamine oxidase precursor
  Pfam annotation: Domain name=Amino_oxidase; Domain location=81-522; Score=343.5; E_value=3.6e-100; Accession=PF01593.14; Description =Flavin containing amine oxidoreductase
  Pfam annotation: Domain name=DAO; Domain location=83-520; Score= -56.7; E_value=0.035; Accession=PF01266.14; Description=FAD dependent oxidoreductase
  Pfam module annotation: Pfam domain module=Amino_oxidase::DAO; Domain location=81-522::83-520
  Subcellular localization annotation: CTP_CleavageSite=27; ConfidenceScore=5.14e-01
MSSSPSFGLLALAAVLLALNLAQHGSLAATVGPRVIVVGAGMSGNNKAPIYVVRLCDYALVLRIIYIYICAVLYATHGSLLPGISAAKRLSEAGITDLLILEATDHIGGRMHKTNFAGINVELGANWVEGVNGGKMNPIWPIVNSTLKLRNFRSDFDYLAQNVYKEDGGVYDEDYVQKRIELADSVEEMGEKLSATLHASGRDDMSILAMQRLNEHQPNGPATPVDMVVDYYKFDYEFAEPPRVTSLQNTVPLATFSDFGDDVYFVADQRGYEAVVYYLAGQYLKTDDKSGKIVDPRLQLNKVVREIKYSPGGVTVKTEDNSVYSADYVMVSASLGVLQSDLIQFKPKLPTWKVRAIYQFDMAVYTKIFLKFPRKFWPEGKGREFFLYASSRRGYYGVWQEFEKQYPDANVLLVTVTDEESRRIEQQSDEQTKAEIMQVLRKMFPGKDVPDATDILVPRWWSDRFYKGTFSNWPVGVNRYEYDQLRAPVGRVYFTGEHTSEHYNGYVHGAYLSGIDSAEILINCAQKKMCKYHVQGNCFFEACRMMNSRSLVDTALGIDSEIFSDRLSFICSVDLISEGPALVQSGATLTSIAFSNSPGLSLEILVGKGVAIFEGLKTTPRMLAILLPFLGVSTKADVILDSPCPTGELYGFGCFSALELSVFNFSI

SEQ ID NO: 71120 - protein, 76 aa, Zea mays
  Coding DNA Sequence Number=SeqID_29341
  Subcellular localization annotation: CTP_CleavageSite=50; ConfidenceScore=5.10e-01
MACPPHRHDRGPNEGAWPSVAGRGGAGPRRPDGPGPTRPGVARRPRRGLRLARKRPRRGPSRRLGARRLRRWIPAR

SEQ ID NO: 71121 - protein, 79 aa, Zea mays
  Coding DNA Sequence Number=SeqID_29342
  Subcellular localization annotation: CTP_CleavageSite=60; ConfidenceScore=5.21e-01
MVRGLPVAARPRPARRGTLPTQLTQPWRDPVRRPWRLGPARLGVSRPCAAWPRPGAASARAAVVPLRSAARALLGPGCM

SEQ ID NO: 71122 - protein, 184 aa, Zea mays
  Coding DNA Sequence Number=SeqID_29343
MSMGAPDSLVYHRTLSGVPATSPNRWGSGADDRWRLCLLVAPDSPVPHRTVDHCAKESLLRWCTGQSGGTPDSLVNYSGATLEKTEIAEFDPVRSWCTEHCPVAHRKRLNPISLSAGEGVLWRVPVRKSLCAGSRGHDGRAIPHRGGFPIAGPPYAVTLQPRHHSVPSDSDQNRSVRSTKEYEG

SEQ ID NO: 71123 - protein, 71 aa, Zea mays
  Coding DNA Sequence Number=SeqID_29344
MVLYAHELYNGLHSHLQASGIDGVKVDVIHVWCRSSPSASRVGLLSCHRPASPVKSATVLRSPSSGAGLLH

SEQ ID NO: 71124 - protein, 91 aa, Zea mays
  Coding DNA Sequence Number=SeqID_29345
MKCSLESAVKKLRLWLNFLTAQQCNGNECCAFENKSPTAAMGAGPSGTANEGHDEELDLFRPPASMNLADERSPAKGNGAAKDDENYNSIV

SEQ ID NO: 71125 - protein, 244 aa, Zea mays
  Coding DNA Sequence Number=SeqID_29346
  Gene Ontology: Mol. function=catalytic activity; Biological process =trehalose biosynthetic process
  Homolog annotation: Hit_ID=Q8H7S6; Match level="QueryCoverage=44%, HitCoverage=12%, E-value=1e-46, Identity=91%"; Hit description =Putative trehalose-6-phosphate synthase
MATIFMAAVVASDLGGISVRLGNHSRSMAVMAWEQVSDLEEVGHFQARPRLPPHGAPHLPAQAIQPHQARLLPALVVPLVRNLQDTPRARGASARPAQLDLIGFHTFDYARHFLSCCGRMLGLSYEFKRGHIRLEYYGRTVSIKILPVGVHMEQLKTVPEVMSGCQQYQFYCDLLAQPEADAIGVAFSDDWIFVGSVSKQLIVVFDFWFVRCQILRSGRYIVPKWSNRMTYSSSNSFPSVACHV

SEQ ID NO: 71126 - protein, 107 aa, Zea mays
  Coding DNA Sequence Number=SeqID_29347
VFYLELNCPSLQFEYGVKLKPLVCICDTTKFIKEKKCMTNEESTSSRCILFGAELPSLQFEYGVKLKPLVRICDTAKVLYSRMIGIAINYPDREFGITHAVFDSRMS

SEQ ID NO: 71127 - protein, 273 aa, Zea mays
  Coding DNA Sequence Number=SeqID_29348
  Homolog annotation: Hit_ID=Q6EN70; Match level="QueryCoverage=83%, HitCoverage=54%, E-value=2e-48, Identity=45%"; Hit description =Streptococcal hemagglutinin-like protein
  Subcellular localization annotation: CTP_CleavageSite=29; ConfidenceScore=5.51e-01
MAAAAAAAPPSECADLMPPPPTAPRPRRRAREVSSRYLSTPVPPTPRLSTVSFFDETGAGNPRASVGSNSADVLEATPRPLLRSTRGPVAPTARRGYPRLPTPARAGSCPTSAAVESDASSCCFSSDTSSTSTDFSEADGALGMAPAAPCESPTLLGPASCRGGRLSSELRSSVPESGGSSRASNPLCYRSLNSALSISMAMAGKPTPAGRPPQPQGPKATDLKKAATVGGRKAVGKQEDVHQLRLMDNSYLQYRLLNARAEAAGKAKAAAAE

SEQ ID NO: 71128 - protein, 150 aa, Zea mays
  Coding DNA Sequence Number=SeqID_29349
  Homolog annotation: Hit_ID=Q6EN70; Match level="QueryCoverage=96%, HitCoverage=23%, E-value=5e-34, Identity=67%"; Hit description =Streptococcal hemagglutinin-like protein
MISCLNQWSDVEGSYASCLRGATRALYNGSLRLPIIGSVDVNCEELTEVLKSATQLLEPLTSCIDNFLPKVEQIDDVACNLAQVIATEKTLIEECGNLLYHAQNLQPMSLPLAGICSDFATKYPTDAMTNSNCIDEGEQFVESSDATETK

SEQ ID NO: 71129 - protein, 129 aa, Zea mays
  Coding DNA Sequence Number=SeqID_29350
PTRHRCDEIIDYVKFLQLQVKVLSMSRLGGAAAVGPLVASMASKICVKNKTTGDLVLATAEINSSQVESHRALSDTCTQGVFKMFSTIPRVKSLAWGYCSDAFDDSSFNEILVVSSDASITVYVMCCDT

SEQ ID NO: 71130 - protein, 295 aa, Zea mays
  Coding DNA Sequence Number=SeqID_29351
  Gene Ontology: Mol. function=zinc ion binding
  Homolog annotation: Hit_ID=Q7F1V5; Match level="QueryCoverage=95%, HitCoverage=18%, E-value=7e-74, Identity=55%"; Hit description =Putative sno protein
  Pfam annotation: Domain name=DUF1610; Domain location=18-41; Score =3.5; E_value=1.7; Accession=PF07754.2; Description=Domain of unknown function (DUF1610)
  Pfam annotation: Domain name=DUF1610; Domain location=93-116; Score =11.1; E_value=0.098; Accession=PF07754.2; Description=Domain of unknown function (DUF1610)
  Pfam annotation: Domain name=zf-LSD1; Domain location=18-42; Score =2.9; E_value=1.3; Accession=PF06943.3; Description=LSD1 zinc finger
  Pfam annotation: Domain name=zf-LSD1; Domain location=93-117; Score =9.1; E_value=0.14; Accession=PF06943.3; Description=LSD1 zinc finger
  Pfam module annotation: Pfam domain module=DUF1610::DUF1610::zf -LSD1::zf-LSD1; Domain location=18-41::93-116::18-42::93-117
  Subcellular localization annotation: CTP_CleavageSite=80; ConfidenceScore=5.24e-01
MAGDSSPSPASAPVQVRCAGCRSILAVGLGVTEFICPKCRMAQRLPPQLMAKSTSPSSPLPKAPSKPSLPPTQPRMGAPSAQGVDPTKIQLPCAGCQAVLNVPHGLARFRCPQCGVDLAVDHAKLQNFLAASNSATSSGHAPTSVRTQPPLATFLSVLPLQLVPGATISMVLPAAEPHEEINEVRCCVIMLKALYNVVNLHNMFLGLCVAFSIVKVAIDVERDEDEGGTVGETFTDYRPSKLSLGLSHPDPVVETSSLSAVQPPEPTYCLNIMDELDETNALSCLQIETIVYACQ

SEQ ID NO: 71131 - protein, 85 aa, Zea mays
  Coding DNA Sequence Number=SeqID_29352
MAPRTRYLTTRGQSQRNARFAPATCPPCSVFRWGRHYAPGPIRQRQKGGERGAVGTDSQGPHSSEHGTRATDEWTPPVGAGVSLG

SEQ ID NO: 71132 - protein, 41 aa, Zea mays
  Coding DNA Sequence Number=SeqID_29353
MGKKRGILLEDLTAATIPIPRGLVESNLFYTKFDTFMVLIS

SEQ ID NO: 71133 - protein, 106 aa, Zea mays
  Coding DNA Sequence Number=SeqID_29354
  Gene Ontology: Mol. function=protein serine/threonine kinase activity; Cellular component=integral to membrane; Biological process=protein amino acid phosphorylation
  Homolog annotation: Hit_ID=O49318; Match level="QueryCoverage=50%, HitCoverage=5%, E-value=1e-12, Identity=62%"; Hit description =Putative receptor-like protein kinase
MASQSSSPLDWEMRFLIALGAAEGLSYLHRKIKSSNNILLDENFEALVGDFGLAKVIEVDVCSCSLVPVRDRATGRGPALRLVIVYPLTILRRRIDFVLCHSDVLG

SEQ ID NO: 71134 - protein, 107 aa, Zea mays
  Coding DNA Sequence Number=SeqID_29355
  Subcellular localization annotation: CTP_CleavageSite=61; ConfidenceScore=5.06e-01
MASRPTGVSAPVVGLSLLCLAELLGGTQSVDPASQSCSVGLGRPIRLAEFLSGTWSTGPPRRVVRRTWEPLNNGTTSWNVGNLNPNPGLGVYYIDQNSSEDPLPSLH

SEQ ID NO: 71135 - protein, 357 aa, Zea mays
  Coding DNA Sequence Number=SeqID_29356
  Gene Ontology: Mol. function=mismatched DNA binding; Cellular component=intracellular; Biological process=mismatch repair
  Homolog annotation: Hit_ID=Q1XBQ7; Match level="QueryCoverage=93%, HitCoverage=27%, E-value=1e-172, Identity=93%"; Hit description=DNA mismatch repair protein
  Pfam annotation: Domain name=GIY-YIG; Domain location=243-336; Score =9.1; E_value=0.076; Accession=PF01541.14; Description=GIY-YIG catalytic domain
  Pfam annotation: Domain name=MutS_V; Domain location=1-151; Score= -105.6; E_value=2.5e-07; Accession=PF00488.12; Description=MutS domain V
  Pfam module annotation: Pfam domain module=GIY-YIG::MutS_V; Domain location=243-336::1-151
MTMKCLRLPMIQDQEFLLFCGVAFIEMSEIRALVSRATARSLVLIDEICRGTETAKGTCIAGSIIERLDNVGCLGIISTHLHGIFDLPLSLSNTDFKAMGTEVVDGCIHPTWKLIDGICRESLAFQTARREGMPDLIITRAEELYLSMSTNNKQGASVAHNEPPNGSPSVNGLVEEPESLKNRLEMLPGTFEPLRKEVESAVTTMCKKILSDLYNKSSIPELVEVVCVAVGAREQPPPSTVGRSSIYVIIRSDNRLYVGQVIQPHKMPTLTTELLFFCLQTDDLLGRLNAHRSKEGMRDATVLYVLVPGKSVACQLETLLINQLPSRGFKLINKADGKHRNFGISRISGEAVATGRN

SEQ ID NO: 71136 - protein, 135 aa, Zea mays
  Coding DNA Sequence Number=SeqID_29357
  Gene Ontology: Mol. function=mismatched DNA binding; Cellular component=intracellular; Biological process=mismatch repair
  Homolog annotation: Hit_ID=Q1XBQ7; Match level="QueryCoverage=96%, HitCoverage=10%, E-value=7e-23, Identity=49%"; Hit description=DNA mismatch repair protein
  Subcellular localization annotation: CTP_CleavageSite=13; ConfidenceScore=5.12e-01
MAAPRRLHPPAPPAALLPSSRAVSFAVSIWPYLWGIGFGMFDRRAWSKPRKVSRGISVASRKANKQGEYCDEKNGEVQKTIIHTIDSEACVFKYIRVGSEFKKRKVCLKDGTLNMEILVFKSKFPREVLLCRGSG

SEQ ID NO: 71137 - protein, 264 aa, Zea mays
  Coding DNA Sequence Number=SeqID_29358
  Subcellular localization annotation: CTP_CleavageSite=32; ConfidenceScore=5.07e-01
MESLNLVVAGTSGRKDRYRRRSKTGCGLRRVRGSPAAASLSQGIGVPRRAALRPDLVERPLPMIKSKILYTSPLELYNHWILKNFIRSSSIFSGIQIVTELFYSSDCAVHGPEKTSRVVACLPAEEDVEQVVPRGRPAAAASWLTARVAVSVPLPLPLPVCSLAIITVHMKESPIASRQTRHCDRAVLSFTDGGGGGDQAGGSLSMDMGVGYCGGGGAECSSSSVATGATEEKQLLKGEMAVNPLCEQPVAAHVERERSTGRMK

SEQ ID NO: 71138 - protein, 374 aa, Zea mays
  Coding DNA Sequence Number=SeqID_29359
  Gene Ontology: Mol. function=sialyltransferase activity; Cellular component=integral to Golgi membrane; Biological process=protein amino acid glycosylation
  Homolog annotation: Hit_ID=Q4JEZ1; Match level="QueryCoverage=75%, HitCoverage=63%, E-value=2e-67, Identity=48%"; Hit description =Sialyltransferase-like protein
  Pfam annotation: Domain name=C1_3; Domain location=207-238; Score =6.9; E_value=0.079; Accession=PF07649.3; Description=C1-like domain
  Pfam annotation: Domain name=Glyco_transf_29; Domain location=61-362; Score=-2.3; E_value=5.4e-07; Accession=PF00777.9; Description =Glycosyltransferase family 29 (sialyltransferase)
  Pfam module annotation: Pfam domain module=C1_3::Glyco_transf_29; Domain location=207-238::61-362
MKRQWSHPSVVLPLLAAVFLLLTFRCSLRHAQQQASSLRADDAGTSTSYAVDATLAELAAVDPAASAVLRAAEALLEANLTRAPPERRNAAVRGLRDWLGKQRFEPQVMAELVDLIKRPMDRYAAGARGGDGDGDAPRPYASCAVVGNSGVLLAREHGALIDAHDLVIRLNNAPAGDGRYARHVGTKTGLAFVNSNVLSRCAARATPGCRRCRTYGDRVPILTYMCSAAHFVEHAVCAGGGGGPDAAAPVIVTDPRLDALCARLVKYYSLRRFVRDTGRPAEEWGTRHEEAMFHYSSGMQAVVAAAGVCARVSVFGFGKAPGARHHYHTLQRGELDLHDYEAEYEFYRDLQERPGAIPFLRDSGFRLPPVVVYR

SEQ ID NO: 71139 - protein, 202 aa, Zea mays
  Coding DNA Sequence Number=SeqID_29360
  Subcellular localization annotation: CTP_CleavageSite=83; ConfidenceScore=5.25e-01
MGTSPHVHVNQLLIHMSAANRTTFPLFIHFSGANDAMSRSIPAQLHKMQSPATLWLISRRSLRAVVTGLWGAERSSSVSEDVSAVGEQGAQSRRRLPKAIVPAPWTPGSCPRCRSGFNWGPGGFRPGVESTHLAAPGENLGWGRANCSPDLCSAADPSLVVASAHHYSNKGWGARLCVAGRGLRRGILTARPCSSERRVMAL

SEQ ID NO: 71140 - protein, 95 aa, Zea mays
  Coding DNA Sequence Number=SeqID_29361
MRMIRKINLMGVPLQVEDLLFNIDKKKQRKRVKASRPWLVLVINGNVILHVTNVCFAEANEVDIIPTSRDPFSSLGCKDPIFLSGDWAGDDYVPL

SEQ ID NO: 71141 - protein, 51 aa, Zea mays
  Coding DNA Sequence Number=SeqID_29362
MGQPGAVDRPAYAAGAVEERVTEDTGEQQIEVAEEELIEGKLCHLFTFATQ

SEQ ID NO: 71142 - protein, 150 aa, Zea mays
  Coding DNA Sequence Number=SeqID_29363
  Gene Ontology: Mol. function=DNA binding; Cellular component=nucleus; Biological process=regulation of transcription, DNA-dependent
  Homolog annotation: Hit_ID=Q8GRY3; Match level="QueryCoverage=58%, HitCoverage=32%, E-value=1e-19, Identity=57%"; Hit description=Myb13 protein
MDPQNQVPNAKMYMIYCNISLLSIKAVRVACLFWFCLSLAVGSSISVLPLRHQSEAPPQTLTEIAAKLPGRTDNEIKNHWNTHIKKKLVKMGIDPATHQPLANSKAAASSQSTVTDESAKTSNTRKELSLKKDGSRREAPLSTDSSEQSS

SEQ ID NO: 71143 - protein, 103 aa, Zea mays
  Coding DNA Sequence Number=SeqID_29364
  Homolog annotation: Hit_ID=Q8RUA3; Match level="QueryCoverage=75%, HitCoverage=7%, E-value=1e-07, Identity=38%"; Hit description =Putative disease resistance protein
MADAGVTGVLAKLGELTEEEATTLLRVDAEIRALRQKLAYLQALVRGADRQRRGRASELLLLWLRETRVVAFAGGSAIHSGDGSSSQDYHIYTEQACSHEVVM

SEQ ID NO: 71144 - protein, 93 aa, Zea mays
  Coding DNA Sequence Number=SeqID_29365
MAHHLGLLIVALLYACAFSGGLLVAASLALLASLAGALLVTLALAASDARRLAGLAARVAGLAAADLRLARAVAAYAVVKAASCALNCCSMSA

SEQ ID NO: 71145 - protein, 182 aa, Zea mays
  Coding DNA Sequence Number=SeqID_29366
MLKSRTWYLGLAAMHWTRIRWPPILLLHLFSAPCSHGNARRPLVLNPSSSLNGLLDYPSPRAGDPTVCLHCAGAAPALRHVSRHMGHHPPPPPRGQARCPTSWAHRRDPGHPSCSWCPARGVHALRMRPGRRDLPSVDQNVEQGRRENDEQVPFVIVYLNDFEGPNWGAADGVEVKNVGQQK

SEQ ID NO: 71146 - protein, 90 aa, Zea mays
  Coding DNA Sequence Number=SeqID_29367
  Subcellular localization annotation: CTP_CleavageSite=71; ConfidenceScore=5.17e-01
MAPQHIVLMVFQSSHQPKLATRDVTTATQSQVYHHDSACPNTYHAALVSFRSSFINYQGSGSRGLVMGKGQAAAGSRSLAIALEGNDARH

SEQ ID NO: 71147 - protein, 321 aa, Zea mays
  Coding DNA Sequence Number=SeqID_29368
  Homolog annotation: Hit_ID=Q4FCX5; Match level="QueryCoverage=28%, HitCoverage=15%, E-value=5e-31, Identity=66%"; Hit description=N -acylethanolamine amidohydrolase
MHLNSDGPDDPRKNHTIHQALGWDSEENGVGEDVVIQGVELEGEEDRVTPAGVGGGSRVEDDGSQRADVLDTRCLGVKGEGIRRVALVLLGEGSITFVFPSSGNSHRGNSEGHEQGGASVSDGGGEGRRNRGGGAGNALGANVEGKRCHRCKRKRRIGGMRGRDTSYRGGGGRRRGGQGRREDGRDQRMAGGDGQSEGGRGCSHRGLAAERRGGEEGEGAGVRVTAASITAPKIPPSALKSGESDYVVSAYLMRFIIAGNLLGLPAITVPVGHDKQGLPIGLQLIGRPWGEASLLRVASAVEELCLKKRKRPSAFYDILKA

SEQ ID NO: 71148 - protein, 38 aa, Zea mays
  Coding DNA Sequence Number=SeqID_29369
MSENTLLRIEASLREMCKERSLQNHFDNRYSPRLKLAV

SEQ ID NO: 71149 - protein, 253 aa, Zea mays
  Coding DNA Sequence Number=SeqID_29370
  Gene Ontology: Mol. function=amidase activity; Biological process =metabolic process
  Homolog annotation: Hit_ID=Q9FGF2; Match level="QueryCoverage=72%, HitCoverage=30%, E-value=1e-58, Identity=57%"; Hit description =Similarity to glutamyl-tRNA amidotransferase subunit A
MDEAGMSWTSIAPTGRSAPTDGQNPLYPLDDHFDKTAFATISGLVYSYKCHITHYVLSFVNSGVAAPNYSDPEPEVVLVDEDRDPVERVHEALRCLPQYDPSVRWTTEENPPFLYWKIRDFAHAYSSGITTPSVVAEYVIAGIEEWNNKKPPMPMLIYFNAEDLKKQAEASTKRFQRGNPISILDGIFVAIKDDIDCFPYPTKGATTFFDQIHTVERDAVCVARLRKCGVIFIGKANMHELGLGVTGNNPNYG

SEQ ID NO: 71150 - protein, 79 aa, Zea mays
  Coding DNA Sequence Number=SeqID_29371
MKIALLAGFYARHRPRLRSPSHDVSSETRKIAFQAGFYVLKCSSLGHFLSMVEMLRMVREARAEAMSSSNNSNRSPAWQ

SEQ ID NO: 71151 - protein, 58 aa, Zea mays
  Coding DNA Sequence Number=SeqID_29372
AWKSLAGGKQGFGRMVSLSTWFRYAAQKFEYCVSLSLKQRQLKNSSTAWAEFLLSAQE

SEQ ID NO: 71152 - protein, 420 aa, Zea mays
  Coding DNA Sequence Number=SeqID_29373
  Gene Ontology: Mol. function=nucleotidyltransferase activity; Cellular component=cytoplasm; Biological process=metabolic process
  Homolog annotation: Hit_ID=Q6ZJ97; Match level="QueryCoverage=96%, HitCoverage=99%, E-value=1e-172, Identity=73%"; Hit description =Putative UDP-N-acetylglucosamine pyrophosphorylase
  Pfam annotation: Domain name=UDPGP; Domain location=61-395; Score= -72.1; E_value=2.6e-14; Accession=PF01704.8; Description=UTP--glucose- 1-phosphate uridylyltransferase
MKEEMVVGLSAPGPVGRWGAAPPQAMLERMKDYGQEGAFALWDDLSPEDRELLVRDIESLDLSRIDRIIRRSLGSQGIPLPAVEPVPESSVSKVEDRSPEDKERWWKKGLKAISEGKLAVVLLAGGQGTRLGSSDPKGCFSPSNTVLIHWYIMTSPFTDASTRKFFETRRYFGLDPDQVTFFQQGTLPCVSADGRFIMETPYRVAKAPDGNGGVYAALKSKKLMEDMAARGVKYVDCYGVDNALVRVADPTFLGYFIDKGVSSAAKVVRKAYPQENVGVFVQRGRGGPLSVVEYSEMDAAMTTEINQSTGRLRYCWSNICLHMFTLDFLNQVANSLEKDSVYHLAEKKIPSIHGFTTGLKLEQFIFDAFTYSPSTELFEASKFPRFPPTPERTWKRSAAGERSMHPARYRFRISFCVTVD

SEQ ID NO: 71153 - protein, 345 aa, Zea mays
  Coding DNA Sequence Number=SeqID_29374
  Homolog annotation: Hit_ID=Q7G3M2; Match level="QueryCoverage=24%, HitCoverage=24%, E-value=3e-24, Identity=58%"; Hit description =Expressed protein
  Pfam annotation: Domain name=Collagen; Domain location=130-187; Score= -37.4; E_value=0.027; Accession=PF01391.8; Description=Collagen triple helix repeat (20 copies)
  Pfam annotation: Domain name=X8; Domain location=258-342; Score =171.7; E_value=1.8e-48; Accession=PF07983.3; Description=X8 domain
  Pfam module annotation: Pfam domain module=Collagen::X8; Domain location=130-187::258-342
  Subcellular localization annotation: CTP_CleavageSite=71; ConfidenceScore=5.17e-01
MAPKDRVPLVSAGLAVASLLLLLLCATRCEARAMAATARRLSSSSSSPLLNALFKLNFIRTVEPARRIPTAGDEEAASDINSPFCVNPPDAPSARPPFKPFTHSFPGQAQQLQPITTEPPSFEPSPPAPENGASGRRGWRSRTGAEGQSQGGDQGQGGGQGQGGSQGQGGGGGDQGQEGPPASTTPNSPPQVGPGGIPFGSVPPSPIVVVPSPPGSGPDPGSGLGGGGSGSDGGPFQPPIIYPPPLAPPLPPGAGQTLWCVAKPTVPDPIIQEAMDYACGAGAGCDSILPSGSCYRPNTVLAHASFAFNSYWQQAKATGGTCDFGGTATIVTRDPSYEECKFDLM

SEQ ID NO: 71154 - protein, 267 aa, Zea mays
  Coding DNA Sequence Number=SeqID_29375
  Homolog annotation: Hit_ID=O82347; Match level="QueryCoverage=49%, HitCoverage=63%, E-value=3e-22, Identity=34%"; Hit description =Expressed protein
  Subcellular localization annotation: CTP_CleavageSite=12; ConfidenceScore=5.43e-01
MAFLLPKLTTPSCKLPPSPLLKPQLVPPGHGGGKIQGSSVSGSGAAQVAAPGHLSLLLLLSASQQAAGPAAKSTATKNRGKGGGDPQRSDFYLNLGTAVRTLRDDLPDVFVRESNYDIYRWIRNFTGACCSEKIGLDVSRIWQLTANSIVVRWELWGTPRVPWESYGCFSGTSRYKVDRNGKIYEHRVDNLALDFPRSVARVGSIADMVVATPSPNLTFWNAVVTGDGCSWTKLYEAVVEAVEREEHSSTGIGPVGCSFGCGCGCSF

SEQ ID NO: 71155 - protein, 117 aa, Zea mays
  Coding DNA Sequence Number=SeqID_29376
  Homolog annotation: Hit_ID=Q6QP54; Match level="QueryCoverage=95%, HitCoverage=32%, E-value=2e-08, Identity=37%"; Hit description =Putative kinase
MAPPVDVVGPCPRLGEVEAPPRSRSSLSSKVEVESEPPGRTRRSSSSFGADPESEPWGRARRSSSSFGVEPESEPWGRSERSSSSFFIEPKSEPWCPAYRSSSSSGANPESEPWGRA

SEQ ID NO: 71156 - protein, 142 aa, Zea mays
  Coding DNA Sequence Number=SeqID_29377
  Homolog annotation: Hit_ID=Q6QP51; Match level="QueryCoverage=20%, HitCoverage=13%, E-value=1e-07, Identity=86%"; Hit description =Putative growth-regulating factor 1
MQAACDCTKGVHPFDFDASSMEAQAHTSCNRHASYYVPKTAAPPAPAPCLLDYGTGTGKGNTPKGILLREGSGPRAPLLIRGSKAGPSEGFDSRLRALGLRAHYWSEKINHLPQQWCIPQLKTVNRYLKKRDRIKGEHRKNK

SEQ ID NO: 71157 - protein, 211 aa, Zea mays
  Coding DNA Sequence Number=SeqID_29378
MGSMRCPAAPGETAVLGTEVGEAVWVDGAGRMSCRDGQWMREPGTAREAPRRRGRGKINKPSPQRAGFRERRRWSFCGGPRPAPLPTLRVPGAAGTGTVSCYSDSASDYSQARAVFAYRSIHRCKFISHCERVLPRAPIYLRMLEGSVSLSHIPQPATAAPSNENSHHGGNMHTVECPTPRKFNGSSRDPQLLLPVPVLAGDRLVDAMTRG

SEQ ID NO: 71158 - protein, 429 aa, Zea mays
  Coding DNA Sequence Number=SeqID_29379
  Homolog annotation: Hit_ID=Q53JL1; Match level="QueryCoverage=92%, HitCoverage=94%, E-value=2e-54, Identity=36%"; Hit description =Expressed protein
MDDSAGEADGRSQVSRNRGALLSSAPQPLSRSKPPDIKNWFSSYVYDSPEVTEHVADHDGGDGSETQDPFEHSSLKRSLQDGGVALTESGFGGQSEPENFPRKYLVPVDGNATKPAPKRKQSLRALFGASFLSEVEEVNATESHGLFPVQLNALKHVPDCRSLPLNEICETHSEKIDCTTSLPDATRHSQEATIEHKALVNFDRISSADTRESTPADEEVESKTSANCDDALLADTGEGFAEDINGHIELPGSFNNITRAGTGEKIQDGVDHSTHIVSRNRPSLAETEDNCALRETDSEENSPLGEADRCKLSSDSKRRQEIVASDGFIAVKRKRKQPEEHITNKNLRHLTGGEKQKRNLKENVSIPDQKVLVQEQTRRPLADRTNFSEVNASPAPEPSSKWKCPRKGKPYVGRPMKQLRLGQWVRRMN

SEQ ID NO: 71159 - protein, 407 aa, Zea mays
  Coding DNA Sequence Number=SeqID_29380
  Gene Ontology: Mol. function=ubiquitin-protein ligase activity; Cellular component=ubiquitin ligase complex; Biological process =protein ubiquitination
  Homolog annotation: Hit_ID=Q6ZGX9; Match level="QueryCoverage=98%, HitCoverage=96%, E-value=1e-148, Identity=67%"; Hit description =Putative immediate-early fungal elicitor protein CMPG1
  Pfam annotation: Domain name=U-box; Domain location=3-78; Score=67.0; E_value=6e-17; Accession=PF04564.6; Description=U-box domain
MEEPPQLFLCPISMELMEDPVTVSTGVTYDRRSIERWFFKYGKTTCPATMQRLNSFGLTPNHTLKRVISTWLDRASSSSSSTPLRNNLAREKLPSLLASIEATPFKVTALKNLRCCMDGDVAAQEDFVAYGGIQMLGRVMTQALAESCAGGDFSAFRTCEEAGAVLATLPLSDDASVELVLKPECMKPVVAVVQRGSAESRLHAMAILAKISSASGADRDWTPGVDVEDLVKSLLELLSDGASAKLSSRALDVLLDVMARSRGARRAKAVEVGAVCVLVELLPDASRRVAERALLLLKRMCKCPEGRLAFADHALAVSAVARTMLRVSGLASRLAVSVLWLVACAVTPAERVLDDMLMSGGVAKLLALLQVENSASTKEKAAKLLRMHGAFWRQYPCFPTGATPRGC

SEQ ID NO: 71160 - protein, 480 aa, Zea mays
  Coding DNA Sequence Number=SeqID_29381
  Gene Ontology: Mol. function=zinc ion binding; Cellular component =cytoplasm; Biological process=protein amino acid methylation
  Homolog annotation: Hit_ID=Q6L4V6; Match level="QueryCoverage=74%, HitCoverage=44%, E-value=1e-111, Identity=58%"; Hit description =Putative zinc finger protein
  Pfam annotation: Domain name=zf-C3HC4; Domain location=127-166; Score= 40.5; E_value=5.9e-09; Accession=PF00097.15; Description=Zinc finger, C3HC4 type (RING finger)
  Subcellular localization annotation: CTP_CleavageSite=28; ConfidenceScore=5.19e-01
MPAKKRRFPSLSSKPHGDVAAPTSDATSGGGVEGRGGRPPLPSRGACRPRLTDPEPQGGLEDDSDTEGDGGADGDSESSQSDGGGTDEFVDFGIFDVLHGLKLIVHCSVSLRFMLVKLAEIRKEVQCPICLGIIRKTRTVMECLHRFCRDCIDKSMRLGNNECPACRTHCASRRSLRDDPNYDALIAALYPDIDKYEEEIQETIEETFRRQSDAIGKKRSMAKATATAFARKYRRTRGRVRTIPPDIAPTGSSEEESGEGNSKETIREQSSADDHSPDLRQKRCRKRSGPQGSPAGTIGSIDYSFEENDELVGGKEILATSPLQGEMLAWGKNGARSQNRHGSVGSNGRTGRSGRIAKLVDYLHTADEMDKEFQLFLLLLPVDGQTIPNLEKPYLSCRPTLSIKHLAQLSCEVEELEMYIRMDRHRVSVGSRPSSTGEAKSRPFDDLERLNEEKLVSELHPSFVSSNGDMELRYALRTRE

SEQ ID NO: 71161 - protein, 150 aa, Zea mays
  Coding DNA Sequence Number=SeqID_29382
  Homolog annotation: Hit_ID=Q67U25; Match level="QueryCoverage=33%, HitCoverage=11%, E-value=4e-16, Identity=70%"; Hit description =Lustrin A-like
MLNFLERLLLKGDSMNRNQFESMLCVPREPLPDKAKMFEMHGYRISKGQGFFIFEFTILSIEDGTLLKSFSHLLHRNKKVDFIEQFNEKLLVKQEGKNLQILDVSLTPNCSQTKNTFARFDDNPLIRTKSMLAALFVKHRSTKMKNVSVR

SEQ ID NO: 71162 - protein, 148 aa, Zea mays
  Coding DNA Sequence Number=SeqID_29383
MKELKKRKQKQTKVTMKHCKVCVSKKKHKAQTSQASEEGETTPRYDEVMELLILEETPLASVASETKEDSTLEHFPSSTEEDERIAPVMCMFFFYDDDDNDDDDEKAEATTTKAMVMDDELLLLAAVVALNIMEIPQYSRQRHLRQPR

SEQ ID NO: 71163 - protein, 42 aa, Zea mays
  Coding DNA Sequence Number=SeqID_29384
MADNIGFPKHEARISMMPFDEFSEFLAYTHLKGLILSKALKN

SEQ ID NO: 71164 - protein, 220 aa, Zea mays
  Coding DNA Sequence Number=SeqID_29385
  Subcellular localization annotation: CTP_CleavageSite=45; ConfidenceScore=5.49e-01
MAQGIAKSTAPNTSKPPLGAKSAAPGPSKPLPAMPAQERRPPSPPCSAKTEVGISVEDYLVGSGCLTRLWCRVGGGQLDVVPAPMVAGSVAVTTGAKGSSQDPWSKFCSSGEIASAAAAKDVAGSVAQQLKHLFMLGGRLSRTYCIGALTSEFAAERRRLEGGIERLQTQHTEAVRDKSAEENKSRNLMEKLSAVEAEKEDLGRRLVVEKECADRACAEA

SEQ ID NO: 71165 - protein, 68 aa, Zea mays
  Coding DNA Sequence Number=SeqID_29386
MAQRLTWSTFVGERKKSGEGDSGSLDLAYWFQRYGALKSGLSLSLSLRQIFGFVVSRVRIPMESSDMW

SEQ ID NO: 71166 - protein, 44 aa, Zea mays
  Coding DNA Sequence Number=SeqID_29387
MACWRPERKKVTGGSVVAFTGAAVQKWSLTYLGLTYIHKPYLRV

SEQ ID NO: 71167 - protein, 170 aa, Zea mays
  Coding DNA Sequence Number=SeqID_29388
  Gene Ontology: Mol. function=DNA primase activity; Cellular component= alpha DNA polymerase:primase complex; Biological process=DNA replication, synthesis of RNA primer
  Homolog annotation: Hit_ID=Q69PX2; Match level="QueryCoverage=89%, HitCoverage=33%, E-value=1e-65, Identity=81%"; Hit description =Putative DNA primase large subunit
MEIVRSQRQVAAAASGGGGGGAGALPTYKAAPQLEVRLEEFELFAIDRLRVLKGISDGLSRGKRPEEMEKLVSELWKTHMRHQDPAENLNKDIISHFVLRLVYCRTEELRKWFLSMETTLFRYRFRLESPETQRMLMTEFQLPYKALPYSEFEFLAFSCLLREVIFVFMF

SEQ ID NO: 71168 - protein, 93 aa, Zea mays
  Coding DNA Sequence Number=SeqID_29389
MALSAVVPVDRIGHRCSPTCSSSPWLCQLPGFFPDHALHLLRARPGLGVLHWLLQWCPSPCWNSLGALPASLSLISLCWPELPHPSSMAALLP

SEQ ID NO: 71169 - protein, 1066 aa, Zea mays
  Coding DNA Sequence Number=SeqID_29390
  Gene Ontology: Mol. function=RNA-directed DNA polymerase activity; Cellular component=intracellular; Biological process=RNA-dependent DNA replication
  Homolog annotation: Hit_ID=UPI00005A975E; Match level="QueryCoverage =95%, HitCoverage=59%, E-value=0.0, Identity=89%"; Hit description =PREDICTED: similar to Retrovirus-related Pol polyprotein from transposon 297
  Pfam annotation: Domain name=RVT_1; Domain location=56-225; Score =146.2; E_value=8.8e-41; Accession=PF00078.17; Description=Reverse transcriptase (RNA-dependent
  Pfam annotation: Domain name=RnaseH; Domain location=455-583; Score =9.6; E_value=7.3e-06; Accession=PF00075.14; Description=RNase H
  Pfam annotation: Domain name=rve; Domain location=780-939; Score =113.4; E_value=6.4e-31; Accession=PF00665.16; Description=Integrase core domain
  Pfam module annotation: Pfam domain module=RVT_1::RnaseH::rve; Domain location=56-225::455-583::780-939
MPDIPRDVAEHSLDIRAGARPVRQPLRRFDEEKRRVIGEEIHKLMAAGFIKEVFHPEWLANPVLVRKKGGKWRMCVDYTGLNKACPKVPYPLPRIDQIVDSTAGCETLSFLDTYSGYHQIRMKESDQLATSFITPFGMYCYVTMPFGLRNAGATYQRCMNHVFGEHIGRTVEAYVDDIVVKTRKASDLLSDLEVTFRCLKAKGVKLNPEKCVFGVPRGMLLGFIVSERGIEANPEKIAAITSMGPIKDLKGVQRVMGCLAALSRFISRLGERGLPLYRLLRKAECFAWTPEAEEALGNLKALLTKAPILVPPADGEALLVYVAATTQVVSAAIVVERKEEGHALPVQRPVYFVNEVLSETKIRYPQVQKLLYAVILTRQKLRHYFESHPVTVVSSFPLGEIIQCREASGRIAKWAVEIMGETISFAPRKAIKSQVLADFVAEWVDTQLPTAPIQPELWTMFFDGSLMKTGAGAGLLLISPLGKHLRYVLRLHFPASNNVAEYEALVNGLRIAVELGVRRLDARGDSQLVIDQVMKNSHCRDPKMEAYCDEVRRLEDKFYGLELNHIARRYNETADELAKIALGRTTVPPDVFSQDLHQPSIKINDTPEPEAPSVQPEVPSAQPEASSVQPEVPSAPEGEALHVEEEQNGATPDRNWQTPYLQYLRQGELPLDQAEARRVARRAKSFVLLGDEEELYHRSPSGILQRCISIAEGQELLQEIHSGACGHHAAPRALVGNAFRRGFYWPTAVADATRIVRTCEGCQFYAKQTHLPAQALQTIPITWPFAVWGLDLVGPLQKAPGGYTHLLVAIDKFSKWIEVRPLNSIRSEQAVAFFTNIIHRFRVPNSIITDNGTQFTGRKFLDFCEDHHIRVDWAAVAHPMSNGPVERANGMILQGLKPRIYNDLNKFGKRWMKELPSVVWSLRTTPSRATGFTLFFLVYGAEAILPTDLEYGSPRTRAYNDQSNQASREESLDQLEEARDKALLHSARYQQSLRRYHARGVRPRDLQVGDLVLRLRQDARGRHKLTPPWEGPFVIAKVLKPRTYKLANNQGKIYDNAWNIQQLRRF

SEQ ID NO: 71170 - protein, 142 aa, Zea mays
  Coding DNA Sequence Number=SeqID_29391
MKGLLLGVFFSAEGPQDKVFIGKVILRTLSLPKILKTKILSGSNNDFALGHYNKFVEVRGTSSPALIGVVIRAAFRMGARHTYLHRDINGQENEEEVVVEEEVVPQAENPPVENNFYFDICGIDPEPPATQGKPRCIYHIPC

SEQ ID NO: 71171 - protein, 274 aa, Zea mays
  Coding DNA Sequence Number=SeqID_29392
  Homolog annotation: Hit_ID=Q10PC8; Match level="QueryCoverage=23%, HitCoverage=9%, E-value=1e-10, Identity=52%"; Hit description =Hydroxyproline-rich glycoprotein family protein, putative, expressed
MTTAAGMPGSPVGSAAAAGGPAAPEVAAMDAVIGWFRGEFAAANAMIDALCGHLAQIGGGGGAEYDPVFAALHRRRANWFPVLHMQKFYPVTDVNAELRRVAAARAAAGPCCYSEEEVASTVIHDPMEDLPSEAEPEPRPEHQQDPIHQDPAPEAEEADGTVINPALECHEEADAGADSSGDSSERKAPSTEDDTVPDGLLTSGTLLGFGLSLVPRRRPQADGRLVCSYGLRALERLRPTRLVWPRAANGLECIVAVGHTSLVDRDGSRRDFSR

SEQ ID NO: 71172 - protein, 107 aa, Zea mays
  Coding DNA Sequence Number=SeqID_29393
MALALAKQRKTLLTFVIEYDEKVCAFPTENDEKGCAFPTTAPVDFDITTTEGNNIPPTYRRNRMSIPDAAHMFEVLYVVMHNLEELQRGARINQLHIANLLHHGYIL

SEQ ID NO: 71173 - protein, 133 aa, Zea mays
  Coding DNA Sequence Number=SeqID_29394
MDSSNVYINGYYALNVSSDVRYRSRGWSGPAPQTVREDAYNSFYRTRHFRVFLVLHRPDGPRLRPDGPRLVSDGARFSIGRVPVLGSPWWTVRRKGPDRKPLDVFSKKLLQSGIIYGIPDSRVRMVVDELMHL

SEQ ID NO: 71174 - protein, 254 aa, Zea mays
  Coding DNA Sequence Number=SeqID_29395
  Gene Ontology: Mol. function=O-sialoglycoprotein endopeptidase activity; Cellular component=chromosome, telomeric region; Biological process=proteolysis
  Homolog annotation: Hit_ID=Q6L4N8; Match level="QueryCoverage=72%, HitCoverage=48%, E-value=7e-91, Identity=89%"; Hit description =Putative glycoprotease
  Pfam annotation: Domain name=PPR; Domain location=21-55; Score=44.5; E_value=3.7e-10; Accession=PF01535.11; Description=PPR repeat
  Pfam annotation: Domain name=Peptidase_M22; Domain location=6-188; Score=-28.7; E_value=0.0001; Accession=PF00814.15; Description =Glycoprotease family
  Pfam module annotation: Pfam domain module=PPR::Peptidase_M22; Domain location=21-55::6-188
MPEARRLFDQMAQVGIQVNTITFNVWIDGYAKSGQMDQASAAYSEMQARGLVPDSCTFNIIVARAHKFGLAKKGEQFIDVPYVVKSMDVSFSGILSFIEAAAIEKLKNNECTPADLCYSLQETIFAMLVEITESAMAHCDSKDVLIVGGVGCNERLQEMMKIMCSERGGRLFATDDCYCIDNGAMIAYTGLLAYAHGMTTPLEESTFTQRFRTDEVHAIWREKEMPVLNNTHSDAIAEVSIDEASMATPIVIDY

SEQ ID NO: 71175 - protein, 107 aa, Zea mays
  Coding DNA Sequence Number=SeqID_29396
  Homolog annotation: Hit_ID=Q1SGL9; Match level="QueryCoverage=49%, HitCoverage=14%, E-value=2e-08, Identity=54%"; Hit description =Protein phosphatase 2C-like
MSRAFDDYYIKDSGVISVSGVTQRRTDNNDESVILAIVGVWDVLSNDKTMYIMGLENLISLNICLVHEHVIDNYSVGIHMLILLVNIRGHGDKHEKNTSSELFVCFP

SEQ ID NO: 71176 - protein, 173 aa, Zea mays
  Coding DNA Sequence Number=SeqID_29397
  Homolog annotation: Hit_ID=Q2QVV5; Match level="QueryCoverage=47%, HitCoverage=10%, E-value=1e-09, Identity=44%"; Hit description =Leucine Rich Repeat family protein
MRIKNYRGTAKRKQHLGNQVHHLLETDKSTHQTVQSASCIGGLTSLVSLDLSTSYEFYDLLDDGFLLHRDSNSDARLTVQIFETLVANLRNLRELYLVVLSSDDGVGPRWRWCSIVAASCPELHVLSLPHCRLSGPICGHTGGSGDRGQGWPRRAGPRLASSGDFDLVEETRD

SEQ ID NO: 71177 - protein, 97 aa, Zea mays
  Coding DNA Sequence Number=SeqID_29398
MTASARPGERATNFAVACSLFSRFVRQNGAAPAQLGLGIKGEVEQQRTPATINLLPGVDGEETERRKETMELFPQSAGFGVKDPAAAPRCVLLLHIM

SEQ ID NO: 71178 - protein, 498 aa, Zea mays
  Coding DNA Sequence Number=SeqID_29399
  Gene Ontology: Mol. function=transferase activity, transferring glycosyl groups; Biological process=metabolic process
  Homolog annotation: Hit_ID=Q65XD0; Match level="QueryCoverage=95%, HitCoverage=95%, E-value=1e-120, Identity=51%"; Hit description =Putative flavonol glucosyltransferase
  Pfam annotation: Domain name=UDPGT; Domain location=6-483; Score= -42.0; E_value=1.7e-08; Accession=PF00201.9; Description=UDP -glucoronosyl and UDP-glucosyl transferase
MMQLADVLLEEGYAVAVALIDFTMDQDVTLAAAVDRVASAKPSVTIHRLPRIQNPPAITDCGGDGLLWYFKTVKRYNDPLREFLCSLQQQQPARSVVHAVILDGPSADALDVTKELGIPAYTLLRHQRLRRRGVPPASLDPRGRPSQASKELGDTPLSISGVPPMPASYLMPPMLDDPASETYKTMMRVSRRNPEPEGILVNTFASLEGRVLRALRDPLFLPIGDDGCRRMPPVYCVGPLVVGAGDGDGVGVGEAKEKHECLAWLDEQPERSVVFLCFGSLGAAAHSEEQLKEIAVGLERSGHRFLWVVRAPLPTEGVDPGRLFDPRADFDLCALLPAGFLERTRARGLVVKLWAPQVNVLNHRATGAFVTHCGWNSVMEAVTAGVPMLCWPMYAEQKMNSVVMVEEAGIGVDLVGWQQGLVNAEEVERKVKMVMEFKEGEQLRARVTAHRDAAAVAWKDGGSSRAAFGLFLSDVDNHVHKAKTWSSANGRDGKLGQS

SEQ ID NO: 71179 - protein, 35 aa, Zea mays
  Coding DNA Sequence Number=SeqID_29400
MESTRHKHPRPAIDQPLHDNCSAYKGWDEKVKGGD

SEQ ID NO: 71180 - protein, 132 aa, Zea mays
  Coding DNA Sequence Number=SeqID_29401
MASAVTSIDGERGSGGEGERRGRRWLQAWGGEQSGAAGARKRKWPGWASPASGREEGEMKGGKTRLWILEKSFRAKNPKVVTEVKHTEAEAKDDVAEVETISARAIEKAEDDAILKICEQIYDEAMRSDPGN

SEQ ID NO: 71181 - protein, 1009 aa, Zea mays
  Coding DNA Sequence Number=SeqID_29402
  Gene Ontology: Mol. function=binding
  Homolog annotation: Hit_ID=Q584G5; Match level="QueryCoverage=14%, HitCoverage=19%, E-value=3e-10, Identity=28%"; Hit description=TPR -repeat-containing chaperone protein DNAJ, putative
  Pfam annotation: Domain name=TPR_1; Domain location=910-943; Score =18.2; E_value=0.029; Accession=PF00515.18; Description =Tetratricopeptide repeat
  Pfam annotation: Domain name=TPR_1; Domain location=944-977; Score =6.5; E_value=0.89; Accession=PF00515.18; Description=Tetratricopeptid e repeat
  Pfam annotation: Domain name=TPR_2; Domain location=866-899; Score =9.3; E_value=2.7; Accession=PF07719.7; Description=Tetratricopeptide repeat
  Pfam annotation: Domain name=TPR_2; Domain location=910-943; Score =6.7; E_value=5.5; Accession=PF07719.7; Description=Tetratricopeptide repeat
  Pfam annotation: Domain name=TPR_2; Domain location=944-977; Score =11.9; E_value=1.4; Accession=PF07719.7; Description=Tetratricopeptide repeat
  Pfam module annotation: Pfam domain module=TPR_1::TPR_1::TPR_2::TPR _2::TPR_2; Domain location=910-943::944-977::866-899::910-943::944-977
  Subcellular localization annotation: CTP_CleavageSite=44; ConfidenceScore=5.59e-01
MANPVLGLGLAPPGAEPSAGTPPSSRRAPRLAKRRHAPASSRFRAAQASVGTWNPFGGGGGTDGQTRGFVFGAASPVSQQPSEPAVEISSSSEAPFVFQSVRENLPRFEEGLSGSSMLPDKMGKLNLRTSGEVGDGLGQGRDRKDGSSAFGVDISGLFSNKEDNGLQEKLTQLNLGHREPLQSEKRDSANGVPQAFVFGCNGAGSFADCKNTVASGAQSDDPSSVCGTDAKAMAGKSTQFNIGSQAPSWGGGIEGTNGAPEAFTFQSTAVSGHVDNINNVVSGANTSANTSSSTVAKGVGDVDLLPEKLTRLNIGSDMPLHESKSGYQPKVFRAVQGTIFGNETSSTSDRSSEFLSANSNTSSSSSDLFSTANSNTSNSANGTYCFPPEKTPDLNAGEGVMSESLESDSSNCPPQTFLFERNETRSSVSHSASIAMDDGGNFVNHKNTDTCSSARGTFDYAGALPEKMTKLNIGCRNSYHSRKDETATEPPEVFVFGCNVSSFSSTHTASKSHDPTTPEFCFQSKAEATSGYGAVPQTKVQESYLFTTLNNSCSPSTFENAVPAFSFGTMDAEIETAPDDHFSVKQDLPGFSRETLFGLDSIKSAYKDKREAHKGKMKNKRPTRLKQHAQLHQVISKEACNDGKSSDLAGDYSPMDCSPYPAEAEHVPTEAYVASGQPVHIGDSVISNWNTSCAEDDVVSATEHLIIDVNLPMFGDEGRGPKLDASESNFGSSFSSFQGDQSNGPQHSFTNIGQDCNDNTYRTPHDFVEPPAFQSSSSNFSGLNFRFGVSSSPQISAAAQRRNTRRKLRTKGSLASKPSTIGSFEQSKSSQDTKGMRFFCETSKNEDPVKEQPSRKSSTSAALEACETWRTSGNKAYENGHFATAEDYYTRGINSVTHYGVSGHCSRALMLCYSNRAATRMSLGMMWEALQDCLTATSIDPTFLKAKVRAANCHLALGDLEDALRSYMACLNSNTGSSSDPKILAEASDGLERVKGRSSARGSYMSGVW

SEQ ID NO: 71182 - protein, 272 aa, Zea mays
  Coding DNA Sequence Number=SeqID_29403
  Homolog annotation: Hit_ID=Q70WY6; Match level="QueryCoverage=28%, HitCoverage=15%, E-value=3e-09, Identity=48%"; Hit description =Chaperone protein dnaJ
  Pfam annotation: Domain name=DnaJ; Domain location=139-221; Score =75.1; E_value=2.2e-19; Accession=PF00226.21; Description=DnaJ domain
MTHGWGPLPSTLGIGNIGACLCLRRVLGLSKPIVRLAHDSLTALTSTSTFSCTDCRDYVAVFVYGALLHYSQPDAWRPALTSASDLCVLRPRLVRAQLPYARHLDNGSAVLALGYLDIIDTKGYRLHELLLGFFYSHCLFTATQGVEPSCSSADIKKAYRKAALRHHPDKAAQLLVRNENAEDGFWRDVIKEVYADADHLFKTIGEAYNVLSDPDKRQEYDFEENLRNARRVSSSRSMRRSPEHNYSDRGFNPRQWQSSRASRWYSKSDDYW

SEQ ID NO: 71183 - protein, 245 aa, Zea mays
  Coding DNA Sequence Number=SeqID_29404
MTIEETQKELMQAVAFCVDNVEVAKCKDGRAIVKVSCIGQAVVSEAYYGFAKPENASKTKARTDVANTECTRQRAPTMRHRLKGPAKKASTTIVVQNGKEGGASCFQLSTSRRLVVGSALGSRLATGEVGSTFLASRATWQRLEILSRLVIDLVWQVGRLVSQFAQAAQRSIIQHKPYLPAPLAASSQSSTRRPSSARPHSKLCKLAQPLLTLPRPLINLQEALMRQGEMEDASTDRPQGESGNQ

SEQ ID NO: 71184 - protein, 78 aa, Zea mays
  Coding DNA Sequence Number=SeqID_29405
MVVSAGGAHRCEFLEQEIISDLGEGWERGDLHEDGSQLDREGVEDLGVDHAVYLPLGMCRHGTVSEDVVAEGITVDSQ

SEQ ID NO: 71185 - protein, 161 aa, Zea mays
  Coding DNA Sequence Number=SeqID_29406
HGHTGHGREHSELTRRPYNSTRKGEGDELREDSGSITSGRVRDAIGAGAVGIRWWVAREASRSSVTGGDEVGAGGTERNRLVEAVVSGGGWSSIGNSEADDDTDKKDAGCGFGCGQGLVYQGTQSRLARSRPRVGTVVPDELTPRPRASSGGGRTLDSPEA

SEQ ID NO: 71186 - protein, 202 aa, Zea mays
  Coding DNA Sequence Number=SeqID_29407
  Gene Ontology: Mol. function=metal ion binding; Cellular component =nucleus; Biological process=regulation of transcription, DNA -dependent
  Homolog annotation: Hit_ID=Q5QLR5; Match level="QueryCoverage=98%, HitCoverage=45%, E-value=1e-52, Identity=47%"; Hit description=C -terminal zinc-finger-like
  Pfam annotation: Domain name=zf-C3HC4; Domain location=150-190; Score= 42.2; E_value=1.7e-09; Accession=PF00097.15; Description=Zinc finger, C3HC4 type (RING finger)
MPNGNIQDYQAGHSSIHGPLPHFCQIPLRSMQVPQIQVPHQQFIGNNVVHGLNPSAAGLPLDPRMLAFPFNDEHTFGHQVHPPLINQANNGALRILPYQELVALQEQIGDVNTGLTESYIQENLRSTFHVPGAASISDQFCELSLENDACIICQEEYEARELIGALECGHKYHEDCIKQWLMVKNVCPICKTTALSSDRRNG

SEQ ID NO: 71187 - protein, 177 aa, Zea mays
  Coding DNA Sequence Number=SeqID_29408
MEIGYFHWHWCKPMVILFPLVVTLQQPPVQIVGGSVKKTTKIGFDSRFVKPTACDLCCINAPSSSPTGVVPHSQLTLETILGVQISQNIRGGFDLHFWKKFAKKGDYGEDILDVYLSRLNSSNISEVHRFIDVATNYAWRTKAKHIYCPCVECKNVVVFNDIEQTIYEGLYNLDKVW

SEQ ID NO: 71188 - protein, 91 aa, Zea mays
  Coding DNA Sequence Number=SeqID_29409
MSGEHAKKELITREKPGSSGKKNEGKTLSKEAKLTRRRHLDLVKLLIVVLLLATCSSPVGGLYHKGELTKVHRSTSVGNNVHELTKKWGLM

SEQ ID NO: 71189 - protein, 145 aa, Zea mays
  Coding DNA Sequence Number=SeqID_29410
MTALGLRIYGPDLTTHTTNRAAEMAFQLQPAARIDGHATALFVPTVARGGLRRDEVRGQSPTYPALKSPRSGPGARNKRLRIPRRSSAMLGGMVEGERLQSGPTRQRYKRERVAGARGPAGRDREGERARDATDSRAPGVSGSAR

SEQ ID NO: 71190 - protein, 173 aa, Zea mays
  Coding DNA Sequence Number=SeqID_29411
  Subcellular localization annotation: CTP_CleavageSite=43; ConfidenceScore=5.33e-01
MELSLPAEPSPFLPLPSSLSSGGLLPGRDLATGARPHLLARTRARRRDRLRPPRPPRPSSLPLLCLCDRPPTPSCRALVAALRPRREPSVVAVVVVARVGACPCNTPATVPTPFVNHPPSVEPHRNSRPTVQTHRRSYAVRHRRDRAAHQLDHPRPRRSSSSVHPRLKRIKTI

SEQ ID NO: 71191 - protein, 149 aa, Zea mays
  Coding DNA Sequence Number=SeqID_29412
  Gene Ontology: Mol. function=nucleic acid binding; Cellular component= intracellular; Biological process=DNA integration
  Homolog annotation: Hit_ID=Q3LRV2; Match level="QueryCoverage=86%, HitCoverage=71%, E-value=1e-41, Identity=54%"; Hit description=Gag
MKKVVYYETGSFTPSTSNAESTSSKRQEHKKYSKIPLRYARIPKRASLLFVPLGKPPYFDGEDYSMWSDKMKHHLTSLHESIWDIVEFGAQARQVGDEDYDSDEAAQDVFKMAHEGDKVIKITKRETIEGNSVGSSSTKEKSHKLGSRP

SEQ ID NO: 71192 - protein, 573 aa, Zea mays
  Coding DNA Sequence Number=SeqID_29413
  Gene Ontology: Mol. function=nucleoside-triphosphatase activity; Cellular component=integral to membrane; Biological process=transport
  Homolog annotation: Hit_ID=Q6YYM2; Match level="QueryCoverage=99%, HitCoverage=86%, E-value=0.0, Identity=57%"; Hit description =Putative ABC transporter AbcG1
  Pfam annotation: Domain name=ABC2_membrane; Domain location=308-514; Score=174.7; E_value=2.3e-49; Accession=PF01061.14; Description=ABC -2 type transporter
  Pfam annotation: Domain name=ABC_tran; Domain location=74-264; Score =9.6; E_value=2.4e-08; Accession=PF00005.17; Description=ABC transporter
  Pfam module annotation: Pfam domain module=ABC2_membrane::ABC_tran; Domain location=308-514::74-264
  Subcellular localization annotation: CTP_CleavageSite=77; ConfidenceScore=5.25e-01
FEEVAYKVKLGKPTTTTAGWCDKLSAAAASMAVGGGRKKKATAAAAGSSPSSPAALREKTRTIISGMSGVVRPGEMLAMLGPSGSGKTTLLTALGGRHGGGGRALLSGKITYNGQPFSGGVRRRTGFVTQHDVLYPHLTVAETLWYAAALRLPRALGAGEKRARAEAVARDLGLGKVARPAWWAGCAACGGCRAASAKRVSIGLEVLPSSRLYHMFDKVLLLSADGRPIYYGRAADALSYFASVGFASPLSLNPADLMLDLANGIAPQTTSGDGMAALLAGGGEGEHKEVRGRLSAAYERHIAPAVKLDFAVLVQRGLKERRHESFNKLRVFQVLSVAALAGLLWWRTPASHLQDRTALVFFFSVFWGFFPLYNAVFTFPLERPMLLKERASGMYRLSSYVASRAATDLPMELGLPTAFVLILYWMGGLDPRPGPFLLSLAVVLYSVLVAQSLGLAIGAVLMDVKQGTTLASVITMVFLIAGGYYVQHIPPFVAWLRWLNYSFYCYRLLLGIQFPDGGGYYDCGHGALCPVAEFPAIKAVGLNNHWVDACVMALMLVGYRVVAYIALDRLKPR

SEQ ID NO: 71193 - protein, 233 aa, Zea mays
  Coding DNA Sequence Number=SeqID_29414
  Homolog annotation: Hit_ID=Q651V3; Match level="QueryCoverage=28%, HitCoverage=14%, E-value=9e-17, Identity=73%"; Hit description=NAM -like protein
MATRSKSNARVDGAGPSRLSWAARGKTEDSLISWEIGMESGLELGPGLLQSCTCGVWASSVINSVRGVTVLDCVHCAIDLLPGDGRGEEVCGKVPAIQSDGAALSNSILHASFSQLASLEFHNPSSSHMSMPPSFQQLLEVYNPFLERAEQPNSQETTKETHSPLPQVGSKQKKVSRRGGGFTKEEDRVICSAFLNVSKDPITGVNQSSGGTTSAFLSILMLESPQVPIEARL

SEQ ID NO: 71194 - protein, 91 aa, Zea mays
  Coding DNA Sequence Number=SeqID_29415
MELRFGEKFPAPQQSPTRLLPPTASSHTSESPETRFGAEAPSDTVYAMAARCAPPTRALSARPQPYNGVAIVETGLTEDYGATYRHKTVGA

SEQ ID NO: 71195 - protein, 151 aa, Zea mays
  Coding DNA Sequence Number=SeqID_29416
MVEFSGLVPDSWQSMCPLPKLVMERRIYYDEVERLLVEWINMSNELYNIVSVLESHNLILSFRYSAGSDWFTLPASVKCVFAFSTIPGLQYACSGAEQQHVALYDAAEAPSPLSGGSTTTPESSPSSSRFEFQRTDAGNRHREASFTSPTE

SEQ ID NO: 71196 - protein, 77 aa, Zea mays
  Coding DNA Sequence Number=SeqID_29417
MQVACNRTARAHPLGFVASSMDPQAHTSWTKKGDISKGILLREGSGPRALLLIRGSKAGPSEGFDSRPRALRLQAHY

SEQ ID NO: 71197 - protein, 70 aa, Zea mays
  Coding DNA Sequence Number=SeqID_29418
  Subcellular localization annotation: CTP_CleavageSite=30; ConfidenceScore=5.07e-01
MASILNPPPLQANDSGNQGGGGDPAPPPPRQDQSSPLQGTRAGVARLTNVALHQGNRIEKEIENWKGILF

SEQ ID NO: 71198 - protein, 304 aa, Zea mays
  Coding DNA Sequence Number=SeqID_29419
  Gene Ontology: Mol. function=DNA binding; Cellular component =chromosome, pericentric region; Biological process=chromosome organization and biogenesis (sensu Eukaryota)
  Homolog annotation: Hit_ID=UPI00005A5838; Match level="QueryCoverage =44%, HitCoverage=87%, E-value=2e-58, Identity=86%"; Hit description =PREDICTED: similar to histone 1, H2ai (predicted)
  Pfam annotation: Domain name=CBFD_NFYB_HMF; Domain location=232-297; Score=5.1; E_value=0.051; Accession=PF00808.13; Description=Histone -like transcription factor (CBFNF-Y) and archaeal histone
  Pfam annotation: Domain name=Histone; Domain location=226-300; Score =142.9; E_value=8.5e-40; Accession=PF00125.14; Description=Core histone H2AH2BH3H4
  Pfam module annotation: Pfam domain module=CBFD_NFYB_HMF::Histone; Domain location=232-297::226-300
MPPPPLRARTRPVPLARTNRPICPIRESRTGHLHAASAPSSCRPKVAHRPLTVLRLAKEDKVENSLPKERRNTRHLVGLTIHFKTASANGVAPLPVTRIGTSSRATPAVHLHPTADAVSPKIFAIPPCFCLLQMPAPRHRPSIHSSHPISNFKSFDRAAPPALSQLSPMARTKQTARKSTGGKAPRKQLATKAARKSAPATGGVKKPHRFRPGTVALREIRKYQKSTELLIRKLPFQRLVREIAQDFKTDLRFQSSAVAALQEAAEAYLVGLFEDTNLCAIHAKRVTIMPKDIQLARRIRGERA

SEQ ID NO: 71199 - protein, 362 aa, Zea mays
  Coding DNA Sequence Number=SeqID_29420
  Gene Ontology: Mol. function=binding; Cellular component =intracellular; Biological process=regulation of transcription
  Homolog annotation: Hit_ID=Q6Z996; Match level="QueryCoverage=86%, HitCoverage=50%, E-value=1e-132, Identity=51%"; Hit description =Putative pentatricopeptide (PPR) repeat-containing protein
  Pfam annotation: Domain name=PPR; Domain location=163-196; Score =27.1; E_value=6.3e-05; Accession=PF01535.11; Description=PPR repeat
  Pfam annotation: Domain name=PPR; Domain location=197-231; Score =11.2; E_value=0.35; Accession=PF01535.11; Description=PPR repeat
  Pfam annotation: Domain name=PPR; Domain location=232-266; Score=9.4; E_value=0.57; Accession=PF01535.11; Description=PPR repeat
  Pfam annotation: Domain name=PPR; Domain location=298-332; Score =11.1; E_value=0.36; Accession=PF01535.11; Description=PPR repeat
  Pfam annotation: Domain name=PPR; Domain location=62-96; Score=35.3; E_value=2.1e-07; Accession=PF01535.11; Description=PPR repeat
  Pfam module annotation: Pfam domain module=PPR::PPR::PPR::PPR::PPR; Domain location=163-196::197-231::232-266::298-332::62-96
MHRHLFYLCQFKGHAVIPAVAATIQLVVANFGTSPTLEISRKQSQLEIAHRIFQNMTAKSTVTWTALISGYAQDNQVEPCLHLFALMRQSVCKPNDITFATILSVCTNHAFLVLGKSVQALQMRMGFGSYVHVSNALISMYAKCGSIGEARAVFESITCKDLVSWNSLIFGYSQHGLAEHCLYLLREMEGHIIPDAISFLGVLSSCRHACLVAEGRRCFRAMIEHGVIPEIDHYSCMVDLFGRAGLLDEAWDLIQTMPMPPNGVIWGSLLASCRLHGSISIGIQAAEHRLKLEPSCAATHVQLANLYGSIGCWDDVARVRKVMKERGLKTNIGSAWKMMGNKLGYFDAMGCAMLCKGASFIV

SEQ ID NO: 71200 - protein, 118 aa, Zea mays
  Coding DNA Sequence Number=SeqID_29421
  Homolog annotation: Hit_ID=Q1RSU0; Match level="QueryCoverage=83%, HitCoverage=14%, E-value=1e-17, Identity=39%"; Hit description=Tudor
METFVMIIIKRLKDANLFVSQGGLIILAQEVEECLLKVEQSPPESTSNALQVATAALDVFSLIVEAFKHLDDIESPFFGRRTSIFDTVAKVRSCVVMLDLECDDLINDMFHHFLRTVK

SEQ ID NO: 71201 - protein, 112 aa, Zea mays
  Coding DNA Sequence Number=SeqID_29422
MGVGKTLSTARAIPRWKEERVEKCRCAGEQSRSAPPNEVFPHSKEAHGQDFEGAVEAICGSQATTLIPFAAARNSCVCGRKGERKRDEWIESTAEPFMHPLRGQRGPVLDLL

SEQ ID NO: 71202 - protein, 65 aa, Zea mays
  Coding DNA Sequence Number=SeqID_29423
MAVGTMLSTTRAIPQWKERAAPNEVFPHSKEALGQDFEGAVDDSLRFTSGGPDSFRSSEKFLRLL

SEQ ID NO: 71203 - protein, 146 aa, Zea mays
  Coding DNA Sequence Number=SeqID_29424
MDSDSALAVARDDVSSSLDSEMSLDSVASDSESTLDSFELAMDSAAEEVAPDSFELTLDSFELVPDSAAEEVAPKAKSGELELGPFLCGSCGVVHDNRASWNRVHSTFRPCSRCGVINKDNLIDALLHGAQEWDCKPECDGKASQV

SEQ ID NO: 71204 - protein, 470 aa, Zea mays
  Coding DNA Sequence Number=SeqID_29425
  Gene Ontology: Mol. function=methyltransferase activity; Cellular component=cellulose and pectin-containing cell wall; Biological process=metabolic process
  Homolog annotation: Hit_ID=Q6EP94; Match level="QueryCoverage=91%, HitCoverage=61%, E-value=0.0, Identity=78%"; Hit description =Dehydration-responsive family protein-like
  Pfam annotation: Domain name=DUF248; Domain location=9-460; Score =723.3; E_value=1.7e-214; Accession=PF03141.7; Description=Putative methyltransferase
  Subcellular localization annotation: CTP_CleavageSite=54; ConfidenceScore=5.58e-01
MALASFAGVGSFQSLLRLSGQRVFVSVNGSHPGSFCCFVQVASWGAYLLSRDILAMSFAPRDSHEAQVQFALERGVPAMIGVLASNRLTYPARSFDMAHCSRCLIPWQLYGMLNLYRPQCYKGSLSSADYPVASWSDVRADGLYLIEVDRILRPGGYWILSGPPINWKKHWKGWDRTKEDLDAEQKAIEAVARSLCWKKIKEAGDIAIWQKPTNHIHCKAIHKVSKSIPFCSNQNPDAAWYDKMEACITRLPEVSDLKEVAGGALKKWPERLTAVPPRIASGSIEGVTEEMFVEDTELWKKRVGHYKSVIAQLGQKGRYRNLLDMNAKFGGFAAALVNDPLWVMNMVPTVGNSTTLGAIYERGLIGSYQDWCEGMSTYPRTYDLIHADSLFTLYNGRCEADNILLEMDRILRPEGTVIIRDDVDMLVKIKSITDGMRWNSQIVDHEDGPLVREKLLLAVKTYWTLDDSKQ

SEQ ID NO: 71205 - protein, 136 aa, Zea mays
  Coding DNA Sequence Number=SeqID_29426
  Gene Ontology: Mol. function=protein binding; Biological process =ubiquitin cycle
  Homolog annotation: Hit_ID=Q6EP91; Match level="QueryCoverage=82%, HitCoverage=36%, E-value=2e-27, Identity=58%"; Hit description=F-box protein-like
  Pfam annotation: Domain name=F-box; Domain location=23-70; Score =24.8; E_value=0.00032; Accession=PF00646.23; Description=F-box domain
MGVGASSVGAAEGCGRGWGPRHTSLGDMPESCVAAVLLYLDPAEICQVACLNRAFRGAASADCIWAAKLPANHRYLAALAAAADDDDCSCGCDGVAAEGSCSTVAIKKELYARLCRPTPFDGGTKMPHDFGARWSN

SEQ ID NO: 71206 - protein, 68 aa, Zea mays
  Coding DNA Sequence Number=SeqID_29427
MEAEVAAQIYETAIGSGASELLVRAVAKARRDGGGRVRRLRVAAWGRSRIGEGGGNGLTQLVLCILLD

SEQ ID NO: 71207 - protein, 409 aa, Zea mays
  Coding DNA Sequence Number=SeqID_29428
  Gene Ontology: Mol. function=oxidoreductase activity; Cellular component=integral to membrane; Biological process=electron transport
  Homolog annotation: Hit_ID=Q7XU38; Match level="QueryCoverage=94%, HitCoverage=75%, E-value=0.0, Identity=88%"; Hit description =Cytochrome P450 87A3
  Pfam annotation: Domain name=p450; Domain location=37-409; Score= -18.0; E_value=3.7e-10; Accession=PF00067.12; Description=Cytochrome P450
  Subcellular localization annotation: CTP_CleavageSite=22; ConfidenceScore=5.06e-01
MAPMAYIAACAAALSAFVALLHWAYRWSHPRSRGRLPPGSMGIPLLGETMQFFAPNPTCDVSPFVKERVRRYGSIFKTSIVGRQVVVSADPDMNYFVFQQEGKLFESWYPDTFTEIFGRDNVGSLHGFMYKYLKTLVLRLYGQENLKAVLLAETDAACRGSLASWAAQPSVELKEGLSTMIFDLTAKKLIGYEPSKSSESLRKNFVAFIRGLISFPVNIPGTAYHECMEGRKNAMKVLKGMMKERMADPERRCEDFFDHVIQELRREKPLLTETIALDLMFVLLFASFETTALALTLGVKLLTDSPKVVDALREEHDAIAKNRNDPDAPVTWAEYRSMTFTNQVIMEMVRLANIVPGIFRKALQDVEIKGYTIPAGWGVMVCPPAVHLNPDIYEDPLAFNPWRWQSEVL

SEQ ID NO: 71208 - protein, 110 aa, Zea mays
  Coding DNA Sequence Number=SeqID_29429
MATRWQHRHRFLLAPLLLSLLAATAERCEQSYGFLPYTTTVLGNLFLVLEYAFVMYKVTMYLSAGSELLLEIMGVGLVGGLLLPILSALPDALLMVYKFDLGALNENVEG

SEQ ID NO: 71209 - protein, 88 aa, Zea mays
  Coding DNA Sequence Number=SeqID_29430
  Homolog annotation: Hit_ID=Q6QP51; Match level="QueryCoverage=98%, HitCoverage=56%, E-value=3e-22, Identity=52%"; Hit description =Putative growth-regulating factor 1
MVRLVRAQGRARQRLLLRPRPGSGKDVIPPEAEVEAEPWGRARRRPPSEAEPHPGGWHSSRSGASGAVFLSGRSVKGRSDCGHFDLAD

SEQ ID NO: 71210 - protein, 90 aa, Zea mays
  Coding DNA Sequence Number=SeqID_29431
MRVRHNATKVSATLVSEEHPWRPCNFTEAPSQPQIRLRPSTGIPAAQPMRPLCFLVIDAQSRGEEPIIEDPGDQKIEVAEQKLIEGKLCP

SEQ ID NO: 71211 - protein, 239 aa, Zea mays
  Coding DNA Sequence Number=SeqID_29432
  Gene Ontology: Mol. function=RNA-directed DNA polymerase activity; Cellular component=mitochondrion; Biological process=RNA-dependent DNA replication
  Homolog annotation: Hit_ID=UPI00004C1731; Match level="QueryCoverage =99%, HitCoverage=19%, E-value=5e-87, Identity=60%"; Hit description =UPI00004C1731 related cluster
  Pfam annotation: Domain name=rve; Domain location=73-231; Score=57.9; E_value=3.3e-14; Accession=PF00665.16; Description=Integrase core domain
MYEALVNGLRFAVDLGVRRLDARGDSQLVIDQVMKNSHCRNRKMEVYCDKVRRLEDKFYGPELNHIARRYNETVDELAQIASGRTTVPPDVFSRDIHQPSVKIDDTPEPEEASAQPEKALGGFSHLLVAIDKFSKWIEVRPLTSIRSEQAVAFFTNVIHRFGVLNSIITDNGTQFTGKKFLDFCEDHHIRVDWAAVAHPMTNGQVERANGMILQGLKPMIYNDLNKFDKWWMKELPSVV

SEQ ID NO: 71212 - protein, 62 aa, Zea mays
  Coding DNA Sequence Number=SeqID_29433
MAHRSGPGAIEPATLENSPGALHYNSPDCPMNMDEQCRAESEQQSQRSTDSVRCAIGLSGVA

SEQ ID NO: 71213 - protein, 166 aa, Zea mays
  Coding DNA Sequence Number=SeqID_29434
  Gene Ontology: Mol. function=zinc ion binding; Cellular component =COPII vesicle coat; Biological process=ER to Golgi vesicle-mediated transport
  Homolog annotation: Hit_ID=Q9ZQH3; Match level="QueryCoverage=66%, HitCoverage=14%, E-value=5e-28, Identity=49%"; Hit description =Expressed protein
  Pfam annotation: Domain name=zf-Sec23_Sec24; Domain location=49-86; Score=27.6; E_value=1.7e-05; Accession=PF04810.5; Description =Sec23Sec24 zinc finger
MAVRASLACFPSDPALHAACGMPWGVAITPFSATDERGFPPATGTEGHLLPRCQSCFAYFNLLCPLDRWSWNCAICGAENDLSADAAARYARDGGHDPPEMRSAFVDLLLPARCGTVRYCGNLVVVEFCSGGGRGGSGGGSDARVRGGDRLVLDSIGFLGGSRVGS

SEQ ID NO: 71214 - protein, 184 aa, Zea mays
  Coding DNA Sequence Number=SeqID_29435
  Gene Ontology: Mol. function=2 iron, 2 sulfur cluster binding; Cellular component=chloroplast; Biological process=electron transport
  Homolog annotation: Hit_ID=P27788; Match level="QueryCoverage=72%, HitCoverage=86%, E-value=6e-29, Identity=51%"; Hit description =Ferredoxin-3, chloroplast precursor
  Pfam annotation: Domain name=Fer2; Domain location=65-144; Score =83.8; E_value=5.2e-22; Accession=PF00111.17; Description=2Fe-2S iron- sulfur cluster binding do
  Subcellular localization annotation: CTP_CleavageSite=57; ConfidenceScore=5.43e-01
MAMATFTSSPVLCSFRTIEQKKAPLLNNSTKRPLHLGFPRSVPTSPSLRERLDLRVAAVYKVKLLGPEGQESVLDVPEDSYILDAAEEAGLDLPYSCRAGACSTCAGKLLEGSVDQADQSFLDEAQVGAGFRLSASPWKETVKQMGAFRDVAAANADGKRLRRRKAGWAGGRNDLDATRQERVT

SEQ ID NO: 71215 - protein, 56 aa, Zea mays
  Coding DNA Sequence Number=SeqID_29436
MKMSRLSPPLGAMPPPASSRERGELVSIVINTELPHDLGLGLGASRGAAHGDELPD

SEQ ID NO: 71216 - protein, 562 aa, Zea mays
  Coding DNA Sequence Number=SeqID_29437
  Gene Ontology: Mol. function=hydrolase activity, hydrolyzing O -glycosyl compounds; Cellular component=apoplast; Biological process =carbohydrate metabolic process
  Homolog annotation: Hit_ID=Q9SBI2; Match level="QueryCoverage=96%, HitCoverage=96%, E-value=0.0, Identity=71%"; Hit description=Cell wall invertase Incw2
  Pfam annotation: Domain name=Glyco_hydro_32C; Domain location=391 -514; Score=170.2; E_value=5.4e-48; Accession=PF08244.2; Description =Glycosyl hydrolases family 32 C termi
  Pfam annotation: Domain name=Glyco_hydro_32N; Domain location=52-350; Score=467.5; E_value=1.6e-137; Accession=PF00251.10; Description =Glycosyl hydrolases family 32 N termi
  Pfam module annotation: Pfam domain module=Glyco_hydro_32C::Glyco _hydro_32N; Domain location=391-514::52-350
MRALGTVAWAWLLLLQQLAGASHVVYENLEVEATTAAVRPSIVDPLLRTGYHFQPRKNWINAPLYYKGWYHLFYQYNPKGAVWGNIVWGHSVSRDLINWVALQPAIEPSIPSDRCRTWAYPRNRSDPLLREWVKPSHNPIIVPGGGINATQFRDPTTAWRAAGDGLWRLLIGSVTEARHGVAYVYRSRDFRRWTRARRPLHSAATGMWECPDFYPVGAPGRRAGVETETSAVSDGDGGSPRRRQQAKYVLKNSLDLRRYDYYTVGTYDRAAERYVPDDPAGDERHLRYDYGNFYASKTFYDPVKQRRVLWGWANESDTAADDVAKGWAGIQAIPRTVWLDPSGKQLLQWPIEEVEALRGRSVALKNRVIKPGQHVEVTGIQTAQADVEVSFEVSSLAGAEALLDPALASDAQRLCGARGAAVEGGVGPFGLWVLASGDREERTAVFFRVFRRGGGGGHDKPVVLMCTDPTKSSLDANLYQPTFAGFVDTDISNGKISLRTLIDRSVVESFGAGGRTCILSRVYPSIAIGSKARLYVFNNGRADVRVSRLTAWEMKKPLMNGA

SEQ ID NO: 71217 - protein, 79 aa, Zea mays
  Coding DNA Sequence Number=SeqID_29438
MAAASSTAASLHGDDAMAAAPSTATKQPLLDRAEVRVGAGGGGEGEALEAVFLALHCAAHLAAAAVVAHEKRARAGTGH

SEQ ID NO: 71218 - protein, 143 aa, Zea mays
  Coding DNA Sequence Number=SeqID_29439
MPRAQPSATLPPHLAPTLDISSHDSSGISYHDSSSISSHDDSFSYSTGDVITTRPWPTPSERYNHDSPEANPARETQSQLARGQPRAGYTVTARPRPNPGQETQSCLARGQPRAGDTVTARPRPSLGGRRSHVSPEANLGRET

SEQ ID NO: 71219 - protein, 139 aa, Zea mays
  Coding DNA Sequence Number=SeqID_29440
  Gene Ontology: Mol. function=zinc ion binding; Cellular component =COPII vesicle coat; Biological process=ER to Golgi vesicle-mediated transport
  Homolog annotation: Hit_ID=Q9ZQH3; Match level="QueryCoverage=89%, HitCoverage=17%, E-value=6e-31, Identity=53%"; Hit description =Expressed protein
MVIYQIFQILGAERRLRVRTIQYNTTANIWDLYDFVDPDVVLTILVHQVILASLSDALETRLWLQDWLVVVIAQYNKAYKNVTSGGGTEIYNIDVNFSHCSQLQPLSRFVFAILLSPLLQVSSEGIHPDYVTYLQCLLR

SEQ ID NO: 71220 - protein, 98 aa, Zea mays
  Coding DNA Sequence Number=SeqID_29441
  Homolog annotation: Hit_ID=Q9ZQH3; Match level="QueryCoverage=61%, HitCoverage=8%, E-value=4e-09, Identity=47%"; Hit description =Expressed protein
MALAGLLRSTVDRLKQERNITPKLVFIHGAHDDTTEFEKYLVEDQTLDGSPLSSSTGFSSFLDEVSGATSDICYLMILNAPTNLDFVLVRRLLHEKEF

SEQ ID NO: 71221 - protein, 194 aa, Zea mays
  Coding DNA Sequence Number=SeqID_29442
MLETPSRLDGCWRRGLHGVRCTQLPAIPAGYPGPETPCFVARKGRTAAPSSAHNDSSPRFPEHSSSVLIIAVVGAGGENVRQNRHIHHKRTQFESYGCGGGNTWVPRHQGSSAPPSRGGPSVHARQPVLTFAAGSSDRWAYSHQAVMARRVAGGVFAVGVSAPRCLLFIAVLCGGGRNTTAVGCKRDGVDQFNA

SEQ ID NO: 71222 - protein, 86 aa, Zea mays
  Coding DNA Sequence Number=SeqID_29443
MGVERRELGAMSVRRLLNHSSEPSTARNLKLAMERGSQLHDYRSTIRAPGCIGSDSDESSTVLGRVAMPSRYSGRRVVTASRCMAY

SEQ ID NO: 71223 - protein, 181 aa, Zea mays
  Coding DNA Sequence Number=SeqID_29444
  Homolog annotation: Hit_ID=UPI0000DA43ED; Match level="QueryCoverage =60%, HitCoverage=19%, E-value=8e-07, Identity=32%"; Hit description =PREDICTED: similar to keratinocytes proline-rich protein
  Subcellular localization annotation: CTP_CleavageSite=19; ConfidenceScore=5.26e-01
MSDGLGDPSFWLMFLQRLRAVARTATVVVSVEPSPASSAIGSSASPDPRARTWPRPRKTTNSASPDPRARTQPRLRKTTNSASPDPRARTRPRPRKTTNSASPDPRARTQPRLRKTTNSASPDPRARTQPWPQTMVSASPDPGLRLDLGRQTRPRPRRSLCLARPRARTDHVTGGPSLSYP

SEQ ID NO: 71224 - protein, 119 aa, Zea mays
  Coding DNA Sequence Number=SeqID_29445
  Gene Ontology: Mol. function=transferase activity, transferring glycosyl groups; Cellular component=membrane; Biological process =protein amino acid glycosylation
  Homolog annotation: Hit_ID=Q8W0S0; Match level="QueryCoverage=83%, HitCoverage=15%, E-value=1e-46, Identity=91%"; Hit description =Putative galactosyltransferase family
VQNLTATNIMKCDDDTFVRVDVVLRHIKLNNGDKPLYMGNLNLLHRPLRTGKCAVTNEEWPEDIYPPYANGPGYVIYGDIAKFIVSQHANQSLRRSPMEDEDQYEKDMQPDDTVADEDM

SEQ ID NO: 71225 - protein, 68 aa, Zea mays
  Coding DNA Sequence Number=SeqID_29446
MMVVECLSIGIVLWVESVGLTRVPKTVVDDEGEHHAGSYIWTESGEVQTLSLDRETRDAGWIYLVENT

SEQ ID NO: 71226 - protein, 52 aa, Zea mays
  Coding DNA Sequence Number=SeqID_29447
MVQGLGGGMRVVLDGVAAVQQIVVDGIKALLGELMRLTNTKMKMKANMCSDV

SEQ ID NO: 71227 - protein, 48 aa, Zea mays
  Coding DNA Sequence Number=SeqID_29448
  Gene Ontology: Mol. function=protein kinase activity; Biological process=protein amino acid phosphorylation
  Homolog annotation: Hit_ID=Q1ENV7; Match level="QueryCoverage=83%, HitCoverage=8%, E-value=4e-09, Identity=63%"; Hit description =Protein kinase family protein
MIEGCLPYYDKKNDEIEKAHNSKERPPFRAPPKHYAHGLRERDLSSVS

SEQ ID NO: 71228 - protein, 82 aa, Zea mays
  Coding DNA Sequence Number=SeqID_29449
  Subcellular localization annotation: CTP_CleavageSite=35; ConfidenceScore=5.22e-01
MAPEGLGCQGGRFAMEGSCSRGLGAHSNRGMVGPTSMTSSPCRWLRRRRRPWQRQRRGGALRGELLWLYDQVDVLVVGDRFV

SEQ ID NO: 71229 - protein, 370 aa, Zea mays
  Coding DNA Sequence Number=SeqID_29450
  Homolog annotation: Hit_ID=Q1SL66; Match level="QueryCoverage=96%, HitCoverage=58%, E-value=9e-96, Identity=52%"; Hit description =Aldehyde oxidase and xanthine dehydrogenase, a/b hammerhead; Membrane attack complex ...
  Homolog annotation: Hit description=component/perforin/complement C9
  Pfam annotation: Domain name=MACPF; Domain location=133-312; Score =84.7; E_value=2.8e-22; Accession=PF01823.10; Description=MACPerforin domain
MSLTGSALEAALQAVGRGLDAAGDHRLLYCKGGGRLVALEEDRARDLPLPDGGVLPSVPPDVEVEQCRRDPERIRPFPSGPSSAAADGPFVCSFDKMAEYFNRKSCLSETVPLGSFNSLFSFTGSWKNDAAATKALAIDGYSLPLFRVKIRSSELTLLESVKHAIPNVWDPSALASFIENYGTHIIISVTVGGKDEVYIKQHSSSQLSGLEFKNYVREIGRERFSDVENKSNATPINYSEKKCVVFSGLRQDITVIFRRRGGCDLVQSFSDWKGTVASAPDVIGMTFLSIVSLVDDVPGKKHLARAVELYLTYKPPIEELQYFLDFQVPLVWAPAPPGIASHHRKEPVCPSLQFSLMGPKLFISTEQEML

SEQ ID NO: 71230 - protein, 90 aa, Zea mays
  Coding DNA Sequence Number=SeqID_29451
  Subcellular localization annotation: CTP_CleavageSite=64; ConfidenceScore=5.26e-01
MAHRTLSGAPGQAANEPATLGFLPDALHYNSPACPVSQRSNGSLRANGRLLRCTVMNSAVTEVRAQKSEGTGLSGAAKRQTTTTVNSSKP

SEQ ID NO: 71231 - protein, 79 aa, Zea mays
  Coding DNA Sequence Number=SeqID_29452
MGTDSLLPPDPKWTSQIRSTLNRTGLIVTAHVDPTASGHRLHTMPDRMVLPTAHDGSLTGECPLDAPRSRNPPQVVKGK

SEQ ID NO: 71232 - protein, 33 aa, Zea mays
  Coding DNA Sequence Number=SeqID_29453
MKHNEFTTRTELKSLTRLIKCAETDCGRLRILK

SEQ ID NO: 71233 - protein, 43 aa, Zea mays
  Coding DNA Sequence Number=SeqID_29454
MGDHILGRVRGYVHCQVHSGTRLTDLPYFSDLVNIMLSERKLS

SEQ ID NO: 71234 - protein, 93 aa, Zea mays
  Coding DNA Sequence Number=SeqID_29455
  Subcellular localization annotation: CTP_CleavageSite=28; ConfidenceScore=5.09e-01
MYVSAQGTRTMEVGPLVIAHGWQFPAVAAGSPSAVARGLHAMISGEASSPRIDFFSSTLTIVESSSCAWESRQGSATMAPWRCTLAVVAWDTG

SEQ ID NO: 71235 - protein, 110 aa, Zea mays
  Coding DNA Sequence Number=SeqID_29456
MAQEVGRSDGNGATALRRVAAGRHRRRVEAEFPACCRGEEGLPGRCFGCSLTAAGKTWGAMAEGVKIWALGAAAAACVVARLGEEEDWEGARLLAMDSREREEGMGGMGA

SEQ ID NO: 71236 - protein, 86 aa, Zea mays
  Coding DNA Sequence Number=SeqID_29457
MGDMGVGEVAAHHACSQAANGVLTIYRHSGTGRGLGAFAALGFGQLGSIGHVAGGRTAEVATPPSWLRLVEEDEASAVDQLMGGHD

SEQ ID NO: 71237 - protein, 68 aa, Zea mays
  Coding DNA Sequence Number=SeqID_29458
  Subcellular localization annotation: CTP_CleavageSite=36; ConfidenceScore=5.34e-01
MDGGRAVLTKPSKQLPPILGHQSSTITIDTLLKRMRSSLTPCFSSSDDVPQFPSRRQLFFRTDPLGSR

SEQ ID NO: 71238 - protein, 100 aa, Zea mays
  Coding DNA Sequence Number=SeqID_29459
MSGDHAKREIVTGDKPASSGRTLSRESGNKHKEESSSSIKSHRRGNKKKKMKKVVYYESDSSSPFTSSSESSVASKRHECNKYSKPPYLMVRIIVCGVIK

SEQ ID NO: 71239 - protein, 209 aa, Zea mays
  Coding DNA Sequence Number=SeqID_29460
  Gene Ontology: Mol. function=phosphoethanolamine N-methyltransferase activity; Biological process=metabolic process
  Homolog annotation: Hit_ID=Q6QA26; Match level="QueryCoverage=95%, HitCoverage=30%, E-value=7e-62, Identity=64%"; Hit description =Phosphoethanolamine N-methyltransferase
  Pfam annotation: Domain name=Methyltransf_11; Domain location=118 -209; Score=49.1; E_value=1.5e-11; Accession=PF08241.2; Description =Methyltransferase domain
  Pfam annotation: Domain name=Methyltransf_12; Domain location=118 -209; Score=23.7; E_value=0.00066; Accession=PF08242.2; Description =Methyltransferase domain
  Pfam module annotation: Pfam domain module=Methyltransf _11::Methyltransf_12; Domain location=118-209::118-209
MDAAAAAAVVSLNGKMGAEERKAQKSYWEEHSKNLTVEAMMLDSRAADLDKEERPEVFRCIYCYCLVLVPFWIQLLGYGQHLSDTQPLLRGIPWQSLKGRVVSPVLSLLPSYEGKSVLELGAGIGRFTGELAKTAGNVLALDFIESAIKKNESINGHYKNASFMCADVTSQDLVLQANSIDLIFSNWLLMYLSDEEVEQLVQRMVKWLK

SEQ ID NO: 71240 - protein, 74 aa, Zea mays
  Coding DNA Sequence Number=SeqID_29461
MATRAREKLRERLLKERPRCCIHHLIAARLGKEGDGGCDQWLATENGILDGSEGSVVAFIGWNREPGRSDRPQL

SEQ ID NO: 71241 - protein, 1027 aa, Zea mays
  Coding DNA Sequence Number=SeqID_29462
  Gene Ontology: Mol. function=protein serine/threonine kinase activity; Cellular component=integral to membrane; Biological process=protein amino acid phosphorylation
  Homolog annotation: Hit_ID=Q6K2G4; Match level="QueryCoverage=95%, HitCoverage=97%, E-value=0.0, Identity=48%"; Hit description =Putative leucine rich repeat containing protein kinase
  Pfam annotation: Domain name=Kdo; Domain location=705-915; Score= -84.8; E_value=0.06; Accession=PF06293.4; Description=Lipopolysacchari de kinase (Kdo)
  Pfam annotation: Domain name=LRRNT_2; Domain location=48-88; Score =37.6; E_value=4.2e-08; Accession=PF08263.3; Description=Leucine rich repeat N-terminal domain
  Pfam annotation: Domain name=LRR_1; Domain location=105-127; Score =11.9; E_value=1.7; Accession=PF00560.23; Description=Leucine Rich Repeat
  Pfam annotation: Domain name=LRR_1; Domain location=129-151; Score =15.5; E_value=0.2; Accession=PF00560.23; Description=Leucine Rich Repeat
  Pfam annotation: Domain name=LRR_1; Domain location=153-175; Score =10.5; E_value=3.1; Accession=PF00560.23; Description=Leucine Rich Repeat
  Pfam annotation: Domain name=LRR_1; Domain location=177-200; Score =4.2; E_value=46; Accession=PF00560.23; Description=Leucine Rich Repeat
  Pfam annotation: Domain name=LRR_1; Domain location=204-226; Score =14.9; E_value=0.3; Accession=PF00560.23; Description=Leucine Rich Repeat
  Pfam annotation: Domain name=LRR_1; Domain location=228-250; Score =18.4; E_value=0.027; Accession=PF00560.23; Description=Leucine Rich Repeat
  Pfam annotation: Domain name=LRR_1; Domain location=252-275; Score =9.9; E_value=4.1; Accession=PF00560.23; Description=Leucine Rich Repeat
  Pfam annotation: Domain name=LRR_1; Domain location=277-299; Score =10.6; E_value=3; Accession=PF00560.23; Description=Leucine Rich Repeat
  Pfam annotation: Domain name=LRR_1; Domain location=301-323; Score =11.3; E_value=2.2; Accession=PF00560.23; Description=Leucine Rich Repeat
  Pfam annotation: Domain name=LRR_1; Domain location=325-347; Score =11.8; E_value=1.8; Accession=PF00560.23; Description=Leucine Rich Repeat
  Pfam annotation: Domain name=LRR_1; Domain location=349-371; Score =7.0; E_value=14; Accession=PF00560.23; Description=Leucine Rich Repeat
  Pfam annotation: Domain name=LRR_1; Domain location=373-395; Score =13.8; E_value=0.61; Accession=PF00560.23; Description=Leucine Rich Repeat
  Pfam annotation: Domain name=LRR_1; Domain location=397-416; Score =8.5; E_value=7.3; Accession=PF00560.23; Description=Leucine Rich Repeat
  Pfam annotation: Domain name=LRR_1; Domain location=420-441; Score =9.3; E_value=5.2; Accession=PF00560.23; Description=Leucine Rich Repeat
  Pfam annotation: Domain name=LRR_1; Domain location=446-469; Score =11.9; E_value=1.7; Accession=PF00560.23; Description=Leucine Rich Repeat
  Pfam annotation: Domain name=LRR_1; Domain location=471-490; Score =1.1; E_value=1.7e+02; Accession=PF00560.23; Description=Leucine Rich Repeat
  Pfam annotation: Domain name=LRR_1; Domain location=492-514; Score =10.5; E_value=3.1; Accession=PF00560.23; Description=Leucine Rich Repeat
  Pfam annotation: Domain name=LRR_1; Domain location=516-538; Score =18.2; E_value=0.03; Accession=PF00560.23; Description=Leucine Rich Repeat
  Pfam annotation: Domain name=LRR_1; Domain location=540-562; Score =5.8; E_value=23; Accession=PF00560.23; Description=Leucine Rich Repeat
  Pfam annotation: Domain name=LRR_1; Domain location=564-586; Score =20.1; E_value=0.0079; Accession=PF00560.23; Description=Leucine Rich Repeat
  Pfam annotation: Domain name=LRR_1; Domain location=588-612; Score =6.8; E_value=15; Accession=PF00560.23; Description=Leucine Rich Repeat
  Pfam annotation: Domain name=LRR_1; Domain location=614-637; Score =9.3; E_value=5.1; Accession=PF00560.23; Description=Leucine Rich Repeat
  Pfam annotation: Domain name=Pkinase; Domain location=736-985; Score =150.0; E_value=6.1e-42; Accession=PF00069.15; Description=Protein kinase domain
  Pfam annotation: Domain name=Pkinase_Tyr; Domain location=736-1016; Score=122.1; E_value=1.6e-33; Accession=PF07714.7; Description =Protein tyrosine kinase
  Pfam module annotation: Pfam domain module=Kdo::LRRNT_2::LRR_1::LRR _1::LRR_1::LRR_1::LRR_1::LRR_1::LRR_1::LRR_1::LRR_1::LRR_1::LRR _1::LRR_1::LRR_1::LRR_1::LRR_1::LRR_1::LRR_1::LRR_1::LRR_1::LRR
  Pfam module annotation: Pfam domain module=Pkinase_Tyr; Domain location=705-915::48-88::105-127::129-151::153-175::177-200::204 -226::228-250::252-275::277-299::301-323::325-347::349-371::373 -395::397-416::420-441::...
  Pfam module annotation: Domain location=446-469::471-490::492 -514::516-538::540-562::564-586::588-612::614-637::736-985::736-1 16
  Subcellular localization annotation: CTP_CleavageSite=43; ConfidenceScore=5.18e-01
MAPHPKLYRLSGPHTMALSLLHLALLTTMASSLLTPAPPALVSASNATATDLSALLAFKHRLSDPGDVLRGNWTPGTPYCGWVGVSCGHRHRQRVTALALAPRRAARRLNLSGTELTGNIPASLGKLPRLLSLDLSNNYLSGAVPATLGNLTALGILSLDSNNLTGEVPHELSNLRSVGFLTLSRNDLSGPLAQGLFNGTSSTQLSFLSLAHNSLTGDIPSAIASLQNLQVLELSGTQLSGQIPSSLFNMSSLLGLYLSRNHLSGPVPDNQSFNLPLLERVYLSKNELTGTVPPGFGTCKYLQQLVLPYNRFTGGIPPWLSTLPELTWISLGGNDLSGEIPAVLSNITGLTVLDFTTSRLHGEIPPELGRLAQLQWLNLEMNNLTGTIPASIRNLSMLSILDVSFNSLTGPVPRKLFGESLTELYIDENKLSGDVGFMADLSGCRSLKYIVMNSNSFAGSFPSSTLANLSSLQIFRAFENQITGHIPNMPSSVSFVDLRDNRLNGEIPQSITELRNLRGLDLSSNRLSGTIPAHIGKLTELFGLGLANNELHGPIPDSIGNLSNLQVLELSNNHLTSVIPPGLWGLENIVGLDLSRNALRGSFPPEESLANLSYLTSLNLSFNRLHGRVPEGGVFSNITLQSLEGNAALCGLPRLGLPRCPTDEFDDDHRHRSGVLKIVLPSAAAAIVVGACLFILVRARAHVNKRAKKLPVAASEEANNRKTVSYLELARATNGFDDGNLLGAGSFGKVFRGVLDDGQTVAVKVLDMELERATVSFDAECRALRMARHRNLVRILTACSNLDFRALVLPYMPNGSLDEWLLCRDRRGLSLSRRVSIMSDVALAVAYLHHEHFEVVLHCDLKPSNVLLDQDMTACVADFGIARLLPGDDTSVVSRNMQGTIGYMAPEYASTGKASRKSDVFSYGVMLLEVVTGKKPTDAMFSEELSLREWVRQAIPSGLAHVVDHSILLVDEEATSSGDVLRADWSCLAQMLNLGLQCSCDLPEDRVSMKDVADELARIKKSLLCSS

SEQ ID NO: 71242 - protein, 480 aa, Zea mays
  Coding DNA Sequence Number=SeqID_29463
  Gene Ontology: Mol. function=RNA-directed DNA polymerase activity; Cellular component=intracellular; Biological process=RNA-dependent DNA replication
  Homolog annotation: Hit_ID=UPI00004C1733; Match level="QueryCoverage =99%, HitCoverage=37%, E-value=0.0, Identity=89%"; Hit description =UPI00004C1733 related cluster
  Pfam annotation: Domain name=RnaseH; Domain location=356-475; Score= -32.3; E_value=0.059; Accession=PF00075.14; Description=RNase H
MADVCRLHWSKQSMSEGYHQIRMKESDQLATSFITPFGMYYYVTIPFGLRNAGATYQRCMNHVFGEHIGRTVEAYVDDIVVKTKKASDLLSGLETTFRCLKAKGVKLNPEKCVFGVPRGMLLGFIVSERGIEANPEKIAAITNMGPIKDLKGVQRVMGCLAALSRFISRLGERGLPLYHLLRKAECFTWTPEAEEALENLKALLTNAPILVPPAAGEALLIYVAATTQVVSAAIVVERREEGHALPLQRPVYFISEVLSETKIRYPQIQKLLYTVILTRRKLRHYFESHPVTVVSSLPLGEIIQCREASGRIAKWAVEIMGETISFAPQKAIKSQVLADFVAEWVDTQLPAVPIQPKLWTMFFDGSLMKTGAGVGLLFILPLGKHLRYVLRLHFPASNNVAEYEALVNGLRIAIELGVRCLDARGDSQLVIDQVMKNSHSVTRRWKPTVTRFGAWKTSSTGSSSTTSPDDTTTLRTSWLR

SEQ ID NO: 71243 - protein, 661 aa, Zea mays
  Coding DNA Sequence Number=SeqID_29464
  Gene Ontology: Mol. function=RNA-directed DNA polymerase activity; Cellular component=nucleus; Biological process=RNA-dependent DNA replication
  Homolog annotation: Hit_ID=Q8S472; Match level="QueryCoverage=98%, HitCoverage=60%, E-value=0.0, Identity=81%"; Hit description =Putative gypsy-type retrotransposon RIRE2
  Pfam annotation: Domain name=Retrotrans_gag; Domain location=149-240; Score=73.7; E_value=5.9e-19; Accession=PF03732.7; Description =Retrotransposon gag protein
  Subcellular localization annotation: CTP_CleavageSite=27; ConfidenceScore=5.03e-01
MSRSDGPKALLSRRQGYPSKHRVATSRFMREASVHTGLTRNTAPAVPGRLGNEHHHRNHRTHLDERVRRGYHPRRGGRYDSGEDRSPSPEPPGPQAFSRAIRRAPFPTRFRTPTNITKYSGETRPELWLADYQLACQLGGTDDDNLIIRNLPLFLSDTARAWLEHLPSVQISNWDDLVQAFASNFQGTYVRPGNSWDLRSCRQQPGESLRDYIRRFSKQRTELPNVTDSDVIDAFLDGTTCRDLVSKLGRKTPTRASKMMDIATKFASGQEAVEAIFRKDKQPQGRQPEDVPEASTQRDTKKKCNKKSQAKRDAADADLVAAAEYKNPRKPPGGANLFDNMLKEPCPYHQGPVKHTLEECVMLRHHFHKVGPPAEGGRAHNNDKKEDHKAEEFPEVPDCFMIYGGPAANASARHRKQERREVCSVKVTAPVYLDWSDKPITFDQGDHPDRVPSPGKYPLVVDPVIGNVRLTKVLVDGGSSLNIIYAETLGLLRIDLSSVRAGAAPFHGIIPGKCVQPLGQLDLPVCFGTPSNFRRETLMFEVVGFRGTYHVVLGRPCYAKFMAVPNYTYLKLKMSGPNGVITIGPTYRHAYECDMECVEYAEALTESEALIADLESLSKEAPDVKRHAGNFEPAETVKSVPLDPSNDASKQIRIGSELDPK

SEQ ID NO: 71244 - protein, 217 aa, Zea mays
  Coding DNA Sequence Number=SeqID_29465
  Subcellular localization annotation: CTP_CleavageSite=50; ConfidenceScore=5.31e-01
MKSGLGPLKGHQLASPEPSLGQGVRLTAAKSGFGRHRKRRLARPQGSCPVSASDDELRLARPQGSDSASAPEDDELRLARPRARTQPRLRKTMNSASPDPGLGLGLGSGRRRTPPRPTQGSDSASVPEVDELRLARPQGSDSASAPEDDELRLARPPGLGLSLVLRRWSPPRPTRGSDSTSTSEDRLDLNLGGATASPDPGLGPTTSQGGHHYPSPS

SEQ ID NO: 71245 - protein, 148 aa, Zea mays
  Coding DNA Sequence Number=SeqID_29466
  Homolog annotation: Hit_ID=Q0MRQ8; Match level="QueryCoverage=42%, HitCoverage=11%, E-value=1e-15, Identity=46%"; Hit description =Respiratory burst oxidase protein A
  Subcellular localization annotation: CTP_CleavageSite=63; ConfidenceScore=5.45e-01
VLLSSHLLCVSVLHISRSLLLGSSQTPPSPACPRLRRQPLCTPVPSTAAPKVQPPSLRAPDPSASAPKVQPQGINDSEAYDIFFATWMHPIFPALFYACERVIRKFHENDYHSGIVRHPFSITLAPGDNYLTVHIRALGDRASKLSIL

SEQ ID NO: 71246 - protein, 206 aa, Zea mays
  Coding DNA Sequence Number=SeqID_29467
  Gene Ontology: Mol. function=hydro-lyase activity; Cellular component= cytoplasm; Biological process=fatty acid biosynthetic process
  Homolog annotation: Hit_ID=Q6I5L0; Match level="QueryCoverage=92%, HitCoverage=96%, E-value=3e-71, Identity=71%"; Hit description =Putative beta-hydroxyacyl-ACP dehydratase
  Pfam annotation: Domain name=FabA; Domain location=68-192; Score =161.0; E_value=3.1e-45; Accession=PF07977.3; Description=FabA-like domain
  Subcellular localization annotation: CTP_CleavageSite=52; ConfidenceScore=5.56e-01
MDPAAMLRSPCSIVSPGSLLTAPLLPVRLAVQPRRRVPGFIAPSGRPSVARRAAAGDKFEAETPIEKSRFPFLLVDRVIDYKPGEYAVAIKNVTINDNFFPGHFPERPIMPGVLMVEAMAQVGGIVMLQPEVGGSRENFFFAGIDKVRFRKPVIAGDTLIMRMTLIKLQKRFGIAKMEGKAYVGADLVWSPETVVNNEVEDHAGSY

SEQ ID NO: 71247 - protein, 129 aa, Zea mays
  Coding DNA Sequence Number=SeqID_29468
  Homolog annotation: Hit_ID=Q8GU89; Match level="QueryCoverage=42%, HitCoverage=5%, E-value=1e-15, Identity=58%"; Hit description =Pleiotropic drug resistance protein 4
MSASTACDGLPHLIPLLAWAAGAAAGHEGCEAGVAPAEMRSPPWSASWEFGYGLALCRKRQMLTKLARREKTTNIKPDHDIDVYMKILDLEVCADTLVGKEMMRGISGGQRKHVTIDPVYGVYEGSYFL

SEQ ID NO: 71248 - protein, 587 aa, Zea mays
  Coding DNA Sequence Number=SeqID_29469
  Gene Ontology: Mol. function=protein binding; Cellular component =Golgi apparatus; Biological process=visual perception
  Homolog annotation: Hit_ID=UPI0000D9C15F; Match level="QueryCoverage =91%, HitCoverage=97%, E-value=2e-20, Identity=23%"; Hit description =PREDICTED: similar to retinitis pigmentosa GTPase regulator isoform C
MARPRDTAASVVDTVAICSAPTVIGAGGGTGPDRADSRLNFAGGLFRPLSLRYFVIVVLGFVPAVSDSTPRVRVRCLRFDAILLLSLFRPLSLRYFVIVVLGFVPAVSDSTPRFVPSALPPLFRHRGSRVRARCLRFDAKLRAVLHWCPPFVQSLSDFVVLWFGVCTGNCVMCSIGLFRPLSLRYFIIVVLGFVPAVSDSTPRVRVRCLRFDAILLLSLFRPLSLRYFVIVVLGFVPAVSDSTPRVRVRCLRFDAILLLSLFRPLSLRYFVIVVLGFVPTVSDSMPRVRVRCLRFDAILLLSLFRPLSLRYFVIMVLGFVPAVSDSTPSTGLLLAIAPFTASVLSRPSPSRLFRPLSLRYFVIVVLGFVPAVSDSTPRVRVRCLRFDAILLLSLFRPLSLRYFVIVVLGFVPAVSDSMPRVRVRCLRFDAILLLSLFRPLSLRYFVIVVLGFVPAVSDSTPRVRVRCLRFDAILLLSLFRPLSLRYFVIVVLGFVPAVSDSTPRVRVRCLRFDAILHLSLFRPLSLRYFVIVVLGFVPAVSDSTPRVRVRCLRFDAILLLSLFRPLSLRYFIIVVLGFVPAVSDSTP

SEQ ID NO: 71249 - protein, 218 aa, Zea mays
  Coding DNA Sequence Number=SeqID_29470
  Gene Ontology: Mol. function=RNA-directed DNA polymerase activity; Cellular component=mitochondrion; Biological process=RNA-dependent DNA replication
  Homolog annotation: Hit_ID=UPI00004C1731; Match level="QueryCoverage =93%, HitCoverage=14%, E-value=1e-102, Identity=88%"; Hit description= UPI00004C1731 related cluster
  Pfam annotation: Domain name=rve; Domain location=2-153; Score=88.2; E_value=2.5e-23; Accession=PF00665.16; Description=Integrase core domain
MQHLGPPSETLSDKKAPGGFKHLLVAIDKFSKWIEVRPLTSIGSEQAVAFFTNIIHRFGVPNSIITDNGTQFTKKKFLDFCEDHHIRVDWAAVAHPITNGQVERANGMILQGLKPRIYNDLKKFGKRWIKELPSVVWSLRTTPSRATSFSLFFLVYGAEAILPTDLEYGSPRAKAYNNQSNQTNQEDSLDQLEEARDVALLHLAWYQQSLRRYHARRV

SEQ ID NO: 71250 - protein, 487 aa, Zea mays
  Coding DNA Sequence Number=SeqID_29471
  Gene Ontology: Mol. function=protein serine/threonine kinase activity; Cellular component=membrane; Biological process=protein amino acid phosphorylation
  Homolog annotation: Hit_ID=Q1SH98; Match level="QueryCoverage=76%, HitCoverage=80%, E-value=1e-111, Identity=52%"; Hit description =Protein kinase
  Pfam annotation: Domain name=Pkinase; Domain location=172-431; Score =58.9; E_value=1.6e-14; Accession=PF00069.15; Description=Protein kinase domain
  Pfam annotation: Domain name=Pkinase_Tyr; Domain location=172-431; Score=10.9; E_value=3.9e-13; Accession=PF07714.7; Description =Protein tyrosine kinase
  Pfam module annotation: Pfam domain module=Pkinase::Pkinase_Tyr; Domain location=172-431::172-431
MSPPPPPPLLRNELSRRTAVLGLRLWVLVGIAVGAAFVLLLVLISLHLAAARRRRPRKGVAHAPAHAPAGAPPLSPSTIPPVSKEIQEVAVHVGSLRHYLETGHAFLKDGGGGDGESVAYGSQRVHIEAGKGQRMVAAASDALSAAVGPEVSHLGWGHWYTLRELEEATAAFAPEHVVGEGGYGIVYRGVLADGYLSPSRTFLNNQGTSRAGVSEWRWRPSAASGTRIWILVYEYVDNGNLEQWLHGDVGAVSPLTWDVRMNIVLGMAKGITYLHEGLEPKVVHRDIKSSNILLDRRWNPKVSDFGLAKLLGADSNYVTTRVMGTFGYVAPEYASTGMLNERSDVYSFGILIMEIISGRSPVDYARPAGEVNLVEWLKNKVTNRDYEAIVDPKLPEKPSSKALKKALLVALRCVDPDSQKRPKMGHVIHMLEVDDFPYREDRRTLRPGNGSPLEKARNPAAGSCDGSSCYGGDTTTASTPSRLVQDM

SEQ ID NO: 71251 - protein, 85 aa, Zea mays
  Coding DNA Sequence Number=SeqID_29472
  Gene Ontology: Mol. function=DNA binding
MVHIVKHHDFMLEGFLVEEEAASSTPRATNRSAPGAAAVHSARQHTPTQTSRASRAAPGALSAARELLRHPPSSTASPGGHEVVV

SEQ ID NO: 71252 - protein, 265 aa, Zea mays
  Coding DNA Sequence Number=SeqID_29473
  Gene Ontology: Mol. function=heat shock protein binding; Cellular component=endoplasmic reticulum; Biological process=protein folding
  Homolog annotation: Hit_ID=Q1SDA8; Match level="QueryCoverage=85%, HitCoverage=61%, E-value=6e-79, Identity=60%"; Hit description=Heat shock protein DnaJ, N-terminal
  Pfam annotation: Domain name=DnaJ_C; Domain location=175-263; Score= -33.1; E_value=0.0009; Accession=PF01556.9; Description=DnaJ C terminal region
MEMGTPVARTLVTRFPDRWDRGTGTCFFGGGGGGMEEEEQQILKGDEVIVELDASLEDLYMGGSLKVWREKNVIKPAPGKRRCNCRNEVYHRQIGPGMYQQMTEQVCDQCPNVKFVREGEFLTVDIEKGMKDGQTRFTGNGIFRKQARLSEFYVGIDIGIGVRLASIIPSPYPTHEVLFFEEGEPKIDGEPGDLKLQALVGFEKTIKHLDNHLVEIGTKGITKPKEIRKFKGEGMPLYQSNKKGDLYVTFEVLFPKTLTADLCQA

SEQ ID NO: 71253 - protein, 133 aa, Zea mays
  Coding DNA Sequence Number=SeqID_29474
MEAETWLYGEESDEREQRKTEGEGVNQGVSQVDGVEAELIGATDIAGSRWWPRNRSETTADGDSDSIDLGLQVYLGPTVRGTISMMTMGQRAVGVLSPNMGWGTILLMAALCALNTQFRNLRTRIAQLVKGVV

SEQ ID NO: 71254 - protein, 107 aa, Zea mays
  Coding DNA Sequence Number=SeqID_29475
MQSVGALRLRKAAAAEAAGQLPSAREADERVRALRTGCWAVMGALGRRGQARAAANPLNRSIDLHLMTLLLSLILTDANWIGAREKGETTLRPSKDKENDKTCKIGA

SEQ ID NO: 71255 - protein, 98 aa, Zea mays
  Coding DNA Sequence Number=SeqID_29476
MKEKVDVSAVDLEAGIGETLYRGSREDVIPSVFLSSPPPPLDPPSLPQLSSMWDKEGAAKGNAVTPTLATAMLGSLAPWVCAAAGAPVMAPRLKLLQG

SEQ ID NO: 71256 - protein, 157 aa, Zea mays
  Coding DNA Sequence Number=SeqID_29477
  Homolog annotation: Hit_ID=Q6QP51; Match level="QueryCoverage=46%, HitCoverage=38%, E-value=6e-23, Identity=70%"; Hit description =Putative growth-regulating factor 1
  Subcellular localization annotation: CTP_CleavageSite=42; ConfidenceScore=5.54e-01
MTTASKKRAPSPPADQGFEGWPLGRVRQPPQSTRASGSLLIRGSKAGPSEGRPRARRARDDSGYVRYMAEARATLPRPGLPPLCKLARAIVLCTRSGRGASLVGGGVDRGLGVDVGNRALDRRVALLRRALPCEVSAPPRLGSVVGENASSAVDSEE

SEQ ID NO: 71257 - protein, 130 aa, Zea mays
  Coding DNA Sequence Number=SeqID_29478
  Homolog annotation: Hit_ID=Q8H095; Match level="QueryCoverage=46%, HitCoverage=54%, E-value=9e-22, Identity=77%"; Hit description =Expressed protein
  Pfam annotation: Domain name=LysM; Domain location=83-125; Score =20.1; E_value=0.0043; Accession=PF01476.10; Description=LysM domain
MAEAEASSRRRRCGGAAELCATAARLADAASWWCAVALVALVLLGALRAETDGVGDGDGGGAYRALRGPRLGGPAARPCEEVYVVGEGETLHSISDRCGDPFIVERNPHIHDPDDVFPGLVIALCPTRNT

SEQ ID NO: 71258 - protein, 100 aa, Zea mays
  Coding DNA Sequence Number=SeqID_29479
MGQQLAICITKVRLKTSEVISHTRENSFVKFERILDSRVRTEPTSTTVSKRRGASLLDWSLVSLINMIIFFAIRFAVPRRGMVRMMVILLRKGEIKKDEI

SEQ ID NO: 71259 - protein, 86 aa, Zea mays
  Coding DNA Sequence Number=SeqID_29480
MAFAWHGMGLWEIARETPDAMRHDVDDRQGSAPCPPSALSACVSARSALRSASTGFRASDAGSLYCCIRTASHPTLNKKQVDLDVS

SEQ ID NO: 71260 - protein, 134 aa, Zea mays
  Coding DNA Sequence Number=SeqID_29481
  Gene Ontology: Mol. function=peptidyl-prolyl cis-trans isomerase activity; Biological process=protein folding
  Homolog annotation: Hit_ID=Q2R1J4; Match level="QueryCoverage=62%, HitCoverage=35%, E-value=7e-38, Identity=86%"; Hit description =Peptidyl-prolyl cis-trans isomerase, cyclophilin-type family protein, expressed
MVFKRVAGIQAIAESGCFKASSFHFPTIKLLTALITIALPLPTNFGDIEFGFFPHVAPKTVEHIFKLVRLGCYNTNHFFRVDKGFVAQVADVMSGRTAPMNEEQKKEAEKTIVGEFSSVKHVRGILFMGSLIVA

SEQ ID NO: 71261 - protein, 46 aa, Zea mays
  Coding DNA Sequence Number=SeqID_29482
VLFTTPDLVVLFLTCLTVTGTPRGVTLEHLLSSKKVAGDEFPRSDT

SEQ ID NO: 71262 - protein, 482 aa, Zea mays
  Coding DNA Sequence Number=SeqID_29483
  Gene Ontology: Mol. function=steroid hormone receptor activity; Cellular component=nucleus; Biological process=regulation of transcription, DNA-dependent
  Homolog annotation: Hit_ID=Q6EPQ3; Match level="QueryCoverage=96%, HitCoverage=66%, E-value=0.0, Identity=78%"; Hit description=SPX (SYG1/Pho81/XPR1) domain-containing protein-like
  Pfam annotation: Domain name=MFS_1; Domain location=247-466; Score= -46.1; E_value=0.041; Accession=PF07690.6; Description=Major Facilitator Superfamily
  Pfam annotation: Domain name=SPX; Domain location=6-143; Score=56.6; E_value=8.3e-14; Accession=PF03105.10; Description=SPX domain
  Pfam module annotation: Pfam domain module=MFS_1::SPX; Domain location=247-466::6-143
LIRNLIRLGLSIARYYINYKLMKKMLKQYVQQTQHGGKDREQVLKEFSRILDDQIERIVLFLLQQQGHLASRIEELGEKRSALEEYDISQVYQLHDAYREVGLDLIKLLRFVDVNATGIRKILKKFDKRFGYKFTDYYVTTRANHPYSQLQQVFKQVGIVAVVGALSRNLEYLQHHEGSFVSIYDRPAVTLKDPIIDQVNHAVQKLTHATNFMQFLGQHSLIVQEDAQSGSEDLVDDQSYHFMSLMLNLVNTFLYMVNTYIIVPTADDYAVSLGAAATVCGIIIGSMAVAQVFSSVYFSAWSNKSYFKPLVFSSIVLSLGNLLYALAFDLNSLSVLLIGRLLCGLGSARAVNRRYISDCVPLKMRLQASAGFVSASALGMACGPALAGFLQTKFKIYSITFNQSTLPGWVMCIAWLIYLLWLWFTFKEPEHFTKTLVNEHPSESGRQGNSNLEEGLAQPLLLGVEQRQDENSDDRSNHGSIE

SEQ ID NO: 71263 - protein, 51 aa, Zea mays
  Coding DNA Sequence Number=SeqID_29484
MGVHETEIEGDEKFTVSGERLEARLGGLVCDFPTDPMVRSTYRVRERWSVN

SEQ ID NO: 71264 - protein, 58 aa, Zea mays
  Coding DNA Sequence Number=SeqID_29485
MDHICRASNSVDVEIEDEEEPYEAARALDSDDDCHGLFPSVVSRQASLVGDKFIPVSG

SEQ ID NO: 71265 - protein, 563 aa, Zea mays
  Coding DNA Sequence Number=SeqID_29486
  Homolog annotation: Hit_ID=Q69V47; Match level="QueryCoverage=34%, HitCoverage=60%, E-value=1e-71, Identity=72%"; Hit description =Putative zinc finger and C2 domain protein
  Pfam annotation: Domain name=ArfGap; Domain location=295-391; Score =52.6; E_value=1.3e-12; Accession=PF01412.9; Description=Putative GTPase activating protein for Arf
  Pfam annotation: Domain name=C2; Domain location=428-507; Score=83.9; E_value=4.8e-22; Accession=PF00168.20; Description=C2 domain
  Pfam module annotation: Pfam domain module=ArfGap::C2; Domain location=295-391::428-507
MSGCKSLACWVVSFGHQLVGQLTQALEHQTRTILVELNKWFTTIDSKWEARVEAAHQAAVGAVVEWRPRVDASIEHLQQHQADEDAVDGFGDVGAVPDPVEEEVHVDKPTKCLMGVLNRETYPRQGLQAQPSSLMTLSYDAKADDDEVFTGVLDAAFPTAFNDDSTDSNDIEGFYAWANTEDTEAAPPTSSSLPWTLSSLIHHTLARDVVHAAFDPVCHTAVPLHGGSGHHDAKQLVPDTTFSAFFHKSVVVLASTRDIVGLHGASSAAYYIANPATFARERLPDHGWAGFVVNAQALWEETGERPCYGVHRSVGTHVSKVLSVTLDQWTDDEINSMIEVGGNSYANAIYEALLPEDYEKPHPNSSQEERAEFIRSKYELQEFVKPSLVSSYKGSLGDTSSQKHTDNFVFPSASFSSEARMVEIIGILKVKVIRGTKLAVRDLMSSNPYVVLNLGQQKAKTSVSKCNQNPVWNEEFKLSVYQQCGPLKLQVFDHGTLSKDNSEARILVSEKRVSMVQFKTLEHMLLHSGHQDSGCAKILHRLEGKSSFKEEGMLHRHCQILHI

SEQ ID NO: 71266 - protein, 140 aa, Zea mays
  Coding DNA Sequence Number=SeqID_29487
MADGGDPSILASNSPPDDGSRARLPTRARSTQNGDPLVNSSANEQHRAWDEHMAARWNAEGKQQQRPTWESLEQAGDLLSRFYFSRVGWFNGGNPARLKSSKACEERWRLIFKSVRTPQRPEKGEETRTGLDGRPMAMRG

SEQ ID NO: 71267 - protein, 184 aa, Zea mays
  Coding DNA Sequence Number=SeqID_29488
  Gene Ontology: Mol. function=zinc ion binding; Biological process =defense response to fungus
  Homolog annotation: Hit_ID=Q9FI29; Match level="QueryCoverage=83%, HitCoverage=24%, E-value=1e-49, Identity=61%"; Hit description =Arabidopsis thaliana genomic DNA, chromosome 5, P1 clone:MDN11
MAVTGDRDGTYSGTLNPGRLMKEKLDKVQKKCHFKNYDLIQPQNRFCFEKRDWMTVQPNELPHGSQLIMGLNPPFGVKASLANKFIDKALTFKPKLIVLIVPKETKRLDQRRTPYDLIWEDSECLSGKSFYLPGSVDLNDKIVEGWNASAPPLYLWSHPGWTKKHMQVAEEHGHTCMGKISLPC

SEQ ID NO: 71268 - protein, 61 aa, Zea mays
  Coding DNA Sequence Number=SeqID_29489
MALIIYTCVIWVRQWWTNGSNHGLCGKPGVGAQFRLEVEGDGLCHGSSVARLGLGQAYMFG

SEQ ID NO: 71269 - protein, 122 aa, Zea mays
  Coding DNA Sequence Number=SeqID_29490
MVKTTWETGEDTVVAGVGAEAAGSTSNLFAPHGPELPSSPCRRDRSGEQPWCLCACLDPCLDVSHLVDLGFFGDFVLGSRPLDSPSIQPEQSPFPPPHKGTVISSLCCSIAQYNMDYSQEFS

SEQ ID NO: 71270 - protein, 175 aa, Zea mays
  Coding DNA Sequence Number=SeqID_29491
MEVVAFVTAIRQCHLLRRVYQGRTQAHGRLGHGPGRRPINVLEDPRSWASVQGLPSARPVASAAAPQPPQAAATPPHPAARKAKPHPPASLPSSDPGPASRVPAVQRSTPPHPPAARKAKPQKPSALCLASRVPAVQRSRSGCRGAGQPVSRCRLRPACALPTTLRDSISAAAIR

SEQ ID NO: 71271 - protein, 40 aa, Zea mays
  Coding DNA Sequence Number=SeqID_29492
MTAPSPGATTAARPGLDAPVSARPRIIPYLLRSLHRHAQI

SEQ ID NO: 71272 - protein, 53 aa, Zea mays
  Coding DNA Sequence Number=SeqID_29493
MAAAARELCAAVGEGRCTSAINHGSDDEHATEDPGVQQVETAEQELVENKLCP

SEQ ID NO: 71273 - protein, 327 aa, Zea mays
  Coding DNA Sequence Number=SeqID_29494
  Subcellular localization annotation: CTP_CleavageSite=31; ConfidenceScore=5.22e-01
MNPRSFPAGTPNTHFFGLNFQRRPDQAKGVTGATAAAPTLDPPLLRLRWRPCNWKRSLIYGMDGAKPVAAGKQDLEEISDLQDLFFCYMWQSQLAKYPQLGAIDIGAELVRLGANYFACTTFCVAPTWRADGRPSSGLGARRGRYDGVREGGRAAGRERPAAGAAGEWVAGADGALPDGVAGAAGGWAERAAGTAGRRRESPTVGRADERPWRAGGRRGGGLGVGKGGAGGAAACRMEEPGGVMACGMAARRLSGAGGSGSGDGGKRMKWRKEMVTGIKYLGAKIHGRRARPQDPRHRVVCHVSSPSQLRATPTRSTSVPIVMVTRQ

SEQ ID NO: 71274 - protein, 43 aa, Zea mays
  Coding DNA Sequence Number=SeqID_29495
MELAVNLPGGIFNLPMEEWSTEPKLRHRPANHHGPPPPLPANP

SEQ ID NO: 71275 - protein, 280 aa, Zea mays
  Coding DNA Sequence Number=SeqID_29496
  Subcellular localization annotation: CTP_CleavageSite=85; ConfidenceScore=5.11e-01
MAHGSAKRRRVHPAPTVAARIAAVASSHQYRGRRFLRPHGKPGGLFLALPACLFPTSTPPPPLHPACSPPPPPRHRDNAVLTVARFSDEMSELAAPTDPPFPQNPRWKESSLEEILTKIHAGWDLCGHRGSPKSMPHHWHLPSSTPSIHGWKSSFPSAAPFFSPHSALPPHHSLHPICGATPYAPRAAAVVVVQSSDVWQGPWRRRGKGIRKEQGGGFFTCGIDADLIGWIKTSSVESENVSKALYETIGKLSIHKEEARLIGQLCSGMLANLIGCCRER

SEQ ID NO: 71276 - protein, 218 aa, Zea mays
  Coding DNA Sequence Number=SeqID_29497
SLGEATPPPMQGAGTPLSGEGAAGLFLPTSVGGGVYEAVLPCAPTGGTPTPPHGVPIAGGDPNGDNDGGSSGHSTELSMEQELEGWVARPITRDATHDSHSREVLRPLESYRSGAPTEDALRGAEACSEHYAIGEGNPRLSSIVNLVTVLNTELNHVLDELSRARAEIAELHAERAERCHQEHGSPAPAGTQHPYHSPPHGHHAYGTPDCRTKIDLDP

SEQ ID NO: 71277 - protein, 179 aa, Zea mays
  Coding DNA Sequence Number=SeqID_29498
  Gene Ontology: Mol. function=nucleic acid binding; Cellular component= ribonucleoprotein complex; Biological process=RNA processing
  Homolog annotation: Hit_ID=Q6ZJG0; Match level="QueryCoverage=64%, HitCoverage=27%, E-value=4e-28, Identity=53%"; Hit description =Putative RNA recognition motif (RRM)-containing protein
MKHGLGQGRKGGDEEYAADEDGPDTTDHPRDFGTDVTAQISEAHFDHQAEDGTHDKGGMRQQGRGRGRGGRGRGRGQHYGHNSRDGHHPIGTPPSEHPAVLKPPLGPRITDGTKGFVFKILVLNIFLVNGSSVTVAGVFNRSLATCAFQQSSTPIVHHNCVLWLRVSLLKLMLDRDFLL

SEQ ID NO: 71278 - protein, 254 aa, Zea mays
  Coding DNA Sequence Number=SeqID_29499
MEHKGGKQGDMRKGETRGLRRPSSEAEAESEPWGRARRSSSSSGAEAESEPWGRARRSSSSSGAEAESEPWGRARRSSSSSGDEAEAESKPWGRARRSSSSSGAEAESEPWGRARRSFLWRPKPDLAAVSLSLSSGTAVGAAQATLSSCQAGQWSGEAILALNAPAIRSVGVAIRPRLLLGEDWASGEPKLCADGGYQLRLGVLGVPLIMVPDRSVLEHPTAEVELTSHRPESGAVDDQRGGAIAGEGRDTILA

SEQ ID NO: 71279 - protein, 197 aa, Zea mays
  Coding DNA Sequence Number=SeqID_29500
  Gene Ontology: Mol. function=DNA binding; Cellular component =mitochondrion; Biological process=DNA integration
  Homolog annotation: Hit_ID=UPI00004C1731; Match level="QueryCoverage =89%, HitCoverage=9%, E-value=3e-54, Identity=62%"; Hit description =UPI00004C1731 related cluster
  Pfam annotation: Domain name=rve; Domain location=4-195; Score=20.8; E_value=0.00011; Accession=PF00665.16; Description=Integrase core domain
MPEPSTTEGRRIQGELKNLLEDAAKAPGGYTHLLVAIDKFSKWVEVRPLNNIRLASRAGSRAYIEPSRASSSSSQSDRAEPGSARYSTEPHRAEPSLAWLGSFPALVAFFTNIIHRFGVPNSIITDNGTKFTRRKFLDFCEDHHIRVDWAAVAHPITNGQVERANGMILQGLKPRIYNDLNKFGKRWMKELPRWSGV

SEQ ID NO: 71280 - protein, 107 aa, Zea mays
  Coding DNA Sequence Number=SeqID_29501
MTWLGAAEVQLGLAHRTVRWCTEQCPVRQAGFRLTGHSREKSAAYGYNSPDCPVVHQTVRITYSPPSRCSQHLVEAATDQADKSMEANMCILDNFEEEVTITRLSVT

SEQ ID NO: 71281 - protein, 140 aa, Zea mays
  Coding DNA Sequence Number=SeqID_29502
MAGGSLEPGQTRAAPNQRKRKAPAPTADAEDEAEAEELQSVEELEREVADLDRRVLEHVRGTATLLSDAIVSRLDALRPPARPEAAVISETSVTEDDQELEKKVKILKSKIEANIADLPKKTFDLSAVVSALTILLREIW

SEQ ID NO: 71282 - protein, 73 aa, Zea mays
  Coding DNA Sequence Number=SeqID_29503
MDGASPWPGWQGAPRYKLGWLDMHTASVGFESKLTRSIVIQRSTDEDTPSANAFCKRTPMFPSNQPALLGVCK

SEQ ID NO: 71283 - protein, 160 aa, Zea mays
  Coding DNA Sequence Number=SeqID_29504
MAQEHISLSATREQQERFREELRQQQMTFIRQQSEYMAAYNTQVQQAMNSWFTEQAQQQLFISPQFQSPIPQWGLHAPTPPLAQGVMGHNTPPPVIPAPRRAFGGGATKEETPNQIDDFVNNFFASGGSGHNSTTPICDDLTLLVNLADAMDSNVFVMEL

SEQ ID NO: 71284 - protein, 162 aa, Zea mays
  Coding DNA Sequence Number=SeqID_29505
MKHGTGTSDGDASRSHSWHDAVQEAIQRGTEVVWDDLEGQAGQDATIVKVAAPPQTALVEAIPVSSEKEPGVPDTTSTMASPTVSDLLHAIPDSPIIVRVPEVASTEEAGPSKHSEEPTGDQNMPLPSAEASGGLVRVGSDPLAWGGPTLTWMDEDGYHTRF

SEQ ID NO: 71285 - protein, 139 aa, Zea mays
  Coding DNA Sequence Number=SeqID_29506
MKPIVDRTVVLNLLRCLRPRYGHLKALIQRTVPFLTFHAVRNKLLLKELTMETKASAQLRPSTVLLPADRRLRGQGPGCILASSSHIGPPDGAPYGVPPMTPAPPQLLPPGIPTPTPWSPLAGGWDSASIVVAFSTPWR

SEQ ID NO: 71286 - protein, 182 aa, Zea mays
  Coding DNA Sequence Number=SeqID_29507
  Gene Ontology: Mol. function=glutamate-cysteine ligase activity; Cellular component=chloroplast; Biological process=glutathione biosynthetic process
  Homolog annotation: Hit_ID=Q6XXZ2; Match level="QueryCoverage=77%, HitCoverage=28%, E-value=1e-68, Identity=85%"; Hit description=Gamma- glutamylcysteine synthetase
MTEPLTKEDLVAYLVSGCKPKENWRIGTEHEKFGFEVDTLRPIKYDQIRDILNGLAERFDWEKIMEGNIVIGLKQGKQSISLEPGGQFELSGAPLETLHQTCAEVNSHLYQVKAVGEEMGIGFLGLGFQPKWALSDIPIMPKLNEMLSLEMLSLVRIPFPTHSIDLLVLTVDTLGIMTDNSL

SEQ ID NO: 71287 - protein, 41 aa, Zea mays
  Coding DNA Sequence Number=SeqID_29508
MADIAKDSQSSTPRTKLQIEECYTYRKPRFDFKFSLKLKHQ

SEQ ID NO: 71288 - protein, 135 aa, Zea mays
  Coding DNA Sequence Number=SeqID_29509
MPQILIYAIKSPSNGQPLNTHGPLSFVPLLIYGCDASYHTAPDDSIPFHYACGGARAPAAAPWPVSPKLRTTRPNIDSTNATQGSNDGEHGQGHLTGNDVAEESGYGASRFYDWAAGPSPPTDYTENFEAHRRSP

SEQ ID NO: 71289 - protein, 66 aa, Zea mays
  Coding DNA Sequence Number=SeqID_29510
MKTNDLRHVHLCQYCTTVVGLDRVYRVRCLMSFLEDQFPNRLDIGNTQVVFEPHHTSASLRAPRGG

SEQ ID NO: 71290 - protein, 114 aa, Zea mays
  Coding DNA Sequence Number=SeqID_29511
  Homolog annotation: Hit_ID=Q6QP51; Match level="QueryCoverage=25%, HitCoverage=13%, E-value=7e-07, Identity=82%"; Hit description =Putative growth-regulating factor 1
MGFGNRPRPLGLRALYWSGVRRLAPRKGSTAAPEHAELGMTLGLGLSLGRGRRSPPRPTLGLGLSLGLGRRSLPRPTSGLGLGLGRSHILTRPQPRPQEKSLPRSTSALDRLRH

SEQ ID NO: 71291 - protein, 282 aa, Zea mays
  Coding DNA Sequence Number=SeqID_29512
  Gene Ontology: Mol. function=sequence-specific DNA binding; Cellular component=nucleus; Biological process=regulation of transcription, DNA-dependent
  Homolog annotation: Hit_ID=Q652B0; Match level="QueryCoverage=63%, HitCoverage=44%, E-value=1e-40, Identity=50%"; Hit description =Putative heat shock factor
RRRPATRGRKTSASGGENARLTRELGQMKKLCNNILLLMTKYASSQQLDASAALSSVVNCSGESSEAVPAPPPLPPAILELMPACPGLATAAAGLVAEADPDQASRLFGVSIGMKRMRDDDDTGEEQADHGAAADVKTEASDPQHRMEPSPESPDQHPWPIYRPTPVYHSMRPCNGPDQGAGSDQDGSNSSLGRNRELRLAQPQASASASAEGEGLRLARPQASASASASGEGLRLARPRASASGGVTSSPDLSLGLRRSLRLARPRPRTDYATGDASLPYP

SEQ ID NO: 71292 - protein, 124 aa, Zea mays
  Coding DNA Sequence Number=SeqID_29513
  Gene Ontology: Mol. function=ATP binding; Biological process=apoptosis
  Homolog annotation: Hit_ID=Q2R4B8; Match level="QueryCoverage=75%, HitCoverage=31%, E-value=4e-21, Identity=54%"; Hit description =Disease resistance protein RPM1, putative
MQAFLSNLSKCEEGHDDQTEDWMKQILCEAAYDIEDCIDDFAHSLRPDLRASGWVTAVRKILYLIRTWYPRRNIATQIVDLKNRAQHIGERRTRSIRDVPLQIESRRELLQRSGRSPDGLLLHT

SEQ ID NO: 71293 - protein, 143 aa, Zea mays
  Coding DNA Sequence Number=SeqID_29514
  Gene Ontology: Mol. function=sequence-specific DNA binding; Cellular component=nucleus; Biological process=regulation of transcription, DNA-dependent
  Homolog annotation: Hit_ID=Q652B0; Match level="QueryCoverage=59%, HitCoverage=18%, E-value=3e-35, Identity=80%"; Hit description =Putative heat shock factor
  Pfam annotation: Domain name=HSF_DNA-bind; Domain location=43-142; Score=-21.0; E_value=3e-08; Accession=PF00447.8; Description=HSF -type DNA-binding
MAEQGGAAGEAAGSDPPAPAPATAPAPAPALAADAAGQRSLPTPFLTKTYQLVDDPAVDDVISWNEDGSTFVVWRPAEFARDLLPKYFKHNNFLQLCAAAQHLRIKEMVPDRWEFANDFFRRGGESACFPNSSDGREQPVPLA

SEQ ID NO: 71294 - protein, 92 aa, Zea mays
  Coding DNA Sequence Number=SeqID_29515
  Subcellular localization annotation: CTP_CleavageSite=41; ConfidenceScore=5.51e-01
MAAASPAPSRPRLSGELPSMSWPLSRSPRRSPRKICDALVVAELPRVVRAFPSVLVVEEWKIGEEAAHFVRAQEKESHVLACAVTAERNKSM

SEQ ID NO: 71295 - protein, 62 aa, Zea mays
  Coding DNA Sequence Number=SeqID_29516
MPPTLILTGWERLEDANRTGAKGKSIARKGKIEKMVVFPYQGETALRPSKDKGQDKTCRIGA

SEQ ID NO: 71296 - protein, 147 aa, Zea mays
  Coding DNA Sequence Number=SeqID_29517
MLLTSVAARRQFFNSGEQSTEGRVPVVLILPEEKNIQVTRTLGQAVTRSRGARVCYERGDDEPRNQSYLLVKRARWEFWKRSSLTRLDSAQTQLRTRPGGCGPEMRVLTPRSHGTAIQDEIGGGFRLTGGPVTMCWCACRMQARAWR

SEQ ID NO: 71297 - protein, 78 aa, Zea mays
  Coding DNA Sequence Number=SeqID_29518
MAPPRASLHRRATCATAVGVALVGHWIHGGRTRLDGERTTSVIRSGSWIYKVTTEIRSVHWPSSFMIWMLRGDRAVGI

SEQ ID NO: 71298 - protein, 57 aa, Zea mays
  Coding DNA Sequence Number=SeqID_29519
  Gene Ontology: Mol. function=structural constituent of ribosome; Cellular component=ribonucleoprotein complex; Biological process =translation
  Homolog annotation: Hit_ID=P49690; Match level="QueryCoverage=70%, HitCoverage=29%, E-value=4e-14, Identity=90%"; Hit description=60S ribosomal protein L23
MEGLDGFNIGKDVPLPDNAGVIVNPKGDMKGFAITGPIDKECADLWPRIASAANTIV

SEQ ID NO: 71299 - protein, 91 aa, Zea mays
  Coding DNA Sequence Number=SeqID_29520
  Homolog annotation: Hit_ID=P35100; Match level="QueryCoverage=42%, HitCoverage=4%, E-value=1e-10, Identity=82%"; Hit description=ATP -dependent Clp protease ATP-binding subunit clpC homolog, chloroplast precursor
VITLDLGLLVAATKYRGEFEERLQKLMEQIKRNEDIILFRRIVLIRWLLQTALTFSRHIELNVKAMNNVNNIIGPAIVGKVEASTNHLSEK

SEQ ID NO: 71300 - protein, 92 aa, Zea mays
  Coding DNA Sequence Number=SeqID_29521
  Subcellular localization annotation: CTP_CleavageSite=41; ConfidenceScore=5.46e-01
MAAASPAPSRPRLSGELPSISWPLSRSPRRSPRKICDALVVAELPRAVRAFPSVLVVEEWKIGEEAAHFVRAQEKESHVLACAVTAERNKSM

SEQ ID NO: 71301 - protein, 75 aa, Zea mays
  Coding DNA Sequence Number=SeqID_29522
  Subcellular localization annotation: CTP_CleavageSite=58; ConfidenceScore=5.15e-01
MATSILALFSTIALLLPATCLAVAHPMGNGPYIARPVARRCPRVRRDTPRVWPCQSTSMSHAWSNVEMASVRHTW

SEQ ID NO: 71302 - protein, 76 aa, Zea mays
  Coding DNA Sequence Number=SeqID_29523
  Gene Ontology: Mol. function=binding
  Homolog annotation: Hit_ID=Q10P70; Match level="QueryCoverage=93%, HitCoverage=11%, E-value=2e-20, Identity=68%"; Hit description =Armadillo/beta-catenin-like repeat family protein, expressed
MASGANAVESCDTSMHQAGWQCLRVDCTELRSRAMKLAELLRQAAWVELYERPAARVMADTERVLHKAAGMAARCF

SEQ ID NO: 71303 - protein, 342 aa, Zea mays
  Coding DNA Sequence Number=SeqID_29524
  Gene Ontology: Cellular component=integral to membrane; Biological process=phosphoenolpyruvate-dependent sugar phosphotransferase system
  Homolog annotation: Hit_ID=Q9LS84; Match level="QueryCoverage=88%, HitCoverage=53%, E-value=3e-36, Identity=60%"; Hit description =Membrane related protein-like
VRSGSVHSHMNYGTIVYEWGKEGPIMYCSRTIFEDATPELVRDFFWDGDFRLKWDPMLAYSKSLDEFPQNGATIVHWIKKFPFFCSDREYIFGGRIWESGKTYYCVTKSHAFIFLAALGQMPRRSYSPAPELPGKRPRVVAAAGAGTRTRALPMPGWGHRQVVDFVDFPNSIADESREKATVKFGLGVPYPSLPKKEKPRRVELYFSSWRIRAVQSPKHVGQQSACEVTLVHYEDMGIPKDVARVAVRHGMWGAVKKLQSGFRAYQQMRDTENTLSHSAIMARMTTRVSITASNGGLDHDLSIADKISGENDSSHAVQHGFDWKWVVFGGAVAAVCVLNTGL

SEQ ID NO: 71304 - protein, 266 aa, Zea mays
  Coding DNA Sequence Number=SeqID_29525
  Gene Ontology: Mol. function=nucleoside-triphosphatase activity; Cellular component=membrane; Biological process=proteolysis
  Homolog annotation: Hit_ID=Q5VRN1; Match level="QueryCoverage=84%, HitCoverage=39%, E-value=1e-32, Identity=65%"; Hit description =Putative cell survival CED-4-interacting protein MAC-1
  Pfam annotation: Domain name=AAA; Domain location=77-202; Score =114.7; E_value=2.6e-31; Accession=PF00004.19; Description=ATPase family associated with various cellular activities (AAA)
MTAEKSRRLITSDCGGGGGDAKLEASVSEGVVNGDKWSRFADLGGMEQVLDQLLVEVVVPLCRPELPYHLGVRSVAGLLLYGLPGCGKTTLAHAITNETGVPFYKISAPDIVSGVSGYVIVIGATNRPDAVDQALRRPGRFDREIYLGVPYVNSRKQILMMLARKLRLEGQFDFLKIARATPGFVGADLKALVNNAGYLAMKRLINKRRAQYCSEVKQRKHYETMRSVERLVGVLVVVEVEPALERLSGGDARGGNRSGPSQGCWT

SEQ ID NO: 71305 - protein, 264 aa, Zea mays
  Coding DNA Sequence Number=SeqID_29526
MALPVDVVGLCPRQGDVGAPPKPRLSLSSVAEAESEPWGRARRRSFGRGQGGVRALGLGEAEFRRLPGLSPSPSPGVGRSGVRRLPGLSPSPSPRVGRGGGRSAEARAESEPWGRARRSFVVFRVLARVRALGSGGAEFAVFRVLARVRALGSGGAEFAVFRVLARVRALGSGGAEFAVFRVLARVRALGSGGAEFAVFRVLARVRALGSGGAEFAVVPLARPDCLSDSLCRVAPQSEWRRRRCPSVRLLYADGGYQLRIRRLE

SEQ ID NO: 71306 - protein, 591 aa, Zea mays
  Coding DNA Sequence Number=SeqID_29527
  Gene Ontology: Mol. function=nucleic acid binding; Cellular component= intracellular; Biological process=chromatin modification
  Homolog annotation: Hit_ID=Q6H672; Match level="QueryCoverage=94%, HitCoverage=93%, E-value=1e-77, Identity=36%"; Hit description =Putative PEThy;ZPT4-1
  Pfam annotation: Domain name=zf-C2H2; Domain location=109-130; Score =7.4; E_value=1.6; Accession=PF00096.16; Description=Zinc finger, C2H2 type
  Pfam annotation: Domain name=zf-C2H2; Domain location=29-51; Score =11.9; E_value=0.53; Accession=PF00096.16; Description=Zinc finger, C2H2 type
  Pfam annotation: Domain name=zf-C2H2; Domain location=295-317; Score =19.9; E_value=0.009; Accession=PF00096.16; Description=Zinc finger, C2H2 type
  Pfam annotation: Domain name=zf-C2H2; Domain location=420-442; Score =7.5; E_value=1.6; Accession=PF00096.16; Description=Zinc finger, C2H2 type
  Pfam module annotation: Pfam domain module=zf-C2H2::zf-C2H2::zf -C2H2::zf-C2H2; Domain location=109-130::29-51::295-317::420-442
  Subcellular localization annotation: CTP_CleavageSite=49; ConfidenceScore=5.29e-01
MCESPSSSMSPSPSPSPPQPSRPPPEYKHFCRVCNKGFTCGSALGGHMRAHGASDVDGFGVDDDDSLDEEPTAPARCTGADQWDVAGTSSATHAYALRANPNRLIRSCQVCKNCGKEFTSWDLFLQHGKCNSSEGGEGEEGEMDGSDSLRSSLPASEAGGGGEEDPAVAAAAWSKGKRSRRVVRTDDPSSTMVSAERCTSGDEDEELANFLVMLSSSKSNNNDDQTIVITADHHKEPVCASTGEGGGGGEPLPFQSQTISLFTQTQTQEPVVPLLPSTVAATVSQYIAPISRGVFECKACKKVFTSHQALGGHRASHKKVKGCFAARFDNNATETAINNPTIAADTNSKAVVVNNADASVDAATRVFAITSVDTDVGTSNEATSSSLSMAHAVPIRHNPASATTTTFTVAAHCKKNVKMHECSVCHRLFTSGQALGGHKRCHWLTSNTSDPCNPLAIPPLTEDLVVGEVKHHDDTLQPTVDATEPLLDLTIAANPAVALAASTMRPDIASTVHLKQLVVAAPSNNVSHRKKTAATGSHTTDAVVEEDEADSIIIKKAKISDLKDVVNMDGESTQPWLQVGIGSSSARGDDG

SEQ ID NO: 71307 - protein, 167 aa, Zea mays
  Coding DNA Sequence Number=SeqID_29528
MEMDGPSVAAAIDKRKGGRGGRETPCPGGREGAGAAPAVPAAVGETDCRGGGATAAGVGEDGRRRIYGLVGYGQSATRPGGQPCSAGSNSKPDSASEDRIRPRSAGSAVQRTAAGTTAVQCRIRPRSSSWAGIRPRSSSREPASRPHSSLPRWGLPDFATWGLGLGT

SEQ ID NO: 71308 - protein, 85 aa, Zea mays
  Coding DNA Sequence Number=SeqID_29529
MPYSRCCQFWHLLYAPFPAMGIRGPRLSGTTLAAGTPPQRQPEPPADGPRAARRGTGALTAPAATKKSRLKELYWWTEVILVNIM

SEQ ID NO: 71309 - protein, 227 aa, Zea mays
  Coding DNA Sequence Number=SeqID_29530
  Homolog annotation: Hit_ID=Q2A0L7; Match level="QueryCoverage=22%, HitCoverage=80%, E-value=5e-23, Identity=96%"; Hit description=WOX9A protein
  Pfam annotation: Domain name=Homeobox; Domain location=32-91; Score= -6.6; E_value=0.024; Accession=PF00046.19; Description=Homeobox domain
MAGGPVCRAVPAPTFVMPPISFRGGEERTPDPKPQWNPRPEQIRILEAIFNSGMVNPPHDEIPRIRMRLQEYGQVGDANVFYCGARQAAAQSLIQNQFQLLASPTQAQAPASSSSSSSDRSSGSSKPVPQPMFTTAAAMDFPGPLGATCAQMYYQAHPVASVSASPAHKVQDPVASDEPVFQLWPQGYFLSAVEVATILGGSIGTTCPCSSSHRRRCLRERSWGYAT

SEQ ID NO: 71310 - protein, 168 aa, Zea mays
  Coding DNA Sequence Number=SeqID_29531
MADWLGNGGYVLALGEIISPCWASGEIRTGTRKLAASVAALRSTVRTLALGRAGRVVLLASQYPACLPVRAVYVLGKPCSYAVLTLEQADPERKVGAACGAEVLGARAGADRQWGRKPDAEARSYYSGGGLAGCDATSPREGADFFGVLRNCAVRSRFCVPLHGTRGH

SEQ ID NO: 71311 - protein, 947 aa, Zea mays
  Coding DNA Sequence Number=SeqID_29532
  Homolog annotation: Hit_ID=Q1RWS5; Match level="QueryCoverage=18%, HitCoverage=44%, E-value=1e-37, Identity=54%"; Hit description=SBP
  Pfam annotation: Domain name=SBP; Domain location=263-341; Score =177.5; E_value=3.4e-50; Accession=PF03110.5; Description=SBP domain
MARAVADTDDWTGAVRSPPAGRPACLLRTLSACPRTAPHQAFAGRCARLHFDRWDTVTQVPLGSGVRSAVEFWYAMRKAFCGVWFRIRDLSSKWQSRLFSNPSPRQILANDVRDPPDGDSTCHPRLPMARVPFGQQHHQPPPPPPRFHFVLSPALNDDSRAGSTARIAMEGNGGAGGGSGSAAPPWDLAMHWAPAVVSSYPPQPLELQQQELTCLKLGKRPACCWAGAPGNQAAQVHGNGGAGGAAAEGKRKDKAPAAAAVTRCQVEGCHLSLADAKEYHRRHKVCEAHSKAPRVVVLGAEQRFCQQCSRFHAISEFDDAKRSCRRRLAGHNERRRKSNASEAMARGVAHPHGVTAFGHGGFLPSRGLVPAGSSPAAAGALSLLSSARGSVAGASGPWLVTAAREDIPARSSAALDDLIAENRAAALLARQYFVSDRSPAPRRDFVASSTAGCSLQQQQHPPDHDHTAGWHPHPHPYSGGGGGSCGGRYQYHHVAPPSAWHATTLDLMQPTASTTAAPATAGAALWPAVPERAGARSSRSRSETKDGDASGCSGLDAWAPTGGARVLTQEVAQEHFAALVDVDPKPLLEPPCKLTAKEGETTPPQTEAEHASRTRTSLRVVEQGPAARSLRSGMDKLCRSLGGKTLSAARGSTRTLTARQEQRQRLRLKRQAKQQQRQRSGGSKRWGARWLGERMQQGARRRVALAIGEKREGGRDDQQSRRARSEARQHNPARRQRKHRGQRQSGGRQLLRGKRHPTGIGTGLTERRGAGERAVEGGLYARDRHLAGGPDCLWPEAPQAQHRMGSLAAITHEVIRLQRQGNGSQPKASPTSAVSRELEEGAVLKARSWPQQPKAQSDVPIQHVWLESSNSVFFNPRQPNCSSSPHGGRQTGVRRQREDPASLSGPTQLISRRRKLLHASTSLGAAPVFEKLCTSETVLKLSSPDGT

SEQ ID NO: 71312 - protein, 68 aa, Zea mays
  Coding DNA Sequence Number=SeqID_29533
  Gene Ontology: Cellular component=extracellular region; Biological process=sexual reproduction
  Homolog annotation: Hit_ID=Q7XT40; Match level="QueryCoverage=95%, HitCoverage=25%, E-value=1e-12, Identity=48%"; Hit description =Expansin-B15 precursor
  Pfam annotation: Domain name=Pollen_allerg_1; Domain location=1-51; Score=14.3; E_value=0.00018; Accession=PF01357.11; Description =Pollen allergen
  Subcellular localization annotation: CTP_CleavageSite=33; ConfidenceScore=5.49e-01
MQQGQGGAWTPMQHSWGAMWRANTGKPLRAPFSARLVSGSGKVLVVGNAIPAGWRAGMTYWSKLNYAT

SEQ ID NO: 71313 - protein, 160 aa, Zea mays
  Coding DNA Sequence Number=SeqID_29534
MGRASPAAGARGRDTGTWGSGGDEAGQTRCAGGRNWARTGERSALGEIGGGGFRFQHRHVDQTQGTSGRRLLEGKLMTSGPHGSRRSAAERVCAWLWHAGPPWAATTATEPPTRTTRAGSAAAGGGRRAGAPGWAATGPRERACRGPNGSTGRLGQGGVA

SEQ ID NO: 71314 - protein, 113 aa, Zea mays
  Coding DNA Sequence Number=SeqID_29535
MAMMGPTSEKMYLCQKESLGVVSPSQSIKDLVDVGLLTEDPSTGHMPRHGSCNHFRISAFPMNILSVRWVKRSWKGGPNDLGGPVTPAQGALTSDDRSFAAIHVTGDWIHAWS

SEQ ID NO: 71315 - protein, 165 aa, Zea mays
  Coding DNA Sequence Number=SeqID_29536
  Gene Ontology: Mol. function=protein serine/threonine kinase activity; Cellular component=phragmoplast; Biological process =protein amino acid phosphorylation
  Homolog annotation: Hit_ID=Q5SNF8; Match level="QueryCoverage=87%, HitCoverage=27%, E-value=1e-71, Identity=86%"; Hit description =Putative serine/threonine kinase 38
  Pfam annotation: Domain name=Pkinase_C; Domain location=120-156; Score=9.9; E_value=0.042; Accession=PF00433.14; Description=Protein kinase C terminal domain
HSQLSGHRDYIAPEVLLKKGIWNGMWSLGAIMYEMLVGYPPFYADDPITTCRKIVHWRNHLKFPEDAKLSNEARDLICRLLCDVDHRIGSAGADQIKAHPWFQGVAWDKLYEMEAAFKPQVNDELDTQNFMKFEELENPPAKTGSGPSRKKYKAEYNSISVLLLV

SEQ ID NO: 71316 - protein, 160 aa, Zea mays
  Coding DNA Sequence Number=SeqID_29537
  Gene Ontology: Mol. function=nucleic acid binding; Cellular component= intracellular; Biological process=translation
  Homolog annotation: Hit_ID=Q3LRV2; Match level="QueryCoverage=99%, HitCoverage=68%, E-value=7e-67, Identity=78%"; Hit description=Gag
  Subcellular localization annotation: CTP_CleavageSite=43; ConfidenceScore=5.13e-01
MKKVVYYETDSSSPSTSGSDAPFVTSKRHERKKFSKIPLRYPRISKRTPLLSVPLGKPPVFDGEDYNMWSDKMRHHLTSLHTSIWDVVEFGVQVPSVGDEDYDLDEVAQIRYFNSQATTILLASLSRDEYNKVKGLKSAKEIWDMLKTAHEGDEVTKITK

SEQ ID NO: 71317 - protein, 81 aa, Zea mays
  Coding DNA Sequence Number=SeqID_29538
  Homolog annotation: Hit_ID=Q5SNF8; Match level="QueryCoverage=39%, HitCoverage=5%, E-value=2e-09, Identity=96%"; Hit description =Putative serine/threonine kinase 38
MADAPAAAIPAAAAEPLAAVAEEGEGEAEGEAPAEAAVGSTLTMERVAAAKKFIENHYRSQMKTIQERKERYCTVPAVLIP

SEQ ID NO: 71318 - protein, 446 aa, Zea mays
  Coding DNA Sequence Number=SeqID_29539
  Gene Ontology: Mol. function=protein dimerization activity; Cellular component=nucleus; Biological process=negative regulation of cell proliferation
  Homolog annotation: Hit_ID=Q2QNH1; Match level="QueryCoverage=99%, HitCoverage=57%, E-value=0.0, Identity=68%"; Hit description=HAT family dimerisation domain containing protein, expressed
MAIVVTEEQPDNNPEDQGFTPEENIDTDRNDNNMSDHEPVFTEDIYDPINWDNLDNKSRDILVEKGPIRDENIEFPLDTNGRHFSYTHYSRKMSNGEVYDRKWLLFNTENCKSSLGHEGFKDWKHINERLKEHEASIQHITSMNSWNELRVRLGKHETIDKNIQQQITKEKERIRQVLQRIIVVVKFLGKQNLAFRGPSEQLYNDQNGNFLACVEMIAEFDLVMQDHLRRIQNNEIHYHYLSHKIQNEFISLLASDITKSIINTVKEAKIFSVILDCTPDVSHQEQMSLLIQCVNMSTRKVEEYFLGFMKVDDTSGDGLFNSLLDSIMSFGLNIEDVRGQGYDNGSNMKGKHKGVQRRLFDINPRALFMPCACHSLNLTLCDMAKSCGKAISFFGIVQRVNTLFSSSTKRCDVLKDHVESLTVNSWCNTRWESRIKTAKAIRFQAP

SEQ ID NO: 71319 - protein, 113 aa, Zea mays
  Coding DNA Sequence Number=SeqID_29540
MVQGYRKCTTPKSRHGRASTTPTSPQIDSANISPNPNSTDSADLAPNPDSADIADSTRPPNPAIAQTSPQIDDNLAAHNPVIPDHGPKPRPRSMQTYHRRRFGSSLKTMAGRS

SEQ ID NO: 71320 - protein, 761 aa, Zea mays
  Coding DNA Sequence Number=SeqID_29541
  Gene Ontology: Mol. function=binding; Cellular component=plastid chromosome; Biological process=positive regulation of transcription, DNA-dependent
  Homolog annotation: Hit_ID=Q8L4S1; Match level="QueryCoverage=99%, HitCoverage=87%, E-value=0.0, Identity=39%"; Hit description=Crp1 -like protein
  Pfam annotation: Domain name=PPR; Domain location=119-153; Score =11.9; E_value=0.29; Accession=PF01535.11; Description=PPR repeat
  Pfam annotation: Domain name=PPR; Domain location=198-232; Score =47.3; E_value=5.2e-11; Accession=PF01535.11; Description=PPR repeat
  Pfam annotation: Domain name=PPR; Domain location=233-267; Score =33.2; E_value=9e-07; Accession=PF01535.11; Description=PPR repeat
  Pfam annotation: Domain name=PPR; Domain location=268-302; Score =29.6; E_value=1.1e-05; Accession=PF01535.11; Description=PPR repeat
  Pfam annotation: Domain name=PPR; Domain location=303-337; Score =16.3; E_value=0.088; Accession=PF01535.11; Description=PPR repeat
  Pfam annotation: Domain name=PPR; Domain location=372-406; Score=7.8; E_value=0.88; Accession=PF01535.11; Description=PPR repeat
  Pfam annotation: Domain name=PPR; Domain location=407-441; Score =30.7; E_value=5.2e-06; Accession=PF01535.11; Description=PPR repeat
  Pfam annotation: Domain name=PPR; Domain location=442-476; Score =31.6; E_value=2.7e-06; Accession=PF01535.11; Description=PPR repeat
  Pfam annotation: Domain name=PPR; Domain location=477-511; Score =44.6; E_value=3.3e-10; Accession=PF01535.11; Description=PPR repeat
  Pfam annotation: Domain name=PPR; Domain location=512-546; Score =24.6; E_value=0.00035; Accession=PF01535.11; Description=PPR repeat
  Pfam annotation: Domain name=PPR; Domain location=547-581; Score =26.0; E_value=0.00013; Accession=PF01535.11; Description=PPR repeat
  Pfam annotation: Domain name=PPR; Domain location=582-615; Score =18.3; E_value=0.028; Accession=PF01535.11; Description=PPR repeat
  Pfam annotation: Domain name=PPR; Domain location=616-650; Score =12.4; E_value=0.25; Accession=PF01535.11; Description=PPR repeat
  Pfam annotation: Domain name=PPR; Domain location=651-685; Score =26.1; E_value=0.00013; Accession=PF01535.11; Description=PPR repeat
  Pfam annotation: Domain name=PPR; Domain location=84-118; Score=26.2; E_value=0.00012; Accession=PF01535.11; Description=PPR repeat
  Pfam module annotation: Pfam domain module=PPR::PPR::PPR::PPR::PPR::PP R::PPR::PPR::PPR::PPR::PPR::PPR::PPR::PPR::PPR; Domain location=119
  Pfam module annotation: Domain location=512-546::547-581::582 -615::616-650::651-685::84-118
TLPPHSNPFDEVLSSMSPREQTSLLSRQRCWRRARDLFNRLRALPGYAPNPVHDAVLLRHLARARRWAELHRAWIGMPFPPSNPAYAALADALAKAGLARGALLLLRHMRTRGVAPDEVSMNTFVRILKDEGRHDDALALFHSWCDGRFEVDFLDLDCITVDLDGPMQFLLADMYDDKIAAPAAGVAPERPRKPKLVVTYNVLIDLYGKAGKLKNALDMFLDMPAHGVMPDTYTFNTLINIFGFSGNSAQAEVLFASMVIRGVKPDTKTYNVMMTVFASIGDLEGVLKYYCQIRNAGLHPDAVTYRILLQVLCERKMVHKAEDVIEGILKAGSFVHEQSLPVVMKMYVDLGLLDEAIAFFEKHCRGKGVSSKNFSAIMDVFAGRGLWEEAEHIFCSERGDGNEKDIVEYNVMIKAYGQAKQYDRVSSLFESMEESGVPSDECTYNSLIQMFSFGGFPHRAKKLLGKMKDAGFEPKCETYSAIIRSYSRHCLVPEAIDLFNEMKASGVEPNVIVYGILIDMFAETGNVKEALHYSNLLEQSGISPNHIVLTSLIKAYSKFNSWKEAQDLYSRMNDMDGGPDIIASNAMLNLYAKLEMVTEAKEIFDSLRRNNHADAVSYTTMAYLYKSIGLLSESIRITHKLQKSGLLSDCASCNAVMACYGAKGNLRDCAELVHQMVVANIPPDASTFEMIFSLLKNGHVSTKEILQLESAYDDGKKSAKQAIIAFLFSVAGMHDAALEICGKMLMPQSTLDACAYNVCFK

SEQ ID NO: 71321 - protein, 78 aa, Zea mays
  Coding DNA Sequence Number=SeqID_29542
MELPCVTALAHTLWIWRRLVLGHGVPVQPPSLPSLREIVWGCGVATGHRCSSMRGEHGAGGDGGVDRLGEACEGDQGG

SEQ ID NO: 71322 - protein, 64 aa, Zea mays
  Coding DNA Sequence Number=SeqID_29543
MAQPQWGQRVGRVRGATVSGAPLARKEKRWGGGQVFTPPEPVCPALCSGALFSSVVDDQTKFSK

SEQ ID NO: 71323 - protein, 167 aa, Zea mays
  Coding DNA Sequence Number=SeqID_29544
  Gene Ontology: Mol. function=microtubule motor activity; Cellular component=microtubule associated complex; Biological process =microtubule-based movement
  Homolog annotation: Hit_ID=Q8GS71; Match level="QueryCoverage=91%, HitCoverage=13%, E-value=9e-55, Identity=67%"; Hit description =Kinesin-like protein
  Pfam annotation: Domain name=Kinesin; Domain location=16-161; Score= -115.2; E_value=4.9e-07; Accession=PF00225.13; Description=Kinesin motor domain
MTMEHGEDCCVKVAVHARPLIGDEKLQGCKDCVAVVPGKPQVQGKKSVGRAKPSAFLVQIGSHSFTFDHVYGSTGTPSAAMFDECVAPLVDGLFQGYNATVLAYGQTGSGKTYTMGTACKEGSHIGIIPRAMAALFDKIENLKTQVEFQLRVSFIEVQELFQILACE

SEQ ID NO: 71324 - protein, 544 aa, Zea mays
  Coding DNA Sequence Number=SeqID_29545
  Gene Ontology: Mol. function=microtubule motor activity; Cellular component=microtubule associated complex; Biological process =microtubule-based movement
  Homolog annotation: Hit_ID=Q8GS71; Match level="QueryCoverage=95%, HitCoverage=48%, E-value=1e-171, Identity=64%"; Hit description =Kinesin-like protein
  Pfam annotation: Domain name=ERM; Domain location=32-333; Score= -199.9; E_value=0.042; Accession=PF00769.9; Description =Ezrinradixinmoesin family
MALTSKEISLTCNPKDIEDEVAKEWEHTMLQDSMGKELNELNRQLERKESEMKMYGCDTVALKQHFGKKLMELEEEKKAVQQERDRLLAEVESLSADGQTHKLRDAQLQKLKSLEAQILDLKKKHENQIQILKEKQKSDEAAKKLQEEIHFIKAQKVQLQHKIKQEAEQFRQWKATREKELLQLRKEGRRNEYERHKLQALNQRQKLVLQRKTEEAAMATKRLKEILEARKSSARDSSAGSNGTSQGYNMGERSLQKWFDQELEVMVHVHEVRNEYEKQSQLRAALGEELAILKQEDIRAGGSSPQRGKNGNSRTNTLSPNARQARIASLESMVTISSNTLVAMASQLSEAEERERAFSGRSRWNQLRSMGEAKSLLQYVFNVAADARCQVKEKEVEIKEMKEQMTELVGILRHSESRRREMEKQLKQREQTTPMATTPPKSGNGTTKHSADDPNTPLSPVAVPAQKQLKYSAGIVNSPSKGVAAIKKEQLKYLISSLTIFNADGSNCTVVCGEESFNSRAFRKALEVEKKPSPVADAVKWTNL

SEQ ID NO: 71325 - protein, 119 aa, Zea mays
  Coding DNA Sequence Number=SeqID_29546
MKYRQRIGWSGRNATTRGTRGLGHAVAGPRRAVAQLRKLDEPRDQIARSVQHRRAAAEHRHYRQYSGRQWENGGMGPGSFHPTCIQGWRQNEWNYYKISKYRVCSKEMQFVLKLIHYDN

SEQ ID NO: 71326 - protein, 81 aa, Zea mays
  Coding DNA Sequence Number=SeqID_29547
MGVGLVGGSAEAGEHVRRTGWGGGVEDCDGNAGMFRFRSVHVQPRDYQGIFVSCFHKSDALYPQNIHFEDGSMYFEELLKS

SEQ ID NO: 71327 - protein, 174 aa, Zea mays
  Coding DNA Sequence Number=SeqID_29548
MAKDIVVLQRLCWQRIRVKGSKNLKRPIKLSKMTRRLGLFLSKALKNKKNVEGEAAQKEIVKLRFEVSGLGTTAKRKKNCLRSWRMILLKVKSKFKLCLKKRINLRKWCIATLEVELKRAKEEYEAKTSKISIRSLTVEASEWSKKSYQIYGTKTKKISIEESMKNIEKARKAT

SEQ ID NO: 71328 - protein, 170 aa, Zea mays
  Coding DNA Sequence Number=SeqID_29549
MVRTKNVTPSGGGDDEDPPRPFRQVKGKTVYLEQQEGRKKRRMDRAARAALAAVAAADQDEQGGQLRISSDQIAYHVRRLASRPRSSTTHSTPFDPVSTPPPTSLASIALEPSTTPNVSSTESQLPGYVDSDMYLWILGCQLRGTQQLRHSSAPRLRSRSSGCSCLPRLP

SEQ ID NO: 71329 - protein, 128 aa, Zea mays
  Coding DNA Sequence Number=SeqID_29550
MGYREATTHIQLWLLGALISHSEFDVVDFLICEIEDTVLDGLRARHTSSNDDDDLEIPPPPAVPPRSHDHEAGSYSAAPAAPPAINPALSAILQSLTQQQPHLAVEQARQVAIQQQMFEQMLSMFENI

SEQ ID NO: 71330 - protein, 97 aa, Zea mays
  Coding DNA Sequence Number=SeqID_29551
  Subcellular localization annotation: CTP_CleavageSite=33; ConfidenceScore=5.65e-01
MRASSFSPLTDISFVFPAFAMFFLPNLLRLGILSMSSPNVQVFVVSFSTNEHRMMDVSQAASIRRPFPPFDGHPAAPRCAGHAASDGHFGYRSSQLS

SEQ ID NO: 71331 - protein, 90 aa, Zea mays
  Coding DNA Sequence Number=SeqID_29552
MASKGNGEEGLWSWLYREREGRGRDGERNDGLQSHGFKAPLMAVDDGLCSVSRRVGEAGGVVLRGAGALQGGWLAAQPAGGTQGVGAAAA

SEQ ID NO: 71332 - protein, 347 aa, Zea mays
  Coding DNA Sequence Number=SeqID_29553
  Homolog annotation: Hit_ID=Q673F9; Match level="QueryCoverage=23%, HitCoverage=10%, E-value=6e-19, Identity=59%"; Hit description=Ent -kaurene synthase-like protein 1
  Pfam annotation: Domain name=zf-CCHC; Domain location=199-216; Score =33.9; E_value=5.5e-07; Accession=PF00098.13; Description=Zinc knuckle
MNPPPNPLPAGTDPVAVAQMQLLQQMANTMIEMKAQMWQKRREMRQKMRQEMRQERLERQQQPPLPPPPPPAPPREKHREFMSHKPPTFSSSPDLLHADDCLKSVEKMLNIAQYTNQEKLSRYALEKVADDERKQEQFMERLIGPPQYQLGTPARPGGGQQSYQQPTQHTPEATPQTPHPRQAAPTGNLVRPVGQGTVTTCFKCGEVGHYANDCTKSNPNTPARSNIQGKQQTPATGKGFSIARVKVSADTTADTADGADAGRNASLDIETAAPIGFDFTFSGMFTLAIKMGLQFRVRQTDIDGILRLRENELKRHAGDKTYAYVAEGFENLLDWNDVMKFQARNGS

SEQ ID NO: 71333 - protein, 453 aa, Zea mays
  Coding DNA Sequence Number=SeqID_29554
  Homolog annotation: Hit_ID=Q572C5; Match level="QueryCoverage=10%, HitCoverage=47%, E-value=1e-17, Identity=89%"; Hit description=Mob1 -like protein
  Pfam annotation: Domain name=Mob1_phocein; Domain location=3-113; Score=-53.6; E_value=2.3e-05; Accession=PF03637.7; Description =Mob1phocein family
MGYSTAVYGWGRGQRYEYRWADGVQIKKPIEVSAPKYVEYLMDWIEGQLDDESIFPQKLALYCIELIVPVIRHKDMSHMRVSVLFLPDHADHAGSMALYELAVFSPSDPVLVEGTNYAGQYSAVLEQSNETATEEHTKEMPCCWKTCHFCSDHKQHTRHEGFIIMWILEATQHVTGTDGTTTGATATTRCGRREQNGWTRHRISNTELVLNTDGACRRNAGNVHPAAASSLDAALPEAGLFVGAEGEERRRRCEAERGGAAPPLGAGDAEAWPVARVHVELAARPLPLLRLRLLLLAAAGAVICGDERRIKIESIGRSAGTAAEANSDRGIRTGIGTWGRVDVGGECGLLVVMRRRLLGDAASGLGSGGGGVRLLLTEEGLHVASAAPRHGSGDLSPADGAAGGAGLTVEEDGNGLETWNAAAEEWAWWIWIERGLLFIYILGWLHPTALRPL

SEQ ID NO: 71334 - protein, 78 aa, Zea mays
  Coding DNA Sequence Number=SeqID_29555
MSLFGLGRNQKTFRPKKSAPSGSKEYELVRFYQNVPEVGKLYVVCFGFNLSVPTMSRAKGYLARLTFLFAIAKSYVYH

SEQ ID NO: 71335 - protein, 109 aa, Zea mays
  Coding DNA Sequence Number=SeqID_29556
MDEARPRRRVIRGGPVIFDEQFVGPQHGTTPASTTSAIQKLKAQGMSYTYYVTYEYGIKFRANPEMNIHHFTYLRMKDIFKAYIVLGKEWGKKRLYPRLWILTHLGDLT

SEQ ID NO: 71336 - protein, 87 aa, Zea mays
  Coding DNA Sequence Number=SeqID_29557
MELAAAELLSLGNDSLNGLVLHSGNTHDSLLALALLGCSGWLLRQEDGLPGCSDAGTDFLPAGYSDGTAAAGSDADAGAGAGAGDLA

SEQ ID NO: 71337 - protein, 189 aa, Zea mays
  Coding DNA Sequence Number=SeqID_29558
  Subcellular localization annotation: CTP_CleavageSite=50; ConfidenceScore=5.18e-01
MPASAAPPAQPAAPPPPPPPASPAPPSKDAEVMLKMGSTTDKREQYRLMRDAMEKRFIRVAKGSLVGGVRLGMFTATFFGIQNLLIDTRGVHDVFNIAAAGSATAAAFGLILPGSMMWRARNVLVGSALGAGICYPLVVDSTGWVQLKLAEKANLEIANSKPSSDLTEGKENQSRVGAAIERLEGSLKK

SEQ ID NO: 71338 - protein, 254 aa, Zea mays
  Coding DNA Sequence Number=SeqID_29559
MAKLGTRRRDRGGQTAEGDLGRTEDHFGEQYPPRWGIIWRTEADMSFEERRGEEVPYLEAAHGAAWHNTGDFDWPDDEESRGRAHDWLTVTITLNQARSAALPKVTISRGGPSKGATTHTSGVLREGQHEDLRGPLRRPTARLHIMKAQLVGHVTSPWSLGKVMAAGSPELMAFGVTADDLLQVLPLATAKAERDTTYPFVSEGNNNMPTSNPFNMDATGAVLLHRIGIFGTSNRYDPTYGLVASPEMGLRPLL

SEQ ID NO: 71339 - protein, 443 aa, Zea mays
  Coding DNA Sequence Number=SeqID_29560
  Gene Ontology: Mol. function=phosphotransferase activity, alcohol group as acceptor; Biological process=protein modification process
  Homolog annotation: Hit_ID=Q69JJ2; Match level="QueryCoverage=81%, HitCoverage=57%, E-value=3e-69, Identity=38%"; Hit description =Phosphatidylinositol 3-and 4-kinase family-like
  Pfam annotation: Domain name=PI3_PI4_kinase; Domain location=119-356; Score=192.9; E_value=7.6e-55; Accession=PF00454.17; Description =Phosphatidylinositol 3- and 4-kinase
MAIAVGHFHDLKPPAVRNRHYSLHTVALLDSPLLDRDHREHGAAGGGHTGLSPRRRSQSSPCFTTVAPAAGSEHADRSENKMPRVEIVAGRHARGVRELIAGAAAAITSGTRLVPAQNGLSGALLLNGSRAGEHVAVIKPLDDAATANGGGGGYASKTVLREVAAFLLDHDGFASVEPTALIKISRPATATTTVASIQRFVAHEYDAGELGPSRFSVASVHRVGILDVRLLNIDRHAGNILVKDPPRGLQRAHGSSSTPARLDLVPIDHGLCLPEQLDDPYFEWLHWPQSSLPFSDDELAYVASLDPFKDAETLRAELPSLKEPAIRILTVCTIFLKRAAAAGLCLADIGDMMTREFTAQQDGLSTLEALCKQAHDSVLPHPSPDGDGDGVDESTSVSGGRKHVSFGDLSLAEWTSFLEMFEQLLPAALEDKKCAVLGTSSSF

SEQ ID NO: 71340 - protein, 175 aa, Zea mays
  Coding DNA Sequence Number=SeqID_29561
  Gene Ontology: Mol. function=Rab escort protein activity; Cellular component=Rab-protein geranylgeranyltransferase complex; Biological process=regulation of GTPase activity
  Homolog annotation: Hit_ID=Q9C8Z5; Match level="QueryCoverage=79%, HitCoverage=27%, E-value=6e-28, Identity=44%"; Hit description=Rab escort protein, putative; 48705-51166
MAEAGADSSNAAVDGGGGSVQNDYPTIDPTSFDVVLCGTGLPESVLAAACAAAGKTVLHVDPSPFYGSLYSSIQLSSLASFLSREATPPTSTVAAAASDWHTVVDLHRRIVYSEVETSGAAPEPARRFTIDLVGPRVLYCADEAVDLLLRSGGSRHVEFKSVEGGSLLPGRLPLP

SEQ ID NO: 71341 - protein, 60 aa, Zea mays
  Coding DNA Sequence Number=SeqID_29562
MARGTIVKSDRTPRLLVDAALVMLKPRLREKRFHENPPKNPSFSEKLAVGKSWLLGKAGG

SEQ ID NO: 71342 - protein, 67 aa, Zea mays
  Coding DNA Sequence Number=SeqID_29563
MTPRELNNYPRKDTIYLCQEVVFKIMAGCNKQRSNDSNITILDGDLKACRRPRKKNEEKRRRMKKSR

SEQ ID NO: 71343 - protein, 67 aa, Zea mays
  Coding DNA Sequence Number=SeqID_29564
MELRPPAWEPPLPHMGLPSLALWIGSRRLRPGKRRLYFGSRNRRHRMSRHLDLVRLDQIALSGLGFL

SEQ ID NO: 71344 - protein, 496 aa, Zea mays
  Coding DNA Sequence Number=SeqID_29565
  Gene Ontology: Mol. function=calcium ion binding; Cellular component =mitochondrion; Biological process=translation
  Homolog annotation: Hit_ID=Q94HS0; Match level="QueryCoverage=90%, HitCoverage=83%, E-value=1e-118, Identity=32%"; Hit description =Putative salt-inducible protein
  Pfam annotation: Domain name=PPR; Domain location=11-45; Score=48.0; E_value=3.1e-11; Accession=PF01535.11; Description=PPR repeat
  Pfam annotation: Domain name=PPR; Domain location=113-147; Score =33.6; E_value=7.1e-07; Accession=PF01535.11; Description=PPR repeat
  Pfam annotation: Domain name=PPR; Domain location=148-182; Score =25.6; E_value=0.00018; Accession=PF01535.11; Description=PPR repeat
  Pfam annotation: Domain name=PPR; Domain location=217-251; Score =17.6; E_value=0.046; Accession=PF01535.11; Description=PPR repeat
  Pfam annotation: Domain name=PPR; Domain location=364-398; Score=1.8; E_value=4.5; Accession=PF01535.11; Description=PPR repeat
  Pfam annotation: Domain name=Peptidase_M22; Domain location=139-351; Score=-57.2; E_value=0.02; Accession=PF00814.15; Description =Glycoprotease family
  Pfam module annotation: Pfam domain module=PPR::PPR::PPR::PPR::PPR::Pe ptidase_M22; Domain location=11-45::113-147::148-182::217-251::364 -398::139-351
MAQVGIQVNTITFNVLIDGYAKSGQMDQASAAYREMQARGLVPDSCTFNIIAARAHKFGYAAQLVHDHDMFSSHMSADGLDMLVCRLCWDHRLDDAWELLLGAIEQDVPLRVTGFNALIAAYSKEGLHEEASELYRIMNKLGLAPSSSTFNYLIMGLCNQVRLDEAQLLLEHMVSKGYCLSTSFTISLDAYFRDGNAVGTLKCWDDMGKIGLQTDFIAFSAYINGLSQLDYVNEAYQAFAEMTSRGILAKKGEQFIDVPYVVKGMDVSFSGILSFIEAAAIEKLKNNECTPADLCYSLQETIFAMLVEITERAMAHCDSKDVLIVGGVGCNERLQEMMKIIDVLDRAMILTGRLIKMAFKPNTITLNVFLSHFCKQGFGNIALMWAEKLREDSFVFYGATRNIIDWARREMEDDPQANNEDIGRCMFLEFLMFMTYEAMLSNRSSKATHMLTEKGFDPASSSMIRKEVKMGLAVIDCLLLNQTFLIDPKYPSFCLN

SEQ ID NO: 71345 - protein, 78 aa, Zea mays
  Coding DNA Sequence Number=SeqID_29566
GEGAAASAPATTWARQPRPWRWLHPRRVRDLDEGTTEAHGRATSGGVAPLRRHAAPTLERRRGSGVREFSPGGAAPSS

SEQ ID NO: 71346 - protein, 391 aa, Zea mays
  Coding DNA Sequence Number=SeqID_29567
  Gene Ontology: Mol. function=serine carboxypeptidase activity; Cellular component=peroxisome; Biological process=proteolysis
  Homolog annotation: Hit_ID=P37890; Match level="QueryCoverage=92%, HitCoverage=76%, E-value=1e-106, Identity=52%"; Hit description =Serine carboxypeptidase 1 precursor
  Pfam annotation: Domain name=Peptidase_S10; Domain location=33-391; Score=215.5; E_value=1.2e-61; Accession=PF00450.12; Description =Serine carboxypeptidase
MASLFLLLLVVVAALLWPPAVAAPEEHLVTGLPGFHGAFPSKHYSGYVTVDERSERSLFYYLVLSERDPAGDPVVVWLNGGPGCSSFDGFVYGNGPFNFEPGSSPGSLPKLQLNPYSWSKKVSNIMYLDSPAGVGMSYSLNRSDYVTGDLKTAADAHKFLSKWFELYPEFQLNPFYISGESYAGVYIPTITDEVVKGLSDWQSRLTDVDYDFNSFRAICAWDGPHLNRHDVKASCRGTFFGAVDDLCQEKNRQSALGNASQDWSHRTEHIESTASSSDGLGHWVRLGETDRPFPVRKRMSGRSWPLRLALKDGHVPMWPGLSGRSLPCTSDEVATAWLDDEDVRAAIHAKPKSLIGSWELYTARIDFTHDTGTMVSYHKKFTALGYRVLIY

SEQ ID NO: 71347 - protein, 169 aa, Zea mays
  Coding DNA Sequence Number=SeqID_29568
MGVDEGGVSLLGVKLQLASMTRNGAELRMTPDVGSQTLPCGGSARRRRDSTTVMASAIHNAASHMNGHTDMVAKDHRVRCGRFSSHLQYGAAQHRVTGEEAAPAETNTPVARSGDAPEQRGQAAASGCNSRRWRRGGAGKRHCPSGGCNGARRSDTHDHVRGTRRLLRT

SEQ ID NO: 71348 - protein, 124 aa, Zea mays
  Coding DNA Sequence Number=SeqID_29569
  Subcellular localization annotation: CTP_CleavageSite=25; ConfidenceScore=5.03e-01
MTLRNHGLSGPKRGPSGQCAGKICSGSRGTDPSVKSCGQSAPLHRRPPHRAEPKVVAIIEVIQCSKDLQLYLTLHHLKVSWLVCQPQDHPTQRETVLAARSRTIRPRVMDSLHRRREYRQVKVA

SEQ ID NO: 71349 - protein, 102 aa, Zea mays
  Coding DNA Sequence Number=SeqID_29570
MEPRWRAGRHGRDRPSVACGQPDQRVRAASGPDGVGRDLGSSKRGPPAAAPTRRPRCARVRPGGRLRPRPRRRGGSSPRRRGRPTTVQPRPGACGRGPLKGN

SEQ ID NO: 71350 - protein, 55 aa, Zea mays
  Coding DNA Sequence Number=SeqID_29571
MAVLGRGSLGRGGDGSPKVWEVRARWRSTRACDLLRDRARLYPEDIQTRFTILKK

SEQ ID NO: 71351 - protein, 68 aa, Zea mays
  Coding DNA Sequence Number=SeqID_29572
MDIYTYARGRIVSELHRADLQQPRHRSPIDFALVVEDEPVERMRFWILKEKAGPKGGSRAIGARTGDA

SEQ ID NO: 71352 - protein, 176 aa, Zea mays
  Coding DNA Sequence Number=SeqID_29573
  Subcellular localization annotation: CTP_CleavageSite=70; ConfidenceScore=5.10e-01
MEGPDCTAPAADGTYGNMAASRAGGGGGIHRNLVQHRTLSSARPMLTQTASATHHVTTPSAPWSDSGSASASASRHRPWSRELSASNITTQRFGRKYCGEGWRGRSRAQIDEEPDGSSRAPMEGMAGSTARMAGHEHGARARIWGLPTLSNGERRRRSCSPGGRAYLPSARTFQRT

SEQ ID NO: 71353 - protein, 96 aa, Zea mays
  Coding DNA Sequence Number=SeqID_29574
MTLESRGGGARAGAWAREREQEHNADIEMWERGRRGHAPQHSKQVAEATFIFIPTYVLLCHWTRLRPAAILFLLKVPNGGPHGSNFKANFGLHLSG

SEQ ID NO: 71354 - protein, 97 aa, Zea mays
  Coding DNA Sequence Number=SeqID_29575
MVLSAFSNGDCAGCLDREQVRKAKLMSLNCIAANRDETHTVESLSCQYWVSLAIGTTCRLRGHPNPPLVLHCIGILRNTDHQLQSSPSTAGPTRPLS

SEQ ID NO: 71355 - protein, 543 aa, Zea mays
  Coding DNA Sequence Number=SeqID_29576
  Gene Ontology: Mol. function=methyltransferase activity; Cellular component=intracellular; Biological process=metabolic process
  Homolog annotation: Hit_ID=Q69U43; Match level="QueryCoverage=95%, HitCoverage=61%, E-value=1e-153, Identity=53%"; Hit description =Putative HEN1
MATSTSKSQPLLLNRACMWILLGKLPDGNCKMSRDSILAAELPSAYSRFSWKGLSPRDLLCSFCRLQRLPEPHFDVSRVSCDTLMSALSSEERGAPAGSAENQYTNDVRINKEKPDLFKCEVNIRSRKQEILLEYSAADTWSKESNAIQNSSLKVLIWFNNYFKKLTSKTGKLYLSESTAGVKVHSNIFLQEFAMCLPVYGKNGGSYSAMCSAVGSFSMDTQKKHLESTAKLTRIEGPDSGVFPSHGSLTCISYTASLVTKDKAKTYLLESHNEFEFEIGTGAVSNQLESCVTQLSVNQTARFVAELPPRDLIMAASCEFSHDLSNVSSGVHILNIVVESCFLEFSVKVLQVDFGCGSGSLLDSLLEHPTTLEKLVGVDISRKGLTRAAKSLHQKLSKKSTTQTNVPTDVLYDRSITDYDSRLYGFDIGTCLEVTDLTSWTFSIVFLFGRRGRRKHWSLQVPQSRPQVRVDQATVQCWATGLAVKHSYSVEFSGVGGLGEEPGYASQIAVFRRLVQGQEAMCLDKDGDQPYEVLWEWPNACVN

SEQ ID NO: 71356 - protein, 214 aa, Zea mays
  Coding DNA Sequence Number=SeqID_29577
MPILVAWERVIWSRGGETATSLYDINLEAMLVGLLIPVGFSWRDYYAFRTAQYVAPLVLKNWRSKMVQSASSEESSGSAVQILGTSGDPNLVGAFISSQDIDTAPHNSLSKEMLDSKVQINEQNCDIKGNVAVEKLSFERTSAEAGKNSKNISQLLVKKALEVEKFEGSVWSAGEGRHGAVGSAGEGREHGAVASSSRREQERPVQSRRRAALG

SEQ ID NO: 71357 - protein, 67 aa, Zea mays
  Coding DNA Sequence Number=SeqID_29578
MARAHPQKLCLWVQAVCSAGEFPGAFCPLAMSELSKSKDIDAYVEGRGRMWRSGWNKLNASSMDPDM

SEQ ID NO: 71358 - protein, 163 aa, Zea mays
  Coding DNA Sequence Number=SeqID_29579
  Subcellular localization annotation: CTP_CleavageSite=46; ConfidenceScore=5.25e-01
MGVAAAREPARPRQMPARAPARPRRQQPAPPLWSGKRREGTGGRVSNAAERPRPNWPEPTSPGLAATSGEKDAASGSERNCRRESRLPSMFLTERQMQAATGSRNKKYTSARFGHFVQRRRHNADITQLIVTASHGPRNRSLIQFNYLYRIDLNRKLLSNGSK

SEQ ID NO: 71359 - protein, 164 aa, Zea mays
  Coding DNA Sequence Number=SeqID_29580
MSLVSLGCSASNPSTALFDLSSSLSIIEEKVESLGDEELALVASRFPKKGKSQADLRDHNSGLCKGKQEYTSGKHKSRGSDLDHDSDESVSSSGDKEPERSIEDKLNRLCFNANTTGDLCTMTLGEEAVGDDGKDISDDSTSEVSHCTDDLATEIEKLIATLAS

SEQ ID NO: 71360 - protein, 127 aa, Zea mays
  Coding DNA Sequence Number=SeqID_29581
MDERSRSRAVRLPGRALGARLLARSDGLRAGTLGRLGRRYARQLERRVAGRLGARRGFLGVGRGALGFWRCGQGREARGGWARARLASRVRQREQGRGKEKARGGERRWQRLAGSRGAAPSWAEWAD

SEQ ID NO: 71361 - protein, 107 aa, Zea mays
  Coding DNA Sequence Number=SeqID_29582
MEPTAMVRTPMVHNFTIFLHNRGNCWCNGTHKHTSNTKHKSKKSFDKDTLKQKYLHKAKLKECAFFASLDNLDNEFNHASSTSSDDDPERQVEDKPNELCFLSVFRV

SEQ ID NO: 71362 - protein, 49 aa, Zea mays
  Coding DNA Sequence Number=SeqID_29583
MERLLGFLGACLGDFSGRPWEVELLLLPWKKGFEFGLNMRYLAESDKID

SEQ ID NO: 71363 - protein, 112 aa, Zea mays
  Coding DNA Sequence Number=SeqID_29584
MANGQGKECSPALAEEEGCPAELEKVVEGEDAMDPRELVYEGGWVLFWSMGTVDMGGEAGELEAARGFTNPTPLNRNLVLEICQVVVYGRVDLSHQFRLKSIRVWPYPLYQQ

SEQ ID NO: 71364 - protein, 88 aa, Zea mays
  Coding DNA Sequence Number=SeqID_29585
MLVPLLGTPSPRCALLPPCRGARWACAYALGRCMGEGVATAMDLAAPSCTDGKVGDNLGDHQIMMNGGRSQNYSPEYLLYCGSVHHQQ

SEQ ID NO: 71365 - protein, 339 aa, Zea mays
  Coding DNA Sequence Number=SeqID_29586
MYGCLQCVRTEEMEPLYPAHEPRSDTDIRLRSPQRKAREVEEASVVLKSPHRKTAVAAQVSTQVQQPSLPPQQPDEVGTKNSAAEVVMDVISPKTTQVGVVHGNPVDDDKEQRARYLKYSQKALGFAVCTFVGYASNASSTGSAAFKMAAAPFFVAIIADLLTLKTKAKHGCALIYLSSFHLILMTYLIFIAFDMAHAYAVLFLPLVASASHLQQKLWPPPPRDDGSADDRSKAVSKDLDSILELSSLILNWSSFVSAIMTVDNDEIAPEAVGLLFFLTIVLGIYLMLATTVRAPALNLPTKYLDVLLICLLLSTLIATVMTFSGANWTGKQSSTGGST

SEQ ID NO: 71366 - protein, 41 aa, Zea mays
  Coding DNA Sequence Number=SeqID_29587
KAQFTPLLGIVILSSTPVEGIKINEEIFSIAFKGFCNWWSG

SEQ ID NO: 71367 - protein, 385 aa, Zea mays
  Coding DNA Sequence Number=SeqID_29588
MVRTKNVSAPGGGDDEDPPRPFRQRAIAARVRRFRHVPVESWLLAQRDPTAVDLFSTRTQASFFRAQLSAQIALRAHRLLDLPAFLLAASANSEVHLSYLPCLLSLLTTTGRYIEEWVRVFYAIVWIDSDHQWMRFHFEREDVTLHASHIRQLFGFSKSSTRLHSMCYGSSDPPRRPHNGVAPATTHVAALFRPPFTDGSQRSPADFTPAAKYLYQVMRRTLLPRMGYREATTHIQLWLLGALISHSEFDIIDFLICEIEDTILDGLRARRQLPYAHYLYYIFTQLIRPPQFQGTLEASHLQFGSYHPAHEDPFLVPDTQAEDEAFRQFKTQGTTVVDDDDDYDDDFGIPPLPPMPPRSHDHEAGSSSAAPAAPPAIDPGLAAIL

SEQ ID NO: 71368 - protein, 148 aa, Zea mays
  Coding DNA Sequence Number=SeqID_29589
  Gene Ontology: Mol. function=DNA binding; Biological process=DNA integration
  Homolog annotation: Hit_ID=O24587; Match level="QueryCoverage=99%, HitCoverage=25%, E-value=2e-40, Identity=71%"; Hit description=Pol
MKSAFLSGPIKEEVYVEQPPGFKDDRYPTMCTSSLRCSMDLSKPQEHGILKKFGMKDANPAKTLMGTDGHLDLNMGGARFQSDPKECHLVAVKRILRYLVRTPYIGLWYPKGSTFDLIGYSDSHYAGYKVDKKSTSGTCQFLGRSLVS

SEQ ID NO: 71369 - protein, 175 aa, Zea mays
  Coding DNA Sequence Number=SeqID_29590
  Subcellular localization annotation: CTP_CleavageSite=24; ConfidenceScore=5.44e-01
MRPAPSVSRPTSTSTISPAAPPPAAAKLASSPWHSTVPYLFGGLAAMLGLITLALLILACSYRKLNNYLSTGDASSSPSRPEATDGNGFKSPAATAPASPATFADLVAVVMAGEKIPTFLAAPIVRRTHGNDSAATATGEGSPETEEELESRGKAGERECRVIADAERERHLSHV

SEQ ID NO: 71370 - protein, 160 aa, Zea mays
  Coding DNA Sequence Number=SeqID_29591
MADLVAVGIKRRDAEVGSHGFPILLGPKRIKLEDEAEIPEPMEEEEPLADVDADAGAAAPVVVQAQPAVSVSMPSPSPLQPAQGHEEAAVLREPQPGLQQAAPMDVEEDFRQPQPQPGLHPRFWSGGRLWSVLMAGAPVCASVQQPKSGAPLFQAAFVTC

SEQ ID NO: 71371 - protein, 425 aa, Zea mays
  Coding DNA Sequence Number=SeqID_29592
  Gene Ontology: Mol. function=nucleotidyltransferase activity; Cellular component=cellular_component; Biological process =biosynthetic process
  Homolog annotation: Hit_ID=Q9AYG1; Match level="QueryCoverage=92%, HitCoverage=52%, E-value=1e-177, Identity=77%"; Hit description =Putative phospholipid cytidylyltransferase
  Pfam annotation: Domain name=CTP_transf_2; Domain location=265-397; Score=50.5; E_value=5.6e-12; Accession=PF01467.16; Description =Cytidylyltransferase
  Pfam annotation: Domain name=CTP_transf_2; Domain location=74-204; Score=90.7; E_value=4.6e-24; Accession=PF01467.16; Description =Cytidylyltransferase
  Pfam annotation: Domain name=FAD_syn; Domain location=76-200; Score= -67.7; E_value=0.057; Accession=PF06574.2; Description=FAD synthetase
  Pfam module annotation: Pfam domain module=CTP_transf_2::CTP_transf _2::FAD_syn; Domain location=265-397::74-204::76-200
MAIGLLAFESHQGLWNSGYYSQLFGIGGVLITLTILMLSTGYFGGIGAPFAPYFWPYLGQVPKKRERKRPVRVYMDGCFDLMHYGHANALRQAKLLGDQLVVGVVSDEEIVANKGPPVLSMEERLTLVSGLKWVDEVVPNAPYEITEEFMNTLFNKYSIDYIIHGDDPCLLPDGTDAYALAKKVGRYKQIKRTEGVSSTDIVGRILLTFRQKDADTDLSVVVAEKSGEKSNDEVKSQLSHFLPTSRRIMQFSNGQAPSPGARVVYVDGTFDLFHAGHVEFLRSARQLGDFLLVGIYDDESIRDRRGCRPIMHLHERTLGVLACRYVDEVIIGAPWEVSKDMITTFNISLVVHGTVAEGNSAGEIDPYAVPKSMGIFQTIRSPKSITTLSVATRIVDNHEAYKYSVSESYMFQGPKTTATPPIAGS

SEQ ID NO: 71372 - protein, 77 aa, Zea mays
  Coding DNA Sequence Number=SeqID_29593
  Homolog annotation: Hit_ID=Q2QNH1; Match level="QueryCoverage=43%, HitCoverage=4%, E-value=4e-07, Identity=79%"; Hit description=HAT family dimerisation domain containing protein, expressed
MAKSCEKVATFFGIVQAEKAFEVNYFLVVVDMANSSLKNRFEELQTFKKREPKQQRVVNVRAGAEYVYESESTGYGD

SEQ ID NO: 71373 - protein, 149 aa, Zea mays
  Coding DNA Sequence Number=SeqID_29594
  Homolog annotation: Hit_ID=Q9LVD1; Match level="QueryCoverage=88%, HitCoverage=30%, E-value=1e-20, Identity=44%"; Hit description =Arabidopsis thaliana genomic DNA, chromosome 5, P1 clone:MJB24
MEEGRNCYADEHYLPTLFHVSSDRTVPFYILKESGCQICLLGTDVKALICIEQMMDPAGIANWSVTYVDWSEGKWHPRSFRAKDVTYERLKNMTSIDVSYHITSDDKKDLLQRPCMWNGLKRPCYLFARKFYPEALDNLVNLFSNYTIF

SEQ ID NO: 71374 - protein, 98 aa, Zea mays
  Coding DNA Sequence Number=SeqID_29595
  Homolog annotation: Hit_ID=Q1RX82; Match level="QueryCoverage=45%, HitCoverage=8%, E-value=2e-18, Identity=82%"; Hit description=Major facilitator superfamily MFS_1
MGSARMIQVHDRTNDQLSNNGLKRPTKQRICIMVQHRDQVTELLSRSDIDKNLKDEFRSQGCALGGIFQKQGGLGNDICTLLWKLGALYLFVLATNIL

SEQ ID NO: 71375 - protein, 326 aa, Zea mays
  Coding DNA Sequence Number=SeqID_29596
  Subcellular localization annotation: CTP_CleavageSite=47; ConfidenceScore=5.10e-01
MLFHGDLRAAGEPHPPPPPPNSLPLEQRSAARNAPSPSSYAIVLLVSIAATTSTQAIARSAPSPSGLPLKRRHSRSGTTSPLRVDLHVAKNPISSNTYSRRAARHEEPYPLPRCPCRSSCTSSGAQSTQASLPDELHAARIPISIPSLLAFTTLLDSSKFHPNERWWTDCVFRVLQNGLAIDVESHNQIKERKNKANKICGVNKTTGSNCNKVNRAVCKFYSKEVVDTTPGRVGGGFFINSKAEGRLLSCPLSDKGERQYTSVYYHRRMAETEKDIFRSMDESRFMVGGRFKKMTGSTLSIKKVMVKTSGFQEGVEKFVVGATIRS

SEQ ID NO: 71376 - protein, 103 aa, Zea mays
  Coding DNA Sequence Number=SeqID_29597
  Homolog annotation: Hit_ID=UPI00004C1734; Match level="QueryCoverage =67%, HitCoverage=29%, E-value=7e-11, Identity=41%"; Hit description =UPI00004C1734 related cluster
MPILVSPAKEEPILLYVATTTLVVSVAVIVERQEERHTLPIQRPVYLVSEKWALAYSSSHPFEVHLRYAIRLHFAAYNNVVECEALVNGLHIAIDLGVRCLDV

SEQ ID NO: 71377 - protein, 47 aa, Zea mays
  Coding DNA Sequence Number=SeqID_29598
MAGVPHPVGLAALAGYASHLGACCQTSVEGIHTSELMLQSFSISERC

SEQ ID NO: 71378 - protein, 221 aa, Zea mays
  Coding DNA Sequence Number=SeqID_29599
  Gene Ontology: Mol. function=transporter activity; Cellular component= integral to membrane; Biological process=transport
  Homolog annotation: Hit_ID=Q1RX82; Match level="QueryCoverage=63%, HitCoverage=25%, E-value=5e-59, Identity=78%"; Hit description=Major facilitator superfamily MFS_1
  Subcellular localization annotation: CTP_CleavageSite=42; ConfidenceScore=5.12e-01
MAASVLQAERHLLLLGSGRNRPLLRMLPPRVLFPHRRRSWPRAVRVSPGDGEGAGGFASAVEKRSIPGIVEEEGYGARGEELEGDVAGALEQRWPPWDGLAERYKLIGATSLAFVICNMDKVNLSVAIIPMSHQYGWNSSTAGLVQSSFFWGYALSQLPGGWLAKLFGGRKVLEVGVVTWSLATAIIPVVAGFMPGLVLSRILVGIGEGVSPSAATDLIAR

SEQ ID NO: 71379 - protein, 522 aa, Zea mays
  Coding DNA Sequence Number=SeqID_29600
MNVNPKVAYARGSCQCQPDRHEEIAKEAASAVSSAAMGYTYTPTYYSGLQDTIASLCKSILPSFRVGRRLTADQAAARRHAEQLKWQQESFHRILHLAALHREGIAPASDVAAFRGTMLAALVAPPQHLEQPAVLRDKLLFLQELLYAKCVSAAEYNASKAPLVQRLAAFGVIVDCPDAEVSAEEWSEIDLRDPPPPATAAASDKPKHKAFVTPWKSRSKKDQDVNSSASRPPLAPVDHNNATNAPVFMTESSPSETVPSGKAEKGKRRHLAGMFHSGGSGTENKEPAGEEGVVEKETVRGKKKSSWGFDGIKKWTKAGACNSGEAAATGEQPQHVPPRSSYSECQLEASPMAASGPDAKRAKTRLHSDTDNDSASELLRDKNTKKELSRIQAELSSTNRNLNFSNQQMEAISTKLPVDKSDLKSYFPKAWCDQHGDGVITAAKEGFKQHVEEMEKQRDITGSEGWATFEDIDLDDNFNPRAFSRHQPDSAVKGKKVNESLTSSFTNPFYSEKNPFLNTNYN

SEQ ID NO: 71380 - protein, 69 aa, Zea mays
  Coding DNA Sequence Number=SeqID_29601
MAVAPGSSGVDRGGRDFEYGSRRDAETGGCGEGSADQVLDGQGGGRRARRILALLRGKQARRRWNCSGG

SEQ ID NO: 71381 - protein, 49 aa, Zea mays
  Coding DNA Sequence Number=SeqID_29602
MATATAVGGPDRVETAASSAAAVLAVAVASQRLLGLLALAGPIVTAIIM

SEQ ID NO: 71382 - protein, 92 aa, Zea mays
  Coding DNA Sequence Number=SeqID_29603
MSGDARAIAAVGCHRGLAWPGHLGLPPAEPTPWLCAPSTRDGSAGPAALGRHRRAPTRKGRSPSLYVPRKKTTDQSANSITAGDFVLMFENS

SEQ ID NO: 71383 - protein, 120 aa, Zea mays
  Coding DNA Sequence Number=SeqID_29604
  Homolog annotation: Hit_ID=Q53KA2; Match level="QueryCoverage=23%, HitCoverage=2%, E-value=8e-08, Identity=75%"; Hit description=ABC transporter-like protein
MARLFICQTLIADFLFQSELLAAEINYMAKRENELQNDHMNLRTKDPRTCPTGHRPEDQPAGHQEHALQAAQVPVLLPRILLPRTTKFLAILNRLIYRTAASKNNKEQGMSYWASDLMIH

SEQ ID NO: 71384 - protein, 111 aa, Zea mays
  Coding DNA Sequence Number=SeqID_29605
MVKNFGRETVQIAMNAVVTSHLLVCLYSAAGLQGRSGFIMCEQLTVPDVKNINEDTEMIHVVKTEDPNDASGVVSAVITNVGVASCITGEALLVNMHLEDIATETKDSEIQ

SEQ ID NO: 71385 - protein, 245 aa, Zea mays
  Coding DNA Sequence Number=SeqID_29606
  Gene Ontology: Mol. function=hydrolase activity, hydrolyzing O -glycosyl compounds; Cellular component=membrane; Biological process =carbohydrate metabolic process
  Homolog annotation: Hit_ID=Q9ZNY6; Match level="QueryCoverage=86%, HitCoverage=63%, E-value=1e-53, Identity=51%"; Hit description=Beta -1,3-glucanase precursor
  Pfam annotation: Domain name=Glyco_hydro_17; Domain location=26-243; Score=108.8; E_value=1.6e-29; Accession=PF00332.9; Description =Glycosyl hydrolases family 17
MAFTLRLGTAFLVLLLFSCAAEAGEVGVNYGMVANDLPNPASVVQLLKQNGITMVKIYDANATVLTSLANTGIKAMVMMPNQNLAHAARDPVYAAQWVQDNVKKYLPRTQINAVAVGNEVFDDPNVDKMTLVPAMKNVQKALADLGLANAVKVSTPIAFSAVRDSFPPSGSRFRDDIAQPMQQPDDIPLDYALGNAQHAVLDGSNKYYSLLDAQLDATHYAMEALGFGNVEPFSGRPGAPQGKIG

SEQ ID NO: 71386 - protein, 312 aa, Zea mays
  Coding DNA Sequence Number=SeqID_29607
  Gene Ontology: Mol. function=protein serine/threonine kinase activity; Cellular component=membrane; Biological process=protein amino acid phosphorylation
  Homolog annotation: Hit_ID=Q84SG9; Match level="QueryCoverage=87%, HitCoverage=41%, E-value=3e-68, Identity=49%"; Hit description =Serine/threonine kinase receptor-like protein
  Pfam annotation: Domain name=DUF26; Domain location=193-247; Score =41.3; E_value=3.3e-09; Accession=PF01657.8; Description=Domain of unknown function DUF26
  Pfam annotation: Domain name=DUF26; Domain location=76-130; Score =59.7; E_value=9.6e-15; Accession=PF01657.8; Description=Domain of unknown function DUF26
  Pfam module annotation: Pfam domain module=DUF26::DUF26; Domain location=193-247::76-130
MAHHLMTLAAIVAAVVLLLPCATGYPWAFCGENNNFKANSSYQSHLSLVAATLPKNASTSPDLFATAVVGTIPRQLWAMGLCRGDVDGTACFNCLTQAFRDLPNHCSYNKDATMYYDPCMLHYSNNQLIPDDDSGDFYTINSTAAVNSDPVGFNRLVAALVNATADYAAHKSTRRFATGETTAGSVSEEFPKLYSLAQCTPDMKAARCRECLAALISQSLDAFQNLTLGRVLWINCTYRYEAAPFFNGPAMVQIAVPSSSVPVPAPAPTLAPAIQPSYGTPAAVAGVGESQSTVHISSYLKVPDSGMLGSKF

SEQ ID NO: 71387 - protein, 121 aa, Zea mays
  Coding DNA Sequence Number=SeqID_29608
MKKTSKGGGVEIQTAEADRLLASLFGNPIGVSGAPQPKERELLNAEGVQGIVEGGIETGSTTSLFLSNKSQTKLKSPRRTQGLRRRGSMLMILSKKTCGSRDWIGVHVGVYYPCLAIHSHH

SEQ ID NO: 71388 - protein, 121 aa, Zea mays
  Coding DNA Sequence Number=SeqID_29609
MTHLLASLTGVAHRAVAASLHPVRMADVADSVGIGSQPLPRDPRESWTSWIKAGAVTVGQSNGGQLQPRRESEARWNTAPRYALHPVVVQFASGDEQATVDSEVQQVEVAEQELIEGKWCP

SEQ ID NO: 71389 - protein, 182 aa, Zea mays
  Coding DNA Sequence Number=SeqID_29610
MANPQHHLWLSIVIWFGSLEFMSLGFGYDMVLFPPRHPTDVDYRFSQPGGAKPLLVHWPMEEHLDFRLYPPRHRRRRRNKHNRATGSALRPTNALRPADDVDSLARDLSCVSFTPGASTSTHVAPTSTPLTLPFRSGSVGSTDSPSHGSGDAGFASTPTYRLGGASSTYFPSYGSRGADSTI

SEQ ID NO: 71390 - protein, 84 aa, Zea mays
  Coding DNA Sequence Number=SeqID_29611
MVMTTRGWMSGWAWPGSDLSHPRLAVGLDVLVLELEASMPPLDSRASAELGPILIAEEEEVAVDKGPEEPGAEKARHALVWPKA

SEQ ID NO: 71391 - protein, 107 aa, Zea mays
  Coding DNA Sequence Number=SeqID_29612
MEQSILKAALVWRTGLSGVPPDSVRCTREDPLELASFGNLGSRSAIIHRTVRGQSSARRRTGQSTGPVRCTTGLSDGPLVRAPTVGTQWPGDMASAPDSVQWRTGLS

SEQ ID NO: 71392 - protein, 175 aa, Zea mays
  Coding DNA Sequence Number=SeqID_29613
  Gene Ontology: Mol. function=phosphatidylcholine-sterol O -acyltransferase activity; Cellular component=endoplasmic reticulum; Biological process=lipid metabolic process
  Homolog annotation: Hit_ID=Q67U60; Match level="QueryCoverage=86%, HitCoverage=22%, E-value=1e-73, Identity=85%"; Hit description =Putative lecithin diacylglycerol cholesterol acyltransferase
LPNAPDMEIFSMYGVGIPTERAYVYKLAPQAECYIPFRIDTSAEGGEENSCLKGGVYLADGDETVPVLSAGYMCAKGWRGKTRFNPAGSKTYVREYSHSPPSTLLEGRGTQSGAHVDIMGNFALIEDVIRIAAGATGEEIGGDQVYSDIFKWTPMRYDVVPLFSALYIKLYRWSV

SEQ ID NO: 71393 - protein, 148 aa, Zea mays
  Coding DNA Sequence Number=SeqID_29614
MAKAEKTNEASDDDKNDAHSTSAALLLSLTWRAPIVSLVSTLHQPNAHHTRLLRPALDVSLFDWATSRVNSSLVPFSYTWDPSSQPLSPRATLLLSAEDPCLAGGPRRSDPSSSRHQPRGLGKRHAGTSPRISEAQPNPSRAAKSPSP

SEQ ID NO: 71394 - protein, 132 aa, Zea mays
  Coding DNA Sequence Number=SeqID_29615
MAAEESLPTRWGYPAADFSHRCQSTVEVTQPSDCGDAANWRRSGRSLARTPRQTQTRVQAELPDPTARARRRWNRGSTHGRARDGDRPEVFSGRGEATLAAHAKSRRRGERVCGRVIYTGESRSVKQRFQTN

SEQ ID NO: 71395 - protein, 331 aa, Zea mays
  Coding DNA Sequence Number=SeqID_29616
  Homolog annotation: Hit_ID=Q6QP51; Match level="QueryCoverage=29%, HitCoverage=48%, E-value=1e-11, Identity=51%"; Hit description =Putative growth-regulating factor 1
MSWSSEERLSPVEAHMSGLSGRARRRPSSGVEVESEPWGRARRIPSSGVEVESEPWGRARRIPSSEAEAGVEPWGRARWSFLWRLRLDLAAVSLTLVGGTAVGAGQAALFSCQTILALNAPVIRSVGKAIWPRLLLREACRSWASGESGVRPLLEETLGRDMNPPGPLQLYANGGYQPSLGVLGGEFASQRRPQQQRTADHATSSSGIERGSDSIRIDMDGGEHEAEESSSKRRERLLALRSAANVSPAGAPPPTAAGSLLPDPDLPDDEAASVCPPPPQRFDYYTNPAAAFTSSSGGATNPTWSHKRKSPPACYAPPPPAYGPYYPTSTY

SEQ ID NO: 71396 - protein, 410 aa, Zea mays
  Coding DNA Sequence Number=SeqID_29617
  Homolog annotation: Hit_ID=Q10L55; Match level="QueryCoverage=54%, HitCoverage=69%, E-value=3e-53, Identity=47%"; Hit description =Rhomboid protein, putative, expressed
  Pfam annotation: Domain name=DUF1751; Domain location=224-322; Score =167.0; E_value=4.9e-47; Accession=PF08551.1; Description=Eukaryotic integral membrane protein
  Pfam annotation: Domain name=Rhomboid; Domain location=225-382; Score= -32.8; E_value=0.047; Accession=PF01694.12; Description=Rhomboid family
  Pfam module annotation: Pfam domain module=DUF1751::Rhomboid; Domain location=224-322::225-382
MAVRISVPVVPLEGNGGAAAADGHAPPTPSQDASTQRRKGEEKGREALGGRGSLAATVGSSRVDRRGSGVWRVTQQPPPPLPFCLIATSPRLHQTRQQGRSRSASARGGSGGGDDGEPAAAGPDGHGSGPRICGASRSSAGRRKRRFLAPFLALPLFLACLLCHSSPGIQFSSLLGHRIRIMSFLQTPGKEFTRTCKGLVVVLIGGYVLLQLLPSSLNYLAIIPSKTIPYVWTVFTAGYIEQVLPGAIGSSLGLLFCGKDIEPAWGRKEFLKFIILINSICGILAFCFAIGLYYVTGKESFLVTPLSGFHGCLAGFLVALKQLLPNLELPMCFFWKIKAKWMPFFVVCFSSIMAFIVPDSINFLPTLVSGMYVSWLYLRYFQRNPLTGLKGDPSDDFSFPSLFPAAMRYF

SEQ ID NO: 71397 - protein, 84 aa, Zea mays
  Coding DNA Sequence Number=SeqID_29618
MDPTNQSSSGAGRHRSVAAAKGHGQQHVPALGVLTICTGNGKDVLLDGRVNSLEIRSLLIIKKAKGRILNKHLVSYDVDGVILK

SEQ ID NO: 71398 - protein, 171 aa, Zea mays
  Coding DNA Sequence Number=SeqID_29619
  Pfam annotation: Domain name=DVL; Domain location=147-165; Score =41.0; E_value=4e-09; Accession=PF08137.3; Description=DVL family
MAAGLAAATTEMTKLCAQLAVEGSAVTGVYKPRPRASDHIYCPVGPSVPVPLLLSSLNSTMEESCDKRSEKQVVAAAKKKKLAKSGHGRRWSSSTDLQDIETATRTAAVDGGMKQQRQQAAREGQGEAVEQRRRCGGAGARLSRKIKEHRARFYIVRRCVAMLVCWRDADD

SEQ ID NO: 71399 - protein, 161 aa, Zea mays
  Coding DNA Sequence Number=SeqID_29620
  Subcellular localization annotation: CTP_CleavageSite=51; ConfidenceScore=5.17e-01
MARQREGSCFASAAVEFSGLKLNAASGLNVLAAASASKVLFSRRPDLSAPMAMPSSRSPAPPPTASSSYWCYMCDRFVRAAASSSSSPTSPSSSSPACPSCGGGLPRGDGARRRPAPAGPVVPPRRGADSAPRPSTPSPFSAAPRPARVDAECSLLSRRRL

SEQ ID NO: 71400 - protein, 74 aa, Zea mays
  Coding DNA Sequence Number=SeqID_29621
MSCRTSAPAVARRRVCGGPVLKRGYLFMGSNPTVLPSTDMTDTAIVLPLPDTRIKDATTRWWGWQRLFMLPSPP

SEQ ID NO: 71401 - protein, 71 aa, Zea mays
  Coding DNA Sequence Number=SeqID_29622
MGAGHPWKGEDRRVGVGPWNGAFHRRSAGADAMMAGAAMEGPWNGATESEAGREFWGRGHGTSVDAHTGPL

SEQ ID NO: 71402 - protein, 136 aa, Zea mays
  Coding DNA Sequence Number=SeqID_29623
  Subcellular localization annotation: CTP_CleavageSite=37; ConfidenceScore=5.25e-01
MEPCAGMPFQFRSPGVGATGMMPSQVKHIYGPTNKVTTSPKVGLGATVGTSRLGYPLLLGQGKPSGTTLCHHANDGLPRVLETRALDTCARGLDPPGMASTLMAGHPYLCPMGVRCCHMLANTGGDMTSPEHHPDP

SEQ ID NO: 71403 - protein, 117 aa, Zea mays
  Coding DNA Sequence Number=SeqID_29624
MPQGPLLSADTRTTMQECLSPHGGLMRVWYSSGETPPRRSHEQPQQMENYSGSVPRGRRHTGSERFEWQANSSLSLPSLHAMATGLAQGFTVTYICVRGGESELRGSVAGETKVGMR

SEQ ID NO: 71404 - protein, 105 aa, Zea mays
  Coding DNA Sequence Number=SeqID_29625
  Gene Ontology: Mol. function=actin binding; Cellular component=actin cytoskeleton; Biological process=actin cytoskeleton organization and biogenesis
  Homolog annotation: Hit_ID=O22655; Match level="QueryCoverage=66%, HitCoverage=51%, E-value=4e-20, Identity=74%"; Hit description =Profilin-4
  Pfam annotation: Domain name=Profilin; Domain location=20-105; Score=- 18.3; E_value=0.0063; Accession=PF00235.9; Description=Profilin
MRYRQPRRHLFLPFSPPAPICMDRFRDRIYAVAGQLKPEEVAGIIKDFNEPGTLAPTGLFVGGTKYMVIQGEPGVVIRGKKLKNETTGRQYSKAEVALIFSVMDI

SEQ ID NO: 71405 - protein, 57 aa, Zea mays
  Coding DNA Sequence Number=SeqID_29626
MASGGSLHRRAHFGGYERPIFLCGGDNNTVEPSQCRQADFSDWNLWFFLKIEYVLAS

SEQ ID NO: 71406 - protein, 92 aa, Zea mays
  Coding DNA Sequence Number=SeqID_29627
MGELLTSSEDLGVLKQWQGMQGGLGSTAAGLRLHAKNAGEHGPGEPKGLGANWKMSHVVGEEAKLTEEAGAIENQRRPHNGRWTTANGGRTP

SEQ ID NO: 71407 - protein, 130 aa, Zea mays
  Coding DNA Sequence Number=SeqID_29628
  Subcellular localization annotation: CTP_CleavageSite=22; ConfidenceScore=5.43e-01
MGTIGTNMHTGSTSPTVDASTSAPILGKLSRRRGPTSKEYINEREIGLKTISTLVLVTSTTFVRLRAEKVDLETKIEYLLTMDTEDAWENWRPSRRVDGMHDRVATLELEFSIAKTYDEKLEAEMWAGVD

SEQ ID NO: 71408 - protein, 414 aa, Zea mays
  Coding DNA Sequence Number=SeqID_29629
  Gene Ontology: Mol. function=protein binding; Cellular component =cellulose and pectin-containing cell wall; Biological process =protein amino acid phosphorylation
  Homolog annotation: Hit_ID=Q1S176; Match level="QueryCoverage=82%, HitCoverage=78%, E-value=1e-100, Identity=53%"; Hit description =Leucine-rich repeat
  Pfam annotation: Domain name=LRRNT_2; Domain location=33-72; Score =31.9; E_value=2.3e-06; Accession=PF08263.3; Description=Leucine rich repeat N-terminal domain
  Pfam annotation: Domain name=LRR_1; Domain location=110-132; Score =10.0; E_value=3.8; Accession=PF00560.23; Description=Leucine Rich Repeat
  Pfam annotation: Domain name=LRR_1; Domain location=134-154; Score =12.5; E_value=1.3; Accession=PF00560.23; Description=Leucine Rich Repeat
  Pfam annotation: Domain name=LRR_1; Domain location=158-178; Score =9.5; E_value=4.7; Accession=PF00560.23; Description=Leucine Rich Repeat
  Pfam annotation: Domain name=LRR_1; Domain location=181-203; Score =5.9; E_value=23; Accession=PF00560.23; Description=Leucine Rich Repeat
  Pfam annotation: Domain name=LRR_1; Domain location=237-259; Score =3.9; E_value=53; Accession=PF00560.23; Description=Leucine Rich Repeat
  Pfam annotation: Domain name=LRR_1; Domain location=261-283; Score =14.2; E_value=0.49; Accession=PF00560.23; Description=Leucine Rich Repeat
  Pfam annotation: Domain name=LRR_1; Domain location=285-307; Score =16.0; E_value=0.14; Accession=PF00560.23; Description=Leucine Rich Repeat
  Pfam annotation: Domain name=LRR_1; Domain location=309-327; Score =2.8; E_value=86; Accession=PF00560.23; Description=Leucine Rich Repeat
  Pfam module annotation: Pfam domain module=LRRNT_2::LRR_1::LRR_1::LRR_ 1::LRR_1::LRR_1::LRR_1::LRR_1::LRR_1; Domain location=33-72::110 -132::134-154::158-178::181-203::237-259::261-283::285-307::309-3
LGQGPAIAAWINGSPPPSPDAAAAAAAAASGPRSQEYAALQALKVAVTDDPKGALASWQGANVCAYKGVYCSAPPDGAAAAGASTVVAGIDLNRANLRGTLPDAVSLLAHLTFLHLNSNRLGGAVPDTLRDLQYLTELDLSNNLFSGPFPASTLLIPSLVYLDLRFNAFSGEVPPEVFAKELDAVFLNDNQFEGQIPDTLWASPATGHHAGPTTTSPGAVPAAYEFGAGAGAGAGGRVREVLFLNNNLTGCVPEALGFLPSMQVLDLSYNALSGHLPGTLSCLSGIEVLNLAHNQLTGELPDLLCDLRRITNLSVSFNFFSGISQRCDRQLGSRGVFDFVGNCVPGRDMQRPQPECDEFPGEGGLSCLRIPGARPAGCGDAGVTIGVGVGVGIGGLPFGLPGAAAGGVVTVTVP

SEQ ID NO: 71409 - protein, 187 aa, Zea mays
  Coding DNA Sequence Number=SeqID_29630
  Gene Ontology: Mol. function=acid phosphatase activity; Cellular component=intracellular; Biological process=translation
  Homolog annotation: Hit_ID=Q9M4D6; Match level="QueryCoverage=98%, HitCoverage=66%, E-value=2e-60, Identity=59%"; Hit description =Putative acid phosphatase
  Pfam annotation: Domain name=Acid_phosphat_B; Domain location=17-187; Score=129.9; E_value=6.9e-36; Accession=PF03767.5; Description=HAD superfamily, subfamily IIIB (Acid
MRASEIDDGMPLIHMLRPLLHSGGDLGRRGRVPCDSWRFAVETNTLRDWDTVPARCEKYVGNYMLGGHYRSDSRAVANEAIAYAEGLNLTGQGKEVWVFDVDETTLSNLPYYAKHGFGVEPYNWSTFGAYVKEANAPVLPETQRLYKRLQALGIKPVILTGRREDKREATANNLAAAGYTGYLKLLL

SEQ ID NO: 71410 - protein, 129 aa, Zea mays
  Coding DNA Sequence Number=SeqID_29631
  Subcellular localization annotation: CTP_CleavageSite=65; ConfidenceScore=5.70e-01
MALHGCTQVEAAPRSPVAAPKSMPQPRASPGGTRPGPGLRPQRANSKPCRRRSSRRLRVCTDSCRGGYYTSALNLEGASIRELKLKYQKLKYRNKPNNCNADDHVNAERSPLRKAEEKKVLARKHEDCE

SEQ ID NO: 71411 - protein, 77 aa, Zea mays
  Coding DNA Sequence Number=SeqID_29632
MVRCGKGPCGRGGWPENHVTAVKHRRRPSPVNRTKIERKQGQRKRGGASDPYLGWSSGEVELGTLAGFGRGRNNNTG

SEQ ID NO: 71412 - protein, 161 aa, Zea mays
  Coding DNA Sequence Number=SeqID_29633
MGKNNKRKREPTLPSEDFGDSEYSEEEFSSESEGSPAPVSPPASSDDSDDSQGIAAEVWTYIRAVERPELEGSDESEYSSDEEDSDGGGEDEDDDDDDGGDGDGDGSGSGRSSGGGGKDGDSGGSSRGSNQGGSSRGSNRGGSSKGSTRGGGGGNSNRASG

SEQ ID NO: 71413 - protein, 175 aa, Zea mays
  Coding DNA Sequence Number=SeqID_29634
MRVDSDASPSCHGSLANRCRPRTPFPNCAAVISTQRAVLYFAAVEDEDPDIWGPLAVSRANFSPLLPSVPLTGGPFASARIHGSAPVPTSHHRPAGSALPWPYPSRTSAPRVPAAFPLPLSESPTRGPRPLERARAHNEQPVVPECVAEDLPEQPPGEDVGNMEDFEEFQDYDEF

SEQ ID NO: 71414 - protein, 169 aa, Zea mays
  Coding DNA Sequence Number=SeqID_29635
  Subcellular localization annotation: CTP_CleavageSite=52; ConfidenceScore=5.45e-01
MERGAVVLPLQGAGVGRVLLPVQVRVRSFLRSRRATERRRRLASSAAPARCSKMYVPGFGEGSPERKAAINLQHFFNYIAVSIVLAQLECMKLLRHVWFRLLETNSLEDSGGILTLSDELMRLQVRSAYVKNEFEWDNLKELSFKMVDEANTKLMRDYVVEVSHIEDEN

SEQ ID NO: 71415 - protein, 119 aa, Zea mays
  Coding DNA Sequence Number=SeqID_29636
MGLGAGRACAKQYPGIWTTARDRDQTVEINAGGGVYGCGPRRSYSSAVKSLELGRVWATGAPRSLELARTDEKDPANSLVESRPRDQGQRRENGGGEALGGLGLLRRGIPATGRGNRVH

SEQ ID NO: 71416 - protein, 49 aa, Zea mays
  Coding DNA Sequence Number=SeqID_29637
MDKIKRIEVPKAKVAKRFLQEAQDPRSSGVMVTKMRRSIKVITWKDPKN

SEQ ID NO: 71417 - protein, 109 aa, Zea mays
  Coding DNA Sequence Number=SeqID_29638
  Homolog annotation: Hit_ID=O23998; Match level="QueryCoverage=87%, HitCoverage=7%, E-value=3e-27, Identity=63%"; Hit description=P -glycoprotein homologue
MSAPAGSGGGGERAMNIRGIFRFADRVDVLLMALGTLGAIGDGCSTNLLLIFASDVMNALGYGGAQAGGGAKSAQFMHEVEKSCLNFVYLGLVVLAVAFMGTVPSAHHT

SEQ ID NO: 71418 - protein, 76 aa, Zea mays
  Coding DNA Sequence Number=SeqID_29639
  Gene Ontology: Mol. function=ATPase activity, coupled to transmembrane movement of substances; Cellular component=integral to membrane; Biological process=transport
  Homolog annotation: Hit_ID=O23998; Match level="QueryCoverage=97%, HitCoverage=56%, E-value=7e-30, Identity=69%"; Hit description=P -glycoprotein homologue
MDTILIVESMSEQVVQEALDRIMSGRTTIVVAHRLNTIKNVDSIAFLGEGKVVERGSYPQLMNKKGAFYNLATLQK

SEQ ID NO: 71419 - protein, 77 aa, Zea mays
  Coding DNA Sequence Number=SeqID_29640
MGDNTLMEIVMVQYLQKIAGALNLAADDPASRSSLALRFVPSGARITSRGERPLAIDEDGALWSLCHRAHLRRDVAA

SEQ ID NO: 71420 - protein, 179 aa, Zea mays
  Coding DNA Sequence Number=SeqID_29641
  Gene Ontology: Mol. function=RNA binding
MDEAATAALAAARGRWTQWEEVVVSNDRGSRLVHYYLRGNSEEKQLAVVGRERSPRHMSYAVQGRFLRALAAAAGAVAVAPSPSRSPLPAAGADGGAPRRWRSRREVVDWLSSLVSGKISVPGSSGPGLCFLELDVDLDDSELGAFGPVLARFGAIFCFQIAPVLVRLKAVHVLLRFSA

SEQ ID NO: 71421 - protein, 74 aa, Zea mays
  Coding DNA Sequence Number=SeqID_29642
FLVKRRILLGLVSPECRVAHLRLLLVGLGSPLEPCRTPQVLLFSEVPLVWFCSSQAEATSSWICSSADQIGSVK

SEQ ID NO: 71422 - protein, 120 aa, Zea mays
  Coding DNA Sequence Number=SeqID_29643
MDYCYPSYATRDAENMADRFGNCGWSIKPPREERAYNHQGTVLPTYTDARETRGKGGRVKPCLVSRRSVGDAEYATQFAGPDKKGGSYTAREIRWSLNLAGRRFLELRRVGGRIDFTQGI

SEQ ID NO: 71423 - protein, 184 aa, Zea mays
  Coding DNA Sequence Number=SeqID_29644
MTREGGVEARGGALSTCSAPSALMDYCYPSYVTRDAENMADRFGNCGWSIKPPREERAYNHQGTTLSTYMDARETKGKGGGVKPYLVSRRSVGDTEYVAQFAGLDKKGGSCAAREIRWSLDLAGRRFRELRRVGGRIGLQSTNCAVCCERPAERRSTWQWGPIAQRAGQRPHQGKLSGPRGGSI

SEQ ID NO: 71424 - protein, 139 aa, Zea mays
  Coding DNA Sequence Number=SeqID_29645
MGEREMEESDGFGRRTCAGGAARLACRALGAVDVGALGRAVGWHGRASSLAAVRASLGWSGHGAWSRQLRGLGALLARCSGAGHDVLALGSWRRGLGKGRRRDGRGRERMGGGRVAAAAAGCQGRAHGWLTWVLLGLKG

SEQ ID NO: 71425 - protein, 494 aa, Zea mays
  Coding DNA Sequence Number=SeqID_29646
  Homolog annotation: Hit_ID=Q2R244; Match level="QueryCoverage=81%, HitCoverage=98%, E-value=1e-133, Identity=58%"; Hit description=F -box domain containing protein, expressed
  Pfam annotation: Domain name=DUF295; Domain location=401-458; Score =63.8; E_value=5.6e-16; Accession=PF03478.8; Description=Protein of unknown function (DUF295)
  Pfam annotation: Domain name=F-box; Domain location=83-129; Score =22.1; E_value=0.002; Accession=PF00646.23; Description=F-box domain
  Pfam module annotation: Pfam domain module=DUF295::F-box; Domain location=401-458::83-129
  Subcellular localization annotation: CTP_CleavageSite=79; ConfidenceScore=5.18e-01
MGSGGASASVGGKMRGVWLSFESGLGREVYKFSSTMFNMKLMEKLRFILSKFNSNLSHPKLMDKSRFEASEFNTLFDPNTMEKTAEDLSFDVLWLIFANLELPDLVRAGSVCSIWRDIYTSLCNSGSYNPQHTPCLLYTSESAGTKAACLYSLAEKKTYTLTLPDPPLCSRYIFGSSYGWIVTADERSELHIVNPITGDQIALPSVTTIDQVKPIFSDIGVVCGYEHSGYSGVWEVSDIPSIFDLSELRDHLFHKVFLSSDPSAGDYFMVLIHNPHCQLSFARAGDDKWTWLPQGDSYDDCLFNGQLLYACTQLGEIHEFDLGTPTITHKIFLGRVKDLYDEKIYMVQASCGQMLQIWRSDDTIEEGDNEDEYDPDFGPDLPWHSTSMIKVYKLEPTSKKLVEISSLGANVLFLGHNLSLCLHAEEHPQLKANHIYFADDEPYTYFKSKRRDIGVFDLERNCSEKIVSPQLWSNWPAPVWLVPNPRRIGLSLCK

SEQ ID NO: 71426 - protein, 188 aa, Zea mays
  Coding DNA Sequence Number=SeqID_29647
MQYNGSSSLISCEKQTIRIEFLSLQVTALVPTITGMGDHVSGRVRGKVCGQLAARVGGGARCATSERGSGSGSDVRQQCKGGALCRGYRNSGVSPRSCAGRRGGASCCCARENEPGKKKGRPAAGRRTRGVLVEVAGQVKDDAGQGRLDLGTSSCWIEQGCTWGGGLPAAVPEGGAKGREGGAMGSSK

SEQ ID NO: 71427 - protein, 158 aa, Zea mays
  Coding DNA Sequence Number=SeqID_29648
MWYCSLSLSPARCTGYRPSSSKRKQGLEISADSVQLEIQGPHRMMRQSTMHLVDLEGDILWGRDIAGEGRRHLGWRVVGRGKRVLRVDGGGEARCGEWRQCPRLKATMAWARGVSRTFLAVAEGSSRRHGARLRALGNGGQGRVHGKSGDGETGAHAN

SEQ ID NO: 71428 - protein, 330 aa, Zea mays
  Coding DNA Sequence Number=SeqID_29649
MAEATWLRQFLLELHPPLQHATVVYYDSVSVVYLSTNPVLRKPSQPPSSQAATFALTSPLAAVDLDRRLLYLDGNFTLRTGCARGGRPRPLLRQVPSWRAHADDPNGASASASYGRAPSEDARMALCTPALPARRRRIPRTPSGRTEIDAGGGCGSKKACIVAEMGERGGVGGQQLDGSRGSLTTRRARRRWMATGRGAETRTCPNMPGTGSATVTTSAQFDTDDEEEFSLDTDDLDARVGGDGEAGTGYHGVASPACRTAAPSIRTCRASGVEGSDSATAYGHRELAEASDSATAYGRGELAGASDSSTAYGRRELAEASDSATPYRRH

SEQ ID NO: 71429 - protein, 68 aa, Zea mays
  Coding DNA Sequence Number=SeqID_29650
MATGSRIVHKAISSRLFNCSNCSAEEGSCVASKISSKKATRDNKTDKGRNMFWINIGLCFKTPSQVAK

SEQ ID NO: 71430 - protein, 125 aa, Zea mays
  Coding DNA Sequence Number=SeqID_29651
  Homolog annotation: Hit_ID=Q5Z9S8; Match level="QueryCoverage=47%, HitCoverage=3%, E-value=2e-18, Identity=75%"; Hit description =Pleiotropic drug resistance protein 12
MCMLLVDPSRLRYADSDVAAANGGVIPGPNRFSLEFDSHSVSTLSCFICAFLNFLHFGINCPRLEGDATTLRMVIGLMYTIVMFVGINNCSNAQPIVSIERMVFYRERAAAGMYSAMPYVVAQAI

SEQ ID NO: 71431 - protein, 128 aa, Zea mays
  Coding DNA Sequence Number=SeqID_29652
MGRWENGTGIQSSKKRWPCGEASEEAIKDSIAGQQGQGWACALDLDSVGRFLRGPIAVWVNDYRIAGMDVSGEALAVIRSRRGAVLTVDLFSDDYNYVRAIPIRGCVCSVRFGRGVCWAVDRRVGCQD

SEQ ID NO: 71432 - protein, 172 aa, Zea mays
  Coding DNA Sequence Number=SeqID_29653
  Subcellular localization annotation: CTP_CleavageSite=53; ConfidenceScore=5.47e-01
MPGWLPHDPHPLVSHALTAARDPRVSASSPPNPLLAATDRAVEPGSLSLPNARASRVSYCLTRTSRWELVAGNRALAGFKGMRPGHWGLRSATVEPHRRRQGPSLLPTSTAFSFPSATAMGRWENGTGIQSSRKRWPCGEASEGARCDPLESSTTIRSCNLETRRLRKDIRS

SEQ ID NO: 71433 - protein, 96 aa, Zea mays
  Coding DNA Sequence Number=SeqID_29654
MVGWVACPAGATFPASRARGVVGTHRFVAADEKRAGVRVLGAPGRYHCSPYSFPYPQLQDPSEDCVKNVSGTFPSLQPTLPTPVSVEPAKVPQKGL

SEQ ID NO: 71434 - protein, 66 aa, Zea mays
  Coding DNA Sequence Number=SeqID_29655
MRLMVLVMTMVLVSGILSVWKGYIGLITWVNAKTWLSNSCQHCNHCSGEDEAVEGDFQEFQDYDEF

SEQ ID NO: 71435 - protein, 40 aa, Zea mays
  Coding DNA Sequence Number=SeqID_29656
MGDGVRLSISYLYQSIGIYAKCWKNKENMHALMRTLWLKP

SEQ ID NO: 71436 - protein, 228 aa, Zea mays
  Coding DNA Sequence Number=SeqID_29657
  Subcellular localization annotation: CTP_CleavageSite=44; ConfidenceScore=5.44e-01
MISSSSNAVAVLELQQSSFGTVAPTMAWSLARTTSVGRRARYLSTAHVPTTGKREQKGLFDTIFGALYREEQMLETNPILNKVGSKSKPPVVIAASAPKKVAEESGSGGLSLGGFFSRPKKGGDANGDIKGFTARSNGLYLKIQVTLAGFQAKQHGFALYIRLFTQDQALKLVICILWNSRQMHILSEYRVSIGEGCVVVHPDGLINWIRCVDQVRFSPLVEIGNTTQ

SEQ ID NO: 71437 - protein, 480 aa, Zea mays
  Coding DNA Sequence Number=SeqID_29658
  Gene Ontology: Mol. function=oxidoreductase activity; Cellular component=integral to membrane; Biological process=electron transport
  Homolog annotation: Hit_ID=Q8LL74; Match level="QueryCoverage=87%, HitCoverage=80%, E-value=0.0, Identity=99%"; Hit description =Cytochrome P450 monooxygenase CYP72A16
  Pfam annotation: Domain name=p450; Domain location=29-476; Score =232.7; E_value=8e-67; Accession=PF00067.12; Description=Cytochrome P450
  Subcellular localization annotation: CTP_CleavageSite=42; ConfidenceScore=5.47e-01
MQRNATSQARGKRDSFPSLSGQAASRKQPITPSLNALTELTSLSMESSTPQQQQHLYGTNSFTWFGPIPRVIIPDPELMREVLSNKFGHFGKPLFSRVGKLLANGLANHEGEKWAKHRRILNPAFHHEKIKRMLPVFATCCADMINRWENSMSSKEPSEMDVWPEFQNLTGDVISRTAFGSNYQEGRNIFQLQGEQAERLIQSFQTIFIPGYWLLPTKNNRRMKEIDREIRKILHGIIRKRERAFIDSEGTNDDLLGLLVESNMRESNGNAKLGMTTEDIIEECKLFYFAGMETTSVLLTWTLILLSMHPEWQEQAREEVLNHFGMGTPDFDNLNRLKIVTMILYEVLRLYPPVVFLSRRTYKEMELGGIKYPSGVSLLLPIIFIHHDPNIWGKDASEFNPQRFEDGISNATKHQAAFFPFGWGPRICIGQNFALLEAKMALSTILQRFSFELSSSYTHAPYTVITLHPQHGAQIRLKKL

SEQ ID NO: 71438 - protein, 139 aa, Zea mays
  Coding DNA Sequence Number=SeqID_29659
  Subcellular localization annotation: CTP_CleavageSite=65; ConfidenceScore=5.07e-01
MDLTAGMPSPTFSRDGRNRAAAPLAGDEFSGRLRPKLHTRSPYPRRRIRQTLWLVAHLPSVARASCSRYAATVRRSTCSDEEFRWPGARFRPGEAAMSIRVRWASSQVDLRGLDVVPWRTDEFPRELGLWGGFTRDDDG

SEQ ID NO: 71439 - protein, 128 aa, Zea mays
  Coding DNA Sequence Number=SeqID_29660
  Subcellular localization annotation: CTP_CleavageSite=54; ConfidenceScore=5.33e-01
MGRVFMTSKIGLAGWANVATRTSRVGQKHMSGSPFVPHVDPPLPNPIEKSTRPRESKLAGTWRPGSNGSTLLPLQQVKLQLSKATMVRDIAGPVPNSVCQQGPNNASAFDCCLSACRDRAKTHRVSGN

SEQ ID NO: 71440 - protein, 386 aa, Zea mays
  Coding DNA Sequence Number=SeqID_29661
  Gene Ontology: Mol. function=catalytic activity; Cellular component =cellular_component; Biological process=biosynthetic process
  Homolog annotation: Hit_ID=Q9SDD7; Match level="QueryCoverage=57%, HitCoverage=76%, E-value=2e-91, Identity=75%"; Hit description =Putative MAWD binding protein
  Pfam annotation: Domain name=PhzC-PhzF; Domain location=149-385; Score=211.4; E_value=2.1e-60; Accession=PF02567.7; Description =Phenazine biosynthesis-like protein
MRWPGDSDAAASREAQSRTRGELKGAGTVAGDLGHRELHDRGILSWERGNHGWSRRGAGRWRPERRAEGRVKLKEPGRSAPSSPQREFGCARVMARRRDGVQTSAPDGVCVGERNGQGRHPVRSGQILLCTPLEERERFFLLSGYLTSSPWSSQVDAFTAEPFKGNPAAVCLLEDAAKAADERWMQSVAAEFNISETAFLLREKSSAAGAVPLFQLRWFTPVAEVELCGHATLASAHFLFTSVLAEHEKLVEFSTKSGILTAKKVPAPQSTGVSGEGKLFIELDFPTIDLVDCHPSELPAIPDTLNGASIVSVHKSTTAGDLIVELSSGKEVADIIPNIHEIEKCSGRGIIVTGPAPAGSGYDFFTRFFCPKFGIDEVMSYSMSLT

SEQ ID NO: 71441 - protein, 333 aa, Zea mays
  Coding DNA Sequence Number=SeqID_29662
  Gene Ontology: Mol. function=RNA binding; Cellular component=cytosol; Biological process=salivary gland cell autophagic cell death
  Homolog annotation: Hit_ID=Q9VAW5; Match level="QueryCoverage=59%, HitCoverage=12%, E-value=6e-41, Identity=43%"; Hit description=La -related protein
MVDALIIKEVPRLILQMLILNQPVVQREAIFALGLKLLKKQDSPFHVGAKIKATEKRTAHYGGVSESPPGNSVGYFYGSTPENHSYKSSKLSSSPHGIPTGSSPVGSVPKSSPQSQHLTFHLLEKNKLQPQRYNKFKHHCLMERKKLGTGQSEQMNSLYRFWSYYLRDNFNEDIYKDFKKLALEDAAASYRYGLECLFRFYSYGLEKKFQPNVYEDFEKLTFEFYRNGDLYGLEKYWAFHHYRNPDIGPVDKLPELERLLREEFQTLEDFKAKEKARATTEKGTGISSSSVVVAASHSKAETKQGVGYVDGIVIFENLIFEYLLEFKMMQRII

SEQ ID NO: 71442 - protein, 45 aa, Zea mays
  Coding DNA Sequence Number=SeqID_29663
MGGCTGGSSREGAEACAGVAEGDEVTSGPSDGTVKISSKLFYSNF

SEQ ID NO: 71443 - protein, 77 aa, Zea mays
  Coding DNA Sequence Number=SeqID_29664
MASIVLLLSELLGGESAASVLAAERYMAGHQSLRPGVVPARRDHRSAVGRRHGTVSSDLNQKGRSSKDTKVDTVPKL

SEQ ID NO: 71444 - protein, 160 aa, Zea mays
  Coding DNA Sequence Number=SeqID_29665
  Subcellular localization annotation: CTP_CleavageSite=90; ConfidenceScore=5.22e-01
MTAPRDRVNLSRLAKPSALRGAVVSPDPLNSGCQRRLFSPNPAAQHPAPTGSAGAAAIHGAPPTVRRLLMASIVLLLSELLGGESASVLAAERYMGGHRSLREFRPAVTEAPPKRAQRLAEGQRAAAGTERAREEGKQRKDDDSFEDLALPRVAVDIMWP

SEQ ID NO: 71445 - protein, 113 aa, Zea mays
  Coding DNA Sequence Number=SeqID_29666
MAGEGETEEAGDLCTVYNANPADVKHELRGQHFALNHEDSVISKVAMRSPEPELGQVVQMNAKGEKQMYPNCTQQTKPSSPAHGKTVISEMKPKKDCITDMYDIHLDVNIARS

SEQ ID NO: 71446 - protein, 151 aa, Zea mays
  Coding DNA Sequence Number=SeqID_29667
  Subcellular localization annotation: CTP_CleavageSite=25; ConfidenceScore=5.37e-01
MAGPWEHKAPSAPPRVTTPPHQLLRVAAVASQVTAVRAAGAPPSSPERRPKGLHAELFTFGKIQRRSAIIHRTVRCPRGEQLWNSPASGIRSAIIHRTCPVYTGLSGEPAEQQLLRANGHLQKLQRRAHQSELQRSEPNGLVTWLAHRTLS

SEQ ID NO: 71447 - protein, 237 aa, Zea mays
  Coding DNA Sequence Number=SeqID_29668
GEPCLPLHEIAARRKPAAAFAGGSEAAFCLASSSAGQDSAPITAASPDAAGGGVVFLHGDALGPTPASPAGSATSTAAAPAAPAFGSSIVNANAQQKHRAAIRDYLSAAFLSRRRRRERETQAQDSEQTSERLISVRPWTRRRPTATSPLPPHVVHCRFVHGSASRAALPCHHQGTNKTPLAPLPRQTLALTVSLFVGNGGGGGEEEAGESRKLFVGKILAGAQEPKLRAHFVVTMS

SEQ ID NO: 71448 - protein, 661 aa, Zea mays
  Coding DNA Sequence Number=SeqID_29669
  Gene Ontology: Mol. function=protein transporter activity; Cellular component=nuclear pore; Biological process=protein import into nucleus, docking
  Homolog annotation: Hit_ID=Q9ZVW8; Match level="QueryCoverage=87%, HitCoverage=70%, E-value=0.0, Identity=68%"; Hit description =Putative transportin
  Pfam annotation: Domain name=HEAT; Domain location=109-144; Score =3.1; E_value=18; Accession=PF02985.12; Description=HEAT repeat
  Pfam annotation: Domain name=HEAT; Domain location=157-193; Score =7.7; E_value=4.9; Accession=PF02985.12; Description=HEAT repeat
  Pfam annotation: Domain name=HEAT; Domain location=198-234; Score =17.0; E_value=0.067; Accession=PF02985.12; Description=HEAT repeat
  Pfam annotation: Domain name=HEAT; Domain location=239-275; Score =7.7; E_value=4.9; Accession=PF02985.12; Description=HEAT repeat
  Pfam annotation: Domain name=HEAT; Domain location=367-406; Score =25.1; E_value=0.00025; Accession=PF02985.12; Description=HEAT repeat
  Pfam annotation: Domain name=HEAT; Domain location=411-447; Score =23.7; E_value=0.00067; Accession=PF02985.12; Description=HEAT repeat
  Pfam annotation: Domain name=HEAT; Domain location=457-493; Score =8.4; E_value=4; Accession=PF02985.12; Description=HEAT repeat
  Pfam annotation: Domain name=IBN_N; Domain location=22-86; Score=6.5; E_value=0.017; Accession=PF03810.9; Description=Importin-beta N -terminal domain
  Pfam module annotation: Pfam domain module=HEAT::HEAT::HEAT::HEAT::HEA T::HEAT::HEAT::IBN_N; Domain location=109-144::157-193::198-234::239 -275::367-406::411-447::457-493::22-86
MLVVHKLSNLLWSKILFRYYYACRSSYFFFGISDVELLFCLYQGKSIEVRQAAGLLLKNNLRTTYISMQSSSQHYVKSELLPCIGATNRAIRSTVGTVISVLFQIVRVAGWIELFQALHKCLESNDLDHMEGAMDAIYKICEDVPEELDVDVPGLSERPINVFMPRILQFFQSPHASLRKLSLGIINQYIVVMPSALYMSMDQYIQGLFNLAKDSSADVRKLVCSAWVQLIEVRPSILEPHLKNVTELILQANKDSDDEVALEACEFWSAYCDVSMPPEGLQEFLPHLIPTLLSNMVYADGDESLDDAEEDESFPDRDQDLKPRFHDSRLHGSETGDDDDDADAVNVWNLRKCSAAGLDVLSNVFGDSILPTLMPLIEQNLARTDDDSWKERETAVLCLGAIAEGCISGLYPHLPQIVAFLIPLLDDKFPLIRSITCWTLSRYSKFIVQSLDHPNGRGQFDKILMGVLRRILDTNKRVQEAACSAFAILEEEASEELVPHLEVILQHLMCAYRKYQRRNLRILYDALGTLADAVGAELNQAKYLDIFMPPLITKWQQLSNYDKDLFPLLECFTSIAQALGPGFAQFAEPVFQRCINLIHSQQLSKIDPTAAGAVYDREFIVCSLDLLSGLAEGLGAGIESLKLSVLLHGAVPWVPSRLSSW

SEQ ID NO: 71449 - protein, 53 aa, Zea mays
  Coding DNA Sequence Number=SeqID_29670
  Subcellular localization annotation: CTP_CleavageSite=30; ConfidenceScore=5.13e-01
MAAIAAGHRNWSGLCLNRRSNGSDGPVTLRPSKVSNKSLNFTESNPRSIVTIH

SEQ ID NO: 71450 - protein, 142 aa, Zea mays
  Coding DNA Sequence Number=SeqID_29671
MAEKRHLKMHAVDLKRRLNNRVDAIRQKAVEASSTFLEVTDVGPPPGSVMLEVAGGVLRQSTVVFKVVTVIRHPGTGEAATGYRPLCSIPGEEGPWKLPTCTGVSKTQPVGHKLHGVRGSSQQPPPGVAYPSSQKRDGAQTV

SEQ ID NO: 71451 - protein, 160 aa, Zea mays
  Coding DNA Sequence Number=SeqID_29672
  Gene Ontology: Mol. function=structural constituent of ribosome; Cellular component=ribonucleoprotein complex; Biological process =translation
  Homolog annotation: Hit_ID=Q9TJN6; Match level="QueryCoverage=69%, HitCoverage=84%, E-value=1e-44, Identity=82%"; Hit description=30S ribosomal protein S17, chloroplast precursor
  Pfam annotation: Domain name=Ribosomal_S17; Domain location=67-134; Score=105.8; E_value=1.3e-28; Accession=PF00366.10; Description =Ribosomal protein S17
MEGDGGERGEDGVGGLVPPRSTENRERARMLLLSSPFVSVSPPPPPLISHGARPALRIEAVRQLTRRVVTTKADKTIGVEVVHLAPHPKYKRRERIKKKYQAHDPDNQFKVGDVVELQPSCPISKTKHFLAIPLPPRDTRRKSQLLPPLQSDDSQESSLR

SEQ ID NO: 71452 - protein, 164 aa, Zea mays
  Coding DNA Sequence Number=SeqID_29673
MAAGRGHAEDMLGFKEDDAMRFIFGEDIMGMEDHGAFDRSLMELQVFKEVFCGAAHNVAATTHLPTEMDLGFVHTSAAAAHLKATETSPSPFVSHAQQQQPAAAATADPQLTMDRSQPNYGPRHDLHPQIWMCTRKILELGCAMLPGWAAAAALARLMTPCLPS

SEQ ID NO: 71453 - protein, 61 aa, Zea mays
  Coding DNA Sequence Number=SeqID_29674
MGKMIVQKVGIRKASWKDLYIRKVQDKHQGKDRGMTRVKVITDKHTTKDVFRQDLQGVKEG

SEQ ID NO: 71454 - protein, 76 aa, Zea mays
  Coding DNA Sequence Number=SeqID_29675
  Homolog annotation: Hit_ID=Q9ZVW8; Match level="QueryCoverage=79%, HitCoverage=7%, E-value=9e-15, Identity=60%"; Hit description =Putative transportin
MAASALWQPQEQGLREICAHLEAHISPNSDQARIWQQLQQYSQFPDFNNYLLFILARGEARGGNSSLYKSKISSPS

SEQ ID NO: 71455 - protein, 269 aa, Zea mays
  Coding DNA Sequence Number=SeqID_29676
  Gene Ontology: Mol. function=N-acetyltransferase activity; Biological process=metabolic process
  Homolog annotation: Hit_ID=UPI00001633D7; Match level="QueryCoverage =79%, HitCoverage=17%, E-value=1e-62, Identity=55%"; Hit description =DNA binding / N-acetyltransferase/ protein binding / zinc ion binding
MTLALNKRSYLLRIKYLRHGFVGNTVKSHVGTDNILDSDLSWSILRCNNDGQKLHSVQKIACLAECNMKLAVALTLLEECFIRMVDPRTGVDMIPHVLYNKGSNFARVDYQGFYTVILEKGDEILCVASIRVHGTKAAELPFIATSVDFRRQGMCRILMSIIEKMLCSFNVKMLVLSAIPELVSTWVSGFGFKPIEDAERKQLHNVNLMLFPGTSLLTKRLDGFIMATKPGEEKDIHEVSGVPNLKRMPNGKANEHFKLHDLDLSWDRV

SEQ ID NO: 71456 - protein, 183 aa, Zea mays
  Coding DNA Sequence Number=SeqID_29677
MDGTFSKRKDLALKSNQEKKGKAKVQIEEESSSDDDLDANIALMLVLNLPPTIARRGCAHVRAFSGNRAPPPPAFDRCLFCGHRRIRALSHATVSSASLRSPTVVAPSLRLRRCPVTLALPLKRLLVLPRRRDTHGRVHQAALNTPELAPKPLEPRRGQPSCFQRALAAGPSGATAPMPALGR

SEQ ID NO: 71457 - protein, 190 aa, Zea mays
  Coding DNA Sequence Number=SeqID_29678
  Gene Ontology: Mol. function=carboxyl- and carbamoyltransferase activity; Cellular component=ornithine carbamoyltransferase complex; Biological process=amino acid metabolic process
  Homolog annotation: Hit_ID=Q8SA97; Match level="QueryCoverage=74%, HitCoverage=21%, E-value=1e-23, Identity=55%"; Hit description =Ornithine carbamoyltransferase
MAPPVDVAGLRPRLGDVEAPPKPRSSLSSVAEVESEPLGRARRSPSDEARVESEPWGRAKRSSSSSGAEPESEPWVGRSGPESEPWVGRSGVRRLPGLGPSPSPGSGGAEFAVFQDIARVRALGWAEQSSPSSGTWPESEPWVGRSGVSYGRSVEQRSDGGHFGSAGWGARVRIKLYADGGYQLRIRSLE

SEQ ID NO: 71458 - protein, 49 aa, Zea mays
  Coding DNA Sequence Number=SeqID_29679
MARRGRDGVVWHGEGSAAYDSDHPRQSEYRAPSPIDGMMSKRTTPQFLF

SEQ ID NO: 71459 - protein, 69 aa, Zea mays
  Coding DNA Sequence Number=SeqID_29680
MARVACTLRGKRLDDGVSVLSVGVNPHTLESLFFSRVTSNLIVIGVMCRWDGLLITVQSYLMALDCDWC

SEQ ID NO: 71460 - protein, 73 aa, Zea mays
  Coding DNA Sequence Number=SeqID_29681
MEKEPGLRERKARGVFVRFSGEYGCQSNLAVYPATGLDIQVGPYLNRRGACGVMGQASEREMCPWAISKYFGD

SEQ ID NO: 71461 - protein, 114 aa, Zea mays
  Coding DNA Sequence Number=SeqID_29682
MGRATWPRIPTTCASARSLVHSGHGEGEADRGGPQRRQRMGARAMAQRLAERACGIEKEEGSASEAIGADRLAPLGSEHEGEKGVRDRLPLIGGALLSGTAGARARGLAGLSWA

SEQ ID NO: 71462 - protein, 172 aa, Zea mays
  Coding DNA Sequence Number=SeqID_29683
MWYEGECFFVKNVAGSASLFTGWESISTEEWHHGAEVNLKSEVDHLLMMILTSKQRGLTIVRLGIRHLAQCLLSLLEGVTVKAERKRKRDAGEEALATPLEGLQAKKEKRASCPARMESGGASSNVPSLGDGLADDVVAAKGITRGKNPWERWRHGWRLQRWMAPPAVAWKK

SEQ ID NO: 71463 - protein, 86 aa, Zea mays
  Coding DNA Sequence Number=SeqID_29684
  Subcellular localization annotation: CTP_CleavageSite=48; ConfidenceScore=5.72e-01
MRGRQTAASWTWCSFPSFVRAAVVPRTGRPRPGLPRAVSRARGLPSTSCAARVVLVFWGGLGEGGSEDLPVRFGAAAVHGRGVGGF

SEQ ID NO: 71464 - protein, 114 aa, Zea mays
  Coding DNA Sequence Number=SeqID_29685
  Gene Ontology: Mol. function=peptidase activity
  Homolog annotation: Hit_ID=Q84SE0; Match level="QueryCoverage=89%, HitCoverage=27%, E-value=4e-35, Identity=74%"; Hit description =Putative TPA: Cgi67 serine protease
MPSGCSVSSLAARFAFFPPEPATYAVRKDEATGRLVASGVPRDNAMDVLLVDTSRGNKVVAFYFRNPCARLTLLYSHGNAADLGQLYDLFVQLKVNLKINLMGLVVHYASCPSL

SEQ ID NO: 71465 - protein, 335 aa, Zea mays
  Coding DNA Sequence Number=SeqID_29686
  Gene Ontology: Mol. function=nucleotidyltransferase activity; Cellular component=endoplasmic reticulum membrane; Biological process=biosynthetic process
  Homolog annotation: Hit_ID=Q7EYE4; Match level="QueryCoverage=85%, HitCoverage=91%, E-value=1e-137, Identity=84%"; Hit description =Putative CTP:phosphorylcholine cytidylyltransferase
  Pfam annotation: Domain name=CTP_transf_2; Domain location=60-190; Score=143.5; E_value=5.6e-40; Accession=PF01467.16; Description =Cytidylyltransferase
MKAAEDAAGPEATPTAAAQTVWYDPMSSPQAPAPQQQPAIEAAAPTSPSVSSEARPLRVYADGIYDLFHFGHARALEQAKKSFPNTYLLVGCCSDEITHMYKGKTVMTEDERYESLRHCKWVDEVIPDAPWVINQEFIDKHNIDYVAHDALPYADTSGAANDVYEFVKSIGKFKETKRTEGISTSDIIMRILKDYNQYIMRNLTRGYSRKDLGVSYVKEKQLRVNMGISKLREKVKEHQEKVIESLCSYFERDLRVVRRTLISIALRTQFHSAAKIAGTNPVEWMENADRWIVGFLEKFEEGCHMMETAIKGRIQEGLKRQGRSESNLSGEDSDS

SEQ ID NO: 71466 - protein, 82 aa, Zea mays
  Coding DNA Sequence Number=SeqID_29687
  Homolog annotation: Hit_ID=Q41901; Match level="QueryCoverage=38%, HitCoverage=29%, E-value=6e-10, Identity=81%"; Hit description=NADH ubiquinone oxidoreductase subunit
MVNLNITEATVFAHVGCLQIKADILDWVAKPRAGPEGMQGMRPLRAPKISRAPVCPNYVQIHICYRKFALMYLNLVYCDFKV

SEQ ID NO: 71467 - protein, 129 aa, Zea mays
  Coding DNA Sequence Number=SeqID_29688
  Gene Ontology: Mol. function=DNA binding
MVHNVEHHDFIPEDFPMEEEAASSTPWASSRPAPGATAVRSTRQHTPAQASRTSRAAPGALSMARELLHHPPSSMASPGAMKQWRDDVDRLLSMGCPDEGLTGGAQPPAYGRGRPTSLEGPDDLRAELN

SEQ ID NO: 71468 - protein, 140 aa, Zea mays
  Coding DNA Sequence Number=SeqID_29689
MARSYFCKPKPDLGELIARLRCPFLPVVYVPSGRVLPLPRSTPPRACLLPPAISGTGFFVAALSWPLPRRPIPTHPLCQLAAPADSRAPRSVSRLDWPWPRSTAKGGVLVRDRRGEWGRREGGSSGSRGSRKGFYCVGIW

SEQ ID NO: 71469 - protein, 191 aa, Zea mays
  Coding DNA Sequence Number=SeqID_29690
  Homolog annotation: Hit_ID=Q3DVE9; Match level="QueryCoverage=71%, HitCoverage=39%, E-value=2e-07, Identity=40%"; Hit description =Putative Ig
  Subcellular localization annotation: CTP_CleavageSite=38; ConfidenceScore=5.70e-01
MGAIQFKAPPTQGTQSRLARAQPRAGTVDPGRFTPRPRASSSNGRTFDSPEAQFGARTQPRPRTTVSASPDPRARTQPRPQTTVSASPDPRARTQPRPRTTVSASPDPGLGLNLDLGRWSPPRLTPRLRLNLDLARPQGSDSTSTSDDGLRLARPQGSDSTSTLDDGLRLAQPQGSDSTSTSDDGLRLAQP

SEQ ID NO: 71470 - protein, 126 aa, Zea mays
  Coding DNA Sequence Number=SeqID_29691
MTLRKKLNSNDCNLADGEYVLVPEQGAAQEVAPDPAPEPAPEDMPATALEGKPRLPSSRDLRRGLPFRLWWVQVRSLHDGSRGQWGIVRQGGSLEDMVAGVTWPSTLPPGWTVEWDPASAEEEHEE

SEQ ID NO: 71471 - protein, 115 aa, Zea mays
  Coding DNA Sequence Number=SeqID_29692
MASRDFLGGFGRDGGQAPVGGAGAAPGPGGESDEIELSLGLSLGGCFGAEPSQEGRSADPRLQRSSSVASICSLPAATTGTSCGAQDAGPGPVVSLRRTCSAPPPCPTNQADSSN

SEQ ID NO: 71472 - protein, 362 aa, Zea mays
  Coding DNA Sequence Number=SeqID_29693
  Gene Ontology: Mol. function=glycerophosphodiester phosphodiesterase activity; Cellular component=periplasmic space; Biological process =glycerol metabolic process
  Homolog annotation: Hit_ID=Q6YVY7; Match level="QueryCoverage=98%, HitCoverage=93%, E-value=1e-161, Identity=77%"; Hit description =Putative glycerophosphoryl diester phosphodiesterase
  Pfam annotation: Domain name=GDPD; Domain location=36-349; Score =215.8; E_value=9.8e-62; Accession=PF03009.8; Description =Glycerophosphoryl diester phosphodiesterase family
MAASAGGVAARPLVGGGGAWENRAPLQTSRPFNIAHRGSNGELPEETAAAYARAIDEGADFIEADIEATKDGHLVCFHDTTLDGTTDVADHPEFAGRRRTLEVQWGQRHRILRQYVDTDFTLVELKTLRAKQRWDFRDKSHNGVSPIITFDEFIDVALNAKRVVGIYPEMKNPVFMNKHVQWADGKKYEDKFIATLKKYGYGGKYMSPAWRARPVFVQSFAPTSLVRAAGLTDSPLVFLVDDVTVRTEDTNQPYDEITSGEHLDYMKRYVVGIGPWKDTVVPPTKDNRLATPSDLVAMAHARGLQVHPYTYRNENKFLHFDFRQDPYAEYDYWINDVGIDGLFTDFPASLRRFQEWTAKNKD

SEQ ID NO: 71473 - protein, 409 aa, Zea mays
  Coding DNA Sequence Number=SeqID_29694
  Gene Ontology: Mol. function=protein serine/threonine kinase activity; Cellular component=integral to membrane; Biological process=protein amino acid phosphorylation
  Homolog annotation: Hit_ID=Q6YVY8; Match level="QueryCoverage=99%, HitCoverage=37%, E-value=0.0, Identity=85%"; Hit description =Putative receptor-like protein kinase
  Pfam annotation: Domain name=Pkinase; Domain location=127-398; Score =124.4; E_value=3.2e-34; Accession=PF00069.15; Description=Protein kinase domain
  Pfam annotation: Domain name=Pkinase_Tyr; Domain location=127-398; Score=86.9; E_value=6.1e-23; Accession=PF07714.7; Description =Protein tyrosine kinase
  Pfam module annotation: Pfam domain module=Pkinase::Pkinase_Tyr; Domain location=127-398::127-398
  Subcellular localization annotation: CTP_CleavageSite=70; ConfidenceScore=5.04e-01
PTNGNTVRCDSVIGNPLLQSCHVYTLAVPSAAQQGRGLNSNDSNDTTPSNSQNEGANNSFNAIEIASITSATAIVSILLALIALFIYTRKCAPRMSARSSGRREVTLFQDIGVPITYETVVRATGSFNASNCIGSGGFGATYKAEIAPGVLVAIKRLSVGRFQGAQQFDAEIKTLGRLRHPNLVTLVGYHLGESEMFLIYNYLSGGNLERFIQERSKRPVDWKMLHKIALDVAKALAYLHDTCVPRILHRDVKPSNILLDTNYTAYLSDFGLARLLGNSETHATTGVAGTFGYVAPEYAMTCRVSDKADVYSYGVVLMELISDKKALDPSFSPYGNGFNIVAWACMLLRQGRAREFFIDGLWDVGPHDDLVETLHLAVICTADSLSIRPTMKQVVQRLKQLQPPIREHR

SEQ ID NO: 71474 - protein, 46 aa, Zea mays
  Coding DNA Sequence Number=SeqID_29695
MAPRVRAGEDVARMAALCRARVGRDRLNVGGGGGQRRSDGEGRATT

SEQ ID NO: 71475 - protein, 125 aa, Zea mays
  Coding DNA Sequence Number=SeqID_29696
  Homolog annotation: Hit_ID=Q6QP51; Match level="QueryCoverage=96%, HitCoverage=56%, E-value=1e-08, Identity=44%"; Hit description =Putative growth-regulating factor 1
MCAYMYMNHHPQLRENSAVHSTPTIVPAIREGPTTASHDLPPSSASGATGSSASPDPGLGPQLRSREKVSASPDPDLNLGLGRRSLPRPTLGLGLSLGLGGVAASPDLGLISATLLGIHHYPTLS

SEQ ID NO: 71476 - protein, 255 aa, Zea mays
  Coding DNA Sequence Number=SeqID_29697
  Gene Ontology: Mol. function=protein serine/threonine kinase activity; Cellular component=integral to membrane; Biological process=protein amino acid phosphorylation
  Homolog annotation: Hit_ID=Q6YVY8; Match level="QueryCoverage=99%, HitCoverage=57%, E-value=8e-97, Identity=48%"; Hit description =Putative receptor-like protein kinase
  Pfam annotation: Domain name=LRRNT_2; Domain location=1-34; Score =28.9; E_value=1.8e-05; Accession=PF08263.3; Description=Leucine rich repeat N-terminal domain
  Pfam annotation: Domain name=LRR_1; Domain location=112-134; Score =16.1; E_value=0.13; Accession=PF00560.23; Description=Leucine Rich Repeat
  Pfam annotation: Domain name=LRR_1; Domain location=136-158; Score =5.7; E_value=24; Accession=PF00560.23; Description=Leucine Rich Repeat
  Pfam annotation: Domain name=LRR_1; Domain location=162-184; Score =17.0; E_value=0.067; Accession=PF00560.23; Description=Leucine Rich Repeat
  Pfam annotation: Domain name=LRR_1; Domain location=186-208; Score =10.0; E_value=3.8; Accession=PF00560.23; Description=Leucine Rich Repeat
  Pfam annotation: Domain name=LRR_1; Domain location=210-232; Score =15.9; E_value=0.15; Accession=PF00560.23; Description=Leucine Rich Repeat
  Pfam annotation: Domain name=LRR_1; Domain location=89-108; Score =16.2; E_value=0.12; Accession=PF00560.23; Description=Leucine Rich Repeat
  Pfam module annotation: Pfam domain module=LRRNT_2::LRR_1::LRR_1::LRR_ 1::LRR_1::LRR_1::LRR_1; Domain location=1-34::112-134::136-158::162 -184::186-208::210-232::89-108
  Subcellular localization annotation: CTP_CleavageSite=32; ConfidenceScore=5.11e-01
MKFKAAVTADPGGLLRGWSPASGDHCRWPGVSCGASGEVVALNVTSSPGRALAGALSPAVAALRELRVLALPSHALSGPLPPAIWTLRRLRVLDLSGNRLQGGIPAVLVCVSLQTLDLAYNQLNGSVPAALGALPVLRRLSLACNRFGGAIPDELGGAGCRNLQFLDVSGNMLVGGIPRSLGNCTELQALLLSSNNLDDIIPPEIGRLKNLRALDVSRNSLSGPVPAELGGCIQLSVLVLPILMHPLLVLILLIM

SEQ ID NO: 71477 - protein, 84 aa, Zea mays
  Coding DNA Sequence Number=SeqID_29698
MKFKNMLLGGTKTVIEERTGIERGKGMQARAVLTTVGSTGGANLMPALDGAMIEGAMVELVEHCHAGGSGGYMGSGGHGGSGHD

SEQ ID NO: 71478 - protein, 167 aa, Zea mays
  Coding DNA Sequence Number=SeqID_29699
MANRGSVAASTRDCRGDRESKENVVAGVAETIVQGGGIGSGGESIGSGNIGGGWMLLRYKGPERTMSPTKVIGRVDPLSIVMEEGKLRLGGGVERGTRVSNLVGSRRGKQRKGVREESQVRHPYIATGMELGLEGASMLGGNDKVSIGMKAITALENTSDLVASWHT

SEQ ID NO: 71479 - protein, 40 aa, Zea mays
  Coding DNA Sequence Number=SeqID_29700
MAELDKVFSPAIDRAKRSARAQGLRSCWRHAAREIGNESS

SEQ ID NO: 71480 - protein, 96 aa, Zea mays; identical to SEQ ID NO: 62463
  Coding DNA Sequence Number=SeqID_29701
  Subcellular localization annotation: CTP_CleavageSite=56; ConfidenceScore=5.25e-01

SEQ ID NO: 71481 - protein, 33 aa, Zea mays
  Coding DNA Sequence Number=SeqID_29702
MAESGSADDGTAAGNPVRRRVVSIAYWFVAGGI

SEQ ID NO: 71482 - protein, 43 aa, Zea mays; identical to SEQ ID NO: 49312
  Coding DNA Sequence Number=SeqID_29703

SEQ ID NO: 71483 - protein, 65 aa, Zea mays
  Coding DNA Sequence Number=SeqID_29704
MEEYDMNLDGLLDCEEFAEFIRKHMHELVGIMFQERGNVYRLLKQEGGLRCAVTRGALDFYVYMA

SEQ ID NO: 71484 - protein, 130 aa, Zea mays
  Coding DNA Sequence Number=SeqID_29705
  Gene Ontology: Mol. function=sequence-specific DNA binding; Cellular component=nucleus; Biological process=regulation of transcription, DNA-dependent
  Homolog annotation: Hit_ID=Q84NC2; Match level="QueryCoverage=34%, HitCoverage=25%, E-value=6e-11, Identity=75%"; Hit description=MADS -box transcription factor 31
MAEDLASFSAQDLSNLEQQIEFSLYKVCLRKQELLDQQLLEIRQRNLAAATASGQHQQAGEMVGINPRPFLWWDVGASGSGSQSQQLLHGRDAAESSMTVLGLSPQMHRYRLQPRQPNLWQDTDVHGWLW

SEQ ID NO: 71485 - protein, 121 aa, Zea mays
  Coding DNA Sequence Number=SeqID_29706
MGWGRGQRAGPVAAAPVGVAVGDGSGRGARGQGGCTGWSGLHGWEQACGGDFDLVEETRELERGEKRIRKIAVNLTSPAVPQRKANFLRLLQVAELPMPIAETWEVDFQISFLPPFRIEAD

SEQ ID NO: 71486 - protein, 69 aa, Zea mays
  Coding DNA Sequence Number=SeqID_29707
MEQVLRGSGCDKRRGSGVVGDDGGGGCAAKGAWGGGSVHGGGHACEGHGALAKEKKNFTTQCMQRTGYN

SEQ ID NO: 71487 - protein, 55 aa, Zea mays
  Coding DNA Sequence Number=SeqID_29708
MSSLSKAKIEIHDYNEDHMAWNKGSYMTSVEMCMQYLKSRHKVALVVTIKESLDI

SEQ ID NO: 71488 - protein, 152 aa, Zea mays
  Coding DNA Sequence Number=SeqID_29709
MAGKAAAATAARWAEGYPWKEKLAKYKGELGKGVWGYWELGAWKPLGISARKRARLRKEVLLAGEDWSYDPPRGEMRTKRKGHKCDRISAEKRANTVELMKKMPQMLLDYKDVYIAIQCASFPFLRSANTSWAAVRDSCVEVKPCQFEAVMA

SEQ ID NO: 71489 - protein, 220 aa, Zea mays
  Coding DNA Sequence Number=SeqID_29710
MASTDSAAHGTPAMRAERSAAACGFCLRPSGGEGSGPDEWAQEVRERARERPAKASPTYVALAVQAPFSLANNRYAKRSGMQNFQRCPIRRTRGGLHWPRRDEDAQWSTYSGEPLALHCPKIIVLQLALLNADLAQSYQGNSYRGLVRRKFNDHAGGGVLTMMNFDEKFLGPGRRSGPRNPIGTLGVLRRTPDDPITSISTMVSGWRKKNELPKRAHVAE

SEQ ID NO: 71490 - protein, 126 aa, Zea mays
  Coding DNA Sequence Number=SeqID_29711
  Subcellular localization annotation: CTP_CleavageSite=31; ConfidenceScore=5.26e-01
MASLSTASLAACGSSSSALLPRNPRRAQLPRATDSVEIGGAVLTGTAPRYIYTEALYSSGPLDVATSDPVPWPSVCNRMALGVGYPFAIAFCIKVPGEVEYQPAVQLVGQLCLRINCTRAPALSGI

SEQ ID NO: 71491 - protein, 121 aa, Zea mays
  Coding DNA Sequence Number=SeqID_29712
MGLCSLICPHLLPEPSPLLLLASPDAESGPQVQTSASPDAEFGHRRNLRLARRLVQPQVIRRPCPSTASATCSTVNPASGHSADCGTCQGMAQPMPREGFPPRPSRALTSINAIGNHDVTP

SEQ ID NO: 71492 - protein, 110 aa, Zea mays
  Coding DNA Sequence Number=SeqID_29713
  Gene Ontology: Mol. function=DNA binding; Biological process=DNA integration
  Homolog annotation: Hit_ID=O24587; Match level="QueryCoverage=99%, HitCoverage=20%, E-value=2e-29, Identity=91%"; Hit description=Pol
LCIRGLKLDYRQRMHKPYDGEKKMFTSYVKNKDSQDAIIFGDGNQGKVKGLGKIAITSEHSISNVFLVESLREIGGKHSSQQERDDNIKTTGASSHGPLRTRCLPQHRGK

SEQ ID NO: 71493 - protein, 162 aa, Zea mays
  Coding DNA Sequence Number=SeqID_29714
  Gene Ontology: Mol. function=transporter activity; Cellular component= integral to membrane; Biological process=transport
  Homolog annotation: Hit_ID=Q7F1T0; Match level="QueryCoverage=88%, HitCoverage=36%, E-value=2e-57, Identity=79%"; Hit description =Putative glucose-6-phosphate/phosphate-translocator
  Pfam annotation: Domain name=DUF6; Domain location=8-144; Score=17.5; E_value=0.0066; Accession=PF00892.11; Description=Integral membrane protein DUF6
  Pfam annotation: Domain name=TPT; Domain location=1-144; Score=166.6; E_value=6.1e-47; Accession=PF03151.7; Description=Triose-phosphate Transporter family
  Pfam module annotation: Pfam domain module=DUF6::TPT; Domain location= 8-144::1-144
MGAMISNLAFVVRTIFSKKGMKGKSVSGMNYYACLSIMSLVILLPFAVAMEGPKVWAAGWQTAVAEIGPNFVWWVAAQSVFYHLYNQVSYMSLDEISPLTFSIGNTMKRISVIVASIIIFQTPVQPINALGAAIAILGTFIYSQEADTPAPDPMNNLNLMVL

SEQ ID NO: 71494 - protein, 109 aa, Zea mays
  Coding DNA Sequence Number=SeqID_29715
  Gene Ontology: Mol. function=protein serine/threonine kinase activity; Biological process=protein amino acid phosphorylation
  Homolog annotation: Hit_ID=Q9FDV7; Match level="QueryCoverage=83%, HitCoverage=17%, E-value=2e-13, Identity=45%"; Hit description =Protein kinase
MAWGGEWGGGEGGNLRPVIQLSCLATLTLLIEQCWSWQSEKRPNFQQIVSILKDLKIVLETDGTLHKVPSSICQALESNDQNKKKAGNWIQRLSYAQPDFSGPPPPKLL

SEQ ID NO: 71495 - protein, 59 aa, Zea mays
  Coding DNA Sequence Number=SeqID_29716
MSGGYWVAGECKQESDVSSTIRFGFHALLSLLTQKIAQRWSESLSLHGLADNGLVVNSS

SEQ ID NO: 71496 - protein, 109 aa, Zea mays
  Coding DNA Sequence Number=SeqID_29717
  Homolog annotation: Hit_ID=Q9AY65; Match level="QueryCoverage=69%, HitCoverage=6%, E-value=8e-08, Identity=40%"; Hit description =Putative reverse transcriptase
MTKVRRSARLANRPAMPALKRAQIILCQRLGLTAEETNHNSVEQALKKYVAMFNTALPEPVTAALTSLLGIDDEHTEQLDEALIGLVGQGIDGINPMEGVPAAGGAVDE

SEQ ID NO: 71497 - protein, 51 aa, Zea mays
  Coding DNA Sequence Number=SeqID_29718
MTSREFQAGKIDYSYNDPNIFNPSAANRLSSNWTVSPRSVAHYEIDQESAT

SEQ ID NO: 71498 - protein, 84 aa, Zea mays
  Coding DNA Sequence Number=SeqID_29719
MKELFALSFVFAAIAKRRQGNHMARSCRRGVAAQDQHGAKHRYGPTYATDDEQLSTPTQSIGPSGRVAGLQGGVNTGPIGAIAQ

SEQ ID NO: 71499 - protein, 80 aa, Zea mays
  Coding DNA Sequence Number=SeqID_29720
MEPGRGSHSAKFPYLAKCKGRRANSARETECIRPTPSECQSWNFIGRLGESYSRFPLLGASNVGHGSRADDLVFGTPNVL

SEQ ID NO: 71500 - protein, 302 aa, Zea mays
  Coding DNA Sequence Number=SeqID_29721
  Gene Ontology: Mol. function=cytochrome-c oxidase activity; Cellular component=membrane; Biological process=electron transport
  Homolog annotation: Hit_ID=Q69SA4; Match level="QueryCoverage=82%, HitCoverage=68%, E-value=1e-105, Identity=81%"; Hit description =Putative MtN21
  Pfam annotation: Domain name=DUF6; Domain location=114-243; Score =48.9; E_value=1.7e-11; Accession=PF00892.11; Description=Integral membrane protein DUF6
  Pfam annotation: Domain name=TPT; Domain location=105-241; Score= -30.9; E_value=0.036; Accession=PF03151.7; Description=Triose -phosphate Transporter family
  Pfam module annotation: Pfam domain module=DUF6::TPT; Domain location= 114-243::105-241
  Subcellular localization annotation: CTP_CleavageSite=14; ConfidenceScore=5.01e-01
MAGTINLYCIGLKYASATSSSAIFNIVPVVAFLLAVMFRMETLKLRSVHGIAKACGILLCVAGVIVLALYQGPQLKSPNHQQLLKQHAGAAAAQVHHSSREWALGIFLMTTSVVIWSLWTVKQGPLLLEYPSKLLNTTLQCAFASVQSLAIALVLERDLSRWKLAGPVSLASVLFTGVVVAAISYYLQIWVIEKRGPVFLSMSMPLSLVFTMAIASFLLGEDVSLGSIIGSVLLVAGLYNVLWGKSREEKQQAAAAVGETTTTTTTTTDGGRDNGDAEKNAAAVQPADGEDDDDDDDAAAKV

SEQ ID NO: 71501 - protein, 74 aa, Zea mays
  Coding DNA Sequence Number=SeqID_29722
MAQRLTLSTCSGGAGGFRRGRSGASGEVALGLGPREASRDSREASRAVGAGDGSLGIIFGLLMFDFECLVEFLS

SEQ ID NO: 71502 - protein, 144 aa, Zea mays
  Coding DNA Sequence Number=SeqID_29723
MASRGNESRASQGDDINVLWTVLRRGFGFGRTTMAERNDVQVLDGSESWAMGHAASTARYWWRHRGPPPFILEGSEAKELEVEEWHQIEAASNRVGKSLGTMERILHNFEEAVSIARTLLTHDIIPHGQGVGDLRHPKVLKNRI

SEQ ID NO: 71503 - protein, 97 aa, Zea mays
  Coding DNA Sequence Number=SeqID_29724
MCEANLRTEDAESTLRVANARLEAANPNLLQEHNAAGEPLRSLSFADLQKKIFVVHDAMKAAQEAKKVANDEVCKLSLTCDCVVTALKGKCALRPFL

SEQ ID NO: 71504 - protein, 68 aa, Zea mays
  Coding DNA Sequence Number=SeqID_29725
MTGRMIGGVNTFRPTDGVDDQIEAWGSFMGLPEVTHTPGFGLGTNRNVGRRRGCQGGVLQSRSTILVW

SEQ ID NO: 71505 - protein, 146 aa, Zea mays
  Coding DNA Sequence Number=SeqID_29726
MAGGKSSKGKRDKKIQGSKRKYSLTPASEDFGDSEFSKEQFSSEGEESPPLVPPCHHPKGAGLEGSDDSEEEDSKEEEEEGDDEADEGGYDGDNEGGDDGKVDSGSGGNKSSGRSGGATTTTRATTAARAVALAAATSVARCHRHK

SEQ ID NO: 71506 - protein, 43 aa, Zea mays
  Coding DNA Sequence Number=SeqID_29727
MAARRAAASGTAPHGGANTGPRGSAKGTAPPRQGSVKGEGTPP

SEQ ID NO: 71507 - protein, 54 aa, Zea mays
  Coding DNA Sequence Number=SeqID_29728
MEKESRRDKGWRRSHVKFWRNARTEMLAIGYCIDAGKGGHDLYEVIVLSEAIVS

SEQ ID NO: 71508 - protein, 93 aa, Zea mays
  Coding DNA Sequence Number=SeqID_29729
  Gene Ontology: Mol. function=3'-5' exonuclease activity; Cellular component=intracellular
  Homolog annotation: Hit_ID=Q2V9B5; Match level="QueryCoverage=66%, HitCoverage=18%, E-value=2e-23, Identity=77%"; Hit description=3'-5' exonuclease domain-containing protein-like
MDQFYLLCFDHLSSLADNIPELPCPPCHIVTKPGQLPVEFLEPSAAQKLVIGFDCEGVDLCRNGALCIMQLAFPDAVYLVDAIEGGKKTYSSL

SEQ ID NO: 71509 - protein, 186 aa, Zea mays
  Coding DNA Sequence Number=SeqID_29730
MQRPGHRRRALAARAQHYEREWGTSSETEYRAAGSQRPDPPLFTPRAEQHWESRATRRMKRGREGEAEASAAPEGASVSLVAAESRGSDWWGGRQEASAPATEKNKDKKRHEDEGCAAAPRRCCGDGYCRVPRLSAGLGPGHALRELHRQAAAQSVMVISAGELGRDGDCDALRLLDSLDDLSSPS

SEQ ID NO: 71510 - protein, 48 aa, Zea mays
  Coding DNA Sequence Number=SeqID_29731
MGLADRPGQVVGPFAIYPVGSEPRGSATADPGRRRAIAATEESPEPAL

SEQ ID NO: 71511 - protein, 153 aa, Zea mays
  Coding DNA Sequence Number=SeqID_29732
MAGARSGGGGGRGTLGRMARSAVARWQGGDRSDVRTAETDRGAMRARNVCVASVDLFSQNSAVATAAREDGIQCVTLLTYLAAAQIYRTNRSRHYRVMVLDNAHHSTPAGVSCSAADGVRDLDLAKASVDTGWFWPLSLCLSTLFNWLDRVFV

SEQ ID NO: 71512 - protein, 157 aa, Zea mays
  Coding DNA Sequence Number=SeqID_29733
  Homolog annotation: Hit_ID=Q8H3V2; Match level="QueryCoverage=45%, HitCoverage=16%, E-value=9e-10, Identity=48%"; Hit description =Putative cis-zeatin O-glucosyltransferase
MEGRDAEGGSGHPDGVEGHLNQLLHLSLLLTSRGLPVHFAAPEPRLREVRTRLHGSGPDAAAVYFHALDVPAHDSPSPDPSSPFPEHMQPLFEVFCTGARASRATLERRWRNWRGEEASGGRRVLEIRVFGKRPGRCVPDGCAGSDVGIRRLRLFTG

SEQ ID NO: 71513 - protein, 52 aa, Zea mays
  Coding DNA Sequence Number=SeqID_29734
MTVKGVQITIFAFTTTTEEKRKVIQFALNEEQPICGLVFKGCCLAQHQVLAG

SEQ ID NO: 71514 - protein, 61 aa, Zea mays
  Coding DNA Sequence Number=SeqID_29735
MKGRHNVGKRKGELKYTTSKQKSPFSTTTAVALHPDPARPLVSLPAAHTVQTIIIIIWGPS

SEQ ID NO: 71515 - protein, 47 aa, Zea mays
  Coding DNA Sequence Number=SeqID_29736
MEVTTDQTMMKSGPRPTGAGPRVSANCDQGVRGGRLTPRTHRSEKGS

SEQ ID NO: 71516 - protein, 59 aa, Zea mays
  Coding DNA Sequence Number=SeqID_29737
MATMNGSESVFTTCKGDKNMNTLMHHPFSNWADTVSRYFTRSSWPDVNLKLKLTSSQSN

SEQ ID NO: 71517 - protein, 56 aa, Zea mays
  Coding DNA Sequence Number=SeqID_29738
MAIKETLLMEAPSLVAEDKLEFVFRCSLYLFQIYCITVYCFSTYFTLLPILSRFGD

SEQ ID NO: 71518 - protein, 267 aa, Zea mays
  Coding DNA Sequence Number=SeqID_29739
  Gene Ontology: Mol. function=transcription regulator activity; Cellular component=nucleus; Biological process=regulation of transcription
  Homolog annotation: Hit_ID=Q657D1; Match level="QueryCoverage=89%, HitCoverage=44%, E-value=2e-55, Identity=56%"; Hit description=BHLH transcription-like
  Pfam annotation: Domain name=HLH; Domain location=161-208; Score =27.8; E_value=3.8e-05; Accession=PF00010.16; Description=Helix-loop -helix DNA-binding domain
MAAEAVVVAEGNAGPTGRGRPPPRPSAAQEESTLCSLLASTAPTTAGGIQIAFSTAAVHQQQHAAGGAGGAKTSAKPSSLSLSSSGSSSNISFDGRNPARNGGGGGGGDPVYEPDTEALAQVKEMIYRAAAMRPVSLGSEDDAGAGAERPPRRRNVRISSDPQTVAARQRRERISDRLRVLQKLVPGGAKMDTASMLDEAASYLRFLKSQVRDLQTLDRRNYGAASSNDAAATMAAVVGSSLSYNRGTGAMPAFTFPAAGETLRGAG

SEQ ID NO: 71519 - protein, 93 aa, Zea mays
  Coding DNA Sequence Number=SeqID_29740
MVIASESVRFGQAIATTSPCGFDGHHEGRVDTTKKVVAVVQRISPQDQSGHGKSNICALTPTGYVEDTEIKLMKTTQVIQVWWEQTHPILKGN

SEQ ID NO: 71520 - protein, 321 aa, Zea mays
  Coding DNA Sequence Number=SeqID_29741
  Gene Ontology: Mol. function=nucleoside-triphosphatase activity; Cellular component=peroxisomal matrix; Biological process=ATP -dependent proteolysis
  Homolog annotation: Hit_ID=P93647; Match level="QueryCoverage=48%, HitCoverage=20%, E-value=5e-74, Identity=78%"; Hit description=Lon protease homolog 1, mitochondrial precursor
  Pfam annotation: Domain name=AAA; Domain location=9-172; Score=82.4; E_value=1.4e-21; Accession=PF00004.19; Description=ATPase family associated with various cellular activities (AAA)
  Pfam annotation: Domain name=AAA_3; Domain location=9-146; Score= -16.6; E_value=0.021; Accession=PF07726.2; Description=ATPase family associated with various
  Pfam annotation: Domain name=AAA_5; Domain location=9-167; Score= -6.1; E_value=0.0052; Accession=PF07728.4; Description=ATPase family associated with various cel
  Pfam module annotation: Pfam domain module=AAA::AAA_3::AAA_5; Domain location=9-172::9-146::9-167
LKPDARGPVLCFVGPPGVGKTSLASSIAKALNRKFLRISLGGVKDEADIRGHQRTYIGSMPGRLIDGLKRVSVSNPVMLLDEIDKTGSDVRGDPASALLEILDPEQNKAFNDQMEVIELPGYTPEDKLKIAMNYLIPRVLEQHGLSTANLQIPEAGKLFILVSMRSPTFHLTTVATTEAGPAARGGGRRGGGGEVRKAVTEAVLMGIDGTGRVAPAFDARLVSGSLLPLRLTLPRQYCLHEIGDHGARLGDGTGVGRGVMKRECRGSGVGRGGHRGRAWWGWGRSRRKVREVRGEGMRTVRGAMMAGRRRRIVWDCGSANG

SEQ ID NO: 71521 - protein, 275 aa, Zea mays
  Coding DNA Sequence Number=SeqID_29742
  Gene Ontology: Mol. function=phosphotransferase activity, phosphate group as acceptor; Cellular component=cytoplasm; Biological process =nucleobase, nucleoside, nucleotide and nucleic acid metabolic process
  Homolog annotation: Hit_ID=Q9SE47; Match level="QueryCoverage=72%, HitCoverage=95%, E-value=1e-98, Identity=90%"; Hit description =UMP/CMP kinase b
  Pfam annotation: Domain name=ADK; Domain location=81-234; Score =246.8; E_value=4.6e-71; Accession=PF00406.12; Description=Adenylate kinase
  Pfam annotation: Domain name=Thymidylate_kin; Domain location=81-251; Score=-38.2; E_value=0.011; Accession=PF02223.8; Description =Thymidylate kinase
  Pfam module annotation: Pfam domain module=ADK::Thymidylate_kin; Domain location=81-234::81-251
MVPNEEILEPCSTITRRAVTVHSTTAQREDFLTKPEIAPEGGSNLGPRVSAVETCIFVAKISVGLVTENMLGGKKVTAVFVLGGPGSGKGTQCANIVEHFGFTHLSAGDLLRAEIKSGSENGTMIENMIKEGKIVPSEVTIKLLQEAMIKNENDKFLIDGFPRNEENRAAFENVTKISPAFVLFFDCSEKEMEKRLLGRNQGRVDDNIETIKKRFKTFVESSLPVIEHYNSRDKVKKIDAAKPIPEVFEDVKTIFAPYAPKLHEIRIHLKNNSTP

SEQ ID NO: 71522 - protein, 354 aa, Zea mays
  Coding DNA Sequence Number=SeqID_29743
  Homolog annotation: Hit_ID=Q9FQB4; Match level="QueryCoverage=28%, HitCoverage=44%, E-value=3e-40, Identity=89%"; Hit description =Glutathione S-transferase GST 25
MAGADDLKVLGMWTSPFVIRVCIVLNLKGLAYEYVEEDLGNKSPAPAQLQPGAQDRARAAPRGLPRKQVPDHPAVHRQGLDRDRAGRAIARPLRARGRAVLAGRIGITSHGEGGFSSAFVRVCPHGIEDEAPRKKARLGWGQGLTKYEKQKVQGPVDPAEAVADGSPADGELKTASLVPMPAPYVAPAPPAAPVLAPAPAPAPSAAPAFLSAPMQCSSPVTGPPYCSSVFRNIYSSSYISQWSITFNLLWLEIFLVEYKATKEKSKEIDRLAREQKAEERQKQRGKESDVEAGIEIPEERGLGSMTIIVIVSMSKVVEKTNPMIREREDQSTEAISIEMGAILKESVIDTGVVI

SEQ ID NO: 71523 - protein, 353 aa, Zea mays
  Coding DNA Sequence Number=SeqID_29744
  Gene Ontology: Mol. function=identical protein binding; Cellular component=proton-transporting two-sector ATPase complex; Biological process=negative regulation of enzyme activity
  Homolog annotation: Hit_ID=Q6K7G5; Match level="QueryCoverage=85%, HitCoverage=38%, E-value=1e-138, Identity=79%"; Hit description =Putative subtilisin-like proteinase
  Pfam annotation: Domain name=Peptidase_S8; Domain location=59-353; Score=-57.3; E_value=0.001; Accession=PF00082.12; Description =Subtilase family
MERISGPRLAVLLALAVFTAVAAAATDEAAHAAAGEGVLAVYPDQARQLHTTHTPAFLRLTEAAGLLPAATGGASSSAVVGVLDTGLYPIGRSSFAAADGLGPAPASFSGGCVSAGSFNASAYCNSKLIGAKFFYQGYEAALGHPIDETKESKSPLDTEGHGTHTASTAAGSPVAGAGFFDYAEGQAVGMDPGARIAAYKICWTSGCYDSDILAAMDEAVADGVDVISLSVGANGYAPSFFTDSIAIGAFHAVSKGIVVSCSAGNSGPGEYTAVNIAPWILTVGASTIDREFPADVVLGDGRVFGGVSLYAGDPLDSTQLPLVFAGDCGSPLCLMGELDSKKVARQDGALSAW

SEQ ID NO: 71524 - protein, 287 aa, Zea mays
  Coding DNA Sequence Number=SeqID_29745
  Gene Ontology: Mol. function=isomerase activity
  Homolog annotation: Hit_ID=Q6V7U9; Match level="QueryCoverage=84%, HitCoverage=73%, E-value=1e-12, Identity=24%"; Hit description =Putative chalcone isomerase
MALRKDRGNIEPTEQSYSEENRPGCACVAVPRVLLPEDATEPTTGIKFPTVLEDNSNLTTEIIYNVDASRSLVGMGFRSMRIMRVKNLNLYAFGLCSYCLIIAFWLLTVGAVFPLPAEFLLCYIGIFSDIQPDSVCKKLGPKYAYIPDAELKDHPDFYEDLLRENIDMTVRLVVSYNGLSIGTVRDAFEKSLGFRLQKMNPNTDYGCLKTFGSCFSEDIRIPAGTKIDFRQTSDGQLITEIDGKQIGTVQSKDLCRAFFDMYIGDPPVSVETKQDIAQNVAGLIRRC

SEQ ID NO: 71525 - protein, 153 aa, Zea mays
  Coding DNA Sequence Number=SeqID_29746
MNTQLSFRLAIPIVTQYHEILESPLGTWEAPTPQRPPIVAPPSLTAQHQATKCPNLQTNPTPSTRPQQIPHSLLGPRFRKPKAPNLAWPSPGIARWLMVTVVLVPRRLAPAAAGMETRPRAPSFPSLGAAAWRGVPVASSPDSGANPIPREWG

SEQ ID NO: 71526 - protein, 125 aa, Zea mays
  Coding DNA Sequence Number=SeqID_29747
  Homolog annotation: Hit_ID=Q6F3A5; Match level="QueryCoverage=46%, HitCoverage=12%, E-value=2e-12, Identity=62%"; Hit description =Expressed protein
MHHVHERLRRSNAPTLERLQRHSNATSASAAPPNNSNATPALAAVELYCSQIRYLLDPDIYTDGRISVQGIDAVLFAPDDAKATQTVDPNRKPPTIVTHKKKIKLRRVHLLLNLSIGQRENMEVK

SEQ ID NO: 71527 - protein, 93 aa, Zea mays
  Coding DNA Sequence Number=SeqID_29748
  Homolog annotation: Hit_ID=Q8S8K9; Match level="QueryCoverage=84%, HitCoverage=22%, E-value=4e-14, Identity=49%"; Hit description =Expressed protein
MSNSALTVQMNQVHSELQHARGLIDEKDSELQRIRLSNNQYVEENDRLRAILGEWSARAAKLERALEAERVSNVELRKNIAKFRGHLYKEQEA

SEQ ID NO: 71528 - protein, 337 aa, Zea mays
  Coding DNA Sequence Number=SeqID_29749
  Gene Ontology: Mol. function=isoleucine-tRNA ligase activity; Cellular component=cytosol; Biological process=tRNA aminoacylation for protein translation
  Homolog annotation: Hit_ID=Q6ZGC2; Match level="QueryCoverage=77%, HitCoverage=24%, E-value=1e-132, Identity=86%"; Hit description =Putative isoleucyl-tRNA synthetase
  Pfam annotation: Domain name=tRNA-synt_1; Domain location=2-323; Score=-123.5; E_value=2.3e-13; Accession=PF00133.12; Description =tRNA synthetases class I (I, L, M and V)
MGTFCCCEPKSLFIAVAEVQSVFESESTSGGKQRKVGNILSSEKGKLFVIVASDLITTLESKWGVKLVVHKSFPGSALEHCRYAHPVNSNECSVILGGDYITTESGTGLVHTAPGHGQEDYITGLKYGLPIISPVDDEGNFTAEAGQFGGLSVLGAGNAAVVKYLDEQYSLILEEPYKHKYPYDWRSKEPTIFRATEQWFASVDGFRDAAMDAIRRVTWVPSQAQNRIVAMTSSRSDWCISRQRTWGVPIPVFYHVDSQEPLITEETIEHIKDIEDPPREAGDSARVCADHGGRAHGIIEGVTTDPAGKATTTIDPVRKPTIRPKGRQIYPGRSWQQ

SEQ ID NO: 71529 - protein, 47 aa, Zea mays
  Coding DNA Sequence Number=SeqID_29750
MERCVDEAETLTQRCSTSFALRVTTHTRIQAGKGKIRDAAKAYNRAM

SEQ ID NO: 71530 - protein, 359 aa, Zea mays
  Coding DNA Sequence Number=SeqID_29751
  Gene Ontology: Mol. function=isoleucine-tRNA ligase activity; Cellular component=mitochondrion; Biological process=tRNA aminoacylation for protein translation
  Homolog annotation: Hit_ID=Q6ZGC2; Match level="QueryCoverage=92%, HitCoverage=31%, E-value=1e-179, Identity=90%"; Hit description =Putative isoleucyl-tRNA synthetase
  Pfam annotation: Domain name=Anticodon_1; Domain location=210-355; Score=80.6; E_value=4.9e-21; Accession=PF08264.3; Description =Anticodon-binding domain
  Pfam annotation: Domain name=tRNA-synt_1; Domain location=1-167; Score=-397.7; E_value=0.0045; Accession=PF00133.12; Description=tRNA synthetases class I (I, L, M and V)
  Pfam module annotation: Pfam domain module=Anticodon_1::tRNA-synt_1; Domain location=210-355::1-167
MVSAHTHILTLTIVLKKGSDAWWYMTTEELLPDRYRDKASEYRKGTDTMDVWFDSGSSWAAVLAKRDGLNFPADIYLEGSDQHRGWFQSSLLTSIATTGKAPYSSVITHGFVLDEKGFKMSKSIGNVVDPEKIIVGGKNHREEPGYGADVLRLWVSSVDYTTDVLIGPQILRQMSDMYRKLRGTMRFLLSNLHDWKPDNSVPYNDLPKIDKYALFHLETVMTSMKDSYESYQFYKVYQILQRFATVGLSNFYLDVAKDRLYVGGRVSFTRKSCQTVLMAHLLYLVRAISPIMPHLAEDVWQNLPFQYTLQDGSLANFVFDLKWPEKNEEWLSAPKDDVDFLGVILEESRTSSYFKRGSK

SEQ ID NO: 71531 - protein, 339 aa, Zea mays
  Coding DNA Sequence Number=SeqID_29752
  Gene Ontology: Mol. function=protein serine/threonine kinase activity; Cellular component=chromosome, telomeric region; Biological process=protein amino acid phosphorylation
  Homolog annotation: Hit_ID=Q75XU7; Match level="QueryCoverage=77%, HitCoverage=51%, E-value=2e-93, Identity=62%"; Hit description=RIO kinase
  Pfam annotation: Domain name=RIO1; Domain location=2-162; Score =263.6; E_value=3.9e-76; Accession=PF01163.12; Description=RIO1 family
ANVYHATKTDGQELAIKVYKTSVLVFKDRDRYVQGDYRFRHGYCKHNPRKMVKTWAEKEMRNLLRVRAAGIRCPAPLLLRLHVLVMEFIGKGGWAAPRLKDAALSDDKLHESYFEGHLYIIDVSQSVDLDHPSALDFLKEDCLHVSDFFKKRGVPVMTVTDLFNFVIDQSISDEDVDDYLEKAQQKILENGGAVPNDDEITPTVMVQTLDYVKQCEADIVNMSIMQRSSSGYEPTADKLYDQPLLGFVRTKNTNTEKEQGQPARNLVEVEEDESESCLSSDEDDSWHEDDPKVGPEERKAARKENKKKVKEEKREARKTKIPKAEKKKRKKMAKAKCKR

SEQ ID NO: 71532 - protein, 254 aa, Zea mays
  Coding DNA Sequence Number=SeqID_29753
  Gene Ontology: Mol. function=glutathione transferase activity; Cellular component=cytoplasm; Biological process=metabolic process
  Homolog annotation: Hit_ID=Q9FQB4; Match level="QueryCoverage=39%, HitCoverage=44%, E-value=1e-40, Identity=90%"; Hit description =Glutathione S-transferase GST 25
MAGADDLKVLGMWTSPFVIRVCIVLNLKGLAYEYVEEDLGNKSPAPAQLQPGAQDRARAAPRGLPRKQVPDHPAVHRQGLGRDRAGRAIARPLRARGRAVLAGRIGITSHGEGGFSSAFVRVCPHGTEDEAPRKKARLGWGQGLTKYEKQKVQGPVDPAEAVVDGSPADGELKTASLVPMPAPYVAPAPPAAPVLAPAPAPAPSAAPAFLSAPMQCSSPVTGPPYCSSVTDMLGPFLFLQTRNSVTYDPNQYKP

SEQ ID NO: 71533 - protein, 129 aa, Zea mays
  Coding DNA Sequence Number=SeqID_29754
MTTALWMPPPPPDQREYLYREGRRHDGGEGDPLLLPAPMPPRWWDSPYHPSPPPHLRDHARPSPRRVPMSASSGGYYRQGGGAYDRSYPDDPQPIYKPSRSDRYWPKDDGGGYKGFVRYGGVATGTAVT

SEQ ID NO: 71534 - protein, 787 aa, Zea mays
  Coding DNA Sequence Number=SeqID_29755
  Gene Ontology: Mol. function=identical protein binding; Cellular component=proton-transporting two-sector ATPase complex; Biological process=negative regulation of enzyme activity
  Homolog annotation: Hit_ID=Q6K7G5; Match level="QueryCoverage=94%, HitCoverage=95%, E-value=0.0, Identity=54%"; Hit description =Putative subtilisin-like proteinase
  Pfam annotation: Domain name=PA; Domain location=380-475; Score=82.2; E_value=1.6e-21; Accession=PF02225.12; Description=PA domain
  Pfam annotation: Domain name=Peptidase_S8; Domain location=128-618; Score=57.5; E_value=4.4e-14; Accession=PF00082.12; Description =Subtilase family
  Pfam annotation: Domain name=Subtilisin_N; Domain location=33-117; Score=29.7; E_value=1e-05; Accession=PF05922.7; Description =Subtilisin N-terminal Region
  Pfam module annotation: Pfam domain module=PA::Peptidase _S8::Subtilisin_N; Domain location=380-475::128-618::33-117
MAGLAGVVCLCLLLAASSVTAAAAAAAEEESLSSYIVHVAAEHAPRSTRPRLLSRSYTSFLHDSLPAHLLRPAPLVFYGYAHAATGFAARLTERQAAHLASQHSVLAVVPDETLQPHTTLTPSFLGLSPSSGLLPRSNGAADVVIGVIDSGIYPMDRPSFAADASLPPPPSKFRGTCVSTPSFNGSAYCNNKLVGARFFYQGMQQRMGVAAFSEAGESLSPLDTQGHGSHTASTAAGSAGVDASFFNYAKGKAIGVAPGARIAAYKACWKHGCSDSDILMAFEAAITDRVDVISVSLGASKPKPRKFYKDGIAVGSFRAVRNGITVSVSSGNFGPGEFTTVNVAPWFLTVGASTINRRFPASVVLGNGETSTGTSIYAGAPLGKAKIPLVYGKDVGSQVCEAGKLNASMVAGKIVVCDPGVNGRAAKGEAVKQAGGAGAILVSDESFGEQALTTAHILPATAVKFADAESIKKYIRSNASPPVATIEFHGTVVGRTPSSPRMASFSSRGPNLLAPEILKPDVTAPGVDILAAWTGENSPSQLGSDPRRVKYNIISGTSMSCPHVSGIAALLRQARPDWSPAAVKSAMMTTAYNVDNAGDIIKDMSTGKASTPFVRGAGHVDPDRAVDPGLVYDAGADEYLSFLCAIGYTAEQIAVFRTKDDPAVDCSKRKASVGDHNYPAFSVVLNSTRDAVTQRRVVRNVGSSARATYWASVTSPAGVRVTVNPRKLRFSATQKTQAYEITFTSRRMWSVPDKYTFGSIVWSDGEHKVTSPIAITWPATASQVAAM

SEQ ID NO: 71535 - protein, 41 aa, Zea mays
  Coding DNA Sequence Number=SeqID_29756
MGRRDLTLLRGGMPLRHNRWQGAVVLSWRAAVVDCAAVLSG

SEQ ID NO: 71536 - protein, 148 aa, Zea mays
  Coding DNA Sequence Number=SeqID_29757
  Subcellular localization annotation: CTP_CleavageSite=77; ConfidenceScore=5.56e-01
MANICGSTATTSVSSARFSPIPSSFGLATSDIKLGTAPPLSSHLLAPPWANRTAPKRQWRATTLDLAEGHGRVTACLSDDRRAWPRTHALPWAPNYVSILGMSAGLGASTEFLQSKCSSPSRCTMVEGLLSMNPGEILDPVGSLAGPL

SEQ ID NO: 71537 - protein, 169 aa, Zea mays
  Coding DNA Sequence Number=SeqID_29758
  Pfam annotation: Domain name=zf-CCHC; Domain location=101-118; Score =19.7; E_value=0.00056; Accession=PF00098.13; Description=Zinc knuckle
MNPNEDKVDDVNDKIPASTMVKRKDESHRYLLNGMKNNKRTRKMFGYKIKPPQPQAEAPKLVNTQTRESNQAQLFNMQATDQPSSASNKAKLTRREVKVRGACFYCNEEGHFICQCPKKHLDWLAKKAFKQNSTSDDPEEIVFTRSKYKVIQTTDEGGMLLNLRVEPRE

SEQ ID NO: 71538 - protein, 247 aa, Zea mays
  Coding DNA Sequence Number=SeqID_29759
  Gene Ontology: Mol. function=protein serine/threonine kinase activity; Cellular component=integral to membrane; Biological process=protein amino acid phosphorylation
  Homolog annotation: Hit_ID=Q5VQM7; Match level="QueryCoverage=59%, HitCoverage=28%, E-value=5e-30, Identity=41%"; Hit description =Putative receptor-like protein kinase INRPK1
  Pfam annotation: Domain name=LRR_1; Domain location=110-132; Score =7.7; E_value=10; Accession=PF00560.23; Description=Leucine Rich Repeat
  Pfam annotation: Domain name=LRR_1; Domain location=134-156; Score =0.1; E_value=2.8e+02; Accession=PF00560.23; Description=Leucine Rich Repeat
  Pfam annotation: Domain name=LRR_1; Domain location=158-180; Score =9.8; E_value=4.1; Accession=PF00560.23; Description=Leucine Rich Repeat
  Pfam annotation: Domain name=LRR_1; Domain location=182-205; Score =8.8; E_value=6.6; Accession=PF00560.23; Description=Leucine Rich Repeat
  Pfam module annotation: Pfam domain module=LRR_1::LRR_1::LRR_1::LRR _1; Domain location=110-132::134-156::158-180::182-205
TGIPVQPDLLSLQSCSALLNLTSSLLWWRLGHKRADSEFVTVSGMARRWCWSVGPIGRRPRPGTQVVDGPKVQESAQLRTPFMPPLAPSPAARHNSSGPSPVPEIGSCSNLTMLGLTETRISGLLPAILGQLKSLDTIAIYTAMLSGLIPPELKQCTSLVNVYLYENVLSGSIPLQLDKLGNLKTLLLWQNNLVGVIPWSSGATMVGLSEGEKHFIHRGIAQDISTNGLLSSSVLTLQMKNFSNTLM

SEQ ID NO: 71539 - protein, 86 aa, Zea mays
  Coding DNA Sequence Number=SeqID_29760
MESHDLRAERGSRLVGGDENDGFGIDYGDASPLQPNRTFAEYVDVYSPLLYTPNPPSPGCPCCNHCSGEDEAVEENFQEFQDYDEF

SEQ ID NO: 71540 - protein, 101 aa, Zea mays
  Coding DNA Sequence Number=SeqID_29761
MESPRKHKASAVPVKEKVKLEDGNDLLVKRRKTEFSGSIVQPEREIEVFDPENKVPDGLPVEYSTDKDPMDALTSCAVQNFGQAKGCINISFQFGYVLNDN

SEQ ID NO: 71541 - protein, 396 aa, Zea mays
  Coding DNA Sequence Number=SeqID_29762
  Gene Ontology: Mol. function=molecular_function; Cellular component =membrane; Biological process=auxin mediated signaling pathway
  Homolog annotation: Hit_ID=Q69PB8; Match level="QueryCoverage=97%, HitCoverage=93%, E-value=1e-124, Identity=61%"; Hit description =Putative MtN21
  Pfam annotation: Domain name=DUF6; Domain location=187-351; Score =22.9; E_value=0.0012; Accession=PF00892.11; Description=Integral membrane protein DUF6
  Pfam annotation: Domain name=DUF6; Domain location=20-154; Score =12.3; E_value=0.013; Accession=PF00892.11; Description=Integral membrane protein DUF6
  Pfam annotation: Domain name=MFS_1; Domain location=79-393; Score= -54.7; E_value=0.1; Accession=PF07690.6; Description=Major Facilitator Superfamily
  Pfam module annotation: Pfam domain module=DUF6::DUF6::MFS_1; Domain location=187-351::20-154::79-393
GGAPWLERCGPSVGMVLVQLFYALVDVALKTAYGLGMRPIVFVAYRQGIAAATLLLASLAARGCTLRPMAVGARGFALLFAASLATATGQYLYLQGLHLASPSMARATTNLAPGITFAIAAVIGLEKVDIRSPRSVAKIVGTAICLAGAASMAFFKGPALLGAALPSTTSDNSDWVKGGIYLVGNAICVSIWYILQVPVCKSYLDPVSLATWMCLLATLQCAAMALFLEPNNYLEIWKLNSLWEFPCILYGVSLTLDSCSGAATILRCASPCWIGVIEAERILQGVFASGANFFLQSWCIAVKGPLYSAIFTPLSAVITATLSTLFLNEQLHVGSVLGAVTIIAGLYVVLWGKAEDANGGQVGSKQTADADGIAVTVDTPTNLSEPLLPTVAEPVF

SEQ ID NO: 71542 - protein, 304 aa, Zea mays
  Coding DNA Sequence Number=SeqID_29763
  Gene Ontology: Mol. function=catalytic activity; Cellular component =endoplasmic reticulum; Biological process=metabolic process
  Homolog annotation: Hit_ID=Q6RBX9; Match level="QueryCoverage=93%, HitCoverage=46%, E-value=1e-121, Identity=75%"; Hit description =Glossy1 protein
  Pfam annotation: Domain name=Carotene_hydrox; Domain location=123 -280; Score=-90.7; E_value=0.1; Accession=PF03897.5; Description =Carotene hydroxylase
  Pfam annotation: Domain name=Sterol_desat; Domain location=30-254; Score=295.1; E_value=1.3e-85; Accession=PF01598.8; Description =Sterol desaturase
  Pfam module annotation: Pfam domain module=Carotene_hydrox::Sterol _desat; Domain location=123-280::30-254
MGAALLASWPWDNLGFYKYVLYGPLVGKAVASRAWEAASPDRWILLLLLLFGLRALTYQLWSSFSNMLFATRRRRVVRDGVDFDQIDKEWDWDNFLILHALMAAAALCAFPSLRHLPAWDGRGFAVALVAHAAATEPLSYLAHRALHGSSGRLYARYHSLHHSSRVPQPFTAGLATPLEHVALGALMSLPLAAARAAGCASVALAFAYVLAFDSLRAMGHCNVEVVPASLFRAIPALRYVLYTPTYHAIHHTKKEANFCLFMPLFDLLGGTIDRRSWDMQRKMSAGHQTTYIGLTHFSFNNLTS

SEQ ID NO: 71543 - protein, 70 aa, Zea mays
  Coding DNA Sequence Number=SeqID_29764
MSGGAPGQCPVPQAGSAANWPLSGIGGVTWLKIIGLSGGSPDYLGERLQLVEIPRKREKNTKQKEPLYSS

SEQ ID NO: 71544 - protein, 82 aa, Zea mays
  Coding DNA Sequence Number=SeqID_29765
MPPADRCVALAQQGHITSGVTHGIPSLSVPWVSPLAGPDAEERHQKVEEVGSHAKAKRYTCLKIKRIKENKTRDPSKSQPEC

SEQ ID NO: 71545 - protein, 170 aa, Zea mays
  Coding DNA Sequence Number=SeqID_29766
MSRSPAKEADGSAHVCADHGVCARGKIEGVTADPAEKATTATNLAGKTRSGQRDGRSSREGRSNGRGRAGRHAGPKADGAFSGAGVWQSHREEGRRWQDPGDVAAPGRRHVLAPVGGSSAAMAAADWAASRAEREDRSPPLVAQGETGEPSGRAGEEGADVSSGSDHGDE

SEQ ID NO: 71546 - protein, 311 aa, Zea mays
  Coding DNA Sequence Number=SeqID_29767
MAHYSQCTRDESARICEADTHRDNLSLKVTEVQGEVRGNKSLAHEELEHPYCNNGRRRLVPVFASLTTQRAEARAEGSVTYPSLPDGEVAHVIVVCASNAHVPCDLRLRPASGLPSLPDTGSGEAETVVLGREDLGWDEDSTEYVPCQRAGPGEAELWVTVEKGLGRIVVYTLLSSLNVPGGNLEVHKGSTQTNKRSKLGFKCKGAKKPSMPWSGAPDCPVCHQTVSGAPGPYNVQLSTYSRVSEDALRYNSPDYPVHQRSNDSFAQRSTAKAADSVNSEEQCAQKSEQSPEVHWTVNSTYLVRHRTVRCH

SEQ ID NO: 71547 - protein, 178 aa, Zea mays
  Coding DNA Sequence Number=SeqID_29768
  Homolog annotation: Hit_ID=Q6QP51; Match level="QueryCoverage=68%, HitCoverage=58%, E-value=7e-09, Identity=42%"; Hit description =Putative growth-regulating factor 1
  Subcellular localization annotation: CTP_CleavageSite=12; ConfidenceScore=5.43e-01
MKLLKKCVTSLRMAKTKGPNTGSFVKKAQSMMMNDLKQFLMSYEATMSSYGGNTAVMAKSFVMVVRKFVVFRSRGRVRALGSGKAEFVVFRSRGRVRALGSGEAEFVVFRSRGRDGGRVRALGSGEAEFPMAPEAGLGCCQPHSVEWHSSRSDAGGAVFLSGRSVERRSDCGHFVSVD

SEQ ID NO: 71548 - protein, 222 aa, Zea mays
  Coding DNA Sequence Number=SeqID_29769
  Gene Ontology: Mol. function=ubiquinone biosynthetic process monooxygenase activity; Biological process=aromatic compound metabolic process
  Homolog annotation: Hit_ID=Q24DW9; Match level="QueryCoverage=50%, HitCoverage=12%, E-value=1e-13, Identity=38%"; Hit description =Ubiquinone biosynthesis hydroxylase, UbiH/UbiF/VisC/COQ6 family protein
TVHCRLLRLEELLICCKNTSHRRFGTCVLGNVVDICDYFCVPEVGKFWLVNGSVLQMFPWQRDDAIRALDMYKRAIEQRSRCAISPEEFVNFLNHALDFGYGPHSCSTTLDHYMEQFFGIGSTATSTKECFQVAPKATHVVFERMEFPLSLVHSHYYVYKRLALVGDAAHIVHPFASQGVNLGFGDVVALAKVIAKGLFADFATMARQGQEGCDARDRSISL

SEQ ID NO: 71549 - protein, 127 aa, Zea mays
  Coding DNA Sequence Number=SeqID_29770
MGTQIHELQEQVEIRDNTIEVLENQLHDLQLELDDAKAHQNAPPGVAGCLSCSSGTAEAGLAAPDGRRRREHGLERGGLERRHTEAGLEDGLESSGLEDDLEGGRPGGRTAWRAAAWSGGGLEQRHA

SEQ ID NO: 71550 - protein, 58 aa, Zea mays
  Coding DNA Sequence Number=SeqID_29771
MVSHSGYGGYKCGHCTTAVGVSEALYAKAVYLARFKNSIRIVCFSQLMRLLDPCCYIE

SEQ ID NO: 71551 - protein, 68 aa, Zea mays
  Coding DNA Sequence Number=SeqID_29772
MDRKKAANKGIPYKEFFFVAVTTIASDHNCRPLDASLSVPFTCTLCMLFYAIPCFTCRIVDVISPRTK

SEQ ID NO: 71552 - protein, 177 aa, Zea mays
  Coding DNA Sequence Number=SeqID_29773
  Gene Ontology: Mol. function=catalytic activity; Cellular component =cellular_component; Biological process=metabolic process
  Homolog annotation: Hit_ID=Q7F1V2; Match level="QueryCoverage=92%, HitCoverage=18%, E-value=2e-59, Identity=67%"; Hit description =Putative Cycloartenol Synthase
MWRLKIGEGGPWLKSGNGHIGRETWEFDEDFGSEADREAVDSAREEFSKNRLRMRHSSDLLARMQIAKENGFSLDLHKTRDDDGRSPLLVATTGSSTVSETLRKALDYFAAIQAHDGHWPGDFPGPLFTTATMITVLYVTGSLDSTLSSDHRREICRYLHNPPNPPFQRLLFLRNIT

SEQ ID NO: 71553 - protein, 99 aa, Zea mays
  Coding DNA Sequence Number=SeqID_29774
MGITLCSGPIVGSMDNVLPILHLASLPKEKGEATYCTVQEAVTGRSWVLDIQGALTVGVIVDFVSRNYCTAMSYVEDVHLYGLHLVANTQSSLLTRFSC

SEQ ID NO: 71554 - protein, 183 aa, Zea mays
  Coding DNA Sequence Number=SeqID_29775
  Gene Ontology: Mol. function=catalytic activity; Cellular component =cellular_component; Biological process=metabolic process
  Homolog annotation: Hit_ID=Q7F1V2; Match level="QueryCoverage=82%, HitCoverage=19%, E-value=1e-56, Identity=68%"; Hit description =Putative Cycloartenol Synthase
  Pfam annotation: Domain name=Prenyltrans; Domain location=99-154; Score=28.4; E_value=2.5e-05; Accession=PF00432.11; Description =Prenyltransferase and squalene oxidase re
MDNPSGDFSRKYRHISKGGWGFQVADQGWQVSDCTAEALKVLLMLSRFSSDIGSDQMETCRLYDAVNVLFGSWGICFTYGTWFAIEGLSAVGQSYGNSTCIQKACKFLLAKQLKNGGWGESHLSSTTKAYTNLDKEKSHIVNTAWAMLALMKAGQAERDPTPLHKAARLIMSMQLSNGDFPQE

SEQ ID NO: 71555 - protein, 155 aa, Zea mays
  Coding DNA Sequence Number=SeqID_29776
  Subcellular localization annotation: CTP_CleavageSite=73; ConfidenceScore=5.05e-01
MALRKLCDDGGFQLSYGSKATSARTRPLLQLSLRQAPLLLRQPRHHASKVCTLRHVAYVHFNVSSTSFCPLILCVAKSAFGLGFGHIANLGETMAKRETPKDSQKGLKDLGLKEPKLCRSGSHRTGPVVLQTRSLERLSATLVPWDTTMRNKQAF

SEQ ID NO: 71556 - protein, 188 aa, Zea mays
  Coding DNA Sequence Number=SeqID_29777
  Gene Ontology: Mol. function=metal ion binding; Cellular component =nucleus; Biological process=ubiquitin cycle
  Homolog annotation: Hit_ID=Q5QLR5; Match level="QueryCoverage=69%, HitCoverage=25%, E-value=3e-61, Identity=82%"; Hit description=C -terminal zinc-finger-like
  Pfam annotation: Domain name=zf-C3HC4; Domain location=80-120; Score =27.5; E_value=4.7e-05; Accession=PF00097.15; Description=Zinc finger, C3HC4 type (RING finger)
MDFSRLYEVSNTVDEHRDMRLDIDSMTYEELLALEEQIGDVNTGLTKSHIVDKLRTSLYVPGISSMSDQPSKSSLENDACIICQEEYQARDCVGTLDCGHRYHAECVKQWLMVKNLCPICKTTALSANRRQGQSGYIAHSCSKLSKHANVYIQISGNTIEDRIASQRNIMAPSPNHVVNVECQSPVTT

SEQ ID NO: 71557 - protein, 282 aa, Zea mays
  Coding DNA Sequence Number=SeqID_29778
  Gene Ontology: Mol. function=transcription factor binding; Cellular component=intracellular; Biological process=regulation of transcription, DNA-dependent
  Homolog annotation: Hit_ID=Q8RZ83; Match level="QueryCoverage=67%, HitCoverage=75%, E-value=1e-68, Identity=73%"; Hit description =Putative GTP-binding protein Rab11b
  Pfam annotation: Domain name=Ras; Domain location=1-163; Score=146.8; E_value=5.8e-41; Accession=PF00071.12; Description=Ras family
DEFSLETRSTIGVEFATKTVQVDDKLVKAQIWDTAGQERYRAITSAYYRGPATRWAALVVYDAIQFFFSLTISNTHSLNPGTPLVPRRVTFDNAERWLRDHTDANIVVMLVGNKADLRHLRAVSPEDAAAFAQRHGTFSMETSALDATNVERAFAEVLRQIYHVVSRNALDIGDDPAAPSRGKTIDVDAAKDERSRLLGMKTGREILEAEYSQSQQNNAVVLQMGHKFFTISHCFTHSACVNRCTLNIIQATSGREVMQSAIKADCKAIRAQQLQCLCQTWG

SEQ ID NO: 71558 - protein, 179 aa, Zea mays
  Coding DNA Sequence Number=SeqID_29779
LFQVSLPAAVYKLKSQLVEADFDGDFCGWKKNYMYMKVGFGGFLDLCEKVFFLIQYPGAVLPPAVFVREHNEDGNRGTWCFILVEKSKISSRKVWTWILREFRLYVVLPPNSSRLCSWWSKAAASLEKDLRKGFISLVILVTWELWKHRNDWLTACSMACNLRRKQLSFWWLSRVTCGV

SEQ ID NO: 71559 - protein, 203 aa, Zea mays
  Coding DNA Sequence Number=SeqID_29780
  Homolog annotation: Hit_ID=Q6ZIQ0; Match level="QueryCoverage=36%, HitCoverage=20%, E-value=8e-21, Identity=76%"; Hit description=Arm repeat-containing protein-like protein
  Subcellular localization annotation: CTP_CleavageSite=18; ConfidenceScore=5.02e-01
MKLWKETSRSSKTTTSSRCGLAATPSRLPVKVAVIYVSFPHFDLLFHGQPCGDKVHFSRMTAMVQVLEKNNIETITYLFQSDGYGSHAITHWTAFLVSDPLLRVPCAQLLLVQHEEVGLIIPGAQVLVNKKDAATALYALCSGARENRQRAVETGDVRPLLDLMADPESGMVDKAAYVLHSMVTSGRTAPPPSRNRILVLVEM

SEQ ID NO: 71560 - protein, 140 aa, Zea mays
  Coding DNA Sequence Number=SeqID_29781
  Gene Ontology: Mol. function=metal ion binding
  Homolog annotation: Hit_ID=Q2QTN7; Match level="QueryCoverage=85%, HitCoverage=30%, E-value=2e-13, Identity=35%"; Hit description =Copine, putative, expressed
MTNAFSFYRGGRACNGVNEALQRILILQVPTSTSARGLEEAKIRKLPRRLEERTVQALIHASDSPLSIVLVGVGNGPWDDLFMDFTEIMSRETSQGDKEGKFTLEALMKIPAQHDAIISQNISELMTRAPATRAAFRPPC

SEQ ID NO: 71561 - protein, 43 aa, Zea mays
  Coding DNA Sequence Number=SeqID_29782
MAICLLEFDCPKGPVIVLTRLSGVRGAPDRSDAPMDPVFHHVI

SEQ ID NO: 71562 - protein, 40 aa, Zea mays
  Coding DNA Sequence Number=SeqID_29783
MAVVREVREGRDTTDCPRVEGQGNAVTPTQQPSAELGACC

SEQ ID NO: 71563 - protein, 263 aa, Zea mays
  Coding DNA Sequence Number=SeqID_29784
MEPTVHDVLAFHRVDRAAYEHMLSLGAGRHSSRDAVALLMWFHGKAGLDAVSHVRALVRTQAAAAQLVEEARAVLLHGADAETTTLLSLACGEDDDARVRRFLASCGTADAPRRGVADVLGGVGALVFDDRLHAILRRYEAGGRDGGALPGELAAPYRRRVAAEVQEEDGRSLFITFSKGFPLTRVEVEEFFTERWGGDCVARVMMEKTPAGEPPTYGRIVFRRAATAAAVLAGRPLVKLVVNGRHLWARICSNPNSCNSVGL

SEQ ID NO: 71564 - protein, 181 aa, Zea mays
  Coding DNA Sequence Number=SeqID_29785
MTIQFFNHVKTIWSTTKHIVMGKANGNFYKPKGEAAKNRKQKERTMGQRRCMVKRRLKMTEHVTLKLFFPEKGRVPPPQRDNDYLPWAPMKQEGTPRQRRVRERLREAQATSMFRQQQDDPQTLPPPPMPLDVSSVSSSMTLRMIRLKTLSTTYSLLAVADTTPTTPSGCRSLFYLFENLY

SEQ ID NO: 71565 - protein, 64 aa, Zea mays
  Coding DNA Sequence Number=SeqID_29786
MGKNNKRKREPTPPSEDFGDSEYSEEEFSSESERSLAPIPLRESSKVAAERLVDDVRVLEITAE

SEQ ID NO: 71566 - protein, 107 aa, Zea mays
  Coding DNA Sequence Number=SeqID_29787
  Subcellular localization annotation: CTP_CleavageSite=50; ConfidenceScore=5.13e-01
MNSAVCGNIPVAKRRAMILFVFAFPSGAEALGQKAVASRPGRPPLSSACRSSEQVGGLATAHPFTGGHLLALALCPLFTEAEKGGVVERRNEGENLGIRRSSKAGDA

SEQ ID NO: 71567 - protein, 36 aa, Zea mays
  Coding DNA Sequence Number=SeqID_29788
MASVGKFSGKAPTHGHLRHREQPAVGDDPAMDKLLK

SEQ ID NO: 71568 - protein, 237 aa, Zea mays
  Coding DNA Sequence Number=SeqID_29789
  Subcellular localization annotation: CTP_CleavageSite=19; ConfidenceScore=5.27e-01
VHIVWCTVLSPSPSRSSPRCTPLSPPPHPPPHAIDAAIIASVPRRLCPSRAPFHPLHDGRRTRAPAQPRASCSPRPLRARAQSHHAVAAIIASAESAMSDGPRSTRSLSMASTLHPCSRPDAPPAHLPRCDSHLPIRRPAPSAASSRLPPNPALHLSQAPTRHPHPPHGTPIERHQSQNYGRAPPATMGSATVGALLLGFAHAPAPTVEAGRPGPRSRTPGVLYNINTEESASACTM

SEQ ID NO: 71569 - protein, 637 aa, Zea mays
  Coding DNA Sequence Number=SeqID_29790
  Gene Ontology: Mol. function=signal transducer activity; Cellular component=membrane; Biological process=signal transduction
  Homolog annotation: Hit_ID=UPI0000D56DB9; Match level="QueryCoverage =52%, HitCoverage=18%, E-value=7e-11, Identity=21%"; Hit description =PREDICTED: similar to CG15792-PD, isoform D
MPGPARAATNALPVRFSLLCLIGWPGHQCGCAPSSVCRVAASCVKGGAWNLDREKHIPRHLQVQLLKQNTSGHHQSSKNEVSSPISVLERKSGELHKPVRSLTQQILQGQLHATSAMLPVATMEKATKWEPGDIKGMESHDAYLIASQLNLLDEHRDTAYVADLQMELQQARDRISAMETERRSAKKRLDHLFKKLAEEKAAWRNREHEKVRAILEDMKADLDHEKKNRRRLEMINMKLVNELKEAKMSAKQLLQEYETERKARELTEEVCNELAREVDEDKAEIEALKRDSQRLREEVDEERKMLQMAEVWREERVQMKLVDAKLTLDAKYTQLSKLQQDVEAFIAACSTANGDVTVVEQAESIIQAIKSVRAQDAEFRYEPPAASEDIFSIFEELRPSEEPVIKEIEPCYKNSSAKCEPEIQEVSPMTDIFLEKKAKANSNKSPKDESDTEDGSSWETISHEDVQGSSGSPDGSEPSVSNKVCDGSIPWKSRNGFERMESEKLKDESADACLTNMNQPKKKESAISKLWKSSRPKNSEICKKDAVETVNARSSNVRLSVGTYSTVESGIQEIGLSPPCVEQWSSPDSMNVQFNRGFKGCIEYPRMSQKHSLKAKLMEARLESHKVQLRQVLKQKI

SEQ ID NO: 71570 - protein, 1181 aa, Zea mays
  Coding DNA Sequence Number=SeqID_29791
  Gene Ontology: Mol. function=DNA-directed RNA polymerase activity; Biological process=electron transport
  Homolog annotation: Hit_ID=Q1T3P8; Match level="QueryCoverage=28%, HitCoverage=93%, E-value=1e-137, Identity=70%"; Hit description =Alcohol dehydrogenase superfamily, zinc-containing; D-isomer specific 2-hydroxyacid ...
  Homolog annotation: Hit description=dehydrogenase, NAD-binding
  Pfam annotation: Domain name=2-Hacid_dh_C; Domain location=207-317; Score=-102.4; E_value=0.1; Accession=PF02826.9; Description=D-isomer specific 2-hydroxyacid dehydr
  Pfam annotation: Domain name=ADH_N; Domain location=83-198; Score =103.8; E_value=5.1e-28; Accession=PF08240.2; Description=Alcohol dehydrogenase GroES-like domain
  Pfam annotation: Domain name=ADH_zinc_N; Domain location=229-363; Score=96.6; E_value=7.5e-26; Accession=PF00107.16; Description=Zinc -binding dehydrogenase
  Pfam module annotation: Pfam domain module=2-Hacid_dh_C::ADH_N::ADH _zinc_N; Domain location=207-317::83-198::229-363
  Subcellular localization annotation: CTP_CleavageSite=51; ConfidenceScore=5.55e-01
MEPRPSASQVRRPGLRPAASLLSPPSPMVPHPSSGPRVLKSVRFCSSFQMAAAAEHGNCDAWAARDPSGVLSPYKFNRRAVQSSDVSLKIIYCGVCYGDVMWIQNKHNDSVYPLVPGHEIAGVVTEVGADVKAFKVGDHAGVGTYVNSCRHCENCNSSLENYCPETVFTYNTTDADGTITKGGYSTHIVVHERYCFKIPDGYPLAQAAPLLCAGITVYTPMARHNMKQPGKSLGVIGLGGLGHMAVKFGKAFGLKVTVFSTSESKREEAINLLGADNFVISSDTQQMEALKNSLHFIVDTASGDHPFDPYLSLLKVGGVMTIVCFPSEIKMHPASLNRGGRTLSGSIVGGTKDIQEMVNFCAENKIYPEIEIIKMDYINEALARLVNRDRAPAPPKPPAASYQVSTEARSPHRSNASLLFAVVFLGPPLPYWLFYLFNARDIHWSCDPNCWCSFTCHNPWWFSINSMSDDGMASAAVEPPKREQNFLVKVGMEAWTQSFAVAHKVRLVHILKNLHTSEVKIYSDASKEFIGVLDGESGGEVLQEYVQQSPQLGELLEAWRLHRENPGMAHILLLFAAVLGHPDGKLRRHGSVKKSLDGVARMILEDKEKMGDVYLELNSGEFRRQNAALDLLAAIVRRGGGLASEVAERFDFKIPILPQLAGTMKKKGSRDGRNRRKGADFGSTRRSFIGFAMSFLEVGNPRLLRWVLQQKEVYSGVLRGIGNDDAETVIYVLSTLRDNVLVDESLVPPGLRSVLFGSVTLEQLSLISGNLESGEAADIAHEVLVMYAHAGQVIICRFSAISLAADVIASAKCNSIVQTLSSSSHGLVSVDDEEVQVVLKCMVPNVCSRAMINRGLLHSDDLVKHGSLRLVFESVNLLCYITESINCMVSKGRLKSEFIGSEKVTMKIDGFPVLSCSDATDASLVDEVHQGDEMQVKRWTSLREYIQDEVHGAMPDPQVFLKLLSSTSQKHQSYSQSIQKNNAQLSEPPQKKRRCSPSCEVDDIIIGGIDVEQDKDASEEQGLELKNDRTTTLCEIWSLDKQDPKTKDANVVENVFHSKLLDVLRLYLGVMPSSFDGSYDFFKIIPPNPLDLSMDEQQSLLSFLLEYSGQSRGCLDPERVPESMYKYLQPLVYIMLHSQIKNIRDQAYILVKAAMASSGAFDHNFTEIDAWLVFLPGYEAK

SEQ ID NO: 71571 - protein, 188 aa, Zea mays
  Coding DNA Sequence Number=SeqID_29792
  Gene Ontology: Mol. function=sequence-specific DNA binding; Cellular component=nucleus; Biological process=regulation of transcription, DNA-dependent
  Homolog annotation: Hit_ID=Q6H6J2; Match level="QueryCoverage=77%, HitCoverage=28%, E-value=1e-53, Identity=71%"; Hit description =Putative homeobox protein
  Subcellular localization annotation: CTP_CleavageSite=53; ConfidenceScore=5.11e-01
MALHFTAVVVRSRWTSNQCLDKIQSTTAKFNTLMHSPPGGGGICAPFAHRAVSAMYRGLRRWLAGEIMATASRASCWGESSSSVTVAAGGDVEQSWESAFIQKHWSAQQLWRTEQQCWRPQCGLPEKSVAVLKAWMFENFLHPYPKDHEKDVLAARSSLTRNQAQIEIPPDSFQIRFFFGEMGFRIGS

SEQ ID NO: 71572 - protein, 457 aa, Zea mays
  Coding DNA Sequence Number=SeqID_29793
  Gene Ontology: Mol. function=oxidoreductase activity
  Homolog annotation: Hit_ID=Q9LXZ4; Match level="QueryCoverage=97%, HitCoverage=74%, E-value=2e-40, Identity=61%"; Hit description =Quinone reductase-like protein
  Pfam annotation: Domain name=ADH_N; Domain location=38-119; Score =56.8; E_value=6.9e-14; Accession=PF08240.2; Description=Alcohol dehydrogenase GroES-like domain
  Pfam annotation: Domain name=ADH_zinc_N; Domain location=339-457; Score=38.8; E_value=1.9e-08; Accession=PF00107.16; Description=Zinc -binding dehydrogenase
  Pfam module annotation: Pfam domain module=ADH_N::ADH_zinc_N; Domain location=38-119::339-457
MEALVVRQLGDPTLPPGGEASPFAAVSGDHPVPEISSPTAVRVRVAATSLNFATFLQVQGKYQERPPLPFVPGSDYSGVVDAVGPGVRGLRPGDRVCSFTGLGSFADFIVAEEKQLLSPKMLLKLKDIIKPFLQAFLSIWLWSWLLKESKYLVDYMLSGMIISGTQIIPKNAFKTQGHHQESDCRADCGKDLSIVGLHAARKGSVLTSGRLLPRPSPALPSISVTEDVPDVIRYSGANTPLRSFSPYLALCQPLWYERPLARGAQEHDRALGFSLDSLAGNKQAQVNNKVQDHAVYRAQRNPFTVFLVPDGCDLVTAGALPVAFGTSHLALVHRAQLKAGQVLLVLGAAGGVGASAVQIGKVCGAVVIAVARGAEKSDYLKSIGADHVIDSSKDNVIESAKSFLKARGLKGVDVLYDPVGGKLTQDSLKLLNWGAQILVIGFASGDVSSYSSEYCSC

SEQ ID NO: 71573 - protein, 174 aa, Zea mays
  Coding DNA Sequence Number=SeqID_29794
  Homolog annotation: Hit_ID=Q2R0V3; Match level="QueryCoverage=26%, HitCoverage=12%, E-value=1e-08, Identity=65%"; Hit description =BTB/POZ domain containing protein
  Subcellular localization annotation: CTP_CleavageSite=32; ConfidenceScore=5.11e-01
MESSMSSFLTRDASFSLIGPKSSALNTANLAASSHRWAGNNCLPTTKVPEHGRLPNDDGAHVVDAETTIRTHLPVKRSLPLRNNVLNWLDLGIKVCSVLSFFHTLLSLLKAVKLNPTLTRSYPCPPLRGFKKADTFICMRRRDPFWVEKDAPVVVANAKVPRVDALAGAHAFEQ

SEQ ID NO: 71574 - protein, 268 aa, Zea mays
  Coding DNA Sequence Number=SeqID_29795
  Homolog annotation: Hit_ID=Q6QP54; Match level="QueryCoverage=48%, HitCoverage=45%, E-value=3e-11, Identity=42%"; Hit description =Putative kinase
MKYTQDFLKRFGMKDAKPTKTPMGTDGHLDLNKGEGQRRLRHSDCSATRQSESDRQSGLAKGATANSAPPDPRARTRAKTRKTANSAPPDPRARTRAKTRKTANSAQPDPRARTRAKTRKTANYAPPDPRARTRAKTRKTANSAPPDPRARTRAKTRKTANSAPPDPRARTRAKTRKTTKLRLARPQGLDSALASAERLPPRPTPWLGLGHGNRRQTQPRLRRKPHVALPRAQTATSTGGAIIILPRIDSGHGEQDRRLIRPAPPEGQ

SEQ ID NO: 71575 - protein, 93 aa, Zea mays
  Coding DNA Sequence Number=SeqID_29796
MSGDHTKREIVTGEKATSSGRTLSRESGNKNKEESSSSTKSLRSGDKKKKMKNVVYYETDSSSPSRRLSKRPPVQVTPKDAKSVIKGDKREQK

SEQ ID NO: 71576 - protein, 165 aa, Zea mays
  Coding DNA Sequence Number=SeqID_29797
MAAIITSTRVGCVIITVFILFFLFDLIGVIITMTASSRRFTALSRRCTAGCSGDIVQGCVDCRSAAIRVGSPHPARVLRSPVRWARTTLSLNLLPEGTLSDFRERQAAAALQGPDAYIHRQHGCIAVITPAAEQTGMAAWAASISVKKYVTFQMKSILSRYTNGK

SEQ ID NO: 71577 - protein, 352 aa, Zea mays
  Coding DNA Sequence Number=SeqID_29798
  Gene Ontology: Mol. function=DNA-directed RNA polymerase activity; Cellular component=mitochondrion; Biological process=electron transport
MEVVNGLISSRLITDWLQETALEQLSTISSYLSVLINNAKLLKGNVHLLTSALSVITSTMRLSMKRKIYQPHFTLSLHGVFNLCQTIGGSSRSTEHKLVMELGIDAILMNGPIPILSEMDKSRISMVVSWATSSIFWLYSNQRSLLEISCKEPPRNESLLSKILRLLAASVILGKISSIFHGKSVDLAGNTSETLCSFLDNAYERAETAKSCSVNDTLAVIILHLQDHMPKNSDSLPSVIAALCLLLLDRSMNKHLANNRGKIEMLCSKIGCPAESNPAWRWHYYQPWKDSALQRTGMERLEEEQACRSLLVLFSSAFSACLSEFPVLSLDDVEKSGLFQWERDLMAKQSST

SEQ ID NO: 71578 - protein, 623 aa, Zea mays
  Coding DNA Sequence Number=SeqID_29799
  Gene Ontology: Mol. function=N-acetyltransferase activity; Biological process=metabolic process
  Homolog annotation: Hit_ID=Q6ZA58; Match level="QueryCoverage=83%, HitCoverage=35%, E-value=1e-127, Identity=51%"; Hit description=PHD finger transcription factor-like
MGRLLHGEGTGSGGSHSGQVSFAKRGDPPPDDEHEKQQAKPIPFPSASSRSSPNPPRSPKPYPPAPQARNTTLPPPPSRSRNPGRGSEAVAASKPRKRQLVMESSDSEADEFCSSTRQNASGAASLGNAGVSSQGSGDRSEEKPVTSSPEKLPGVKSSDVDGSDKKTGVQLESSSSQPAVKRIRVETVHGDGNGCSGGASKCGTGGKMLPRGLPAWRFERPEVRGGRVLDDKGGVSMKASSASKMKEQVSSLGDKRQAELQKHERRTPLKTDQGKAIDSGQQEVLRLQGKRGVLRILPKNDKVTRDTGDGKILSRQTEVDEETGNGRIPTKRGVLKLLPKNNGAVMESNECKLLSKKVKVDEETGDDKMPMKKTKVVDKETSDGKILAITTNLDAEFGGHKLPMKNCTVDMETVAGKFQQKNSKADGETKGRYKGYEEKSGAPAEFQKHDANGEKRVLGKLLSPVALRKSDPSVVGVSLGQRMKQQNSKQQLKNYSLSLKDDSTKSSEQKNLKKRLLEHKGSSESLSKKAQLKAVDQQATSGPVLNKLEKKPRGGPLNKHKQDLRNKIKHVLLDNGWKIDLRQRKNKDYEDSVYVSPTGTGYWSITKAYAVFPRTVSKYGSLI

SEQ ID NO: 71579 - protein, 72 aa, Zea mays
  Coding DNA Sequence Number=SeqID_29800
MARSLLRMRTQPPRHATERRSWKKPPPDPAASAPQAVAQGEIAPGRAGSAVRNKEMGRPTGNSAQVRYGYGK

SEQ ID NO: 71580 - protein, 113 aa, Zea mays
  Coding DNA Sequence Number=SeqID_29801
KSEQAQKAHRTVHRTCPVAPLSESPTVGTQRPGDVAGAPDCPREEEELGRGREMDATVTRRGKAKGKEIERHRSRSDVEEPGGLAAVVAMRLRARAHVPVRRLEGQGRVGPTR

SEQ ID NO: 71581 - protein, 143 aa, Zea mays
  Coding DNA Sequence Number=SeqID_29802
  Subcellular localization annotation: CTP_CleavageSite=64; ConfidenceScore=5.48e-01
MRRPARGPLLSALSSPRSSGFSFLFGIGNEISATNSGVYNTRASRPRSSTPESQSQNQKIPGLVCAGVWAPGQWMAVGGNGTAGCAGHASGQRWGAEVTGVVARWEEEGPVAVYREINDGGPGWIPPRCIWVVAWLGRGKDRE

SEQ ID NO: 71582 - protein, 137 aa, Zea mays
  Coding DNA Sequence Number=SeqID_29803
  Subcellular localization annotation: CTP_CleavageSite=37; ConfidenceScore=5.35e-01
MSGAPEDSSANSSSSGKSRGNSTIIHRTVRCTPDSVRCSKEERPQELASFEKLQRLLRYNSPDMSGVHRTVRCNCGATATSGANGYLRHIYWAPARAEVRHAHAGAPDTLQYMSGAPPDIQAGPEDRAPTIGTQRLW

SEQ ID NO: 71583 - protein, 191 aa, Zea mays
  Coding DNA Sequence Number=SeqID_29804
  Gene Ontology: Mol. function=metal ion binding; Cellular component =integral to membrane; Biological process=ubiquitin cycle
  Homolog annotation: Hit_ID=Q6ESZ8; Match level="QueryCoverage=90%, HitCoverage=81%, E-value=4e-15, Identity=30%"; Hit description =Putative RING-H2 zinc finger protein
  Pfam annotation: Domain name=zf-C3HC4; Domain location=123-165; Score= 41.4; E_value=3.1e-09; Accession=PF00097.15; Description=Zinc finger, C3HC4 type (RING finger)
  Subcellular localization annotation: CTP_CleavageSite=57; ConfidenceScore=5.10e-01
MRGARVLLAGAPQPLASDPSLDAPQRAQLERAIGATTTVLFVATVSYVALSAIFSCLCSGGGSSRRRQQPDGGDTRPQLPSAAAEETKRALEEIPVVVVVAQDPAGSGGGAGAEDGSEEPGECAVCLAEYAGGEEVRVLPACRHGFHRACVDRWLLTRAPTCPVCRAPVAAHAEPPDAKDRSTGDVDAAFP

SEQ ID NO: 71584 - protein, 66 aa, Zea mays
  Coding DNA Sequence Number=SeqID_29805
  Subcellular localization annotation: CTP_CleavageSite=54; ConfidenceScore=5.05e-01
MAFLTILLLARISSSIAISSNYISRSAEQQGAQPFLTSPSGSYAAYLRRAVTAPAASGGGRRAYGP

SEQ ID NO: 71585 - protein, 90 aa, Zea mays
  Coding DNA Sequence Number=SeqID_29806
  Gene Ontology: Mol. function=endonuclease activity; Biological process=DNA repair
  Homolog annotation: Hit_ID=Q69JZ1; Match level="QueryCoverage=83%, HitCoverage=12%, E-value=1e-26, Identity=76%"; Hit description=AP endonuclease 2-like
  Pfam annotation: Domain name=zf-GRF; Domain location=45-80; Score =2.4; E_value=0.015; Accession=PF06839.3; Description=GRF zinc finger
MQCTTSAAKVQDNTDASSCSLSTDKSNAAALEWQRIQKKMKMTLPRCKGHSEPCIPRSVKKGPNIGRLFYVCARAQCTRKGERGVAPDVI

SEQ ID NO: 71586 - protein, 80 aa, Zea mays
  Coding DNA Sequence Number=SeqID_29807
  Gene Ontology: Mol. function=protein transporter activity; Cellular component=nuclear pore; Biological process=intracellular protein transport
  Homolog annotation: Hit_ID=Q71VM4; Match level="QueryCoverage=83%, HitCoverage=13%, E-value=3e-17, Identity=69%"; Hit description =Importin alpha-1a subunit
  Pfam annotation: Domain name=IBB; Domain location=4-71; Score=47.7; E_ value=3.8e-11; Accession=PF01749.10; Description=Importin beta binding domain
MSLRPSERVEVRRNRYKVAVDAEEGRRRREDNMVEIRKSRREESLLKRRREGLQAQVPAPPSGVEKKIYQEFYYFMLVIS

SEQ ID NO: 71587 - protein, 141 aa, Zea mays
  Coding DNA Sequence Number=SeqID_29808
MAGAWMGDSLAGLGGLAKAGEQGHGRATAAGWLSEGAATRVAPWLGHGRRGLAMAGARPPCSVSLPRKEDGIARRDAVGACGAQRLGDRPQRRLPRRKENEEGCARLLTSRHSLTERARGCLLVKLRHAVLNDGLADDNLR

SEQ ID NO: 71588 - protein, 570 aa, Zea mays
  Coding DNA Sequence Number=SeqID_29809
  Gene Ontology: Mol. function=single-stranded DNA binding; Cellular component=nucleus; Biological process=pollen development
  Homolog annotation: Hit_ID=Q64MA3; Match level="QueryCoverage=99%, HitCoverage=89%, E-value=0.0, Identity=71%"; Hit description =Putative single-strand DNA endonuclease-1
  Pfam annotation: Domain name=XPG_I; Domain location=69-159; Score =78.6; E_value=2e-20; Accession=PF00867.9; Description=XPG I-region
  Subcellular localization annotation: CTP_CleavageSite=46; ConfidenceScore=5.28e-01
MGVFPVFVVDGEPSPLKSQARAARFFRGSGMDLAAFPSTEAESSVTAAPVKRRNAAFTRCVEECVELLEYLGMPVLRAKGEAEALCAQLNNEGHVGACITADSDAFLFGAKTVVKVLRSNCKEPFECYHIADIESGLGLKRKQLVAMALLIGSDHDLHGVPGFGLETALRFVQLFDEDEILDKLHEIGKGVYPFLKGFDNPHIDDLPSSSKKSPIKSPHCSHCGHPGSKKNHIKDGCNYCLVDSLENCVERPAGFKCECPSCDEARDLNEQRRHENWQIKVCKRIAAETNFPNEEIIKLYLSDNNLVEEKGVPLLSWSKPDVEALVDLLSYKQNWEPSYIRQRMLPMLSTIYLREVASSSSTPLPLCDQYEFDSIERTKIRHGHPYYLVKWKRATRGMNSNMPSKKPVTEGETSSEVVVLDDDDNEDTVVCESPELLDEPDVPQVLMDDGCCFLLTDEDIQLVGAAFPKETARFQEEQRLKEARSRSRKSKTSLADSGCETPKGPRPSGVQLSITEFYRSKKGQDMESGKKKQAGEGHAAARDGSRKSSDRDLNNKSLPKSVRRRLLFDC

SEQ ID NO: 71589 - protein, 181 aa, Zea mays
  Coding DNA Sequence Number=SeqID_29810
  Homolog annotation: Hit_ID=Q7XIK7; Match level="QueryCoverage=34%, HitCoverage=5%, E-value=2e-10, Identity=57%"; Hit description =Putative guanine nucleotide-exchange protein GEP2
ALKPSQYRTEDSFARRQLLDNHYRMIAVVLKSSLVPLASFIISCLLLIALEDFGLLCLVSILNSSTDWEQLQRYSLKQGSIVESHEEDASRRVTTDETESQEDGQDQFERAKTQNMETAISEVFEQVILLLSAMLNFASRSGGQFSRTIRLLNDGVRQVFDKMQWLLLLNIDSVLESCSAP

SEQ ID NO: 71590 - protein, 231 aa, Zea mays
  Coding DNA Sequence Number=SeqID_29811
  Homolog annotation: Hit_ID=Q94JG1; Match level="QueryCoverage=38%, HitCoverage=17%, E-value=3e-08, Identity=37%"; Hit description =Membrane transporter-like
PRPCPRSPHPRDAHACPARLQSFHHAHNSGTVPLPRSIHPPHPREAHPCARPIPTIWQCRRHVPTYAPYPACDALPPPPRAPPRNHPTAEATPEQGAGYRVISWSPLADRAQSRKGRTMTGSERCRLLVSMDLRPLTLLVVMGSLPTTLVGRLEMGPTCDLFDPRDASGFTNLLAALTVVIIAVTASSPVGFIVLRFVAGLSLANFVANQHWMSGIFAPSVIGLANAVTTG

SEQ ID NO: 71591 - protein, 64 aa, Zea mays
  Coding DNA Sequence Number=SeqID_29812
MAHRLSVQCLTDPDYHRAVTALVPTITEMGDHVLGRVRDKVCGQVHSDNASPGIVVYKPSSFRY

SEQ ID NO: 71592 - protein, 76 aa, Zea mays
  Coding DNA Sequence Number=SeqID_29813
  Subcellular localization annotation: CTP_CleavageSite=47; ConfidenceScore=5.14e-01
MVVTVRVVEAGSSAVQKRRFVRLPGNSDSVRSKQAGVLVVLGRSGKRQAQVVSGHCGDAFAARGSGAGASQLLPAL

SEQ ID NO: 71593 - protein, 48 aa, Zea mays
  Coding DNA Sequence Number=SeqID_29814
MAPCRGSSASSAMARLVQPLATAGRGAGGGARGKGRNGKELGQRPSRE

SEQ ID NO: 71594 - protein, 136 aa, Zea mays
  Coding DNA Sequence Number=SeqID_29815
MGGVALARGRELTGDEAVSGYKGELGHIAMNCPSKKKKKKDGEDKKKKRLYHKKKDVKAYLVEWDSDASSDDDDDDDSSSKLNVGIAIKEAPSLFSSPHCLMAKGDAKVKIIDDINDIDDDDEVDDLDDDGYSFMI

SEQ ID NO: 71595 - protein, 173 aa, Zea mays
  Coding DNA Sequence Number=SeqID_29816
  Homolog annotation: Hit_ID=Q1SLU4; Match level="QueryCoverage=39%, HitCoverage=24%, E-value=1e-06, Identity=38%"; Hit description=RNA -directed DNA polymerase
VRERKTRDFNQVNRIKDEMEHLLVKEDEIKHIRQEIQESEVREALESMKVGKTMGTDGISILTWRCLGDIAIIETTSYADAIQFYADMNIQSPPSIYPPKRYCDLTGFEGGKVPGGLSHFWMEMRVQLAPRNLTGRVVPIGLRALGARVQACEKREVDGVGELPGEVGRPWGQ

SEQ ID NO: 71596 - protein, 148 aa, Zea mays
  Coding DNA Sequence Number=SeqID_29817
  Subcellular localization annotation: CTP_CleavageSite=33; ConfidenceScore=5.04e-01
MCLPCAPAAAIPTGPTAVATQPAARTLGQGQLLASALQQADQAKRTCLWPPILQRRGFVLEDAKGLSLNGDLNVHPVIARSFPLHTQSFWCGFIALGVKVVHQYGNLSISAAYFKCKLRWYRLQAHLFKQQLPMFKSSQDAKRIGPRQ

SEQ ID NO: 71597 - protein, 67 aa, Zea mays
  Coding DNA Sequence Number=SeqID_29818
MAEVDPQRRKTPGEQLMALGSGSPHDNLSDDTPTHRRPPWFPTPRKNNNYEQPRWRRFTPSWAVSGG

SEQ ID NO: 71598 - protein, 88 aa, Zea mays
  Coding DNA Sequence Number=SeqID_29819
MEDIECLHRKAIVGFPEPNEAGAVEEMSELGEPVGEFQLIAVFRGVLADQHGFNGRRGQLPSGTKQSHSRDTRPRLIRRITLDKLYLR

SEQ ID NO: 71599 - protein, 315 aa, Zea mays
  Coding DNA Sequence Number=SeqID_29820
  Gene Ontology: Mol. function=DNA binding; Cellular component=nucleus
METENVQAIPEGNQAPKNELSNSNNGSPAMEISPNSVPDNSRLTVSDQMATAFVTVESPDAISKVAASRIVCSLPYISNEILKEAQTLEKAAPYSAVKSASLNENEVDPIHAYAAKAVTEHPDQNENLVPVNADEMADEGLNEILPDDKDDKKDCQLEVSSGPVILNDSSTPVYPEFSNFFYAKDGTEVSNNAVDSKNNAEQHAFSNQGKGNMEECKDSDGNNASESSVAQKLVSVIVLPASDTGDFRPQKYDWEALYRRSEKHLPEARYEKVDLMHTNEVLTWDYDFANHLTRLCGLAKCSSNEFLLVGAVKVA

SEQ ID NO: 71600 - protein, 122 aa, Zea mays
  Coding DNA Sequence Number=SeqID_29821
MPELLPSHVGGMDGGKDFCPTVADHRGVVAVHPGDGGRPCSWQQPVLMLVWWHPGMAWENPSMQLSLETGLQSNRCPWPYDMALRIKERLSPSVPTVKADLAAYGVIHQRMSLASIAFQSRA

SEQ ID NO: 71601 - protein, 52 aa, Zea mays
  Coding DNA Sequence Number=SeqID_29822
MAPKRKRQIQSLAPCRNWGSAAEGVVFLENLARVTVPTEDTHEAIVFVPFLT

SEQ ID NO: 71602 - protein, 93 aa, Zea mays
  Coding DNA Sequence Number=SeqID_29823
MGVGANWCTTSTPARNDASVDNRPDLNVLSAFILVTTNETLVHKLGLKIPQIAKELLGITTSHTLGEDAVGAIFDHRGQKAKCNKESDEGSGT

SEQ ID NO: 71603 - protein, 396 aa, Zea mays
  Coding DNA Sequence Number=SeqID_29824
  Gene Ontology: Mol. function=oxidoreductase activity; Cellular component=intracellular; Biological process=lignin catabolic process
  Homolog annotation: Hit_ID=Q4VDN6; Match level="QueryCoverage=58%, HitCoverage=39%, E-value=6e-86, Identity=65%"; Hit description =Ascorbate oxidase
  Pfam annotation: Domain name=Cu-oxidase; Domain location=186-337; Score=43.2; E_value=8.8e-10; Accession=PF00394.12; Description =Multicopper oxidase
  Pfam annotation: Domain name=Cu-oxidase_2; Domain location=61-170; Score=-0.0; E_value=0.00066; Accession=PF07731.4; Description =Multicopper oxidase
  Pfam annotation: Domain name=Cu-oxidase_3; Domain location=54-171; Score=195.1; E_value=1.7e-55; Accession=PF07732.5; Description =Multicopper oxidase
  Pfam module annotation: Pfam domain module=Cu-oxidase::Cu-oxidase _2::Cu-oxidase_3; Domain location=186-337::61-170::54-171
PLADKFDRAARLLAAIRPTMALLPGAARRLLCSLFLCLWLSTLARAATRRYEWEVSYQFKSPDCVRKLSATINGQTPGPTIRATQGDTVEVKVRNSLLTENLAIHWHGIRQIGTPWADGTEGVTQCPILPGDTLTYAFVVDRPGTYMYHAHYGMQRSAGLYGVVVVVVAAAPGAKADDAEPFAYDDEHHVLLNDWWHNSTYELAVGLASVPMVWVGEPHSLLINGRGRFNCSAAAVPGTCNATSPECDTPVFAVVPGQTYRFRIASVTSLSALNFEIEGLMKGQMAFCPFAFRVIVAVVVRLLVTLDLLFSVSSLSVPPTELFDGSQVHGMSRSVGHEPWMVAADQAVTLPPVGLLRLGSLSFSLSLMSRGGAADGGDLLQPPSPGHHWSTYIPFE

SEQ ID NO: 71604 - protein, 44 aa, Zea mays
  Coding DNA Sequence Number=SeqID_29825
MVGGKSGEGKPDKKSRSDKRMHPPTPLSDDFGDSKYSEERFSSE

SEQ ID NO: 71605 - protein, 110 aa, Zea mays
  Coding DNA Sequence Number=SeqID_29826
MKLPVIAYAENKWLIMFFEGLRKRKAPNRGAKSTLQASEEILVVPIAEVPVMPKEIPSVGTKGAKIEDAFDLIAQNVVPLRPLLESEEDEEKRIAPVMSSFFDIDDMEFE

SEQ ID NO: 71606 - protein, 112 aa, Zea mays
  Coding DNA Sequence Number=SeqID_29827
MWDTGSALKKDILPNQGMMKGYHPYHLQQDDWDSLVWEDHQRSWLSPVRCLGLHRMRASLLPSIPKPALPLKLTLIAFFHLQTSLSQLKGGDDFVPKPKEDKVIVLRSNESS

SEQ ID NO: 71607 - protein, 64 aa, Zea mays
  Coding DNA Sequence Number=SeqID_29828
MADTATCHVTWSGLKNINPVLEASHPWREPERGLYFYEKILKNVSHTDILKAMSAKNIRIAERS

SEQ ID NO: 71608 - protein, 102 aa, Zea mays
  Coding DNA Sequence Number=SeqID_29829
MTGDIVSDKIILLREASPSPEYGAASVFSFDVVLRPSRVESAIPAAAVRLSRVASPTFGGVGARRSDAHIKLTTAELKSESGAWGRRLGRRDMHFYTDAFGK

SEQ ID NO: 71609 - protein, 156 aa, Zea mays
  Coding DNA Sequence Number=SeqID_29830
  Gene Ontology: Mol. function=kinase activity; Cellular component =ornithine carbamoyltransferase complex; Biological process=amino acid metabolic process
  Homolog annotation: Hit_ID=Q6QP54; Match level="QueryCoverage=57%, HitCoverage=29%, E-value=2e-17, Identity=77%"; Hit description =Putative kinase
MAPPVDVAGLRPRLGDVEAPPKPRSSLSSVAEVESEPLPESEPWVGRSGVRRLPGLSPSPSPGVGRSGVRRLLGLSPSLSPGSGGAEFVVFRDLARVRALGRAKRSFLWCLRPGLTACQPHSVKWHRSRSGAGGAVFLSGRSVERRSDSGHFGSVG

SEQ ID NO: 71610 - protein, 618 aa, Zea mays
  Coding DNA Sequence Number=SeqID_29831
  Gene Ontology: Mol. function=identical protein binding; Cellular component=cell wall; Biological process=negative regulation of enzyme activity
  Homolog annotation: Hit_ID=Q948Q4; Match level="QueryCoverage=99%, HitCoverage=83%, E-value=1e-111, Identity=46%"; Hit description =Subtilisin-like serine protease
  Pfam annotation: Domain name=PA; Domain location=270-386; Score=49.1; E_value=1.5e-11; Accession=PF02225.12; Description=PA domain
  Pfam annotation: Domain name=Peptidase_S8; Domain location=17-466; Score=4.6; E_value=5e-07; Accession=PF00082.12; Description =Subtilase family
  Pfam module annotation: Pfam domain module=PA::Peptidase_S8; Domain location=270-386::17-466
MTTYTPRLLGLPDGVWRPRRGGKGEEDDGAGVVVGVVDSGVDPEHPSFAYAPRPRAAPADPRGDDGGPFAGARGCVVGPRFPPGSCNGKIVTARYFAAGAAAVLPLDPSRDLSPFDAEGHGSHVASIAAGNRGVPVVVGGAMYGFASGMAPSARLAVYKAVYPAGGTMADLIAAIDQAMEDKVDVLVLSIGPDERPASEVTFLSMLDVALLSARRAGVFVAQAAGNSGPAESSVVSYSPWVTTVAAATTGRSYTSWLVLGDGRRIPGLGLSAPTIQSRLVAAKDAAVPDAASMEHAEECQHAEALSFRTDVLRGSIVVCSFSRGFYNGTSTLSAIRDVAQALGFAGFVLVADAQHGGDFLAQPLPFSVPGVMVPRVADAMVLWSYYAAHTVYGGSATVFGATAAITEGRVAAFTDAAPVVARYSSRGPDVIDRESTPADVLKPDILAPGDQIGSLHTGTPFHYGAGFVNPAGALDPGLVVAPEPDDYTSFLCSLPQLSPDDVLAATGLACQTPLASPVDLNLPSVTVSALRGSLFVRRRVTNVASNAETYLCSTLPPAGVSVTVRPAWFEVAPGETQEVVIELRVTRASNAFSFGEILLAGSLDHLVRLPLAVRPLAT

SEQ ID NO: 71611 - protein, 120 aa, Zea mays
  Coding DNA Sequence Number=SeqID_29832
  Gene Ontology: Cellular component=extracellular region; Biological process=cellulose and pectin-containing cell wall organization and biogenesis
  Homolog annotation: Hit_ID=Q94KT5; Match level="QueryCoverage=99%, HitCoverage=47%, E-value=3e-56, Identity=87%"; Hit description=Alpha- expansin 3 precursor
  Pfam annotation: Domain name=Pollen_allerg_1; Domain location=27-104; Score=161.1; E_value=2.9e-45; Accession=PF01357.11; Description =Pollen allergen
MAEPAWLKIGHLPRRHRARQLPKKGGVRFSINGRDYFELVLISNVGGCGSIQSASIKGSRTGWMAMSRNWGVNWQSNAYLNGQSLSFQVTSSDGQTKTFPDVAPASWGFGQTFATSQQFS

SEQ ID NO: 71612 - protein, 94 aa, Zea mays
  Coding DNA Sequence Number=SeqID_29833
MSGEPAEQRSLRVNDHAKREIVTGDKPTGSRRTLSRESDNKYKDESSSSIKSLRKGDKKKKKMKKVVYYETDSSSPSTSGAESTTSKRHERTKY

SEQ ID NO: 71613 - protein, 720 aa, Zea mays
  Coding DNA Sequence Number=SeqID_29834
  Gene Ontology: Mol. function=identical protein binding; Cellular component=cytoplasm; Biological process=negative regulation of enzyme activity
  Homolog annotation: Hit_ID=O65836; Match level="QueryCoverage=86%, HitCoverage=90%, E-value=1e-127, Identity=40%"; Hit description=P69F protein
  Pfam annotation: Domain name=PA; Domain location=326-417; Score=46.1; E_value=1.2e-10; Accession=PF02225.12; Description=PA domain
  Pfam annotation: Domain name=Peptidase_S8; Domain location=101-554; Score=2.7; E_value=6.3e-07; Accession=PF00082.12; Description =Subtilase family
  Pfam module annotation: Pfam domain module=PA::Peptidase_S8; Domain location=326-417::101-554
MPIQTPFLLLFLLTTTVAILLCPAATVGDDIATTGAAGDAVGTYLVVVCRANGPKEGGEKLREWHASLLASLLNTSTTTILEEARSPEGGQLVYSYQHVISGFAARLTTGMWAAARSMGEGIIVGVLDNGIDPRHASYSDEGMPPPPAKWRGSCEFGGAPCNKKLIGGQSLTPGEHGTHTSSTAVGAFVSDVQMFRAKVGAASGMAPRAHLAFYEVCFEDTCPSTKQLIAIEQGAFMDSVDVISISAGDDTQKPFYQDLTAVGSFSAVTSGVFVSTSAGNAGPDYGTVTNCAPWVLTVAASTMTRRVVSRIRLGNGLVIQGEAGRRYKGLKPAPLIYVQGVFEDGALNTVDVRGKIVFCDRSETATMRGEMVRAAGGVGIIMFNDASEGGVTRFLGNVSIAAARVSEADGAKIMSYINSTANPTANLHFTGVMLDPSYQPAIAEYSSRGPCNMSNLGVIKPDITGPGTSIIAAVPGAGGGNGSAPSHTFGLLSGTSMAAPHLSGIAAVLKRARPAWSPSAIKSAMMTTADVTHPDGTPITDQITGKPAGPLLMGSGIVNPTKALDPGLIYDLSALDYTTYICGLGYNDNFVNEIIAQPLQNVSCATVSKIESKDLNYPSFLVTLTAAAPVVEVRRTVTNVGEAVSAYTAEVVAPKSVAVEVVPPRLEFGSVNQKMDFRVRFSRVGAAADGGTAEGSLRWVSGKYSVRSPILVLDGTQNLV

SEQ ID NO: 71614 - protein, 119 aa, Zea mays
  Coding DNA Sequence Number=SeqID_29835
MRPRPAATWPGIAARGSVQLCIEKGEEDRWSSPRCGHDNGRARMDGERVRDREAALSAAVPACKHSSGLIALAFRCSQPTDAILEDPLDLWVRTHTRFCCATLILLVDVDRIVFIGVSD

SEQ ID NO: 71615 - protein, 83 aa, Zea mays
  Coding DNA Sequence Number=SeqID_29836
MAGIAGIAHRSNLLAAELPTATWATVLAAGTAGSGRASGRAEHVLAVAGHSDGQLAGKVLAIAGLDSDAAGHWSGSLHYFNGR

SEQ ID NO: 71616 - protein, 58 aa, Zea mays
  Coding DNA Sequence Number=SeqID_29837
MTSLIIMILIDYEKDKHIEDETHRVFNGYRYFHGYGFRMAKLNGFLPVAINYVEIVED

SEQ ID NO: 71617 - protein, 99 aa, Zea mays
  Coding DNA Sequence Number=SeqID_29838
MEEGEGEPLGRVLPATVEQGQLFTARSNLAGTDKLRRAIIEASVHHFDRYGHDPIPRDVMKLQQTCVRLNRQCRRVPSATRESAAMARSVCGTHNSLLR

SEQ ID NO: 71618 - protein, 66 aa, Zea mays
  Coding DNA Sequence Number=SeqID_29839
MTGFKDHTDISQDNILRPIVESLSANEQQRYQDLMSQVMEDVCHQLAKVHEQEEEEFLSQFTVDHH

SEQ ID NO: 71619 - protein, 35 aa, Zea mays
  Coding DNA Sequence Number=SeqID_29840
TWNHQAVVLDSLKTKYLQSSHEHSPLYSRYSSPGL

SEQ ID NO: 71620 - protein, 61 aa, Zea mays
  Coding DNA Sequence Number=SeqID_29841
MAKHAHTPSRGPGHGNRVFAGNRESSNMGVEFGEMTAMAAPWALCATVCGVGEEGVEVMFC

SEQ ID NO: 71621 - protein, 564 aa, Zea mays
  Coding DNA Sequence Number=SeqID_29842
  Gene Ontology: Mol. function=DNA binding; Cellular component=nucleus; Biological process=regulation of transcription, DNA-dependent
  Homolog annotation: Hit_ID=Q9LGU7; Match level="QueryCoverage=78%, HitCoverage=47%, E-value=1e-137, Identity=57%"; Hit description =Putative squamosa promoter binding protein-like 1
  Pfam annotation: Domain name=SBP; Domain location=218-296; Score =147.4; E_value=3.7e-41; Accession=PF03110.5; Description=SBP domain
MSQVLGQHEPLDADVPNKVQPEPWPWRRCPNARQETGEMKKRRRWCGTRDVQTGRPARSGPGPVKPVIRANKEQQKKNKWGDRDREEGKAEEMEASFLRKDGGDQASAATMSGEHRNKGLDWDLNDWRWDANLFLATPAAIVPSECSSRKLSRAQGEIDFGVVVDKRRRLSPEEDGSAGCSNSGVADGDNNHVVPAQRGRSSEEETPRKGASSSTTPSCQVDGCHADLSGARDYHKRHKVCEAHTRTTVVCIKNVEHRFCQQCSRFQLLQEFDEGKKSCRSRLAQHNGRRRKVQPQTVVNGNSMSENQSLSNTSILLLKQLSRLESGSSSEPINHPNSLVNLLKNLAAIASTQSYQDILKNANSNSILSNAGNNAANGSTVHEQTIRSIPIRGESLAEEPPVKRRVHDFDLNDACFEEVETWMDQGITPDFLISLLLKHIPFTIGRAGKNPWCITGPRYESRTDKIVFKLFGKEPKDFPVDLREQIQHWLSHYPTDMESYIRPGCVILTIYLRLPNWMWDEKKLISISNDGLWRKGWLYARVQDCLTLSYNGSLIVLHSPLATG

SEQ ID NO: 71622 - protein, 75 aa, Zea mays
  Coding DNA Sequence Number=SeqID_29843
MGSPCQRAALRPRKQIIEAWAHPRSHTPSWSGVATSRVAKALPDRRIERTIAWSGKCGNGAVVLVFTGAATGMRS

SEQ ID NO: 71623 - protein, 113 aa, Zea mays
  Coding DNA Sequence Number=SeqID_29844
  Subcellular localization annotation: CTP_CleavageSite=36; ConfidenceScore=5.09e-01
MEANSSTLSTTLAATHPERGQFFYQRLMTENRPNSPAMTPVDPNSSMLLVTDVPPQVLLKNHVAGYLLKVEYMLRWWDPCILLQLPHCHFSLHTLLWYLSVKGSTNTPQLGTL

SEQ ID NO: 71624 - protein, 62 aa, Zea mays
  Coding DNA Sequence Number=SeqID_29845
MSHLKTCTEFLQNSQIVSIEEEKREYKIQRVYRTSQQFTTSTTSQELEGSSKIQREKGRDKR

SEQ ID NO: 71625 - protein, 76 aa, Zea mays
  Coding DNA Sequence Number=SeqID_29846
FDHQENELFECYEAKDPEHLFGEGKDTNDRRYIGSIYGFGYDDDNDVSSMRKWFTGKEEGIEVDPQEFHDFDEFED

SEQ ID NO: 71626 - protein, 51 aa, Zea mays
  Coding DNA Sequence Number=SeqID_29847
MVFLRPFSIEWIDAQVRDSVSHGCVRVYRHENTEKCNVLATMHLRPPKKVH

SEQ ID NO: 71627 - protein, 106 aa, Zea mays
  Coding DNA Sequence Number=SeqID_29848
MARGYRRMSGDEGLIQKGAQPWKERSRGALACCRKGRGVRGRELVTLAPWGSKSGMLAAGKVGRHDREMEHAICREDGRASSPPGENGGVVEMKQGVVLIFRKGRS

SEQ ID NO: 71628 - protein, 162 aa, Zea mays
  Coding DNA Sequence Number=SeqID_29849
  Subcellular localization annotation: CTP_CleavageSite=31; ConfidenceScore=5.08e-01
MGRGRGARVGLAVPTVSASILQVCPRRILVTQSTRRKLPPRDPSEEVEDSSNSEEWRGGEGDGTEDNDNSGKDDGKGGGNNDGKDGDDDSKGDDKGDSDGSGKGDGGDGKGKGYDDGDTGDGGKGDGGDSKGDSDGEGEDDRGDGGKGDGGDGKADNIMLLV

SEQ ID NO: 71629 - protein, 129 aa, Zea mays
  Coding DNA Sequence Number=SeqID_29850
MPATELPRASAESIATTCTRFNDGGFPRSHPVTPSLNKISMVLLVVCAEMDNGQVGYEVRRSYSGEVGRLVALTPIGGAGGGGGSDSSENLFLLISFIVEVIFLLDLRTISRGVRCHYPSWDNNCEYIG

SEQ ID NO: 71630 - protein, 58 aa, Zea mays
  Coding DNA Sequence Number=SeqID_29851
GNEIDGFGYDYGAAVTGGRGDRNKRPRPQKAEWDLMYQSPEGDLKDVFTGGSYSGGDN

SEQ ID NO: 71631 - protein, 228 aa, Zea mays
  Coding DNA Sequence Number=SeqID_29852
  Subcellular localization annotation: CTP_CleavageSite=68; ConfidenceScore=5.12e-01
MNSAWTVRAESEQRQKAHRTMNSACPVRHRTVRVVAADQVVTQPSVGLLQLGSLSPFPFPQTSSWRCDASRTAQEATEAKAEPLRTQLSDADGRVTGKAVALRFLSGFLASFLTLFVSSSSFGGKLRKLHHHLGQLLDNNGAHCTSLVERLDNALCRIRDIVDFDVHRGVVVALMMGEICSGRHLQYIIDPPPSLSNEGQEDLLEGYDEVASHVFLRVSAHDVVHDAR

SEQ ID NO: 71632 - protein, 388 aa, Zea mays
  Coding DNA Sequence Number=SeqID_29853
  Gene Ontology: Mol. function=RNA-directed DNA polymerase activity; Cellular component=nucleus; Biological process=RNA-dependent DNA replication
  Homolog annotation: Hit_ID=UPI00004C1732; Match level="QueryCoverage =99%, HitCoverage=36%, E-value=1e-123, Identity=75%"; Hit description= UPI00004C1732 related cluster
MPEPSTTEGRRIQGELKNLLEDAAVRRAESSASRRQGYTPEHRAATSRFMREASVHTGRMRDTAPAAPGRLGNEHHRRDRRAHLDEKVHRGYHPRRGGRYDSGEDRSPSPEPPGGDRGHLPKEQTASGRQPKNVPEASAQRSTKKKGKKKSQAKRDAADADLVAATEHKNPRKPPGGANVFDKMLKESCPYHQGPVKHTLEECIMLRRYFHKAGPPAEGGKAHDNDKKEGHKAEEFPEVHDCFMIYGGQVATASARHRKQERREVCSMKVVAPVYLDWSDKPITFDQGNHPDRVPSPGKYPLVVDPVIGNVKLTKVLMDGGSSLNIIYAETLGLLQIDLSAIRAGAAPFHGIIPGKRVQPLGQLDLPVCFGIPSNFRKETLTFEVVGF

SEQ ID NO: 71633 - protein, 189 aa, Zea mays
  Coding DNA Sequence Number=SeqID_29854
MGKPGPSLLMLLSCGVAEGIKSGGAAYWRQERSGGGLGEVRELLAVMSRGGSPTMMAEGGLVACAGAQARRRRVLRPAHDGRVQLNHTGSFTGDQRGCRRKESKGGSPCSSVYVRLWSDGVRRRQSGTSGDVVFGLRARGASLSSKKASRGIGWSGGGLEWLIHGGRGSGGRWHAMGRASSGELALRRG

SEQ ID NO: 71634 - protein, 46 aa, Zea mays
  Coding DNA Sequence Number=SeqID_29855
MGAILFLPKSKEPANGHAFPGRRKVEEPVCEADLWAQGGSLVLQIG

SEQ ID NO: 71635 - protein, 90 aa, Zea mays
  Coding DNA Sequence Number=SeqID_29856
MDGARRRHGGAGGSAARRDELGCRGYGGAREVSSDATSMEAGARAKAGAGARRRAEELGTAPGSSEQGGHRVEHAAIWGQGRRARHGGTR

SEQ ID NO: 71636 - protein, 192 aa, Zea mays
  Coding DNA Sequence Number=SeqID_29857
  Gene Ontology: Mol. function=exonuclease activity; Cellular component= intracellular
  Homolog annotation: Hit_ID=Q948H6; Match level="QueryCoverage=76%, HitCoverage=33%, E-value=2e-37, Identity=54%"; Hit description =Putative exonuclease
  Subcellular localization annotation: CTP_CleavageSite=36; ConfidenceScore=5.32e-01
MTRSRANGTASPDLPKPEANSPPDSSKRQRTVSPVDCVMPAEGLKVQFGVSTKFLDNAGRPKMSIVVEIPENLCKVLEFCDVLARKLSQESGSSSEWRPLIKKYGYINRPTIRLNIPPISNSDAVAFSTDICQREPSGNIQKLAFGNVGATELDSLFVKGSKVDAFFSLELYDYQQNAGIRLVAKRLVIHSN

SEQ ID NO: 71637 - protein, 74 aa, Zea mays
  Coding DNA Sequence Number=SeqID_29858
MDALPCPGHGRIPGGEVDSPLDRHRGHIDDKGARQWWWPLASFPRTGDSISRFPEMVPDLILWKGQSPSPRDKW

SEQ ID NO: 71638 - protein, 182 aa, Zea mays
  Coding DNA Sequence Number=SeqID_29859
  Gene Ontology: Mol. function=exonuclease activity; Cellular component= intracellular
  Homolog annotation: Hit_ID=Q109P8; Match level="QueryCoverage=89%, HitCoverage=60%, E-value=1e-68, Identity=81%"; Hit description =Exonuclease family protein, putative, expressed
  Pfam annotation: Domain name=Exonuc_X-T; Domain location=19-173; Score=63.7; E_value=5.9e-16; Accession=PF00929.14; Description =Exonuclease
MASASPSASASSEPAAAPERAGQGYALLEFGAILVCPRRLVEVASYATLVRPADPASAVSAASVRCNGITRDAVSAAPPFRDVADAVYDLLNGRVWAGHNIVRFDSARIREAFTEIGRSPPQPKGMIDTLPLLTQRFGRRAGDMKMASLANYFGLGKQRHRSLDDVRMNLEVLKYCATVLFL

SEQ ID NO: 71639 - protein, 157 aa, Zea mays
  Coding DNA Sequence Number=SeqID_29860
  Homolog annotation: Hit_ID=Q338D7; Match level="QueryCoverage=44%, HitCoverage=12%, E-value=2e-11, Identity=50%"; Hit description =Calmodulin-binding family protein, putative, expressed
MVTSPLSLFYVVWVPTDGSDCNSLDRWKLHKQCIKYLGPKEADVVQAEPSDSRHGWKRQGEQVDLCAQYMQDSLHRPEANGPKERSVDLTDVMVRKKEPNVSVLASQWSSSPDASAENYWCCFAGFSVLLQLSPSEGEEDGDFSLRGSYSQLVSLRG

SEQ ID NO: 71640 - protein, 241 aa, Zea mays
  Coding DNA Sequence Number=SeqID_29861
  Gene Ontology: Mol. function=galactose oxidase activity; Biological process=cell wall catabolic process
  Homolog annotation: Hit_ID=Q10NU0; Match level="QueryCoverage=92%, HitCoverage=39%, E-value=9e-79, Identity=66%"; Hit description =Glyoxal oxidase, putative, expressed
  Pfam annotation: Domain name=DUF1929; Domain location=120-224; Score =69.5; E_value=1.1e-17; Accession=PF09118.1; Description=Domain of unknown function (DUF1929)
MGDMVLLPNGAEVAIINGAAADGTAGWESAKTSAYAPVVYRPDHSPGDRFEEQNAAGVARLYHSSAVLLRDGRLLVGGSNPHTYYNFSNVQFPTDLSLEAFSPEYLDASNDMLRPRILDPSPTGAPATVGYGATMVIRFLVPALARRRRGGRAGCLGDVSVTMVAPSFTTHSFAMNQRLLFLDVTKNVAVRGRADTFSASVTMPATAVLGPPGYYMLFVVRDHIWSTATAATSTGPDRDHI

SEQ ID NO: 71641 - protein, 146 aa, Zea mays
  Coding DNA Sequence Number=SeqID_29862
MEAQAHVSCNRRVECFVHATAPPLAPPPRLLGCGTNTRLEATQQRQPGAAVSAAKNGPAVMTVAGRQAGAAVMSSAKLTSHPGQRENPLSRREDNAPVFRSSNGSRTRNGRPANHSPRRINSAGPGKGIPRKGSFPVKEPGSEPPY

SEQ ID NO: 71642 - protein, 125 aa, Zea mays
  Coding DNA Sequence Number=SeqID_29863
MAHRTVRCATGAPTVRHRCANGHFQRLVLTQSRWTHGAPDSEQSTVRCTPDSPVSPIHPSLGDFQLASEPVLHYESNQFEVMSGYHAKREIMTANKSRKLGDDSSQGNPATNTRMNPVPPIKSHR

SEQ ID NO: 71643 - protein, 661 aa, Zea mays
  Coding DNA Sequence Number=SeqID_29864
  Gene Ontology: Mol. function=kinase activity; Cellular component =proton-transporting two-sector ATPase complex; Biological process =ATP synthesis coupled proton transport
  Homolog annotation: Hit_ID=Q2QMG9; Match level="QueryCoverage=98%, HitCoverage=54%, E-value=0.0, Identity=48%"; Hit description =Expressed protein
EIISLKNAQRRLEEEVSRHVEDKKVLQHELSHLKDSKGDMDRKHFSIKEQIQEVNFNVESLQSLAQEVRDGNVELKETIKNHDGVKALYVDNLMLLERTLEKNAHLERSLSAATNEIEGLQEKKSALEESCKHLHSKVNGHQSERAMFVARIEGISHTVEKLSEKNVFLENLLSDKNTELELLRRKLKDSEESTHAFRNQNSVLRSEKRTLMREVDSINSALLSLETQYAELEGRYLDLEQDKDKALNEVIKLRDLLRLEKEKHKEATNSDMTKFSAIQKQIGLLLKEVHRREDQLQEEEHRIVEAQTEIFILQRCLGDMAEANADVLAQLQKQQVVCKDQEEKVDFLSQNNQQLTEGIGSVVEVLNLDEKYESLDLMKIDVVVQLLLHEIKCLLNTISDAQDVKQNQILEKSLVVTLLEHFGREVADLRSERSVLKQEWQAKSEELQQLQSEKHDLLKISCELRKEMEARNRKVDELKSEAKFLVRQLSELQESRQSLQAEIVKLIAENSSLSSKVYRSREKETSFDEDFSTLVDEAIRTDILGVIFRSLYEERTSQLQRLHEDFGSLHAAGNELYQEIKLMNKKLGDLQLENNYLEKELSRTLSICDGSGTEISSGRRRAMRRDTKLLKSGRKSQEGGQNMEQRKEVDNAGPREIERNA

SEQ ID NO: 71644 - protein, 153 aa, Zea mays
  Coding DNA Sequence Number=SeqID_29865
MAGDGHPTQQRLEPLKRQVLTNAWILAEINPTPSRALKPTSEEEFKEVGVRMLYAGRGGEGVGVPGGDARTGEDEGPRWAMEAVRRAGARDLGKNQGQSAVAVPEGGGRSEQRSRRTWAPLKSSAASRELLPRGKGSVVGEEWRGERGSRHDT

SEQ ID NO: 71645 - protein, 109 aa, Zea mays
  Coding DNA Sequence Number=SeqID_29866
  Subcellular localization annotation: CTP_CleavageSite=55; ConfidenceScore=5.06e-01
MNIKIEMSAILHSGGSASEAVWAAAPIAAQPANRLITSCKPSNSFSAQHQKTAARGSAVRASNGEFLQAAEGRGSRLNISEVSQIGEGCRRPPCAKQKQASSEGPKAIV

SEQ ID NO: 71646 - protein, 314 aa, Zea mays
  Coding DNA Sequence Number=SeqID_29867
  Gene Ontology: Mol. function=phosphoenolpyruvate-protein phosphotransferase activity; Cellular component=cytoplasm; Biological process=phosphoenolpyruvate-dependent sugar phosphotransferase system
  Homolog annotation: Hit_ID=Q2QMG9; Match level="QueryCoverage=99%, HitCoverage=19%, E-value=1e-131, Identity=77%"; Hit description =Expressed protein
  Pfam annotation: Domain name=KIP1; Domain location=13-86; Score =171.1; E_value=2.7e-48; Accession=PF07765.3; Description=KIP1-like protein
MAMSPSNPMRKYSWWWDSHISPKNSKWLQENLTDMDSKIKVMIKIIDEDADSFARRAEMYYKRRPELMSLLEELYRAYRALAERYDHAAGELRQAHKKMAEAFPDEFQLDFDDDLPTETVTTETEADNRDMTPFFLSFIKAGDSKKRAKEDQDHEKLQKEISSLSQENQELKKKITSVLEKGNMAEFEVLSLKEALAEQEAEKEAAFSQCQQSSDRLQSLKSEILHTQEEFNKLKEEMQNGLQNLSTAEERCLLLETANQNLLLELDKLKLASKEKHDELNEKHIELEKLSISIQEEQLKSMQAEMARLSVEKQ

SEQ ID NO: 71647 - protein, 270 aa, Zea mays
  Coding DNA Sequence Number=SeqID_29868
MNPFEDSDNTDNEEDNTIICPTKPSHVDFSKSKIKGGHIEDSKKRKKKVTTRWSKVLKVQVESTPKALVEILAAPKAKVTAEIEELPPMVIKEAKIGEAIALIAQRVTPLESLPEIEEEEEEERIAPVMSSFFDVDEDETEEKDTIGTTLAPKGTALPTADVTGPSSPRFEQITAAVTPSAIMAAEEKVSSKLALAKDKGKGLAKFEEAKKAVEDDTPLSEGPFDQDLGGQRYRVHHAAGKVMGAKQLAKAIGFVEQLGYPSRSIIFGAS

SEQ ID NO: 71648 - protein, 208 aa, Zea mays
  Coding DNA Sequence Number=SeqID_29869
  Homolog annotation: Hit_ID=Q6K2L9; Match level="QueryCoverage=75%, HitCoverage=34%, E-value=8e-21, Identity=36%"; Hit description =Putative Poly(A)-binding protein binding protein
  Pfam annotation: Domain name=PAM2; Domain location=128-145; Score =20.1; E_value=0.0079; Accession=PF07145.5; Description=Ataxin-2 C -terminal region
MASRVARLLARPAALAGGRGAAAGEEGEGRRPVAGEMPGGPTTAVGWVGRRLDRKLSKGSNENMDKRKLQPENNLSDGARPLISEDLVTHPIYLDHLDGSDGATLSSYAFETLIFWPKGFKSPETPDLTEFKLNPNAKSFTPSASLRPPHPASSDASYYYTNNIPAAPLGPGLPVGMGFPPAYGTQPVMYNAQPGASQQGYMHPVGLQ

SEQ ID NO: 71649 - protein, 54 aa, Zea mays
  Coding DNA Sequence Number=SeqID_29870
  Subcellular localization annotation: CTP_CleavageSite=24; ConfidenceScore=5.18e-01
MARSHPPSTALVRGGAAGLHSGVFAGERQSVTLVTQSPRRSTKNVTDSKAIVMA

SEQ ID NO: 71650 - protein, 271 aa, Zea mays
  Coding DNA Sequence Number=SeqID_29871
  Gene Ontology: Mol. function=protein methyltransferase activity; Cellular component=cytoplasm; Biological process=protein amino acid methylation
  Homolog annotation: Hit_ID=Q6K2L9; Match level="QueryCoverage=98%, HitCoverage=43%, E-value=1e-107, Identity=77%"; Hit description =Putative Poly(A)-binding protein binding protein
  Pfam annotation: Domain name=Ataxin-2_N; Domain location=62-183; Score=186.9; E_value=4.9e-53; Accession=PF06741.3; Description =Ataxin-2 N-terminal region
MAQVIKDGSARGQRFASDVVKKPETMIIPARELVQVFAKDVALGGDELPKGPGHDKRKDLLIDSAISRSHYLEERELERWAPDEGDSECIELEKYDRKGNRSWDQFETNAALFGVKSTFNEEIYTTKLERGPHMRELEKHASRIAREIEGEDTKDIHLAEERGLFLGDDLDHDEEIKYSAVRRDTDNSKYKPPFTNVPSSTYQVDLFNRTVNIVPKDLLGCSSTMDEESSSHIFDDIDASATIQTNSVRQPTSDYLPDRLSSNDENRYYLP

SEQ ID NO: 71651 - protein, 58 aa, Zea mays
  Coding DNA Sequence Number=SeqID_29872
MGRAKVDDSGPTPTESRRCTVCDVSRSAYGDGLVNLREVHEIGEGAVPAFGRQPLGRF

SEQ ID NO: 71652 - protein, 114 aa, Zea mays
  Coding DNA Sequence Number=SeqID_29873
MDLGLQGRLVRGDGYGASPSFAGWVHNLDGRDGTPELNKISCRHNYFIVMPRTVVVERFRVQSDTNEQGLKISNWVLGILVRWREDRRHCSDGGEVACATVARAEEEEEPLCFW

SEQ ID NO: 71653 - protein, 141 aa, Zea mays; identical to SEQ ID NO: 56757
  Coding DNA Sequence Number=SeqID_29874

SEQ ID NO: 71654 - protein, 180 aa, Zea mays
  Coding DNA Sequence Number=SeqID_29875
MDLLLRLLPRRSSLPDGGRCEGARSPLAPPLPRLMPIMDVDFTTRDKARRRAFRISLVMTCCAVCQPLGRPCASKALLMASHVECRRSRRPCASRHECHIVMGNGETLGATTSAVMPPSSMDGEPKCRRVGALVDGRGDGSLVHTHPIPGTSGSLGLGEKSLCKHSSGVGEYNINETLFS

SEQ ID NO: 71655 - protein, 172 aa, Zea mays
  Coding DNA Sequence Number=SeqID_29876
MGGEGEGERARFEQRGECLERVLQRHSTTTMRKRVWGERERKRWEGLTMERPATISISDDDGDCGEGGASVIEMGVERASHGFVRVSDDIKITLTTLKEMERNEKKEKRGGLPLVTALLALIDTSSTETHGRHYALLTNFLHNFAALTVLSSDSPDHHDILSGFKQMVRANT

SEQ ID NO: 71656 - protein, 121 aa, Zea mays
  Coding DNA Sequence Number=SeqID_29877
  Subcellular localization annotation: CTP_CleavageSite=49; ConfidenceScore=5.34e-01
MGLAIHPSRSGSSESSVSWLELPPASSSSPSPSGLLQQPGCPEVVQGASLAEVQGKAASQTPPPAEARGKSPAAPGPAPAPSVGAPAPRAGDDAVSPAGWTDLTPCDARDAPPVEKAKRES

SEQ ID NO: 71657 - protein, 185 aa, Zea mays
  Coding DNA Sequence Number=SeqID_29878
  Gene Ontology: Mol. function=methionine adenosyltransferase activity; Cellular component=cytosol; Biological process=one-carbon compound metabolic process
  Homolog annotation: Hit_ID=P50299; Match level="QueryCoverage=99%, HitCoverage=53%, E-value=5e-77, Identity=72%"; Hit description=S -adenosylmethionine synthetase 1
  Pfam annotation: Domain name=S-AdoMet_synt_C; Domain location=58-174; Score=158.0; E_value=2.4e-44; Accession=PF02773.6; Description=S -adenosylmethionine synthetase, C-te
  Pfam annotation: Domain name=S-AdoMet_synt_M; Domain location=1-56; Score=43.5; E_value=3.1e-10; Accession=PF02772.6; Description=S -adenosylmethionine synthetase, cent
  Pfam module annotation: Pfam domain module=S-AdoMet_synt_C::S-AdoMet _synt_M; Domain location=58-174::1-56
MVPVRVHTVLISTQHDETVTNDEIAADLKEHVIKPVIPEKYLDEKTIFHLNPSGRFVIGGPHGDAGLTGRKIIIDTYGGWGAHGGGAFSGKDPTKVDRSGAYVARQARQEHRGQRPSPARCLVQEILKIVKENFDFRPGMISINLDLKKGGNRFIKTAAYGHFGRDDADFTWEVVKPLKFDKASA

SEQ ID NO: 71658 - protein, 607 aa, Zea mays
  Coding DNA Sequence Number=SeqID_29879
  Gene Ontology: Mol. function=zinc ion binding; Biological process =proteolysis
  Homolog annotation: Hit_ID=Q53PX0; Match level="QueryCoverage=95%, HitCoverage=43%, E-value=1e-135, Identity=54%"; Hit description =Expressed protein
  Pfam annotation: Domain name=PHD; Domain location=283-333; Score =15.4; E_value=0.0016; Accession=PF00628.19; Description=PHD-finger
MARQGVGPPPRRLGDTFKTVDTTLLESNIRGVAFSASWFKPIDDWPAESPCPSTGASRPAQHQKRGAGGRRGRRRLLVSEPGTVTDDDNSWTWWTGGNIIKRTLQRGALLHSTIRKAARQGILLNAALVKKRNLMLTSYNTNASYIQHLQKNNGQQPVTAPRNVSKVSSSHSAEPAPKVEAEPVTKVKAQRVGNVEATTQPVLNVKAQPPAKVVTQNITSVQKTKAKKSKSEKPTKAKKVQAITYFGLIWKKNKNDKDDGSEFRANDVILKSKDGIGSSIKPKCCLCDKAYSPEFLYVRCERCKNWFHGDSLQLEEDRIGELVGYRCCRCRRRAIPPCPHSDNYVKPEPEFSEQTVATSSVSTMLSSGKTSASADQDPLLASYGIVEPIGEETGDVDLSANTASIAPGSSQKLSIRRALAKTSGYLDQAGKSVNEYYVQNQNTPPGNGNINFSHTNEISFSEADSVGASGLLGWDFSRGTAYAAPPGFTSNRQQNRTSRGSFVPDECEREPQTYFSFTELLEADDAQLDDNAFGIATGLQGDANGSGSFVQRGVGFGGTSFMAEDGASNMNVPTNGPTPEEVACHNGTNTQPPPDPRCSVRDLRTHR

SEQ ID NO: 71659 - protein, 81 aa, Zea mays
  Coding DNA Sequence Number=SeqID_29880
MARPLAISLLPFSFSSLAWLCINLCRELKQMMSPPILRIFLDDLICYELNFAGILSFPQFLYIGHGISSYHVFNLGFTYFD

SEQ ID NO: 71660 - protein, 478 aa, Zea mays
  Coding DNA Sequence Number=SeqID_29881
  Gene Ontology: Mol. function=zinc ion binding
  Homolog annotation: Hit_ID=Q53PX0; Match level="QueryCoverage=69%, HitCoverage=17%, E-value=1e-75, Identity=50%"; Hit description =Expressed protein
  Pfam annotation: Domain name=DDT; Domain location=396-455; Score =52.1; E_value=1.9e-12; Accession=PF02791.7; Description=DDT domain
MDTAAGPGPRDGPDRTPQGPGASPEEAAADGVKTDIAGGAEALAAAGAAGEADPGGGAAAAGRGGDAEASASEPTAEEVNEGCGGAAAAAGGDRPAAPEADADGGAGKGRSAVHAVSEVEQGQGIAGAAQDVDPAVFEVKKMDVSEGGDASKQNQHSPSCTASEVDVGIVPVAVRDLDPVGSEVMMEVDDGHVREQERAGVAVAGSEFKMEEADGRVVHQGSAATSAGGLQARAEEVGECLVGRYIGRNAPMQAGILIGKVASYDSTAGIYSVVFEDGHNEDLELPELHEFLMPDKNGTLGMSVNCRKRKLGLLVLSGSVSEVKEPASTRQRVDGCEMPANTDALRYSGSGSDMSEDIESSSNSSDFTKEEPSEPCPPVQAVELPPSSGDIHVPEDSISYLFSVYNFLRSFSVQLFLSPFGLDDFVAAINCTVQNNLLDAVHVSLLRALRRYLESKSAQGSQMASNCLKYIYSINPPF

SEQ ID NO: 71661 - protein, 533 aa, Zea mays
  Coding DNA Sequence Number=SeqID_29882
  Gene Ontology: Mol. function=zinc ion binding; Biological process =proteolysis
  Homolog annotation: Hit_ID=Q53PX0; Match level="QueryCoverage=98%, HitCoverage=28%, E-value=1e-174, Identity=60%"; Hit description =Expressed protein
  Pfam annotation: Domain name=PHD; Domain location=32-77; Score=37.2; E_value=5.5e-08; Accession=PF00628.19; Description=PHD-finger
MLNDLQNFESGPNVTNSDVAVADVSQDGNSDDCRICGMDGTLVCCDGCPWAYHSRCIGQNKAFLPQGDWFCPECVVNKLGPTSSRIERGARGAQMFGIDMHGRLFLGTCNYLLVIEISSDVESYARYYNHYDVVKVLQRLALSDAYVDICRQIMEYWKHLLGRVQSERSTILKEVGTRHTPQSSMLSFTPTMSGDGSGWTTLKDGGDSKTVALPQTNVQQKIFANQYTVCSAEQTEKNVDVCKQALSAQNNIHNAPRNGASGPFVASPVSHQNGSIGTGMSNIAQAQPAHSIYRPDLSTVSAKSESFRSSLQGKLHLQMCTERPGNMSCGKAAKLSSFKPQAYMNLYNHGNIAASAAANLAIIASSEGKVSTSQLSAKPKKKVAADNALQLKAFSSAVAQFVWPSTEKKLMEVPRDRCGWCLACRSSASGNKKACFLNMTTSNAAKSSARVLSTMRVIKISDSHFPSIAAYLANMEESLRGLLVGSLQDMQQRERWREQLEEASNCRTVIPLLLEVSYRMASFGTSQYSTTEL

SEQ ID NO: 71662 - protein, 719 aa, Zea mays
  Coding DNA Sequence Number=SeqID_29883
  Gene Ontology: Mol. function=RNA binding; Cellular component =intracellular; Biological process=regulation of translation
  Homolog annotation: Hit_ID=Q5JMD6; Match level="QueryCoverage=51%, HitCoverage=38%, E-value=4e-73, Identity=38%"; Hit description =Putative pumilio domain-containing protein PPD1
  Pfam annotation: Domain name=PUF; Domain location=346-380; Score =14.6; E_value=0.08; Accession=PF00806.9; Description=Pumilio-family RNA binding repeat
  Pfam annotation: Domain name=PUF; Domain location=382-416; Score =22.2; E_value=0.0018; Accession=PF00806.9; Description=Pumilio -family RNA binding repeat
  Pfam annotation: Domain name=PUF; Domain location=418-452; Score =23.7; E_value=0.00067; Accession=PF00806.9; Description=Pumilio -family RNA binding repeat
  Pfam annotation: Domain name=PUF; Domain location=454-488; Score =29.6; E_value=1.1e-05; Accession=PF00806.9; Description=Pumilio -family RNA binding repeat
  Pfam annotation: Domain name=PUF; Domain location=490-521; Score=5.9; E_value=1.2; Accession=PF00806.9; Description=Pumilio-family RNA binding repeat
  Pfam annotation: Domain name=PUF; Domain location=556-590; Score =23.8; E_value=0.00062; Accession=PF00806.9; Description=Pumilio -family RNA binding repeat
  Pfam annotation: Domain name=PUF; Domain location=592-626; Score =24.2; E_value=0.00047; Accession=PF00806.9; Description=Pumilio -family RNA binding repeat
  Pfam annotation: Domain name=PUF; Domain location=639-673; Score =28.6; E_value=2.3e-05; Accession=PF00806.9; Description=Pumilio -family RNA binding repeat
  Pfam module annotation: Pfam domain module=PUF::PUF::PUF::PUF::PUF::PU F::PUF::PUF; Domain location=346-380::382-416::418-452::454-488::490 -521::556-590::592-626::639-673
MSHLFFIWKALVVFCPRVHRTLHSRRFVSFPDEVDRCRPLDIVDHLAHRTVRCSLVTVGQAGVTGADCAADRCRRRPANTPDSPVDVSIPAVYTEGFIYGGLRSRFGISLNVLLAYEDVRYSLVDEASWRQQLPAFYPGGGVTVADPSSQLATMGAQDATALSVQQGRARTAAENLVHVPAAQVSLPGALALGNFEQELGEDALLPPVLSQEQQDAVKRYNHLMGVHVAYFRVCIDPTVASSRRLLQQAIQDLKNHCAGDALVAHYYVNNRNNNDPADQPDTTTAIRQQAIARSADASSRQHHGACRGFNDHHGGGVVPSVHREEEEALAAPVVAMSMSPALRLVDIKGKVAAFCADRNGSRFVQQALEAAAPEEIAMVYKEIMPCVRTLAVDMFGNHAIQKILEHGPRSCKRGVISNLIGHLLPLSLDKYSCRVVQKSFDVGEHDQKVAMAKELGSKVLRCVRDQFANHVVQKCVECLPSKDIHSILRSFYGRAKALSTHPFGCHVIQVFALALHLHRRCVVVVGVSSDPSKLDDSQKVLARCKDHEIYHALTAEIMENVNKLAADRFGNYVVQQLVEHGGGAMRSAMVRRFAGRVVGMSYHKFASNVVEKCLAFGSQEDRRLIADEIVAGGGGGQQQHLDHLVDMMINPYANFVIQKMVVTAEERQVRLLLEVASSNAASLARYAHGRHVIDAMERFLGGAKAVVHADPAALPCRRR

SEQ ID NO: 71663 - protein, 214 aa, Zea mays
  Coding DNA Sequence Number=SeqID_29884
  Homolog annotation: Hit_ID=Q852L4; Match level="QueryCoverage=35%, HitCoverage=39%, E-value=3e-20, Identity=58%"; Hit description =Expressed protein
MSAAPIASNSTNPAVAGASELAVEEEEEEAPGTTVGLVCPWLTGAAAVGVAGAGASSGSGAAAAVAGGAASLKRESWREVELHALGSRTASVRLTGTPTETLPVRMRHAQPVLALISAPSDRQQSSVGEALPLVMKLRHGVKLVTSDAVHDMAPPTTPPGPGCPDAGAGAATTSSVATTAAKASSIGLLLVVVAIMRALDLLASSLDHTHSTWS

SEQ ID NO: 71664 - protein, 459 aa, Zea mays
  Coding DNA Sequence Number=SeqID_29885
  Gene Ontology: Mol. function=inositol or phosphatidylinositol phosphatase activity; Cellular component=membrane coat; Biological process=abscisic acid mediated signaling
  Homolog annotation: Hit_ID=Q6ZF04; Match level="QueryCoverage=97%, HitCoverage=81%, E-value=0.0, Identity=82%"; Hit description =Putative inositol-1,4,5-trisphosphate 5-phosphatase
  Pfam annotation: Domain name=Exo_endo_phos; Domain location=1-415; Score=131.4; E_value=2.4e-36; Accession=PF03372.13; Description =EndonucleaseExonucleasephosphatase family
IFAATWNVGGKSPPRGLNLDEWLHTSPSADIYVLGFQEIVPLNAGNVLGTEDNLPAKKWVSLIRRTLNKNPGSSGCGGGYHTPSPVLDPVVELDADFEGSARRQDNFSFFHRRSFHNLSRSLRMDGDLMFPQPRLDRRFSVCDPVNLGGRPSDFDGSLRCPGSPDEDTIDMEMGDSVQVSPFPHSYSASAPSEQNDDQSNSSRYCLVASKQMVGIFLTVWVRNEIRDDVRNLKVSCVGRGLMGYLGNKGSISVSMCLHQTSFCFVCCHLTSGEKEGDELRRNSDVLEILRKTRFPRVRGAGDVRSPETILEHDRVIWLGDLNYRIALSYCSAKALVEMHSWKQLLEKDQLRMQQRYGRVFQGWKEGRIYFPPTYKYSFNSDRCDRILWHGNGLSQLCYVRGESRFSDHRPVYGIFLAEVGVVRQRRRNNAGYFGSRVEVEELLPRSRSYRLRDDEVLLS

SEQ ID NO: 71665 - protein, 716 aa, Zea mays
  Coding DNA Sequence Number=SeqID_29886
  Homolog annotation: Hit_ID=Q6ZEZ8; Match level="QueryCoverage=84%, HitCoverage=74%, E-value=1e-180, Identity=57%"; Hit description =Putative CXC domain protein TSO1
  Pfam annotation: Domain name=CXC; Domain location=556-597; Score =81.0; E_value=3.8e-21; Accession=PF03638.5; Description=TesminTSO1 -like CXC domain
  Subcellular localization annotation: CTP_CleavageSite=68; ConfidenceScore=5.07e-01
MDTPDRAAAQSAATRTEVTTLSLYHSRLLDCAGQFPSPPSLPSRLPPQMRPGSPASTPYPVEAGTGRPAARRRAPAPRFRPARPQPGAEPTPTPDSPVFSFLNNLSPIEPLRSSAYSTNSLQGFQSINITSISSIFTSPHDNVSKEPRLPKSPLGEISDKEVRADAAGTNEPPEPSNAARLFACTSTVTRETRTGTCTGVAGPPPTTGGPCDLALPRQFDNNGSPDHNTTPCHGVRSDLKQDKARKLLQAAQNAKKNALEKRKCLFSTEVRLLDGGGGGGGEPGSDSDGVLGCEWSDLVSPTSAKLLAFDATMDEHHRGVHLAAQNAESCGYLLSKLAGDGGVSDGAYPTASAQVYYQELVMGEDQSENAAPQMDAQETISAEETQDNIYEADVCVPLEYKVVESQQQRGIRRRCLVFEAAGGFSNSAVKRGTIEDRSVSTCSKGKSPAESQPRGLRGIGLHLNALALTPKGKMACQDPPPTASALLPSSASEKDARGELLCAGENFAHSGGELLEFPLDGCSAGGGFPVNDHHVSGQSVSPQKKRRKTDNGDDGEACKRCSCKKSKCLKLYCECFAAGVYCSEPCSCQGCMNKPIHEETVLSTRKQIEFRNPLAFAPKVIRMSDAGLETGVWRCVLLLEIEMKILTTLRLRLVTREDAIVRSQAVSRNTVNATREVLDARATADVRVAKMLLAEEMIRNYCLGTCTVQSHPGAFF

SEQ ID NO: 71666 - protein, 46 aa, Zea mays
  Coding DNA Sequence Number=SeqID_29887
MTEESAKKSKLSWSKSLVRKWLNIRPRAQDFHADFDAGHQDTFFRP

SEQ ID NO: 71667 - protein, 77 aa, Zea mays
  Coding DNA Sequence Number=SeqID_29888
MVNRGCVVKPVRGLSGAIKNRGKVEIAHWCVTDGGNCAVLCAASFLVSIPDEQATVDTEAQQIEVAEQELIEGKLCP

SEQ ID NO: 71668 - protein, 212 aa, Zea mays
  Coding DNA Sequence Number=SeqID_29889
MGNWRVGRFSPQSAHHGSPAGAVAMRAASIAIADRIGELLLAPPQQNGAVVRSTCGRSCASSAMGLRCQRLRACSRARPLPRGAVGSATSPPSSRNDLRTEPTGFLANGHPRFMGSGAQRPRQQGRICNSPPCGLHAFINFTRVVPSPLCGFTGEPIWREDRTCVGRSVVGLHYLRPALGDRPGRESGAQGCSSQRLLGGIALWTTGIFHRS

SEQ ID NO: 71669 - protein, 172 aa, Zea mays
  Coding DNA Sequence Number=SeqID_29890
MVTQRTTPTAMRGAAHPADHGEKFLAPPVIPPSPLAQIRSENYWEGYWTQGEAQERSMAPATNSTIGADAPSSTEAAAEKKESDRAMPAHRAPPISESARQTRGPRVVGTALAESGSRWRGYETGTAKKGEGIEMTGRSHLRAPQVSERMRGARDRVGLHSQGREWKWAEYK

SEQ ID NO: 71670 - protein, 128 aa, Zea mays
  Coding DNA Sequence Number=SeqID_29891
MAHQEASTRSEFTRLDELAGRGRATRDWRNRSKAYYFIVTEERSMAPATNSTIGADAPSSAEAAAEKKESDRAMPAHRAPPIGESARQTRGPRVVGTARAESGSRWRGYETGTAKKGEGIEMTGRSHL

SEQ ID NO: 71671 - protein, 278 aa, Zea mays
  Coding DNA Sequence Number=SeqID_29892
  Homolog annotation: Hit_ID=Q7XCD6; Match level="QueryCoverage=22%, HitCoverage=4%, E-value=2e-07, Identity=53%"; Hit description =Retrotransposon protein, putative, unclassified
MNPDTQVILDEIARRFSEHDVKWDRCLTEQESRWDAAFSDFTKGQERRVQALEQNTSLIADWRSSMEGVVDDLRLEVGKVSKNWERAVVDKSTSMAGVLAPSPPVVERPAARFTAEPPHGHHIELFTEEDGFGSVTTLLHPPGQSRDYFDVYAVEVRLWEEVSRPLRRPEGVRPSFPMVAKGPARGALPLPLPPKMEQFGVVAEEVKRGDYNHPRVEDKFAALRAYHRSRGLCQRVLKIGPRIISVLQRFSYMHCKRSRSFTKGMRNNCQKPQILSPL

SEQ ID NO: 71672 - protein, 49 aa, Zea mays
  Coding DNA Sequence Number=SeqID_29893
MARRRSQTNKKSKENKEVNYESFFGSIVFKFCINLAALKLKSGSPETSS

SEQ ID NO: 71673 - protein, 115 aa, Zea mays
  Coding DNA Sequence Number=SeqID_29894
MEKSRGLTTDGECVAPGGNGGEETEEMKSINRRSETVAGVVAGAKLVAAWGALDGVGSVSVSRAGRELTLRSVESRLARGRRGVQGAQRLGLQRRRARCRALVARGGQGLGARRA

SEQ ID NO: 71674 - protein, 186 aa, Zea mays
  Coding DNA Sequence Number=SeqID_29895
MGWTCAAGNRAERGPVKEIDDEVCLVGQGEETEVETELGVGASWASADLRRGEHQGEEGARRRGDGRRFHGCQAEKRTRVGGDPAPGTGSGARRELGRAAEMGLGQAAWWPEVVAGGNEIDGSSYDYGAASPLQPNRILAEYVDVYSPLLYTPNPPSPGCQHCNHCSGEDEAVEGDFQEFQDYDEF

SEQ ID NO: 71675 - protein, 256 aa, Zea mays
  Coding DNA Sequence Number=SeqID_29896
  Homolog annotation: Hit_ID=Q9FMC8; Match level="QueryCoverage=69%, HitCoverage=55%, E-value=9e-14, Identity=30%"; Hit description =Genomic DNA, chromosome 5, P1 clone:MUK11
  Pfam annotation: Domain name=DUF623; Domain location=148-209; Score =87.1; E_value=5.3e-23; Accession=PF04844.4; Description=Protein of unknown function, DUF623
MTVTVMTSTTASGWRSSRREGEKAAYHKTWNSVSSGDFSFTSTASSDAEAVIIQALRSDRLLYEPADHMDDHDDASCCRLIKQPPHNKQSISRQKQAAVGDDEPQLDTSSIVLSSGSGKANKAPVLDLVTTAEALATFCGATAMSVESHNPYRDFRDSMQAMVMSQQGTTKDWRWLEDMLGWYLRANGKTTHALIVAAFVDLIVALAISPPAAEDYNYSSSSSSSSLCLLATPPASASATNCSAASSSSSIDDCSC

SEQ ID NO: 71676 - protein, 50 aa, Zea mays
  Coding DNA Sequence Number=SeqID_29897
MARIPQRLSWPCGARSLLLVEFPEEEDEIQEVVSVEESASVPAHQMMGAI

SEQ ID NO: 71677 - protein, 36 aa, Zea mays
  Coding DNA Sequence Number=SeqID_29898
MVKVLRHVAQDREVQKCAHFAYNPLGSQARVFQGSI

SEQ ID NO: 71678 - protein, 80 aa, Zea mays
  Coding DNA Sequence Number=SeqID_29899
MADIDDGFLRRETRVTSGGASVAVVVAVRDTSDGASVYGGNRPTSSGDGGDDRLRQHPKTMISSNPAHLGVLRRRPPLVW

SEQ ID NO: 71679 - protein, 648 aa, Zea mays
  Coding DNA Sequence Number=SeqID_29900
  Gene Ontology: Mol. function=carbohydrate binding; Cellular component= cellulose and pectin-containing cell wall
  Homolog annotation: Hit_ID=Q5JPE7; Match level="QueryCoverage=90%, HitCoverage=45%, E-value=1e-51, Identity=26%"; Hit description=Nodal modulator 2 precursor
  Pfam annotation: Domain name=Cna_B; Domain location=44-102; Score =9.7; E_value=0.08; Accession=PF05738.4; Description=Cna protein B -type domain
VPVIIDHNGCNGNADINFQFTGFMISGKVVGAVGGKSCSKRGGPAGVKIELMTDSDELIASALTSSSGEYSFTNIIPGRYILRASHPDYEIELRGSPEIDLRFGNAVADDVFFVSGYDIYGTVVAQGNPIVGVHLYLYSNDVTKVPCPQGFSDAPKEGALCHAISGADGKFTFRSLPCGSYELLPYYKGENTVFDISPSSLSVSVEHSHLTIPQKFQVTGFSVGGRVIDGYGAGVESANVIVDGQLRAITDSLGYYRLDQKFAYKNMGYNFAYGNTGYTMWSEQWVGNNVKTEYTVFEYESDWLPALEAIQVTSKKYTITAEKDHYKFNRLEDFMILPNLASIDDIRSVRYDVCGIVRTVTLNSKAMVTLTHGPENVKPQRKLVGENGHFCFEVPAGEYQLSALPVDSERSSSLMFSPGSISVNVNSPLLDLEFSQSQVNVHGKVSCKQQCSQNILVSLVRLAGGVEQEKKTTTLEQDNVNFVFKKVFPGKYRVEVKNSLPEGLAKDDWCWDQSILNIDVGTDDKGSQRICVETSGQHEIHLTNPCISFGTSSVLFDTANLMPIHINAKKYLVKGEIHVDMSSIQENIDSKDIVVDILKSDGSFIEKISTSLVLGKDNQNDFTAFEYSIWADLGEDFIFVPHDSRICL

SEQ ID NO: 71680 - protein, 39 aa, Zea mays
  Coding DNA Sequence Number=SeqID_29901
MVVDQVQLLDRHHLFVKFGSVDGGLTANTFWISLGFSEY

SEQ ID NO: 71681 - protein, 55 aa, Zea mays
  Coding DNA Sequence Number=SeqID_29902
MTATTPRKGLTGSREDRVRASQACILVVFYAHADGIIYQEMIRHYVQIVKTVYEC

SEQ ID NO: 71682 - protein, 112 aa, Zea mays
  Coding DNA Sequence Number=SeqID_29903
MAAARPDVEVARGRDGCTTQRTMRCYARQHRRHDEATQRGTYTGAGLSSMTPRKMEMKNIEGKALTRDDELAGIDVCGVARLWCSAALARRRCTCRGCRDSKGAAQEMRRVG

SEQ ID NO: 71683 - protein, 78 aa, Zea mays
  Coding DNA Sequence Number=SeqID_29904
MELRQDLQMEKERVRPRVRQVNCRSQIEVEERRFLKSRHKYKCQEAITNKGMREKMKAFKSQWYEYNKEWSYVQAFTR

SEQ ID NO: 71684 - protein, 153 aa, Zea mays
  Coding DNA Sequence Number=SeqID_29905
MEITRNSVGADLPEIEQRRAPGHGITRPTANGCSGEQLWCSRGDLSPEWSHYNTGTKRTHQAFPVPQTATQTDAHGEMRPRQTSWPRRAHWALRVASLTRKAHAYTRDEAAIWPDHPNHPQKWHTGIAPAATHMPSTRILAAALRILDANPHW

SEQ ID NO: 71685 - protein, 66 aa, Zea mays
  Coding DNA Sequence Number=SeqID_29906
MDGTRLEIVLSGSSSGHLCLPLVFDVEVFPYFDERGWIKEFDAYAATLGGLHPQDGKPLSRTIFAP

SEQ ID NO: 71686 - protein, 52 aa, Zea mays
  Coding DNA Sequence Number=SeqID_29907
SECPIFRVSIEAPRLTLGEAANPQELWQVRMLKASIRPGTIPGCGLGPTMFL

SEQ ID NO: 71687 - protein, 130 aa, Zea mays
  Coding DNA Sequence Number=SeqID_29908
MAFGVAVVGTQHARATAITDLIKATAYPSNLNASSILAKQKGSGANRCYNDINLAMTKVAHRPWEILTRDIPRALKGLNTAPIPNSTPTSSMAFRVAASDLRRALPLVIAKAGWGTAYHSSQMHNGARAV

SEQ ID NO: 71688 - protein, 133 aa, Zea mays
  Coding DNA Sequence Number=SeqID_29909
  Subcellular localization annotation: CTP_CleavageSite=41; ConfidenceScore=5.15e-01
MASRGQRRMDVLVSNCGVSPWRFVTGVVTITTHGNQANPPKAFPVPQTATQTDAHGEMRPRRTSWPRRAHWALRVASLTRKAHAYTRDEAAIWPDHPNHPQQRRTGIAPAAAHMPSTRILAAALRILGANPHW

SEQ ID NO: 71689 - protein, 107 aa, Zea mays
  Coding DNA Sequence Number=SeqID_29910
  Subcellular localization annotation: CTP_CleavageSite=50; ConfidenceScore=5.38e-01
MSHSADAIAILASNQAPVLHHRRQYSSTPSLGAHRRVSGVGRTTGELWVLSDQENCRRTTGISCRGPSAPLGIEIGSRLCTIADEQATEDPEVQLVEIAEQELVEGK

SEQ ID NO: 71690 - protein, 115 aa, Zea mays
  Coding DNA Sequence Number=SeqID_29911
  Subcellular localization annotation: CTP_CleavageSite=68; ConfidenceScore=5.61e-01
MPHSADAIAILASVRVDPNQAPVVRRRHQSSSTPSLGAHRRVGGVGRTTRELLVLSDQENCRRTTRISCRGPSAPLGIEIGSCLCTIPDEQATEDPEVQMVETAEQDLVEGKLCP

SEQ ID NO: 71691 - protein, 83 aa, Zea mays
  Coding DNA Sequence Number=SeqID_29912
SPIDPPSRRLSIGIKARYFIRVQPLKVMSGTSAKREMEMDTSRGKAPSKESGAKKKKMKKVVYYETDSSSPSTSRLRRTVRYF

SEQ ID NO: 71692 - protein, 54 aa, Zea mays
  Coding DNA Sequence Number=SeqID_29913
MTLREEEDYGNYVQGFSPALKTKTVVRDPKRWLRGVLLFQRRLSRHLWRMLQNM

SEQ ID NO: 71693 - protein, 140 aa, Zea mays
  Coding DNA Sequence Number=SeqID_29914
MTPRGQGRGSTVASYSDTSLATDMTKLYPPPSWSRHRYGTDARGEDAARDEGGRGGEGGEVAVRRRAEHEKPHHCMQASGSFRNGRWLQLKWRQGRKRRWGRVRLRKMTSGSHQQVRSFLQPKPAHKKVETDSRGPRASV

SEQ ID NO: 71694 - protein, 164 aa, Zea mays
  Coding DNA Sequence Number=SeqID_29915
MNVCELILVVSHPPTGQEQTVALRPKPTVRRGRGGRHCFGKHSPTLQSIPRVAIRAHDPGDGLGESQWLPHDDTARPGMWIDGGTVQRHFPGDGHAKALPATPLGDAVGTTRMHEGRMRRAAKGAGEAKEAKWRYGTVRSTRSHSIAGELLEASCLWMAVVEVE

SEQ ID NO: 71695 - protein, 87 aa, Zea mays
  Coding DNA Sequence Number=SeqID_29916
MGRAQGGRGDCSEHERGYGTDAVAPEGSHPRCDGSATVQLHSGRSGEHEQREQMGSGRIEGCLGHGHGGESSLRLWTYRGLYYDCGK

SEQ ID NO: 71696 - protein, 77 aa, Zea mays
  Coding DNA Sequence Number=SeqID_29917
MGASVVRGGGESRGRWGPAGELEAVVGVASHSLDCNLADGEYVLILEQGVDQEEVQEPTPESAIEDLLVAPVIKGKP

SEQ ID NO: 71697 - protein, 94 aa, Zea mays
  Coding DNA Sequence Number=SeqID_29918
MAVPSFIVARVESLWERSVGTNPKSPRSRCDSSVLATMGLMAEARKSHPDSTHVSARFFAKVGEGPYSLGPPIREFSSSHKNSKLRNLCSNATI

SEQ ID NO: 71698 - protein, 401 aa, Zea mays
  Coding DNA Sequence Number=SeqID_29919
  Gene Ontology: Mol. function=protein serine/threonine kinase activity; Cellular component=membrane; Biological process=regulation of transcription, DNA-dependent
  Homolog annotation: Hit_ID=Q9AXB2; Match level="QueryCoverage=67%, HitCoverage=46%, E-value=6e-43, Identity=36%"; Hit description =Disease resistance protein-like
MGHDHMSRIKMHMAEGSFGDRNRCQQPGCNEVVDGRVVYCKTHSGELSCQQFSHLQSGLESSGLSVRPVTPVNDSQFKGSVSIAAVPCTEQELHVKHEGDDRGKLKDSSGYTLGQTAQFVFPGAGMFCKNDSCSKQAHENSIYCKLHSGVSKGCMVRGCTRGAHGGTPLCIGHGGGKRCVIPGCPNAACGQGLSDRCVRHGGGRRCRFEGCAKGAQGNTDYCIRHGGGRRCKFEGCTKSAQGRTDFCIKHGGGSRCKFQGCGTSAKWGTDFCSIHRKALLGGDNAAVPEALPAASEKRRRAKKPKKAAKLSEASQENATAAAAIAGNSTQHMGGLLIAIPVANRDMLTKAVAATGQAAIASAQIVAPLSMKSPTPSGAAAATLTGRVPSKQGDAGSVERWW

SEQ ID NO: 71699 - protein, 304 aa, Zea mays
  Coding DNA Sequence Number=SeqID_29920
  Gene Ontology: Mol. function=protein binding; Cellular component =spliceosome; Biological process=mRNA processing
  Homolog annotation: Hit_ID=UPI0000DA43ED; Match level="QueryCoverage =99%, HitCoverage=98%, E-value=1e-25, Identity=31%"; Hit description =PREDICTED: similar to keratinocytes proline-rich protein
MAPPVDAVGPCPGLGDVEAPPRSRSSLSSEAEVESEPLGRARRRPSAEARAESEPWGRAKRSSSSSGAEPESEPWGRAKRSSSSSGAEPESEPWGRAKRSSSSSGAEPESEPWGRAKRSSSSSGAEPESEPWGRAKRSSSSSGAEPESEPWGRAERSSSSSGAEPESEPWGRAKRSSSSSGAEPESEPWGRAERSSSSFGAEPESEPWGRAERSSSSSGAEPESEPWGRAERSSSSSGAEPKVRRLPGLSPSLSPGATFALNAPAIWSVGVAIWPRLLLGEGWASDEPKLCADGGYQLRIRSLE

SEQ ID NO: 71700 - protein, 143 aa, Zea mays
  Coding DNA Sequence Number=SeqID_29921
MAPRTLYDDGGSQPPYGSKRTDPPVSKRRQDLLVIGDFRVRDWRRLRRSGWGSHRRRQRLPLPPLASRFAPSPPVLRTLAGDPACVPLSLSPPASGGSLTAPNPGGCAARGLRAEGASSRCSTKRSRRFGSAYAPKAKRYPSS

SEQ ID NO: 71701 - protein, 152 aa, Zea mays
  Coding DNA Sequence Number=SeqID_29922
MGKSNKRKREPTPPSEDFGDSEYSEEEFSSESEGSLAPVSPPVSSDISDDSQRIAAEVWTYIRAVERSGLEGSDESEYSSDEEDSSDSSEEGGGGDGGDDDDGGDGDDSDSGRGGDGGSKGGNGGGSRGSNGGGSRGSDGGGSSKGSNKASG

SEQ ID NO: 71702 - protein, 260 aa, Zea mays
  Coding DNA Sequence Number=SeqID_29923
  Gene Ontology: Biological process=protein transport
  Homolog annotation: Hit_ID=Q336R4; Match level="QueryCoverage=75%, HitCoverage=25%, E-value=5e-99, Identity=92%"; Hit description=C2 domain-containing protein, putative, expressed
MEVHLRKVMHRSRFMRKSSIIPAITNRIKRDLIHNPLHLIFSVDFLGVTKSTLSSLSKGFAELSTDGQFLQLRSKQVWSRRITGVGDGLVQGTEAFAQGLAFGVSGVLRKPVESARQYGVIGIAPGIGRAFVGFIVQPLSGALDFFSLTVDGISASFMRCVNILSNKSVPQRIRDPRAIHRDGIVRDYDKFEAAGQVAVGGRGIAHGAVGGDRVAHGMSGVDGTVGKERAGTAIESLSWMSRSGGGEEPARGKTYSSKTT

SEQ ID NO: 71703 - protein, 312 aa, Zea mays
  Coding DNA Sequence Number=SeqID_29924
  Homolog annotation: Hit_ID=Q6K796; Match level="QueryCoverage=94%, HitCoverage=6%, E-value=1e-54, Identity=38%"; Hit description =Vacuolar protein sorting 13C protein-like
VVATVATLSFFCHRPTVIAIMEFMNAINLANGSDTDKDKSTYPATVEDSAIEESKSDLESEPSIKPLLAKGKSRIVFHLTSSMAEAQILLMNENGDRLATLSQNNLSTDIKVFTSSFSIKAALGNLKISDDSLLSSHPYFWVCDMRNPGGRSFVEIDFSSYNVGDEDYCGYDYSLVGQLSEVRIVYLNRFVQEIISYFMGLVPKSSDAVVKLKDNKTNSEKWVSKTDMEGSPALKLDVSFSRPIIVMPRETNSNDFLELDVLYITVQNEFQWIGGDKNEMSTVHLDILTVTLERGANMEIKGRRHNKAFTRI

SEQ ID NO: 71704 - protein, 454 aa, Zea mays
  Coding DNA Sequence Number=SeqID_29925
  Gene Ontology: Biological process=protein localization
  Homolog annotation: Hit_ID=Q6K796; Match level="QueryCoverage=96%, HitCoverage=10%, E-value=2e-47, Identity=30%"; Hit description =Vacuolar protein sorting 13C protein-like
MVRDINLVIGMNMVRGETIIQDVEGLSFELRRSLRDLRHQLPVVEAAIKVDVLKATLSNREYEIISECALSNFSETPHPVPTLDDPRYGTSTTPSHVSASSSESIHVLSEGAETWIANKFSVSINLVELSLHSGSTRDSPLASVQASGAWLFYKSNTRGENFMYATLKGFSVFDDREGTKDELRLAIGKSASVRDTSSVDGYDNPNELDSGERRIQKDLGLEPIPSMLILDAIFRKSSSSVSVCVQRPKFLVALDFLLAVIEFFVPSAQSLLSNDEDKDLLHMITPVVLNDQIYFQEHSTFSLSPQKPLIVDNERFDHFVYDGKGGKLYLLDSEGKILSSPCTESFIHVLGCKRLQFRNVTIVNGEYLDSCISLGDDSCYSASRNDHVYLVREDDGSLSTPSKEIRGDSVKNGSADISTEFIMELQAIGPELTFYSTSRNAGENLALSTKAQLG

SEQ ID NO: 71705 - protein, 521 aa, Zea mays
  Coding DNA Sequence Number=SeqID_29926
  Gene Ontology: Mol. function=beta-amylase activity; Biological process=polysaccharide catabolic process
  Homolog annotation: Hit_ID=Q9AY35; Match level="QueryCoverage=79%, HitCoverage=81%, E-value=0.0, Identity=74%"; Hit description =Putative chloroplast-targeted beta-amylase
  Pfam annotation: Domain name=Glyco_hydro_14; Domain location=91-473; Score=636.3; E_value=2.6e-188; Accession=PF01373.8; Description =Glycosyl hydrolase family 14
  Subcellular localization annotation: CTP_CleavageSite=48; ConfidenceScore=5.18e-01
MALTLRSSTSFLSHVDPASKLLHKPTDEAPPCCVSVPPAPSRRPRALRAAAATATAPSPATHRAPAEAAELLHGGGAGQQHGLPRGGVPVYVMLPLDTVGPGGQLSRQRAVAASLMALAGRRGGGRDGGRVAVMSFHQCGGNVGDTCNIPLPPWVLEEMSSNPNIVYTDRSGRRNPEYISLGCDTLPVLRGRTPIQVYTDYMRSFRQRFRDYLGNVIAEIQVGMGPCGELRYPSYPEANGTWRFPGIGEFQCYDKYMRASLEAAAVASGHEEWGRGGPHDAGEYKQMPDDTGFFRREGTWSTEYGHFFLEWYSGMLLEHGDRVMDAAEAVFGGTGATLSAKVAGIHWHYRTRSHAAELTAGYYNTRGRDGYAPIARMLAKRGAVLNFTCMEMKDEQQPQHASCSPELLVQQVKAATSAAGVQLAGENALERYDDAAFSQVVSTARGAGLAAFTYLRMNKTLFDGDNWGRFVSFVRAMADGGARPALPRCDTGHSDLYVGFVDAAKERKAAEAKGAATTAAL

SEQ ID NO: 71706 - protein, 169 aa, Zea mays
  Coding DNA Sequence Number=SeqID_29927
MDEKRAHGWVGLGPEDDERHGGLEAGFNNDAAGIIKNTTIAKNRLGEDNRHGREKLDAEARHVVASRELRARNRRVRHAQELRAERRPAGRREGILRAERDAGAHTAQVSWAPVNQQGKTPWGDLGRRLEQGGSRKTRGRVRGRELVTGYFSMTKRCRNTEAGHSELLG

SEQ ID NO: 71707 - protein, 165 aa, Zea mays
  Coding DNA Sequence Number=SeqID_29928
  Subcellular localization annotation: CTP_CleavageSite=55; ConfidenceScore=5.39e-01
MSPSTETAQRPPPRQSSTAPAPATPTDTARRHLPIGTKSDARAVGHSGSTETTPSGEARQRYALPHSTQGLQVAPCEGGTHQASESRPSTVHGEDGARAGKPTPSAQRGGKDHRAGNPVDVARGTRGSVTALLWRGKAVGRVETVQHSSMDSPLRKVRYVSLNGP

SEQ ID NO: 71708 - protein, 464 aa, Zea mays
  Coding DNA Sequence Number=SeqID_29929
  Gene Ontology: Biological process=protein localization
  Homolog annotation: Hit_ID=Q336R4; Match level="QueryCoverage=37%, HitCoverage=22%, E-value=3e-79, Identity=84%"; Hit description=C2 domain-containing protein, putative, expressed
MGQAAAPGTAQGPRWWAGRARLGGVAWGHAGESAGDHMMGETDDHVGNPKPGWAVVCIGKYMGWANAHYNRKYTIHVLEWFSMESKLNSTPTHSNTHGFRWINVHLNKALVRLVDTEWCQPLEIVKEDTIVIAMRKQGGTQKFVKAEIRGYEEGSRFLIVFRLGPAYGPIRIENRTSHTTISTCQSGLGEESWIQVKPHATRKYSWDDPYGQKVIDVSIDKGDDTCVLCVDLENPIGSSTSFREHGLMFTVDTSDIKILKFADYIRKEEVYGLPGSELTDHQGSSLKENETEPGAGPLELIVELGVVGISLIDHKPRELLYLHLQKVFVSYLTGYDFGTTSRFKLILGELQLDNQLPLSTMPVVLSTESRPDSNRSVFKANVAVSNVTSNGIQVYPHVYIRVTDQTWRLNIHEPIIWALFDFYSNLRFVTTINSTTVTEVDPEIRIELIDISEIRLKISLGNCA

SEQ ID NO: 71709 - protein, 140 aa, Zea mays
  Coding DNA Sequence Number=SeqID_29930
MACDCGEDKEDDGAEARCGCRVYRGRAITAGKKTSGSEIFHGQAKGSNIMEQELLGGAVDYGSGIGVRGQVLEDEVVADLMEGRDHDQASDLVLEVIVALVEAAKEVEGERAIRDGLYDIREGGCHALQLTAYSMAERSP

SEQ ID NO: 71710 - protein, 132 aa, Zea mays
  Coding DNA Sequence Number=SeqID_29931
MGRGSMARGAEAGQVGGACASRRRGPGHSSADPAGRQGGAYPGGKEGCNEEGGDTPLAWRESRAVYPLGHVADRHKQVEHSGEEPTWAKAPNRALEAGAVLKKGPSGPRGLACGDRVAHGPVRGDGATWMGV

SEQ ID NO: 71711 - protein, 115 aa, Zea mays
  Coding DNA Sequence Number=SeqID_29932
  Subcellular localization annotation: CTP_CleavageSite=51; ConfidenceScore=5.10e-01
MWSSASTRSLQHAPSSSVEPPQSTGESSTLVAALTTIQSAITAAQDREWVVARAYEHKHVAAGVHNNRSLESVVLDPTSPHFARWRDQVLLMLQRYTLVDHVLDNVVAPLAPSWI

SEQ ID NO: 71712 - protein, 93 aa, Zea mays
  Coding DNA Sequence Number=SeqID_29933
MGRPWEKAGARREQENQRPSCRNINDEIGTELVAWCPRMKFKNINAHQQNINAHQQRWEMRTTLEEISRLEHAGSREQAPHRREKYQREKNGG

SEQ ID NO: 71713 - protein, 273 aa, Zea mays
  Coding DNA Sequence Number=SeqID_29934
  Gene Ontology: Mol. function=protein serine/threonine kinase activity; Cellular component=integral to membrane; Biological process=protein amino acid phosphorylation
  Homolog annotation: Hit_ID=Q9LLN7; Match level="QueryCoverage=52%, HitCoverage=13%, E-value=3e-40, Identity=61%"; Hit description =Leucine rich repeat containing protein kinase
  Pfam annotation: Domain name=Pkinase; Domain location=1-213; Score= -62.5; E_value=7.7e-05; Accession=PF00069.15; Description=Protein kinase domain
  Pfam annotation: Domain name=Pkinase_Tyr; Domain location=1-192; Score=-122.8; E_value=6.2e-05; Accession=PF07714.7; Description =Protein tyrosine kinase
  Pfam module annotation: Pfam domain module=Pkinase::Pkinase_Tyr; Domain location=1-213::1-192
MCSSPDFRALVLEFMSNGSLEMLLHSKGRNRSHMGFLTRRMDAMLDLAMAMAYLHHEHHEVVLHCDLKPSNVLFDDDMTAHVAYFGIAELLLGGDNNMVVSTMLGTLGYMAPEYGSLGKASRKSDVFGFEIMLLEVFIGKRPTDAIHPELFVSHPDFRDKFGRVSYEGSAILPVPTTVPTTKVKLMTAGLDLPRVQPRSQQGAPPRPTQASASSSASEEGLRLARPRVSASASASGGVTTSPDLSLGLRRSLRLARPRPQTDYATRDTSLPYH

SEQ ID NO: 71714 - protein, 91 aa, Zea mays
  Coding DNA Sequence Number=SeqID_29935
MDMLGREKSKKGGYKMTWRGLDIDLKDQKVQKIPDDKFAFKKIIYAVDINRALSCILTFCASFTPFAGFYAPGPQSTPAEATPVLPHAPLA

SEQ ID NO: 71715 - protein, 194 aa, Zea mays
  Coding DNA Sequence Number=SeqID_29936
  Pfam annotation: Domain name=DUF937; Domain location=128-189; Score= -30.3; E_value=0.1; Accession=PF06078.2; Description=Bacterial protein of unknown function (DUF937)
MEPVVIQGPKIDEISHQHDHDRRKFYLAASSGGHQWLLLIYMHGYEVEGGASATSACRFTSSTLAATSDKLGGDHALFLRANYPFFITMRHGHGSEIDLEASTLPAHPRTTVGVLPSWIFKKKGYNVPIFDLKKGGYGDVDTWIKKSVKTLDGTPLGEDVGKLQRGVDEADALKRTAELVEKLTQLGGLCHVVG

SEQ ID NO: 71716 - protein, 309 aa, Zea mays
  Coding DNA Sequence Number=SeqID_29937
  Homolog annotation: Hit_ID=P19862; Match level="QueryCoverage=47%, HitCoverage=14%, E-value=1e-55, Identity=70%"; Hit description =Phytochrome A
  Pfam annotation: Domain name=PAS; Domain location=205-302; Score =37.1; E_value=6.2e-08; Accession=PF00989.14; Description=PAS domain
MSSPSLVDTQLIQALEHQTRHHDKSSSALCADVEAHLSAADTDLLDRICYWEASIGTREAGYLPASKSSSLRSIRESDLACPDQFIVDFVVALVHLNPLVHVDFSTVPVANSIDPRHQVPKDKYVIPTLLAKCLINCFDCNCGSMLYDDIKIGAQKSMSAIGREEKEVRFELKTHGSKRDDDPAILVLNACASHDLHDHVVGLQRDYKAIIHDLNPLIPPIFGADQFGWCSEWNAAMTKLTGWHRDEVVDKMFLSEVFNSSNVSYLLRGKDTFVCLCIISNNSLAVEEAQMPHTISLTTMRIMMNASCQ

SEQ ID NO: 71717 - protein, 174 aa, Zea mays
  Coding DNA Sequence Number=SeqID_29938
MAAQTWQRTTWPEFVISAHKHPGVDSLALHVKRNKAISIDGSLPDFTVWRSLATTVCGNAVERQRRRPIPPHRSVDRARERHIRHPQAQAESKIATKLRAATNRMSIKMPTAAARAAPHTPHTRRWIMVCEGRREKKPGAQFYSNKGSAADPEIGQDLNNPRAPSMAASESDFG

SEQ ID NO: 71718 - protein, 494 aa, Zea mays
  Coding DNA Sequence Number=SeqID_29939
  Gene Ontology: Mol. function=transferase activity, transferring hexosyl groups; Cellular component=cytoplasm; Biological process =metabolic process
  Homolog annotation: Hit_ID=Q69JH3; Match level="QueryCoverage=98%, HitCoverage=98%, E-value=1e-116, Identity=46%"; Hit description =Putative indole-3-acetate beta-glucosyltransferase
  Pfam annotation: Domain name=UDPGT; Domain location=15-494; Score= -107.1; E_value=3.1e-05; Accession=PF00201.9; Description=UDP -glucoronosyl and UDP-glucosyl transferase
  Subcellular localization annotation: CTP_CleavageSite=67; ConfidenceScore=5.12e-01
MDDGAATTIVQGGDAHVLLLPFPGMQGHANPMLQLGRRLAFHGLRPTLVVSRHVLSTTSTSRSCPIPVAAISDGFDDGGISSCPDTAEYVRRMEAAGSETLAGLLDAEARAGRPVRVLVYDSHLPWARRVARAAGVAAAAFMTQMCAVGLVYGEAWAGRVALPLADGAALRGRLAVELGPDDVPPFVAAPEWYPAFTESALSQFDGLEHADDVLVNSFRDLEPMEADYLESTWRAKTVGPTLPSFYLDDGRLPCDKTYGVDLFSSTDSEAAPCMTWLDKQEPCSVVLASYGTVANLNKEQLDELGNGLCDSGKPFVWVLRSNEAEKLSRQLGGRCKERGLIVPFCPQLEVLAHKATGTHEMYSTTMRNLFLEEKSLKTFLRKCYIGCFLTHCGWNSTIESIASGVPMVAMPQWADQPTTAKYVESAWGIGVRMRKGSLVRKEVERCIREVMGGERKHVYGRNAARWMHKAKEAMQEGGSSDKNIAEFAAKYLPK

SEQ ID NO: 71719 - protein, 494 aa, Zea mays
  Coding DNA Sequence Number=SeqID_29940
  Gene Ontology: Mol. function=transferase activity, transferring hexosyl groups; Cellular component=cytoplasm; Biological process =metabolic process
  Homolog annotation: Hit_ID=Q69JH3; Match level="QueryCoverage=98%, HitCoverage=98%, E-value=1e-119, Identity=47%"; Hit description =Putative indole-3-acetate beta-glucosyltransferase
  Pfam annotation: Domain name=UDPGT; Domain location=15-494; Score= -102.8; E_value=1.9e-05; Accession=PF00201.9; Description=UDP -glucoronosyl and UDP-glucosyl transferase
  Subcellular localization annotation: CTP_CleavageSite=67; ConfidenceScore=5.12e-01
MDDGAATTIVQGGDAHVLLLPFPGMQGHANPMLQLGRRLAFHGLRPTLVVSRHVLSTTSTSRSCPIPVAAISDGFDDGGISSCPDTAEYVRRMEAAGSETLAELLDAEARAGRSVRVLVYDSHLPWARRVARAAGVAAAAFMTQMCAVGLVYGEAWAGRVALPLADGAALRGKLAVELGPDDVPPFVAAPEWYPAFTESALSQFDGLEHADDVLVNSFRDLEPMEADYLESTWRAKTVGPTLPSFYLDDGRLPCDKTYGVDLFSSTDSEAAPCMTWLDKQEPCSVVLASYGTVANLDKEQLDELGNGLCDSGKPFVWVLRSNEAEKLSRQLGGRCKERGLIVPFCPQLEVLAHKATGTHEMYSTTMRNLFLEEKSLKTFLRKCYIGCFLTHCGWNSTIESIASGVPMVAMPQWADQPTTAKYVESAWGIGVRMRKGSLVRKEVERCIREVMGGERKHVYGRNAARWMHKAKEAMQEGGSSDKNIAEFAAKYLPK

SEQ ID NO: 71720 - protein, 173 aa, Zea mays
  Coding DNA Sequence Number=SeqID_29941
  Gene Ontology: Mol. function=translation initiation factor activity
  Homolog annotation: Hit_ID=Q6ZI51; Match level="QueryCoverage=61%, HitCoverage=21%, E-value=4e-35, Identity=73%"; Hit description =Putative eukaryotic translation initiation factor
  Subcellular localization annotation: CTP_CleavageSite=73; ConfidenceScore=5.62e-01
MALAQGRSLPPAWTLVTPYCKRTRPGRGANTKAAGSTSHACLPPAALPPSRSASRRPIWARARGDNSLVGVARCADDWSRGKKPLPSGPSRYPSLGSAGSGFRDSPVSTDSSDRWSRAALSNDERERPRIVLDPPKRDALATPTPPAEAGRSRPSPFGATRPQEDVLADKGLD

SEQ ID NO: 71721 - protein, 337 aa, Zea mays
  Coding DNA Sequence Number=SeqID_29942
RRSSERGVHRTASEVMERRLRPIAPKPMPPLMPTGAAATSVLWRARKRGRDEDRLLLSPPLSKRETEREAAGASSYPNPQPPASAAPVAATRRGRRYVPMPEGLLTGCEERLRRLSLVAGSSPAAALPWPAAAAAPSSSDAATTRRVFPVERDLISKLQVPKVIRPRPARPLWTTICIDSSNIAVVGSGPETAASASNKTAREVEAELELPGALPAVVSGPRNRVHLVNDAYKAMVGQPVCPWLDALPGAGASRRINGIVALDVRTFGPAPRLPKNAGSSSDAFPCTARITWEHGGGSAIASLTVPCAVEHLAGGSGDYRFIWRFDSSRASIIYCIA

SEQ ID NO: 71722 - protein, 79 aa, Zea mays
  Coding DNA Sequence Number=SeqID_29943
MADGETSSWRGTTTARLLHRDRARVETECAGYAGRAGAAQMSHAGSLRWAGWGAPPCGEKAECHRAGQDSSTTALTPPA

SEQ ID NO: 71723 - protein, 401 aa, Zea mays
  Coding DNA Sequence Number=SeqID_29944
  Homolog annotation: Hit_ID=Q10LV3; Match level="QueryCoverage=89%, HitCoverage=77%, E-value=2e-20, Identity=29%"; Hit description =Expressed protein
  Pfam annotation: Domain name=DUF1618; Domain location=211-343; Score =66.4; E_value=9.5e-17; Accession=PF07762.4; Description=Protein of unknown function (DUF1618)
MEAPQPWVILRRVLVRKDPEAKQAGHPPAISTALRSPPRVTNLAVAVGPNAHPGRPVRFYEVPYLVATGPSALLYCFYFDVIPLVTDELLLARRFVAPADAKRQPTTGSADRVPRRTGSSSMPVTYNIRNVGLIPGLSGGYVIAELQVTKRSNRAKLFRLMSGDDRRSEAGRLFEGDRQRWYETELHCPLPTMEREWAPQGVVSLANKLWWFDLSWGLLSCDPNDIVHPVLSYHKLPPGCVFLEPMAFIHYIRCICVSENMLRYVEMVRGSFRDGMFVGEQKVVMWTLVPVPSGDGDIEWKWHKSYEMDFKDIWDDAIYKAAGLPALVPQIVLVSPRNHNVVYFFRDNRLFGIDVPSHRLVHVLEDCYKLEAPVHSLSVFPWDLPSWIANGLRVLVNAGRT

SEQ ID NO: 71724 - protein, 128 aa, Zea mays
  Coding DNA Sequence Number=SeqID_29945
  Subcellular localization annotation: CTP_CleavageSite=64; ConfidenceScore=5.33e-01
MPPNGTPTVAPGIRVAPPSRTAPPVCVGPACGDGSRAPPVPTPSREVETSGGRRCRPTSGGQVVLGHFAGDEYHKAVLRHHAGGRGQRHCHHARLLPAAILIRVASVLSSTAPSGHSGTTPRSMTACT

SEQ ID NO: 71725 - protein, 120 aa, Zea mays
  Coding DNA Sequence Number=SeqID_29946
  Subcellular localization annotation: CTP_CleavageSite=61; ConfidenceScore=5.17e-01
MKNPIVANFPWSSENIASSPGNTVVDTLRTDPLSHARFVQIHMRTTPLNGLAGVLTPPSLRADKGVSGVMPVCLLPVMGVAGDENRDRSQVFDRSQVRGHNVVREIEGKGLGEDVSDTLE

SEQ ID NO: 71726 - protein, 83 aa, Zea mays
  Coding DNA Sequence Number=SeqID_29947
MAQKIRMWPELKQRLLEKEHHMRIFVNSENYFRINMEITRSEIYTRVGDNQIIGQIHRGSRDLDDKANMIHKKKGYQIRQKER

SEQ ID NO: 71727 - protein, 66 aa, Zea mays
  Coding DNA Sequence Number=SeqID_29948
MGNTTLTVIDTGSTRFVDPSLTIETFLDTYIFQVCMMSSQGPLTNFVHAYYLSHFAVDILAQSYTE

SEQ ID NO: 71728 - protein, 78 aa, Zea mays
  Coding DNA Sequence Number=SeqID_29949
MRTHNERHCSSPSFCSRLGVQATEEMEQASKDALLTHCPGAGTAEQGHGGTFETGEGRWVGLLLAGVTVCLVRCEDGP

SEQ ID NO: 71729 - protein, 97 aa, Zea mays
  Coding DNA Sequence Number=SeqID_29950
  Gene Ontology: Mol. function=structural constituent of ribosome; Cellular component=intracellular; Biological process=translation
  Homolog annotation: Hit_ID=Q9BZK7; Match level="QueryCoverage=56%, HitCoverage=12%, E-value=7e-15, Identity=60%"; Hit description=F-box- like/WD repeat protein TBL1XR1
MSANLRPFNHLSDQNKIWSMKQDKCVFDFKEHTKEIYTIRWSPTGPGTNNPNQQLLLARYWSTELGIGINFSKFCCLVVREIEILNQRPNSLELGYN

SEQ ID NO: 71730 - protein, 205 aa, Zea mays
  Coding DNA Sequence Number=SeqID_29951
  Gene Ontology: Mol. function=structural constituent of ribosome; Cellular component=intracellular; Biological process=translation
  Homolog annotation: Hit_ID=Q7EYK0; Match level="QueryCoverage=81%, HitCoverage=27%, E-value=1e-94, Identity=95%"; Hit description =Putative WD-40 repeat protein family
  Pfam annotation: Domain name=WD40; Domain location=106-144; Score =40.1; E_value=7.7e-09; Accession=PF00400.22; Description=WD domain, G-beta repeat
  Pfam annotation: Domain name=WD40; Domain location=148-185; Score =23.1; E_value=0.001; Accession=PF00400.22; Description=WD domain, G -beta repeat
  Pfam annotation: Domain name=WD40; Domain location=65-103; Score =30.0; E_value=8.2e-06; Accession=PF00400.22; Description=WD domain, G-beta repeat
  Pfam module annotation: Pfam domain module=WD40::WD40::WD40; Domain location=106-144::148-185::65-103
MSVLFLCFLCFLPFSSFLFPWFLDGRESEGKKMWSGDSTARIWTIPDGPCGSNMQSSPPGVHVLKHFKGRTNEKSKDVTTLDWNGEGTLLATGSYDGQARIWSRDGDLKQTLFKHKGPIFSLKWNKKGDFLLSGSVDKTAIVWDTKTWECKQQFEFHSAPTLDVDWRNNNSFATCSTDNMIYVCKIGEQRPVKAFSGHQVSLLGD

SEQ ID NO: 71731 - protein, 386 aa, Zea mays
  Coding DNA Sequence Number=SeqID_29952
  Gene Ontology: Mol. function=hydrolase activity, hydrolyzing O -glycosyl compounds; Cellular component=chloroplast; Biological process=carbohydrate metabolic process
  Homolog annotation: Hit_ID=P49235; Match level="QueryCoverage=99%, HitCoverage=74%, E-value=1e-155, Identity=65%"; Hit description=Beta- glucosidase, chloroplast precursor
  Pfam annotation: Domain name=Glyco_hydro_1; Domain location=34-385; Score=379.1; E_value=7e-111; Accession=PF00232.9; Description =Glycosyl hydrolase family 1
MAMNHAGHPGPNHESFSRHHLSCSPQNSKPRCNLSFRPRAERIEGGWNEDGKGPSSWDYFCHNFPEWILDKSNGDVAADSYHMYPEDVRLLKEIGMDAYRFSISWSRILPNGTLEGGINPDGIKYYKNLINLLLENGIEPFVTLFHWDTPQALMDKYGGFLDKSIVKDYTDFAKVCFDNFGDKVKNWFTFNEPETFCTFSHGTGQCAPGRCSPGIITPTGSTSCANPIGNSLTEPYIVGHNLLRAHAEVVDLYNKHYKIDYKGENGRIGIVFDVMGRVPFEKSAFIDQQAEERSWDINLGWFLEPVVRGDYPFSMRSLVRDRLPFFTNEEREKLVGSYDMLGLNYYTSRFSKHIDITQHNTLRLNTDDAYASQETKGPDGEPIGPP

SEQ ID NO: 71732 - protein, 86 aa, Zea mays
  Coding DNA Sequence Number=SeqID_29953
MEKARRRHVPAFREWNYYYSSSSSTSPDSAPAAAEPCWWPVDEDLYRVPPPDDNDGAAAVSRLPRRRKRAARRSLWMGCLGLNCVA

SEQ ID NO: 71733 - protein, 121 aa, Zea mays
  Coding DNA Sequence Number=SeqID_29954
MGGDRYEDVSNMMGMGLGCYNPVGNYPLTSLASGDRTWAESAIFAGGYGSLGLIVTSSERKLLVLQAHMVSGCGYTGHGSMAEMMRVGLCGQLDRVRVVLQGGVLVEEDIPSNGAHMSAAQ

SEQ ID NO: 71734 - protein, 172 aa, Zea mays
  Coding DNA Sequence Number=SeqID_29955
MSLTASLVQLDVDGGCSIHTRRCEPKHDEHQQRCSSILWAWAKAPGHRHVTKNMVWGSAQTEEYGGGVVTRAIRRHPWQHDIRVGEDKEGVGEMRIDYRSSRRLRRRNPRLPHGIAAVKYGTGRAGHRSRLWRRREAELRQANDGDDDGGNADDDVQRCEDGAGWARKSMDS

SEQ ID NO: 71735 - protein, 115 aa, Zea mays
  Coding DNA Sequence Number=SeqID_29956
MADGEAYQIFERAQQLGQAQEEGEKARNGEGEEMSIGRGRESASAPLMMLRPSLQRDKMKLLSGGEEKGVLQWGKESSRRGVSAPVGGEGPARAAARKIERWQLRLSSVQSACVL

SEQ ID NO: 71736 - protein, 74 aa, Zea mays
  Coding DNA Sequence Number=SeqID_29957
MSAAQGLDTMTEQLLSCMQERSVGVIGVCLFLVALQLCHLSQQRSVGVIGVSDQLGCILLVCLVYRQRMPEPDD

SEQ ID NO: 71737 - protein, 148 aa, Zea mays
  Coding DNA Sequence Number=SeqID_29958
MEKGFGCPPWLPGSQARQGFAPGAEHGRSGRGRRSGEDGGQVGLLDGIHGKAGVAGLEKGRKPDGRGSVRAESKQGAQAKGTSSPARARTLRNALCAGLEMEILGLVPWRRSTLEEGRRNRGASLLCAPWRPWAREGRPGVHRWSRGT

SEQ ID NO: 71738 - protein, 130 aa, Zea mays
  Coding DNA Sequence Number=SeqID_29959
MAARRGPRGRAQGDGEPRRWGPEAARSGPGVAREGDQGVAPRGPGAASPVARTAASGGRGSRARGGDAAPGEQGPARPGRAGAVPPGPRLHRGKTGGARRGRKGRGRGRERGRGELTSGIQISAITVSKT

SEQ ID NO: 71739 - protein, 35 aa, Zea mays
  Coding DNA Sequence Number=SeqID_29960
MAIWPRLLLREAWASSEPKATLGRGEIVSPEWTEP

SEQ ID NO: 71740 - protein, 53 aa, Zea mays
  Coding DNA Sequence Number=SeqID_29961
MAAVGFNRMRREWATGGERRGARKLYSPRRAIPQATASTESWQELAADFARYD

SEQ ID NO: 71741 - protein, 63 aa, Zea mays
  Coding DNA Sequence Number=SeqID_29962
MLKEEVSSISSNLMAWTHPTSWCELLSLILRLDAGIEAQILELELVTENDNSPFTYIIIDEQT

SEQ ID NO: 71742 - protein, 54 aa, Zea mays
  Coding DNA Sequence Number=SeqID_29963
MENDRKVTSKKKEGGDLAGEPMVGNKGPACESKEGKDKRPDRWRRRGMSYVTSR

SEQ ID NO: 71743 - protein, 56 aa, Zea mays
  Coding DNA Sequence Number=SeqID_29964
MNGKPTCTDIMDYVLQKLRGFQFLQCEGEERWDGSQRRQQQQQAQGYRNQQHALMS

SEQ ID NO: 71744 - protein, 283 aa, Zea mays
  Coding DNA Sequence Number=SeqID_29965
  Gene Ontology: Mol. function=peptidase activity; Cellular component =extracellular region; Biological process=proteolysis
  Homolog annotation: Hit_ID=Q8RWB6; Match level="QueryCoverage=84%, HitCoverage=53%, E-value=5e-67, Identity=56%"; Hit description =Putative serine protease-like protein
MEAGRPSVRKGAMEDHIRSFYFYFTIYTDSQPTFSHGANALSEAWNGYRKPPSEQKYSEDVGHIHQGLNFEPTREELNSLAKACSRLWELDMNRIVPGKDYRIDCGEGKKVYQKGDMASESLFSWLGDDVLRKPTYSHFCALLDNYNPHQDKHEEIAFVEEIARTSPIKYLHRYLVQKGVVPQDYEDFKRMLASLWFDLYGRGGNSSCSTAFEHVFVGEIKGRGQGESEFYLEEAKGNVDYQGEDNRVDIGPYSVNVKCTDWGTTKLDQPFPLQRTDYLSLGP

SEQ ID NO: 71745 - protein, 87 aa, Zea mays
  Coding DNA Sequence Number=SeqID_29966
MAVRCWPMGHGANDLGAACVLELVLPQLGLRGGVHVDGGSDEKIPFGLRGEGGEVEGGWGGGLEVEVVRAPSASQRQRTGMGAGWER

SEQ ID NO: 71746 - protein, 54 aa, Zea mays
  Coding DNA Sequence Number=SeqID_29967
MAGSVVVCGAGKWVAVACRRLWWCACQRIWRLAEVAARDDQREVQCAAHFVPGS

SEQ ID NO: 71747 - protein, 183 aa, Zea mays
  Coding DNA Sequence Number=SeqID_29968
  Subcellular localization annotation: CTP_CleavageSite=71; ConfidenceScore=5.74e-01
SSTPAASLTTASTSPPSPSQFPSAPTTPAAPTPTSDASAPTPIVLAPPLPVAPTHAPSTPTPPLNHRTEIAADLSSPPCCAHPCPLRTRASPQPPRRDRRRSEMLSCTPPILPEIAVGSTCCHARCRFGMPVMVANPKICVAKAVDAFVELAKASRCGAPTDSHASCPWCSLAEAVATGSNHY

SEQ ID NO: 71748 - protein, 110 aa, Zea mays
  Coding DNA Sequence Number=SeqID_29969
  Pfam annotation: Domain name=zf-DNL; Domain location=1-57; Score =11.4; E_value=8.8e-05; Accession=PF05180.3; Description=DNL zinc finger
  Subcellular localization annotation: CTP_CleavageSite=44; ConfidenceScore=5.09e-01
MRVAFACSVCGQRTTKAINPHAYTDGTMFVPLFNATLVLPIFCAVMFGWPKGFGNRLSLTQYLMTSKRNKSGNGGLTASLLRGGGSQILATALICSRSDEKKAVGIGSTL

SEQ ID NO: 71749 - protein, 131 aa, Zea mays
  Coding DNA Sequence Number=SeqID_29970
MGPVRPGLDLSTICSSEDDDVNSAVDVEADEDGEHPEVRQAAQRGGVEPGPGPAGRGGDVGGQVEAGGVEHACVVGRELALQARQRRVGVGSRVELRPRRVAEEVRHQPEDGRQLRPRQLWRRRVPSRDCG

SEQ ID NO: 71750 - protein, 176 aa, Zea mays
  Coding DNA Sequence Number=SeqID_29971
MTATAILAVHVLLCRLPSKEKKRSRQKCSNWINSGLERAKESDALNLGLKQFLLVTFGTIVGSLITLMELVPPMSLYRIIYELSPPSSLGLFSNFFDIHLGDLSDPETIRAHICLIRFGTYTCGACTMSCMLKWDMATIMEYKGLPMQQAVDYLKGKCALGPFLRILVIKCPTQMP

SEQ ID NO: 71751 - protein, 71 aa, Zea mays
  Coding DNA Sequence Number=SeqID_29972
  Homolog annotation: Hit_ID=Q2HW33; Match level="QueryCoverage=86%, HitCoverage=23%, E-value=2e-07, Identity=41%"; Hit description =Protein phosphatase 2C-like
MYYLADEPEVDFVWQPNQESSVLVMSRAFDDYYIVDCGVISAPEAWGVLSNDETMKIVSYIEVGMILMVVM

SEQ ID NO: 71752 - protein, 272 aa, Zea mays
  Coding DNA Sequence Number=SeqID_29973
  Gene Ontology: Mol. function=oxidoreductase activity; Cellular component=proton-transporting two-sector ATPase complex; Biological process=ethylene biosynthetic process
  Homolog annotation: Hit_ID=Q6JN56; Match level="QueryCoverage=99%, HitCoverage=91%, E-value=1e-137, Identity=86%"; Hit description=Acc oxidase
  Pfam annotation: Domain name=2OG-FeII_Oxy; Domain location=143-243; Score=147.4; E_value=3.9e-41; Accession=PF03171.10; Description=2OG -Fe(II) oxygenase superfamily
MVVPVIDFSKLDGAERAETLAQIANGCEEWGFFQLVNHGIPLELLERVKKVCSDCYRLREAGFKASEPVRTLEALVDAERRGEVVAPVDDLDWEDIFYIHDGCQWPSDPPAFKETMREPWTRTSASPGAPSRTPSPAAAGTIPFFGTKVSHYPPCPRPDLITGLRAHTDAGGVILLFQDDKVGGLEVLKDGEWTDVQPLEGAIVVNTGDQIEVLSNGLYRSAWHRVLPMRDGNRRSIASFYNPANEATISPAAVQASGGDAYPKYLFGDYMD

SEQ ID NO: 71753 - protein, 1046 aa, Zea mays
  Coding DNA Sequence Number=SeqID_29974
  Gene Ontology: Mol. function=RNA-directed DNA polymerase activity; Cellular component=intracellular; Biological process=RNA-dependent DNA replication
  Homolog annotation: Hit_ID=UPI00005A975E; Match level="QueryCoverage =95%, HitCoverage=59%, E-value=0.0, Identity=86%"; Hit description =PREDICTED: similar to Retrovirus-related Pol polyprotein from transposon 297
  Pfam annotation: Domain name=RVT_1; Domain location=56-225; Score =149.6; E_value=8.5e-42; Accession=PF00078.17; Description=Reverse transcriptase (RNA-dependent
  Pfam annotation: Domain name=RnaseH; Domain location=455-582; Score =8.4; E_value=9.6e-06; Accession=PF00075.14; Description=RNase H
  Pfam annotation: Domain name=rve; Domain location=780-939; Score =124.2; E_value=3.7e-34; Accession=PF00665.16; Description=Integrase core domain
  Pfam module annotation: Pfam domain module=RVT_1::RnaseH::rve; Domain location=56-225::455-582::780-939
MPGIPRDVAEHSLDIRAGARPVRQPLRRFDEEKRRVIGEEIHKLIAAGFIKEVFHPEWLANPVLVRKKGGKWRMCVDYTGLNKACPKVPYPLPRIDQIVDSTAGCETLSFLDAYSGYHQIRMKESDQLATSFITPFGMYCYVTMPFGLRNAGATYQRCMNHVFGEHIGRTVEAYIDDIVVKTRKASDLLSDLEVTFRCLKAKGVKLNPEKCVFGVPRGMLLGFIVSERGIEANPEKIAAITSMGPIKDLKGVQKVMGCLAALSRFISRLGERGLPLYRLLRKAECFAWTPEAEEALGNLKALLTKAPILVPLADGEALLVYVAATTQVVSAAIMVERQEEGHALPVQRPVYFVSEVLSETKIRYPQVQKLLYAVILTRRKLRHYFESHPVTVVSSFPLGEIIQCREASGRIAKWAVEIMGETILFAPRKAIKSQVLADFVAEWVDTQLPTAPIQPELWTMFFDGSLMKTGAGAGLLFISPLGKHLRYVLRLHFPASNNVAEYEALVNGLRIAIELGVRRLDARGDSQLVIDQVMKNSHCRDPKMEAYCYEVRRLEDKFYGLELNHIARRYNETADELAKIASGRTTVPPDVFSRDLHQPSVKIDDTPEPEAPSAQPEAPLARPEAPSVQPEVPSAPEGEALDVEEEQSGATPDRNWQAPYLQYLRQGELPLDQAEARQVVRRAKSFVLLGDEEELYHRSPSGILQRCISIAEGQELLQEIHSGACGHHAVPRALVGNAFRQGFYWPTAVADATRIVGTCEGCQFYAKQTHLPAQALQTIPITWPFAVWGLDLVGPLQKAPGGYTHLLVAIDKFSKWIEVRPLNSIGSEQAVAFFTNIIHRFGVPNSIITDNGTQFTGRKFLDFCEDHHIRVDWAAVAHPMSNGQVERANGMILQGLKPRIYNDLNKFGKRWMKELPSVIWSLRTTPSRATGFTPFFLVYGAEAISPEKILSSLEEARDKALLHSARYQQSLRRYHARGVRSRDLQVGDLVLRLRQDARGRHKLTPPWEGPFVIAKVLKPGTYKLANNQGEVYDNAWNIKQLRRFYP

SEQ ID NO: 71754 - protein, 168 aa, Zea mays
  Coding DNA Sequence Number=SeqID_29975
  Subcellular localization annotation: CTP_CleavageSite=56; ConfidenceScore=5.36e-01
MQAACNRAKWARFSDSQRTSMEAQAHASRNRRAGCCMQATAPPLAPPSRLFGCGTNAATRGDPAHDPAAPARRRFWQEKRPTLRLRRNNHAKKKGPGKGDTPKRILPCEGTGLRAPLLIRGSKAGPPRGSTVASDRVGPTPTTGQRFEGRPPEGLHGRLRLLGLRAHY

SEQ ID NO: 71755 - protein, 94 aa, Zea mays
  Coding DNA Sequence Number=SeqID_29976
MSRTFDNYYIKDCDVISAPEVTQRRTDSNDQFVILTTVASAYGGAWLMTDDVRENFFRQVWDVLSNGSQIDYNCDIYRSPHDTDGCNVVVKQIY

SEQ ID NO: 71756 - protein, 154 aa, Zea mays
  Coding DNA Sequence Number=SeqID_29977
  Subcellular localization annotation: CTP_CleavageSite=59; ConfidenceScore=5.36e-01
MACSGSNHTSGAQQTSQWSIGYGEHCHLPRGLTKARPRPALARSRAVVFNQALSMTSPVAATGREVPFGGPPLALLVFQGQGSTKTCTVHYVGLLLGLAHRLQHKLMASRKDKATSGPKLMAFGETIGDTLQALSSAITKTERGCCLPFESDGW

SEQ ID NO: 71757 - protein, 162 aa, Zea mays
  Coding DNA Sequence Number=SeqID_29978
  Gene Ontology: Mol. function=isomerase activity; Cellular component =mitochondrion; Biological process=metabolic process
  Homolog annotation: Hit_ID=Q10MF8; Match level="QueryCoverage=89%, HitCoverage=54%, E-value=1e-50, Identity=71%"; Hit description=Enoyl- CoA hydratase/isomerase family protein, expressed
  Pfam annotation: Domain name=ECH; Domain location=24-162; Score=40.3; E_value=2.4e-11; Accession=PF00378.10; Description=Enoyl-CoA hydrataseisomerase family
  Subcellular localization annotation: CTP_CleavageSite=42; ConfidenceScore=5.21e-01
MGTASPDSGDLIEVGPARPGSPVAVVTINRPSALNALTKPMMISMAAAFRRLGADDAVAAVVLAGRGRAFCSGVDLTAAAEVFKGDVKDVATDPVVQMELCRKPIVGAIAGFAVTAGFEIALACDILVAGRSTKFLDTHAKYVYHPPLHTDHCIVESASVLT

SEQ ID NO: 71758 - protein, 76 aa, Zea mays
  Coding DNA Sequence Number=SeqID_29979
MALATSLLSPSRRWRVRGKPRKVATRVGEATEGGKADIIHGEIVNGMRERVGTLSAAMAYRRRPSPGGKEDERGER

SEQ ID NO: 71759 - protein, 90 aa, Zea mays
  Coding DNA Sequence Number=SeqID_29980
  Subcellular localization annotation: CTP_CleavageSite=46; ConfidenceScore=5.38e-01
MAPTAAASSPWPSTNQAVNVLGDTLPSSSVGRAAVPTVEVYSVIIVCGSIEPWYAIVLPWTSSPKNNNMSIVIISKTPVGKINDETYNSG

SEQ ID NO: 71760 - protein, 102 aa, Zea mays
  Coding DNA Sequence Number=SeqID_29981
MAHVGGAAKARFPWSQRVLEASGGTLPYLVAGAWPPGGSAAQHGSRGAHGDTAAAPRGGTGAATQRSWARLRLLWVRPRRLWACSPGHGSGVATERRHGSGR

SEQ ID NO: 71761 - protein, 199 aa, Zea mays
  Coding DNA Sequence Number=SeqID_29982
  Gene Ontology: Mol. function=cellulose synthase (UDP-forming) activity; Cellular component=membrane; Biological process=cellulose biosynthetic process
  Homolog annotation: Hit_ID=Q8W1N4; Match level="QueryCoverage=82%, HitCoverage=33%, E-value=1e-81, Identity=84%"; Hit description=CSLF6
MFYVYLAIVLGTLLILAVLEVKWAGVTVFEWFRNGQFWMTAQLLRVVFRRDISFKLTSKQPAGDEKKDPYADLYVVRWTWLMVTPIIIILVNIIGSAVAFAKVLDGEWTHWLKVAGGVFFNFWVLFHLYPFAKGILGRHGKTPVVVLVWWAFTFVITAVLYINIPHIHGPGGKHGGAIGRHGGDAHHHGKKFDGYYLWP

SEQ ID NO: 71762 - protein, 109 aa, Zea mays
  Coding DNA Sequence Number=SeqID_29983
MATRLLVRPSIIHLLTAPLFQRLNHPTEDKRMRIAAAQARRCAYFLFLSLGLGPNGCTMAAWRALCFWRQQAITGNINIIESFLIRAPMLKRFGTAIGPFLCAGFCQDR

SEQ ID NO: 71763 - protein, 118 aa, Zea mays
  Coding DNA Sequence Number=SeqID_29984
MAVSFAECPRWTLGKVAVDAAQQDDDDTQQDDYTTRRRRRSATGGAAGRCRCGVAGRRRRSAGRLNNKTTMKLSNRWNSRPLSMRRSRMTMTLNRTTTQQDDDDAQQQVEQQAAVDAA

SEQ ID NO: 71764 - protein, 356 aa, Zea mays
  Coding DNA Sequence Number=SeqID_29985
  Gene Ontology: Mol. function=DNA binding; Biological process =regulation of transcription
  Homolog annotation: Hit_ID=Q84UP8; Match level="QueryCoverage=73%, HitCoverage=74%, E-value=4e-79, Identity=64%"; Hit description=Myb family transcription factor-like protein
  Pfam annotation: Domain name=Myb_DNA-binding; Domain location=168 -219; Score=41.7; E_value=2.5e-09; Accession=PF00249.21; Description =Myb-like DNA-binding domain
MELFPSQPDLSLQIGLPASATPHDHHHGAALSARFLAAAAGGGGNGIPGNPAVAMAPSLQLPMPMPLPMPMPMPPNAAAAAGAAGGLYYHPDAAAMLRPIRGVPLYQHPHTHAVPPTFPPHAAGAAGPCFCEPCHVAAGAWRRAGCGVGTRVVAGFPTAAKRAARAPRMRWTSTLHARFVHAVELLGGHERATPKSVLELMDVKDLTLAHVKSHLQMYRTVKNTERPAASSDLADGFENGSAGEICDDNSLDLHGAGRPESGAARHGRLAACNDHGSSTGAHGALWNSSSREDWTGFPSESNTGRMSMHSRSLKDQTMQSKSLEILSDMNSSCVSETTSCASELNLEFTLGPRIRH

SEQ ID NO: 71765 - protein, 562 aa, Zea mays
  Coding DNA Sequence Number=SeqID_29986
  Gene Ontology: Mol. function=cellulose synthase (UDP-forming) activity; Cellular component=membrane; Biological process=cellulose biosynthetic process
  Homolog annotation: Hit_ID=Q944D9; Match level="QueryCoverage=84%, HitCoverage=52%, E-value=1e-169, Identity=62%"; Hit description =Cellulose synthase-like protein OsCslF4
  Pfam annotation: Domain name=Cellulose_synt; Domain location=85-562; Score=306.6; E_value=4.7e-89; Accession=PF03552.5; Description =Cellulose synthase
MAAGQQQASGGAKHGCVCGFPVCACAGAAAVASAASSADMDRVAVAATEGQIGAVNDESWIAVDLSDDGLSADGADPGVALEDRPVFRTEKIKGVLLHPYRVLIFVRLIAFTLFVIWRISHRNPDALWLWVTSIAGEFWFGFSWLLDQLPKLNPINRVPDLAALRQRFDRAGGGAGGGTSLLPGLDVFVTTADPFKEPILSTANSVLSILAADYPVERNTCYLSDDSGMLLTYEAMAEAAKFATVWVPFCRKHGIEPRGPESYFDLKSHPYMGRSQEDFVNDRRRVRKDYDEFKARINGLDHDIKQRSDAYNAARGLKDGEPRATWMADGTQWEGTWVEPSENHRKGDHAGIVLVLLNHPSHSRQLGPPASADNPLDLSMVDVRLPMLVYVSREKRPGHNHQKKAGAMNALTRCSAVLSNSPFILNLDCDHYINNSQALRAGICFMLGRDSDTVAFVQFPQRFEGVDPTDLYANHNRIFFDGTLRALDGMQGPIYVGTGCLFRRITLYGFDPPRINVGGPCFPALGGMFAKAKYEKPGLELTTTKAAVAKGQARLPASCPRS

SEQ ID NO: 71766 - protein, 114 aa, Zea mays
  Coding DNA Sequence Number=SeqID_29987
MEMTHEVWKRLEDYYEGTSVVKEAKVSTFKDNYAKFKLSSAREPGTRKNGQLRRLTLQGGPDDQLFDDDQLREMDRMTNSPMTNSDDQLPRPTLRGGLDDQHSLCSQHRGCVAH

SEQ ID NO: 71767 - protein, 44 aa, Zea mays
  Coding DNA Sequence Number=SeqID_29988
MALFTVRQRSRPLAKLTVALLAHRIVRTSIRAPYKEDLKGVGII

SEQ ID NO: 71768 - protein, 91 aa, Zea mays
  Coding DNA Sequence Number=SeqID_29989
MYKIPWSHHSAEEATWETEDFLRSRFPDFLPKEVDCNLADGEYILVPEQGAAQEVAPDPAPEPAPEDLPATALEGKPRFMHNLLFMLFYFT

SEQ ID NO: 71769 - protein, 273 aa, Zea mays
  Coding DNA Sequence Number=SeqID_29990
MTREVSKGQRAPMSLDQRPRHIARRTNLVAARSTDEGKQGTQRSVGELNIGSDIRGQRCGQGRAHERLELGSLWLAGRSSRGKGLRLGAAARTSAAGSQDETAAKQALAGTGVTARELGTVPEPEAERAESTMVDSRESARRRGEQGVNWVELSQGASANAKPYADHGKRTVGQRKPPWEGGQAGGAREGSRGAGRAQERCREERSKGRSARAQEMGTRRGHGEEMARARARKKQIRTSGKKIWGEEERRGIEALEIFFFFLEIHRYFELRFF

SEQ ID NO: 71770 - protein, 99 aa, Zea mays
  Coding DNA Sequence Number=SeqID_29991
MDPSKDSDDIDIEEDNTIIRPTKSSHVDFGKPKTKEGYAEVAMLPAMEGTYLIIAALETQEAKRLFLLPENVEFAAGPAWAPDTVRCTTAQSGAPHAGA

SEQ ID NO: 71771 - protein, 125 aa, Zea mays
  Coding DNA Sequence Number=SeqID_29992
MDGGWGRKGGATSIEVRQNGSDGGEILEDAEPTTTVAAENGARGMKETTLGDAKVLMEGLVLIVVYRDASKQAEQGIVGPSGAMSMEQQEVGRWRRTMQRMTCWRLSGNGGEGRCGGRERRSTVG

SEQ ID NO: 71772 - protein, 342 aa, Zea mays
  Coding DNA Sequence Number=SeqID_29993
  Gene Ontology: Cellular component=integral to membrane; Biological process=peroxisome organization and biogenesis
  Homolog annotation: Hit_ID=Q94DE5; Match level="QueryCoverage=99%, HitCoverage=75%, E-value=1e-152, Identity=79%"; Hit description =Putative betaine/proline transporter
  Pfam annotation: Domain name=Aa_trans; Domain location=2-328; Score =11.0; E_value=9.5e-08; Accession=PF01490.8; Description =Transmembrane amino acid transporter protein
PGWGKYYIGPIQFLVCFGAVVGCTLLAGQSMKAIYLLANPGGTIKLYVFVAIFGVFMMILAQLPSFHSLRHVNLVSLLLCLAYSFCAVAGSIYLGNSDKAPPKDYSISGDAQNRVFGVFNAIAIIATTYGNGIIPEIQATVAAPVTGKMFRGLCLCYAVVVTTFFSVAISGYWAVGNQAQGILLSNFMVDGAAVIPKGLLLVTQLFTLLQLSAVGVVYLQPTNEVLEGLFSDAKQGQYAARNVVPRLVSRTVAVALATTVAAMLPFFGDMNSLIGAFGFLPLDFAVPALFYNVTFKPSKKGFVFWLNKTIAVVFSGLAVIASVAAVRQIALDAKTYKLFANV

SEQ ID NO: 71773 - protein, 56 aa, Zea mays
  Coding DNA Sequence Number=SeqID_29994
MFDRRFYSETVDTLVSFKSELMDDTLINRAMRKKNQVDSKRGLIRKLKLMNQPEDG

SEQ ID NO: 71774 - protein, 617 aa, Zea mays
  Coding DNA Sequence Number=SeqID_29995
MADSTAMTVDFLRARLLSERSVSRAAKERADELAKRVAELEEQVRAVTAQRRQAEWAAAEVLAVLESQGFGDHLSDGADDSDGSEVQDGEEEDGKSRGDTAGAAGEDGEGEPSAAKGEAEDALSGTTAQPGGLSWKGRSVSPRKARQLKQRHRRSFFYLLSSADPSPKYRVGQSCRKNKRRMELSNVSRSVATEEDGEGGGSQRGRQDGPDFTDDGEVGVDERSPGAGGGVGQYVIRYEKDGGEMARVLERQAELIGQYEEEENAQREWEKQYNENRNANKGDVEPKNNAKNVPSTNNPSAERLPNKESSNNSAVPRQDQTSDGDSGYSRDTRSPKRDTTVSAPSDGSPSSDTLNSKASGWSSSRFHDCTDRQLDDTPAPCSIADIESVLQALQRARISLSAKLSKPVPPSQVTLALPAPGDEHREYDDEDLPTDEGSYGDEKLSGSSPSCQEMLALPAPEDYHGHEREGSPLVSHVEKASTSSPPREEMLALPAPRDEYRNRKEAEDYMRIPAGIPGLFRLPVDSFPVDEKMFSGTACGSGFRLGLRAAAPTSGRCISVPTPPDLTVGSGRFLCGIPGLQSMSRGIKGRDEDLFNSGVSPAPSSIRGCSNYDKRLE

SEQ ID NO: 71775 - protein, 117 aa, Zea mays
  Coding DNA Sequence Number=SeqID_29996
  Gene Ontology: Mol. function=transferase activity; Biological process= carbohydrate metabolic process
  Homolog annotation: Hit_ID=Q1S8P3; Match level="QueryCoverage=66%, HitCoverage=16%, E-value=4e-09, Identity=48%"; Hit description=Three- deoxy-D-manno-octulosonic-acid transferase, N-terminal
MALVAENGSLRRGEGGGGEKHGEAGTEADAVANNGKRGPFPRQGIRHETTRAESPAEAAPRTAVLAAPATASGAPALAVAATIALPAPPRGSLSCTARITPIPHATPRGSAASIVRH

SEQ ID NO: 71776 - protein, 85 aa, Zea mays
  Coding DNA Sequence Number=SeqID_29997
  Homolog annotation: Hit_ID=Q94DE5; Match level="QueryCoverage=97%, HitCoverage=18%, E-value=5e-28, Identity=73%"; Hit description =Putative betaine/proline transporter
MRYTLDEAGSWLHCGYHLTTSIVAPALLSLPFAFASLGWAAGTICLVIAAAVTFYSYNLISLVLEHHARQGRRQLRFRDMATDIL

SEQ ID NO: 71777 - protein, 124 aa, Zea mays
  Coding DNA Sequence Number=SeqID_29998
  Homolog annotation: Hit_ID=Q5N911; Match level="QueryCoverage=47%, HitCoverage=22%, E-value=1e-09, Identity=61%"; Hit description =Nucleobase-ascorbate transporter-like protein
VNYVLNTILSLNMVIAFLVALTLILDNIVPGGHQERGLHVGHVLAPHVNDGAAATELELYSRTWPWPEPTGSNRLYRIGQLVDYACDKAATSIRVEWQGGGRDDGGWVSGVGGDRAAHSPLPTS

SEQ ID NO: 71778 - protein, 114 aa, Zea mays
  Coding DNA Sequence Number=SeqID_29999
MATSGLMVWDFEPGCGLRPSLSLKDFHHQGWGGESAELGVGPCVGGDPLLHSVMGGEAETTDQAKDGGKKSFEVPSAREKVKETRNPKPGVKKKTCKVKVDRVKKSYGASRITT

SEQ ID NO: 71779 - protein, 195 aa, Zea mays
  Coding DNA Sequence Number=SeqID_30000
MKVMKQITCVATVCERVGKSLVMHCAARLGEAALLCEEDSGSDARRRTEARDSGVAGGLRRAIAVAGGLRDTDGRRTADYLSRARPAEDWAREANGRRSSAGPQGAAERRRTSRRTTERWRTGPGGARPVERRSGARRTGKSITGRKRATVEEDWGLGDPVPLSVRPEAPACATTVQPAPSPSRACSGYASGPLP

SEQ ID NO: 71780 - protein, 114 aa, Zea mays
  Coding DNA Sequence Number=SeqID_30001
MGVAAFSERSFVGGFPYFRGLILGDGLCWIPFPHFMGSGLLSEVPSGSRQTQRHTLLFAERVDVPGPKPTLARSCMERKPVEVLVLWDLSTEFSLALFMLALQLPSAPPGMISS

SEQ ID NO: 71781 - protein, 59 aa, Zea mays
  Coding DNA Sequence Number=SeqID_30002
MPNPSWFVAAANRTWGGDGPDDWGPQTSESDKRKRRGCDGTRVWHRGPTNRKRNEEIPC

SEQ ID NO: 71782 - protein, 90 aa, Zea mays
  Coding DNA Sequence Number=SeqID_30003
MGQAPSDEFSMPTSRVMFKEVDAPSPSPALWNGPQGPRVKLGLADWILSACPVKEGHSIVRCLCMLTQRRSMGPSESQLTVVYLKEKLAS

SEQ ID NO: 71783 - protein, 71 aa, Zea mays
  Coding DNA Sequence Number=SeqID_30004
  Subcellular localization annotation: CTP_CleavageSite=36; ConfidenceScore=5.19e-01
MAQRHISLSPLSWTRPHCGMTSSPVFVWCRSSEGPAAAAKASSEGWRLCLRPNICPPRDQFDKVIWCRRRR

SEQ ID NO: 71784 - protein, 100 aa, Zea mays
  Coding DNA Sequence Number=SeqID_30005
MARKRGGCDYRSAQGGGSNVDGTVRAGKGETEAGSRYKPRERRGAARKKSGDLEQVELLCLSAVEEVENSHNATVTVNNIVEASIFHLVTDLSKRRMELK

SEQ ID NO: 71785 - protein, 824 aa, Zea mays
  Coding DNA Sequence Number=SeqID_30006
  Gene Ontology: Mol. function=catalytic activity; Cellular component =alpha,alpha-trehalose-phosphate synthase complex (UDP-forming); Biological process=trehalose biosynthetic process
  Homolog annotation: Hit_ID=Q6Z548; Match level="QueryCoverage=99%, HitCoverage=100%, E-value=0.0, Identity=77%"; Hit description =Putative trehalose-6-phosphate synthase
  Pfam annotation: Domain name=Glyco_transf_20; Domain location=58-500; Score=681.7; E_value=5.7e-202; Accession=PF00982.11; Description =Glycosyltransferase family 20
  Pfam annotation: Domain name=Hydrolase_3; Domain location=548-792; Score=-79.1; E_value=0.015; Accession=PF08282.2; Description =haloacid dehalogenase-like hydrolase
  Pfam annotation: Domain name=Trehalose_PPase; Domain location=549 -786; Score=337.9; E_value=1.7e-98; Accession=PF02358.7; Description =Trehalose-phosphatase
  Pfam module annotation: Pfam domain module=Glyco_transf_20::Hydrolase_ 3::Trehalose_PPase; Domain location=58-500::548-792::549-786
MVSKSYSNLLDMTPGDGFDFRRPFKSLPRVVTSPSIISDHDWDSISDGDSVGSAFSIERKIIVANFLPLNCTRDETGELSFSLDHDSLLMQLKDGFSNETDAVYVGSLKVHVDPREQDQVAQKLLREYRCIPTFLPSDLQQQFYHGFCKQQLWPLFHYMLPICLDKGELFDRTLFQAYVRANKLFADKVMEAINTDDDYVWVHDYHLMLLPTFLRKRLHRIKIGFFLHSPFPSSEIYRTLPVRDEILKSLLNADLIGFQTFDYARHFLSCCSRLLGLHYESKRGYIGIEYFGRTVSLKILSVGVHVGRLESVLKLPATVSKVEEIEQRSSIPQEARGKDVQEAITEAVSVAERVNTKYGSSSYKPVVLIDNRIPFYEKVAFYAASDCCIVNAVRDGMNLVPYEYTVCRQGNEEIDRVRGLDKDTHHTSTLIVSEFVGCSPSLSGAFRVNPWSVDDVADALCRATDLSESEKRLRHEKHYRYVSTHDVAYWAHSFAQDLERACRDHYSRRCWAIGFGLNFRVIALSPGFRKLSSEHFVSSYNRASRRAIFLDYDGTLVPQSSINKAPSEEVISILNTLCNDPKNVVFIVSGRGRDSLDEWFSPCEKLRLAAEHGYFIRWSKEAAWESSYSSPRQEWKHIAEPVMQVYTETTDGSSVESKESALVWHYLDADHDFGSFQAKELKDHLERVLSNEPVVVKCGHYIVEVKPQGVSKGRAVDKLIQALANNNGKAQDFLMCVGNDRSDEDMFECINGMASNDVSSTTVPEVFACSVGQKPSKAKYYVDDTSEVIRLLRDATRFSSSQRREDVNASRGRVTFRDALDYVD

SEQ ID NO: 71786 - protein, 242 aa, Zea mays
  Coding DNA Sequence Number=SeqID_30007
  Gene Ontology: Mol. function=RNA-directed DNA polymerase activity; Cellular component=chromatin; Biological process=RNA-dependent DNA replication
  Homolog annotation: Hit_ID=UPI00004C1733; Match level="QueryCoverage =78%, HitCoverage=14%, E-value=5e-32, Identity=41%"; Hit description =UPI00004C1733 related cluster
MAEELSRNWLNRFQARLNRFPGLKTTFEYFEENKGGTLVGRSYNAILGRPCYAKFMHVPNYTYLKLKMLGHHFIITTSASYKGTPDAPKVGYGTFKSTEDTKEILVDPADLAKHICIGEALSSNIGGRAHRLPPGQPQRLRLEACGHAGIPWEVVEHSQSIQPMRPVAQHLHLFDEKCKDISEEVPKLLATEFVRENHHLVWIVNPVLVKKKNGNWIMCVDYMGLNKMCRKILSLSHASTRL

SEQ ID NO: 71787 - protein, 153 aa, Zea mays
  Coding DNA Sequence Number=SeqID_30008
MAKFSQDSTSLWRTGLSGVDWTVSGAQAGPTANWLLSGIGGATWLKFTGLSGESSAPAPKSSAMNSSLSGNGKGAAAKNHRTVRWCTGLSGESEAPAANGRLRDQLATRGRANGRIVTPDSVRCANGPGGPTVGCARYGRKSRTGQELFMSGA

SEQ ID NO: 71788 - protein, 220 aa, Zea mays
  Coding DNA Sequence Number=SeqID_30009
  Gene Ontology: Cellular component=membrane
  Homolog annotation: Hit_ID=UPI000038CD8D; Match level="QueryCoverage =50%, HitCoverage=30%, E-value=3e-16, Identity=41%"; Hit description =COG0697: Permeases of the drug/metabolite transporter (DMT) superfamily
  Pfam annotation: Domain name=DUF6; Domain location=82-213; Score =58.8; E_value=1.8e-14; Accession=PF00892.11; Description=Integral membrane protein DUF6
MAMLSVDSSRRLSRGGTAEDIGWARERKAKSKLRPCSLSHQARQVFALPSWPGELVALTELDSPFQVIIDSQPLTVAILASLLFGESIGAIGVGGLVLGVVGLLLLEHMIIGGLPLLVISVLNHDPALSGHIQDLTWSDILALGYTSIFGSAVSYGVYFYNATRGSLTTLSSLTFLTPMFASVFGYLYLGETFSTVQIGGALLTLVAIYMVNYKSIIGEK

SEQ ID NO: 71789 - protein, 67 aa, Zea mays
  Coding DNA Sequence Number=SeqID_30010
MPWNGVDDGCGGSGHRTTEGEEEEEKKKERKIDADDGDYLMTLIFEHGMERPQGLPNMLIAVLVKYI

SEQ ID NO: 71790 - protein, 308 aa, Zea mays
  Coding DNA Sequence Number=SeqID_30011
  Gene Ontology: Mol. function=zinc ion binding
  Homolog annotation: Hit_ID=Q9ZU41; Match level="QueryCoverage=73%, HitCoverage=61%, E-value=8e-34, Identity=38%"; Hit description =Predicted by genscan and genefinder
  Pfam annotation: Domain name=DUF789; Domain location=1-237; Score =335.2; E_value=1.1e-97; Accession=PF05623.3; Description=Protein of unknown function (DUF789)
MDSVEYFNLADLWEQYYEWSAYGAGATVQLPGGDRVVQYYVPYLSGMQLYTNKVLTASRSFGEDNGMDLWSDDEDNEKMSRSWSSTSDESLFNCDVLWSNRKRPGHLYFEFFEVGSPYGRVPLIDKVYELSQGFPGLTSLKSAELSPVSWMSVAWYPIYHIPYQRSVKDLSACFLTYHTISSSFQDHGLETMTTDCCHPVANGKQNGHMDKKSNTVSLPPFGLAAHKIQVRQLYAHILIQSDWIPAHERAGSDEADCVDTPVLSVSVDASEMTYVASVHADHVFHVQGSLQEQDSCIMRNPILDGNSA

SEQ ID NO: 71791 - protein, 465 aa, Zea mays
  Coding DNA Sequence Number=SeqID_30012
  Gene Ontology: Mol. function=nucleoside-triphosphatase activity; Cellular component=integral to membrane; Biological process=transport
  Homolog annotation: Hit_ID=Q8LNT5; Match level="QueryCoverage=93%, HitCoverage=57%, E-value=0.0, Identity=81%"; Hit description =Putative ABC transporter
  Pfam annotation: Domain name=ABC_tran; Domain location=86-276; Score =144.3; E_value=3.2e-40; Accession=PF00005.17; Description=ABC transporter
MGREAAAAVAAELEDSLGNAAAAAAAAPVLSPLSETLWRDRAAAGGVLLGDVSARLAWRDLTVTVALGTGDTQAVLQGLTGHAEPGTITALMGPSGSGKSTLLDALAGRLAANAFLDGTVLLNGRKANLSFGAAAYVTQDDNLIGTLTVRETISYSARLRLPDSMPREEKQALVEGTIAEMGLQDCADTVVGNWHLRGISGGEKRRVSIALEILMRPRLLFLDEPTSGLDSASAFFVTQTLRGLARDGGRTVVASVHQPSSDVFLLFDCLYLLSGGRTVYFGKASEACEEYVYVFLACYTNGGMRVYCARSDREQFFAQAGFPCPPMRNPSDHFLRCINSDFDRVKATLKGSMKTRFERSYDDPLEKITTSEAMSRLVSHYQHSQHYVSAQQKVDEMARLKGTVLDSGGSQASFLMQASTLTKRSFVNMSRDFGYYWLRLIIYVVVTICIGTIYFNVGTGYSSIL

SEQ ID NO: 71792 - protein, 155 aa, Zea mays
  Coding DNA Sequence Number=SeqID_30013
  Gene Ontology: Mol. function=histone-lysine N-methyltransferase activity; Cellular component=nucleus; Biological process=chromatin modification
  Homolog annotation: Hit_ID=Q2RB00; Match level="QueryCoverage=94%, HitCoverage=22%, E-value=5e-52, Identity=64%"; Hit description =YDG/SRA domain containing protein
  Pfam annotation: Domain name=Pre-SET; Domain location=1-103; Score =69.3; E_value=1.2e-17; Accession=PF05033.6; Description=Pre-SET motif
MSSSAEKLPVCLVNDADDDDEQRVPGRFNYVTGVEYEYPRPLGKTKPCKCPSVCLPSDDPDCSCARLNSGHLPYTACGLLVKRVPVLYECGPECRCSGNCRNRVAQKGVRLRFEVFWTGDACGWGVRSWDPIRAGAFVCEYAGQAVDVLVFPLYI

SEQ ID NO: 71793 - protein, 50 aa, Zea mays
  Coding DNA Sequence Number=SeqID_30014
MGKLERPLAIYGSREPSWEMTAMGGACCCREGEGGRRGEEGSRAGDSSTG

SEQ ID NO: 71794 - protein, 238 aa, Zea mays
  Coding DNA Sequence Number=SeqID_30015
MILRARTICAAAAQQGRRSTAKLKQSKCDMHREQFLSRARSNLIGVHDGFELPVSLLAWLAVIPVLHSATCMLPPPGGFFPLQPPPAPSRRPSSHLRPPASLPTSRRAALPWAAAPPSRRVPSPLSLRFRRSQGRRPCAAATPRCRDSGVPPGAADAPSPEVAQPSATEPGSPVSPHGDPAPTPSRQELPRRRPTRQAARVRLTQPRAAAPAPRPSARSHLAGAPSHRFLSDPAASLA

SEQ ID NO: 71795 - protein, 109 aa, Zea mays
  Coding DNA Sequence Number=SeqID_30016
MKARPRCGSTVVVRLPGCRGGDKRRRGWSPGWRPTEVQAYIEQQGSGVERGGGERQRRWRLGWRRGRAAREVAPPEQAVTALGVVLRGAHDAEARLLAVVTFGEILMIR

SEQ ID NO: 71796 - protein, 162 aa, Zea mays
  Coding DNA Sequence Number=SeqID_30017
  Homolog annotation: Hit_ID=Q948J0; Match level="QueryCoverage=48%, HitCoverage=16%, E-value=3e-24, Identity=73%"; Hit description =Putative pyrophosphate--fructose-6-phosphate 1- phosphotransferase
VHHAGAHKQIYFEPQYVKTRIVSCGGLYPGLNDVIQQIVLTLEKYGVKNIVGYIMGSVDFFLHYNLEVPARRPDMIFVLRRVEEAAQRAINFAYIEYNDAAAAGGQSEEAAKEVLFVGVEEEVEKEGKREEEKREWEKGEEVGREFVAHVPLPGKRRLSAWS

SEQ ID NO: 71797 - protein, 53 aa, Zea mays
  Coding DNA Sequence Number=SeqID_30018
MKTAIAHGRSTRTRLPMEGYDLRFYIGQMEEFCETKKAARPAAVKQSVAGGGG

SEQ ID NO: 71798 - protein, 54 aa, Zea mays
  Coding DNA Sequence Number=SeqID_30019
MEGRLGKDDLFDNTNEAQINVDAVDDGEGIAALSDATTMFETMSTGRKKRKCTW

SEQ ID NO: 71799 - protein, 191 aa, Zea mays
  Coding DNA Sequence Number=SeqID_30020
  Gene Ontology: Mol. function=binding; Cellular component=ubiquitin ligase complex; Biological process=protein ubiquitination
  Homolog annotation: Hit_ID=Q71VM2; Match level="QueryCoverage=82%, HitCoverage=63%, E-value=2e-66, Identity=72%"; Hit description =Plakoglobin/armadillo/beta-catenin-like protein
PIPPLIKLLKGSKKSSKTADKCCALLESLLAFNQCPLALTSEEGGVLAIVEVLEEGSLQGREHAVGALLTMCESDRSKYRDLILNEGAIPGLLELTVHGTPKSRMKAHVLLDLLRDSPYSRPKLQADTLENIVTNIASQIDGEDRGGKAKKMLAEMVKKIDQNNEIPGDAGPGLDKDRVTGLSPHTLKLLT

SEQ ID NO: 71800 - protein, 67 aa, Zea mays
  Coding DNA Sequence Number=SeqID_30021
  Subcellular localization annotation: CTP_CleavageSite=39; ConfidenceScore=5.61e-01
KRKQNHAEEKAKGSLSGSGSGSPTRSRTHLSSLTARLSSASSAASPASGAGERSLATSGSTAASSLR

SEQ ID NO: 71801 - protein, 84 aa, Zea mays
  Coding DNA Sequence Number=SeqID_30022
  Subcellular localization annotation: CTP_CleavageSite=52; ConfidenceScore=5.17e-01
MLPPDLLLSGIWRSGFAPPHLVAGLLTSTSPRHRRLLFAIAPLASCANDPTNLAAKQGHTVDSLSADEVPTITLKQGILYTSLL

SEQ ID NO: 71802 - protein, 453 aa, Zea mays
  Coding DNA Sequence Number=SeqID_30023
  Gene Ontology: Mol. function=DNA binding; Cellular component =mitochondrion; Biological process=DNA integration
  Homolog annotation: Hit_ID=UPI00004C1731; Match level="QueryCoverage =90%, HitCoverage=33%, E-value=0.0, Identity=74%"; Hit description =UPI00004C1731 related cluster
  Pfam annotation: Domain name=RnaseH; Domain location=37-164; Score =5.6; E_value=1.7e-05; Accession=PF00075.14; Description=RNase H
  Pfam annotation: Domain name=rve; Domain location=177-324; Score =70.1; E_value=6.9e-18; Accession=PF00665.16; Description=Integrase core domain
  Pfam module annotation: Pfam domain module=RnaseH::rve; Domain location=37-164::177-324
MGETISFAPRKAIKSQVLADFVAEWVDTQLPTAPIQPELWIMFFDGSLMKTGAGAGLLFISPLGKHLRYVLRLHFPASNNVVEYEALVNGLRIAIELGVRRLDARGDSQLVIDQVMKNSHCRDPKMEAYCDEVRRLEDKFFGLELNHIARRYNETADELAKIASGRTTVPPNVFSRDLHQPSVKIDDVHKPEKAPGGYTHLLVAIDKFSKWIEVRPLNSIRSEQAVAFFTNIIHRFRVPNSIITDNGTQFTGKKFLDFCEDHHIRVDWAAVAHPMSKWARLKPRIYNDLNKFGKRWMKELPSVVWSLRTTPSRATGFTPFFLVYGAEAILPTDLEYGSPRTRAYTDQSNQASREESLDQLEEARDRALLHSARYQQSLRRYHARGVRSRDLQVGDLVLRLRQDARGRHKLTPPWEGPFVIAKVLKPGTYKLANNQGEIYGNAWNIKQLRRFYP

SEQ ID NO: 71803 - protein, 142 aa, Zea mays
  Coding DNA Sequence Number=SeqID_30024
MDPHMSLTHVDPHAAGGYSDLLLGRHKVLPKPYWAFRPLVASPKATGPTGAGNLVQSVFHQSCPPRRILILSGGVFPSRQLGGQAAFQEPGGCWQPGRRVLDSRPVLFALRMFLMMNSTSRLRVFAVAVRLVPTRENGIRCI

SEQ ID NO: 71804 - protein, 534 aa, Zea mays
  Coding DNA Sequence Number=SeqID_30025
  Gene Ontology: Mol. function=zinc ion binding; Cellular component =integral to membrane; Biological process=sporulation (sensu Fungi)
  Homolog annotation: Hit_ID=Q6Z1H3; Match level="QueryCoverage=72%, HitCoverage=93%, E-value=0.0, Identity=80%"; Hit description =Putative DHHC-type zinc finger domain-containing protein
  Pfam annotation: Domain name=zf-DHHC; Domain location=198-262; Score =121.7; E_value=2.1e-33; Accession=PF01529.11; Description=DHHC zinc finger domain
MYMPPPPPTGGAGEQPRLYQVWRGSNYNHPLLLLFLTKTGGDEDSPTFYTFSLIIHLALSETDPCVYWGMNSFLAIDSIFMNGGSMEFFLQGRFIFGPDVRSVFLTMILIIAPVVVFCLFVARHLINDFPDSWGISVMVVVVVFTIYDLTLLLCTSGRDPGIIPRNSHPPEPESIDGINDTGVQTPQQFRLPRTKEVLVNGISVRVKYCDTCMLYRPPRCSHCSICNNCVERFDHHCPWVGQCIGLRNYRFFYMFVFSTTLLCLYVFAFCWVYVIKIRAAEQSSVWKALLKTPASVALIIYCFLCVWFVGGLSVFHLYLMSTNQTTYENFRYRYDRRDNPYNKGVLNNFLEIFCTAIPPSKNNFRARVTAGQGLQQTRSQSRGFMSPSMGKPIGDLEMDRKPVAPWDEPRTAADIRDLEAGLGVMFDEKEGRVAHASPDLSRDLPAEFVEGRSGMHSRQSSWVQRGDAIEASAVQMANARTTEASNNVAWSGSNGCCAWFATPALRALGTRKWHLGTPLPCKLVLGMWTWYLLV

SEQ ID NO: 71805 - protein, 83 aa, Zea mays
  Coding DNA Sequence Number=SeqID_30026
  Gene Ontology: Mol. function=metal ion binding; Cellular component =mitochondrial intermembrane space protein transporter complex; Biological process=protein import into mitochondrial inner membrane
  Homolog annotation: Hit_ID=Q6Z1H2; Match level="QueryCoverage=97%, HitCoverage=97%, E-value=4e-27, Identity=73%"; Hit description =Putative small zinc finger-related protein
  Pfam annotation: Domain name=zf-Tim10_DDP; Domain location=18-83; Score=88.3; E_value=2.3e-23; Accession=PF02953.6; Description =Tim10DDP family zinc finger
MDNPEMQRFLQVRTGSSRLGGLQEQQKAMMNEMVGKLTSVCWDKCITSAPGSKFSSGESTCLTNCAQRFLDMSVMIAKRFEMK

SEQ ID NO: 71806 - protein, 61 aa, Zea mays
  Coding DNA Sequence Number=SeqID_30027
MAGVPTALHGIGSGMALTVLSPIDEYEAASGFLVYIPGGSQQPQRSRRRCADPREVVELGR

SEQ ID NO: 71807 - protein, 40 aa, Zea mays
  Coding DNA Sequence Number=SeqID_30028
MWERGKRLVGGPRDAVKGGHAVCAGATALWVHHVGAEGCK

SEQ ID NO: 71808 - protein, 148 aa, Zea mays
  Coding DNA Sequence Number=SeqID_30029
MEGSQSWSRPRLARSCSQPGLRWPQMAWPCKRAAPACSNGGAAPPAMTGLGLGARTDQDGEGKNWNLVTVEYIFLDVHFTNLLHGLRVHIELFEQDYKAWLNFKFCFYLIEQSQVDTIEIPLENVDSDYVFRHRPTIEKADSDTDWIT

SEQ ID NO: 71809 - protein, 123 aa, Zea mays
  Coding DNA Sequence Number=SeqID_30030
  Subcellular localization annotation: CTP_CleavageSite=17; ConfidenceScore=5.07e-01
MPLPIPCTRPCPPWVPRAPGREAAAAPPVDLPPPANPASRPAANQSPCLPRNSPPPANHPSRLHLQITRCSSISVKRPSGSRAPSAKRHRETPASHAANPTPQTPARPCALRPKFNTPRVAPS

SEQ ID NO: 71810 - protein, 122 aa, Zea mays
  Coding DNA Sequence Number=SeqID_30031
  Gene Ontology: Mol. function=hydrolase activity
  Homolog annotation: Hit_ID=Q2QYI3; Match level="QueryCoverage=64%, HitCoverage=23%, E-value=9e-20, Identity=47%"; Hit description =Hydrolase, alpha/beta fold family protein, putative, expressed
DPFQTTLKCQSRRRRCQSVADIDQDEPLDPKALADPDNSFYEINGVRLHHKPLVCIVRAMVLAFDRPAFGLTSRASRSADDAKPLNPYSIVAVEGWILGEITAIEMGDVLQKTIVVRVIAQA

SEQ ID NO: 71811 - protein, 155 aa, Zea mays
  Coding DNA Sequence Number=SeqID_30032
MATLLDEDGERHRACVACGWIAGACSRMGGFGEWLGEGNEGRQSIARAPTTKSVSADESVSSPERGGLVGSRRGTQEDGERSGSAAGESSVKSSHPSSSVESAEGRDDSDDVFAPSLAPLIIIINIMKVTVIGLGFVKAEGVVNSMARHGDRRIV

SEQ ID NO: 71812 - protein, 230 aa, Zea mays
  Coding DNA Sequence Number=SeqID_30033
  Gene Ontology: Mol. function=G-protein coupled photoreceptor activity; Cellular component=membrane; Biological process=regulation of transcription, DNA-dependent
  Homolog annotation: Hit_ID=P93528; Match level="QueryCoverage=77%, HitCoverage=16%, E-value=2e-81, Identity=85%"; Hit description =Phytochrome C
  Pfam annotation: Domain name=HATPase_c; Domain location=107-216; Score=40.5; E_value=5.7e-09; Accession=PF02518.16; Description =Histidine kinase-, DNA gyrase B-, and HSP90-like ATPase
MACIYSVLEATLRCFYILHWLIFGLLRCITCFEFPNYSVTKDQLKKILHDTDLESIEQCYMETNTAEFNLEEALNTVLMQGIPLGKEKRISIERDWPVEVSHMYIYGDNIRLQQVLADYLACALQFTQPAEGHIVLQVIPKKENIGSVMQIAHWNSTLGVPEALIQEMFQHNPGVSREGLSLYISQKLVKTMSGALHYLREANTSSFIILIEFPVAQLSSKWSKPSPSKF

SEQ ID NO: 71813 - protein, 104 aa, Zea mays
  Coding DNA Sequence Number=SeqID_30034
  Gene Ontology: Mol. function=heat shock protein binding
MSEYAESLFQASIIEGIKGVSAARSWAQSWRDEDEKNAASAGPSWFRGHRWRNSKRARSQKSRNWSFETDEEDEVSAPSEVSLARQALGLSTSGPLKLEDVKSA

SEQ ID NO: 71814 - protein, 80 aa, Zea mays
  Coding DNA Sequence Number=SeqID_30035
MLVLFETPPDFALFKALDKGKLDKVEIKKQLEADIITVVDTSGDSRHVWMTRECRWPASSVPDVGAEISIGCHTLSRGFK

SEQ ID NO: 71815 - protein, 90 aa, Zea mays
  Coding DNA Sequence Number=SeqID_30036
MDVGAKNGVVGEFVAAAVLPRESVRDVRLGRAGARARWAADARSGWGAGMGHAVELGRDAAGETRSAWGGLHARAWCGPRGSAHALAYRG

SEQ ID NO: 71816 - protein, 78 aa, Zea mays
  Coding DNA Sequence Number=SeqID_30037
  Subcellular localization annotation: CTP_CleavageSite=42; ConfidenceScore=5.27e-01
MSACVLGTLLAQTAATMTAVGVRGPLLAPHVDPTATRKAALAASMADPSSFLNNTVGLLSGATYGHRDTLVDGVPYIA

SEQ ID NO: 71817 - protein, 69 aa, Zea mays
  Coding DNA Sequence Number=SeqID_30038
MDKAWLNVVAQLRANVGIGLAFVRPPGMWQCSSWSVAHLHQVEVDEGVALSGLFAKLHRYGWRLSTPHG

SEQ ID NO: 71818 - protein, 107 aa, Zea mays
  Coding DNA Sequence Number=SeqID_30039
  Subcellular localization annotation: CTP_CleavageSite=9; ConfidenceScore=5.01e-01
MARRSGGSSATTRRSSWTDASTWTILASQTLPITVHHYKASRPSFVGFFEPESALHVLVRYHVIFLAYIWREISDTTNASQVVLTRGEQLNNIDMPGGRLHERVLPI

SEQ ID NO: 71819 - protein, 677 aa, Zea mays
  Coding DNA Sequence Number=SeqID_30040
  Gene Ontology: Mol. function=microtubule motor activity; Cellular component=microtubule associated complex; Biological process =microtubule-based movement
  Homolog annotation: Hit_ID=Q6Z9D2; Match level="QueryCoverage=99%, HitCoverage=83%, E-value=0.0, Identity=50%"; Hit description =Putative kinesin heavy chain
  Pfam annotation: Domain name=Kinesin; Domain location=1-172; Score =62.0; E_value=5.9e-18; Accession=PF00225.13; Description=Kinesin motor domain
MEIYNEAVRDLLRPDATQLRLLDDPEKGTVVEKLTEETLKDKGHLLELLATIESSAKQFMGRGNSSTLLACVNFVDLAGSERASQTQSAGMRLKEGSHINRSLLTLGKVIRQLSKGRNGHIPYRDSKLTRILQSSLGGNARTAIICTMSPAHCHIEQSRNTLLFANCAKNVVTDAKVNVVMSDKVLVKHLQREIARLENELKFHGSAYTSNHADALREKDELIKQDQRNRSSESLPHNVSEDALSSFDTYDVVYGEQDGLGPKAFDVHPISILHQPRNHISDNIQIYQPNKEASSEVSEEHCKEVQCIETNELRRSPLFFPVDRYHVGTNIDEGKHDENITDTSDSAIKLYTCDSEPSSDTEKTNNDESLALKRCVISSRDSVLTRSRSCRASFMVIPNSWFGDSLDMRMTRPGDIFKYSQRRPKNVRSLYPENGHCSNDLTFTCNEEDEDAINNVVGITKVEEKLEECCTSQLEGNQDDVTEEILDIKHANDVDKDISVTSVDSPSRWPINFEKKQKEIIELWHECNVSIVHRTYFFLLFKGDKEDNIYLEVEHRRLSFIKSSFSVASEANAAATSSLRNLRHERDMLYRQMLRRLNLLERESLYNKWGIDLNSKQRRLQLSRRIWTQTDMEHVRESVALVAKLVEHLEKGQVIKEMFGLTFTLNPQAERRPFQLC

SEQ ID NO: 71820 - protein, 155 aa, Zea mays
  Coding DNA Sequence Number=SeqID_30041
MTLPLYGCPSNTEDSHKGGPPRAVEPFFICKRVHKNRVPKLALSGMYSTREEKDGGKKLVKFWGEKRVHASDMDISHKIWPTGRAIGKAIDMLWIMKDYPGHLLPLDRRDGHDVDVLCCPIWEQEHLPRFREGYGFVVTERLVWVVDPTAPFVRL

SEQ ID NO: 71821 - protein, 70 aa, Zea mays
  Coding DNA Sequence Number=SeqID_30042
RGSGGSKAARVARLVDAYLAASAALEAGLRPAEFEELARAVPAHARPAADALYRAVDTYLKEPPYLVFQK

SEQ ID NO: 71822 - protein, 572 aa, Zea mays
  Coding DNA Sequence Number=SeqID_30043
  Homolog annotation: Hit_ID=Q10T01; Match level="QueryCoverage=99%, HitCoverage=62%, E-value=1e-120, Identity=44%"; Hit description =Expressed protein
  Subcellular localization annotation: CTP_CleavageSite=40; ConfidenceScore=5.08e-01
MLDATDGAQTVSKIVILKPNPERGINQKAATARTLHQQPCTSNAPGCSGRENSKFSIKEVKKRFRFVTGERSERNLSPAEDLQGDPRKIKDSVVAINKYFRHLPEGSLANKSASDIENGIKPFISSKQKNQNGSITEISGHIVAPKGASVFYEEARRHLSEMLKGNDCSINYPEVQISKSLEGILSLPHGNVSTTGSSLRGKDYLDPSPGETDVYDACEVEREECTQERSQSQEDFGSIAHCTCTTVDDQVTVREGYYTNEAQEGPRHAHDEPDTLYIEGLDKFICRENIRNEESSPAEQSRDDIRQEILEEINQGKEHVKMSLASVEGIDEKLGQQEPETPEPRASAKLISDGSPNQSDEKQERPSPVSVLESSFEDIGSPDCINKKECELHGLQRTLYFPDNEPDVNVLWEDKNVRLDYIKLVLELSELCAEQNLEVWYLEDELISPCLFEELQSQGDQTDDRMLLFDCICEALTEIQERYFRLSSWLTFLKHDIRTPPTGENLITEVDRYVNGYIIQYSLPSTLEQTIKRDLEVQTWMNIRSKTEGIIMEMWEFVLDELIDETVSDLWI

SEQ ID NO: 71823 - protein, 117 aa, Zea mays
  Coding DNA Sequence Number=SeqID_30044
MGGVGREEVVSVMVIWEEKDIREDVMDEFGVYWINGSNTMLNGARHIYPHGAVHVFIDQKIHADMYKQGNNLPRREAQLQPRIMRYANRITRYPNMLIDLPSTSAVNEFVLLKPSSS

SEQ ID NO: 71824 - protein, 157 aa, Zea mays
  Coding DNA Sequence Number=SeqID_30045
MAYSTRMPKTLFAASKSTEGNFRPKLIERSRPDPNSARAGLALGLGGRSAPDPGGVRVSGSHGARTYGYGSRVGIAAACPRRASAAGLCQRKNPIVPVSSPVQAPGTAPHLTRRRRRRDRERLLWSGVAPMAIGQGMPGAGALVPGHERHLSQTEHA

SEQ ID NO: 71825 - protein, 306 aa, Zea mays
  Coding DNA Sequence Number=SeqID_30046
  Gene Ontology: Mol. function=ubiquitin-protein ligase activity; Cellular component=ubiquitin ligase complex; Biological process =protein ubiquitination
  Homolog annotation: Hit_ID=Q336U1; Match level="QueryCoverage=92%, HitCoverage=54%, E-value=3e-53, Identity=45%"; Hit description=U-box domain containing protein, expressed
  Pfam annotation: Domain name=U-box; Domain location=218-282; Score =20.9; E_value=2.7e-06; Accession=PF04564.6; Description=U-box domain
DEAKSELGLYDELKEACIAAENLMKRALNESSRRQKADGEVASALQKAKEYQELYFEETRKREELEGALARAHREIARLMQAKQVFVVERNTAADELQEAMSERSSLEGHDVDEDAVLRTAGGQATEQQEEEEEHVQTQHDLGTGERDLELEARLNQSKLAAFSPSSVIQSPYDEDRVPACFLCPILQVWVLALHPPQALSTVHAWRSCLNVVEFTYMQEPMRDPHVAADGFTYEGDAIRGWLDGGNGASPVTGQPLAHRELAPNLALGAVIQDYTVMRRRQCRFCDSHDGVAALQFFPSPVGCQR

SEQ ID NO: 71826 - protein, 102 aa, Zea mays
  Coding DNA Sequence Number=SeqID_30047
  Homolog annotation: Hit_ID=P04702; Match level="QueryCoverage=44%, HitCoverage=19%, E-value=3e-12, Identity=82%"; Hit description=Zein -alpha M6 precursor
MTTKIFSLLMLHALSACVANATIFPQRSQAPIAALLHPYLPSMIDSHQQLLPFSQLATAYSQLRQLLPFNQLAALNLAAYLQQQILLPFSQLAAASHASFLT

SEQ ID NO: 71827 - protein, 546 aa, Zea mays
  Coding DNA Sequence Number=SeqID_30048
  Gene Ontology: Mol. function=nucleic acid binding; Cellular component= chromatin; Biological process=DNA integration
  Homolog annotation: Hit_ID=Q10I04; Match level="QueryCoverage=76%, HitCoverage=24%, E-value=0.0, Identity=74%"; Hit description =Retrotransposon protein, putative, unclassified
  Pfam annotation: Domain name=RVT_2; Domain location=33-288; Score =541.2; E_value=1.1e-159; Accession=PF07727.4; Description=Reverse transcriptase (RNA-dependent
MTNRYLKWRRLIKGEHKMIKVEEALLDPDWVLAMQEELNNFKRNEVWTLVPRPKQNVVGTKWVFRNKQDEHGVVTRNKARLVAKGYAQVAGLDFEETFAPVARLESIRILLAYAAHHSFRLYQMDVKSAFLNGPIKEEVYVEQPPGFEDERYPDHVCKLSKALYGLKQAPRAWYECLRDFLLANAFKVGKADPTLFTKTCDGDLFVCQIYVDDIIFGSTNQKSCEEFSTVMTQKFEMSMMGELNYFLGFQVKQLKDGTFISQTKYTQDLLKRFGMKDAKPAKTPMGTDGHTDLNKGDSDYAGCKVDRKSTSGTCQFLGRSLVSWNSKKQTSVALSTAEAEYVAAGQCCAQLLWMRQTLRDFGYNLSKVPLLCDNESAIRMAENPVEHSRTKHIDIRHHFLRDHQQKGDIEVFHVSTENQLADIFTKPLDEKTFCRLRRLQLELVAFGNFQRHSAIIHRTVRCTPDSVRCSKEERPQELASFGKSQRLLRYNSPDMFGKAGTPMLAHRTFYSTCPVRHRTSRRAQKTELQRSNPNGVGDMAGAPDMS

SEQ ID NO: 71828 - protein, 56 aa, Zea mays
  Coding DNA Sequence Number=SeqID_30049
MSRTLGAWDKNDAENIQGVSNILESRSLATTKESTVIATVDSIQKSDKFTRESKLN

SEQ ID NO: 71829 - protein, 60 aa, Zea mays
  Coding DNA Sequence Number=SeqID_30050
  Gene Ontology: Mol. function=nutrient reservoir activity
  Homolog annotation: Hit_ID=P04702; Match level="QueryCoverage=75%, HitCoverage=19%, E-value=3e-16, Identity=91%"; Hit description=Zein -alpha M6 precursor
MTAPKIGLAIVETPRVIKVCCLLRLLVGAYRVEELGFHILKLSLMEGGIYTHVRPCAHVD

SEQ ID NO: 71830 - protein, 41 aa, Zea mays
  Coding DNA Sequence Number=SeqID_30051
MALGKEASFAECLQEHSAKNLTPGPTSGPRCRVQAGDTWQR

SEQ ID NO: 71831 - protein, 143 aa, Zea mays
  Coding DNA Sequence Number=SeqID_30052
MGFGWGSPARGSRALGVPRQGARDMAAWDATRAGQARRAGLHGRESARRRLGERRAGGGARVWDAGLCALWPPGEVAAGRERRGAGAGWAARPRAGVGRGVAGPRPGERASALVGREELAAEGWGARRAGWAAEWAREGGVEG

SEQ ID NO: 71832 - protein, 151 aa, Zea mays
  Coding DNA Sequence Number=SeqID_30053
  Gene Ontology: Mol. function=nutrient reservoir activity
  Homolog annotation: Hit_ID=P04702; Match level="QueryCoverage=99%, HitCoverage=100%, E-value=1e-38, Identity=45%"; Hit description=Zein- alpha M6 precursor
  Pfam annotation: Domain name=Zein; Domain location=1-151; Score= -20.8; E_value=0.013; Accession=PF01559.7; Description=Zein seed storage protein
MAAKIFSLLMLLALSACVANTTIFPQCSQAPIAALIPPYSPSMIASQQHLLPFSQLATAYSQQQQFIPFNQLVVLNPATYLQQQILLPFGQLAAASPASFLTPQQLLPFYLQFVANPATLLQLQQLLHFVQLALTNPSASYQQHIIGGALF

SEQ ID NO: 71833 - protein, 79 aa, Zea mays
  Coding DNA Sequence Number=SeqID_30054
MAELAEDGEEENGAQQGRPRPRLRLLGRDSRAGRGGSSPGHGVGVGLTRVREQGAWHSSPGRARHGCLGRDEGWAGATR

SEQ ID NO: 71834 - protein, 151 aa, Zea mays
  Coding DNA Sequence Number=SeqID_30055
  Gene Ontology: Mol. function=nutrient reservoir activity
  Homolog annotation: Hit_ID=Q41884; Match level="QueryCoverage=82%, HitCoverage=52%, E-value=4e-45, Identity=76%"; Hit description=Zein
  Pfam annotation: Domain name=Zein; Domain location=1-151; Score= -31.0; E_value=0.053; Accession=PF01559.7; Description=Zein seed storage protein
  Subcellular localization annotation: CTP_CleavageSite=56; ConfidenceScore=5.42e-01
MAAKIFSILMLLALSSSLANLSPYSQQQQFLPFNQLSTLNPAAYLQQQQLLPFSQLATAYSQQQQFLPFNQLAALNPSAYFQQQILLPFGQLATTSPASFLTQQQVLPFYQQFVANPATLLQLQQLLPFVQLALTNPAAFYQQHIIGGALF

SEQ ID NO: 71835 - protein, 167 aa, Zea mays
  Coding DNA Sequence Number=SeqID_30056
VPPTTPQGTPATGGDPDIDDDGGSSSHNTALLEEQEQKDVLPDPSLVTPLAVVTSMMRWTPCCARPLISTHGQSSIAAWSTSIVVGHTQTTGRLPAWCAVWRMTSEVQRPTQRTMPSLRGTLMRSVIVSPISKGNPRLSSTINLVIVLNIELYHVLDELSKAREEKS

SEQ ID NO: 71836 - protein, 234 aa, Zea mays
  Coding DNA Sequence Number=SeqID_30057
  Homolog annotation: Hit_ID=Q947D1; Match level="QueryCoverage=87%, HitCoverage=19%, E-value=2e-17, Identity=29%"; Hit description =Embryonic flower 1-like protein
MNVPVAEENVPEALVDTRVPSIEVSGHKSKQVCNMGPRRASSKRNVESDDLKFCQRKPKKTRLLSELIGSEQVGVSRDAIQVDHTNSVDLCEGGKRKMHLEVGKGNDTANQQVDEIQSRAVKNKAKYTGVDKLEDGSSLMNWLKSTNKEVRTKKKDSEHKNLDSSSISRSYPDIVASNDMHHDFLPSVGDVGQANVSSTTSAKHGNGNAQNDKLEQNMQKMDGLCENESRNLKQ

SEQ ID NO: 71837 - protein, 127 aa, Zea mays
  Coding DNA Sequence Number=SeqID_30058
MEAGGEEFAIGVVISAKTTLGEEFEGQIVAFDRPSNLLVIHILRKSLMLVTRISLSFTYRSGCLSQEGVGRAERGERRNVRVLKANYIREFSVVSKGDDPLDPASCMLDLNSIYAREDAALSLLVQM

SEQ ID NO: 71838 - protein, 82 aa, Zea mays
  Coding DNA Sequence Number=SeqID_30059
  Subcellular localization annotation: CTP_CleavageSite=38; ConfidenceScore=5.28e-01
MGLPSRLVAAKHKAMSPTPASGVAGHTIALPWAPWLVRTEMTRNQPIAASTTREDLVMGGSSRTTANRRAWLASTRLGGDVI

SEQ ID NO: 71839 - protein, 119 aa, Zea mays
  Coding DNA Sequence Number=SeqID_30060
  Gene Ontology: Mol. function=protein serine/threonine kinase activity; Cellular component=membrane; Biological process=protein amino acid phosphorylation
  Homolog annotation: Hit_ID=Q94E23; Match level="QueryCoverage=76%, HitCoverage=18%, E-value=1e-30, Identity=69%"; Hit description=S -receptor kinase homolog-like
EDSELKERCLVETPNAIWIHLHYDLIVNLLEWLKMMVTNKRADEVVHPNLEVKPPKCALKQEILVGFKCVDPDVDKSPKMSHVVQMLEGVQNAYHQNQRKLSQVGRMEIESQQPLEDMS

SEQ ID NO: 71840 - protein, 189 aa, Zea mays
  Coding DNA Sequence Number=SeqID_30061
  Gene Ontology: Mol. function=GTP binding; Cellular component =intracellular; Biological process=small GTPase mediated signal transduction
  Homolog annotation: Hit_ID=Q0PZE6; Match level="QueryCoverage=87%, HitCoverage=63%, E-value=4e-49, Identity=62%"; Hit description=Small GTPase
  Pfam annotation: Domain name=Miro; Domain location=10-154; Score=6.3; E_value=0.0013; Accession=PF08477.3; Description=Miro-like protein
  Pfam annotation: Domain name=Ras; Domain location=10-176; Score=48.9; E_value=6.3e-13; Accession=PF00071.12; Description=Ras family
  Pfam module annotation: Pfam domain module=Miro::Ras; Domain location= 10-154::10-176
  Subcellular localization annotation: CTP_CleavageSite=10; ConfidenceScore=5.10e-01
MASSASRFIKCVTVGDGAVGKTCMLICYTSNKFPTVSSSFLYLIPVPIGKKVAVRFPVNLGDFITSNGFFPVSVFLRTDYIPTVFDNFSANVVVDGTTVNLGLWDTAGQEDYNRLRPLSYRGADVFVLAFSLWIPELQHYARGVPVVLVGTKFVTDQNGQQGADHLSPWIPSISLSTKPALIVNMENFM

SEQ ID NO: 71841 - protein, 125 aa, Zea mays
  Coding DNA Sequence Number=SeqID_30062
  Homolog annotation: Hit_ID=Q00WL9; Match level="QueryCoverage=59%, HitCoverage=44%, E-value=2e-09, Identity=47%"; Hit description=[S] KOG4401 Uncharacterized conserved protein
MAGKRGVAAGGADGGEEVGRGWGASGGGYGRRLQECSGWGQAEIEAERIGVGVTPEAQSIFDALSKTLPVQWDKTDIVVMKEVRVRSPYLPENVNGGTAAANERVKKVIDFERKRLHSRVPGQFS

SEQ ID NO: 71842 - protein, 213 aa, Zea mays
  Coding DNA Sequence Number=SeqID_30063
  Subcellular localization annotation: CTP_CleavageSite=84; ConfidenceScore=5.40e-01
LDFEGHAHASRPMTVFFVARTAVGAGGSFTGWLATSAGAARQAGNGDGRDSRASSSMARGLARRGPACNEQPYSARGAKRSGCSAMARGRARAEAAQAGDAWLATSRPGRTSRTPRAADGRADWPLGAGRAALGEPLPLPHAGRNTASSTGSPGRVEARASWPEMAAMPCWATGGKSAVKGLRRREALAAGREQGKKGEVFERKGEVLMAASE

SEQ ID NO: 71843 - protein, 80 aa, Zea mays
  Coding DNA Sequence Number=SeqID_30064
MAWALPAGGGGEWRHLRDWRRIFREVRVAISMVTMGRRAVRVLSPNRGRGTILLMVALRALNTQFRNLCLSLAQLVKGMV

SEQ ID NO: 71844 - protein, 102 aa, Zea mays
  Coding DNA Sequence Number=SeqID_30065
VLYARSQGLAANSRDDGFYYSEAEALTRGTRGSISQRLREGKGKVETSGADGRVPLVRAAVFLSRALGASAMAGASDSTRAKEARGSCGWPGVSVRRRGVIT

SEQ ID NO: 71845 - protein, 47 aa, Zea mays
  Coding DNA Sequence Number=SeqID_30066
MHIYSMGKHMILVGMKFVHSWPFLGRVYGIAALDVKKLKDVGLCTVE

SEQ ID NO: 71846 - protein, 86 aa, Zea mays
  Coding DNA Sequence Number=SeqID_30067
  Subcellular localization annotation: CTP_CleavageSite=44; ConfidenceScore=5.55e-01
MAPLLFPVRPGKRPSLFSSSQHAKAPYCSLRPTLPWKPAGAPFSTMEKASRSTLVDVRSYAPIGITVVLANAVWLYEWKRVERKMK

SEQ ID NO: 71847 - protein, 106 aa, Zea mays
  Coding DNA Sequence Number=SeqID_30068
  Gene Ontology: Mol. function=DNA binding; Cellular component=nucleus; Biological process=regulation of transcription
  Homolog annotation: Hit_ID=Q9SDW0; Match level="QueryCoverage=73%, HitCoverage=23%, E-value=5e-15, Identity=48%"; Hit description =Transcription factor GT-3a
MEVGGAGAGGRDERVPQWGAQETRELIMARGEMGRETVATCRSAKTMWEAIAARLQERGYRRTAEQCKCNWKNLVNCYKVYFGLLAVRPQLSLAFTFAALFPQPFP

SEQ ID NO: 71848 - protein, 286 aa, Zea mays
  Coding DNA Sequence Number=SeqID_30069
  Gene Ontology: Mol. function=structural constituent of nuclear pore; Cellular component=nuclear pore; Biological process=nucleocytoplasmic transport
  Homolog annotation: Hit_ID=Q5Z4E0; Match level="QueryCoverage=74%, HitCoverage=15%, E-value=7e-98, Identity=80%"; Hit description =Putative Nuclear pore complex protein Nup155
MAATLPRKGLTGSREDSFRASQSMYADVECFTGFRKPSEKACIKLWAKGDLPTQHILPRRRVVVFNTMGLMEVIFNRPVDILRKLFDGNTLRSQIEEFFNRFGAGEAAAMCLMIAAKLLYAEDSLISNSVSKKVAEAFEDPGLVGMPQIAGTTALSNTRTQAGGFSMGQVVQEAEPLFSGANEGLCLCSSRLLYPIWDYGDSKTGWLSAGAMKILESKIHSLETFLRSRRNKRRSHAVPLTLNLKGKNTNIIDIVHIVFISISLSSHCSIFLGTDIRKDTQYILIQ

SEQ ID NO: 71849 - protein, 72 aa, Zea mays
  Coding DNA Sequence Number=SeqID_30070
MAPVPCTASPSPKLLARRAFLWVRARAEEVLPQWPTPYSGNEANAPAAPMSRSSTPAFFLCPLPQEQQLFPL

SEQ ID NO: 71850 - protein, 175 aa, Zea mays
  Coding DNA Sequence Number=SeqID_30071
MGTSSPARARTQRNALRARSLGDGDAVQGTGAMDARERGARGVELLGYGSGCLLEEEEGEGMERGAAPGAEHAGEQDPGKEWRHGSKEKFLLFLRRRRARLPALVMKWWQDTAWGRSRRTWGNSREQHHGETAFPAAGEVRQGGSHGRPCSCAEKGENARRGFCAKEQRREWSVG

SEQ ID NO: 71851 - protein, 175 aa, Zea mays
  Coding DNA Sequence Number=SeqID_30072
MGTSSPARAQTQRNALRARSLGDGDAVQGTGAMDARERGARGVELLGYGSGCLLEEEEGEGMERGAAPGAEHAGEQDPDKEWRHGSKEKFLLFLRRRRARLPALVMKWWQDTTWGRSRRTWGNSREQHHGETAFPAAGEVRQGGSHGRPCSCAEKGENARRGFCAKEQRREWSVG

SEQ ID NO: 71852 - protein, 145 aa, Zea mays
  Coding DNA Sequence Number=SeqID_30073
MATSRRLSTLRCGPGRNLGTGEQFRRGSASPGAGEFVATTGTTPQPHQIGTQGMHASESAGQQRWIPHTRGLGNGGANLFRETRLAREVLQVTPSTIMAVEDKGSSKPALAENKGKRSAEFEEAKKAIKDDTPLSEGSFDQDLGG

SEQ ID NO: 71853 - protein, 61 aa, Zea mays
  Coding DNA Sequence Number=SeqID_30074
  Gene Ontology: Mol. function=transcription regulator activity; Cellular component=nucleus; Biological process=regulation of transcription
  Homolog annotation: Hit_ID=Q84LH4; Match level="QueryCoverage=93%, HitCoverage=24%, E-value=1e-17, Identity=62%"; Hit description =Putative Helix-loop-helix DNA-binding domain containing protein
MKLLQDLVPECSKFLSMKLATVNPELGFDIEQIISKQMLLSQDWHLAFYGVEPGSSGLTGP

SEQ ID NO: 71854 - protein, 69 aa, Zea mays
  Coding DNA Sequence Number=SeqID_30075
  Subcellular localization annotation: CTP_CleavageSite=35; ConfidenceScore=5.30e-01
MAYRRMDPEPFLPPGFSAAVVQHRGVMVSSCLAVRLRMKTPSLRPLRMDISSPWSSSGWVNLCLRQALT

SEQ ID NO: 71855 - protein, 143 aa, Zea mays
  Coding DNA Sequence Number=SeqID_30076
  Gene Ontology: Mol. function=peptidase activity; Cellular component =anchored to membrane; Biological process=lipid transport
  Homolog annotation: Hit_ID=Q1S9L0; Match level="QueryCoverage=58%, HitCoverage=41%, E-value=9e-23, Identity=56%"; Hit description=Plant lipid transfer protein/Par allergen
  Pfam annotation: Domain name=Tryp_alpha_amyl; Domain location=46-125; Score=34.6; E_value=3.5e-07; Accession=PF00234.12; Description =Protease inhibitorseed storageLTP f
MAMLPRPTALVAAVVVAAALVLGMASAQGPAAAPAPGPAPGISDECFNAVLNMSDCLTYVTAGSKARHPDTPCCPELAGLLESHPVCLCQLLGGAAESYGVSVDYKRALALPGICRLTAPPVSACAARYDDTITHEMEVASSS

SEQ ID NO: 71856 - protein, 441 aa, Zea mays
  Coding DNA Sequence Number=SeqID_30077
  Gene Ontology: Mol. function=inositol or phosphatidylinositol phosphatase activity; Cellular component=intracellular; Biological process=abscisic acid mediated signaling
  Homolog annotation: Hit_ID=Q6AVN0; Match level="QueryCoverage=97%, HitCoverage=77%, E-value=1e-170, Identity=67%"; Hit description ='putative inositol-1, 4, 5-trisphosphate 5-phosphatase'
  Pfam annotation: Domain name=Exo_endo_phos; Domain location=16-404; Score=83.8; E_value=5.3e-22; Accession=PF03372.13; Description =EndonucleaseExonucleasephosphatase family
MEKWEVPCILQEIVPLNAGNVLVIEDNEPAARWLVLINQSLNRPADIDANVFQHEPSPSVDSSSSRASSSIGTSFSDLSKTASGATIFQNSLLKAISKSFMPVRRKQLKACNCPVEMTRTSYRDACFGCQKAYADETDSSGEDEEKGKDKEKSRDSDGSVVDGITSGPATRDQLKYNLIACKQMVGIFVTVWVKKELVQHIGHLRKACIGRGILGCLGNKGCISISMTLHQTSFCFVCSHLASGQKEGDEFRRNSDVLEIMRLTMFSRICRRAGRKIPERIVDHDKVIWLGDLNYRIALSYADTKKLLMENDWDALFEKDQLKIERDAGRVFKGWNEGKIYFAPTYKYSFNSDAYAGETATSKKKRRTPAWCDRILWRGDGIVQLSYYRGESRFSDHRPVCGTFAVEVEVLNKKTNRRSSNADMRIDAEELLPTGKGKGKR

SEQ ID NO: 71857 - protein, 99 aa, Zea mays
  Coding DNA Sequence Number=SeqID_30078
MWAHIIDIIGFKFLPCGPRDLDFSLESTADYPKLTAGIGVDKSKNSKQPQRYHYDPQLTRDFGVKAREKREVVDYYDTAVEWEPEEGDLAIPEYLDNSQ

SEQ ID NO: 71858 - protein, 156 aa, Zea mays
  Coding DNA Sequence Number=SeqID_30079
  Subcellular localization annotation: CTP_CleavageSite=70; ConfidenceScore=5.16e-01
MGGLGGATTTSVCALSLLSALLLLHYCLLLAPSAAVVSKERTQSRKLLQSLVVVARVSSDSEKARPEVVRAAAKPAAMGPGGAAVSENLKKQTPSRLSSMHLIRQKDYPHEDHKDLCQECSVTISGAFPDIDPKTSRKKPFSITKKLYGTHLNSAI

SEQ ID NO: 71859 - protein, 84 aa, Zea mays
  Coding DNA Sequence Number=SeqID_30080
MQKTKAKTPWDVQGVDLRCDGVSLKKFDWDILRYWLIKLDIDAIIVYSLKTSDQASHWCDHNVSFENVSLHISPLCTITPKDVI

SEQ ID NO: 71860 - protein, 508 aa, Zea mays
  Coding DNA Sequence Number=SeqID_30081
  Gene Ontology: Mol. function=RNA-directed DNA polymerase activity; Cellular component=mitochondrion; Biological process=RNA-dependent DNA replication
  Homolog annotation: Hit_ID=Q8S463; Match level="QueryCoverage=99%, HitCoverage=25%, E-value=0.0, Identity=84%"; Hit description =Putative prpol
  Pfam annotation: Domain name=RnaseH; Domain location=37-164; Score =7.0; E_value=1.3e-05; Accession=PF00075.14; Description=RNase H
  Pfam annotation: Domain name=rve; Domain location=376-508; Score =76.7; E_value=7.5e-20; Accession=PF00665.16; Description=Integrase core domain
  Pfam module annotation: Pfam domain module=RnaseH::rve; Domain location=37-164::376-508
MGETISFAPRKAIKSQVLADFVAKWVDTQLPTAPIQPELWTMFFDGSLMKTGAGVGLLFISPLGKHLRYVLRLHFSASNNVAEYEALVNGLRIAIELGVRRLDARGDSQLVIDQVMKNSHCRDPKMEAYCDEVRRLEDKFYGLELNHIARRYNETADELAKIASGRTTVPPDVFSRDLHQPSVKTDDTPEPEKASAEPEAPSAQSEVPSARPEAPSAQPEAPSAQSEVPSAPEGEALRIEEERSGVTPNRNWQTPYLQYLHRGELPLDRAEARRLARRAKSFVLLGDEKELYHHSPSGILQRCISIAEGQELLQEIHSGACGHHAAPRALVGNAFRQGFYWPTTVADATRIVRTCEGCQFYARQTHLLAQALQTIPITWPFAVWGLDLVGPLQKAPGGYTHLLVAIDKFSKWIEVRPLNSIRSEQAVAFFTNIIHHFGVPNSIITDNGTQFTGRKFLDFCEDHHIRVDWAAVAHPMTNGQVERANDMILQGLKPQIYNDLNKFGKRWM

SEQ ID NO: 71861 - protein, 218 aa, Zea mays
  Coding DNA Sequence Number=SeqID_30082
  Homolog annotation: Hit_ID=P04922; Match level="QueryCoverage=44%, HitCoverage=27%, E-value=4e-07, Identity=30%"; Hit description =Circumsporozoite protein precursor
  Subcellular localization annotation: CTP_CleavageSite=40; ConfidenceScore=5.33e-01
MANQGQGYRDYFSQAASSSADRSFSPPPTAPNTDELGLFSQSVVGTRPLAPLVTMENLDLNSHIDSFSFLGTYSGYMQPEGGTSEQGVPPVAPGGTSRHSAFHPPRPNESRSKNSHGPNSLNNGAGYSRQSLQSGPQVPAPGIGGRRHSLGSGPQVPAPGMGGSRQSLGSGPQVPALGIGGSRHSLRSGPQVSCSEDGSRRSWEIEEHLISYRRHRHP

SEQ ID NO: 71862 - protein, 92 aa, Zea mays
  Coding DNA Sequence Number=SeqID_30083
MSAQPRTMNDTADATTPATALSSLTLPDEEVDADDLDDAANTHMESKILTIMGFLEDPDQKKSKRVRFLEENEMHLCYATFHVGEMKHSTPA

SEQ ID NO: 71863 - protein, 225 aa, Zea mays
  Coding DNA Sequence Number=SeqID_30084
  Gene Ontology: Mol. function=protein dimerization activity; Cellular component=nucleus; Biological process=regulation of transcription, DNA-dependent
  Homolog annotation: Hit_ID=Q5VQQ8; Match level="QueryCoverage=85%, HitCoverage=68%, E-value=1e-61, Identity=56%"; Hit description =Putative bZIP protein DPBF3
MTSQAGGSGGDVGGSAGAGAGAGQHGQMQSLARQGSLYNLTLDEVQSHLGEPLHSMDLEELLKSVFPDGLDPDGGTTSQYEQSSGLLRQGSITMPLELSKRTVDEVWKGIQDVPKRNVGEGDQQSQERERQPTLEKMTLEDFLVKAGVVAEGYLKDLNDVGNVDQVSSAGAAGPGAILESYSDGHITSPMMGALSDSPTPGRKRGSPGDVTDKLMERRQKRMVKK

SEQ ID NO: 71864 - protein, 227 aa, Zea mays
  Coding DNA Sequence Number=SeqID_30085
  Gene Ontology: Cellular component=chloroplast envelope
  Subcellular localization annotation: CTP_CleavageSite=16; ConfidenceScore=5.14e-01
MASRPNFGLNELDFVFSTLVVGSILNFVLMYLLAPTAAASSAASALPSHMFEPGAFSLGSRVATLVSKGATFAVVGFAAGLAGTALSNGLMAMRKRMDPAFETPNKPPPTLLNAATWALHMAGSSNLRYQTLNGVEYMLGKVAPAPVFKASVVVLRCLNNVLGGVSFVLLARLTGAQKSDKPATVAEEKDRLIAVGNAAADAIGEARDGEEVRPQGHARAMIVGTTI

SEQ ID NO: 71865 - protein, 552 aa, Zea mays
  Coding DNA Sequence Number=SeqID_30086
  Gene Ontology: Mol. function=nucleotide binding
  Homolog annotation: Hit_ID=Q6ETI4; Match level="QueryCoverage=92%, HitCoverage=97%, E-value=0.0, Identity=66%"; Hit description =Putative auxin-independent growth promoter
  Pfam annotation: Domain name=DUF246; Domain location=214-520; Score =375.8; E_value=6.5e-110; Accession=PF03138.5; Description=Plant protein family
  Subcellular localization annotation: CTP_CleavageSite=70; ConfidenceScore=5.28e-01
SSANRKQVHTPTPLPRAAPATGAAGPVVVEAAAMAELRHSMAVRSSNSPAKRDSDTSAASSPFLLSPSTRGSRGGGGGDDDGKDAHRSSPLLSHHHHKRVHLLTSPFRSLLALEDPRSSAASSSYRILLALLALLLAAVIFCAPLFWSRLNTPFLCHKEGITLHCPEVKRRNPHLYGKIHVLPRCPGSPVQSDAAMSPQASLPFTFVKDSNIAYIICNAVAIAKIMRATLILPVLKQDQIWKDQSRTVKNIPKYASAQFYIDNVLPRIKEKRIMSIKPFVDRLGYDNVPTEINRLRCRVNYHALKFLPDIEEMAVKLAARMRNKTGSINPYMALHLRFEKGMVGLSFCDFAGTREEKAMMAAYRQKEWPRRFKNGSHLWPLALQKRKEGRCPLEPGEIAVILRALGYTSGTQIYVASGQVYGGKNRMAPLRNMFPNLVTKEELASAEELAPFRRHVTSLAALDFLVCLRSDAFVMTHGGNFAKLIIGARRYAGHRLKSVKPDKGLMSKSLGDPDMGWASFTEDVVVTHRTRTGLPEPTFPGYDLWENPLTPC

SEQ ID NO: 71866 - protein, 95 aa, Zea mays
  Coding DNA Sequence Number=SeqID_30087
  Homolog annotation: Hit_ID=Q6ETI3; Match level="QueryCoverage=97%, HitCoverage=22%, E-value=5e-23, Identity=61%"; Hit description =Putative SNF4b
WLGISVMEFKRKVAEYRAQHQACGPRRRRHGHWHPCRRESTLGEAIEAATSRHVHRLWVVDEEGLLRGVVSLTDILRAVREAALGEDLELHSIVP

SEQ ID NO: 71867 - protein, 110 aa, Zea mays
  Coding DNA Sequence Number=SeqID_30088
MALLLALLLVLLLATGGQADADEPATSQQRAVPAEQAPAPKGYETLREEPAPTGGHRHREIKIGACFPISDGGSSAFSCYQRCTSKGYAGGRCDTLPSGFPGDCFCITYA

SEQ ID NO: 71868 - protein, 144 aa, Zea mays
  Coding DNA Sequence Number=SeqID_30089
  Homolog annotation: Hit_ID=Q9FIJ8; Match level="QueryCoverage=79%, HitCoverage=58%, E-value=2e-28, Identity=52%"; Hit description =Arabidopsis thaliana genomic DNA, chromosome 5, P1 clone:MCA23
KTSVSIFFVSQQSRLILLLSVTMVLLAIRSQGGEQALMQTLNRARELYAQRLQASPSVDELASLLAQCAIAEAQSSNTNPPQGPGSDPVNMLNSDEACILAESGRKQIILDAFADGSSFICLKCGGLFSTSRKDEHLAYWCGTA

SEQ ID NO: 71869 - protein, 80 aa, Zea mays
  Coding DNA Sequence Number=SeqID_30090
MTKEAGQGSGSSERIGGMLVLRQVLMSENSRATPLELENVISELVKALADILYSSPDSGTEEIVQAMVNASASVGSPSER

SEQ ID NO: 71870 - protein, 199 aa, Zea mays
  Coding DNA Sequence Number=SeqID_30091
  Gene Ontology: Mol. function=hydrolase activity; Cellular component =chloroplast
  Homolog annotation: Hit_ID=Q2QN72; Match level="QueryCoverage=73%, HitCoverage=30%, E-value=3e-42, Identity=57%"; Hit description =Diphosphonucleotide phosphatase 1, putative, expressed
ASEPSNDWVGVFSPSGSSEHGGGLGAGNGAVQVHRSKQPWLVFLAHRVLGYSSGGWYETMMGSYGEPMGRDGLQDLWQRYDIAVFGHIHGYERTCPVYQAKARLSLHLCIRRDELVRQCAVLELLQGRRHLMFGKLTAINSSFLLFEYKKSRDGHVYDRFSLARLPSPGGLLRRQLPPKHLGRLIELRTLETCVDRYTV

SEQ ID NO: 71871 - protein, 626 aa, Zea mays
  Coding DNA Sequence Number=SeqID_30092
  Homolog annotation: Hit_ID=Q2QN77; Match level="QueryCoverage=99%, HitCoverage=99%, E-value=1e-175, Identity=54%"; Hit description =Expressed protein
MDKQRNTKNGEVGNNVFCRMILDHIAGDLCLNEENVPCNTPRNSVHSAFGGRTVASTSGSFNTDSVSPGEYVRDPGSLLSLQPWIFRRNGSQNYRESVRASGKGKNLVDVLGEGQAVEISPRSPCLGSGPGRGCGALRSRRSRRNLMKPLVPMENSYVPQLYSENFEMEECTFAPAPSPASTRPFVVTDGTRIISKSRYEPVPLPFNIRLDEECRGTSLMPGSMIGIAPLPELKKLKHEARDLHDARLGLSGSQRSSKSHEQAGLRDRLLLFSTGVSIGILSNKKEFDTLKGTLKQMENLVQDLQDELEMKEGLTVKELLNETSIEHDDDNSKLHGVDPEPMSKIEAELEAELARLELNITSISLEEETSEINGADDDSIGDIVCGELKADTVPRDLTEYSSESDHRRDSRESSPGYTCGANCPVSPRDLSIRLHKVIQHRLEDRIKELESAIVHGQKQTQLQMMVTDQMVSDRIRSNSESGSSSGQGSPIFIQETSSLAEPYRLNLSGDALEAYDEAYEEFMRIADSPYTTSPNGKPQATEDCLADRGLVWGMEDSSRKLREVPTWERALRSADPSRDHERDRDESGGDDDDDDCEVLIRQIVERTRQGSHVLVNAQKLLFSVDQ

SEQ ID NO: 71872 - protein, 1078 aa, Zea mays
  Coding DNA Sequence Number=SeqID_30093
  Gene Ontology: Mol. function=RNA-directed DNA polymerase activity; Cellular component=membrane; Biological process=RNA-dependent DNA replication
  Homolog annotation: Hit_ID=Q53NJ9; Match level="QueryCoverage=80%, HitCoverage=84%, E-value=0.0, Identity=49%"; Hit description =Retrotransposon protein, putative, unclassified
  Pfam annotation: Domain name=RVT_1; Domain location=396-662; Score =195.1; E_value=1.7e-55; Accession=PF00078.17; Description=Reverse transcriptase (RNA-dependent
MKADGTEWWITVVYGPQSDADKLLFLQELRALASQGHERWLVLGDFNLIYQASDKNNLNLNRRLMGSFKSTIDDIHLKELRLNGRQFTWSNGQAEPTMTRIDRFFCTPDWELLFPTCYIHSLPSLMSDHTPLLLQGEIMRKTNSSFRFENFWTRIDGFKEAVYSAWNKPLPSVQQPLLRLHIKLARTAKAIKAWRRVKVGDTKLQLAIVKEVILRLETAQEARTLSLVELNLLRRLKVKSLGLALVEKSRIRQRSRLTAVRLGDANSRFFHLRACSRARKNFIQALQTETGLVVTQEGKEKVITDHFMQHLGTTAPRTRTFDWNSLGYHHMDLSSLEAPFSQEEIKETILSMPRDKAPGPDGFTGTFYRACWDIIKDDLTAAFNQLHNLNGQGFKLLNAGNIVLIPKKKDALRVSDFRPISLIHSVAKIFSKLLANRLAPHLDDLVSKCQSAFIRKRCIQDNFLYVQNIVRQFQKNKTQALFLKLDIQKAFDTINWSYLLEYLQARGFGHRWREWITILFSTASSRALINGVQGESFDHRRGVRQGDPLSPMLFILAFDPLQRILDLASEHGVLTPLPLAAAKLRTSLYADDAAIFINPTRNDLQAVKQILNAFGAATGLTTNFEKSSIHPIRCENVDLSNILQPFPGCCKTFPCQYLGLQLHTRPLQKIHVQPLVEKIGQRLAGWKGPLLNRAGRLTLVSSVLSSMPIYHLTIFPLAKWATKQIDKIRRSFLWKGEDNAHGGHCLVNWKMVARPKDLGGLGVLDLEKFSRALRLRWLWQEWTDSSKPWEGLQVPCNKLDRLLFQASTTVVIGNGIKAKFWHHGWLDGEAPRNLAPHLYKLIRRKNKSVAQELTNSAWIQSLRRKSQPPRNLRNLSASGLGSVTNISSISEWWEKTETLFPQDRKREFNGLVIYTMWNLWKERNRRIFEHCSLPPLQIAERVREGAIARGPRRGAGGGGHAGGGVRVLRGVPLLHLRGGAAGRCRSRRRCWVAEAAAAAPAPAPVALRALAARLRAVFAAAGFPPSPFFALLEAKLSQTVFTFAAALPFALTFLLLAKACVAAMFRDDAASPRRHRRR

SEQ ID NO: 71873 - protein, 227 aa, Zea mays
  Coding DNA Sequence Number=SeqID_30094
  Gene Ontology: Mol. function=nucleic acid binding; Cellular component= ribonucleoprotein complex; Biological process=mRNA processing
  Homolog annotation: Hit_ID=Q2QN68; Match level="QueryCoverage=53%, HitCoverage=32%, E-value=2e-41, Identity=65%"; Hit description=RNA recognition motif family protein, expressed
  Pfam annotation: Domain name=RRM_1; Domain location=110-177; Score =53.0; E_value=1e-12; Accession=PF00076.12; Description=RNA recognition motif. (a.k.a. RRM, RBD, or
METKAIFCNLQNEGASSWVGSPLLVIRSAFQERFFTASQMESLQQRGAQDFQIRFHGAKRMELRKKAAARVIRIGSRTDFMLGDILHPAINWADKESHLDPDEMAKMKSAFIGNLPEDVNEEYLRKLFGQFGEVVRVAISRKGQCPVAFVHFAKRSELENAIEEMDGKTVSVARPTADNDKKRSREEVRTRRSNASGDRRDYSHGRYGHDSLDRQVKAPRLSNYVVL

SEQ ID NO: 71874 - protein, 211 aa, Zea mays
  Coding DNA Sequence Number=SeqID_30095
MATRQGAVDGDADPDPQTVEQPGAALLGTAAWRSTAGNCALAQQARRTAADSSGQHCWELRPGAAGTATRGGQQWTAAARKGRSATADGQQPGSARMAAELDEIRDGGWAAAQIWTRAAQTSSQSSERAAAGSGQRRPDLGSGGADLGSGGGRIWVAAAAGSGRRRRPDLGSGGRIWAAAGGIRADEAAGGRAATAAGRRDGGWKKNSKKP

SEQ ID NO: 71875 - protein, 66 aa, Zea mays
  Coding DNA Sequence Number=SeqID_30096
  Pfam annotation: Domain name=RRM_1; Domain location=21-64; Score=7.0; E_value=0.033; Accession=PF00076.12; Description=RNA recognition motif. (a.k.a. RRM, RBD, or
MASPRGGFDEQDRRTEKGTEVFVGGLPRSATESTLREGYGFVRFAKRDYANTAKRQKNGIEFHIYM

SEQ ID NO: 71876 - protein, 32 aa, Zea mays
  Coding DNA Sequence Number=SeqID_30097
MAVPSRAATIAAASRAAAGLLTNEGRFNTVEL

SEQ ID NO: 71877 - protein, 385 aa, Zea mays
  Coding DNA Sequence Number=SeqID_30098
  Gene Ontology: Mol. function=diacylglycerol kinase activity; Cellular component=integral to membrane; Biological process=intracellular signaling cascade
  Homolog annotation: Hit_ID=Q2QN71; Match level="QueryCoverage=99%, HitCoverage=58%, E-value=1e-180, Identity=76%"; Hit description =Diacylglycerol kinase 1, putative, expressed
  Pfam annotation: Domain name=DAGK_acc; Domain location=204-321; Score= 74.4; E_value=3.6e-19; Accession=PF00609.10; Description =Diacylglycerol kinase accessory domai
  Pfam annotation: Domain name=DAGK_cat; Domain location=58-187; Score =130.6; E_value=4.5e-36; Accession=PF00781.14; Description =Diacylglycerol kinase catalytic domai
  Pfam module annotation: Pfam domain module=DAGK_acc::DAGK_cat; Domain location=204-321::58-187
MPNCKLNEVHQSSESEKDKQLVPDNAATTNMSDVQRENSHVQNNQKYEIINVPSDSRPLLVFINKRSGAQSGDSLRQRLQILLNPVQVFELSKQQGPDVGLALFRKVTHFRVLVCGGDGTAGWVLDAIEKQKFETPPPVAILPAGTGNDLARVLCWGGGLGVIEKRGGLFSVLQDVEHAAVTVLDRWKITIKDNQGKLMRPPKFMNNYFGVGCDAKVALDIHNLREENPERFYSQDSEGILVANIRSYMGGVDLWKNEDDVSDTYLPQSMHDKKLEVVSFTGMLHLGKLQVGLSRAKRLAQGHHIKVEVSTTMPIQVDGEPWSQEPGTIEVSHHSQAFMLKRVSEEPLGHAASVMADILENAESSGIISALQKRTLLQEIASRLL

SEQ ID NO: 71878 - protein, 186 aa, Zea mays
  Coding DNA Sequence Number=SeqID_30099
  Gene Ontology: Mol. function=nucleic acid binding
  Homolog annotation: Hit_ID=Q10Q23; Match level="QueryCoverage=87%, HitCoverage=56%, E-value=5e-28, Identity=38%"; Hit description =Targeting protein for Xklp2 containing protein, expressed
  Subcellular localization annotation: CTP_CleavageSite=33; ConfidenceScore=5.49e-01
MALSEYPAGSTMHGANGGRGHTTAWSCSRKVTRVTTTQQPFRLRTEQRGKAKEGSFVERLRKMQQEEERLRNPLAQGLPYSTDEPEIPMKPPTKEPTEPIDHVLHSEVRVARRAKFDSQADEEIEIKYMRKQQVPRAHPMPDFSKPFVPKRSVKLPTIGREPRFHPRLMRRISTAECSLKMLASRK

SEQ ID NO: 71879 - protein, 1026 aa, Zea mays
  Coding DNA Sequence Number=SeqID_30100
  Gene Ontology: Mol. function=RNA-directed DNA polymerase activity; Cellular component=mitochondrion; Biological process=RNA-dependent DNA replication
  Homolog annotation: Hit_ID=Q8S463; Match level="QueryCoverage=86%, HitCoverage=47%, E-value=0.0, Identity=95%"; Hit description =Putative prpol
  Pfam annotation: Domain name=RVT_1; Domain location=18-183; Score =29.4; E_value=1.3e-06; Accession=PF00078.17; Description=Reverse transcriptase (RNA-dependent
  Pfam annotation: Domain name=RnaseH; Domain location=413-540; Score =10.0; E_value=6.8e-06; Accession=PF00075.14; Description=RNase H
  Pfam annotation: Domain name=rve; Domain location=738-897; Score =120.7; E_value=4.2e-33; Accession=PF00665.16; Description=Integrase core domain
  Pfam module annotation: Pfam domain module=RVT_1::RnaseH::rve; Domain location=18-183::413-540::738-897
MPGIPRDVAEHSLDIRAGARPVRQSLRRFDEEKRRVIGEEIHKLMAAGFIKEVFHPEWLANPVLVRKKGGNGGWYHQIRMKESDQLATSFITPFGMYCYVTMPFGLRNAGATYQRCMNHVFGEHIGRTVEAYVDDIVVKTRKASDLLSDLEVSFRCLKAKGVRLNPEKCVFGVPRGMLLGFIVSERGIEADPEKIAAITSMGPIKDLKGVQRVMGCLAALSRFISRLGERGLPLYRLLRKVECFAWTPEAEEALGNLKALLTKAPVLVPPADGEALLVYVAATTQVVSAAIVVERQEEGHALPVQRPVYFVSEVLSGTKIRYPQVQKLLYAVILTRRKLRHYFESHPVTVVSSFPLGEIIQCREASGRIAKWAVEIMGETISFAPWKAIKSQVLADFVAEWVDTQLPTAPIQPELWTMFFDGSLMKTGAGAGLLFISPLGKHLRYVLRLHFPASNNVAEYEALVNGLRIAIELGVRRLDARGDSQLVIDQVMKNSHCRDPKMEAYCDEVRRLEDKFFGLELNHIARRYNETADELAKIASGRTTVPPDVFSRDLHQPSVKIDDAPEPEVPSAQPEVPTAQPEAPSAQPEVPLAPEGEALDVEEEQSGATPDRDWQAPYLQYLRRGELPPDQVEARRVARRAKSFVLLGDEEELYHCSPSGILQRCISIAEGRELLQEVHSGACGHHAAPRALVGNAFRQGFYWPTAVADATRIVRTCEGCQFYAKQTHLPAQALQTIPITWPFAVWGLDLVGPLQKAPGGYTHLLVAIDKFSKWIEVRPLNSIRSEQAVAFFTNIIHRFGVPNSIITDNGTQFTGKKFLDFCEDHHIRVDWAAVAHPMSNGQVERANGMILQGLKPRIYNDLNKFGKRWMKELPSVVWSLRTTPSRATGFTSFFLVYGAEAILPTDLKYGSPRTRAYTDQSNQASREESLDQLEEARDRALLHSARYQQSLRRYHARGVRSRDLQVGDLVLRLRQGARGRHKLMPPWEGPFVIAKVLKPGTYKLANNQGEIYGNAWNIKQLRRFYP

SEQ ID NO: 71880 - protein, 65 aa, Zea mays
  Coding DNA Sequence Number=SeqID_30101
MAHRTVRCATGAPTVRQRLHKSPWSSIPSCDEVLDGAPHGRHNSGELDRPEKTKTGAQLRTKPNP

SEQ ID NO: 71881 - protein, 164 aa, Zea mays
  Coding DNA Sequence Number=SeqID_30102
  Homolog annotation: Hit_ID=Q8W0S5; Match level="QueryCoverage=82%, HitCoverage=27%, E-value=3e-58, Identity=80%"; Hit description =Putative phosphate/phosphoenolpyruvate translocator
  Pfam annotation: Domain name=TPT; Domain location=60-160; Score=38.1; E_value=3.1e-08; Accession=PF03151.7; Description=Triose-phosphate Transporter family
MTLWLGNSAYLYISVAFAQMLKAITFGLEEMSYKMLSIMSVISVGVIVASVGEITISWVGVVYQMGGVVAEALRLIFIEIFLKKKGVKLNLISMMYYVSPCSAVCLFIPWLFLEKPKMDDSISWNFPPFTLFLNCLMSIGLFDLKSSISAAIAGVVAYNNHKLK

SEQ ID NO: 71882 - protein, 375 aa, Zea mays
  Coding DNA Sequence Number=SeqID_30103
  Gene Ontology: Mol. function=amino acid transporter activity; Cellular component=membrane; Biological process=amino acid transport
  Homolog annotation: Hit_ID=Q6Z3N3; Match level="QueryCoverage=43%, HitCoverage=17%, E-value=8e-50, Identity=66%"; Hit description =Putative villin
MRAAWWDLVGLGLGGMVGAGVFVTTGRAARLYARPGLVVSYAIAGLCALLSAFCYTEFAVDMPVAGGASSYLLVTFGRSTAQDRSQCPRSMSFIPERIRVMGRSPAFTALAATFESSSNRNLLTPRVVKKLYLRYVTPDSSNTSKSSVIAALAGSLDRPSQTPAPAFVKDGSESEKPKQKGDGKGVHTVVTRVESLTINEDVKENKPEDEDSLPIYLYERLKTTTTDPVTEIDVTRQEVISRSHITFLFQKNVMVTLFSIWHAGEFAAFLTGANLIMEYVFSNVAVARSFTVYLGTAVGVDVPSKWRIPVPGLPQGFNQVDLVAVGVILLLSVCICYRLRFCLQVSFYLSFLFVLSLVCSPLADTELLASDFQMF

SEQ ID NO: 71883 - protein, 110 aa, Zea mays
  Coding DNA Sequence Number=SeqID_30104
MGKSFGFKYHGSLKLHYQEHGHWHMAYSPALQCLNQIPCFVLSLLLKIQGLVPLNLEYLLQSQQGIRASLYIKMGVMFQGANKAAGAAQPVGVQQHVLFPGSEEWTPHSQ

SEQ ID NO: 71884 - protein, 50 aa, Zea mays
  Coding DNA Sequence Number=SeqID_30105
MAEPELRRVCFEQQNAVAFKLRVGRVSLAHQRCENNGELHGNIHLGKWVR

SEQ ID NO: 71885 - protein, 83 aa, Zea mays
  Coding DNA Sequence Number=SeqID_30106
MVASPVYGGPWYGISEMGSGCRDFIISYAGPKLGDRIWRENPGRILVSAGELRAFSCGTERRTGTLLTDEAHNTATEEGRCLI

SEQ ID NO: 71886 - protein, 132 aa, Zea mays
  Coding DNA Sequence Number=SeqID_30107
  Gene Ontology: Mol. function=sequence-specific DNA binding; Cellular component=nucleus; Biological process=regulation of transcription
  Homolog annotation: Hit_ID=Q6IEQ6; Match level="QueryCoverage=60%, HitCoverage=20%, E-value=3e-27, Identity=72%"; Hit description=WRKY transcription factor 25
  Pfam annotation: Domain name=WRKY; Domain location=54-114; Score =137.7; E_value=3.2e-38; Accession=PF03106.6; Description=WRKY DNA -binding domain
MMYERGFREAHELFQKERSAAGQGLSRRTVRLPAAAATPGSQPPGHVPASSDVPHDEYSWRKYGQKPIKGSPYPRGYYRCSSAKGCPARKHVERAADDPAVLVVTYEGDHRHDGDGDGDGGVGAGAARSRAA

SEQ ID NO: 71887 - protein, 183 aa, Zea mays
  Coding DNA Sequence Number=SeqID_30108
  Homolog annotation: Hit_ID=Q6QP51; Match level="QueryCoverage=22%, HitCoverage=18%, E-value=3e-11, Identity=80%"; Hit description =Putative growth-regulating factor 1
MAVAGGQEQRSRRQPSLRPIQGRRENPLSRREDNAPVFRSSNGSRTRNGRLANHSPCRINSAAGQAAPLAGEAGDASPSPIMTASKKGPGKGDTPKRILPREGTRLRASLLIRGSKAGPLEGFDSRLRSRGLYTHYWSEVRRPAPRKGSTAALGYSGSAPTTDQGFEGWPPKGSQPPQTQSEG

SEQ ID NO: 71888 - protein, 93 aa, Zea mays
  Coding DNA Sequence Number=SeqID_30109
MVASPVYGGPWYGIGEMGSGYRDFIIPYASPKLGDRIWRENPWRILVSAGELRAFSCGTERRTGTLLTDEAHSTTTEEGSFKFQIQGFNSSFL

SEQ ID NO: 71889 - protein, 194 aa, Zea mays
  Coding DNA Sequence Number=SeqID_30110
ALMFYPKGLVCKEESQYKMQALNSMTRRECQLWPQSFFTSVSKDAIIILRVRTVMEPPKVLGPPTDVFVPRTSDSHAEPARYNSPDCPVYTGQCPVLQEDAALNSPVSGICIGCFAIIHRTCPVYTGLSGVTAAQRLLRRQRLPADALNARQRAQKSGTPMLAHRTLYSACPVRHRTSRRAQRQSSNGRNPNGR

SEQ ID NO: 71890 - protein, 173 aa, Zea mays
  Coding DNA Sequence Number=SeqID_30111
  Subcellular localization annotation: CTP_CleavageSite=41; ConfidenceScore=5.39e-01
MELSLPAEPSPFLPLPSSLSSRALLPGRDLATGARPHRLARTRARQPDRLRPPRPPRPSSLPLLCLRDRPPTPSCRALVAALRPRREPSVVAVVVVARVGACPCNTPATVPTPFVNRPPSVEPHWNLRPTVQTHRRSYAVRHRRDRAAQQLDHPRPRRSSSSVHPRLKRIKTI

SEQ ID NO: 71891 - protein, 107 aa, Zea mays
  Coding DNA Sequence Number=SeqID_30112
MSGASAKREIRTGDKSASSGRTHSRESAHKHKEESSSSIKSQRKGDKKKKMKKVVYYETDSSSPSTSGSESASATSKRHERKKYSKMPLRYPPNMDIHPQEDDRGYH

SEQ ID NO: 71892 - protein, 116 aa, Zea mays
  Coding DNA Sequence Number=SeqID_30113
MEKLNFQIQCGGTEAPRAWPNKTMKCEGDSYLWPHDEQHPSPPHERSQGRHMTRRGDILQDAISASRPPRESTGPLYTQPGPPSMVQDSQVSKPDPLDEARTPLSEVQATHSKVPG

SEQ ID NO: 71893 - protein, 225 aa, Zea mays
  Coding DNA Sequence Number=SeqID_30114
MDGKQKGRLRCAYKGTTRYNQKHLHCLRVRNCSATRIYLHNVVPLLRRIASLRTNSHRATPVLAIPSLTKPEVGQPTNPTLTGYPEEFEERAQERHNAAASGRGGFSSGRPRAGRARSDEGSDAAAIGKVSSTRSGREVEMAAAGGVCERQHGSQRWFEGALELGVGVSVTTGTRRVAAVAGGGRAVRLALWTRPLSRRGPLSDQRNGLFGRKLAKNWRPRIPDC

SEQ ID NO: 71894 - protein, 436 aa, Zea mays
  Coding DNA Sequence Number=SeqID_30115
  Homolog annotation: Hit_ID=P16976; Match level="QueryCoverage=40%, HitCoverage=86%, E-value=2e-95, Identity=99%"; Hit description=GTP -binding protein YPTM1
  Pfam annotation: Domain name=Arf; Domain location=239-415; Score= -57.1; E_value=2.3e-05; Accession=PF00025.11; Description=ADP -ribosylation factor family
  Pfam annotation: Domain name=Miro; Domain location=250-352; Score =26.9; E_value=1.3e-05; Accession=PF08477.3; Description=Miro-like protein
  Pfam annotation: Domain name=Ras; Domain location=257-399; Score =271.1; E_value=2.1e-78; Accession=PF00071.12; Description=Ras family
  Pfam module annotation: Pfam domain module=Arf::Miro::Ras; Domain location=239-415::250-352::257-399
MTELDLSAEVLNLVLHCSFISAFEATMKPFYLYRLYLHSSLSLSKRVAKAQGHSQENWREGACLYGRFPLLVDASTGISMYESGDIVKYLFRNYGQGRSPSPGLLESTIFTGWVPTLLRAGRGMTLWDKAGAVPAEKLELFSYENNPCARIVREALCELELPYVLQNVGEGSSRTDLLLRKSGSKQVPYLIDPNTGFQSGDHKKILPYLFQQYPSHPVPRKSISILRSSLPALFSESLFSSALFLESKGGKRNEQRVDDSYVDSYISTIGVDFKIRTVEVEGKTVKLQIWDTAGQERFRTITSSYYRGAHGIIIVYDITDMESFNNVKQWLDEIDRYANDSVRKLLVGNKCDLAENRAVDTSVAQAYAEEVGIPFLETSAKESINVEEAFLAMSAAIKKSKAGSQAALERKPSNVVQMKGRPIQQEQQKSSRCCST

SEQ ID NO: 71895 - protein, 149 aa, Zea mays
  Coding DNA Sequence Number=SeqID_30116
  Subcellular localization annotation: CTP_CleavageSite=27; ConfidenceScore=5.03e-01
MERNPAGIHAAARISRVVSVERRTPTSGSHTAGAPMRTGCAGASWFGRAEGFQPKRAEFWNMEGLIERYRRTCSEMHGESSNHNKTQTIQQEVLALTHEMDLLQKGGPMTDLRTSMQMQIISREIEMLRNKIIEQNEILNLSNMAMTPV

SEQ ID NO: 71896 - protein, 204 aa, Zea mays
  Coding DNA Sequence Number=SeqID_30117
  Gene Ontology: Mol. function=phosphotransferase activity, phosphate group as acceptor; Cellular component=cytoplasm; Biological process =nucleobase, nucleoside, nucleotide and nucleic acid metabolic process
  Homolog annotation: Hit_ID=O24464; Match level="QueryCoverage=68%, HitCoverage=60%, E-value=2e-40, Identity=58%"; Hit description =Adenylate kinase
  Pfam annotation: Domain name=ADK; Domain location=65-199; Score =147.0; E_value=5e-41; Accession=PF00406.12; Description=Adenylate kinase
MWRRRVGALLRSPRTSSSASSACQSRRHHLLPSEEPLALNRLARLFTSQAGSDGGDTQKPFIAFVLGGPGSGKGTQCTKIASDFGFAHLSAGDILRHEIASGSEKGELILEIIKEGRIVPSEITVELIRKAMEMNNAKRVLIDGFPRCEENRIAFERIVGTEPDIVIFFDCPEDEMVKRLLGRNQVWFQTDICSKDVGVSYSVV

SEQ ID NO: 71897 - protein, 407 aa, Zea mays
  Coding DNA Sequence Number=SeqID_30118
  Homolog annotation: Hit_ID=Q7XHQ9; Match level="QueryCoverage=42%, HitCoverage=59%, E-value=3e-51, Identity=63%"; Hit description =Putative permease
MGSRRALQLGAAVLVIFSFFGKIGALLASIPLALAASVLCFTWALIVALGMSILRYTQAASSRNMIIVGFTLFISLSIPAYFQQYEPSSNLILPSYLLSYAAASSGPVRTASSGLNYAVNALLSIDVVVALLVALILDNTVPGSRHLDRSQIPRGGSCDIGTLPIAGESFMLVQAHSPSRQDRDGGTSLPRVPNSITQEVVPDVDTPPLRLFEGSPVDPDVPLWGDWYVLSDNDSDDFPVDDEGGEEQHDSEVEEQQLQGGGEGHVKGPEERMGIMATISNALRALLSALSAKSSEHINYEDINACEMDLASTMQPPNICYHVDAIVVEVQALIGMLPTKELWAHNCNNFVDFGGTEDRVQAILQQTMDLDNEQVLYPEDVEPPEVLPTLPGPAPLPLPSPNSLSCY

SEQ ID NO: 71898 - protein, 73 aa, Zea mays
  Coding DNA Sequence Number=SeqID_30119
MEAAYRWHKKARLLIARGAIHTVASVYISADNLLWNLYLSFAAIWIGGDDSDGLPIDKGGEEPQGREVEEQQQ

SEQ ID NO: 71899 - protein, 108 aa, Zea mays
  Coding DNA Sequence Number=SeqID_30120
MAASGLRLSGEQECMRISPEHTRVGLDMCQLRTPAWALSAATPAAVAAEASSHPLSVTAQNFDHGSSEVPVSPFAAPIRPASIVDGTTASCLASALHQNQVRKMESPG

SEQ ID NO: 71900 - protein, 179 aa, Zea mays
  Coding DNA Sequence Number=SeqID_30121
MAPPKLYDGGGSQLSYGSSHDITPAGCQDLSGCHIGMAFLERVGRAGPRTGQALSWGRSLPSPTWTLVTPLLQAHPTWARDEHEGRGTSTSLTPVSGHLASPPFALAHALDPSGLGHAAHSLVGLGTPRSRNADTFEGNDMPSRDTSSWEIFNSSLWRSSYDIVKRWILSKVVRETLAS

SEQ ID NO: 71901 - protein, 86 aa, Zea mays
  Coding DNA Sequence Number=SeqID_30122
  Gene Ontology: Mol. function=phosphotransferase activity, phosphate group as acceptor; Cellular component=cytoplasm; Biological process =nucleobase, nucleoside, nucleotide and nucleic acid metabolic process
  Homolog annotation: Hit_ID=Q1SXH9; Match level="QueryCoverage=58%, HitCoverage=23%, E-value=5e-16, Identity=72%"; Hit description =Adenylate kinase
GRVDDNIETIKKRLKVFESLNIPVVDYYSSRGKVHKINATGTADEIFEAVRRLFSSLSLFSLAPNVYAYWKLWCMIASWKVIVVRI

SEQ ID NO: 71902 - protein, 115 aa, Zea mays
  Coding DNA Sequence Number=SeqID_30123
MTLMDDVDVGKPRLPWTAAGDGVGRRRSAAVVGRPGGGGGRGRGGGGQHGGAWSGRTSGVRASVRGRGRTRQRLLLRPKLRSGEVVTPPEAEAEAEARGRVRRRPSPEAEAEAEA

SEQ ID NO: 71903 - protein, 64 aa, Zea mays
  Coding DNA Sequence Number=SeqID_30124
MRPETGSPMLAMVGTSAVTARRQPGSVEHCTIQEMVDGVTWPTTLPPGWTVEWDVAPAGEDHEE

SEQ ID NO: 71904 - protein, 324 aa, Zea mays
  Coding DNA Sequence Number=SeqID_30125
  Gene Ontology: Mol. function=transferase activity, transferring glycosyl groups; Cellular component=cytoplasm; Biological process =metabolic process
  Homolog annotation: Hit_ID=Q6Z035; Match level="QueryCoverage=94%, HitCoverage=63%, E-value=1e-126, Identity=73%"; Hit description =Putative glucosyltransferase-10
MVVHHESCLTNGHLETTIIDWIPGMPPISLGDISSFVRTTDADDFGLWFNITEANNCTKAGALVLNTYDALEADVLAALRAEYPCIYTVGPLGSLLRRHHDNEDADAVGGSLDLSLWKHDTECLSWLDAQEPGSVVYANFGSLTVVTAAQLAEFSWGLAATGRPFLWIVREDLVVGRPAAALPLGFAAETAARGRLAAWCPQERVLRHRAVGCFLTHNGWNSTCECLAAGVPMVCWPVFADQLTNCKYACEVWGVGRRLDAEVRREQVAAHVDEVMESVEVRRNATRWKAMAKEAAGVGGSSHENLLGLVEALRVSSLNSESET

SEQ ID NO: 71905 - protein, 402 aa, Zea mays
  Coding DNA Sequence Number=SeqID_30126
  Gene Ontology: Cellular component=phycobilisome; Biological process =photosynthesis
  Homolog annotation: Hit_ID=Q2R3H0; Match level="QueryCoverage=39%, HitCoverage=19%, E-value=6e-17, Identity=32%"; Hit description =Expressed protein
MDRLARPASPGGGGLGYASRRGLYAQASSHHLAGGSAQTSPGGSPKELSPVHRHARAGSLGGAGAASTAGRRAGVGRRGRRSRAEQRPLAPPRSASLGSWAGAGGDAGSGSDDDDDYELSGPPIELSNTPRRTSTRSPSPSVGRHLADQTQVGRPPSLTNRYTAGKSVPMIPSIKRPATSGPGAGAGSESPMPNRREQRRSVDLGSSLRARRTSSSLNDEVISFMNINTLQVENESMYDKLNMLEAINLVFILPASSQLQLAEERFDDGDAKSMHMEREDSDAGDAAETEPILINRKDAALEQRKIAMRIASRRSSSASCNEIATLKSEAKVTTNVVTSLSRRVKSARSELRSLQATANRMILSQEELEEVVLKRCWLARYWTLCSKLGIKITFALFILLYY

SEQ ID NO: 71906 - protein, 55 aa, Zea mays
  Coding DNA Sequence Number=SeqID_30127
MWEHRSSCILASASSPEPLLHRPWSGTLIRERIEENKEEIEVEEARTTPPPHEEP

SEQ ID NO: 71907 - protein, 94 aa, Zea mays
  Coding DNA Sequence Number=SeqID_30128
MEVAVADLCQHSFVAVFIDVGVDEDAIRASSERSRTPGVRAAAADGLYRLCVRASSGPGTPGPALRLGLRASGGPGERRCSEQRHCERLDRLSA

SEQ ID NO: 71908 - protein, 128 aa, Zea mays
  Coding DNA Sequence Number=SeqID_30129
KGEGEEEAEQEQVRRDGEWRSEESRVAGAGAAAFVAGAGTTAGVDADASAGEAAGMALEDLGGALASAVAGDWARELVAESRTRSGGCGAGRLPPGAKVGPPGGSDGRQRLGGREPPAAAVGGEEEKP

SEQ ID NO: 71909 - protein, 716 aa, Zea mays
  Coding DNA Sequence Number=SeqID_30130
  Gene Ontology: Mol. function=heat shock protein binding; Cellular component=intracellular; Biological process=protein amino acid phosphorylation
  Homolog annotation: Hit_ID=Q2QNV4; Match level="QueryCoverage=77%, HitCoverage=69%, E-value=2e-77, Identity=30%"; Hit description =Pentatricopeptide, putative, expressed
  Pfam annotation: Domain name=PPR; Domain location=200-234; Score =17.0; E_value=0.069; Accession=PF01535.11; Description=PPR repeat
  Pfam annotation: Domain name=PPR; Domain location=335-368; Score =22.9; E_value=0.0012; Accession=PF01535.11; Description=PPR repeat
  Pfam annotation: Domain name=PPR; Domain location=435-469; Score =36.7; E_value=7.9e-08; Accession=PF01535.11; Description=PPR repeat
  Pfam annotation: Domain name=PPR; Domain location=505-539; Score=8.6; E_value=0.72; Accession=PF01535.11; Description=PPR repeat
  Pfam annotation: Domain name=PPR; Domain location=636-670; Score =10.4; E_value=0.44; Accession=PF01535.11; Description=PPR repeat
  Pfam module annotation: Pfam domain module=PPR::PPR::PPR::PPR::PPR; Domain location=200-234::335-368::435-469::505-539::636-670
MNLYGCANPSQKAPAASGDLNRGGEDLDAGFAWVRWVIRGEGEEEWWSPALAMRLKARRNKRTKEKKNPRARAGRALLEATLRAREGGRDLRRQADVAGRMRGRTDQLGWTTWALVFLVGTTMTVPARQRIKKELSGLVAAGQGEQPERPQCYAHLSGLLARCGRAGDLRLGTSLHAIVAKNPSHFRLCPRRSCLQHVVVVWNSLVAMYGRCGCRGDAVRVFDEMALRDSVSWNSLLSASASATDALALLRRMLSAAPGAAACDHATLTTVLSACARAGGGTGSASLPAVHGLAASCGLDAEVSVGNALITAYFECSSPGSAERVFDGMADRNVITWTAMVSGMARAERYSESLSLFRQMRRAVDANRASYSSSLLACAGSRAAREGQQIHGLAVKAGLETDLHVESELMDMYSKCGLMEDALRVFRSGQDPDEVSLTVILAGFAQNGLEEEAFRLFAEMVGKGIRVDANMVSAVLGAFGASAPFALGKQIHALAIKRCFGGNTYVCNGLINMYSKCGELQESIRVFDGTPSKNTVTWNSIIAAHVGSPRKGLEILDSMPSKYGIHPKVEHYACVVDMLGRASQLDDAKAFIEDGPFKDSALLWQSLMGACSFHKNSGVGECAAEKLLLLDPDCTAAYVLLSNVYSSEGRWDDRARIMKRMRARGLRKDTGKSWIELEKEVRSFAAGPTRSRPDDVLVQLSAVASDQEDVVESSAL

SEQ ID NO: 71910 - protein, 468 aa, Zea mays
  Coding DNA Sequence Number=SeqID_30131
  Gene Ontology: Mol. function=sodium:hydrogen antiporter activity; Cellular component=integral to membrane; Biological process=sodium ion transport
  Homolog annotation: Hit_ID=Q94BM4; Match level="QueryCoverage=89%, HitCoverage=71%, E-value=1e-151, Identity=70%"; Hit description =Na+/H+ antiporter
  Pfam annotation: Domain name=Na_H_Exchanger; Domain location=1-365; Score=10.5; E_value=0.00029; Accession=PF00999.11; Description =Sodiumhydrogen exchanger family
MRHLAEAGQWIKVLEVSLVKNQSCLEWGVSWLGNDDASQSSFSCAAIGAIFSATDSVCTLQVLNQDETPLLYSLVFGEGVVNDATSVVLFNAIENLDIDNFDAIVLLNFVGKFLYLFFTSTILGVATGLLSAYIIKKLCFARHSTDREVSIMILMAYLSYMISMLLDLSGILTVFFCGIVMSHYTWHNVTESSRVTTKHTFATLSFIAEIFLFLYVGMDALDIEKWKLASSSWADVMSVQQQQSLLVPNKLGPKKPIALSAIILGLVMVGRAAFVFPLSFLSNLSKKEARPKISFKQQVSARSLFFFFHSSAIVSLWKPERAKLLFTASGHTEVRVNAIMITSTVIVVLFSTMVFGLLTKPLLSLLIPPRTGLNTSSLLSSQSMLDPLLTSMMGSDFDVGQINSPQYNLQFILTAPARSVHRLWRKFDDRFMRPVFGGRGFVPFVPGSPVERSVPESHLGTVTEAERS

SEQ ID NO: 71911 - protein, 89 aa, Zea mays
  Coding DNA Sequence Number=SeqID_30132
MAVAGGQEQRSRRQPSLRPIQGQRENPLSRREDGAAVFRSSNGSRTRNGHLANHSPRRINSAAGQAGPGKGIPRKGSFSVKETGPEPPY

SEQ ID NO: 71912 - protein, 241 aa, Zea mays
  Coding DNA Sequence Number=SeqID_30133
MVSLIITILINYEKNTHIGDETRGPNLQFVPLWRASCRCSAPTAHYGVAEHKLKGPFLSLCQILPSHGGCSSLGSRPRLSTYEVDAIIAAHRGLLDEDKQTHILIQQLPNDFEVEVVLSMLAGESSESKELELGSGAPEQSGTTKKVDSLASPRRKRPSQPDAKVDVSKVKQKRRKLWRTSDMQPVSTQVELVIGDEVVDADLIDEVEGGGVAKSARYVVEEAEEDEEDEEELPLIRRERR

SEQ ID NO: 71913 - protein, 45 aa, Zea mays
  Coding DNA Sequence Number=SeqID_30134
MTIERPLELLNMDLFDLIAYISIGRRKITNTRDLEDILETSSKCV

SEQ ID NO: 71914 - protein, 120 aa, Zea mays
  Coding DNA Sequence Number=SeqID_30135
  Subcellular localization annotation: CTP_CleavageSite=9; ConfidenceScore=5.07e-01
MLAPPALPRCSPCSASPSVHGPASRWHAAGAPGALLPLPRLPLAPLLEEDTAVQVSRGSQPSSCWTRRSLDPVPVDIEQSGSVDWNRFGGLLGQGVWFLFPAGPSGSGLDGLEFFEIKCK

SEQ ID NO: 71915 - protein, 165 aa, Zea mays
  Coding DNA Sequence Number=SeqID_30136
  Subcellular localization annotation: CTP_CleavageSite=81; ConfidenceScore=5.23e-01
MHIQMSHQNPLTLAHLWITVFGNSTPAIYSGRLLSSQGFMAYVQTDSGKTTTFYFPITGIIMQPTRMQQRGGSMGMRTAPSSEPVASVASIELNILHRMWLRHVMEVDIIVLGDVTGNATSISALDFRLPTLQLNQVAPHQQCCCFDLQKLPRQRRREQEEAARV

SEQ ID NO: 71916 - protein, 108 aa, Zea mays
  Coding DNA Sequence Number=SeqID_30137
MGLSAVRLQSHVRERAARAKGTRAVQTLETRVAGARDRAGGTAGGRAAKSTQPRHGGARPGRGTEPGAGRGRGSGAGAGLAGEQGRARGEAAGGGPRRGWGLTGVVGE

SEQ ID NO: 71917 - protein, 145 aa, Zea mays
  Coding DNA Sequence Number=SeqID_30138
  Subcellular localization annotation: CTP_CleavageSite=70; ConfidenceScore=5.00e-01
MAPWLKQPRPMLWTILRESGATTMVKKPDLLTVVKQRLSTGLQRQGRGGDRTTIARGSRRGTGLGSRRIPASMIFTSGEGDLTSDGRSRAKVFVRRSPLPNRSEDEQPGSALVRASGGNGEIGCGDNFLPFLSTLSRLAQLNDSR

SEQ ID NO: 71918 - protein, 122 aa, Zea mays
  Coding DNA Sequence Number=SeqID_30139
MSAAGDCVGFAGRCSWVAPLDPRSRAASAAPVPYPGAWCYMASCWGLPWARSTGLVAGVGPISHRGRGWSRLRLVSWPGGIALRILSRALIKTVRLGPEFCRETPIELQNHARSPEPWECDK

SEQ ID NO: 71919 - protein, 118 aa, Zea mays
  Coding DNA Sequence Number=SeqID_30140
  Subcellular localization annotation: CTP_CleavageSite=59; ConfidenceScore=5.18e-01
MACRTGPQPELVLPHLIPLTPPTRPLPPPDLVGLGSARPPRAAAAQQQQAGGSRSCGLPAMVGSAASCCSLGQARSKQFMLQSFLLLDSHKKLLCCHLTHVFLFTIICYQRFETLDFL

SEQ ID NO: 71920 - protein, 323 aa, Zea mays
  Coding DNA Sequence Number=SeqID_30141
  Gene Ontology: Mol. function=translation release factor activity, codon specific; Cellular component=cytoplasm; Biological process =translational termination
  Homolog annotation: Hit_ID=Q6I547; Match level="QueryCoverage=79%, HitCoverage=82%, E-value=1e-102, Identity=70%"; Hit description =Putative peptide chain release factor
  Pfam annotation: Domain name=PCRF; Domain location=88-203; Score =182.1; E_value=1.4e-51; Accession=PF03462.9; Description=PCRF domain
  Pfam annotation: Domain name=RF-1; Domain location=232-323; Score =126.6; E_value=7e-35; Accession=PF00472.11; Description=Peptidyl -tRNA hydrolase domain
  Pfam module annotation: Pfam domain module=PCRF::RF-1; Domain location=88-203::232-323
  Subcellular localization annotation: CTP_CleavageSite=46; ConfidenceScore=5.10e-01
MQYHLRRCGGGALAALWRLRHNASSAVASPPVAWRRPCLPPRFYSTAEMSQQLPANLVEIMEQRMKLIEQRSAYLQEQINQEIEGLKSLVANDHEEKDMREMAEEELLVAVEEEKRLQHELFRSLLPKDEADEKDCILEVRAGTGGEEASLFAMDIFRMYEKYAQKNGWKFDVIDIMESAVKGYKEASGTISGPGAFGKLKFESGIHRVQRVPATEKSGRMHTSAVSVAVLPQADEVAVDVQLRNEDLRIDTYRSGGSGGQSVNTTDSAVRITHIPTGTVVAIQDERSQHMNKAKALKVLRARLYELERRRLHMDGSKLRSEQ

SEQ ID NO: 71921 - protein, 289 aa, Zea mays
  Coding DNA Sequence Number=SeqID_30142
  Homolog annotation: Hit_ID=Q9LGV5; Match level="QueryCoverage=24%, HitCoverage=15%, E-value=1e-21, Identity=71%"; Hit description =Putative CBL-interacting protein kinase 1
  Pfam annotation: Domain name=Pkinase; Domain location=13-251; Score= -89.7; E_value=0.0032; Accession=PF00069.15; Description=Protein kinase domain
  Pfam annotation: Domain name=Pkinase_Tyr; Domain location=13-179; Score=-140.0; E_value=0.0007; Accession=PF07714.7; Description =Protein tyrosine kinase
  Pfam module annotation: Pfam domain module=Pkinase::Pkinase_Tyr; Domain location=13-251::13-179
MVSDGARGLLGAYELGRTLGEGNFGKVKQARHRGSGGQFAVKIMERARVLSQRADEQICREIATLKLLAHPNVVRLHEVGVETGVWVRLGLSQSHHSEAELVDTVLHVALLRNRGSGLQINRKGMEQTISLHIRRMREVLHVVDDTLLEAFAAGQDAAIPRMNVIPERRVHVQNVHICVIYGWTTVVPLPVVECGLPTASPSPPVPMGDAESSAIAPMDVDLEAPPPPPPTAAAVGRRSPTPPVSVVVGTIAARHGQPPRTFDAPRERVIFTGHRPNGVAPSSSSNGRA

SEQ ID NO: 71922 - protein, 110 aa, Zea mays
  Coding DNA Sequence Number=SeqID_30143
MGSHSPGTRVKVRPVDKYGGSMTDRSQGSYAEYHRWRRPSARGHRAREGTLHLGLRELTGEGRRLVHGGSSARSPRKRSRGIGCRAPWMGIRIGGRASLIYMAPSPRDPQ

SEQ ID NO: 71923 - protein, 62 aa, Zea mays
  Coding DNA Sequence Number=SeqID_30144
MAPSGSKSHQRPTYHSKRYVLLVLTETWEIHSSVRRNPLDKTMVRVAKRGKHDTNQVGMSCA

SEQ ID NO: 71924 - protein, 582 aa, Zea mays
  Coding DNA Sequence Number=SeqID_30145
  Gene Ontology: Mol. function=oxidoreductase activity; Cellular component=cellulose and pectin-containing cell wall; Biological process=lignin catabolic process
  Homolog annotation: Hit_ID=Q7XIF0; Match level="QueryCoverage=95%, HitCoverage=95%, E-value=0.0, Identity=65%"; Hit description =Putative pollen-specific protein NTP303
  Pfam annotation: Domain name=Cu-oxidase; Domain location=194-337; Score=137.5; E_value=3.7e-38; Accession=PF00394.12; Description =Multicopper oxidase
  Pfam annotation: Domain name=Cu-oxidase_2; Domain location=418-560; Score=160.1; E_value=5.6e-45; Accession=PF07731.4; Description =Multicopper oxidase
  Pfam annotation: Domain name=Cu-oxidase_3; Domain location=66-184; Score=180.2; E_value=4.9e-51; Accession=PF07732.5; Description =Multicopper oxidase
  Pfam module annotation: Pfam domain module=Cu-oxidase::Cu-oxidase _2::Cu-oxidase_3; Domain location=194-337::418-560::66-184
MAAPPPAPFLLLLAVAAASLAGADDPYRYFTWTVTYGPISPLGTTQQFFSSSPLPVPQLLHALHLSQFFPPSSPLPVPQLRQGILINGQFPGPRIDCVTNDNLVVNVVNSLDEPFLLTWNGVKQRKNSWQDGVAGTNCGIPPGANYTYRFQAKDQIGTFFYFPSLALHRAAGGFGALNVYQRPAIPVPYPPPAGDFTLLVGDWYAAASPHADLRRALDDGGGGALPPPAALLINGAAASGAAPFVGAQGGTYLFRVSNIGLRASVNVRVQGHALRLVEVEGTHPVQSAYDSLDVHAGQSLAFLVTLDQAPLDYAVVASTRFAAAELTAVATLHYAGATARAPGPLPPAPPPGYGWSLGQARSFRWNLTASAARPNPQGSFHYGAIPTSRTLVLASSASLDGAGRRRCAVNAVSFVVPDRPLKLADRYDIAGVIDWDGLPARLDGAAAVPRAGTPVLRLGLHEFVEVVFQNTEEELQSWHLDGYDFWVVGYGDGQWNETQRQTYNLVDAQARHTVQVYPNGWSAILVSLDNQGMWNLRSAMWDRQYLGQQLYLRVWTPEQSLSNEYAIPANAILCGKAAALPH

SEQ ID NO: 71925 - protein, 246 aa, Zea mays
  Coding DNA Sequence Number=SeqID_30146
  Subcellular localization annotation: CTP_CleavageSite=63; ConfidenceScore=5.13e-01
MANAAASALRVVTGCRSLQLILDAGRRGRGHVAAAAGPARARRLQPAPRRLRLLQRRHGRHCVAVNVVSDVQCFRAGSDSCLQLLYHQIFEYWLGMLQIFVAVMTKAYPSIERGDLILLQEIASYMIFACGAVYVISAESFHTNTPQNIIMAIHEVPTSCVYYRSVLRLECSIPGFGYLGWMDDWLRSPALDNLQDLELNSHSPQKVAVVRRNRSARRLGGLRAKVGCFWEVYRCFPKLYIPTALL

SEQ ID NO: 71926 - protein, 301 aa, Zea mays
  Coding DNA Sequence Number=SeqID_30147
  Gene Ontology: Mol. function=protein serine/threonine kinase activity; Cellular component=membrane; Biological process=apoptosis
  Homolog annotation: Hit_ID=Q8W0E2; Match level="QueryCoverage=93%, HitCoverage=60%, E-value=2e-55, Identity=40%"; Hit description =Fusarium resistance protein I2C-5-like
  Pfam annotation: Domain name=NB-ARC; Domain location=1-256; Score= -98.4; E_value=0.00052; Accession=PF00931.13; Description=NB-ARC domain
MHILLGNCMFGRQLHSSEELEVLPIVGPPRVGKSTLVAHVCKDERVQGHFSEIVWLNDLDFTDGEHQNQVSNSNKDKRLLVVIELSGNLYEDAWNRFYLASKRSFCSGSKIVLTSSSDRAVKFGTSQALTLNHLSHEAYWYFFKTLAFGSIDPEAHPRLAQVAMEIARTQNRSINAAYTICYLMRNNFNIHFWCKVLRFFRVFVQNHVSKFNKHPYDLLNQNRPIQISRMATPSEYVIIRRQYQCSSQEEVPKIRGQDVVYGSMKTCGKFEVLAWRSLIPPYYSSVHTYEIQEPRTTSVGS

SEQ ID NO: 71927 - protein, 132 aa, Zea mays
  Coding DNA Sequence Number=SeqID_30148
MGKSKKGESSSHHSGDKRKREPTPPSEDLGDSEYSEEEFSSESEGSSGIATEVWTYIRPVERAGLEGSDESEVSSDEGDSSDSSEEGSDSNDGGDGDRGDGDGDGSRGDGKGDDGNSSGNGKGGSGSGKASG

SEQ ID NO: 71928 - protein, 293 aa, Zea mays
  Coding DNA Sequence Number=SeqID_30149
  Gene Ontology: Mol. function=DNA binding; Biological process =regulation of transcription
  Homolog annotation: Hit_ID=Q7XIF1; Match level="QueryCoverage=84%, HitCoverage=68%, E-value=2e-58, Identity=57%"; Hit description =Putative cytoskeletal protein-like protein
  Pfam annotation: Domain name=Myb_DNA-binding; Domain location=171 -222; Score=36.3; E_value=1.1e-07; Accession=PF00249.21; Description =Myb-like DNA-binding domain
MGLDVMEIGMGADLSLDLRHFASKALLECSVSTGSVGVLSGARFVGGPKSFGALRSQKQDKGRCSPEARSRGALLPFKADVGSGAPAFAPLFLRTDDKAAAARVGVPDLSSLLSPPATMPPADAGAEESRRQVVGFAQAAARAAAMAPSAPALGLQSQQQQQQQQQARKARRCWSTELHRKFVAALDQLGGPQVATPKQIRELMKVDGLTNDEVKSHLQKYRLHNRRAPGSGVVRQPIVLVGGLWIPQEQGSPQSGSPHGPLHHLSTSVAAVSSAATASCEEEDGRSESYGWK

SEQ ID NO: 71929 - protein, 183 aa, Zea mays
  Coding DNA Sequence Number=SeqID_30150
  Homolog annotation: Hit_ID=Q2R216; Match level="QueryCoverage=37%, HitCoverage=17%, E-value=3e-08, Identity=48%"; Hit description=F-box domain containing protein
  Pfam annotation: Domain name=F-box; Domain location=8-58; Score=33.7; E_value=6.3e-07; Accession=PF00646.23; Description=F-box domain
MEADPPLPPASALMVELVEEVLLRFPPADPASLVRAALVCRRWRRIVTGPRFRRRYRDLHLHRGRGGSHPPMLGFLANAGTGTRFVPTSTFRPASARARAAADGLLLLGRLGARSNARHGRALLRRDTGRDGARQLQASPSGDPATGRRTDPAPALPLVRPTPYSWKRRPGSCGRPQITALPL

SEQ ID NO: 71930 - protein, 84 aa, Zea mays
  Coding DNA Sequence Number=SeqID_30151
MPPCADHRSNLPVDARVDSLRLEEAQLGVTLTPTISARRRRSEQILERGAEAGHDALTAASRHAWLLGPQPSPDELRGTCHGAP

SEQ ID NO: 71931 - protein, 203 aa, Zea mays
  Coding DNA Sequence Number=SeqID_30152
  Homolog annotation: Hit_ID=Q2R216; Match level="QueryCoverage=83%, HitCoverage=45%, E-value=1e-10, Identity=32%"; Hit description=F-box domain containing protein
PRGDDAPASARHPDDNVDFAPSALAGNALYFAFQTGAAALEYDLGTREMAVVRLPPPPRLDWQRAVLATRDDGRLGLATAGKSTIYLWAREAPPRGDGSWVQTRAIELDTLLPVGALSAFVDVVSFVDGVGVVFVRTGDGLFTIDLMSRRVTKVFKDTFFSGIFPYMSFHTPGMLPYFKSADMPRIVLPFVIPVMSRMWGLES

SEQ ID NO: 71932 - protein, 75 aa, Zea mays
  Coding DNA Sequence Number=SeqID_30153
MTCEVYYFPKDADSTYAFGPSSTSTKRQGAYFEHRIWPSGQSTPGVGGVNIRCTINETLISHALTYNLSFMAPKR

SEQ ID NO: 71933 - protein, 382 aa, Zea mays
  Coding DNA Sequence Number=SeqID_30154
  Pfam annotation: Domain name=Conotoxin; Domain location=4-72; Score =8.8; E_value=0.027; Accession=PF02950.8; Description=Conotoxin
  Pfam annotation: Domain name=Toxin_7; Domain location=50-85; Score =5.4; E_value=0.053; Accession=PF05980.3; Description=Toxin 7
  Pfam module annotation: Pfam domain module=Conotoxin::Toxin_7; Domain location=4-72::50-85
MATSKMARVVSTAVLLLLLLATAAGDSAAASSGSNLGPRKPLTLQAGADDCITPENFCDFSDDQCCSGSVCTETIFGKAVGRHRGLCTGGLTRQRRSPSRPASSASPTVSLPLHLPLGNEESLHLPRYDDDDVFDSSTAPEYDDNVFGAHCAQATRRDAVAGDVDPVAVCLAPDNDGYMVQDNTSFSKPVGRLCWVDPLLANQHKKVRDGLIGGTELSHTVRLLHCSLLSPNQAEVVESFELESAPPPPVIYDCYVELGSYSIIPSLFCAEQAKEDELVMPKEEVPSTLPNSRDAVSLPNRVASITDIHIEEDSPVCKLVVEIMGFSIFVARLGLPGVDLISYRDMINHGHLITEAISIPMSGDADNGYENYMHVKMSERIY

SEQ ID NO: 71934 - protein, 171 aa, Zea mays
  Coding DNA Sequence Number=SeqID_30155
MSSGPAACGVCGAAACCPHLLHTGDGNDDDLISRAFFSVFPVVGHHRRHESTSSPAMQQPSGCLHEFQFFGHQDDHHHQETIAWLLDHPPPPAPELGGDDGPSPAGDENDDQPAFHPFGTPQYHHPGKGNGNGLTFELDATLGLGTARQTTETAEASATIERTTLPIYQYM

SEQ ID NO: 71935 - protein, 140 aa, Zea mays
  Coding DNA Sequence Number=SeqID_30156
MERVRGLTITDGALGRCTTFEALSGLVWRLWRLRRASGAAAARCAGGGTDAGGSADAGGGADVDVMSKTLGKACKSLNKKSLSELYISNDFFAEYFLSGTRQVFDQKKSLSWRQVTTIENVPSTMVTLGKGTLFAECLLY

SEQ ID NO: 71936 - protein, 109 aa, Zea mays
  Coding DNA Sequence Number=SeqID_30157
MEARKDADEATIPYVYSVPMCPNALGAWFHQVRQSVLIRKTDASTGGPYTSQLTFVRLHYRHPGSVGMEVFASSDPSLGIVTTVDASSTTSLVPAFGLSDRRPSTLRAY

SEQ ID NO: 71937 - protein, 59 aa, Zea mays
  Coding DNA Sequence Number=SeqID_30158
MASYECDLRLVEMGQCLELLRHETRRELEFPLDVVWGNLTNLRFWPLTTHHLLDRRFPP

SEQ ID NO: 71938 - protein, 111 aa, Zea mays
  Coding DNA Sequence Number=SeqID_30159
MVAPKFNGDAAFSLVRRQLESLSVDNMLLRRAVEVLRAEVRSSNSRAARPAASAAGARGLGRVAATAPQTHTQPYHVTKPDHRPRGAAREAAAAPDDVGEELKKALEARLH

SEQ ID NO: 71939 - protein, 123 aa, Zea mays
  Coding DNA Sequence Number=SeqID_30160
MNGEWLNGQGTTRFDGVWTRLRRDTIARHDGEQVATPASVHNGVDSERAQWQTPARGVDSPTNRRRRGQRDVLHCEKEEGMRRESKLGQGEGEGSTSDFIEERERSEGSVFMAAINGIRINGG

SEQ ID NO: 71940 - protein, 131 aa, Zea mays
  Coding DNA Sequence Number=SeqID_30161
MGAKQLFEAIGFAKQLGYPLWLKSSREGRILSKALETEETLKVKLLRRKFEPSLRENDFIESRSEEKNEALKLKERMNSKILELEALTLEKDNRLAVLEAEMKRVKEEYEAETDKIQRVSAEADVNCHTWI

SEQ ID NO: 71941 - protein, 152 aa, Zea mays
  Coding DNA Sequence Number=SeqID_30162
MIFVNLAWFLLLHATPKTVELPIIEEFPLVDKALESQGATTSDLCLSSEEEDKEHIAPVMSLFFYDDDEDDDAKAKDTAATAMATKDIMLPIAAMAVLESPKVLIASPIVTYLVVMMAKEKTNSMKPAMTSDKWRGPVGIEEAKKLLRMTRR

SEQ ID NO: 71942 - protein, 94 aa, Zea mays
  Coding DNA Sequence Number=SeqID_30163
MPLDLFLMAYAERVWGLEALIDGKGGVMLVHANALRAIFKCPLRENHIKYREFMNMYEDMCWFIMRRVIHFKENYHDATSKLGSSQPIVSYHDI

SEQ ID NO: 71943 - protein, 118 aa, Zea mays
  Coding DNA Sequence Number=SeqID_30164
MDPARQPEAAPARLGSPTNHWDPCVIFIPNLAVNIAVAQTNPIEIGILPLALPSSGPPFTECTTKFTISPASLRECKIEDYRARTGDSSIAEGRNVEVSSPSLWLGFVEEDDVVAVDL

SEQ ID NO: 71944 - protein, 137 aa, Zea mays
  Coding DNA Sequence Number=SeqID_30165
MGKGHKRKREPTPPSEDFGDSEYSEEEFSSESEGSPAPASPPASSDDSDDSQGLAAEVWTYIRAVERSGLEGSDESEFPSDEEDSDGGEDKDDDDDGGDDDDGGDGDGDGGNGGGGGGDKGSTRGGSSTGSSGKASG

SEQ ID NO: 71945 - protein, 82 aa, Zea mays
  Coding DNA Sequence Number=SeqID_30166
  Gene Ontology: Mol. function=nucleic acid binding; Cellular component= intracellular; Biological process=transport
  Homolog annotation: Hit_ID=Q6ZG86; Match level="QueryCoverage=66%, HitCoverage=10%, E-value=4e-19, Identity=81%"; Hit description =Putative Ras-GTPase activating protein SH3 domain-binding protein 2
MASAAAATQVGTYFLRNYYNLLQQTPDVVHQFYSEASTMVRVDDLTGTTAAANNMMKQKRNREEPSLDQTEELDAVDAFKTC

SEQ ID NO: 71946 - protein, 126 aa, Zea mays
  Coding DNA Sequence Number=SeqID_30167
MDNSKVGRCTQGGAKVEQGVSARRSLTTAGQRELEGAATRGSCSAGVHAEREQRARPDLRKRREVGEQGEQEGRAMGARGTDQIQAGETSAMAMVSIRKGLREEDVREAPICGQRRAPERRGKGEA

SEQ ID NO: 71947 - protein, 177 aa, Zea mays
  Coding DNA Sequence Number=SeqID_30168
  Homolog annotation: Hit_ID=Q6QP54; Match level="QueryCoverage=33%, HitCoverage=21%, E-value=2e-24, Identity=93%"; Hit description =Putative kinase
MAPPVDVTGLRPRLGDVEAPPKPRSNLSSVAEVESEPLVRARRRPSAEDRAESEPWGRAKRSSSSSGLSPSPSPGVGRSGVRRLLGQCPSPSPGSGGVEFAVFRGLARVRALGRAERSRRLLGLSLSPSPGSGEAELPMVPEAGPDCLSASLCQVAQQSVRRRRRCPSVRPVSGAAK

SEQ ID NO: 71948 - protein, 168 aa, Zea mays
  Coding DNA Sequence Number=SeqID_30169
  Gene Ontology: Mol. function=metal ion binding; Cellular component =endoplasmic reticulum lumen; Biological process=auxin mediated signaling pathway
  Homolog annotation: Hit_ID=P33488; Match level="QueryCoverage=93%, HitCoverage=61%, E-value=4e-53, Identity=68%"; Hit description=Auxin- binding protein 4 precursor
  Pfam annotation: Domain name=Auxin_BP; Domain location=4-168; Score =200.1; E_value=5.3e-57; Accession=PF02041.7; Description=Auxin binding protein
  Pfam annotation: Domain name=Cupin_2; Domain location=82-161; Score =41.2; E_value=3.6e-09; Accession=PF07883.2; Description=Cupin domain
  Pfam module annotation: Pfam domain module=Auxin_BP::Cupin_2; Domain location=4-168::82-161
MCTDDILMYPDNSLVRDISRMQQSNYGREGFSHITVTGALAHGTKEIATAQGCLLKYGDLERTQPGSEAVFGVDRVDRVEVWLQTFGPGQRTPIHRHSCEEVFIVLKGKGTLLLGSSSLKYPGQPQEVPVFQNTTFSIPVNDPHQVWNSNEHEDLQVLVIISRPPVKM

SEQ ID NO: 71949 - protein, 262 aa, Zea mays
  Coding DNA Sequence Number=SeqID_30170
  Gene Ontology: Mol. function=structural molecule activity; Cellular component=protein complex; Biological process=microtubule-based movement
  Homolog annotation: Hit_ID=P28551; Match level="QueryCoverage=53%, HitCoverage=35%, E-value=9e-35, Identity=57%"; Hit description =Tubulin beta chain
MRKILHIQGGQCGNQIGAICDEHGVGATGRYVGNSDLQFEPHQRLLQRSPAAAISSLVPTSWISNPRPWTLCAPAPFGQIFHPDNFVFGQSGAGINCAKGHDTEGAELIDSVLDVVCNEAVNCDCLRAFDITAPGGDVISGGFDDSASWNNNMVWVVDNSDDGHGCHNCVPVLIESMDSLVFNEMPLESVIWDEEAKHGDVVNLEGKGDQTHNNCEQGVVPNAPWKLGDPLFSKVGLKVAWDGEMQFESHTHEGLLLKVEKS

SEQ ID NO: 71950 - protein, 726 aa, Zea mays
  Coding DNA Sequence Number=SeqID_30171
  Gene Ontology: Mol. function=binding; Cellular component=thylakoid; Biological process=photosynthesis
  Homolog annotation: Hit_ID=Q6K378; Match level="QueryCoverage=94%, HitCoverage=90%, E-value=1e-144, Identity=49%"; Hit description =Tetratricopeptide repeat protein-like
  Pfam annotation: Domain name=PB1; Domain location=285-364; Score =48.2; E_value=2.7e-11; Accession=PF00564.15; Description=PB1 domain
  Pfam annotation: Domain name=TPR_2; Domain location=101-134; Score =10.2; E_value=2.2; Accession=PF07719.7; Description=Tetratricopeptide repeat
  Pfam annotation: Domain name=TPR_2; Domain location=26-59; Score =14.8; E_value=0.31; Accession=PF07719.7; Description=Tetratricopeptid e repeat
  Pfam module annotation: Pfam domain module=PB1::TPR_2::TPR_2; Domain location=285-364::101-134::26-59
MGKPPGARNPAEAEADGDDAVFLELSRELKEEGTRLFNRRDFEGAAFKYDKAVQLLPAGRRVEAAHLRASIAHCYMRMSPAEFHHAIHECNLALEAVPRYSRALLRRAACFEALGRPDLAWGDIRTVLRWEPGNRAARQISDRVRTALEDKGISVALDVLPEDENEIASAKGEERKKSRNKRFDSVAGGREGENGIALLESASTEKQAGPRQTNGTGNHQDHTEDSESNGLEKLEQSTETGEKDMGKKRGAHAAGKKPRCGESKQQKHSAVNHCQDNIGAKEEVMKDVKLVFGEDIRCAQMPANCSLPQLREIVQNKFPSLKAFLIKYKDKEEDLVTITLSEELSWASNLAVSQVPIRFYVVEVNHVQELGVDGVRRRPSFATLERNRDIMLDNGTIGHDVEHKHYADDWMVQFAQIFKNHVGFSSDAYLDLHDLGLRLHYEAMEDTIQREEAQEIFEVAESKFKEMAALALFNCGNVHMSRARRRPCLAEDPLQEFILEKVNVSYDWACTEYAKAGAMFEEAVKTKSDFFEGLIALGQQKFEQAKLSWYYALACKINMETEVLELFNHAEDNMEKGMDMWERMETLRLKGLSKPSKEKVVLEKMVLEGFVKDISADEAFEQASSIRSHINILWGTILYERSVVEFNLGLPSWEESLTVAMEKFKIGGASQADINVIVKNHCANETTQEGTSTIMPKEKQYLRHEFEILGIEFHSNNSNLGKDQLT

SEQ ID NO: 71951 - protein, 134 aa, Zea mays
  Coding DNA Sequence Number=SeqID_30172
  Gene Ontology: Mol. function=endonuclease activity; Biological process=RNA-dependent DNA replication
  Homolog annotation: Hit_ID=Q1S9P8; Match level="QueryCoverage=86%, HitCoverage=30%, E-value=3e-16, Identity=33%"; Hit description =Endonuclease/exonuclease/phosphatase
VRVRRDKLANIARTKWWILKGDTIEVFKKRTIKDGTWKEEVDTNNMWEKIATCIRKVVLELELCGATKGSGDQAKDTLWWNEKVQRAIKENKECYEHLYHDKNVDNIEKYKVAKKTTKFVHLRSFVALTHGKKE

SEQ ID NO: 71952 - protein, 165 aa, Zea mays
  Coding DNA Sequence Number=SeqID_30173
  Gene Ontology: Mol. function=DNA-directed DNA polymerase activity; Cellular component=intracellular; Biological process=DNA replication
  Homolog annotation: Hit_ID=Q8S9E2; Match level="QueryCoverage=93%, HitCoverage=15%, E-value=3e-71, Identity=85%"; Hit description=PolI -like DNA polymerase
MSFSSSFVLYMVSVKEARDTLKLWYRDRKEVLAWQKSQKKLASEKGEVYTLLGRSRHFPYLTQYGPGQRGHIERAAINAPVQGSAADVAMCAMLEIERNVRLKELGWRLLLQVHDEVILEGPSESAEVAKAIVVECMSKPFYGTNILNVDLAVDAKCAKSWYAAK

SEQ ID NO: 71953 - protein, 244 aa, Zea mays
  Coding DNA Sequence Number=SeqID_30174
  Gene Ontology: Mol. function=DNA-directed DNA polymerase activity; Cellular component=intracellular; Biological process=DNA replication
  Homolog annotation: Hit_ID=Q8S9E2; Match level="QueryCoverage=100%, HitCoverage=16%, E-value=5e-51, Identity=75%"; Hit description=PolI -like DNA polymerase
GDHISCAEGRIHCSLNINTETGRLSARTPNLQNQPALEKDRYRIRQAFVAAPGNSLIVADYGQAGGDFHSRTAMNMYQHIRDAVQEKKVLLEWHPQPGQEKPPVPLLKGMYNPEPLDWFSKQKIQLRDYTVQWTISKRCLLISCGIGVAEAGYCDGDDQKNPSVGVSQSLECLEASGVWVLGSSFKTRIALFLHGVPEIELPGMVGPAFARAEDAFGAERRKAKMLNFSIAYGKTAVGLSRDWK

SEQ ID NO: 71954 - protein, 131 aa, Zea mays
  Coding DNA Sequence Number=SeqID_30175
  Subcellular localization annotation: CTP_CleavageSite=81; ConfidenceScore=5.09e-01
MPSAFFAWRSQHGTSLVGILFSALGVLGVGREVARRDFRPTSLGHREARVPWDRLTWSSARFALSYLAPTPGSSRACRRTRCSAGRCGQILTRLCKDKHSVWFNTHVEVERLSLHAVPAKEGLAAEWYASQ

SEQ ID NO: 71955 - protein, 68 aa, Zea mays
  Coding DNA Sequence Number=SeqID_30176
  Subcellular localization annotation: CTP_CleavageSite=53; ConfidenceScore=5.44e-01
MASRGQPCIPASDAAKPGPPSDRERPNLPLAVPPQRSSRPSPTSSLSLLPWARQQQSRVIHGGHRRDR

SEQ ID NO: 71956 - protein, 88 aa, Zea mays
  Coding DNA Sequence Number=SeqID_30177
MAGARPPCSASLPRKEDGIARRDAVGACGAQRLGARPQRRLPRHKENEEGCARFLTSRHSLTERARGCLLVKLRHAVLNDGLADDNLR

SEQ ID NO: 71957 - protein, 120 aa, Zea mays
  Coding DNA Sequence Number=SeqID_30178
  Homolog annotation: Hit_ID=Q338D7; Match level="QueryCoverage=78%, HitCoverage=15%, E-value=9e-20, Identity=59%"; Hit description =Calmodulin-binding family protein, putative, expressed
MGLSISYPPDDYLPAVEDDMGRLFIRSLSFDDMEAAADSPSYSPSALPPAFGSRKLIMEGSLGFFERREADSVQMQNVLSIRNPKPPDREACSSVSPGHENLHNSIDEAIMLKGIDQDHI

SEQ ID NO: 71958 - protein, 104 aa, Zea mays
  Coding DNA Sequence Number=SeqID_30179
MPWPEMWLPPATEEEGEAEDVVGSTPLWVGDLRRGGGGGRVGTGECEGASREPEKRGGRDEAQAQQAQHARLTEILGPSCRTRVSTRSVEDASNAEEPPIPSVF

SEQ ID NO: 71959 - protein, 57 aa, Zea mays
  Coding DNA Sequence Number=SeqID_30180
  Homolog annotation: Hit_ID=Q5QLQ3; Match level="QueryCoverage=86%, HitCoverage=27%, E-value=1e-11, Identity=62%"; Hit description=60S ribosomal protein L18A-like
MGWFLFIIGFFFAAIPWYLGAFVLICVRVRDYREKPGYVACTIASQLLSLNYTIAFQ

SEQ ID NO: 71960 - protein, 66 aa, Zea mays
  Coding DNA Sequence Number=SeqID_30181
MGDPKGAVIGGAGRAPDGRGIRKEGRGVPPERGLPVGVRHLATPWWLPRWQRRLTCASSLDGGVGA

SEQ ID NO: 71961 - protein, 331 aa, Zea mays
  Coding DNA Sequence Number=SeqID_30182
  Gene Ontology: Mol. function=triacylglycerol lipase activity; Biological process=lipid metabolic process
  Homolog annotation: Hit_ID=Q8RZ95; Match level="QueryCoverage=98%, HitCoverage=99%, E-value=1e-122, Identity=61%"; Hit description =Lipase class 3-like
MANALPGQKTGEVTATQNPFEFHVYGPRHLSSPSWWDLLRSSWKDPSYRRMVIACFIQGVYLLELDRQDKRDERTALAPQWWRHFMYRLSQTLVDERDGSIYGAVLEWDRRALLAGYAPFRPAGAPAAVVALRGTLLSGATFRRDVVDDLRFLAWDSLKGSVRFAGALAALRSAARRHGTGNVCVGGHSLGAGFALQVGKALAKEGVFVECHVFNPPSVSLATSLRGFAETAGEMWGYVRAWLPYVGSAAAADAGGEAKEVSLGRAGTAQPGLARMLTVSKGPTKFLDAHGLQQWWADDVELQVALNHSKLIDRQLRSLYAAQPASPQVNQ

SEQ ID NO: 71962 - protein, 275 aa, Zea mays
  Coding DNA Sequence Number=SeqID_30183
  Gene Ontology: Mol. function=Rho guanyl-nucleotide exchange factor activity; Cellular component=intracellular; Biological process =regulation of Rho protein signal transduction
  Homolog annotation: Hit_ID=Q5QLQ8; Match level="QueryCoverage=93%, HitCoverage=89%, E-value=1e-110, Identity=79%"; Hit description =Cytochrome B561-like
  Subcellular localization annotation: CTP_CleavageSite=5; ConfidenceScore=5.04e-01
MSLPSATAPSSSGATQPLPTEQQGVSRERRMESLGWLTESAVMPKKHKAIEGVGAASILDLKAQLYRTQEEARNPIAPSAVAAAASGGEFRRAKIRSAPTDPLGAKNSGVESRAHKDKLELKAVKDGSESYAALEKKAELYEKLSRGELPDEEDKEKYCVDFFQKGFDRVYEPQIPECSHRATDGAEPVNDREDSMPNAKPLGLGRAGTTIDRDEHKRFVREVHEEVTEARQKASTVRSRRQEQDAARREKLRQAYLKKRLEKLIAEKQASSTSD

SEQ ID NO: 71963 - protein, 144 aa, Zea mays
  Coding DNA Sequence Number=SeqID_30184
  Gene Ontology: Mol. function=protein binding; Cellular component =cytoplasm; Biological process=intracellular protein transport
  Homolog annotation: Hit_ID=Q8RZ91; Match level="QueryCoverage=76%, HitCoverage=12%, E-value=3e-56, Identity=92%"; Hit description =Vacuolar protein sorting-associated protein VPS16-like
MAALSTLFLHSRSQHELEVSTKQPIFVGSSVSDTIKTCIAMGNERAALRVKSEFKVPDKRWYWLKTCALATVGNWDGLEKFSREKRPPGGYKPFVEACIDAGQKNEAVKYIPKLTDPRERSEGVFGWMDKKGWKWVTTFFIVFE

SEQ ID NO: 71964 - protein, 110 aa, Zea mays
  Coding DNA Sequence Number=SeqID_30185
MEDRMREKKLGIKVIHGRKRGCVAGIPAAAAAPPQTLGSLPFPSHGAHGPHGVYGLALGCGQCRSGPPLKGSRAHSVTSAHMAQLRYNSPDCPVHQRSNGYLRATVDSDG

SEQ ID NO: 71965 - protein, 218 aa, Zea mays
  Coding DNA Sequence Number=SeqID_30186
  Gene Ontology: Mol. function=structural constituent of ribosome; Cellular component=ribonucleoprotein complex; Biological process =translation
  Homolog annotation: Hit_ID=Q943F3; Match level="QueryCoverage=99%, HitCoverage=100%, E-value=4e-90, Identity=76%"; Hit description=60S ribosomal protein L18a
  Pfam annotation: Domain name=Ribosomal_L18ae; Domain location=5-218; Score=375.7; E_value=7e-110; Accession=PF01775.7; Description =Ribosomal L18ae protein family
MVAFRFHQYQVVGRALPTPGDEHPKIYRMKLWATNEVRAKSKFWYFLRKLKKVKKSNGQVLAINEHIELLLHVNLAIPELSAGRPISVSISTFNVTKSDFYMEMSIFERNPTTIKNYGIWLRYQSRTGYHNMYKEYRDTTLNGAVEQMYNEMASRHRVRSPCIQIIKTATVHFKLCKRDNTKQFHNSEIKFPLVHRKVRPPTRKLRTTFKASRPNLFM

SEQ ID NO: 71966 - protein, 93 aa, Zea mays
  Coding DNA Sequence Number=SeqID_30187
MSGASEDSDFKLFAFGNSRKPARYKSPDCTVYTGHVRCSKEERPPELASLGISLKQHRYNSPVSPIHPPSRRLSDIPEQSYLIALSHALYVFF

SEQ ID NO: 71967 - protein, 111 aa, Zea mays
  Coding DNA Sequence Number=SeqID_30188
  Gene Ontology: Mol. function=DNA binding; Biological process =regulation of transcription, DNA-dependent
  Subcellular localization annotation: CTP_CleavageSite=15; ConfidenceScore=5.19e-01
MKARSQIAPKPLKAVAMAPRPSGPKRKPRPKPAGKGDPRAPKKPPTTFFYFMYHFHLGLRLLVNVIAELNIWHWEDFRKVYKQEKTSVKSMQEIGKACGEKWNTMAFEESG

SEQ ID NO: 71968 - protein, 37 aa, Zea mays
  Coding DNA Sequence Number=SeqID_30189
MAADTPYPGLPLLVPSGKMAPISEMILPEHALILATM

SEQ ID NO: 71969 - protein, 80 aa, Zea mays
  Coding DNA Sequence Number=SeqID_30190
  Homolog annotation: Hit_ID=Q8LQJ9; Match level="QueryCoverage=100%, HitCoverage=8%, E-value=1e-07, Identity=42%"; Hit description=Cell division protein-like
MAWRRVLTQIARHRPTKAIYNETSCFLPLWGAFSKVTSLQCHYSVPLFDIYMVLLLTPGARIKNLQERNQSSYIGSLARR

SEQ ID NO: 71970 - protein, 104 aa, Zea mays
  Coding DNA Sequence Number=SeqID_30191
MARLAPREDFRINQAGALISINATENLEVIKRQDDDVPCKQPLAHTLEPATRHITGWLRICGRNTDNYLPATSTKIWEHHHNSSQHGRLESNDPDHCDRKDCDI

SEQ ID NO: 71971 - protein, 55 aa, Zea mays
  Coding DNA Sequence Number=SeqID_30192
MEREKDQKEEVGVLPESLAQRLPEELEEGQTKLVAAEHRSGTGTGSSGAGRYEPN

SEQ ID NO: 71972 - protein, 538 aa, Zea mays
  Coding DNA Sequence Number=SeqID_30193
  Gene Ontology: Mol. function=nucleoside-triphosphatase activity; Cellular component=membrane; Biological process=protein catabolic process
  Homolog annotation: Hit_ID=Q8LQJ8; Match level="QueryCoverage=85%, HitCoverage=61%, E-value=0.0, Identity=78%"; Hit description=Cell division protein ftsH (FtsH)-like
  Pfam annotation: Domain name=AAA; Domain location=239-423; Score =319.0; E_value=8.4e-93; Accession=PF00004.19; Description=ATPase family associated with various cellular activities (AAA)
  Pfam annotation: Domain name=AAA_2; Domain location=236-365; Score= -38.1; E_value=0.0072; Accession=PF07724.4; Description=ATPase family associated with various
  Pfam annotation: Domain name=AAA_3; Domain location=239-367; Score= -22.8; E_value=0.1; Accession=PF07726.2; Description=ATPase family associated with various
  Pfam annotation: Domain name=AAA_5; Domain location=239-370; Score =16.1; E_value=0.0001; Accession=PF07728.4; Description=ATPase family associated with various cel
  Pfam annotation: Domain name=Peptidase_M41; Domain location=430-538; Score=95.6; E_value=1.5e-25; Accession=PF01434.8; Description =Peptidase family M41
  Pfam module annotation: Pfam domain module=AAA::AAA_2::AAA_3::AAA _5::Peptidase_M41; Domain location=239-423::236-365::239-367::239 -370::430-538
MARSPGGTGSHTEHTQLPALLLLLLLPGTCSSIIAAGPRAFLLADSVEHQLCCLRAGQRGGAWPAFAPDGCEEGLDLHGVVSLTRGEESFSSIPALIGAGQLTKDGALGTANAPIHMVTAETGQFKDQLWRTFRSIALTFLLISGIGALIEDRGISKGLGLNEEVQPSIESTTKFSDVKGVDEAKSELEEIVHYLRDPKSFALTHFSVTTSCSPCWLCSSPRSCSMVRFTRLGGKLPKGVLLVGPPGTGKTMLARAIAGEAGVPFFSCSGSEFEEMFVGVGARRVRDLFAAAKKRSPCIIFIDEIDAIGGSRNPKDQQYMKMTLNQLLVELDGFKQNQGIIVIAATNFPESLDKALIRPGRFDRHIVVPNPDVEGRRQILESHMSKILKGDDVDLMIIARGTPGFSGADLANLVNVAALKAAMDGAKSVTMNDLEYAKDRIMMGSERKSAVISDECRKLTAYHEGGHALVAIHTEGAHPVHKATIVPRGVALGMVAQLPDKDQTSVSRKHMLAKLDVCMGGRVAEELIFGDTEVTSGA

SEQ ID NO: 71973 - protein, 82 aa, Zea mays
  Coding DNA Sequence Number=SeqID_30194
  Subcellular localization annotation: CTP_CleavageSite=38; ConfidenceScore=5.81e-01
MAGITKRRTSPASTSSSSGDVLPQRVTRKRRSARRGPRSTARRPSAPPPPITGRNRLYKRELLITALKLTCREIQVTEPYYL

SEQ ID NO: 71974 - protein, 379 aa, Zea mays
  Coding DNA Sequence Number=SeqID_30195
PPHLRATTAHHRLALAHGHGAHKPQQQETVNSEALTGGGADGLRAVLRGPRRADRRFRVTRCGKTSPDEEEVEAGEVRRLVMPAMPVERRRAEKEGREEVAAAAAAAAAARVGEGEAFIAGWGRAGGDAEAGARGDKCRAGSEMGAKWGRQRQRPPSGAMPRARRRGQPRAREVASAGPQPRMLPAPWFPGVARRPLLAAWARDLVVVRLDGWLGFTAAPSPGPGPRHRALCGDSLVKAAVKLKSWGSPKIAALPLLLLDSGLLTWDFHFRVLKGLKHRGQCFVEVQVQGSAEPLLRCRVSVVVVDVAVENAEEDKPHKSRTQKEGAIDEDGDVVEAVIEEKAPAKCQRLKGSTDKTSTTVVVWRRDKRGDVSRILELR

SEQ ID NO: 71975 - protein, 86 aa, Zea mays
  Coding DNA Sequence Number=SeqID_30196
MEHREQRTRPKKARAGPTAACAVGGPDDSGGAEGGGRDQRGVGPTTAGAAEAERGGADGSLRRGDWRSDRAFTYVGHKSCGYAKGS

SEQ ID NO: 71976 - protein, 190 aa, Zea mays
  Coding DNA Sequence Number=SeqID_30197
  Gene Ontology: Mol. function=methyltransferase activity; Biological process=metabolic process
  Homolog annotation: Hit_ID=Q8S0I2; Match level="QueryCoverage=84%, HitCoverage=56%, E-value=2e-82, Identity=92%"; Hit description =Methyltransferase-like
  Pfam annotation: Domain name=Methyltransf_11; Domain location=28-106; Score=19.8; E_value=0.00062; Accession=PF08241.2; Description =Methyltransferase domain
MTKQSKLSQSTILKFFLQVILLGWPFWTCAAAGSAIILPVTDKRRSWGWVLTQYVVQDLNVNPKLPFEDNTFDVITNVVSVDYLTKPIDVFKEMRRILKPSGLAIMSFSNRCFWTKAISIWTSTGDADHAWIVGAYFHYVGGFEPPQALDISPNPGRTDPIAIKKQIEGKIQEASCLALIAGPIGELMFP

SEQ ID NO: 71977 - protein, 165 aa, Zea mays
  Coding DNA Sequence Number=SeqID_30198
  Gene Ontology: Mol. function=DNA binding; Cellular component=nucleus; Biological process=regulation of transcription, DNA-dependent
  Homolog annotation: Hit_ID=Q5N8D2; Match level="QueryCoverage=96%, HitCoverage=83%, E-value=4e-28, Identity=68%"; Hit description =Regulatory protein Viviparous-1-like
MNELDLNTAALDPDHYATGLRVLLQKELRNSDVSQLGRIVLPKKEAESYLPILMAKDGKSLCMHDLLNSQLWTFKYRYIGSTTKAGCMCLKIPGDEIFDGILNSLPEIPVANVRYSDFFDPFGDSMDMANPLSSSNNPSVNLATHFHDERIGSCSFPYPKSGPQM

SEQ ID NO: 71978 - protein, 266 aa, Zea mays
  Coding DNA Sequence Number=SeqID_30199
  Gene Ontology: Mol. function=motor activity; Cellular component =myosin complex; Biological process=signal transduction
  Homolog annotation: Hit_ID=O24518; Match level="QueryCoverage=94%, HitCoverage=14%, E-value=4e-89, Identity=67%"; Hit description =Unconventional myosin
  Pfam annotation: Domain name=Myosin_N; Domain location=10-51; Score =36.2; E_value=1.2e-07; Accession=PF02736.9; Description=Myosin N -terminal SH3-like domain
MASMLNIVIGSHVWVEDKDLSWVDGEVFRIDGQNAHVHTTKGKTAVVHPPFREKRVEGVGGRVFRSLFTFKGISGFEKCFKVIANISNIHPKDTEAPPDGVDDMTRLSYLHEPGVLDNLAVRYAKNIIYTYTGNILIAINPFQRLPSLVDALTMEKYKGANLGDLDPHVFAIADAAYRQMINEGKSNSVLVSGESGAGKTETTKLLMRYLAFLGGRSGTGERTVEQQVLESNPVLEAFGNAKTVRNNNSSVFKALPRRRLGVQALG

SEQ ID NO: 71979 - protein, 180 aa, Zea mays
  Coding DNA Sequence Number=SeqID_30200
MAREEVPEDPEIWGFRSVGADDKDVEDFGAWTLEHSDGPGPSLLPASPEQPCATSGHDVSQPELPKIPDVPAVSQLLPHPPVKKRQFKAHDVTLPRRSRRVAEAAPWSPGPIVSEAQKRVIKSLGFAAQNEKISQEAQDAYNKLFVNPASDAHMVALASIFGWTVDEGEEIKSVDLIAGF

SEQ ID NO: 71980 - protein, 221 aa, Zea mays
  Coding DNA Sequence Number=SeqID_30201
  Gene Ontology: Mol. function=motor activity; Cellular component =myosin complex
  Homolog annotation: Hit_ID=Q6L5H7; Match level="QueryCoverage=88%, HitCoverage=33%, E-value=2e-40, Identity=34%"; Hit description =Putative myosin heavy chain
MKQLMLQLLNLKQEVKHCLYLVVECRFEEATKNLESSLTFEKQRHQANLIELDEAREKIEELQREVGDTDEKSTLLQTSIQSLEERLGEKDALLTTERLESEATKKSLNESEDRNKDLLMKIEVAEKDIAHFQETVQRNEENMAALETSLRSERQQKDAIMKQLAESQGEIGELQRKLEDADARNGLLQDSLQRFHSYLKLISCVMSQLPSYPSAKSHIML

SEQ ID NO: 71981 - protein, 434 aa, Zea mays
  Coding DNA Sequence Number=SeqID_30202
  Gene Ontology: Mol. function=protein-tyrosine kinase activity; Cellular component=membrane; Biological process=protein amino acid phosphorylation
  Homolog annotation: Hit_ID=Q6ER39; Match level="QueryCoverage=96%, HitCoverage=55%, E-value=1e-124, Identity=54%"; Hit description=CTR1- like kinase kinase kinase-like
  Pfam annotation: Domain name=Pkinase; Domain location=156-426; Score =160.0; E_value=6.2e-45; Accession=PF00069.15; Description=Protein kinase domain
  Pfam annotation: Domain name=Pkinase_Tyr; Domain location=156-426; Score=168.9; E_value=1.3e-47; Accession=PF07714.7; Description =Protein tyrosine kinase
  Pfam module annotation: Pfam domain module=Pkinase::Pkinase_Tyr; Domain location=156-426::156-426
  Subcellular localization annotation: CTP_CleavageSite=31; ConfidenceScore=5.25e-01
MELKLFFFDLGTLFSVSPHHSWNTTASGGARSDGLGGPSTSNARRIRRRSISITPEIGDDIVSRDTVIEHEAYIFKMGLFNRAVRAMNETQKQNRLQRDHVEGSCSYVMEDQSNTNDCPNKDDASWRIGATDSDSRNRTGSTQKAMSLPSSPHEYRGFFGEVFRGIWNGTDVAIKVFLEQDLTTENMEDFCNEIYILSRLRHPNVILLLGACITPPHLSMVTEYMEMGSLYYLIHMSGQKKKLSWRRKLKIIRDICRSNVTEQFDHKRHHGIFFSNTQKRCISLYYEENRRSKMDQIVHRDLKSANCLVNKHWTVKICDFGLSRLMIDSPMTDNSSAGTPEWMAPELIRNEPFTEKCDIFSLGVIMWELCTLSRPWEGISPVQVVYSVANEGSRLEIPEGPLGRLIADCWSEPENRPSCQEILTRLLDCEYTVS

SEQ ID NO: 71982 - protein, 67 aa, Zea mays
  Coding DNA Sequence Number=SeqID_30203
MASISGRVATGERRGQGVNKMLHTPTAGTVGMASINGRVATGMIDGFDYCAIVRDIFMVLSIHELCV

SEQ ID NO: 71983 - protein, 186 aa, Zea mays
  Coding DNA Sequence Number=SeqID_30204
  Subcellular localization annotation: CTP_CleavageSite=50; ConfidenceScore=5.13e-01
MLASATRAGTSSTTKPDHAAGAVHGAGAGAGGTPIVVTDGGQEVTVSQFVAQLGFSCVLTDEAARRRLDSIHQRLRLLEQQMETLEAEWRTVLPSPSALPPRCINARSASASHHAPSPAAPLHRAPSPAAPESVADPPYARPGTVVPRLGSTTTSSSPHNCVVCPRPYTSTAPPSPASGARPPRRQ

SEQ ID NO: 71984 - protein, 215 aa, Zea mays
  Coding DNA Sequence Number=SeqID_30205
  Gene Ontology: Mol. function=protein disulfide oxidoreductase activity; Cellular component=cytoplasm; Biological process=cell redox homeostasis
  Homolog annotation: Hit_ID=Q011R3; Match level="QueryCoverage=83%, HitCoverage=66%, E-value=2e-35, Identity=47%"; Hit description=[O] KOG0911 Glutaredoxin-related protein
  Pfam annotation: Domain name=Glutaredoxin; Domain location=154-214; Score=66.8; E_value=6.9e-17; Accession=PF00462.14; Description =Glutaredoxin
  Pfam annotation: Domain name=Glutaredoxin; Domain location=24-82; Score=37.4; E_value=5e-08; Accession=PF00462.14; Description =Glutaredoxin
  Pfam module annotation: Pfam domain module=Glutaredoxin::Glutaredoxin; Domain location=154-214::24-82
MMARTQKNKATAHHLVSEGNLKYTLIFILELLPMQKGVNILKQEGVKFGSFDILTDNDVREGMKKFSNWPTVPQLYCKGELLGGCDIVIAMHDSGELKDVFEEHNIPLKPQGSKNEEAGQPESATEKGGAVAEPIGLTDAQKARLESLINSSPVMVFIKGTPEEPRCGFSGKLVHILKQENIPFSSFDILSDDEVRQGLKVLSNWPSLPSTVHKR

SEQ ID NO: 71985 - protein, 420 aa, Zea mays
  Coding DNA Sequence Number=SeqID_30206
  Subcellular localization annotation: CTP_CleavageSite=47; ConfidenceScore=5.07e-01
MDSLLASLDWRNEFGPPVLQRMGSFSLLSPVVQSNKNPKAVTSAVAACKHESGLLSIPSHGIFIGSQKSPSLLKSTNETKGMEVQVLDLSSDSEGEVSAHSPDHKRPSQQPGVDPNRRVGDNGSSAVDSLFEEAGAARPPRHPSDALNKGKEKVVDVESVESPKHGGESLGAAGRVLGAGSDPWSALVSKCKAGDSGNNGTECWDSWGDWGDQLTNSAPVARLGSERTGFHETYELRGTPQLHSDSSAFSDQWKGILGASPADPVNSLWCSRDTSMKDSEDETLSQRSVSVREISSCDYFLTEDSSSSWLSKVKGLNFPLPDEHQLRTRQIENDEMFARRLQEQLNQQQPGSQHSEAVVTLDYSSLNVDKTIAWTLHEQDAEHARFAAREVQSSSVFFLKVMERIIKLAKSYVLKRKRMA

SEQ ID NO: 71986 - protein, 84 aa, Zea mays
  Coding DNA Sequence Number=SeqID_30207
MSHHPLLTLLPSAGQALVQAAFNAHVCACENFGRDWVRVEMSMDEAARRRLDSMQRRLRLLEQQMETLEAEVGEATSSRMHTYA

SEQ ID NO: 71987 - protein, 147 aa, Zea mays
  Coding DNA Sequence Number=SeqID_30208
  Homolog annotation: Hit_ID=Q7XCL0; Match level="QueryCoverage=36%, HitCoverage=29%, E-value=4e-16, Identity=76%"; Hit description =Expansin-like A2 precursor
MAAGASDYLTVEYHSRDSPLSPPTTREPPAAAASSYTTVGTCLVDVDGDAACLPLVLLLLVFSAAPSPAHGCDRCVRRSRATYYQASSLALNGGVVQLAVHVAGPRAGVEHGAGAAVVPAGGDRWLRRQVSDVAQEGCYLCDTRKWQ

SEQ ID NO: 71988 - protein, 214 aa, Zea mays
  Coding DNA Sequence Number=SeqID_30209
MESTRRKECLPVRGKRKTTTEGLHIRGLGESSGMGAAVEGQEHSGMTLLWTRSTLRGTARRGFIGFWNPVNSRHMPIQALVPVSDKDAQADAPRSANCNGSATGADIFESPAVHDAIAHASLRERRSFVIYTSACCMSEEKKMSKEKKMSEKKKISEEKKVVDPFLARFYESMAKTNTKKITKEIMVDLSEDSDDSDDYDVESGDEDSEDRPCG

SEQ ID NO: 71989 - protein, 287 aa, Zea mays
  Coding DNA Sequence Number=SeqID_30210
  Gene Ontology: Mol. function=transferase activity, transferring glycosyl groups; Biological process=nucleoside metabolic process
  Homolog annotation: Hit_ID=Q6RYT6; Match level="QueryCoverage=61%, HitCoverage=82%, E-value=3e-79, Identity=86%"; Hit description =Adenine phosphoribosyltransferase
  Pfam annotation: Domain name=Pribosyltran; Domain location=174-287; Score=94.3; E_value=3.8e-25; Accession=PF00156.17; Description =Phosphoribosyl transferase domain
MACIAKGMGQRPYRKLISSMMGSDARIERGPSGEVWPLGTDQERVMTDEHPPAQLPLKATGGDRREEEELSCGSREGNKQAARARSWGAGGSDLLASKARPERRFERSCDMGEQENNKIGGSGNDNAMAVDEAGAGAAANKGKSLGAADPRLQAISDAIRVVPHFPKPGIMFNDITELLLRPGVFRDAVDMFVERYRGMGIAAVAGIEARGFIFGPAIALAIGAKFIPLRKPKKLPGEVFSESYVLEYGMDCLEMHVGAIEPGERVVVVDDLVATGGTLSAAIRLLG

SEQ ID NO: 71990 - protein, 690 aa, Zea mays
  Coding DNA Sequence Number=SeqID_30211
  Gene Ontology: Mol. function=nucleic acid binding; Cellular component= nucleus; Biological process=mRNA polyadenylation
  Homolog annotation: Hit_ID=Q1STD4; Match level="QueryCoverage=94%, HitCoverage=95%, E-value=0.0, Identity=48%"; Hit description=RNA -binding region RNP-1
  Pfam annotation: Domain name=PABP; Domain location=592-663; Score =140.6; E_value=4.3e-39; Accession=PF00658.8; Description=Poly -adenylate binding protein, unique domain
  Pfam annotation: Domain name=RRM_1; Domain location=190-260; Score =91.8; E_value=2e-24; Accession=PF00076.12; Description=RNA recognition motif. (a.k.a. RRM, RBD, or
  Pfam annotation: Domain name=RRM_1; Domain location=281-351; Score =98.5; E_value=2e-26; Accession=PF00076.12; Description=RNA recognition motif. (a.k.a. RRM, RBD, or
  Pfam annotation: Domain name=RRM_1; Domain location=384-448; Score =58.9; E_value=1.7e-14; Accession=PF00076.12; Description=RNA recognition motif. (a.k.a. RRM, RBD, or
  Pfam annotation: Domain name=RRM_1; Domain location=42-108; Score =41.7; E_value=2.5e-09; Accession=PF00076.12; Description=RNA recognition motif. (a.k.a. RRM, RBD, or
  Pfam module annotation: Pfam domain module=PABP::RRM_1::RRM_1::RRM _1::RRM_1; Domain location=592-663::190-260::281-351::384-448::42-108
  Subcellular localization annotation: CTP_CleavageSite=6; ConfidenceScore=5.27e-01
MAAQVAAVVVPNGSPGAVPAVVSPGAVGVGLGVAQPLPTTSLYVGDLEGSVSDSQLYELFSQAGQVVSVRVCRDVTSRRSLGYAYVNFNNPLDGILQKHTFGSRQAVLRFCADGTFFLTSWGCDFGLPGLARQVPNILLSKRLVRADSLFHVTAARALEVLNFAPLNNKPIRVMYSNRDPSSRRSGSANIFIKNLDKMIDNKSLHETFSSFGTILSCKVAMDEGGQSKGFGFVQYEKEEAAQNAIKSLNGMLINDKPVFVGPFLRKQERDHSFDKTKFNNVFVKNLSESTTKEDLLKIFGEYGNITSAVVMIGMDGKSRCFGFINFENPDAASRAVQELNGKKINDKEWYVGRAQKKSEREMELKRRFEQILKDAADKYQGLNLYLKNLDDSIGDDQLRELFSNFGKITSCKVMRDQNGLSKGSGFVAFSTREEASQAAQFSQMRPAVPMTPTLAPRLPMYPPMAPQQLFYGQAPPAMIPPQPGFGFQQQLVPGMRPGGPHMPNYFVPVVQHQQGQQGPRPGIRRGAGAQGQQPVPPFQQQIVPRGRMYRYPTGRNMPEAPAMPGVAGGMMQAYDMGGFPVRDAALSPAAQIGTLTSALANANPEQQRTILGENLYPLVEQLEPNQAAKVTGMLLEMDQTEVLHLLESPDALKSKVAEAMDVLHNVAHQQNANTPTSQLAALSLTEGIIS

SEQ ID NO: 71991 - protein, 405 aa, Zea mays
  Coding DNA Sequence Number=SeqID_30212
  Gene Ontology: Mol. function=protein binding; Cellular component =nucleus; Biological process=nucleosome assembly
  Homolog annotation: Hit_ID=Q8L8G5; Match level="QueryCoverage=74%, HitCoverage=80%, E-value=1e-127, Identity=77%"; Hit description =Nucleosome/chromatin assembly factor group A
  Pfam annotation: Domain name=NAP; Domain location=1-247; Score=409.0; E_value=6.7e-120; Accession=PF00956.9; Description=Nucleosome assembly protein (NAP)
DKDDELEAKFFEERAALEAKYQKLYEPLYSKRYEIVNGVVEVEGITVESAAETPAEQKTGDETSADQKEEKGVPAFWLNAMKNHEILAEEIQERDEEALKYLKNITWYRISEPKGFKLEFQFGTNPFFKNSVLTKTYHMIDEDEPILEKAIGTEIEWYPGKCLTQKVLKKKPRKGSKNTKPITKTEDCESFFNFFSPPQVPDDDEEIDEDIAEQLQNEMEQDYDIGSTIRDKIIPHAVSWFTGEAAQDEEFEVMDGEDDDDEDNDDEDEDDEDDDDDDDYDSKKTKGTAGGEGQQGERPAECKQQYYMCSYAWSEDGCHSGDMLPSERARPHGGNCVKILFLYRSSVPDSISEVPEFILVFRNKESRFVNFNASHRYYCSQPTFQGPLRKEQTAPGLQGLSPLLY

SEQ ID NO: 71992 - protein, 362 aa, Zea mays
  Coding DNA Sequence Number=SeqID_30213
  Gene Ontology: Mol. function=transcription factor activity; Cellular component=nucleus; Biological process=regulation of transcription, DNA-dependent
  Homolog annotation: Hit_ID=Q2TQ39; Match level="QueryCoverage=98%, HitCoverage=81%, E-value=1e-104, Identity=58%"; Hit description =Transcription factor AP2D4
  Pfam annotation: Domain name=AP2; Domain location=115-180; Score =100.9; E_value=3.8e-27; Accession=PF00847.10; Description=AP2 domain
  Pfam annotation: Domain name=AP2; Domain location=18-86; Score=94.2; E_value=3.8e-25; Accession=PF00847.10; Description=AP2 domain
  Pfam module annotation: Pfam domain module=AP2::AP2; Domain location =115-180::18-86
MMLVKSEIESCYPGRPAHPAWHRWTGRFEAHLWDKNSWNPTQRKKGKQVYLGAYDEEEAAARAYDLAALKYWGPTTYTNFPVMDYEKELKVMENLTKEEYLASLRRKSSGFSRGVSKYRGVARHHQNGRWEARIGRVFGNKYLYLGTYSTQEEAARAYDIAAIEYKGVNAVTNFDLRSYITWLKPSAPPAAFNREALVAQAAPAEQLQLHHHPAETAQMLPRGNPFLLDHMTSSGGGQEASMSTVSPGGMRRRGSSTALSLLLKSSMFRQLVEKNSDAEEGAGDGEAAAAAGSGHPGPGDAYEYHNFFQGEAPPDMCDLFSSGGGGGGGHARVAGFHRDIAACYDGEGLDGWSGFGNMPSLQ

SEQ ID NO: 71993 - protein, 69 aa, Zea mays
  Coding DNA Sequence Number=SeqID_30214
MRGSLSPRRRGASVAAYSDPQRLPLGNCLTVDALEPEWQSGGPSASAPPFPMAARAVVVVVCDNKTIRR

SEQ ID NO: 71994 - protein, 60 aa, Zea mays
  Coding DNA Sequence Number=SeqID_30215
MARYVSKKFCQQYKARILIGDRLVTLQVVWFMPLLRRYGTRRGVKFVLYRFVLFAKRLNP

SEQ ID NO: 71995 - protein, 140 aa, Zea mays
  Coding DNA Sequence Number=SeqID_30216
  Gene Ontology: Mol. function=protein serine/threonine phosphatase activity; Cellular component=protein serine/threonine phosphatase complex; Biological process=protein amino acid dephosphorylation
  Homolog annotation: Hit_ID=P49597; Match level="QueryCoverage=79%, HitCoverage=25%, E-value=6e-35, Identity=59%"; Hit description =Protein phosphatase 2C ABI1
MPSQREQYGGDRYLKPFVIPKPEVTVVPRAKDDDCLILASDGLWDVVTNEEACKAARRQIQVWHKNNGAAGASWSLCDEGDGSTTDPAAQAAADYLVRVALKKGTEDNVTVIVVDLKPRKKSSGATRSIGRSGSITVELS

SEQ ID NO: 71996 - protein, 36 aa, Zea mays
  Coding DNA Sequence Number=SeqID_30217
MADTFSVSLWFFISAADFIPNSMPHGVPGDIRLRLW

SEQ ID NO: 71997 - protein, 89 aa, Zea mays
  Coding DNA Sequence Number=SeqID_30218
  Gene Ontology: Cellular component=nucleus; Biological process =nucleosome assembly
  Homolog annotation: Hit_ID=Q8L8G5; Match level="QueryCoverage=75%, HitCoverage=18%, E-value=5e-29, Identity=98%"; Hit description =Nucleosome/chromatin assembly factor group A
MSDGKDSLDLSALGAAIPNSAELSAEDKANLVASIKNTLEGLASRHTDVLESLEPKVRKRVEKLREIQILVTVVWVVHTSTGNSNANRI

SEQ ID NO: 71998 - protein, 283 aa, Zea mays
  Coding DNA Sequence Number=SeqID_30219
  Gene Ontology: Mol. function=transcription factor binding; Cellular component=intracellular; Biological process=regulation of transcription, DNA-dependent
  Homolog annotation: Hit_ID=Q8RZ83; Match level="QueryCoverage=67%, HitCoverage=75%, E-value=1e-68, Identity=73%"; Hit description =Putative GTP-binding protein Rab11b
  Pfam annotation: Domain name=Ras; Domain location=1-163; Score=146.8; E_value=5.8e-41; Accession=PF00071.12; Description=Ras family
DEFSLETRSTIGVEFATKTVQVDDKLVKAQIWDTAGQERYRAITSAYYRGPATRWAALVVYDAIQFFFSLTISNTHSLNPGTPLVPRRVTFDNAERWLRDHTDANIVVMLVGNKADLRHLRAVSPEDAAAFAQRHGTFSMETSALDATNVERAFAEVLRQIYHVVSRNALDIGDDPAAPSRGKTIDVDAAKDERSRLLGMKTGREILEAEYSQSQQNNAVVLQMGHKFFTISHCFTHSACVNRCTLNIIQATSGREVMQSAIKADCKAIRAQQLQCLCQTWGR

SEQ ID NO: 71999 - protein, 62 aa, Zea mays
  Coding DNA Sequence Number=SeqID_30220
MAIGEVVCRWAHRTVWCASRVTQPLGFDRWSSVSLGHRTVRWCTGQSLFTVCVPQCINTFDV

SEQ ID NO: 72000 - protein, 109 aa, Zea mays
  Coding DNA Sequence Number=SeqID_30221
MASTGRSMLLSLLLFAVTLSLLEMYRAKFASSELMTIAGGFVCSLLFLLLLTFIGNYQEASGDRTGWGAVVVAQLVALIVAGTVHRVCITTWKRKQVTCLGKGVGTSNC

SEQ ID NO: 72001 - protein, 33 aa, Zea mays
  Coding DNA Sequence Number=SeqID_30222
MLRAWGISIAPGTTQHSSSGDPPAVATPALPSG

SEQ ID NO: 72002 - protein, 182 aa, Zea mays
  Coding DNA Sequence Number=SeqID_30223
MAQSLAFIGGETFTPGSRITFGTLDLFATFTGELSLVIHGMPDTKGTQLTCSTGSKVEKRHLKRRVATLKRCLNRHNKTKMVEAPSSTLVVVIDRQPTSVLDLLEDDSRHGSTGINSNAEEALKREELDSLVQKLDRVYDDVERRCLEAERPRPKKEEVEQPRERIRERSPTLLGSGPHTFG

SEQ ID NO: 72003 - protein, 130 aa, Zea mays
  Coding DNA Sequence Number=SeqID_30224
MANPVEKNGSVGSTPISAERRHRPRRDEEEVATVGRPPRPLAKNGGDHFQKLMDSLCQNHGFPIRHKLWECELLKRFISKPPAKKARPEEPTKPTEQEVPADDFPKPTGFLMIFDGAEAYDDKCRIKAIH

SEQ ID NO: 72004 - protein, 523 aa, Zea mays
  Coding DNA Sequence Number=SeqID_30225
KAEYFNIPIPSSIRYEGKWFYVSNVAASGPSFTCRELMSSDEWSMHQYSRVDDHDHHSPARLALSKIEARVKVVTALSSGSFMDEDLLPPVSKDVVSTLVSPFSLVCCFISFLLPFPLMCALLGIEPLVVCLPPLPEVAIIEEERKRKRNADCETLAERSRRVRENKEKGKAPQPIYAELGRGGLVNDPITLAMPLEVPTEAAETGTRVVSSRPSGANPACSYTDGFEKDLVLVSCFVFSGFLALVTVYVLCKSVKDAATAVRRGPPALSTPVLSVVDGATTDEVPRSLMPILLPVQGVLVAPTPDACLIAAPPSVVSSRGISAIYLSPLSGASPEGKGVLAMLPSLPSHGGVVEDVLLLPLRCGGMEDLSLGTIEETLDSFRNMVSIAQALMTWDFIPFGQKLHVAVAHSVAKKRKLIELHSRAERLESEEAQLRSIGEGARIEAGRLREEIQLRVALREASFRIGEVEPSLELRKMHSRADDAKRTSEEMKAVAEARLRELSLARNGAIATSVEVANALFE

SEQ ID NO: 72005 - protein, 137 aa, Zea mays
  Coding DNA Sequence Number=SeqID_30226
MAKTAFNEGNTNKSPRQSGRCAPREVSKKVYTYQKSHQLTQEEPPPQKSTNTKGANKVTLDFRGRRWQKVGAHLADNQAKPLKLDASLEKRISHLDRCSNGTIASQRELSQPGLSHRLHLLRCPLGVISPRMHLSEL

SEQ ID NO: 72006 - protein, 106 aa, Zea mays
  Coding DNA Sequence Number=SeqID_30227
MALGSGGGVRGLPGSGVGCSPGGGGSFPGGGDVDSQAGGVGYLCEAVGDLAVVGALFGSSQSSLSAGVLDCPMVHQTLQSVTVNRCMIGHCSFQAGTGLSGAPFDR

SEQ ID NO: 72007 - protein, 48 aa, Zea mays
  Coding DNA Sequence Number=SeqID_30228
MGRKRVAVRKLSASRKDGCNNPPQPWKILPWMVLIGFKMIPLCTTLEC

SEQ ID NO: 72008 - protein, 454 aa, Zea mays
  Coding DNA Sequence Number=SeqID_30229
  Gene Ontology: Mol. function=RNA-directed DNA polymerase activity; Cellular component=intracellular; Biological process=RNA-dependent DNA replication
  Homolog annotation: Hit_ID=Q8S461; Match level="QueryCoverage=98%, HitCoverage=24%, E-value=0.0, Identity=92%"; Hit description =Putative prpol
  Pfam annotation: Domain name=RnaseH; Domain location=318-445; Score =8.4; E_value=9.5e-06; Accession=PF00075.14; Description=RNase H
MYCYVTMPFGLGNAGATYQRCMNHVFGEHIGRTIEAYVDDVVVKTRKASDLLSDLETTFRCLKAKGVKLNPEKCVFGVPRGMLLGFIVSKRGIEANPEKIAAITNMGPIKDLKGVQRVMGCLAALSRFISRLGERGLPLYRLLRKTERFTWTPEVEEALGNLKALLTSAPILVPPAAGEALLIYVAATTQVVSTAIVVERQEEGHALPVQRLVYFISEVLTETKICYPQIQKLPYAVILTQRKLRHYFKSHPVTVVSSFPLGEIIQCREASGRIAKWAVEIMGETISFAPRKAIKSQVLADFVAEWVDTQLPAAPIQPELSTMFFDGSLMKTGAGAGLLFISPLGKNLRYVLRLHFPVSNNVAEYEALVNGLRIAIELGVRRLDARGDSQLVIDQVMKNSHCRDPKMEAYCDEVRRLENKFFGLELNHIARRYNETVDELAKIASGRTKVLKVA

SEQ ID NO: 72009 - protein, 326 aa, Zea mays
  Coding DNA Sequence Number=SeqID_30230
  Pfam annotation: Domain name=DUF590; Domain location=224-326; Score= -78.2; E_value=0.0034; Accession=PF04547.3; Description=Protein of unknown function, DUF590
MGTLGRAAAEMHMKKLTYIGSWTAVSTEHLNFEMWLVVNKTNSEVVLKFDDKEFHWKQNEIKRKQLLRNWALNWLDFTWQPIDEIYSYFGTKIATYFAFLGMYARWLFFPAVFGLATQLIDFGWGIHCSLSEYKNLDNVSFLSDSLTVEEKEFGVVSVVVEKRKFQRNEWFGVLLRIRNNAIIVLAIICLQLPFELAYAHLYEIAETEVMRYLLTAVYLVAIQYYTRIGGKVLENLIENSIPYLKYSYKKYIAVHKKKRGKESTVGRSVRLSTRVEKEYLKPSYTASIGAELEDGLFDDFLELTLQFGMIMMFACAFPLIFCFAAL

SEQ ID NO: 72010 - protein, 341 aa, Zea mays
  Coding DNA Sequence Number=SeqID_30231
  Pfam annotation: Domain name=F-box; Domain location=14-61; Score =37.9; E_value=3.6e-08; Accession=PF00646.23; Description=F-box domain
MENQTTAAAAAAEDHISKLPDDVLVHILSLCPYYTLMRTVSVSTSWQRLLTQQLPDLTFCLSLPVHKDPSMKTPSEERVQSMARTLRRRCHGTAADYTIKNLRLVYRKDVAMESRYADEFIALANATKLNLIPHIGKESLSCSVDADAGDWSVELPPATVELDVQPFSFAVRPPRIHGPGLNALRSLTLGDVVVREDFPLVVTVFPSLEDLHIKGCILTVSMTISSDTMPRLKHLRFTEVSVTADDTKAAITVLADDLRTLRMSCRRCSYTESPSKPLMFMCDGDGMAAFTKYSLVRLRAPKLAVFEWRCCYADEVCVDAVGRLSNVAIEIAAGRTRTRAP

SEQ ID NO: 72011 - protein, 272 aa, Zea mays
  Coding DNA Sequence Number=SeqID_30232
  Gene Ontology: Mol. function=nucleotidyltransferase activity; Cellular component=intracellular; Biological process=DNA repair
  Homolog annotation: Hit_ID=Q654Y6; Match level="QueryCoverage=82%, HitCoverage=27%, E-value=1e-41, Identity=69%"; Hit description =Putative deoxycytidyl transferase
  Pfam annotation: Domain name=BRCT; Domain location=81-160; Score =18.8; E_value=0.019; Accession=PF00533.16; Description=BRCA1 C Terminus (BRCT) domain
  Subcellular localization annotation: CTP_CleavageSite=60; ConfidenceScore=5.59e-01
MSSTSSGRRAPSSSAAVASSPGQKRARDEASSGSPSDPDAAKNPRRAFASSPFADFGTYMAAKNSKLAAQFDADANTSGTDAGGLFDGVSIFVDGFTVPSSQELKEIMLNNGGRFVNYFSRHTVTHIVCSNLPDSKMKNLRRDHSIKVGIVKVKLSMDTLELSKDSLSSDEQNASALKKERAEISRWYPWCAQSPNAKSRCQTYSVQDLQAVIFPCHWRKVQLNLSGRPHSTLTDPNFVENYFKFYVMFLFGVVVLSTALHWDMEKPCYGEL

SEQ ID NO: 72012 - protein, 283 aa, Zea mays
  Coding DNA Sequence Number=SeqID_30233
  Gene Ontology: Mol. function=hydrolase activity, acting on acid anhydrides, catalyzing transmembrane movement of substances; Cellular component=integral to membrane; Biological process=metal ion transport
  Homolog annotation: Hit_ID=Q654Y9; Match level="QueryCoverage=79%, HitCoverage=27%, E-value=4e-87, Identity=74%"; Hit description =Putative cadmium resistance protein
  Pfam annotation: Domain name=Hydrolase; Domain location=2-162; Score =44.7; E_value=3.2e-10; Accession=PF00702.16; Description=haloacid dehalogenase-like hydrolase
  Subcellular localization annotation: CTP_CleavageSite=62; ConfidenceScore=5.25e-01
MAPRMLCDDGGSQPPYGSKRTSARIQPLRQLSLRQAPSLLRRPRHHTSWVPKSLRLPHRHVTLFHFEDEPRSGVCEVISTLREKAKLRIMMLTGDHESSAQRVAKAVCIEEVHFSLKPEDKLNKVKAVSREGGGGLIMVGDGINDAPALAAATVGMVLAQRASATAVAVADVLLLQDNICGVPFCIAKARQTTSLVKQSVALALTCIVFAALPSVLGFLPLWLTVLLHEGGTLLVCLNSIRALNTPTWSLVDDIRKLVDSLRNYFPSKFNSSPSSYTANTAPL

SEQ ID NO: 72013 - protein, 166 aa, Zea mays
  Coding DNA Sequence Number=SeqID_30234
  Gene Ontology: Mol. function=nucleic acid binding
  Homolog annotation: Hit_ID=Q6JB15; Match level="QueryCoverage=52%, HitCoverage=100%, E-value=6e-38, Identity=85%"; Hit description=MEG1
  Pfam annotation: Domain name=BAP; Domain location=93-165; Score= -11.0; E_value=0.094; Accession=PF06639.2; Description=Basal layer antifungal peptide (BAP)
MAALYLSSSGCGGVAGQGGAAARARGVTCPLQWWSGGQRWLYRRCLRWQLQLLVGDGCAAKSSRHRIGREEFLNISCDMEYKKRVDALVFFSLLLLGYFAAHAHGNGHVTDDVNVSAPAEEGILREKRAQCAQGFLPCKDNKCYCCIGGRTHDCYYTMAQCSHACF

SEQ ID NO: 72014 - protein, 90 aa, Zea mays
  Coding DNA Sequence Number=SeqID_30235
  Homolog annotation: Hit_ID=Q6ZIK5; Match level="QueryCoverage=72%, HitCoverage=16%, E-value=1e-18, Identity=65%"; Hit description =Putative growth-regulating factor 1
  Pfam annotation: Domain name=WRC; Domain location=46-90; Score=48.1; E_value=2.9e-11; Accession=PF08879.1; Description=WRC
MGCYSDQELSSQAERHFDGIQMINICKRSYITHQVGYEPYFGKTVYPEPKRCRRTDDKKWRCSNEAAPVSKYCERQMHRAHNRSRKHVKK

SEQ ID NO: 72015 - protein, 128 aa, Zea mays
  Coding DNA Sequence Number=SeqID_30236
  Homolog annotation: Hit_ID=Q6JB14; Match level="QueryCoverage=55%, HitCoverage=80%, E-value=1e-34, Identity=94%"; Hit description=MEG2
MEYRKRVDALVFFSLLLLGYFAAHAHGKCHVTNDVGVSTPAKEGIMQGNGARCAKGFPPCKDNKCYCCIGGCSRPNNYSSCGYRAAEQVVGARSEQWHTDAQGGSRGPLRQMLEAFGCNMPHQGESGS

SEQ ID NO: 72016 - protein, 293 aa, Zea mays
  Coding DNA Sequence Number=SeqID_30237
  Gene Ontology: Mol. function=oxidoreductase activity; Cellular component=integral to membrane; Biological process=electron transport
  Homolog annotation: Hit_ID=Q6J2K5; Match level="QueryCoverage=100%, HitCoverage=34%, E-value=1e-147, Identity=82%"; Hit description =Respiratory burst oxidase protein B
  Pfam annotation: Domain name=FAD_binding_8; Domain location=87-189; Score=112.0; E_value=1.7e-30; Accession=PF08022.2; Description=FAD -binding domain
  Pfam annotation: Domain name=NAD_binding_6; Domain location=195-293; Score=-3.1; E_value=9.4e-05; Accession=PF08030.2; Description=Ferric reductase NAD binding domain
  Pfam module annotation: Pfam domain module=FAD_binding_8::NAD_binding_ 6; Domain location=87-189::195-293
MVVLMTIAFVWAQPWFRRNKLKDSNPLKKMTGFNAFWFTHHLFVIVYALLIVHGDLFISKQEMTWMYLAVPVLLYVSERILRLFRSHDAVRIQKVAVYPGNVLALYMSKPPGFRHPFSITSAPGDDYLSVHIRTRGDWTSRLRTVFSEACRPPSDGESGLLRADPSKGITETNARFPKLLIDGPYGAPAQDYQEYDVLLLIGLGIGATPLISIVKDVLNHIQLGGSVAGTEPEGSGKAKKRPFMTKRAYFYWVTREEGSFEWFRGVMNEVAEKDKDGVIELHNHCSSVHQEGD

SEQ ID NO: 72017 - protein, 162 aa, Zea mays
  Coding DNA Sequence Number=SeqID_30238
MAFMELEWRDREEETETLTRWRTVAAGTSVCDSGVGRAPGIAVLGFGSWSRAWRGWSSCARHVGRWRRAWASVVQCSGGATRPSSGWPGGVTAPGGVGACSACLAWSSESRAAAAQGKERREEREKGCGGACAQEEEGEEARGGGGQQGREPGGAACSTTWA

SEQ ID NO: 72018 - protein, 313 aa, Zea mays
  Coding DNA Sequence Number=SeqID_30239
  Gene Ontology: Mol. function=oxidoreductase activity; Cellular component=integral to membrane; Biological process=electron transport
  Homolog annotation: Hit_ID=Q6J2K5; Match level="QueryCoverage=88%, HitCoverage=32%, E-value=1e-102, Identity=70%"; Hit description =Respiratory burst oxidase protein B
  Pfam annotation: Domain name=ATP-synt_DE; Domain location=3-48; Score= 20.3; E_value=0.0069; Accession=PF00401.10; Description=ATP synthase, DeltaEpsilon chain, long alpha-helix domain
  Pfam annotation: Domain name=NADPH_Ox; Domain location=165-251; Score= 158.5; E_value=1.7e-44; Accession=PF08414.1; Description=Respiratory burst NADPH oxidase
  Pfam annotation: Domain name=efhand; Domain location=252-280; Score =26.3; E_value=0.00011; Accession=PF00036.22; Description=EF hand
  Pfam module annotation: Pfam domain module=ATP-synt_DE::NADPH _Ox::efhand; Domain location=3-48::165-251::252-280
LGSDIDPEEAQHALEIAEANLSKAEESKENLTSALEKNMAATEAATDTGSSRRSQDDTTTLVPHSGNLGEPIQKGVKTTRFKDDDEVVEITIVQRDSVAIEDVRVVDDGGSGHSNGFDGLSLVSPSSSRSGKLSSKIRQVKNGLKMKNSSTKAPQTQLGKNMRKRLDRSKSGAAVALKGLQFVTAKVGHDGWAVVEKRFNELQVDGMDGSDEFAVQLFDSLARKRGITKQVLTKDELKDFWEQLSDQGFDNRLQIFFDMVDKNADGRITEEEVKEIITLSASANKLSKLKERADEYTALIMEELDRDSLGYIE

SEQ ID NO: 72019 - protein, 127 aa, Zea mays
  Coding DNA Sequence Number=SeqID_30240
  Gene Ontology: Mol. function=zinc ion binding
MVTDKWVWSHKRKADGSLDRYSKLSRKDIKARCPACRGLCNCKLCSLGHTKGATHKVIFLPLREPPSGERKILSIKISNHQFYKLLPVKLDREQLDELELEAKIQGTKTSNVRVQVAENGQSESLYW

SEQ ID NO: 72020 - protein, 534 aa, Zea mays
  Coding DNA Sequence Number=SeqID_30241
  Pfam annotation: Domain name=WRC; Domain location=231-276; Score =61.8; E_value=2.3e-15; Accession=PF08879.1; Description=WRC
MPPRRGRRKGKGRAKPRAKATEPEPELEEAADSEIEAGDAKAEESGEAKEDESASDAESMDADANEEAVENGADEMDAEPEAKAEPEAVATEAEAKPDVSDAEDEEAGETCSDREADAKDVDSKAKAEESDGEDEEGATAETDGEDEEGATAETDGESEEEAAETGGENEEDGGDSDTEGDAEESPPPPPSRSRRRKRAATPDDEAEETPTPSRRRRRRKSRQRGDSPPPLPDHLRCRRSDGKKWRCSGRALPTVSFCEYHYARANKGKKLPADGELLAVALQRQKNKRKGRRRINPSTSPQAATSDRQTRDLPNGLMTILPGSSGPAALSTPVTTKVGVEISAPMQRCYRSKNAEPLPVGPCEGCSSCYEYDESSTKNVSLLRALAQRPLSPRPSKRWILDSLGVVDSASHGPNITYYATHNPGLAYHIWCSPNIPCYTSHMFAPSIALRVPPHSLTCFATLVHVYLHRAQEGALTRYPVKVVGVPPSSTSLRSSSCPSDVSPVPSSVHRSLIDPHWRCAMEEEYKAFLANHT

SEQ ID NO: 72021 - protein, 139 aa, Zea mays
  Coding DNA Sequence Number=SeqID_30242
MLPHSKLLPGETWKPETLPSQKRFESITSSLTFIGGTIKNALEISLLTHVIYGCKCHGCKSKLAIAGAKNVKADLAFTKEYCAQLEEESKILCESYDKSDNPKDDDLILNIFFILLTAVPLPTTACPTSHTLPTNSWAR

SEQ ID NO: 72022 - protein, 172 aa, Zea mays
  Coding DNA Sequence Number=SeqID_30243
PGASLGFQLRRPAELPGTAPLLLLLPCRVLSALLPSAALLSQAKSLFLSLVYVPRVLAKLPAQRPASLLPDARAQLSSDPVVSSPLALSFPSSRVLLPVPQLGNSYKLPGTSVSSSPAARPVSFSPMEATPSLNPRRAVLLPLSLLRASSSGDFPPAPLFLACPCAVIQLVL

SEQ ID NO: 72023 - protein, 149 aa, Zea mays
  Coding DNA Sequence Number=SeqID_30244
  Homolog annotation: Hit_ID=Q45RR7; Match level="QueryCoverage=44%, HitCoverage=22%, E-value=4e-09, Identity=56%"; Hit description =Plastid division regulator MinD
MERGLEAEEVEVVERMVADERLVEWEVSREDGGGGEVDTVLEAEQEIEVEEASVDDDGWEAVAREGGGEAGGCGGLSDAGLAGVTQLHPSDVPLRRPSKMQHVIKEARGGGETEGQAGPEVEAACAGGASWERIDAFASRNSTKLKTNF

SEQ ID NO: 72024 - protein, 45 aa, Zea mays
  Coding DNA Sequence Number=SeqID_30245
  Homolog annotation: Hit_ID=Q6Z2Z3; Match level="QueryCoverage=71%, HitCoverage=3%, E-value=4e-08, Identity=81%"; Hit description =Putative 26S proteasome regulatory subunit S2
MIALVIGGGAYVHMIDGRGASSNLDSTSQNIAATFVNVFVNAGFD

SEQ ID NO: 72025 - protein, 456 aa, Zea mays
  Coding DNA Sequence Number=SeqID_30246
  Homolog annotation: Hit_ID=Q10N06; Match level="QueryCoverage=98%, HitCoverage=68%, E-value=1e-102, Identity=44%"; Hit description =Expressed protein
MENGRVREHILGTEANNVLRIRKERPLTSDSIDPLQIGQEASVHQFGNTDVSCSGSSQRYSCGNDSFRKTNRSSSSRICRHAESAVGSKTLAEMFALSDSERLKLNSDSNAPVLCNMIDRDNGHSKDGCFIVLPKHAPVLSIRSSMDMPSCLEGSSQGKNNLNISNIYNNGKFQIDSSRDKPRSLKQIGSGTEAHLSSAHCFQNLTGDNFSTPDCLNDKVLLTTDEDVVRQSAESEPSRFNLQVSRKQRAACIGTSKAWGDKQRGCHQYHNESEVNMSSDDEDHSFYQSLEAFQVEENWDFSYLLDILICSGIIVVDWQLICKSWYLPGYPVGPHVFDRLERKYNKIATWAKPERRLLFDLVNSILSEVLAPCVDVHPWVQPSRHCVAFWGPEGPVEKVWQTIVRLQEDCVTRHPDEMVLDTNWLEVGTDINMVGKQIARMLHGDLLEEVIVDFLG

SEQ ID NO: 72026 - protein, 76 aa, Zea mays
  Coding DNA Sequence Number=SeqID_30247
MAKGGDFGHKSKMGIIVKPYKAVHKAKRMSAIEKTSLITRTLETQEAVLQRPRRQRLKRPLLQRLKGPLQRQRRRR

SEQ ID NO: 72027 - protein, 91 aa, Zea mays
  Coding DNA Sequence Number=SeqID_30248
  Homolog annotation: Hit_ID=Q1S199; Match level="QueryCoverage=84%, HitCoverage=14%, E-value=7e-08, Identity=55%"; Hit description=Zinc finger, RING-type; Zinc finger, C6HC-type
MASRDHGATHEGRTEPSEPKGLLPIPQVLSLHPMQESSSRHTAADAATLRKCVKRIGSLCLSCKVPCIWHYSMSYYEYKMRCGYEFCYTWE

SEQ ID NO: 72028 - protein, 493 aa, Zea mays
  Coding DNA Sequence Number=SeqID_30249
  Gene Ontology: Biological process=regulation of GTPase activity
  Homolog annotation: Hit_ID=Q10L74; Match level="QueryCoverage=88%, HitCoverage=89%, E-value=1e-33, Identity=31%"; Hit description=F-box domain containing protein
  Pfam annotation: Domain name=F-box; Domain location=3-47; Score=29.9; E_value=8.7e-06; Accession=PF00646.23; Description=F-box domain
MEEQLPDDMLVEILSRLPPSSLAASRCVSKHLCSIVDARRLLRAGHLLPLRLDAFYCISLASVDRETYLFARPSVARRIPGACLDFRVDLEVVDHCNGLLLLCDMVLNPATRQSAALPNAPDPSIENMLGVATVWAGTAPHRPPFYLYTDFNLVYDPMAESPEHFEVFLIPVLSCGHSGLMSDNITINLEEQEWPPSTFRTHVFSSRSWRWEERSWVRQGEPTGTMADMLRSEHGSNQKAVYFRGALYVHYSNESVMRISISKDRNTYQMMRLPAIRSKQIVESATFYLGKSEKGVYCALFYWAQDDSDPQFRVWSLMEEEMNGRDGQIHMKWLIKTSISLKPLLAQLHHCGHDLTPDEWMIIYNRHDRDLAGSSAQDDNDDEWDFENAHEIVLEAPNNVKDWYPIDFLGFHPYKEIVFFSLSWKTISYNLNTTKVSCSTKHDESQPCHQVAGTSTAIAGAQQHTRARTDNKDHRYDSVNKDHTVVDRPSLCD

SEQ ID NO: 72029 - protein, 64 aa, Zea mays
  Coding DNA Sequence Number=SeqID_30250
  Gene Ontology: Mol. function=helicase activity
  Homolog annotation: Hit_ID=P84634; Match level="QueryCoverage=73%, HitCoverage=3%, E-value=4e-17, Identity=81%"; Hit description=Dicer -like protein 4
MGEYEVLVMTPQILLHNLRHCFIRMDLIALLIFDECHHAQAQKRHPYAQIMKEVFVMADMILMQ

SEQ ID NO: 72030 - protein, 258 aa, Zea mays
  Coding DNA Sequence Number=SeqID_30251
  Gene Ontology: Mol. function=double-stranded RNA binding; Cellular component=intracellular; Biological process=RNA processing
  Homolog annotation: Hit_ID=Q3SA53; Match level="QueryCoverage=53%, HitCoverage=8%, E-value=5e-40, Identity=58%"; Hit description=Dicer -like 4
  Pfam annotation: Domain name=Ribonuclease_3; Domain location=148-251; Score=52.0; E_value=1.9e-12; Accession=PF00636.16; Description=RNase3 domain
  Subcellular localization annotation: CTP_CleavageSite=60; ConfidenceScore=5.11e-01
MVDRGTSPVAVALGRSAWGAPVATALGKVGGTAVGSRLLESGKVGLLTNAVFSFGWWNISESEARELMEHFVELPPELCSLKIIGFSKDMGSSLSLLPSLMYRLENLLVAIELKDVMSSYFPEASQISASGILESLTTERCLERISLERLEVLGDAFLKYVVGRHNFISYEGLDEGQLTRRRSDIVSNSNLYELSIRRNLQENCAPLYIKQKKGVVLKDQYKNPSLVTALRMVREEAVLWSMTGAKALSFLQVDELLA

SEQ ID NO: 72031 - protein, 70 aa, Zea mays
  Coding DNA Sequence Number=SeqID_30252
  Subcellular localization annotation: CTP_CleavageSite=38; ConfidenceScore=5.43e-01
MTLTAPAVTDWVADSSASYHTTLDARSRYLPPRGAPTSASSSSSASYFSFIIVLRILLQLHHRPRHSRTL

SEQ ID NO: 72032 - protein, 52 aa, Zea mays
  Coding DNA Sequence Number=SeqID_30253
MAEDADAEGRTMEDASARSRDRGALMAGLVDGGSRPCSSMVNKWVKEESPLV

SEQ ID NO: 72033 - protein, 302 aa, Zea mays
  Coding DNA Sequence Number=SeqID_30254
MEGGSLACSWGIGLITPGSFGCTAGAINLPEGRGAKEILTEDLGLPRLPDAAGREEDEQFPRGGTADSVNGTIGSLIPPGRFRPSPWYEMVCAPVVLPHSVGPPETQITVPASHHSLLEELNRDGDQAIQSASTVDPSSFPGQADLHSSKTKLKVYSRRKGGPTQEIQVAPNPSSVGAPILDMADGTSSLITDISVPLVDPSTFISRINKRSAHLLPTPRAEQRNLNSQTMTVPRRSRRVAGIGVEFSMQEWRNRSSRKAMGALHIIKESDGVNPEALMGLVLQTGWTTVVVNLCIWALGGC

SEQ ID NO: 72034 - protein, 190 aa, Zea mays
  Coding DNA Sequence Number=SeqID_30255
  Gene Ontology: Mol. function=triacylglycerol lipase activity; Biological process=lipid metabolic process
  Homolog annotation: Hit_ID=UPI0000196C59; Match level="QueryCoverage =62%, HitCoverage=14%, E-value=5e-40, Identity=66%"; Hit description =triacylglycerol lipase
MDALTNFKPKRVDVLTNSTKKLKFLREATTIFISLLDYFQKVKDSWRIVNHRDIIPTVPRLMGYCHVEAPVYLKFGDAKDAPVNNSILDDEDQGDVIGEYTPDVLVTEFMKGEKQLVEKLLQTEINLLRSIRDGSALMQHMEDFYYVTLLEVFENYFCFSHTKLCQKLLKNVRSSYQVADTANDEYQLTA

SEQ ID NO: 72035 - protein, 248 aa, Zea mays
  Coding DNA Sequence Number=SeqID_30256
  Gene Ontology: Mol. function=triacylglycerol lipase activity; Biological process=lipid metabolic process
  Homolog annotation: Hit_ID=UPI0000196C59; Match level="QueryCoverage =68%, HitCoverage=15%, E-value=2e-30, Identity=45%"; Hit description =triacylglycerol lipase
  Pfam annotation: Domain name=C2; Domain location=143-224; Score=83.4; E_value=7.2e-22; Accession=PF00168.20; Description=C2 domain
  Subcellular localization annotation: CTP_CleavageSite=60; ConfidenceScore=5.69e-01
MASISAPAVACRVAPARATTSVLPAHSRRPGCRSVVWRCWAATRGRRRRWAGLRARCRISCDVSQPSAVQPDSESSGEGLVAQDDGPRRPPFDINLAVVLAGFAFEAYTSPPADVGWRETDAADCQTVFLSDVFLREVYDGRLVVRLKKGINLPAMDPWGTSDPYVILQLNGQTAKSQIKWATKEPTWNEDFTFNIRKSRENLLQVAAWDANLVTPHKRMGNAGLYLESFCDVLVCIESWPNSCRNMM

SEQ ID NO: 72036 - protein, 86 aa, Zea mays
  Coding DNA Sequence Number=SeqID_30257
HSEFDGEVLVLEVSTRYFVGGDHIFGPDPSSQRRWTMKRWIKEMEEVAATAATSSTAPPPPFLPPDSRSLDPDTSFLGSIGEFIDS

SEQ ID NO: 72037 - protein, 215 aa, Zea mays
  Coding DNA Sequence Number=SeqID_30258
  Homolog annotation: Hit_ID=Q69QI6; Match level="QueryCoverage=82%, HitCoverage=33%, E-value=5e-72, Identity=78%"; Hit description =Nucleotidase-like protein
MALARLRLLDRYGLLSPALSATALRSLGDLRALCTLSTTLRSGAGEDEIERIRREFDDAKRNYLSIPAAIKDMPKMNPQGIYVNKNVKLDDLQVYGFDYDYTLSHYSEHLQCLIYDLAKRHLVNELKYPESCLQYEYDRTFPIRGLYYDRLKGCLLKLDFFGSIEPDGCFFGRQRFWFSISNFFSSPVVVLCPPGSWVLIIGVDALHKALASCSY

SEQ ID NO: 72038 - protein, 141 aa, Zea mays
  Coding DNA Sequence Number=SeqID_30259
  Homolog annotation: Hit_ID=Q2QMH5; Match level="QueryCoverage=51%, HitCoverage=15%, E-value=3e-16, Identity=61%"; Hit description =Expressed protein
MTDAGAARARRPGGGGDGDLPLRPPEPPRDPLEFLSRSWSVSSSAADDVSRALAPALASGAAIAEDVAGELDAASGSSFSFASAATSQLVLDRIMAPTSVEVAPLTSGRLSHSSGPLNCGGSLSDSPPVSPEIDDTKVSLF

SEQ ID NO: 72039 - protein, 48 aa, Zea mays
  Coding DNA Sequence Number=SeqID_30260
MHQGISSMISLIRSVSGSGSRGLVMGKGQAAAGSRSLAIALEGNDARH

SEQ ID NO: 72040 - protein, 109 aa, Zea mays
  Coding DNA Sequence Number=SeqID_30261
MAGSDVDTTLAPRATERSRNSDDAIGNEENKWGPGSPDPLTGESLDLVGSLDHLRLDNGGIRPRDLEGTLTDIVVRTATSAPSQLELPCQGLQPGWDPARSSRVPLARK

SEQ ID NO: 72041 - protein, 265 aa, Zea mays
  Coding DNA Sequence Number=SeqID_30262
DNQANAMKEPGTGGYGYGTKNDKNKDVDTIASDFIKLKHKAWALQKSTTINGGGTGTAAEPQYVATGQIEPDLAGAALTMLGDVAADAKQEHRDPVYAQRVCLGALQGTRRPAPTIAATAMGTRHGRAERELERNPSRERAPAGLGRGSREPGVATGEGYRRGTAARRDARPDAASRERDEPKEERARRSVQPWRNLGRGKEALGSREGARLERDGGRREERRGWSSNAAAGKELDAGAREGGRSPNAGEQGEEEAPAGVLPWEN

SEQ ID NO: 72042 - protein, 56 aa, Zea mays
  Coding DNA Sequence Number=SeqID_30263
MNEVYDSLARSSIVKSAGSNPKDAILEIHLCVKRFKRFVDMLVDRLKLYFTVETTR

SEQ ID NO: 72043 - protein, 117 aa, Zea mays
  Coding DNA Sequence Number=SeqID_30264
MAPKKVTTKASSLDNATKVALVDNETGTVNSKHPRTKDPPTLEGSIHTCSSEDLPHDNAPPSFVPAAHLPAQGAEDILQEGEDLGILAEDQLKLRVVRIKTITFRSKGDTRSQEAAN

SEQ ID NO: 72044 - protein, 571 aa, Zea mays
  Coding DNA Sequence Number=SeqID_30265
  Gene Ontology: Mol. function=transferase activity; Cellular component= intracellular; Biological process=protein amino acid phosphorylation
  Homolog annotation: Hit_ID=Q94DI0; Match level="QueryCoverage=93%, HitCoverage=95%, E-value=0.0, Identity=47%"; Hit description =Pentatricopeptide (PPR) repeat-containing protein-like
  Pfam annotation: Domain name=PPR; Domain location=200-234; Score =15.0; E_value=0.13; Accession=PF01535.11; Description=PPR repeat
  Pfam annotation: Domain name=PPR; Domain location=235-269; Score=3.9; E_value=2.6; Accession=PF01535.11; Description=PPR repeat
  Pfam annotation: Domain name=PPR; Domain location=307-341; Score =10.4; E_value=0.43; Accession=PF01535.11; Description=PPR repeat
  Pfam annotation: Domain name=PPR; Domain location=342-376; Score =45.4; E_value=1.9e-10; Accession=PF01535.11; Description=PPR repeat
  Pfam annotation: Domain name=PPR; Domain location=377-411; Score =38.6; E_value=2.1e-08; Accession=PF01535.11; Description=PPR repeat
  Pfam annotation: Domain name=PPR; Domain location=412-446; Score=9.1; E_value=0.63; Accession=PF01535.11; Description=PPR repeat
  Pfam annotation: Domain name=PPR; Domain location=448-482; Score =13.9; E_value=0.17; Accession=PF01535.11; Description=PPR repeat
  Pfam module annotation: Pfam domain module=PPR::PPR::PPR::PPR::PPR::PP R::PPR; Domain location=200-234::235-269::307-341::342-376::377 -411::412-446::448-482
MRVVWSLIIDQRLIHLTPHMFPCHGQWSHNPEAVLYNIHSLSKDPSQALAVFRRSVAAGQPVGSAAYNLMLRTLASHPSAQRHFWPFLREMQEAGHSVDQGTYLAALASFKKASLTADYASLTAHYDKFRKGAKSATAAAEAVRDHDAAGLDSRLSAIGLLPLTETSVTTVLRELREHPIKALAFFRWAGRQQGYTHSSVAYNAMARVLGREESVPEFWDLIRETKAAGMHVDIDTYLKLSRNFQRRHMVREAVELYELMMDGPFKPAQQDGPIIIRRISMGPSPDLELVNRVVNKFEAVWGVKTKELLDGVHRALTRNGMFDEAAEIVQTMKAQGHQPDNVTYSQLVYGLCKADKLEDARKVLDEMEAEGCVPDLKTWTLLIHGCCLAGDVDRAVQYLTEMIEKGLDADANLLDVILKGLCSHEKVEEAYSFFIEMVDKTELRPWQGTCQHLINDLLRVNKLEEALSLLKTMKTCKFPPFADPFPPYIAKYGTVEDARNFFKAMTVNTSPEPVAYLHVLKLFFAEGRYSEAQDLLYGCPNHIRKHPDVIKLFGSIKVESASASRLGSSKQ

SEQ ID NO: 72045 - protein, 469 aa, Zea mays
  Coding DNA Sequence Number=SeqID_30266
  Gene Ontology: Mol. function=RNA-directed DNA polymerase activity; Cellular component=nucleus; Biological process=RNA-dependent DNA replication
  Homolog annotation: Hit_ID=Q8S472; Match level="QueryCoverage=95%, HitCoverage=41%, E-value=0.0, Identity=78%"; Hit description =Putative gypsy-type retrotransposon RIRE2
MAPPKLYDGGGSQLSYGSSCRQQPGESLRNYIRRFSKQRTELPNVTDSDVIDAFLAGTTCRDLVSKLGRKTPTRASELMDIGTKFASGQEAVEAIFRKDKQPQGRPPKDVPEASTQRGTKKKGKKKSQAKRDAADADLVAAAEYKNPRKPPGGSNLFDKMLKESCPYHQGPIKHTLEECAMLRRHFHKVGPPAEGGRARDDDKKEDHKAGEFPEVHDCFMIYGGQVANALARHRKQERREVWSVKVAAPVYLDWSDKPITFDQGDHPDRVPSPGKYPLVVDPVIGNVRLTKVLMDGGSSLNIIYAETLGILRIDLSSVWAGAAPFHGIIPGKRIQPLGQLDLPVCFGTPSNFRRETLMFEVVGFRGTYHAVLGRPCYAKFMDVPNYTYLKLKMSGPNGVITVGPTYRHAYECDVECVEYAEALAESEALIADLESLSKEAPDMKRHADNFEPAETVKSVPLNPSNDASK

SEQ ID NO: 72046 - protein, 176 aa, Zea mays
  Coding DNA Sequence Number=SeqID_30267
  Homolog annotation: Hit_ID=Q9H1E3; Match level="QueryCoverage=85%, HitCoverage=61%, E-value=6e-07, Identity=27%"; Hit description =Nuclear ubiquitous casein and cyclin-dependent kinases substrate
MNKDEEEKNEILVSTQDSGIMFGSQEEVDQKEEAEKDMRNPKNKKQVEEKMCAKKEDRRVSERLKKDAGIRIEKKNRRIAAKRNLEELEKDKGKEAAPYMQDDHGSNSDFLYNEEGSESDGFIIVQSRKKKREKRLGIKISPIGKGQENPDPNRKKTKGAGKIPATNEKQTSKGVK

SEQ ID NO: 72047 - protein, 39 aa, Zea mays
  Coding DNA Sequence Number=SeqID_30268
METCLTTCCAGSGELLAALGTRESRPASNGRMGEPASGE

SEQ ID NO: 72048 - protein, 142 aa, Zea mays
  Coding DNA Sequence Number=SeqID_30269
MVLCICSYMLLVDSGLAITCLKLSLITLMEFVPPMSLYRIIYEFSPPSSSGLFSNFSGVHLGDLSDPETFDYLQHAQARQGGQQAATSRSTTSSHPMGMDKCNANSVDNDNVHKAGMVMNGLPISVYASETLGCAAAMSTDG

SEQ ID NO: 72049 - protein, 85 aa, Zea mays
  Coding DNA Sequence Number=SeqID_30270
MASLCGLHTRRGQDVHGGLPKLHDHVGAASNVRMQMLRSDNIKLWPCTESKYNKDTVLIIKPIKLALRQLQVSGYVQTRYYVAIL

SEQ ID NO: 72050 - protein, 441 aa, Zea mays
  Coding DNA Sequence Number=SeqID_30271
  Gene Ontology: Mol. function=pepsin A activity; Cellular component =cellulose and pectin-containing cell wall; Biological process =proteolysis
  Homolog annotation: Hit_ID=Q8RYK3; Match level="QueryCoverage=80%, HitCoverage=79%, E-value=1e-142, Identity=73%"; Hit description =Nucleoid DNA-binding-like protein
  Pfam annotation: Domain name=Asp; Domain location=104-437; Score= -145.3; E_value=5e-05; Accession=PF00026.14; Description=Eukaryotic aspartyl protease
  Subcellular localization annotation: CTP_CleavageSite=64; ConfidenceScore=5.64e-01
MSPLRLSVLLVLLSSLLAPSTALRSSTLLLARSPQSVSLSAVPGTPVTAWAATLAAQTASDAARAATLATGPRDPPPASAVDAAKKGPRRFSASPATWPARASGTPAQALLVAIDPSNDAAWVPCAACAGCARAPSFDPTRSSTYRPVRCGAPQCSQAPAPSCPGGLGSSCAFNLSYAASTFQALLGQDALALHDDVDAVAAYTFGCLHVVTGGSVPPQGLVGFGRGPLSFPSQTKDVYGSVFSYCLPSYKSSNFSGTLRLGPAGQPKRIKTTPLLSNPHRPSLYYVNMVGIRVGGRPVPVPASALAFDPTSGRGTIVDAGTMFTRLSAPVYAAVRDVFRSRVRAPVAGPLGGFDTCYNVTISVPTVTFSFDGRVSVTLPEENVVIRSSSGGIACLAMAAGPPDGVDAALNVLASMQQQNHRVLFDVANGRVGFSRELCTA

SEQ ID NO: 72051 - protein, 138 aa, Zea mays
  Coding DNA Sequence Number=SeqID_30272
MARKRLPLDGRTQSQLARGHPRAGDTVTTRLRPALGRDPVTARPRVVSGGRHGHASPEANIGRETQSRLEQETQSCLARAILGRETQSRLARVILGQETQSWLAQGHLGRETHVLMTDIYKGHFFAILTTYILQVLIP

SEQ ID NO: 72052 - protein, 125 aa, Zea mays
  Coding DNA Sequence Number=SeqID_30273
MDHAFLGVGTDGNPSLRHKSRCNATMRSSELLTSDEGIDEGRGGQDEEEQQKPEGRWRQSPTRWRSEHKSLRVLVGQGAAGISGARRRWQPEPERESERRGEDELVAGACGGSGSEQHKVGEDAQ

SEQ ID NO: 72053 - protein, 164 aa, Zea mays
  Coding DNA Sequence Number=SeqID_30274
  Homolog annotation: Hit_ID=Q2QQ06; Match level="QueryCoverage=43%, HitCoverage=30%, E-value=2e-09, Identity=34%"; Hit description =Expressed protein
MGTGNRVLYKLALVPLREYPFFLAQFATFRTYLVWQLLLSAIFLKRRYRINEIAGCFLVTVGVIITVARQEIIFLDASKKLKCGSVDLFVVNSYGSAYQSFKNLCLCKFRCPSTLSPYHCRISVWHHLCHLALLRVQQYSPLAYYCTAYHRHDILEILFHNKND

SEQ ID NO: 72054 - protein, 134 aa, Zea mays
  Coding DNA Sequence Number=SeqID_30275
  Gene Ontology: Mol. function=DNA binding
MTLGTADQGCPDGWLRCRRLGRQKEEEEPRPREAAGYCSGRRNRDWDRNKRNKRPRPQGGNSGSCPVHPNSRHSAVECHEIIKLVKRVSERRKQTSKDGFPHLIVGPARRGPTTVMWLRETETSGISHSRETGT

SEQ ID NO: 72055 - protein, 529 aa, Zea mays
  Coding DNA Sequence Number=SeqID_30276
  Gene Ontology: Mol. function=transferase activity
  Homolog annotation: Hit_ID=Q8RYJ1; Match level="QueryCoverage=86%, HitCoverage=88%, E-value=1e-152, Identity=63%"; Hit description =Putative glycosyltransferase
  Pfam annotation: Domain name=DUF563; Domain location=116-385; Score =287.8; E_value=2e-83; Accession=PF04577.5; Description=Protein of unknown function (DUF563)
MEASAKLPVVVPKGVGGMDNDDVAPAGGKKQAAAGRWGFVQFFFVLAVVFCVLLYAPRVLVLSPYGYSIDVGLFAPTPTTATASSVPQRVAGGNAVALDLDNQVRSPCSSMRDHTICCDRSSVHTDVCFMAGDVRTDAASLSLLLFPPHQQAQNGTSSEEDKEERVRPYPRKWERFIMDKVPEVRLRVAAPRRPDGEREEEEHRCDVRHDAPLLVMSAGGYTGNLFHAFNDGFLPSWLTVQHLRRRVVLGVVSYNPWWAGMFGEVISGLSDHPVVDLLHGTRTHCFPGAIVGTRYHGILIVDPARLRDNKTIVDFHQMLADAYEKPPRETARPAQQQDLRDAEQRRRRRPRLGIVSRKGTRVIENQAAVARLASSVGFDVDILETANGLPLSAWYASLRACDALVGVHGADLTKFLFLRPGRASLTQIAPLGVSPIAREDFGEPAARMGLAYEQYEVRAGESSLARRYAPGDVVLTDPEAAKRDKGGWNLVARVYLGGQNVTLDLARFRQTLARMHAHAMRQRRRQERL

SEQ ID NO: 72056 - protein, 91 aa, Zea mays
  Coding DNA Sequence Number=SeqID_30277
MTLTKRKDKQQASCQVERCFSHMFGEHGHLPYLRYSYGSGALIGILIVNSESTDQAKDGGKKSFEVPSAREKVKETRNPKARGEEDLQSQG

SEQ ID NO: 72057 - protein, 95 aa, Zea mays
  Coding DNA Sequence Number=SeqID_30278
  Subcellular localization annotation: CTP_CleavageSite=75; ConfidenceScore=5.50e-01
ISVARLGASVAREDFAKSPATTSKRPRAHAGSTAKAHHHRRVRFLASSSHSRISRKPEPPLRRLLAGASLSYPPRSSSSSFLPSQPGHEPPLGEA

SEQ ID NO: 72058 - protein, 143 aa, Zea mays
  Coding DNA Sequence Number=SeqID_30279
MGQEEPTSSKPYAFTCDEHKKMKGKKKVEYLLFIIDKKKQRKRRCFTCGEKATFEIIAQIWTKPRRGGAKARRSQVSKLGMILQVKMNLQGDTTITLHHALYTHHTNALWQEVILWLCGVSHKAQDEAQELNKGAGAQICQSR

SEQ ID NO: 72059 - protein, 287 aa, Zea mays
  Coding DNA Sequence Number=SeqID_30280
  Homolog annotation: Hit_ID=Q94JG1; Match level="QueryCoverage=41%, HitCoverage=22%, E-value=1e-35, Identity=65%"; Hit description =Membrane transporter-like
  Subcellular localization annotation: CTP_CleavageSite=72; ConfidenceScore=5.25e-01
MDAAVWGGANVGPANRIPKIRRSGAAVVPQAKELASKVRGQNLSSSQPGPLVRPRQRHQPARKHKSRDARARAAPVKSAPLPCAPPRRPPTGSLHLMLQIFIGFHVAPSPSPTIDRAAPAAASQLALYKHHASGDMAEGEFKPAAMQVEAPAEAAAAPSKPRFRMPVDSDNKATEFWLFSFARPHMSAFHMSWFSFFCCFLSTFAAPPLLPLIRDTLGLTATDIGNAGIASGSGAVFARVAIGHGVQPGGPALGSPRPFLLLTTPPANNSAVFNSASPNLARGAFFR

SEQ ID NO: 72060 - protein, 43 aa, Zea mays
  Coding DNA Sequence Number=SeqID_30281
MEMCLNTITMYLELPLLQMTGYGVVWYTIGPVRRPPRESNIGN

SEQ ID NO: 72061 - protein, 141 aa, Zea mays
  Coding DNA Sequence Number=SeqID_30282
MAEGKGGKGKCHSSEGKHKLLPSPPSEDFGDSEFSEEEFSSGDYGSPTPTYPATSSDDSDDSKGLSMAERAYIWSVERVGLGGSDDLGEDSLENSSKQEEDSEEGGDSGSEGDDDGEGEGDNDGGDGDDGEGDNTDVCAFA

SEQ ID NO: 72062 - protein, 163 aa, Zea mays
  Coding DNA Sequence Number=SeqID_30283
MAPRKRKQGAAMPDIPPIDPNRQLPFYVGESSRSARVESADAVIGRVCDGQKRICSPGSARRKRTRWVGSLAMSTETKRRKGKLWRSSGLELEADSTSPDLGNDVANVDLEDDVESCGGTRVSRYVLEEEEDEEDVPSLVHRNRRSKASNDVPDQAVLGLVSF

SEQ ID NO: 72063 - protein, 137 aa, Zea mays
  Coding DNA Sequence Number=SeqID_30284
MVGPKDHTNASPDNFLRLTMECLSVDEQQWFEDLMKQLDDDVLRQCAWVHEEAKFWSHLTLDRHQRIIKKGEIKLDFLVPSLQNSNHYVDQQRDQLEQFLGGVEHLLKKLTGALEKSTIPSFPSHEVASATNGPPQS

SEQ ID NO: 72064 - protein, 37 aa, Zea mays
  Coding DNA Sequence Number=SeqID_30285
MKKEIGKYDGSDSIAVQLANETHWNDLVIIMYSSYSG

SEQ ID NO: 72065 - protein, 944 aa, Zea mays
  Coding DNA Sequence Number=SeqID_30286
  Gene Ontology: Mol. function=transferase activity, transferring phosphorus-containing groups; Cellular component=membrane; Biological process=two-component signal transduction system (phosphorelay)
  Homolog annotation: Hit_ID=Q76H00; Match level="QueryCoverage=99%, HitCoverage=89%, E-value=0.0, Identity=89%"; Hit description =Histidine kinase 2
  Pfam annotation: Domain name=CHASE; Domain location=35-259; Score =242.7; E_value=7.8e-70; Accession=PF03924.4; Description=CHASE domain
  Pfam annotation: Domain name=HATPase_c; Domain location=471-635; Score=117.0; E_value=5.2e-32; Accession=PF02518.16; Description =Histidine kinase-, DNA gyrase B-, and HSP90-like ATPase
  Pfam annotation: Domain name=HisKA; Domain location=320-387; Score =24.2; E_value=0.0004; Accession=PF00512.15; Description=His Kinase A (phosphoacceptor) domain
  Pfam annotation: Domain name=Response_reg; Domain location=800-934; Score=92.9; E_value=9.5e-25; Accession=PF00072.14; Description =Response regulator receiver domain
  Pfam module annotation: Pfam domain module=CHASE::HATPase _c::HisKA::Response_reg; Domain location=35-259::471-635::320 -387::800-934
MCDERARMLQDQFNVSVNHLQALAILVSTFHHSKTPSAIDQTTFARYAERTAFERPLTSGVAYGVRVTHAEREQFERQQGWSIKKMYSSKTKKQSQGPGNAEDAEVREPAEEYAPVIFAQDAYKHVISFDLLSGADDRDNVLRARESGKGVLTAPFKLLNNRLGVISTYAVYKYELPPNARPQERIQAAIGYLGGIFDIEALVDKLLHQLAGKQSIMVNVYDTTNDRRISMYGSNDTGSGMCQVSTLNFGDPSRKHEMHCRFIQSPPWPWMAITTSIGTLVIALLIGYIIYATAKRIARVEDDFQEMSVLKKRAEDADIAKSQFLATVSHEIRTPMNGVLGEGCSKCSWILIWTQHNKTMLEPHKPVAKLLVSLINEVLDQAKIESGKLELEAVPFDLRTVCDDILSLFCGKAQEKGLEVIKDYNHAVTHCTFTVFYYKCTDFILVIPYYDTQREQLAVFVSDQVPQALIGDPGRIRQIITNLVGNSIKFTEKGHIYLTVHVVEEIMNCLEVETGTQSANTLSGYPVANRKRSWENFRVFSRELNSSEMPFAPIASDSISLIISVEDTGVGIPFDAQSRVFTPFMQVGPSIARIHGGTGIGLSISKCLVGLMRGEIGFASKPQVGSTFTFTAVLTRAHSSRNENKSSEFKGINALVVDHRPVRAKVTRYHLQRLGVQTELTTDLDQYISKINCGSQIAKLVLIDKETWLKESHSMPLLVTKLRNKDQPDSTKLFLLENPKSTAKSNSHIFREFNLNVIMKPLRASMLQVSLHRALGGIDKLHCRNGVLGNSTLGSLLHKKRILVVDDNIVNLKVAAGALKKYGAEVTCADSGKKAITQLKPPHSFDACFMDIQMPEMDGFEATKRIRVMERDLNEQIERGEAPPECAGLRQWRTPILAMTADVIQATHEQCLKSEMDGYVSKPFEGEQLYREVARFFQNQDQVQ

SEQ ID NO: 72066 - protein, 145 aa, Zea mays
  Coding DNA Sequence Number=SeqID_30287
SRDSSPELDAANLLEGPRRRARGQEPGPSEPQDGNNRRKTSKKKGKAHGGLPVMLVDLNAGAKELRLSRWDSSQGTIVKGEGYLQFMRQCTFKEGDDVAIWAFVQRRFRLFGVDMCHDSLLHLLVVKKQDEARCRVCRAPAQPES

SEQ ID NO: 72067 - protein, 480 aa, Zea mays
  Coding DNA Sequence Number=SeqID_30288
  Gene Ontology: Mol. function=transcription regulator activity; Cellular component=intracellular; Biological process=regulation of transcription
  Homolog annotation: Hit_ID=Q943I6; Match level="QueryCoverage=98%, HitCoverage=98%, E-value=0.0, Identity=70%"; Hit description =Putative transparent testa 1
  Pfam annotation: Domain name=zf-C2H2; Domain location=239-261; Score =28.7; E_value=2.1e-05; Accession=PF00096.16; Description=Zinc finger, C2H2 type
  Pfam annotation: Domain name=zf-C2H2; Domain location=326-349; Score =12.9; E_value=0.42; Accession=PF00096.16; Description=Zinc finger, C2H2 type
  Pfam annotation: Domain name=zf-C2H2; Domain location=354-378; Score =7.5; E_value=1.6; Accession=PF00096.16; Description=Zinc finger, C2H2 type
  Pfam module annotation: Pfam domain module=zf-C2H2::zf-C2H2::zf-C2H2; Domain location=239-261::326-349::354-378
MEGRMTSLEATMKVSSSMASSISRNADPDQQTLRPNSVEQFYFPRPGQSLPGIPPFFGPPSSSLYLPNDNEAKFGNQFESNPSQNTDWDPQAIVSNLTFLEQKIKQLISTAGSLLPSMKNPLLSSNPAVRQLGNTLGSPMGLGMNANQRPSVDSKTDIPDTGKTSDYDELMNSLNPAQDERDEMIKCPNPCGGEGSEPTPMEDHDVKESDDGGEGENLPPGSYVVLQLEKEEILAPHTHFCLICGKGFKRDANLRMHMRGHGDEYKTPAALAKPTKDSGADHAPVTRYSCPFVGCKRNKEHKKFQPLKTILCVKNHYKRSHCDKSYTCSRCNTKKFSVIADLKTHEKHCGRDKWLCSCGTTFSRKDKLFGHVALFQGHTPALPMEDVKVSEASEQPQDSEPMNEMARSNMYSFPCSSSDGISNLDMKMADDVRGYFSPLNFDPCFGALDDFTRPGFDISENPFSFLPSGSCSYGQQNGDS

SEQ ID NO: 72068 - protein, 488 aa, Zea mays
  Coding DNA Sequence Number=SeqID_30289
  Gene Ontology: Mol. function=ammonium transporter activity; Cellular component=membrane; Biological process=transport
  Homolog annotation: Hit_ID=Q84KJ6; Match level="QueryCoverage=99%, HitCoverage=100%, E-value=0.0, Identity=83%"; Hit description =Ammonium transporter
  Pfam annotation: Domain name=Ammonium_transp; Domain location=30-453; Score=250.4; E_value=3.7e-72; Accession=PF00909.11; Description =Ammonium Transporter Family
MSTTAYNMSSAYMPNPSIGIPDWLNKGDNAWQMVAATLVGLQSVPGLVILYGSIVKKKWAVNSAFMALYAFAAVWLCWVMWGYQMSFGQKLLPFWGKAGHTLGQGFLLSQAGLPATTHFFHGSGVVETGEITPLYPMASMVYFQCVFAAITLILLAGSLLGRMNFKAWMLFVPLWLTFSYTIGAFSIWGGGFLFHWGVIDYSGGYVIHLSSGVAGFTAAYWVGPRLTKDRERFPPNNVLLMLTGAGILWMGWAGFNGGDPYAANIDSSIAVVNTNICAATSLLVWTCLDVIFFKKPSVIGAVQGMITGLVCITPGAGLVQGWAAIVMGMLSGSIPWCTMMVVHKRSRLLQQVDDTLGVFHTHAVAGFLGGATTGLFAHPDLCPLFLPVTNSRGAFYGDGMQFLRQVVGALFIISWNVVVTSLVCLVVRLVVPLRMPDDELAIGDDAVHGEEAYALWGDGEKYDSTKHGWYSDNDTQHNKAPSGVTQNV

SEQ ID NO: 72069 - protein, 134 aa, Zea mays
  Coding DNA Sequence Number=SeqID_30290
  Homolog annotation: Hit_ID=Q6QP51; Match level="QueryCoverage=47%, HitCoverage=29%, E-value=8e-16, Identity=66%"; Hit description =Putative growth-regulating factor 1
MDGGDHPRGGEPSLSQLLQGLQKGLEILLPLARGPIAPMASSSGHHSLRKQREPPVIIPEGPGKGILRKGSFSAKEAGPEPPTDQRFEGWPLGRVRQPPRSTRAPRPLLVRGSKAGPSVGFDSRLRPLGLRAHY

SEQ ID NO: 72070 - protein, 78 aa, Zea mays
  Coding DNA Sequence Number=SeqID_30291
MDVKKKQLKTGFLDPLMISQARYKEVAQRHGEEYKDLDGAEFEKAVKQNQRKKMKVPKSKINVESLERDMVFVLFIKV

SEQ ID NO: 72071 - protein, 59 aa, Zea mays
  Coding DNA Sequence Number=SeqID_30292
MGTNLELKLGGCLYSVHIKLSLPDIISQFFAFANKFCYEGLKPTYDNRVTTMVLALDDA

SEQ ID NO: 72072 - protein, 153 aa, Zea mays
  Coding DNA Sequence Number=SeqID_30293
  Homolog annotation: Hit_ID=Q5GAV3; Match level="QueryCoverage=53%, HitCoverage=6%, E-value=3e-15, Identity=51%"; Hit description =Putative integral membrane protein
MHVFELWRPRVEASVESLHSSVDSIRAEVSKMGIRWSTDARVDGSGQPGLLGAHGSGSGRVPAPEEPPDRPRFGSCFENYYRDSGHVHPGADAHYPVTGSWGLVSASGSCSWRFILCWPFVVEVGCSTVCSLGSIARFGSRILQNSNSASANN

SEQ ID NO: 72073 - protein, 228 aa, Zea mays
  Coding DNA Sequence Number=SeqID_30294
PTLDESGVAVRQTGGRDRHRGIRISDAPAGGPQSAGVAPSAPVVAPNASAAASHPLDKGKRAAGSSSAPGGTGGSEEERRRRLRRADGSFVADPPGFLSLCSQGRASPAPGYCRRDSATWPPGSSWGSDSSGANVKRRRNGEGGPHCSEGCGSLNDGDTVEYTIGSGRGGPNCARPRHRGRRGGALHETKAAILREWEALEAEHQRLSDWRTQLEERTKAASCQFAFE

SEQ ID NO: 72074 - protein, 131 aa, Zea mays
  Coding DNA Sequence Number=SeqID_30295
  Gene Ontology: Mol. function=DNA binding
MEIDVIKKYKFSLSIRARVSLERAHERRLNVKGRNLDYDFAAVAPQTPTDARIHAGVPMAGVGCAALVDHLRAAAWPSKFRPHLLEKYDRVRDEKMLEKLATHDVETVTTLFALADKCARAAEGRAWHSTP

SEQ ID NO: 72075 - protein, 87 aa, Zea mays
  Coding DNA Sequence Number=SeqID_30296
MKAETQKGTIFASVNFDDDDNVFDEEAEKARVAHLNESTINAIIGGRVSKHLEDSVTIGDIFVESCAQKEGTINVDKIEEVIDEPYT

SEQ ID NO: 72076 - protein, 32 aa, Zea mays
  Coding DNA Sequence Number=SeqID_30297
MGNNARLPVPNVSLGFDGLVPAPNYGYATGRP

SEQ ID NO: 72077 - protein, 301 aa, Zea mays
  Coding DNA Sequence Number=SeqID_30298
  Homolog annotation: Hit_ID=Q9FKB4; Match level="QueryCoverage=51%, HitCoverage=26%, E-value=2e-17, Identity=34%"; Hit description =Genomic DNA, chromosome 5, TAC clone:K24G6
MTGNYALKIHLPCQSKAAREWTSVAFTPFGFHGRDHRVETSVKCYCLQPLMDSESMVSPNLILISDEALLTISMVFAYLAGVVPSGQTSPRVRNQNVSQHIPEPSSSHSGRDLKFLPERNAAFDPNDMWSEVRNISGSSELDGIRWLQVSTTLIDSLIQPVFMKWIEEEQALENGQINEKLMKTISSKLKEGNKILRRFNRFGKSELYLDMLFFLRFGSARCDSYFNVKFLAEHGERILEDLVISLADVIASIYLELMSVDGDMSAEVVGSSLVLCSLSTRELQKLRNEGSNPLRSMRKSS

SEQ ID NO: 72078 - protein, 70 aa, Zea mays
  Coding DNA Sequence Number=SeqID_30299
MASTVGQARRGSAGMRRGGTGRGASKVEESYTEQQRKREGATRWPMGLGRGAVGQARVERGARDQAATSP

SEQ ID NO: 72079 - protein, 127 aa, Zea mays
  Coding DNA Sequence Number=SeqID_30300
MVMAWDSMRSCPQRMCCPNTSMAAVNNFGERKMEMCGAQGQWSMAEVKVMRACADGPGAVKDECWVLADEPEQPGDQPWWLTPRTHTRVIHNDFVNRCAFVSFEEGSLDRPTTFSWLQLQFCALAEC

SEQ ID NO: 72080 - protein, 169 aa, Zea mays
  Coding DNA Sequence Number=SeqID_30301
  Gene Ontology: Mol. function=DNA topoisomerase (ATP-hydrolyzing) activity; Cellular component=mitochondrion; Biological process=DNA topological change
  Homolog annotation: Hit_ID=Q5NBJ3; Match level="QueryCoverage=53%, HitCoverage=12%, E-value=4e-40, Identity=89%"; Hit description=DNA gyrase subunit B, chloroplast/mitochondrial precursor
  Pfam annotation: Domain name=HATPase_c; Domain location=59-168; Score= 59.0; E_value=1.6e-14; Accession=PF02518.16; Description=Histidine kinase-, DNA gyrase B-, and HSP90-like ATPase
MSTRSLLGRCGVLLCGLFALLIWHLGVGSCWTIKLKGGKEVLEALDGVRTRPGMYIGSTGPRGLHHLVYEILDNAVDEAQAGHASKIDVVLHDDNSVSVTDNGRGVEIPTDMHPQTKKSCVETVLTLMHAGGKFGGSKSGYSVSGGLHGVGLSVVNALSEVYILISYWL

SEQ ID NO: 72081 - protein, 300 aa, Zea mays
  Coding DNA Sequence Number=SeqID_30302
  Gene Ontology: Mol. function=DNA topoisomerase (ATP-hydrolyzing) activity; Cellular component=mitochondrion; Biological process=DNA topological change
  Homolog annotation: Hit_ID=Q5NBJ3; Match level="QueryCoverage=86%, HitCoverage=35%, E-value=1e-121, Identity=86%"; Hit description=DNA gyrase subunit B, chloroplast/mitochondrial precursor
  Pfam annotation: Domain name=DNA_gyraseB; Domain location=1-134; Score=158.5; E_value=1.8e-44; Accession=PF00204.15; Description=DNA gyrase B
  Pfam annotation: Domain name=Toprim; Domain location=161-267; Score =28.8; E_value=1.9e-05; Accession=PF01751.12; Description=Toprim domain
  Pfam module annotation: Pfam domain module=DNA_gyraseB::Toprim; Domain location=1-134::161-267
SSDSYSDTVLGYANSIRTIDGGTHIDGLKASLTRTINNLAKKSKTIKDKDITLSGEHVREGMTCIISVKVPSPEFEGQTKTRLGNPEVRRIVEQSVQENLTEYLELHPDVLDSILSKSLNALKAALAAKRARELVRTKSVLKSSSLPGKLADCASANPEESEIFIVEGDSAGGSAKQGRDRRFQAILPLRGKILNIERRDEAAMYKNEEIQNLILALGLGVKGEDFKKEALRYHKIVILTDADVDGAHIRTLLLTFFFRYQLRIGAENRSNMKESLWRFFMGKSFQYSIGNVEKSTNKTG

SEQ ID NO: 72082 - protein, 134 aa, Zea mays
  Coding DNA Sequence Number=SeqID_30303
  Gene Ontology: Mol. function=DNA topoisomerase (ATP-hydrolyzing) activity; Cellular component=mitochondrion; Biological process=DNA topological change
  Homolog annotation: Hit_ID=Q5NBJ3; Match level="QueryCoverage=88%, HitCoverage=16%, E-value=2e-57, Identity=87%"; Hit description=DNA gyrase subunit B, chloroplast/mitochondrial precursor
  Pfam annotation: Domain name=DNA_gyraseB_C; Domain location=55-121; Score=131.4; E_value=2.6e-36; Accession=PF00986.11; Description=DNA gyrase B subunit, carboxyl terminus
MGGEQLISIPNCSNKRALFDEGCIYVGVPPLYKVERGKLAHYCYDDADLKEIVNTFPANASYHIQRFKGLGEMMPAQLWETTMDPERRLLKQLRVEDAAEANVVFSSLMGTRVEYRKELIQKAASMINIDQLDI

SEQ ID NO: 72083 - protein, 288 aa, Zea mays
  Coding DNA Sequence Number=SeqID_30304
  Homolog annotation: Hit_ID=Q9FN45; Match level="QueryCoverage=68%, HitCoverage=78%, E-value=1e-27, Identity=33%"; Hit description =Genomic DNA, chromosome 5, P1 clone:MYJ24
  Pfam annotation: Domain name=DUF617; Domain location=124-288; Score =200.8; E_value=3.3e-57; Accession=PF04759.4; Description=Protein of unknown function, DUF617
ARRLMTHPARRPTTSTDTAEIAFLGATAIPDPQSTLATPMPLPEIPFLHTSTPPPPPPPAPVTQKQKHGSGKQRSRPGRLMRSVRAAFRSFPVIQAPSCRGMPSLHLSGLQGAGVRSHFHGATHATGTLYGHRRARITIALHESPGMPPCVLLDIGVPTAKFIQDVSAAGMVRVTLECEKQHHAVDAGMRRLLDEPVWTTEVNGESVGYASRREATERDECVMRMLHSTSMGVGVLPADMTHPSDGELTYMRVHFDRLVGSKDSETYYMHNPEGSATGPELTIFFIRT

SEQ ID NO: 72084 - protein, 152 aa, Zea mays
  Coding DNA Sequence Number=SeqID_30305
TNRIMEACELTFDETSPCPSLVFEPAGPDQMVQAMFVEEDHDNADWGDPEPTPLATLVEPASTTLADRPDPTSSTTWGPLEPVLAKTGGVEAAVDGEATEAGDDPAPELVKNESVRRAMTQPRVARRQGGDDPALELVKQRVGEAGDDPPPS

SEQ ID NO: 72085 - protein, 419 aa, Zea mays
  Coding DNA Sequence Number=SeqID_30306
  Gene Ontology: Mol. function=dolichyl-diphosphooligosaccharide -protein glycotransferase activity; Cellular component=cellulose and pectin-containing cell wall; Biological process=protein amino acid glycosylation
  Homolog annotation: Hit_ID=Q9ZUA0; Match level="QueryCoverage=90%, HitCoverage=86%, E-value=1e-127, Identity=56%"; Hit description =Putative ribophorin I
  Pfam annotation: Domain name=Ribophorin_I; Domain location=14-410; Score=469.9; E_value=3.1e-138; Accession=PF04597.5; Description =Ribophorin I
  Subcellular localization annotation: CTP_CleavageSite=32; ConfidenceScore=5.17e-01
MSCSDGHPVASSSIGISHNFSTPLCQVENAPTASEASRVLLAFTPTEFQHLSIVKATRAEGKRKKKAFVPLSVQASELATTAPDAPRLYSVLLSTPLKPGDATTLEVLYMLTHSLEPFPAEISQSESQLVYYRDSAVLLSPYHVLEQVTYIKMPSNRIESFTRVDPTTRAGSEVKYGTYSNQMPNSYLPVLVHYENNRPFAVVEELLLIEYFLARLEYQSRPSISGASSFKNLLARLPPRVHSVYYRDEIGNISSSHLRTDSHKSDLEIEPRYPLFGGWHCTFTIGYGLPLQDFVFESVDGRRYINLTFGCPLLDTVVDDLTVKVVLPEGSKNPEHVVPFVTEKHLETSYSYLDVVGRTTVVLKKKNVVGEHNVPFQVYYEFNPIFMLAEPLMLISAVLLFFVAFIAYLHMDLSIRKSS

SEQ ID NO: 72086 - protein, 96 aa, Zea mays
  Coding DNA Sequence Number=SeqID_30307
MKHTNVTRAYLCDEETVRINHICDAFHVVCIEGPDRVKELLPWVPHLTMVKTHPHVEKSVAKRFMCDISICGLMLARDAERCFCHGYAIWKLQLRC

SEQ ID NO: 72087 - protein, 91 aa, Zea mays
  Coding DNA Sequence Number=SeqID_30308
MGINERKKNNVNQGYPRTLVICPLKCIKAIPIHYVILKENLSIKDCNLADGEYILVPEQGAAQEVAPDPAPEPAPEDLPATALEGKPRFYA

SEQ ID NO: 72088 - protein, 883 aa, Zea mays
  Coding DNA Sequence Number=SeqID_30309
  Gene Ontology: Mol. function=RNA-directed DNA polymerase activity; Cellular component=intracellular; Biological process=RNA-dependent DNA replication
  Homolog annotation: Hit_ID=UPI00005A975E; Match level="QueryCoverage =99%, HitCoverage=50%, E-value=0.0, Identity=88%"; Hit description =PREDICTED: similar to Retrovirus-related Pol polyprotein from transposon 297
  Pfam annotation: Domain name=RVT_1; Domain location=56-225; Score =144.1; E_value=3.9e-40; Accession=PF00078.17; Description=Reverse transcriptase (RNA-dependent
  Pfam annotation: Domain name=RnaseH; Domain location=455-582; Score =8.0; E_value=1e-05; Accession=PF00075.14; Description=RNase H
  Pfam annotation: Domain name=rve; Domain location=780-883; Score =19.2; E_value=0.00015; Accession=PF00665.16; Description=Integrase core domain
  Pfam module annotation: Pfam domain module=RVT_1::RnaseH::rve; Domain location=56-225::455-582::780-883
MPGIPRDVAEHSLDIRAGARPVRQPLRRFDEEKRRVIGEEIHKLMAAGFIKEVFHPEWLANPVLVRKKGGKWRMCVNYTGLNKACPKVPYPLARIDQIVDSTAGCETLSFLDAYSGYHQIRMKESDQLATSFITPFGMYCYVTMPFGLRNAGTTYQRCMNHVFGEHIGRTVEAYVDDIVVKTRKASDLLSDLEVTFRCLKAKGVKLNPEKCVFGVPRGMLLGFIVSERGIEANSEKIAAITSMGPIKDLKGVQRVMGCLAALSRFISRLGERGLPLYRLLRKAECFAWTPEAEEALGNLKALLTKAPILVPPADGEALLVYVAATTQVVSAAIVVERQEEGHALPVQRPVYFVSEVLSETKIRYPQVQKLLYAVILTRQKLRHYFESHPVIVVSSFPLGEIIQCREASGRIAKWAVEIMGETISFAPRKAIKSQVLADFVAEWVDTQLPTAPIQPELWTMFFDGSLMKTGAGAGLLFISPLGKHLRYVLRLHFPASNNVAEYEALVNVLRIAIELRVRRLDARGDSQLVIDQVMKNSHCRDPKMEAYCDEVRRLEDKFYGLELNHIARRYNETADELAKIASGRTTVPPDVFSRDLHQPSVKINDTPEPEAPSVQPEVPSAQPEASSVQPEEPSAPEGEALHVEEEQSGATPDRNWQTPYLQYLRQGELPLDQAEAWRVARRAKSFVLLGDEEELYHRSPSGILQRCISIAEGQELLQEIHSGACGHHAAPRALVGNAFRQGFYWPTAVADATRIVRTCEGCQFYAKQTHLPAQALQTIPITWPFAVWGLDLVGPLQKAPGGYTHLLVAIDKFSKWIEVRPLNSIRSEQAVAFFTNIIHRFGVPNSIITDNCTQFTGRKFLDFCEDHHIRVDWAAVAHPMSNG

SEQ ID NO: 72089 - protein, 288 aa, Zea mays
  Coding DNA Sequence Number=SeqID_30310
  Gene Ontology: Mol. function=ribonuclease H activity; Cellular component=mitochondrion; Biological process=DNA integration
  Homolog annotation: Hit_ID=UPI00004C1731; Match level="QueryCoverage =99%, HitCoverage=23%, E-value=1e-114, Identity=65%"; Hit description= UPI00004C1731 related cluster
  Pfam annotation: Domain name=RnaseH; Domain location=1-123; Score= -13.3; E_value=0.001; Accession=PF00075.14; Description=RNase H
  Pfam annotation: Domain name=rve; Domain location=114-288; Score =55.2; E_value=2.1e-13; Accession=PF00665.16; Description=Integrase core domain
  Pfam module annotation: Pfam domain module=RnaseH::rve; Domain location=1-123::114-288
MYFDGSLMKTGAGVGLLFISPLGKHLRYVLRLHFPASNNVAEYEALVNGLRIAIELGVQRLDARGDSLLVIDQVMKNSHCRDRKMEAYYDEVWRLEDKFYSLELNHIARRYNKTADELAKIASGRTTVPPDVFSKDIHQPSIKIDDTPEPEEASAQPEKAPGGFSHLLIAIDKFSKWIEVRPLTSIRSEQAVAFFTNIIHRFGVPNSIITDNGTQFTRKKFLDFYEDHHICVDWAVVAHPMTNGQVERANGMILQGLKPRIYNDLNKFGKRWMKELPSVVWSLRTTPS

SEQ ID NO: 72090 - protein, 63 aa, Zea mays
  Coding DNA Sequence Number=SeqID_30311
MELSKPSDPTEPHRRPEIIFARLRSPAAARGPRNPDLPYILDHLTGAVSPLSLKLIKETDQTF

SEQ ID NO: 72091 - protein, 298 aa, Zea mays
  Coding DNA Sequence Number=SeqID_30312
  Gene Ontology: Mol. function=transporter activity; Cellular component= mitochondrial inner membrane; Biological process=transport
  Homolog annotation: Hit_ID=Q5JMQ9; Match level="QueryCoverage=98%, HitCoverage=96%, E-value=1e-136, Identity=62%"; Hit description =Putative mitochondrial deoxynucleotide carrier
  Pfam annotation: Domain name=Mito_carr; Domain location=12-142; Score= 94.8; E_value=2.6e-25; Accession=PF00153.17; Description =Mitochondrial carrier protein
  Pfam annotation: Domain name=Mito_carr; Domain location=151-241; Score=98.6; E_value=1.9e-26; Accession=PF00153.17; Description =Mitochondrial carrier protein
  Pfam module annotation: Pfam domain module=Mito_carr::Mito_carr; Domain location=12-142::151-241
MGSGEEPSQMRRALVDSLAGAISGGISRTVTSPLDVIKIRFQLVWAEMLMRVLLSLDGWKCCWFSETKVQLEPTTSWGILRRDVYGPSKYTGLLQATKDILREEGLPGFWRGNVPALFMYMPYTAIQFTVLHKLKTFASGSSRTEDHLDLSPYLSYVSGAIAGCTATIGSYPFDLLRTILASQGEPKVYPNMRSAFIDIIKTRGVQGLYSGLSPTLVEIIPYAGLQFGSYDTFKRSMMTWNRYKYSHLSFGSEDDSVSSFQLFLCGFAAGTFSKAACHPLDVVKKRFQNKNFFMHPLH

SEQ ID NO: 72092 - protein, 209 aa, Zea mays
  Coding DNA Sequence Number=SeqID_30313
  Gene Ontology: Mol. function=translation initiation factor activity; Biological process=cellular metabolic process
  Homolog annotation: Hit_ID=Q5JMI2; Match level="QueryCoverage=86%, HitCoverage=73%, E-value=5e-34, Identity=44%"; Hit description =Eukaryotic translation initiation factor 2B family protein-like
  Pfam annotation: Domain name=DUF567; Domain location=8-196; Score =90.4; E_value=5.4e-24; Accession=PF04525.3; Description=Protein of unknown function (DUF567)
MAKIQPLPAVSSPAPASNADEPSQVYTVWMKSLVFNGNGCTVYGADGGVAFRVDNYGCRGGREAFLMDRAGRTLVGIQRRSCFGMFRRWEAYRYSESESDGREETRTPWFAVRKARRGGRAAVTVHGSGGRSGAYAIVGGYSRKPDYRIIGSTDGAAVAAIARKQTPAGVVLGDDYLMLTVAPGTDRLLVLGLVVICGLMTRRCDGRWR

SEQ ID NO: 72093 - protein, 87 aa, Zea mays
  Coding DNA Sequence Number=SeqID_30314
  Gene Ontology: Mol. function=hydrolase activity; Biological process =aromatic compound metabolic process
  Homolog annotation: Hit_ID=Q2R416; Match level="QueryCoverage=71%, HitCoverage=33%, E-value=1e-19, Identity=66%"; Hit description =Esterase PIR7A, putative
MSSGTTTTEEESGKGPPPQHQHHFVLVHGACHGAWCWYKVATLLASAGHRVTALDMAGCGASPVRGEDVGCCYSRPLLDAVGANESS

SEQ ID NO: 72094 - protein, 190 aa, Zea mays
  Coding DNA Sequence Number=SeqID_30315
  Subcellular localization annotation: CTP_CleavageSite=45; ConfidenceScore=5.26e-01
MQPNSDSSPRLRLTSSPSSSTALAMQPRRCWSLGLHDYHTAPSKRASPPDAAWGMCGMEQESACNLGRRKMNSSERWIGLGSCKALEERAEIGAPSAFGVEIKGGGWGRRHDSERARDGEGQTGGRQRWQASGARSEENGDVRLCGWAWVRRLLAGAAAPETGCVGRGWRRVGGVEAGAYTGVDAHTAVL

SEQ ID NO: 72095 - protein, 67 aa, Zea mays
  Coding DNA Sequence Number=SeqID_30316
  Gene Ontology: Mol. function=protein binding
MGMVYLGLSVLTVEFDDVHRLADGHVKHSTEVFYAGSLWKAHLYVDPREKVTARYQFCSNSAECDRY

SEQ ID NO: 72096 - protein, 246 aa, Zea mays
  Coding DNA Sequence Number=SeqID_30317
  Gene Ontology: Mol. function=hydrolase activity, acting on glycosyl bonds; Cellular component=lysosome; Biological process=carbohydrate metabolic process
  Homolog annotation: Hit_ID=P94078; Match level="QueryCoverage=97%, HitCoverage=26%, E-value=1e-71, Identity=49%"; Hit description=Alpha- mannosidase
  Pfam annotation: Domain name=Glyco_hydro_38C; Domain location=9-246; Score=-75.6; E_value=0.00066; Accession=PF07748.3; Description =Glycosyl hydrolases family 38 C-termi
MDLTKGKSLVVLVYNSLGWKREDVIRIPVFSDSIVVHDSEGREIESQLLPIATASLNIREKHVKAYLGTTPAHISSKSTQYSPQGSESSNLQVGQGNLKLQYNEAGKYPCTPIVQANFEQKYKYYIGQDGNGSDPQASGAYIFRPNGTVPISTDGQVSLTVLRGPILDEVHQQINSWIFQITRLYKEKDFLETEFIVGPIPVDDGNGKEVATEIVTNMVTNKTFYTDSSGRDFIKRIRDYRSEWKD

SEQ ID NO: 72097 - protein, 669 aa, Zea mays
  Coding DNA Sequence Number=SeqID_30318
  Gene Ontology: Mol. function=transcription regulator activity; Cellular component=nucleus; Biological process=regulation of transcription
  Homolog annotation: Hit_ID=Q2R3F6; Match level="QueryCoverage=79%, HitCoverage=98%, E-value=1e-119, Identity=49%"; Hit description =Helix-loop-helix DNA-binding domain containing protein, expressed
  Pfam annotation: Domain name=HLH; Domain location=388-435; Score =36.8; E_value=7.6e-08; Accession=PF00010.16; Description=Helix-loop -helix DNA-binding domain
MEANASRSEGAKAQGGQERKHFASIQHLSTGILLCQRELRRARCPLQLCHPQESEDDGSPSRGAFIMLPPFGNPLWVPEDMDDQQQHAPPPTPMELLTVPAQGHEEQNLLALASAAAVAGAGCVFSSPAMLDDDWYFDPVAAAAATGAQGHLLLAPPGPVPGPGAGSQMFSLFNVGGAATFDVHGFDIGLGTLGGGSGGDLVPLAGAGNTSNSASFSMSLNAGLLASSFGGFGTAPAQMPDFGGLGGFDMFNNGAGSSSAAPPPASASLTVPFSGRGKPAVLRPLETFPPVGAQPTLFQKRALRRNGGGEDYDKKRKAEATAAAAGASSACGGDDAEDDDGGSIDASGLNYDSEDACRGVEDSGKKDGKGSNANSAGDGKGKRKRLPAKNLMAERRRRKKLNDRLYMLRSVVPKISKMDRASILGDAIEYLKELLRKIEELQNEVESSASPASTASLPPTPTSFRPLTPTLPALPSRVKEELCPSALPSPTSKQPRVSIYTYFSLKPRFIGSVLSDEMVEVRTTREGREVNIHMLCARRPGLLLATMRAIEGLGLDVQQAVASCFNGFSLDIFKAELCKDGPALLLLPEEEIKSVLLQPQPITAPVLKAVRAHVRLDLPPPPPPPGRARSLLLRKCRQRDSLCAGVLQVYRTRRPETGGGAPAPRRAGQ

SEQ ID NO: 72098 - protein, 142 aa, Zea mays
  Coding DNA Sequence Number=SeqID_30319
  Homolog annotation: Hit_ID=Q5I7K8; Match level="QueryCoverage=37%, HitCoverage=45%, E-value=1e-22, Identity=92%"; Hit description =Ribosomal protein l34
  Pfam annotation: Domain name=Ribosomal_L34e; Domain location=63-129; Score=65.5; E_value=1.7e-16; Accession=PF01199.8; Description =Ribosomal protein L34e
  Subcellular localization annotation: CTP_CleavageSite=44; ConfidenceScore=5.25e-01
MAAILPHEPPRWPRSSLSLPPRSAPPISTIPVPSPCVSAVIFPTGSSGWGQDGAAWGKMVRWLTYRKRHSYATKSNQTRVVKTPGGKLVFQYTKKRASGPKCPVTGKKIQGVCAAHLSILSSRYCVRSLHHAPCRDFNFNAA

SEQ ID NO: 72099 - protein, 101 aa, Zea mays
  Coding DNA Sequence Number=SeqID_30320
  Gene Ontology: Mol. function=N-acetyltransferase activity; Cellular component=cytosol; Biological process=metabolic process
  Homolog annotation: Hit_ID=Q2R3D8; Match level="QueryCoverage=87%, HitCoverage=45%, E-value=5e-41, Identity=93%"; Hit description =Acetyltransferase, GNAT family protein, expressed
MDLDDAESNSDEATELVTRSIRVMMESGCEEVTLEAEVTNKGALALYGRLGFIRAKRLYRYYLNGVDAFRLKLLFPRPDPGLPPMMVGNDRDDQKMDSPYL

SEQ ID NO: 72100 - protein, 180 aa, Zea mays
  Coding DNA Sequence Number=SeqID_30321
MARNSGWGYKYPQPPPFKISKPPPCGRREDKSKERVRAIEVVLVPPKYPGWCDGDCSPGYGTAAEPYPTMDRLYRDAAAGISPVASRGFVVGASSAPYRLAGPWTGAESEPWGRAKRSSSSSGAEPESEPWVGRSGVRRLPGLSPSSSPGSGGAEFAVFRDLARVRALGRAERSSSSSGT

SEQ ID NO: 72101 - protein, 293 aa, Zea mays
  Coding DNA Sequence Number=SeqID_30322
  Homolog annotation: Hit_ID=Q2R3B9; Match level="QueryCoverage=67%, HitCoverage=19%, E-value=9e-64, Identity=64%"; Hit description =Expressed protein
MRLANPFHLKHSTYFTFNPFHMKPLDLDWMLWPRSSYVGAGPRAATAAASASGPAFAHNARLAAALVPAAAFLLDLGGLPVFAVLAIGLAAAYLLDALQLRQGSFFTVWAALLAADVAFFFSASLSSAAAASLPLTVLALLLCAETSFLIGVWASLQFRWIQLENPTIVAALERLLFACVPIAAPALFTWALVSAVGMANASYYFATFCMVFYWLFSIPRRSSFNSRKQDAPMLDSDGILGPLESCVHSLYVLFVPVLFHAVSHRATLFTSLASVLIVAAVLHTVLSSCTTNL

SEQ ID NO: 72102 - protein, 52 aa, Zea mays
  Coding DNA Sequence Number=SeqID_30323
  Gene Ontology: Mol. function=ATP binding; Biological process=protein folding
  Homolog annotation: Hit_ID=O24186; Match level="QueryCoverage=66%, HitCoverage=35%, E-value=3e-10, Identity=91%"; Hit description=10 kDa chaperonin
MAKRLLPSLNRVLVEKLVQPKKTAGGILVPETSKQGLGGCRLGDLDRFAGCE

SEQ ID NO: 72103 - protein, 129 aa, Zea mays
  Coding DNA Sequence Number=SeqID_30324
  Gene Ontology: Mol. function=sequence-specific DNA binding; Cellular component=intracellular; Biological process=regulation of transcription, DNA-dependent
  Homolog annotation: Hit_ID=Q1STS2; Match level="QueryCoverage=80%, HitCoverage=79%, E-value=2e-26, Identity=61%"; Hit description =Transcription factor CBF/NF-Y/archaeal histone
  Pfam annotation: Domain name=CBFD_NFYB_HMF; Domain location=22-95; Score=63.6; E_value=6.5e-16; Accession=PF00808.13; Description =Histone-like transcription factor (CBFNF-Y) and archaeal histone
  Pfam annotation: Domain name=Histone; Domain location=16-98; Score =41.1; E_value=3.8e-09; Accession=PF00125.14; Description=Core histone H2AH2BH3H4
  Pfam module annotation: Pfam domain module=CBFD_NFYB_HMF::Histone; Domain location=22-95::16-98
MRQARPYSGIFCGGVSARTGPHALPLARIKKIMKRSAGEAAAAADGGARMISCEAPVVFSKACELFVAELTRRAWAATLDGKRRTVHREDVATAVHNTDLFDFLVDVVTADTAGGTGGGGHDGDGDGAL

SEQ ID NO: 72104 - protein, 129 aa, Zea mays
  Coding DNA Sequence Number=SeqID_30325
  Gene Ontology: Mol. function=sequence-specific DNA binding; Cellular component=intracellular; Biological process=regulation of transcription, DNA-dependent
  Homolog annotation: Hit_ID=Q1STS2; Match level="QueryCoverage=80%, HitCoverage=79%, E-value=2e-26, Identity=61%"; Hit description =Transcription factor CBF/NF-Y/archaeal histone
  Pfam annotation: Domain name=CBFD_NFYB_HMF; Domain location=22-95; Score=63.6; E_value=6.5e-16; Accession=PF00808.13; Description =Histone-like transcription factor (CBFNF-Y) and archaeal histone
  Pfam annotation: Domain name=Histone; Domain location=16-98; Score =41.1; E_value=3.8e-09; Accession=PF00125.14; Description=Core histone H2AH2BH3H4
  Pfam module annotation: Pfam domain module=CBFD_NFYB_HMF::Histone; Domain location=22-95::16-98
MRQARPYSGIFCGGVSARTGPHALPLARIKKIMKRSAGEAAAAADGGARMISCEAPVVFSKACELFVAELTRRAWAATLDGKRRTVHREDVATAVHNTDLFDFLVDVVTADTAGGTGGGGGGHDGDGPL

SEQ ID NO: 72105 - protein, 95 aa, Zea mays
  Coding DNA Sequence Number=SeqID_30326
MGMHGGGWLQRAGRRAHQTALSVEMAWKSGSDLTAAATQKQPPNQDDVDIFSKLENLMVFLCENCSIAWRGSLTRGDKCVPVIILEAISNTLITH

SEQ ID NO: 72106 - protein, 79 aa, Zea mays
  Coding DNA Sequence Number=SeqID_30327
MPQCSSPHVKRVNPGEGLLAAGVESEGASLYVGIEEIESKGTNIDEEGGALHEEHPVVARVGEEEAVIVRRGEKKRCAQ

SEQ ID NO: 72107 - protein, 153 aa, Zea mays
  Coding DNA Sequence Number=SeqID_30328
  Homolog annotation: Hit_ID=Q6QP51; Match level="QueryCoverage=31%, HitCoverage=22%, E-value=4e-09, Identity=61%"; Hit description =Putative growth-regulating factor 1
  Subcellular localization annotation: CTP_CleavageSite=83; ConfidenceScore=5.33e-01
MVNTARSGLAVMAVAGEQAQRSRRQPSSRPIRGQRENPLPRRSGRRFPFAKMNASKKGPRKGDTPKRILPQEGTRLRAPLLIRGSKAGPPEGFNSRFRSRGPYTHYWSGVRRPAPRKGSTTASGYSGSAPNTDQGFEGWPPKGSQQPQTLSEG

SEQ ID NO: 72108 - protein, 120 aa, Zea mays
  Coding DNA Sequence Number=SeqID_30329
MAGGRLHRRAGGRLPPPEAGRRGGPPTRAGGPPLRRGGWVPHVMQANSGQKKPNRRARCTQPPSGYKRPSTFAQTNGRKGGQPCRRHATAPSGRAPPTPNTPGIEAQAHASCNRCAVCYV

SEQ ID NO: 72109 - protein, 140 aa, Zea mays
  Coding DNA Sequence Number=SeqID_30330
  Homolog annotation: Hit_ID=Q56TP8; Match level="QueryCoverage=31%, HitCoverage=16%, E-value=6e-13, Identity=75%"; Hit description=Beta -expansin TaEXPB4
MDSKRRLQGPFSLRITNESGETLVAYQVIPANWAPNSYYRSNIQYEAFGSAAGQATGSAVGLVISSAARLHTLITRIIGLICLVLLYHLQGIEPLRWCCVSAGDVVGPEFHLFEKVLNPNNFPMNFVDSCVTGAHSFQLF

SEQ ID NO: 72110 - protein, 76 aa, Zea mays
  Coding DNA Sequence Number=SeqID_30331
MGGPRRHCLDWRASCPGARRSKRREDQFARNGGGSGSQGLRDNSLQVQEGDDTNQFQLIGNSELSFQLQVRVPNTQ

SEQ ID NO: 72111 - protein, 234 aa, Zea mays
  Coding DNA Sequence Number=SeqID_30332
RPRPPRVGLRGARVAAAAQGPSCLYVGPIETASQEKLEALYHQARDSYYSGQPLIIDDMFDKVELKLRLYGSKSVVKYPRCSLIRHSTYADAEEDQSMFMALSSIWMLLLLFGTSAVLVPTLYTLSIAFGDVFGARHLLYGEKSLDAVTRVNDLALVGLGYLVGYPIASASVGALQGLLSNNLVALKGSCPNCGEQVFAFVKIEKTVRAPHRAECHVCQCPLEYRTKIEYNDIC

SEQ ID NO: 72112 - protein, 102 aa, Zea mays
  Coding DNA Sequence Number=SeqID_30333
MARRGNRLQRERTTKSGNQLGILVLRLRAGHRGSGGCVENTYQPAATEKGGAKEGQRVAPLHGTTAASQGPDRSFLRSGRERRRMDMDGYESDGTRSRVPYL

SEQ ID NO: 72113 - protein, 627 aa, Zea mays
  Coding DNA Sequence Number=SeqID_30334
  Gene Ontology: Mol. function=protein-methionine-S-oxide reductase activity; Cellular component=nucleus; Biological process=regulation of transcription
  Homolog annotation: Hit_ID=Q94HJ3; Match level="QueryCoverage=99%, HitCoverage=88%, E-value=1e-166, Identity=50%"; Hit description =Putative SCARECROW gene regulator
  Pfam annotation: Domain name=GRAS; Domain location=226-533; Score =403.9; E_value=2.3e-118; Accession=PF03514.5; Description=GRAS family transcription factor
MDNLEYCEINSDITLNYITQILMEESADENISAYKHHDALQAMEKPFYDILGKAYPSSSKQTMVNSGSQSGLPDDINNSHHDLERSGNSVSDLLRGRKGVRSIGIDGGSELCDVALQFNRIAEEAKKFVPSIGNLVVDPESNDLSSSKEANGSAIGQHSNQTNKIRSYPHVDLKLVEGRNSKYSAISTSEIIRNELFDRVLLSDEQYLCDVAHLREMAKEANINLQYVQNTGSAQGKQKPQSKKQEKEAVDLRGLLIQCAQAISSNNHPFASELLKKIRHHSSPYGDGSQRLAVYFADALEARAAGTGSQINQRLVVKRTSVTDMLKAYRLSIAACPFGRVAYYFANKTIVDVLGSRPRVHIIDFGIMFGFQWPSLIQRLAKREGGPPQLRITGIDVPETGFRPCKQIEETGKRLAEYARMFNVPFQYQSVASRWESIYIADLNIGRDEVLIVNCLHKMKNLGDETEDIDSARDRVLRIMKRMNPDVLITGVMNGLHSSPFFLPRFREALFFYSSQFDMLNSTVVHQNHEARIMIERDLLGADVFNVVACEGAERIERPESYKQWQARILKAGFKKLPVDQTILKGSVDRKELYHGDFVIDEDSGWLLQGWKGRIMHALSSWKPKDS

SEQ ID NO: 72114 - protein, 32 aa, Zea mays
  Coding DNA Sequence Number=SeqID_30335
MRSPDAQVFIVSFSGNEQVGNIVSRRNARVTD

SEQ ID NO: 72115 - protein, 92 aa, Zea mays
  Coding DNA Sequence Number=SeqID_30336
MTASKERTDVSQDSILRPTIENLSVTEQQLYKDIMCQVEEDAHGQLAKVQEETKENFLAHFVVDRHQKITKHGEIEIASLLPLSQISNTIRH

SEQ ID NO: 72116 - protein, 71 aa, Zea mays
  Coding DNA Sequence Number=SeqID_30337
MAVASVAESGGAVRLAVALARGHGGAVVRGALATGARVRVRGAAAILGAAAGLGAGAFTASYKDNALSVSG

SEQ ID NO: 72117 - protein, 98 aa, Zea mays
  Coding DNA Sequence Number=SeqID_30338
MGVGARGGLPCDALLLDPVEAVEGGAKRGSEWGTATGGASSMIGVGDRRCAGCGGAGSAVASAEGLARGHRYRPIRRGRGSRPWASVPVEDFHMMPRS

SEQ ID NO: 72118 - protein, 274 aa, Zea mays
  Coding DNA Sequence Number=SeqID_30339
  Pfam annotation: Domain name=Spindle_Spc25; Domain location=170-245; Score=43.1; E_value=9.2e-10; Accession=PF08234.2; Description =Kinetochore protein Spc25
MSSSSDLEQQVATALRRVTPVAAAPAVDRGGAPDLAAAIQRRMASQRARGADAFYAKFASARSLADQTFSRRRVQLKGLKDQLRDLQSQLRESLTLQSCKEWKYRIATEPMSEATATNERLRSWVADFRDKRNKGAAIVFEQLQAVESLEANSNEDAEMAEKVPKAVLWYNKFLGFRVIGGERGVKFVFDKIDPQRPEKEYSFRVSPRSQFIDSDPHVKDIDELAKDLDLNEHLFEFMQDNRTYNVYTVKFQLKTYNLYTVKFQLKRLYGLVIM

SEQ ID NO: 72119 - protein, 67 aa, Zea mays
  Coding DNA Sequence Number=SeqID_30340
MGARFFSVPRLGDYYYVFCLHVWSDVNFLYILFLFVLWQVEEPVTEDPGAQQIEVAKQELIEGKLCP

SEQ ID NO: 72120 - protein, 57 aa, Zea mays
  Coding DNA Sequence Number=SeqID_30341
  Gene Ontology: Mol. function=RNA-directed DNA polymerase activity; Biological process=RNA-dependent DNA replication
  Homolog annotation: Hit_ID=Q3LRV3; Match level="QueryCoverage=65%, HitCoverage=23%, E-value=7e-14, Identity=86%"; Hit description =Polymerase
MEEEAEAYRNKGSLGDGGDKKLPPVVFIPSGIQRYQYVPLGVMKLVFGSSSFFIQIW

SEQ ID NO: 72121 - protein, 108 aa, Zea mays
  Coding DNA Sequence Number=SeqID_30342
MALGFRAPERSHGARHFSLAVLAPLWPRLSLWSQGCARPISMALGAQLSLADSHLRVVSARPCSSTPMTYLSIACYLHWDLKLSVVLDRTSLQLVDILCVVEKSREFE

SEQ ID NO: 72122 - protein, 319 aa, Zea mays
  Coding DNA Sequence Number=SeqID_30343
  Pfam annotation: Domain name=Extensin_2; Domain location=3-319; Score= -142.4; E_value=0.099; Accession=PF04554.4; Description=Extensin-like region
  Subcellular localization annotation: CTP_CleavageSite=96; ConfidenceScore=5.72e-01
MAHPLGQPSPPSLAWPRLRLPPSHYSSVLPAVSPSLPMPPDRVVSTTKPPTMSSHFPSLPQCSPSHSAWPTPLLLPLAVWCSPPHPLLRTVWRSPMCTPYSSGTSLFYFDGAISASSSGATPLPSSGTTVLPTTHYSSMAPTPIYGGTAPSSAAAVISSGTGATASFPTGNTGSYNKWLQLSPLPSHSTPTPATLEHPLLARTLHSVPHLATECPAVALANGNTSILAPPSTTAITMRSSLHGGQLIWGTFVAFDRVMNPIPHDCVELHPQADRHAIEPLMFPSVVIASMTISPTSDSLGVPPLALFSHLFSSSYPPTG

SEQ ID NO: 72123 - protein, 156 aa, Zea mays
  Coding DNA Sequence Number=SeqID_30344
MPSIRGRAIGGCDRRATSEGKCDDMVGGFVVETTLDKASGERWLPLGSSCTWGREPLPGRPLTGQGASVGMGTQQAAHCCNGKEVGAVVAMPGRGVKVGRVGCPQQSGSLYDGEDIDGSNEEESQSRKGVRANISNDGDHISTKVIRGNKRIVAPP

SEQ ID NO: 72124 - protein, 274 aa, Zea mays
  Coding DNA Sequence Number=SeqID_30345
MAEQSERMARRAHGRMLGENRGASREPTTASRGAWLRAQGARHGQQPASTTSRQGRARTATSGHQGTRAGDFGWALELESGAPRRSRQRSAASTREQRARRAAKELGTRGRELDGGNPGRAQQGAGTRPQPSELRPAWARRPGSRRARAGRLKLAEENVGDGRAMGEAPARREEDRAEEVGAQEGWAPSAMEMGRAHPCDQRESRGHRGASTTREKCQAPWERSGARRPSAMSGQRGFDELEPGTQHERELREMSACRLGGEDRSSAAGFFYRP

SEQ ID NO: 72125 - protein, 208 aa, Zea mays
  Coding DNA Sequence Number=SeqID_30346
MRVFSLVGLRVTLIVIGVKRRFPLQNVGVCDLCLLNPAVLVELRYLSLNDYSCNIIVGKITKDAYFAIMSSDNDLFVDAHEMWTRIKLMYLKSKWIASISLFSCETNLLEEEEESDRWIHNDESTSLTGLFSTSFKCVAANNDSGDESDDEEEFKDDSEDANKNEKPTSLQGTFSHTSLHASAYNDDRENETKDVEDSPTLHPSQQRR

SEQ ID NO: 72126 - protein, 87 aa, Zea mays
  Coding DNA Sequence Number=SeqID_30347
MLDMGCPKVIVDEVKGVSNLGHRRIDGHGKARLCHHEGKEWPRWLKVERGRHGRDGQDNGAKLRQGQWTHERRVGQNGRRKVGWGKD

SEQ ID NO: 72127 - protein, 254 aa, Zea mays
  Coding DNA Sequence Number=SeqID_30348
  Gene Ontology: Mol. function=electron carrier activity; Cellular component=membrane; Biological process=electron transport
  Homolog annotation: Hit_ID=Q10ME8; Match level="QueryCoverage=93%, HitCoverage=22%, E-value=9e-90, Identity=74%"; Hit description=HAD -superfamily hydrolase, subfamily IA, variant 3 containing protein, expressed
  Pfam annotation: Domain name=Hydrolase; Domain location=77-251; Score= 30.8; E_value=4.9e-06; Accession=PF00702.16; Description=haloacid dehalogenase-like hydrolase
  Subcellular localization annotation: CTP_CleavageSite=54; ConfidenceScore=5.61e-01
MARHLAPSSGSLHRLLASCHYPPTSQAPPPRPLLLPKTRSAAMQLPRRGRRDVVAAAAASAPSPSSPGTEVAVWGKVSAVLFDMDGVLCNSEEPSRQAGVDVFAEMGVEVAVDDFVPFMGTGEANFLGGVARAKGVKDFNPESAKKRFFEIYLDKYAKPNSGIGFPGALELILECKNSGLKVAVASSADRIKVDANLAAAGLSVFLFDAIVSADAFEKLKPAPDIFLAASKSLGVDTNEATNMWVSKDVAALQQ

SEQ ID NO: 72128 - protein, 152 aa, Zea mays
  Coding DNA Sequence Number=SeqID_30349
MANRASVNASMGATLDTTGARVGGAGSARLGGASVVDDATVKERAPPAGGARMEEWDVGAVVWEEQYAGARLDGTKSASRGGRSAGRSSTAEIREKAGSGWQVTMADHRRGKGASALTMERDARRRLSGERGKEREELALIPCWEMESLTSN

SEQ ID NO: 72129 - protein, 72 aa, Zea mays
  Coding DNA Sequence Number=SeqID_30350
  Homolog annotation: Hit_ID=Q10ME8; Match level="QueryCoverage=43%, HitCoverage=3%, E-value=6e-11, Identity=100%"; Hit description=HAD -superfamily hydrolase, subfamily IA, variant 3 containing protein, expressed
MAVCPIHVSEYGRVGYSHMCCFILQFTVVGVHSAKFDNEKDLEAIRNAVLRYNITHPGFVKGSLAELVRWSE

SEQ ID NO: 72130 - protein, 742 aa, Zea mays
  Coding DNA Sequence Number=SeqID_30351
  Homolog annotation: Hit_ID=Q9LIM5; Match level="QueryCoverage=95%, HitCoverage=82%, E-value=1e-20, Identity=34%"; Hit description =Arabidopsis thaliana genomic DNA, chromosome 3, BAC clone:F4B12
  Subcellular localization annotation: CTP_CleavageSite=46; ConfidenceScore=5.40e-01
MFPSRVHRGGRRSRVDSNLPSRPLPRSPASAQVRVKGGKRKPKHTSAATLHSCSRRGGVGSAEVSFRRAGDDRDGPQSKNQGWVYQIPVNICEALKTFGSCGGRSLCSPSRHGGAGERGALPTDANCGKKRRQGAPAGGSWLCGAAVARCLLAIQEEDDDEVGNGKGAAVVPAEEMRTSEVGLVMEGWDVEEEKAVMMGDVEVEKKDEILVVGKEEEGRVSVCIPPRNALLLMRCRSDPVRMAALATRFWGSPAAATVEQVDNEVAGCLNDNEEEEEKEEEAEAEPLECKDGARCSAVSVKDLKCEECGSDENDGAEAGEINQEKAEAEESSKCGDLVEEKEGASCRVGVEEAQIVRKDAELEVPLGEVTEMENQGPDMVELVVSEEEVPGHEKVDEEMMGRRSINSYSPSATLKEDRTKLRRLSSRMCVSTSSRASSSSDRVGRRHSFSAEMEARRSSFSSLKDSRRASFSIDRDGRRWSFSIEQEHLVAQPKVLMASRKGKKTSSEAESEKDCDVVAPNSAEEGQESYDDGKEEDTTENVAEEGKTKSAEANQEVEKVETRAEECEGGTVPVIHRRKKSGELPDCLLLMMYEPKLSMEVSKETWVCSTDFVHWKSYQGKNNRNHWQQKASAAGTVETKEKENAEGTTIANDVQESKDPSTVNSAVPMPCPVVQKTPPLKPATTEQKLKLELPPVTNAAAYAPFVLKRCKSEPMRSSARLAPDACFWKDRHRPLNAAGVGF

SEQ ID NO: 72131 - protein, 108 aa, Zea mays
  Coding DNA Sequence Number=SeqID_30352
MEQGKERPVTQMTPLLPHLDIIVGGGIKMLDNPNHHVKQEGRGKPKLKPLPGAPNVGGKLQPAGRMHPPNPMNEGLPRVYLLRSKEHKDLEWFGPLERNTLCPLNCIA

SEQ ID NO: 72132 - protein, 57 aa, Zea mays
  Coding DNA Sequence Number=SeqID_30353
MDSATIFSIPESALRYNSSDCPVHQRSNGYFAQRSPAKARDLEEQCATVRGRAEPPV

SEQ ID NO: 72133 - protein, 233 aa, Zea mays
  Coding DNA Sequence Number=SeqID_30354
  Gene Ontology: Mol. function=transcription regulator activity; Cellular component=nucleus; Biological process=regulation of transcription
  Homolog annotation: Hit_ID=Q10G91; Match level="QueryCoverage=80%, HitCoverage=35%, E-value=6e-37, Identity=52%"; Hit description=Helix- loop-helix DNA-binding domain containing protein, expressed
MARKPPQKMTTARRSRAAEVHNLSERTDKASMLDEAIEYLKSLQLQVQMMWMGSAGIAAPPAVMFPGVHQYLPRMGVGMGAAAAAALPSMPRLPFMAPQPVVPSAPVSVGPVPAYRGHMPAVGITEPYGHYIGVNHLQPAPPPPQVQSGQHYAQGVSYYPAAAGGDGRRPCSRLQSFTTCRGPAGSIMPRRRRTRSAAPGERARQRARYGAMRSALLILRFSFWATNGSTTMR

SEQ ID NO: 72134 - protein, 515 aa, Zea mays
  Coding DNA Sequence Number=SeqID_30355
MAAQQQAAASVLQSFPIRAAVLALCVALLPLLLPAQAPDVAAGGAGQAFLAKAWELLHLLFVGIAVSYGLFSRRNSADDGRAGAAAAEKDDAAGPEPAKADARYAWRMFRDSIAPFDDDDADVLVPDSPPGGGGGGMARSWSALHRPVEPVVVVSTGGGGVRIGQAQAPDAQAPLSLPVRMLKPQQAQDASAAGAGAGAVDFEPQCARPRRSSQSSAVDCAHDDETVLPSPIPWRSRSGRLDARRPASSPSPSPSPKRVSPASSLSRETLAKASEEEYYAKAKRRSPYRCSSISSSPPAPPPPPPPFLVHGYHPTTERRSAAPKSFKEELQHHSMRGRGEDHYLPKTSSNSFSLPANPRSSFSSNGGSSSSVSVGKSVRTFRTREPAVFQDQSQELPDDSGDDRDALDVHGSEEPYGYRAYQSISRFQYERSGSDSILGGVAVSSDESESSDDDGGDDVGGGGYSTRESTPEVDENEVDKKAEEFIARFREQIRRQRIESIKKSAGTRGVKRHGK

SEQ ID NO: 72135 - protein, 178 aa, Zea mays
  Coding DNA Sequence Number=SeqID_30356
MAGSAIIASPQQVYVPLPNLRYLGGSGEAKDAGTREQGQRSPRTIATSPPRHPPSQVRRHPRDSDEGTKEASQLVLPLGVVRANARHAEELGGADPTHLLPPIILRHEGDALYATVTFLPHATQQPQPFIHSAPRSTAPIPTHGCHAARPCHPHHRKSPYRRWGHRRADRCGHPGDAS

SEQ ID NO: 72136 - protein, 89 aa, Zea mays
  Coding DNA Sequence Number=SeqID_30357
MWSYMSSSLSSGLLLPPHEQARPAVVHRRQKASHGGSQHGWDRHGHTGASTKPFGSSSARELALHIIHDDTYASGTMNLTTETHTNYQK

SEQ ID NO: 72137 - protein, 137 aa, Zea mays
  Coding DNA Sequence Number=SeqID_30358
  Subcellular localization annotation: CTP_CleavageSite=53; ConfidenceScore=5.46e-01
MAASTASPDHPLQPLAPQRCRRSLNAAQAAGHRSSAGCRRMPGRPNRGRCQLRSRSKRAGHDHTFVSWTCGEQVIDGWPTRLSAVADETIDGWTPNPVSFVQPDMEASSARLSMMVSSTRPPRPRRSECQHIATWDL

SEQ ID NO: 72138 - protein, 469 aa, Zea mays
  Coding DNA Sequence Number=SeqID_30359
  Gene Ontology: Mol. function=RNA binding; Cellular component =ribonucleoprotein complex; Biological process=gynoecium development
  Homolog annotation: Hit_ID=Q9AY47; Match level="QueryCoverage=82%, HitCoverage=81%, E-value=1e-173, Identity=82%"; Hit description =Putative nucleic acid binding protein
  Pfam annotation: Domain name=KH_1; Domain location=112-202; Score =43.6; E_value=6.9e-10; Accession=PF00013.19; Description=KH domain
  Pfam annotation: Domain name=KH_1; Domain location=19-81; Score=45.1; E_value=2.3e-10; Accession=PF00013.19; Description=KH domain
  Pfam annotation: Domain name=KH_1; Domain location=311-373; Score =58.2; E_value=2.7e-14; Accession=PF00013.19; Description=KH domain
  Pfam module annotation: Pfam domain module=KH_1::KH_1::KH_1; Domain location=112-202::19-81::311-373
MEEVAAAAKRWPGWPGDSVFRLVVPVLKVGSIIGRKGELIKRLVEGTKARVRILEGPVGATERIVLVSGKEDPGLELSPAMDALMRVFKRVIGITDGAAEGTQAAATPGVCAARLLVPGAQAINLIGKQGATIKAIQESTGATIRPYPYFNCMLLILHDWNSCIELLVMEDEHERPFYVTDDERIVEIQGDTEKVLKALQAVSNHLRKFLVDHSVLPLFEKTNTAVSQDHNVGWSDMSHPSIGSAQVNQPPSVVDEYILPVKRDTLYLERETLLDHNIHRSGVSLYGRDPALSTLRPPGIHGAGPLLTQITQTMQIPLTYAEDIIGVKGANIAYIRANSGAVVTIQESLGSPDDITVEIKGTSSQVQAAQQLIQDSLAAHREPVRSSYVGAGLDSLYRSSYSQYGSSTYPSSSLPSYSSIDDVSRYPSSGLGGYGSSYRDLVDYTASQFPVPRLRSPICFDNGIGNRAC

SEQ ID NO: 72139 - protein, 63 aa, Zea mays
  Coding DNA Sequence Number=SeqID_30360
MGSFLEELLCCGVHDRALYGRQHGRRKALARSLSSLCHIDPGCRIQGLDAGRRLAGPVGDKRT

SEQ ID NO: 72140 - protein, 262 aa, Zea mays
  Coding DNA Sequence Number=SeqID_30361
  Gene Ontology: Mol. function=ATP binding; Biological process=transport
  Homolog annotation: Hit_ID=Q2IGU1; Match level="QueryCoverage=51%, HitCoverage=27%, E-value=3e-10, Identity=38%"; Hit description =General secretory system II, protein E-like
  Subcellular localization annotation: CTP_CleavageSite=43; ConfidenceScore=5.22e-01
APRYTGAPWPHEPKPRLAGAALRRATPCKGRGRAGCTASRGVSGMRRAGTGDRAVLGRHAGDRGTVRRGRAEAGTGERGARAGTARRPRVRAGGWANRGRARGARRGSHGLARAGRALQCAGREAALRHGQGAAPRRGREETARWGRAGLGRCTALRSRRGHGRALEARSGTRERGGTGSGTGTPCTSQGPAPSRPPRAGRAARGGRGQPHARGGRDMEEGDGDEPHLGDSRWQRDVSARRVLTIADGRFCLGWRAEHRIIR

SEQ ID NO: 72141 - protein, 129 aa, Zea mays
  Coding DNA Sequence Number=SeqID_30362
MAAKAPERAVLDKIHPRRCSGCEMAQGRGGFGPGRWAPPSRTRILARSAPCAGSMARLLTDVRRKGMSEAVVQPLQVARLTSHRTAKRTLSETRGQKGMTDFRAVCLRRAIYKRHRKHKSENRTNMTSK

SEQ ID NO: 72142 - protein, 98 aa, Zea mays
  Coding DNA Sequence Number=SeqID_30363
MWTHAQDRPWGTERAGRGTCVWGLAVEVLAQRGAARDHMRGCWLLGKLGVAQQRQQAHRPGTHSHGLDAGVGQRSANDKEQAQVDGHDGEQGRMSVRR

SEQ ID NO: 72143 - protein, 33 aa, Zea mays
  Coding DNA Sequence Number=SeqID_30364
MARTDFGAAVSTVSSERSSGMARGGLAAILEAS

SEQ ID NO: 72144 - protein, 258 aa, Zea mays
  Coding DNA Sequence Number=SeqID_30365
MGYKEATTHIQLWLLGALVSHLEFDMVDFLICEIEDTILDGLRARPTENPVPVPDPVSDVRVEDETFRQFKNQGVVADTSSTDDEGLGIPPLPLCHLAHMITRRQQLLADRAEHWAFMTHILYHTGVQLPPIQSTPPPALQTSIVPALLAGPPLPLFGPSPSQLWPVTLDFSSLVIRTVSAQPPVPPTPAVTTAVVAVSMTAPAPADPASQPSSESVPAPASTLNPGSERDSDPQLAFALLPRPRPDAPSLPPSSSGV

SEQ ID NO: 72145 - protein, 612 aa, Zea mays
  Coding DNA Sequence Number=SeqID_30366
  Gene Ontology: Mol. function=binding; Cellular component=nucleus; Biological process=metabolic process
  Homolog annotation: Hit_ID=Q60EM0; Match level="QueryCoverage=95%, HitCoverage=75%, E-value=0.0, Identity=50%"; Hit description=Unknow protein
  Pfam annotation: Domain name=PPR; Domain location=139-173; Score =35.3; E_value=2.1e-07; Accession=PF01535.11; Description=PPR repeat
  Pfam annotation: Domain name=PPR; Domain location=226-260; Score =20.1; E_value=0.008; Accession=PF01535.11; Description=PPR repeat
  Pfam annotation: Domain name=PPR; Domain location=261-295; Score=6.9; E_value=1.1; Accession=PF01535.11; Description=PPR repeat
  Pfam annotation: Domain name=PPR; Domain location=328-362; Score =44.1; E_value=4.7e-10; Accession=PF01535.11; Description=PPR repeat
  Pfam annotation: Domain name=PPR; Domain location=425-459; Score =34.4; E_value=3.8e-07; Accession=PF01535.11; Description=PPR repeat
  Pfam annotation: Domain name=PPR; Domain location=527-561; Score =33.5; E_value=7.4e-07; Accession=PF01535.11; Description=PPR repeat
  Pfam module annotation: Pfam domain module=PPR::PPR::PPR::PPR::PPR::PP R; Domain location=139-173::226-260::261-295::328-362::425-459::527 -561
MESTEFDGRLGLNSFIQIGQVYTYEIPIGNQAIKTSSMLMGNNAHAFVHGVSMALDHFLDAHRRQGRCVGGGALLGIIKICGSVPDRVLGKQLHARCVRCGHDHGDIRVGTSLVDMYMNWYSVLNGRKVFEGMLKRNVVTWTSLLTGYIQAGVLLDVMSLFFRMRAEGVWPNPFTFSSVLSVVASQVWLLLHCVCVQFSDEMYAKCGLLVEEARVVFCRMETRDMVSWNTLMAGLVLNGRDLEALKLFHDSRSSITMLTESTYSTVIKLCANLKHLGLARQLHSSVLKRGFHSYGNVMTALMDAYSKAGQLDKALDIFLLMSGSQNVVSWTAMINGCIQNGDIPLAAALFSRMREDGVAPNDLTYSTILTVSEASFPPQSHAQVIKTNYECTPIVGTALMVSYSKLCGTEEALSIFKMIDQKDVVSWSAMLTCYAQAGDCNGATNAFIKMSMHGLKPNEFTISSAIDACASPAAGVDLGRQFHAISIRHRCHYALCVSSALVSMYARKGSIENAQCVFEKQTDRDLVSGNSMLSGYAQHGYNQKALDVFRQMEVEGIEMDGLTFLSVIMGCTHAGLVEEGKLDETMSPIEGMPFPAGPTIWRTLLGACNTRL

SEQ ID NO: 72146 - protein, 34 aa, Zea mays
  Coding DNA Sequence Number=SeqID_30367
  Homolog annotation: Hit_ID=O24415; Match level="QueryCoverage=97%, HitCoverage=30%, E-value=2e-08, Identity=94%"; Hit description=60S acidic ribosomal protein P2B
MKVIAAYLLAVLGGNTSPTADDVKSILESVAEVD

SEQ ID NO: 72147 - protein, 132 aa, Zea mays
  Coding DNA Sequence Number=SeqID_30368
MGKKRKREPTPPSEDFGNSEYSEEEFSSESEGSPAPVPPPASFDDSDDSQGIAAEVWNYIWAIERSGLAGSDESEYSSDEEDSSEEDGGGGGEGDDDDDDGGDGGDDDGDGGSRGGNGGSRGGNRGSNKASG

SEQ ID NO: 72148 - protein, 149 aa, Zea mays
  Coding DNA Sequence Number=SeqID_30369
MGKSKKGGSSSHHSGNKRKREPTPPSEDFGDSEYSEEEFSSESEGSPVPASPPASSDDLDNSQGIAVEVWTYIRAIERAGLEGSDESEVSLDEEDSSDSSEEGSDGDDGGEGDSGDGGDGDGDGDGSRGDDKGDGGNSNGKGGSGKASG

SEQ ID NO: 72149 - protein, 246 aa, Zea mays
  Coding DNA Sequence Number=SeqID_30370
  Gene Ontology: Mol. function=acyltransferase activity
  Homolog annotation: Hit_ID=Q6K714; Match level="QueryCoverage=86%, HitCoverage=47%, E-value=7e-63, Identity=60%"; Hit description =Putative anthocyanin acyltransferase
TLDKKRKWQATARLRLRRRRQAHQPKLVIASFALTRDRIDALKRRVAAKVAADGGGTGRVHCSAFTVACALAWACLARVGGGERPRAHLLFSVECRRRLAPPIPQEYLGNCLRPCFVEVGTGELLGGDGVAAAAAAIGAAVAALDGGVLDGAGGWFHKILSLVPERPMSVGGSPRYGVYETDFGLGRPAKVELVSIDKTPGTVSLAEARDAGVEVGVVLQEAEMARFGSCFADALEVLCDSVTELN

SEQ ID NO: 72150 - protein, 247 aa, Zea mays
  Coding DNA Sequence Number=SeqID_30371
  Subcellular localization annotation: CTP_CleavageSite=40; ConfidenceScore=5.04e-01
MGSSASSSLSQRNRSISGGRPERGGGRHLMPAIPYASNVVAARASAQTPPKGINAPPQCCVGRHPLRLGTRNRATTCRMRHTAAHQSRSPLSLSALAPAGTKATCRRALHRRRHHLVPAQVTCCRCHAIKREEGPVAAAISADRVALLAHLAGPLDASLHPCSLPTPKQVPPLLPTSTTTSMRTALVRGRGAGSTLTPALESACIDNLHAAAALQVVANAAWHPPLRCGCGWEGRAEELLAAAFLVP

SEQ ID NO: 72151 - protein, 164 aa, Zea mays
  Coding DNA Sequence Number=SeqID_30372
  Subcellular localization annotation: CTP_CleavageSite=40; ConfidenceScore=5.11e-01
MATSPIICNFRPRSSVSFIPVRGLEQARRPVPDPMARRPRPAYPVPPSYPWFAPNMGRDCPLAPTRARLVRGTLSVALRVCVFAQRSGVARRARDTIVYPLAPVYPPRIRGVVRFAVVPSMGLGVCGSLCQGGYEIDGFGYVYGAGEDEAMEGDFQEFQDYDEF

SEQ ID NO: 72152 - protein, 218 aa, Zea mays
  Coding DNA Sequence Number=SeqID_30373
  Gene Ontology: Mol. function=acyltransferase activity; Biological process=flavonoid biosynthetic process
  Homolog annotation: Hit_ID=Q6K714; Match level="QueryCoverage=88%, HitCoverage=43%, E-value=4e-71, Identity=69%"; Hit description =Putative anthocyanin acyltransferase
MAATKILDRLKVGASPPAPGGALPLTFFDVPWLFTGPVERVFFYPYAHTADHFAAHLLPSLVSSLSATLRAFYPLLGRVRPCPDGGGGYEFFCSDGGEAVELIVAESSDDFDELSAGGPRDVARLYALVPRLPSPGADGSFALAAAQVTVFPARGVAVGVSIHHVACDDSSYTHFIRTWAAQCRVASGGADAVSPPLSDRDWTPTRSTHGCHRRMHNR

SEQ ID NO: 72153 - protein, 125 aa, Zea mays
  Coding DNA Sequence Number=SeqID_30374
MSSRSILFLHAADEYAPDVLRRRFVDALQAHHGTISFCAMTPLAVVVSSVPPVLRIPYVLRHGRRFLVFARSPAVFEIRVKAFHFFVIEAATPCSTANVKKVKMQLPALMGELKEGENCSIHTKV

SEQ ID NO: 72154 - protein, 116 aa, Zea mays
  Coding DNA Sequence Number=SeqID_30375
  Subcellular localization annotation: CTP_CleavageSite=50; ConfidenceScore=5.06e-01
MASLLGLCPAQRLVASQHDARGLAPIPLSSPLLRACPACPGVRPRLPSPPCGEREEEAIVLFVGDMGCDRMRFHRIESDVWITGGDEDDVYDYGNGKEEGVEADLQEFQDFDEFED

SEQ ID NO: 72155 - protein, 166 aa, Zea mays
  Coding DNA Sequence Number=SeqID_30376
ALGRAQAGSGWHNGLSHGHDTDAEAPEGTGLRQSGPATTLAYSGDRLREQQGYGNGKSGAWGGELPRETALERLSDGENTAGPRVDGGGNMAARRGVCIVRITAWGKKYRVEDELGPLFRLVAVPTCTGDVAKRLSPEYAPFTAIAPCLRPFTTSSQVIVTAPRLP

SEQ ID NO: 72156 - protein, 178 aa, Zea mays
  Coding DNA Sequence Number=SeqID_30377
  Gene Ontology: Mol. function=hydroxymethylglutaryl-CoA synthase activity; Cellular component=soluble fraction; Biological process =acetyl-CoA metabolic process
  Homolog annotation: Hit_ID=Q64MA9; Match level="QueryCoverage=74%, HitCoverage=27%, E-value=6e-68, Identity=93%"; Hit description =Putative hydroxymethylglutaryl coenzyme A synthase
  Pfam annotation: Domain name=HMG_CoA_synt_N; Domain location=2-158; Score=213.7; E_value=4.1e-61; Accession=PF01154.8; Description =Hydroxymethylglutaryl-coenzyme A synt
MDRKDVGILAMDIYFPPSCVQQEALEAHDGASKGKYTIGLGQDCMAFCSEVEDVISMSLTVVNSLLKKYKIDPKLIGRLEVGSETVIDKSKSIKTWLMQIFEESGNSDIEGVDSSNACYGGTAALLNCVNWVESNPGMAVMVLSFARIARVVIQPFLPHQFLLFGFFLLEHAITFCHL

SEQ ID NO: 72157 - protein, 124 aa, Zea mays
  Coding DNA Sequence Number=SeqID_30378
  Subcellular localization annotation: CTP_CleavageSite=58; ConfidenceScore=5.28e-01
MAPGESMQRMQGAMRMCCPGLPTRVYSSLTSRLCSPTSALLCGCASNTLPLSHRLLVNEAHDRVSEFLGAIGIDVHDAEAQLSCSGGISRQCRAAAARAGTCAALHAISEPLGHIEGSGADSGG

SEQ ID NO: 72158 - protein, 198 aa, Zea mays
  Coding DNA Sequence Number=SeqID_30379
  Gene Ontology: Mol. function=ATP binding; Cellular component =membrane; Biological process=anion transport
  Homolog annotation: Hit_ID=Q64MA8; Match level="QueryCoverage=98%, HitCoverage=74%, E-value=6e-74, Identity=60%"; Hit description =Putative hASNA-I
  Pfam annotation: Domain name=ArsA_ATPase; Domain location=1-156; Score=-47.0; E_value=1e-09; Accession=PF02374.6; Description=Anion -transporting ATPase
EIDPKVENDDLSNEGMEGFLSELTNAIPGVDEAMSFAEMLNLDTAPTGHTLRLLQFPATLEKGLEKMMELKNRFGGLLNQASRLFGLGDELNEDAMLGKLEAVESKLLKARMKMQQKYIDQFHMLYDDFNITKLPLLSEEVCGVQALQNFSQHFLTPYKSTLKRGTVEELEQRITILKSALQEAETELDRVRKGKQSV

SEQ ID NO: 72159 - protein, 65 aa, Zea mays
  Coding DNA Sequence Number=SeqID_30380
  Subcellular localization annotation: CTP_CleavageSite=28; ConfidenceScore=5.25e-01
MAPHLVVVRPQRNPNSAPIGVYFCPMPRGNVGAPGRKIAGVLCRGGASMRLSLPLLGKRASGPSI

SEQ ID NO: 72160 - protein, 46 aa, Zea mays
  Coding DNA Sequence Number=SeqID_30381
MAPGRKGIRSTREPPPAAKLQDCLPSSKKSILTDYEKTEGRECAEE

SEQ ID NO: 72161 - protein, 100 aa, Zea mays
  Coding DNA Sequence Number=SeqID_30382
  Subcellular localization annotation: CTP_CleavageSite=18; ConfidenceScore=5.22e-01
MKLWKETSRSSKTTTSSRCGLAATPSRLPVKAALSTFLFRTLIYWLKFQYPLGVHRLNQNPNSIQCGLLQKMCLKNFRIIRPFVNWAPQLVLWKKWTFYP

SEQ ID NO: 72162 - protein, 90 aa, Zea mays
  Coding DNA Sequence Number=SeqID_30383
MTCGAENMWVFIGAAKDKMDPHVIVNITTARYFARSGWRRGPGYSRIETHGYTVRQSGKGTRASSASHTLTPNSISNAALGSRVGNIMMP

SEQ ID NO: 72163 - protein, 443 aa, Zea mays
  Coding DNA Sequence Number=SeqID_30384
  Gene Ontology: Mol. function=nucleotidyltransferase activity; Cellular component=integral to membrane; Biological process=aromatic amino acid family biosynthetic process
  Homolog annotation: Hit_ID=Q6R3K6; Match level="QueryCoverage=92%, HitCoverage=60%, E-value=1e-155, Identity=63%"; Hit description =Metal-nicotianamine transporter YSL6
  Pfam annotation: Domain name=OPT; Domain location=1-424; Score=110.5; E_value=4.9e-30; Accession=PF03169.6; Description=OPT oligopeptide transporter protein
  Subcellular localization annotation: CTP_CleavageSite=64; ConfidenceScore=5.10e-01
MPLMQIFIGPKVKIVSKLLHLHSSFISTSVLSYVGFGFISPHIVNCSVFLGSVISWGFLWPFISAQAGHWYPDNLGNSDFRGLYGYKVFIAISIILGDGLYNLVKIFIVIARELCSMQSKQHELPVQALEDDGSCEQLADEKLQTEIFLKDSISPWFAASGYIVLAAISTASVPAIFPQLKWYLVLLCYFFAPVVAFCNSYGMGLTNLNLAPTYGKIALFALASLVGSDGGGVIAGLAACGIVMSVACSTADLMQDLKSGYLTLSSPRSMFTAQLIGIALGCVIAPLTLWLFWTAFDIGDPDGEYKAPFAIMFREMAILGMEGFSALPLHCLDICYAAFFLALATSLLKDVAPANVSRFIPIPIAMAAPFYVGAYFGVDMFIGTAILYAWQKLNREQADGYAVAVASGLICGDGIWSIPSALLSILGAVPPICMSFEASSAPR

SEQ ID NO: 72164 - protein, 317 aa, Zea mays
  Coding DNA Sequence Number=SeqID_30385
  Gene Ontology: Mol. function=transferase activity, transferring glycosyl groups; Cellular component=membrane; Biological process =cell wall biogenesis
  Homolog annotation: Hit_ID=Q6Z7Q3; Match level="QueryCoverage=61%, HitCoverage=33%, E-value=4e-74, Identity=69%"; Hit description =Putative xyloglucan fucosyltransferase
  Pfam annotation: Domain name=XG_FTase; Domain location=67-317; Score=- 11.6; E_value=2e-09; Accession=PF03254.4; Description=Xyloglucan fucosyltransferase
MQQRKAKVVWGGAESAAAQEIPASSQLAMAHNSSWPEGEGAPEHSPVPRKKRLSLDEKRWNTVVNVMLVAFVMAVPPVVVVFAGGGIAPAVWIAAAKAQLRRGSGDGPPDRLLGGLLADGLDERTCRSRYESSLYSRRPARRPSPHLIAKLRRHEELQRRCGPNTDAYSRAVQQLRAGKSVGSPECKYVVSISYRGLGNRILAAASAFLYAVLTDRVLLVDPSNDMGELFCEPFPGTTWLLPREFPLASYTNFSIDTAESYGNMLKNRVLRADVPPPPTETQLPAFVYLHLDHDYGDEDKMFFCDDDPLLLSSVQWL

SEQ ID NO: 72165 - protein, 91 aa, Zea mays
  Coding DNA Sequence Number=SeqID_30386
  Gene Ontology: Mol. function=transferase activity, transferring glycosyl groups; Cellular component=membrane; Biological process =cell wall biogenesis
  Homolog annotation: Hit_ID=Q6Z7Q3; Match level="QueryCoverage=94%, HitCoverage=14%, E-value=3e-38, Identity=78%"; Hit description =Putative xyloglucan fucosyltransferase
MYLLSLCDVLVTSGWSTFGYVAQGLGGMTPWVLHKPTNATSPPDPPCFRDVSMEPCFHAPHVYDCKLKRGADTGKMLPHVRNCEDISDMFY

SEQ ID NO: 72166 - protein, 77 aa, Zea mays
  Coding DNA Sequence Number=SeqID_30387
MESLVTFYISIEYPRKSINMFPGEYDILDMQMTGNYSGLRVSVTSNLPLWFEAAKDIENADEEKLEEIQEWEVGNAS

SEQ ID NO: 72167 - protein, 106 aa, Zea mays
  Coding DNA Sequence Number=SeqID_30388
MTSRLESGGFQLPNTEQENALLLRALISVVSGDTAAASLVPEAAAAEAPAAAASACGCPGGCDLAAASSSDSDGAECFRERRRRGQPEAEAEQGEQLNGRAAASWG

SEQ ID NO: 72168 - protein, 292 aa, Zea mays
  Coding DNA Sequence Number=SeqID_30389
  Homolog annotation: Hit_ID=Q6Z309; Match level="QueryCoverage=64%, HitCoverage=44%, E-value=8e-86, Identity=81%"; Hit description =Remorin protein-like
MNATCVVEGTGESDCLLMVESVCVVECQKQRRLKSERSALARPTALHELNSAGGVELLVLSPRCLIGNPGGMSKSSTTSSRSRSGTGTGTFPSPGTPNYNRHCAGSMQYSKGWSSERVPLGTGSNRRYGGSGVVLPFNNGRKLPSKWEDAEKWILSPVSCDGMGRMSAPAPHHRRPKSKSGPLGHPAGIPGAYAAVSPLVPCFDGVLAEANFAVHSPFSAGVLIPEHGRIGDFSSGRGRCGDDGSSRSYSAEKEPYILRSASIHAWTETLMEASAFANISEETVQGLVQPFP

SEQ ID NO: 72169 - protein, 346 aa, Zea mays
  Coding DNA Sequence Number=SeqID_30390
  Homolog annotation: Hit_ID=Q5JJP7; Match level="QueryCoverage=57%, HitCoverage=66%, E-value=9e-66, Identity=66%"; Hit description =Putative transcription factor PCF3
  Pfam annotation: Domain name=TCP; Domain location=107-256; Score =128.1; E_value=2.5e-35; Accession=PF03634.4; Description=TCP family transcription factor
  Subcellular localization annotation: CTP_CleavageSite=75; ConfidenceScore=5.18e-01
MRTTKVKGQTISTLTAESPLASACLSHPQSTKQRPSPSLPIPFATLGLLPPQGRQGKQKKEARARSLIWFAFCCPDSEGVGASVSLCSQQDGGGGGKEQQQLQVVAQPGERRQQALAPKRSSNKDRHTKVDGRGRRIRMPALCAARIFQLTREIGHKSDGETVQWLLQQAEPAIVAATGTGTIPASALASVAPSLPSPTSGLARPHHHMWAPSAGFSSPSFLNSAAAGTGDAAGIMQRMGIPAGFELPGASAAGATLGAGGHIGFAPMFAGHAAAMPGLELGLSQDGHIGVLAAQSISQFYHQVGAAAGGGGQMHHAHGHHHHHHQQQEDGEDDREDGESDDESGQ

SEQ ID NO: 72170 - protein, 229 aa, Zea mays
  Coding DNA Sequence Number=SeqID_30391
  Homolog annotation: Hit_ID=O80401; Match level="QueryCoverage=13%, HitCoverage=6%, E-value=2e-07, Identity=93%"; Hit description=SAR DNA binding protein
MAVGEAVCRWAHRTVRCASHVTQPLGFDHWSSDRLGHRRVTVHCLTTVGAVAVAPHGTPDSPLNYSGVALQKPEAEQFRVDLPGAPDTVRWCTGQRTVRGEMTYNPAADLVLGQSTEETPKKSELASKKRKHHEAEAAPTAEPEEDGGQEDRKKKKKSKESDESPAAEADGEKKRKRKSKEGEEPAVAASEGEKKKKKNKSDADGEDVAVQTEASGKKDKKKKKKRHCR

SEQ ID NO: 72171 - protein, 232 aa, Zea mays
  Coding DNA Sequence Number=SeqID_30392
  Gene Ontology: Mol. function=structural constituent of ribosome; Cellular component=ribonucleoprotein complex; Biological process =translation
  Homolog annotation: Hit_ID=O65037; Match level="QueryCoverage=99%, HitCoverage=100%, E-value=2e-56, Identity=55%"; Hit description=50S ribosomal protein L27, chloroplast precursor
  Pfam annotation: Domain name=Ribosomal_L27; Domain location=56-178; Score=144.4; E_value=3e-40; Accession=PF01016.9; Description =Ribosomal L27 protein
  Subcellular localization annotation: CTP_CleavageSite=28; ConfidenceScore=5.66e-01
MASMAFALAGAFKGLSLAPTTTTSSFPRCDRASLSVGGAAGVPVPVPARRLTIQMAHKKGAGSTKNGRDSKGQRLGVKIYGDQLAKPGAIIIRQRGTRVLPPSCSLRFPYLLLVCFGLSILTTDQYLHTDYGLRMLESYDVYPGNNVGMGKDHTLFSLIDGLVKFEKYGPDKKKVSVYPYEKEPENPNSYRARKREYFRMRRERKKARAEGAAEPQLVLAAVDENSEVSADC

SEQ ID NO: 72172 - protein, 192 aa, Zea mays
  Coding DNA Sequence Number=SeqID_30393
  Gene Ontology: Mol. function=protein serine/threonine kinase activity; Cellular component=membrane; Biological process=protein amino acid phosphorylation
  Homolog annotation: Hit_ID=Q6H459; Match level="QueryCoverage=94%, HitCoverage=20%, E-value=5e-30, Identity=44%"; Hit description =Putative wall-associated kinase
MQKRMSSPGRWVDGSEYAIITAVQGTFGYLDPEYYHTGQLTDKSDVYSFEVILAELLTRNKPIIEKGNGEKENLSNYLWEAKEKPLEEIVDGQVWEEASKEAVVCFARLALECLDLRREARPTMKDVELRLQLLKAKARAAASGPRADGEFHPPGETGRRTRRYGVVPVTAQDGTRQYSLEQEIASSLWIPR

SEQ ID NO: 72173 - protein, 146 aa, Zea mays
  Coding DNA Sequence Number=SeqID_30394
MAKVGLRTAPGRCKRAALHRRRAGNWVDTGTRNRGFDGRGDGRKQRRVRRRHWIRCGTVCETGAKADAAADACGVAVLREDCAARHERPGSDPTRAMVGTAGIRRAGRGGRGGTGGRMCEGGNGGEAGAAGFAIGRTWVCTPTLDT

SEQ ID NO: 72174 - protein, 100 aa, Zea mays
  Coding DNA Sequence Number=SeqID_30395
MRLSPALSVLVHGPDLLHANGIHLDRHRLNNGVLATNSTGRNCWWDLYKNVSMTRVRMHGLLWNFRYFRFRYLRSEFGELVPGLGIWYFGHSHQRLIDSI

SEQ ID NO: 72175 - protein, 428 aa, Zea mays
  Coding DNA Sequence Number=SeqID_30396
  Gene Ontology: Mol. function=pyridoxal phosphate binding; Biological process=amino acid metabolic process
  Homolog annotation: Hit_ID=Q2JIS3; Match level="QueryCoverage=52%, HitCoverage=65%, E-value=1e-68, Identity=54%"; Hit description =Aluminium resistance protein
  Pfam annotation: Domain name=Alum_res; Domain location=68-379; Score =243.7; E_value=3.9e-70; Accession=PF06838.2; Description=Aluminium resistance protein
  Pfam annotation: Domain name=Cys_Met_Meta_PP; Domain location=112 -303; Score=-297.7; E_value=0.087; Accession=PF01053.10; Description =CysMet metabolism PLP-dependent enzyme
  Pfam module annotation: Pfam domain module=Alum_res::Cys_Met_Meta_PP; Domain location=68-379::112-303
MAVEEGRRGRRRHGAPGRGDRPHPEPHLGCLIRAGVRVGRDGRAVRGDADGCRDFTLDGVSVSEEEDLEGFYRRAVYRCSYMFAICVLAVLSILIKLGIRAPLRFTLVLCLASELTPQHFGGSTGYDHDDGGGRKALDSVFADIVGVEAAIVRPQFFSGTHAIACALFALLRPGHELLAVAGPPYDTLEEVIGIRGSANVGSLKDFGVTYREVPMQNPNCMVMVDNCYGEFVEISEPAMVGADLIAGSLIKNPGVTIAPCGGYVAGKEHLVEAAAARLSAPGLGVEFGSTPGHVMRALFQGLFLGPQMVGEAVKGGLLIAEVMSAKGYKVEPLPRVPRHDIVQIEMTITKAKIGVDPSGCVELAKHVRLNNPNLVLSGLMIIGMLDYSSTPKNFKALANCREDVCKELGIPEEQLELFVDMSSDFEQT

SEQ ID NO: 72176 - protein, 221 aa, Zea mays
  Coding DNA Sequence Number=SeqID_30397
  Homolog annotation: Hit_ID=Q6K990; Match level="QueryCoverage=31%, HitCoverage=7%, E-value=6e-18, Identity=86%"; Hit description =Putative phragmoplast-associated kinesin
MVGGSVEILGSLAIEADGGRHDRREVEWAGKHEGRDGGWGNAELDARGAGLQSWAGQDPRMSARRAGWRLARLTARRSSWWLPGWCGARPTEIVATRRMEVAERIGDAVDPGAHEPAIEPLEVLLLRHRDAVEGEVATPVGVAAHGTAVPPHANSSADETPEVRFRMRPITSTGCSVAPPPSSALLHRHLPSRPPCAQQAMESPPGVAAWLEAEQTAPSSP

SEQ ID NO: 72177 - protein, 189 aa, Zea mays
  Coding DNA Sequence Number=SeqID_30398
MEQYPQPSQDYTTTPRLRDHAFDLLERDLSAFLSYDFVILIRALVCTKVQHKPKNNQVRDPNSKEQRNQSVLRNGATDSVRWATGQCPAPSAIIHRTVWCTTGLSGAPAEQRLSNATVDCKKSADSVTVKNNAWQSQSAESEAHRTVNRTCPVPQEDNSANGRLLPNPNDCVTWWRTRTAYSGRFGGAL

SEQ ID NO: 72178 - protein, 175 aa, Zea mays
  Coding DNA Sequence Number=SeqID_30399
MTRGSRNLIPRRGPICHRPTQNPTPHRLVVHGENSLSRFLVPAVTLSNPRSGGNHRNTACKFHSSAFGLPHRATVPSARIGKPAFRAPEVAANPNPTARRRRSCGGSVGHVDGLGQLVAQRRRLQEFPPDHPRPTRTYRFSSYPYHNTTEAHLVLNCNGIKLAMWATQHHCARVL

SEQ ID NO: 72179 - protein, 248 aa, Zea mays
  Coding DNA Sequence Number=SeqID_30400
MENFGIHGYFIGSFAIPIGRYILIVVPSHATNELHPLYVSTGSAVPLPSKVFNNNCYEDGYSSEITARFSIISFCGNVLICPTNVPFGKGSSTSGASNKQCFLKSTQEFTPQRLSGCGQTAVTFTLISVASITWDFLSWADVFTRRGRSATRGWTVRDLVTNPARNLTDSAHARTVRATTVDCPDRGPSGLRAGPFVVSNICQKYVDTFSGANHYNENRWWWPLQRRGRSAGRGRTVCDLVQGLGFPA

SEQ ID NO: 72180 - protein, 109 aa, Zea mays
  Coding DNA Sequence Number=SeqID_30401
  Subcellular localization annotation: CTP_CleavageSite=20; ConfidenceScore=5.07e-01
MTSSLPARPRGGGGLPARPRGGAAAGSPIESRKPVSWRAPTPGKEASWTGTAQGGARRGGVSSRQRDGVDQIRWHCGPCWLAGEQRKGGHVDREERGERMSAGHHRHND

SEQ ID NO: 72181 - protein, 95 aa, Zea mays
  Coding DNA Sequence Number=SeqID_30402
MGSRNMSDNLRVELDPITENRVHGSIEGHKKALDSLTVVKSDAHNGHGDTGRSRESGGTGGQGRPPGGRRNTMESRGMCAGVVYDGNYKGLTPKP

SEQ ID NO: 72182 - protein, 49 aa, Zea mays
  Coding DNA Sequence Number=SeqID_30403
MPDKGGGGQMSTQVTGSMLVAVEEGAANKSPSGEDDELRILLLLTVRAS

SEQ ID NO: 72183 - protein, 104 aa, Zea mays
  Coding DNA Sequence Number=SeqID_30404
  Gene Ontology: Mol. function=protein binding; Biological process =vesicle docking during exocytosis
  Homolog annotation: Hit_ID=Q7XWP3; Match level="QueryCoverage=73%, HitCoverage=11%, E-value=5e-30, Identity=87%"; Hit description =Probable protein transport Sec1a
MGYSAVEPTVCNRKVPGSSSSLCILCGDSVLKHASSDFRKLGQRLFIFVIGGATRSELRVAHKLSGKLKREIILGSSSLDDPPQFITKLKMLSTEELSLDDLQI

SEQ ID NO: 72184 - protein, 110 aa, Zea mays
  Coding DNA Sequence Number=SeqID_30405
  Homolog annotation: Hit_ID=Q8S1P4; Match level="QueryCoverage=94%, HitCoverage=40%, E-value=1e-38, Identity=75%"; Hit description =Membrane protein COV-like
  Subcellular localization annotation: CTP_CleavageSite=45; ConfidenceScore=5.27e-01
MPEEESTSIPLSQAAEAVDPEDPAKSPPRPSSPTTSTRKACCAVLQSWVSRKFMTGCVVLFPVAVTFFITWWFIQFVDGFFSPLYAKLGINIFGNPCTNTSNFLYMVIVN

SEQ ID NO: 72185 - protein, 770 aa, Zea mays
  Coding DNA Sequence Number=SeqID_30406
  Gene Ontology: Mol. function=identical protein binding; Cellular component=cellulose and pectin-containing cell wall; Biological process=negative regulation of enzyme activity
  Homolog annotation: Hit_ID=Q5N955; Match level="QueryCoverage=98%, HitCoverage=100%, E-value=0.0, Identity=64%"; Hit description =Putative subtilase
  Pfam annotation: Domain name=PA; Domain location=371-464; Score=24.4; E_value=0.00041; Accession=PF02225.12; Description=PA domain
  Pfam annotation: Domain name=Peptidase_S8; Domain location=127-591; Score=37.9; E_value=8.2e-09; Accession=PF00082.12; Description =Subtilase family
  Pfam annotation: Domain name=Subtilisin_N; Domain location=36-119; Score=73.9; E_value=5e-19; Accession=PF05922.7; Description =Subtilisin N-terminal Region
  Pfam module annotation: Pfam domain module=PA::Peptidase _S8::Subtilisin_N; Domain location=371-464::127-591::36-119
MAQAAWHPRPSLRLLLLLINACAVLNSPVAARAERTGYIVHMDKSAMPRHHSDHRDWYAATVASVTDASAGVRTKPQLLYTYDEALHGFAATLSASELRALRGQPGFVSVYPDRRATTLHDTTHSMEFLNLNSASGLWPASKFGEGVIIGMIDTGLWPESASFNDAGMPPVPSRWRGTCEPGVQFTPSMCNRKLVGARYFNRGLVAANPGVKISMNSTRDTEGHGTHTSSTAGGSPVRCASYFGYGRGTARGVAPRAHVAMYKVIWPEGRYASDVLAGMDAAIADGVDVISISSGFDGVPLYEDPVAIAAFAAMERGILVSASAGNEGPRLGRLHNGIPWLLTVAAGTVDRQMFVGTLYYDDAMRGTIRGITTYPENAWVVDTRLVYDDVLSACDSTAALANSTTALVVCRDTGSLTEQLNVVAEAGVSGAIFISADGADFDDSMPLPGIIISPEDAPRLLSYINSSTVPTGAMKFQQTILGTRPAPVVTHYSSRGPSPSYAGVLKPDILAPGDNILASVPPTIPTAMIGQTRLASDFLVQSGTSMACPHASGVAALLRAVHPSWSPAMIKSAMMTTATTADNTGNPITADVVGNTTVASPLAMGSGQVDPNAAMDPGLVFDAGPGDFVALLCAANYTKAQVMAITRSSASAYNCSSASSDVNYPSFVAAFGFNASSGAMQFRRTVTNVGVGASVYRASWVSPSNANVSVSPGTLEFSALGQTATFQVGIELTAPTGGEPTFGDIVWADASGKYRVRTPYVVLSGLPYPS

SEQ ID NO: 72186 - protein, 38 aa, Zea mays
  Coding DNA Sequence Number=SeqID_30407
MVDEVQIIKKIAYVDANDTRVAEMGVGLAVGMGAGMDV

SEQ ID NO: 72187 - protein, 152 aa, Zea mays
  Coding DNA Sequence Number=SeqID_30408
MLPLHVAAAVVVTMLAFPAAVVLGIATDEDCKCFMCVCDLDPHPLPPEVPTHHPPPAQPEPVPSPPPPPPSPSPPPPAPALPVYYPPQTGYYYYPPQPYGYPAGEMYPRDDNRRESKSDAARRHGSCGRASLALAAALACGVLALLLRSAAA

SEQ ID NO: 72188 - protein, 112 aa, Zea mays
  Coding DNA Sequence Number=SeqID_30409
  Gene Ontology: Mol. function=structural molecule activity
  Homolog annotation: Hit_ID=Q6AT64; Match level="QueryCoverage=74%, HitCoverage=14%, E-value=7e-20, Identity=65%"; Hit description =Putative ankyrin
MTTYPLELVELTAKTKRDKCTTSCACVDSVSIDAILEQHLDDVGVVLANDEVEQCAVRLVYGVCNTSLGLSVVEHLLELLDRTVIDNKSRGHKCSYKARPDSIVHKQLLRPR

SEQ ID NO: 72189 - protein, 121 aa, Zea mays
  Coding DNA Sequence Number=SeqID_30410
  Subcellular localization annotation: CTP_CleavageSite=46; ConfidenceScore=5.30e-01
MPPPFRDAIRPSPAIPTAGKMSPWLHSTHDARPSLCPRPLSPRHPRSAPARALSPLEPPPSSMGHQAGAASEGAVLGDWGINYLLLVGAWGSPSTSPPLTPLLSRSPPREPSENSDVLVYE

SEQ ID NO: 72190 - protein, 899 aa, Zea mays
  Coding DNA Sequence Number=SeqID_30411
  Gene Ontology: Mol. function=hydrolase activity, hydrolyzing O -glycosyl compounds; Cellular component=chloroplast; Biological process=carbohydrate metabolic process
  Homolog annotation: Hit_ID=Q5VN31; Match level="QueryCoverage=99%, HitCoverage=100%, E-value=0.0, Identity=79%"; Hit description =Putative 1,4-alpha-glucan branching enzyme
  Pfam annotation: Domain name=Alpha-amylase; Domain location=386-720; Score=-62.4; E_value=0.00076; Accession=PF00128.14; Description =Alpha amylase, catalytic domain
  Pfam annotation: Domain name=Alpha-amylase_C; Domain location=801 -894; Score=80.7; E_value=4.4e-21; Accession=PF02806.8; Description =Alpha amylase, C-terminal all-beta do
  Pfam annotation: Domain name=Isoamylase_N; Domain location=125-212; Score=11.5; E_value=0.0093; Accession=PF02922.8; Description =Isoamylase N-terminal domain
  Pfam module annotation: Pfam domain module=Alpha-amylase::Alpha -amylase_C::Isoamylase_N; Domain location=386-720::801-894::125-212
  Subcellular localization annotation: CTP_CleavageSite=49; ConfidenceScore=5.33e-01
MASCPLFLLVPRPPPSLVGADRCPGSAGCSDLPTSCRPHPGRRHGYPFRCNSSSSSSAPRERPPRQRPGGRGDAIDPVGFLTKLGVSDRAFAQFLRDRHKALKDRRWELCSRFIDLKEASSGFELLGMHRHRQHRIDFMEWAPGARYCSLIGDFNQWSPTENCAREGHLGHDDFGYWFIILEDKLREGQEQDEYFFQEYNYVDDYDKGDNGIDADEIMRRMKEEYWEPGEIRSRQSQLEMVVKLYEQMFGPNGPQTEEELGEIPDAQTRYNEFKASQKADSSSQPSYDIIDNGQEFDIFSVVTDRASFEKFQAKKPPLAYWVEMRKGRIAWLEKYVPTISHKDKYRVYFNTPDGALERIPAWAAYVLPDAEGKQSYAVHWEPPPEEIYKWRFGRPKVKGSLRIYECHVGISGSEQKVSSFQEFTSKVLPHIKKAGYNAVQLIGVVEHKDYSSIGYKVTNYFAVSSRFGTPDDFKKLVDEAHGLGLVVLLDIIHSYASADELVGLSLFDGSNDCYFHSGKRGHHKYWGTRMFKYDDVDVLHFLLSNLNWWVTEYRIDGFQFHSLSSMLYTHNGFSTFTGAMEEYCNQYVDKDALIYLILANEMLHRLHPDIVTIAEDATFYPGLCEPITQGGLGFNYWVNLSIPEMWLWHLENVPEQEWSMNKIIKVLVSSNQNMLSYVENHNQSISGRKSFAEIILNSRECSVGSVDDNLIRASSLLKLMKLITFTTSGGAYLNFMGNEFAHPEKVEFPMPSNDYSFELANRQWELLDKVFHKHIFNFDKDVMSLDENERIISRGPPNILHCDDTSMVISFTRGPLFFIFNFNPQVSHQSYRVGVDEAGEYQLIFNTDETKYGGCETLKSSQYMRRTSDKRADGCRNSLELALPSRSAQIYKLVRILRI

SEQ ID NO: 72191 - protein, 96 aa, Zea mays
  Coding DNA Sequence Number=SeqID_30412
MGATHVPHPAPSERMSMTWELHLQCWDVGIHATVVGEEDLSRAIDRGGDDMIHRLRNQEDRVLNVNRCPEAIDPFVFSSYQQKPQGPQSPIFYAVA

SEQ ID NO: 72192 - protein, 137 aa, Zea mays
  Coding DNA Sequence Number=SeqID_30413
MVIPHRFKDTRSHHAAEQKEQQLRTVRAAFGLDRENVHKRGEKEEGRRLILDRTNLRSVKQTQCIQLEGKRHRLIGRCPLMLYRIRAVAWTLEGEAAPPLSGRRRPEKKLLEEDADDADDPETSRRDCLFQIIDYII

SEQ ID NO: 72193 - protein, 406 aa, Zea mays
  Coding DNA Sequence Number=SeqID_30414
  Gene Ontology: Cellular component=integral to membrane; Biological process=defense response to bacterium
  Homolog annotation: Hit_ID=Q8LR09; Match level="QueryCoverage=68%, HitCoverage=100%, E-value=1e-101, Identity=74%"; Hit description =Senescence-associated protein-like
  Pfam annotation: Domain name=MtN3_slv; Domain location=169-261; Score= 39.7; E_value=9.7e-09; Accession=PF03083.6; Description=MtN3saliva family
  Pfam annotation: Domain name=MtN3_slv; Domain location=295-381; Score= 116.8; E_value=6.4e-32; Accession=PF03083.6; Description=MtN3saliva family
  Pfam module annotation: Pfam domain module=MtN3_slv::MtN3_slv; Domain location=169-261::295-381
MLQPLSVRATAPWTLHASGPTPQLFSPTPYDGMNSNDNNTGNWKAILTAPEAHPDKHKPATTFRNTSSRTYITCGPRTSLPPRAANLQPPSQILVLASRRLASARSKSPAALASHQTPPPPPATEDDLSGCSPQRRRHHRQCHLLWPLPLPSVSTDRSLRVSTSEPGGFNLVRVLFVLTERRRMHFYLCSLTFWRICKARDVEEFKPDPYLATLLNCMLWVFYGIPVVHPNSILVVTINGVGLVIEAIYLTIFFLYSDGPKRRKAFGILAVEILFMVAVVLGVILGAHTHEKRSMIVGILCVIFGSMMYASPLTIMSRVIKTKSVEYMPFLLSLVSFLNGCCWTAYALIRFDLYVTIPNALGAFFGLIQLILYFCYYKSTPKEKNVELPTVSSNAGGGNVTVSVER

SEQ ID NO: 72194 - protein, 98 aa, Zea mays
  Coding DNA Sequence Number=SeqID_30415
MKKRNPQLEQFLSEPFSSSVVLKGGLMLTEDSTIKDLDDAFQDADTYYQSEDQSAAVVRYFSLSQWSGVLILRYTALLRIREKKWSGVRCSLSAKIQG

SEQ ID NO: 72195 - protein, 91 aa, Zea mays
  Coding DNA Sequence Number=SeqID_30416
  Subcellular localization annotation: CTP_CleavageSite=25; ConfidenceScore=5.17e-01
MTISSKFEFLPNSSYNSDKEFLSIYSSSGATRNIAVTGSARALSPRFWFVDWISYSLLICETNKMSNSNVRLKGLVGSPHNLLKIRYLIGQ

SEQ ID NO: 72196 - protein, 215 aa, Zea mays
  Coding DNA Sequence Number=SeqID_30417
  Gene Ontology: Mol. function=DNA binding; Cellular component=nucleus; Biological process=regulation of transcription, DNA-dependent
  Homolog annotation: Hit_ID=Q9AVV5; Match level="QueryCoverage=88%, HitCoverage=74%, E-value=2e-38, Identity=48%"; Hit description=MCB2 protein
  Pfam annotation: Domain name=Myb_DNA-binding; Domain location=43-90; Score=52.5; E_value=1.5e-12; Accession=PF00249.21; Description=Myb -like DNA-binding domain
MKQLRLRDTNASLHIIESLLGWSVAADVSKQKQYSGYIPTTPGVPWSEEEHRQFLAGLDKLGKGDWRGIARSYVPTRTPTQVASHAQKFFLRQSSMGKKKRRSSLFDMRQVPICENSASISDPLDVARHGVASADSERAAVDVDLMNSTTEGDDGRSRDVVSSASGAGTALRFPAAAAQTEPLHPSSSHGHGRGHHCSPLDLELGMSLPAPSVGT

SEQ ID NO: 72197 - protein, 56 aa, Zea mays
  Coding DNA Sequence Number=SeqID_30418
MACSPAPASPFSIDAAAVRKILMSILDPLLGAIAYGAEVTQVGAIAYGAEIFCLYP

SEQ ID NO: 72198 - protein, 249 aa, Zea mays
  Coding DNA Sequence Number=SeqID_30419
MAMTERRLLTARCRPWQWQCRFGMEIGEWGITHEGERCYTQNGEGLVDFRRPGARNTKATVTTRALLLKRARVEPPWVAWPHLNNVDNQGHHYIYQGEIVPWFPINTPALYPDGRSVPLAANNSFILRTFGREGDPNIALVEDTPHEALEDEAFDNKRHRQENLPTPRALFAHAALRDYLGHLRQASPPEADDIIKDGEVLGISAEDQLKLRALRIKSNHLQKQKEILAVKSQRIAMQAKVKQMILDDE

SEQ ID NO: 72199 - protein, 136 aa, Zea mays
  Coding DNA Sequence Number=SeqID_30420
MAEPGPRLPCPLPYVTSLTYVHADKRIPRKCREASLWSMFKWSAKGQNKNHHRLCGVILNMKRFQELWMEEKVKLRAILVSCSIEDFNRRLSSFPPTLNQVDNGTLNNRVMRKTTQVDPKRGLLRRMVLMDESEDG

SEQ ID NO: 72200 - protein, 115 aa, Zea mays
  Coding DNA Sequence Number=SeqID_30421
MSRRLSRQRKTERRPWEREDNRARRWEIRPGWESDDRASDGWAEGERELETSSAGRKTRQGAARRGAGRDLSWAPWETREKLGAQSSTASSRGNRAGAGRWVGATGAGEGEQGTT

SEQ ID NO: 72201 - protein, 129 aa, Zea mays
  Coding DNA Sequence Number=SeqID_30422
  Subcellular localization annotation: CTP_CleavageSite=63; ConfidenceScore=5.57e-01
MSGAPRKLGLLNSPASGSRGSRSAKIHRTVRARRSQNRPYRCTGHQTVHVRCAPDTQEGPQVRSSNGQNPTAVMTWQGHRTVRRGDVPFDVRCTGMGDSDFSARCARIKCTQGAVAPQGAVAPLAHRTV

SEQ ID NO: 72202 - protein, 301 aa, Zea mays
  Coding DNA Sequence Number=SeqID_30423
  Gene Ontology: Mol. function=polygalacturonase activity; Cellular component=amyloplast; Biological process=carbohydrate metabolic process
  Homolog annotation: Hit_ID=Q5JJQ9; Match level="QueryCoverage=91%, HitCoverage=56%, E-value=5e-85, Identity=61%"; Hit description =Putative polygalacturonase PG1
  Pfam annotation: Domain name=Glyco_hydro_28; Domain location=56-301; Score=-14.9; E_value=2e-08; Accession=PF00295.8; Description =Glycosyl hydrolases family 28
  Subcellular localization annotation: CTP_CleavageSite=17; ConfidenceScore=5.46e-01
MRSSVASAALLVTCLVVAAAARSTGRTTLSVLSFGAAGNGVTDDAQALVAAWQVACRVPRATVLVLPSGHRFLLSPVTLQGPCSAKLTLQIDGTVLAPPEMGSWPKPRRPLQWLNFKWLQGFSIQGTGAVDGGQQNLDLDMKCCLSITHFYLQTSTGTGHWHSPGVKPTLIRFYNSFNVSVRNIRISNSPQCHLKFDSSGGIRVKNVTISSPGDSPNTDGIHLQNTKDVEIRSSTIGCGDDCVSIQTGCSNVHMKNVVCNPGHGISLGGLGKDNSLACVSDVVAENIVVQNALYGVRSRRG

SEQ ID NO: 72203 - protein, 77 aa, Zea mays
  Coding DNA Sequence Number=SeqID_30424
MASGLAWVASQACHKDGTLMAVSGTGAESQQGRENHTPNDGALRAQPTTLRSQHEPYSAHQECGPALKGTKEDKARN

SEQ ID NO: 72204 - protein, 612 aa, Zea mays
  Coding DNA Sequence Number=SeqID_30425
  Gene Ontology: Mol. function=protein serine/threonine kinase activity; Cellular component=membrane; Biological process=protein amino acid phosphorylation
  Homolog annotation: Hit_ID=Q9FNE1; Match level="QueryCoverage=93%, HitCoverage=90%, E-value=1e-102, Identity=39%"; Hit description =Receptor-like serine/threonine kinase
  Pfam annotation: Domain name=DUF26; Domain location=193-246; Score =44.3; E_value=4.2e-10; Accession=PF01657.8; Description=Domain of unknown function DUF26
  Pfam annotation: Domain name=DUF26; Domain location=82-135; Score =69.9; E_value=8.3e-18; Accession=PF01657.8; Description=Domain of unknown function DUF26
  Pfam annotation: Domain name=Pkinase; Domain location=311-572; Score =95.4; E_value=1.7e-25; Accession=PF00069.15; Description=Protein kinase domain
  Pfam annotation: Domain name=Pkinase_Tyr; Domain location=308-572; Score=58.8; E_value=4.4e-16; Accession=PF07714.7; Description =Protein tyrosine kinase
  Pfam module annotation: Pfam domain module=DUF26::DUF26::Pkinase::Pkin ase_Tyr; Domain location=193-246::82-135::311-572::308-572
MRCYRCFLLAPVVIACFFSRITTTTLADPRATVVRELCNKTKDDGPGAVWANNFVVAFDNLNSDLEQKGWGVTSVGQDPITFYALVQCLEDLSTVDCTLCYSEIRSLLPKCYPEIGGRIYLDGCFMRYANYSFFGEAVDSLDTSVCSSSNRSSEKRGFGSAVDAVLSNVTSLAVKSGKGFAVTSAFGSTEFAAYALAQCWENLNTSSCAACLSAAAGSVAKCAPAEEGRALFAGCFVRYSTAPFWNSEDSGSSSKKHVVPWTVLGFSVGLVLVLIGSVLAWRKKKKACRAGEGSLRARLQRAWHSKRLQQFHTQAVLPGGNEVAAKRLFLNTKQCLDQFFNEVDVISQVRHKNLVKLLGCSVDGPESFLIYEYHLNRSLDLSIFADGQQKRRLDWQQRFDVIFGVAEGLCYLHEESETRIIHRDIKASNVLLDQKLKPKITDFGLARVLCGDRTHLTTGIAGTVGYMAPEYVVHGHLTKKADVYSFGVLAVEIVTGKRCCGSTGSHSGHSLLAQVWHSYKTNTTEKVVDTRLQQESAPLDLEEITRVVQVGLLCTQANPDERPAMSRVVELLRDRDGERGDADFILGDPPFFEVEIDAAGGGVDGEACTLLP

SEQ ID NO: 72205 - protein, 193 aa, Zea mays
  Coding DNA Sequence Number=SeqID_30426
  Gene Ontology: Mol. function=ATP-dependent helicase activity; Cellular component=nucleus; Biological process=mRNA catabolic process, nonsense-mediated decay
  Homolog annotation: Hit_ID=Q5JKF3; Match level="QueryCoverage=80%, HitCoverage=20%, E-value=6e-31, Identity=47%"; Hit description =Putative ATP-dependent RNA helicase DB10
  Pfam annotation: Domain name=WW; Domain location=56-86; Score=33.7; E_ value=6.6e-07; Accession=PF00397.16; Description=WW domain
MMNYKCTFGLKEREYKRDAKVNAKSARPKIRPALMSGASGSTGRAAPRYAPDDLTLLKPWRGLVDGTTGYLYYWNPETNVTQYERPMPPENQLPPPPPPLPPPPPRSRDRRDRSRSRSRTPPRRDRRDRDRDDEHASSKTASSHHHPAPIAVADYPSTEAYRRRHEITVTGDNVPAPITSFEAGGFPSEILKE

SEQ ID NO: 72206 - protein, 220 aa, Zea mays
  Coding DNA Sequence Number=SeqID_30427
  Homolog annotation: Hit_ID=Q2QXG2; Match level="QueryCoverage=27%, HitCoverage=23%, E-value=4e-16, Identity=70%"; Hit description =Uncharacterized plant-specific domain TIGR01568 family protein, expressed
  Pfam annotation: Domain name=DUF623; Domain location=141-200; Score =67.8; E_value=3.5e-17; Accession=PF04844.4; Description=Protein of unknown function, DUF623
  Subcellular localization annotation: CTP_CleavageSite=45; ConfidenceScore=5.78e-01
SRWGGAAGTRRWSTPSAGAGPRRPRLLSLPSFLRRPCSQLMDGVKAAATTTTTRGGVGEQYSSCASTSTAASSAATRSTGGYASAYSSDYYYCYPSRVAYGAGAAAKAQQATKKKKKEKEKRGEKAEAEADGLGVAVEKESSDPRADFRDSMVQMVLEMGLCDWDGLRGMLRRLLALNAPRHHAAILTAFAEVCAQLAGAAAAAAPPAHPSPPAPCQYRR

SEQ ID NO: 72207 - protein, 644 aa, Zea mays
  Coding DNA Sequence Number=SeqID_30428
  Gene Ontology: Mol. function=RNA-directed DNA polymerase activity; Cellular component=intracellular; Biological process=RNA-dependent DNA replication
  Homolog annotation: Hit_ID=UPI00004C1731; Match level="QueryCoverage =99%, HitCoverage=47%, E-value=0.0, Identity=81%"; Hit description =UPI00004C1731 related cluster
  Pfam annotation: Domain name=RnaseH; Domain location=312-439; Score =3.6; E_value=2.7e-05; Accession=PF00075.14; Description=RNase H
  Pfam annotation: Domain name=rve; Domain location=441-616; Score =91.8; E_value=2.1e-24; Accession=PF00665.16; Description=Integrase core domain
  Pfam module annotation: Pfam domain module=RnaseH::rve; Domain location=312-439::441-616
MPFGLRNARATYQRCMNHVFGKHIGRTDEAYVDDIVVKTRKASDLLSDLEVTFRCLKAKGVKLNPEKCVFGVPRGMLLGFIVSERGIEANPEKIATIVSMGPIKDLKGVQRVMGCLAALSRFISRLGERGLPLYRLLRKVECFTWTPEAEEALGNLKALLTNAPILVPPAAGEALLIYVAATTQVVSAAIVVERQEEGHALPVQRPVYFISEVLSETKIRYPQVQKLLYAVILTRRKLRHYFESHPVTVVSSFPMGEIIQCREASGRIAKWAVEIMGEAISFAPRKAIKSQVLADFVAEWVDTQLPTAPIQPELWTMFFDGSLMKTGAGVGVLFISPLGKHLRYVLRLHFPASNNVAEYEALVNGLRIAIELGVRRLDARGDSQLVIDQVMKNSHCRDPKMEAYFDEVRRLEDKFYGLERNHIARRYNETTDELAKIASGRTTVPPDVFSRDLHQPSVKIDDTPEPEAPSAQPEKAPGGYTHLLVAIDKFSKWIEVRPLNSIRSEQAVALFTNTIHRFGVPNSIITDNGTQFTGRKFLDFCENHHIQVDWAAVAHPMTNGQVERANSMILQGLKPRIYNDLNKFGKRWMKELPSVVWSLRTTPSRATGFTPFFLVYGAKAILPTDLEYGSPRTRAYTDQSNQAN

SEQ ID NO: 72208 - protein, 283 aa, Zea mays
  Coding DNA Sequence Number=SeqID_30429
KIEVRQARRYAKLSPVSSRCGQAEQAGCRASREHAAKSELAERMAGSWGIIVARAGTGYGKHRDTDARGQQESSRELDCAVTRERLTGRARSRGREGDALEKTGGRRRSCTAGIELRGARASRERRVEGDAHAWIRSRPRRVGERAKGCSRLEADDHGSRVPRDHYGRRAEKLARAGREREGAVMVELGMRRPWETRRRRPSELETGRALDHGQGLAALDTRKSARRKKKREMGMGVADEQRGEGGVWHGRGANTRELSVQERQVRRARYAEEGEEGDGRAVC

SEQ ID NO: 72209 - protein, 46 aa, Zea mays
  Coding DNA Sequence Number=SeqID_30430
MEQRSMKAKGRNRLGQNAKRETLPHAPELSQEIPFDGHQGPRQPSL

SEQ ID NO: 72210 - protein, 128 aa, Zea mays
  Coding DNA Sequence Number=SeqID_30431
  Subcellular localization annotation: CTP_CleavageSite=45; ConfidenceScore=5.40e-01
MAHRGASVLRSRRHHDHLGVITPRDTSSSNSNSSSSHNSKSDDRHASRVTGRSRVPRLLPPLLLRSRLLRQIPGPPTGLALGSKNLLRVVLAVRPRLLPRQLQRLPIPQPGNRRQRQQRRLASRRWRK

SEQ ID NO: 72211 - protein, 275 aa, Zea mays
  Coding DNA Sequence Number=SeqID_30432
MSIASDYAIQLPMHVRSSINMLPTVHTEIILTSRQSIRAMKTKDLFMLIKRNDERILEEHYHDLSQFEIVAHRTCRVNTVPSRLDRAYCDDGASGIISSPNPILVHASLTRTRADVGTTAGRIFHLKPGPARPLGSGGEETRKSPSGHLPPPCSRMLLTIFSLGPTSRALLWAAPPSFLVPPTRSTLLRPAMSALPLTSGEPFRVFVGYTRGSTRRTRWAATACVLSRGSRWTCAPSDRMRDLGNTFPGVEVIWEGLTCRDCHEGERGTTAMDGS

SEQ ID NO: 72212 - protein, 143 aa, Zea mays
  Coding DNA Sequence Number=SeqID_30433
MNVCELTLAILTFPPGQGQQMLLGCLHRSCSRKMMHSKNYDWIPTISIITQATVVSPNVGRDIVVTIINIVEGFIYHIDISEQTEEGVEIDSNPSGDESDDEEKHDDSEDESTSSQGTFSRISSANDDYRENETKDVGEEEIR

SEQ ID NO: 72213 - protein, 1213 aa, Zea mays
  Coding DNA Sequence Number=SeqID_30434
  Gene Ontology: Mol. function=nucleoside-triphosphatase activity; Cellular component=integral to membrane; Biological process =proteolysis
  Homolog annotation: Hit_ID=Q8GU89; Match level="QueryCoverage=97%, HitCoverage=95%, E-value=0.0, Identity=63%"; Hit description =Pleiotropic drug resistance protein 4
  Pfam annotation: Domain name=ABC2_membrane; Domain location=484-696; Score=192.4; E_value=1e-54; Accession=PF01061.14; Description=ABC-2 type transporter
  Pfam annotation: Domain name=ABC_tran; Domain location=159-382; Score= 70.9; E_value=4.1e-18; Accession=PF00005.17; Description=ABC transporter
  Pfam annotation: Domain name=ABC_tran; Domain location=865-1052; Score=93.2; E_value=7.6e-25; Accession=PF00005.17; Description=ABC transporter
  Pfam annotation: Domain name=DUF258; Domain location=37-249; Score= -159.6; E_value=0.0033; Accession=PF03193.7; Description=Protein of unknown function, DUF258
  Pfam annotation: Domain name=PDR_assoc; Domain location=701-763; Score=112.9; E_value=9.3e-31; Accession=PF08370.2; Description=Plant PDR ABC transporter associated
  Pfam module annotation: Pfam domain module=ABC2_membrane::ABC _tran::ABC_tran::DUF258::PDR_assoc; Domain location=484-696::159 -382::865-1052::37-249::701-763
MCSRGSRPGSRTRRRTTRRRCGGRRWSGCPRTTRVRRGILALHDAGGEKVEVDVGRLGARESRALVERLVRAADDDHERFLLKLKERMDRVGIDYPTIEVRYENLHVEAQVHVGDRGLPTLINSVTNTIESIGNALHVLPSRKQPMTVLHDVSGIVKPRRMTLLLGPPGSGKTTLLLALAGKLDKDLRVSGKVTYNGHGMNEFVPERTAAYISQHDLHIGEMTVRETLAFSARCQGVGTRYEMLTELSRREKAANIKPDHDIDIYMKASAMGGQESSIVTDYILKILGLEVCADTVVGNEMMRGISGGQRKRVTTGEMLVGPARALFMDEISTGLDSSTTYQIVNSLRQTIHILGGTAVISLLQPAPETYNLFDDIILLSDGHVVYQGPREHVLEFFEFMGFRCPARKGVADFLQEVTSRKDQGQYWCRQDRPYRFVPVKKFADAFSTFHVGRSIQNELSEPFDRTRSHPAALATSKFGASRMELLKATIDRELLLMKRNAFMYIFKAVNLTVMSFIVMTTFFRTNMKRDASYGSIYMGALFFALDTIMFNGFAELAMTVMKLPVFFKQRDLLFFPAWAYTIPSWILQIPITFLEVGVYVFTTYYVIGFDPSVIRFFKQYLLLLALNQMSSALFRFIAGIGRDMVVSHTFGPLALLAFQTLGGFILARPDVKKWWIWGYWISPLSYAQNAISTNEFLGHSWSKIENGTTVGIRVLRSRGVFTEAKWYWIGLGALVGYALLFNLLYTVALAVLSPFTDSHGSMSEEELKEKHANLTGEVAEGHKEKKSRRQELELSHSHSVGQNLVHSSEDSSQNRKGMALPFPPLSLTFNDIRYSVDMPEAMKAQGVAEDRLLLLKGVSGSFRPGVLTALMGVSGAGKTTLMDVLAGRKTGGYIEGDITISGYPKKQETFARISGYCEQNDIHSPHVTVYESLLFSAWLRLPSDVNLETRKMFIEEVMDLVELTSLRGALVGLPGVSGLSTEQRKRLTIAVELVANPSIVFMDEPTSGLDARAAAIVMRTVRNTVNTGRTVVCTIHQPSIDIFEAFDEVTDSSCYDVAREDHLFLMKRGGEEIYVGPVGQNSSRLIEYFEGIEGISNIKDGYNPATWMLEVTSSSQEEILGVDFSEIYRRSELYQRNKALIEELSAPPPGSSDLNFATQYSRSFFTQCLACLWKQKKSYWRNPSYTAVRLLFTIVIALMFGTMFWDLGRKTAV

SEQ ID NO: 72214 - protein, 103 aa, Zea mays
  Coding DNA Sequence Number=SeqID_30435
MAEVMHLRWYVGRWWFCALDGDEGIGLRLLPWRRGVDCVWGAKDMGEASAVHWKNDLAGWSCASSTMGFLLLDCCEAWIAARGCVSFCGSDGIFPYIAEALIG

SEQ ID NO: 72215 - protein, 349 aa, Zea mays
  Coding DNA Sequence Number=SeqID_30436
  Homolog annotation: Hit_ID=O82095; Match level="QueryCoverage=30%, HitCoverage=47%, E-value=2e-09, Identity=35%"; Hit description=MADS -box protein
  Pfam annotation: Domain name=SRF-TF; Domain location=11-61; Score =57.1; E_value=5.8e-14; Accession=PF00319.9; Description=SRF-type transcription factor (DNA-binding and dimerisation domain)
MARRDRRSGVRFIEDGRDRSLTFFKRRSGLFKAASDLSTLTGARVAVVLESESGRFSSFGTPEASPIVDAFLLGSAPTDLDTSEADKASITNLQNEVFQLEKDKAMEDKRRKESLARSSRKVQQASKVARYVYGSVDDLDATELFEMYRELSRVQQEISDRLPTTLLHDASKADAGGGRGRLRDPSLLRPTWWRASSLPVPATSMGGVIHVSSRCAAKVIWLPASELGDPPVTAGAAESVLLATSSPSGTAYHPSHIGRRAIPSTQDAGHLRKPRTLTPTTSVGIDIISGNSSHPSSLSPVMPSSSPTPHQQPSSLRAPPSDDSSPLSLSPRVSYPLHVGSPYHQQLPL

SEQ ID NO: 72216 - protein, 247 aa, Zea mays
  Coding DNA Sequence Number=SeqID_30437
  Gene Ontology: Mol. function=transferase activity, transferring groups other than amino-acyl groups; Biological process=flavonoid biosynthetic process
  Homolog annotation: Hit_ID=P24824; Match level="QueryCoverage=50%, HitCoverage=34%, E-value=6e-33, Identity=56%"; Hit description =Chalcone synthase WHP1
  Pfam annotation: Domain name=Chal_sti_synt_C; Domain location=104 -239; Score=108.3; E_value=2.3e-29; Accession=PF02797.6; Description =Chalcone and stilbene synthases, C-te
AKSPNQRKTPVVLDPYDTDFKSYQDLCTGRRPDVPCQRSPRDTTDDRAFIGAGAATFGRHDYPGSATTPWARLIGPVGFGTSVPASEVLGSDSGWSGSKARSSRLFGAHRTSSSTRWAPSTCLLLKVGVTFHVIKDVSGLIHKYICDAEDEAFKTLGMCERNSMLSGTHSAGRALIEQVEPKVGMDKGRISPTPSTPIRMRKRSAEDGQATTGEGLDWGVLFGFGPGLTVETVVLHSVPITTGAATA

SEQ ID NO: 72217 - protein, 74 aa, Zea mays
  Coding DNA Sequence Number=SeqID_30438
MNHAASVRIVLEAGSGKPHRRRLPPLHQRIASGSNHLYTSSDNDHHSEWFASSSVHLRVCVVARRSSPPSSYGG

SEQ ID NO: 72218 - protein, 264 aa, Zea mays
  Coding DNA Sequence Number=SeqID_30439
  Homolog annotation: Hit_ID=Q1SXL0; Match level="QueryCoverage=42%, HitCoverage=79%, E-value=4e-13, Identity=62%"; Hit description =Surfeit locus 5
MAVTFCLSFRPVVVRFPVTTDYTGADMLEDGRALSEKWKVTFVPTRLLLVGPSFDVRAIGPAHRSIVDTSSGPRKNLGSFTVLPTKFNLVQTDGSGWFFKLAEFYQDPEFDMVGAAATRDEQSRQRPRVRRGDGCGGVRRGAEAEVADVEGGPSRLQPRRQFLLPHQHRSSTSVRHPLESGSLKHSRLILTRNAMVRSTIRQCTTHRRPFRWRCALSAWGIEVLGQQAKGTERMLERIGQEVAASLKELEAHYYSYVVRSPSYD

SEQ ID NO: 72219 - protein, 176 aa, Zea mays
  Coding DNA Sequence Number=SeqID_30440
SVTLDPRLSATGFDPGQFLFGLTRDGYVFTRRTFLGRGLPLFIVVPRDIEAEVELLYSWLVRSNSCMTGDRLGACLIFLVLLSHAHPLSGYEGRIHVRGLLRTVLILPGTDSYSCRSHSTRTNDSLPLFMINYEYEFPRTQTRAGDTLNASRVKARSSRFNLAFGSPRWDLGHASF

SEQ ID NO: 72220 - protein, 138 aa, Zea mays
  Coding DNA Sequence Number=SeqID_30441
MTVLKLTLAIITSGQEQEPSEKYHEDEFRELSTTSSKVQLTWTVGALGSGLARSATRPSKLQMTSNNSGMVWTTGMDIRFESLDFIDNKEGEMMRASEDPSPLASDLLDKPEASATSDLTRRWTTMGRRARHDPIVLR

SEQ ID NO: 72221 - protein, 145 aa, Zea mays
  Coding DNA Sequence Number=SeqID_30442
  Homolog annotation: Hit_ID=Q5Z8B7; Match level="QueryCoverage=36%, HitCoverage=7%, E-value=3e-16, Identity=73%"; Hit description =Receptor protein kinase-like protein
MASSATPYLGELVPIMMYSISSVDMATLFFLGKFPDAKVSTEQLFYQTNARFMYAYNSGVLSSQDRAGANRIEENALVWTIEQKSSEFTLFDLSELLEATKSFAEENRLGQGGFGPVYKENGTVTGLLSALQVTTIIREHHDNRH

SEQ ID NO: 72222 - protein, 476 aa, Zea mays
  Coding DNA Sequence Number=SeqID_30443
  Gene Ontology: Mol. function=acyltransferase activity; Cellular component=plastoglobule; Biological process=metabolic process
  Homolog annotation: Hit_ID=Q1SYE9; Match level="QueryCoverage=99%, HitCoverage=64%, E-value=1e-100, Identity=42%"; Hit description =Esterase/lipase/thioesterase; Phospholipid/glycerol acyltransferase
  Pfam annotation: Domain name=Acyltransferase; Domain location=180 -348; Score=-3.5; E_value=0.0059; Accession=PF01553.11; Description =Acyltransferase
MAVTALLNYNIDNELDMAVSSMLNGKHPLAALNRMTNNMTSFLKHSNILDKIPEDTLKWKMKLIKRAASYANYRLQSVQADVLLLVRLLPSKDEADRLQRLLPKCKIYFFEKHGHSLLLEYGVHVASIIKCTDLYRHSRQHHRVFDYIPPSATELNEVDKATCDLRFRTCPAMYSTLEDGTVVRGLAGVPQDGPVLLVGNHMLLGIELISLAAEFLRLKRVVVRGIAHPLLFPNKKRAWSEGHDFFDFLNLWGGVPMRYKSIYDLLRAGEFVLLYPGGHREALHLQGLSPSCQQWATIYPIPSLLLWVLDAYEIDLQGEEHRLFWPTQTEFVRLAAQFNATIVPFGVVGEDDLLELLCTFDDIRNAPFGKEMIQAYSNHLKLRDVDHEVIFPGMYLKMPGRFYYQFGKPIPTRGRQDVLTDKHAAHHLYMHVKSEVERIISYLLEKRVEDRYRNLIPRMLYQAARGPTCEVPAFDP

SEQ ID NO: 72223 - protein, 417 aa, Zea mays
  Coding DNA Sequence Number=SeqID_30444
  Gene Ontology: Mol. function=RNA binding; Cellular component=voltage -gated potassium channel complex; Biological process=potassium ion transport
  Homolog annotation: Hit_ID=Q5JMD6; Match level="QueryCoverage=99%, HitCoverage=42%, E-value=0.0, Identity=86%"; Hit description =Putative pumilio domain-containing protein PPD1
  Pfam annotation: Domain name=PUF; Domain location=121-155; Score =31.0; E_value=4.2e-06; Accession=PF00806.9; Description=Pumilio -family RNA binding repeat
  Pfam annotation: Domain name=PUF; Domain location=157-191; Score =32.2; E_value=1.8e-06; Accession=PF00806.9; Description=Pumilio -family RNA binding repeat
  Pfam annotation: Domain name=PUF; Domain location=193-227; Score =43.0; E_value=1e-09; Accession=PF00806.9; Description=Pumilio-family RNA binding repeat
  Pfam annotation: Domain name=PUF; Domain location=230-264; Score =40.8; E_value=4.8e-09; Accession=PF00806.9; Description=Pumilio -family RNA binding repeat
  Pfam annotation: Domain name=PUF; Domain location=266-300; Score =32.1; E_value=1.9e-06; Accession=PF00806.9; Description=Pumilio -family RNA binding repeat
  Pfam annotation: Domain name=PUF; Domain location=308-342; Score =41.4; E_value=3e-09; Accession=PF00806.9; Description=Pumilio-family RNA binding repeat
  Pfam annotation: Domain name=PUF; Domain location=49-83; Score=37.3; E_value=5.2e-08; Accession=PF00806.9; Description=Pumilio-family RNA binding repeat
  Pfam annotation: Domain name=PUF; Domain location=85-119; Score=38.8; E_value=1.9e-08; Accession=PF00806.9; Description=Pumilio-family RNA binding repeat
  Pfam module annotation: Pfam domain module=PUF::PUF::PUF::PUF::PUF::PU F::PUF::PUF; Domain location=121-155::157-191::193-227::230-264::266 -300::308-342::49-83::85-119
MRFPSGMRNFGNSFGSWNSGMGGKMDANLMPSLLEEFKSNKSKSYELSEIAGHVVEFSADQYGSRFIQQKLETASTEEKDMVFSEIMPQALTLMTDVFGNYVVQKFFEHGSTAQIKELAGQLIGRVLALSLQMYGCRVIQKAIEVVDLELQTKMVAELEGHVMRCVRDQNGNHVIQKCIECIPQHAIEFIISTFYGQVVMLSTHPYGCRVIQRVLEHCDDPKTQQIMMDEILQSVCLLAQDQYGNYVVQHVLEHGKPHERSAIIEKLIGQIVQMSQQKFASNVIEKCLVFGNPVERQVLIGEMLGSTSESEPLEVMMKDQFGNYVVQKVLETCDDQQREMILTRIKTHLNTLKKYTYGKHIVARVEKLVAAGGIFIHLCLQDLTLSVYHVGLGTNNDVYVVVPTEKRLGLQPACTAA

SEQ ID NO: 72224 - protein, 82 aa, Zea mays
  Coding DNA Sequence Number=SeqID_30445
MVMRVETSRLSWFGLGEVLLPAKRDIEGRAKLGQGRSLPEVMTEPSLEFDNVRHSQWRGFLYPPWEQVAEARLGQAGVCTRG

SEQ ID NO: 72225 - protein, 257 aa, Zea mays
  Coding DNA Sequence Number=SeqID_30446
MPSPPEDESGDPGLAECLRLLEAVPAAAASCPAFRRHWPSISASLAALSDSLTSHAVPPASPLLAPLAAALRALLSVSAAGDAPRLGHLHTISLLSSTAATLSQLAADARLLAAPATSGADHGSAADALVSRLRLGSAASRAAALDELASAAPSLPEPSAAAAVSAVAELLDSGGGGGGGDLRERAVAALAALACSDAARPALAQEAGAVVPHLCRALESGSRSGAEHTCAALLPLTAASRDSDAAVDARGGFAFLL

SEQ ID NO: 72226 - protein, 591 aa, Zea mays
  Coding DNA Sequence Number=SeqID_30447
MASDVLSTDELLQWVKGAVGKAHYTTPVSMHPDQGYISLPRGLALVQAGLGGPIRPCGCACARGDSVPVRCADAPTQGATVSLSVARVSAEQSHVPAVVEEAVAMEEIAVAHPRCPPWRSWRRGSSSRSRCPQRGRGPRLAVVPRSGTKGRAHDPTFSATKAVKSGVETSAGAAARSHAWLDAGQEAIQRGVEVAQLALGRQAGQEPRGGSVEEAGPSKRPEELARDQAVSPLVAEVSSDIIRARPDPSAWGGLMAKTAAKSIFIRHERDLKDEVAVVRAKVAPLEEEVRQLRVDLLAMTDEQDEYRHQATEASTQAYSLARDLEAEQSDVQGLKGQMGDFGQSLGARDVPLGESLWSHMQALSGYMRSELLKVIHRGVKRVLVVVVSHYEINLERRLTDVVEGPGSALAHFFKEEVVPPVSPSPTGSYSTVTPPDGTEDDASPPPEVRLRHGAEQDRCCCEVLTSPVKGQGCFGLGIFHKETVYVACLGACALVKDLVGCFLLEDLPELLRSLLLFSKLSMQLVKLFELSELSESSSSHANRNYGMDSGSQSPEMSMPMPGPSSSLELRHPEGKERPAYRLARELVSKLG

SEQ ID NO: 72227 - protein, 326 aa, Zea mays
  Coding DNA Sequence Number=SeqID_30448
MGVSDLCARWRALIAPAGTRCKPNSLSLSTNSSEDFSDYLAYTRLKGLFLSKALKNKRNVEGKATQREIVKLRFEVFELRFDCGGKEKSFKILEKDFIESRIEVRTISKESNKVKETMVKKISELKASDDEKDKRVALLKAELKQAKKEYETETTRLRQVSVETTVNLRAAQVKIEDLNDEINQTRRLNENYRILMTNCYTLGNRCCNELMKTFSSTGAKSREKNFTGGDLEGMMRGGKEISIDESRKNMEKAQQAAEKAIDIRNNLQGKKAEEVSTLQVIIEVKQTEAKAKDAAIEAEAVAARAAKKATNDVVLKICEQIYDEMM

SEQ ID NO: 72228 - protein, 191 aa, Zea mays
  Coding DNA Sequence Number=SeqID_30449
  Gene Ontology: Mol. function=zinc ion binding; Cellular component =intracellular
  Homolog annotation: Hit_ID=Q2QUW8; Match level="QueryCoverage=58%, HitCoverage=47%, E-value=3e-17, Identity=45%"; Hit description =Expressed protein
  Pfam annotation: Domain name=BRCT; Domain location=1-71; Score=37.8; E_value=3.7e-08; Accession=PF00533.16; Description=BRCA1 C Terminus (BRCT) domain
MRSVVATVSGYHGDERHRLVNLIAETGASYVGSMSRSITHLVCWRLEGKKYDIARRLGTRVVSHWWFTECLREGRRLPEDPYFMVRKKHFCLVHSGEEAGPVPELPSRSRKQVKKNAIMEDRVFQELPDDFWDTPRARASYKVKLDDSDSDFESALLEQTHDVVLSNPVCNSSCFLYLDDSDFDFKSTLRE

SEQ ID NO: 72229 - protein, 745 aa, Zea mays
  Coding DNA Sequence Number=SeqID_30450
  Gene Ontology: Mol. function=nucleoside-triphosphatase activity; Cellular component=nucleus; Biological process=cell division
  Homolog annotation: Hit_ID=Q6Z562; Match level="QueryCoverage=93%, HitCoverage=83%, E-value=0.0, Identity=77%"; Hit description =Putative cell division cycle protein
  Pfam annotation: Domain name=AAA; Domain location=240-424; Score =321.5; E_value=1.5e-93; Accession=PF00004.19; Description=ATPase family associated with various cellular activities (AAA)
  Pfam annotation: Domain name=AAA; Domain location=514-701; Score =324.2; E_value=2.2e-94; Accession=PF00004.19; Description=ATPase family associated with various cellular activities (AAA)
  Pfam annotation: Domain name=AAA_2; Domain location=510-643; Score= -31.6; E_value=0.0023; Accession=PF07724.4; Description=ATPase family associated with various
  Pfam annotation: Domain name=AAA_3; Domain location=240-365; Score= -18.2; E_value=0.032; Accession=PF07726.2; Description=ATPase family associated with various
  Pfam annotation: Domain name=AAA_5; Domain location=240-366; Score =12.6; E_value=0.0002; Accession=PF07728.4; Description=ATPase family associated with various cel
  Pfam annotation: Domain name=CDC48_N; Domain location=19-108; Score =59.7; E_value=9.4e-15; Accession=PF02359.8; Description=Cell division protein 48 (CDC48), N-t
  Pfam annotation: Domain name=Sigma54_activat; Domain location=206 -368; Score=-171.3; E_value=0.0032; Accession=PF00158.16; Description= Sigma-54 interaction domain
  Pfam module annotation: Pfam domain module=AAA::AAA::AAA_2::AAA _3::AAA_5::CDC48_N::Sigma54_activat; Domain location=240-424::514 -701::510-643::240-365::240-366::19-108::206-368
MDADGKKDFSTAILERKKAPNRLLADDGEGEVAIDNSMVALSPATAFQLEIFTGDLVLLRGKRRRETVCYAVFDASCPDGRVRLNRAVRGNIRVHLGDIVSINRIDEVPTGARVQITPFDDTVNGISGNLFDVYLKPYFGNDALRPLCKGDRFIVHGNMHAVEFKVVDAEPADRVVVRPETAIYCSDQPVKREEEERLDGPGYDDVGGVRKQLAQIRELVELPLRHPKLFQTLGVKPPKGILLYGPPGTGKTLLARAIASESGAHFVVVNGPEIMSMIAGQSEANLRKVFEDAEKFAPSVIFMDEIDAIAPNRDKTHGEVERRVVSQLLTLMDGLRPRAQVVVIGATNRPNSLDPALRRFGRFDRELDIGVPDEVGRLEILRIHTKDMPLAEDVDLERIGKDTHGFVGADLAALCSEAALQLIREKMDVIDVEEDTIDVDVLDSLCVCNEHLKHAMEVTKPSALRERGLVEVPKVSWDDIGGLQNVKLELQETVQYPVEHPEMFEMFGMSPSRGVLFYGPPGCGKTMLAKAIAKECKANFISVKGPELLTMWYGESESNVRDLFDKARSAAPCILFFDELDSIAVKRGNSVGDVGGTSDRVLNQLLTEMDGINAKKTVFVIGATNRPDIIDPAMLRPGRLDQLIYIPLPDEPSRLQIFKSCLRRSPVSRHVHLPALARITAGFSGADITEICQRACKLAVRDVIQWSLKRLKGGGFEDETIIAAPMGTQPLTITEIEEEDDSSLY

SEQ ID NO: 72230 - protein, 316 aa, Zea mays
  Coding DNA Sequence Number=SeqID_30451
  Gene Ontology: Mol. function=nutrient reservoir activity; Cellular component=cell outer membrane; Biological process=defense response
  Homolog annotation: Hit_ID=Q65XA1; Match level="QueryCoverage=98%, HitCoverage=99%, E-value=1e-104, Identity=60%"; Hit description =Putative legumin
  Pfam annotation: Domain name=Cupin_1; Domain location=149-298; Score =85.4; E_value=1.7e-22; Accession=PF00190.13; Description=Cupin
  Pfam annotation: Domain name=Cupin_1; Domain location=6-126; Score =50.2; E_value=6.8e-12; Accession=PF00190.13; Description=Cupin
  Pfam module annotation: Pfam domain module=Cupin_1::Cupin_1; Domain location=149-298::6-126
MAPVDLTPKQPRKAYGGDGGAYYEWSPADLPMLGVASIGAAKLSLAAGGLALPSYSDSAKVAYVLQGTGTCGIVLPEATKEKVVAVKEGDALALPFGVVTWWHNGPAAPTPLTADAAALVSSQPASGIVRASSSPLPAPSPRDREGVALNCLEAPLDVDIPGGGRVVVLNTANLPLVKEVGLGADLVRIDAHSMCSPGFSCDSAYQVTYIVRGSGRVQVVGPDGVRVLETRVEGGFLFIVPRFHVVSKIADASGMEWFSIITTPNPIFSHLAGKTSVWKAISAEVLQASFNTTPEMEKLFRSKRLDSEIFFAPPSN

SEQ ID NO: 72231 - protein, 104 aa, Zea mays
  Coding DNA Sequence Number=SeqID_30452
  Gene Ontology: Mol. function=protein tyrosine/serine/threonine phosphatase activity; Biological process=protein amino acid dephosphorylation
  Homolog annotation: Hit_ID=Q9M3C4; Match level="QueryCoverage=78%, HitCoverage=11%, E-value=7e-17, Identity=52%"; Hit description =Phosphatase-like protein
  Subcellular localization annotation: CTP_CleavageSite=53; ConfidenceScore=5.10e-01
MATPDDGPAPAGGRKFWRSVSWSEAREPPPPAPPDVAGGQSRRGLPPPPLTPRSMSSKARSCLPPLQPLAITRRSLDEFPKAGSDDVGEWRPTRRASRAGGGGA

SEQ ID NO: 72232 - protein, 83 aa, Zea mays
  Coding DNA Sequence Number=SeqID_30453
MAMELPLFLGDGPDAALFSSLWSSFPDDLQPPPQQESCTDVMCRRRCGCGMAAADLLAPPHVIASRVLDSSHSPQADTVVKPG

SEQ ID NO: 72233 - protein, 256 aa, Zea mays
  Coding DNA Sequence Number=SeqID_30454
  Gene Ontology: Mol. function=protein binding; Cellular component =membrane; Biological process=defense response
  Homolog annotation: Hit_ID=Q52QI0; Match level="QueryCoverage=98%, HitCoverage=33%, E-value=1e-129, Identity=80%"; Hit description=NBS -LRR type disease resistance protein
  Pfam annotation: Domain name=NB-ARC; Domain location=105-255; Score= -105.6; E_value=0.0015; Accession=PF00931.13; Description=NB-ARC domain
MAEAIILALRKIGSALADETAKKMLAKLSEKVNNLRDLNDKIESIRMQLTAMNNVICKIGTIYLTDEVVRGWIGEVRKVAYHVEDVMDMYSYHTLQMEEEWFLKKQRSHDNYPLLFKDEDLVGIEDNRRRLTEWLYSDELDSTVITVSGMGGLGKTTLVTNVYEREKTNFSATTWMVVSQTYTIEALLRKLLMKVGREEQVSPNIDKLDVHDLKENIKQKLDNRKCLIVLDDVWDQEVYLQMSDAFQNLAMTSCWR

SEQ ID NO: 72234 - protein, 147 aa, Zea mays
  Coding DNA Sequence Number=SeqID_30455
MARTPDTACPFVHLVLLLGAISPPSPRCCACLYRGDVPKHVTEANLLVLFCEVATVEEVIIIKDKATKVSQGWPFWEIWTPWFGSELDHLQRLFQLREEKNVEKDIRVAAKRNDMGSAKLRKLWSDWQPVPRMPLEAAPDLNSCLLH

SEQ ID NO: 72235 - protein, 67 aa, Zea mays
  Coding DNA Sequence Number=SeqID_30456
MEGGKGDWGFIALRGQTVHAVTPMPRSSAAAAPNRARVKVEEIADSKAPPISENERQVWYRMTVGPT

SEQ ID NO: 72236 - protein, 117 aa, Zea mays
  Coding DNA Sequence Number=SeqID_30457
MTPSSSRVQLRRLVREDGERLRESVGGRIWHKGNRCADNWSSMSWYRGGVARHRGQHLWISSQGFCAGRALSPALPLCHRCGTTVVGQIGLGYHPSDFGVVCIFFVYQELSELVIFA

SEQ ID NO: 72237 - protein, 152 aa, Zea mays
  Coding DNA Sequence Number=SeqID_30458
  Homolog annotation: Hit_ID=Q2QN95; Match level="QueryCoverage=44%, HitCoverage=11%, E-value=6e-18, Identity=73%"; Hit description=Amino acid transporter family protein, putative, expressed
  Subcellular localization annotation: CTP_CleavageSite=13; ConfidenceScore=5.24e-01
MAPTASRQPTQATAEQGAKAPRPAERRPNSSPGANSLCRMPAGSAEQRIVLYLELYASCVEYITPLRDSMSSVFPSAHLAFASIDLNAHTVFAITTALAILQTVCLRNLSLLSYLSGSDTPMCVLPLHQEGRSAIVGGKQHFQNPNPEIAGH

SEQ ID NO: 72238 - protein, 168 aa, Zea mays
  Coding DNA Sequence Number=SeqID_30459
MTKQRTEQGIAAVGPACLARGRRRNHPERETRADGVGHMSQGERAPRVARGGPTDSRRELNGADREELGVLELEAKPDEMGRAFQGGTSGGGALGDGLSELEQAGSLKASSTTRGKERGGHQGREHRKQERAPWLEAESEPEQPGKELRTTNSEEGCPATRTWRWSTG

SEQ ID NO: 72239 - protein, 100 aa, Zea mays
  Coding DNA Sequence Number=SeqID_30460
MAESALGLFVVQGTVKGVAFYGIRGGQAAEAELGVVLLPETGSGEAEMVVPWRGDLGRDEDFPERCTCLRVHSGEAEFQVPQVGALANHGSYFLDLGECV

SEQ ID NO: 72240 - protein, 355 aa, Zea mays
  Coding DNA Sequence Number=SeqID_30461
  Gene Ontology: Mol. function=ATPase activity, coupled to transmembrane movement of substances; Cellular component=integral to membrane; Biological process=transport
  Homolog annotation: Hit_ID=Q84ZW6; Match level="QueryCoverage=79%, HitCoverage=76%, E-value=7e-95, Identity=67%"; Hit description =Putative ABC transporter
  Pfam annotation: Domain name=ABC_membrane_2; Domain location=1-114; Score=-118.4; E_value=0.036; Accession=PF06472.5; Description=ABC transporter transmembrane region 2
MKLLSGRRGVAILYAYMLLGLGFLRAISPDFGHLSGQEQELEGTFRFMHSRLRTHAESIAFFGGGSREKAMVEAKFVKLINHSKILLRKQWLYGELAHALRFLASVVSQSFIAFGDILELHKKFLELSGGINRIFELEEFTRFAQRNTVVSPNAISAASKETISFHEVDIVTPSQKLLARKLSCDVVPMVVERVLFLECSGISGPPSLGELPSPQKGMFHVLSAHIPASATSVDVEEHLYRLATSMGITVITSSQRPALIPFHALELKLIDGEGNWELCAIQQHQKIESGVDGKLCKVEATFAMQLVPAFFAPFHARTHMGCFAKTETASVPFIYKQDANTTQHLFHSFRRNKKW

SEQ ID NO: 72241 - protein, 74 aa, Zea mays
  Coding DNA Sequence Number=SeqID_30462
MVLEGGGSQRGDSAVAQHYSGEQSRMTEGNQGKIQARLGCLPREKTPGPLNGGRDTTRAWVDGDGSPAVRGKLR

SEQ ID NO: 72242 - protein, 340 aa, Zea mays
  Coding DNA Sequence Number=SeqID_30463
  Gene Ontology: Mol. function=cytochrome-c oxidase activity; Cellular component=membrane; Biological process=electron transport
  Homolog annotation: Hit_ID=Q2QPU1; Match level="QueryCoverage=90%, HitCoverage=87%, E-value=1e-72, Identity=45%"; Hit description =Nodulin, putative, expressed
  Pfam annotation: Domain name=DUF6; Domain location=176-306; Score =32.4; E_value=1.6e-06; Accession=PF00892.11; Description=Integral membrane protein DUF6
  Pfam annotation: Domain name=DUF6; Domain location=20-132; Score=7.3; E_value=0.025; Accession=PF00892.11; Description=Integral membrane protein DUF6
  Pfam annotation: Domain name=TPT; Domain location=167-306; Score= -15.9; E_value=0.0047; Accession=PF03151.7; Description=Triose -phosphate Transporter family
  Pfam module annotation: Pfam domain module=DUF6::DUF6::TPT; Domain location=176-306::20-132::167-306
MAAGALEAKKPYLIALAVQIIGTGMFVISKAAFDDGMSTFVFIFYRMALASLILVPTAIVQQRNTFSLNTYNLTLKLTSATVGSALANSVPVFTFCLVLLLRMEAANLRTVAGVAKAAGVALCVAGVLVLALYAGPAMSPVNHHRAFAAAAPPRASTSSSRMTWITGTLLMVLANVTWALWIVLQSALLKEYPNRMLVTATQCVFSMLQSFVVAVVAERGDLSKWRLRCDITLVAVLYVGFVVTGLSHYLQAWCMELKGPVFLAMTNPLCFVFTIFSSSFFLGEIVHLGSVLGGALLVAGLYSVHWGKLKEEDMASDQEKTNKQEEEAAAAGASSALQQP

SEQ ID NO: 72243 - protein, 151 aa, Zea mays
  Coding DNA Sequence Number=SeqID_30464
  Homolog annotation: Hit_ID=Q6QP51; Match level="QueryCoverage=34%, HitCoverage=30%, E-value=5e-15, Identity=80%"; Hit description =Putative growth-regulating factor 1
MQVACNRTARAHPFGFVASSMEAQAHTSCNRRAGYYVQGTALPLAPMSRLLDCGTGAATRGNPAHGPTVPIEHNNHGDRERGYFERDPSLRRKRAPSPPTDQGFEGWPLGRVRQPPQSTRASSSLLIRGSKAGPSKGFDNRLRALGLRAHY

SEQ ID NO: 72244 - protein, 70 aa, Zea mays
  Coding DNA Sequence Number=SeqID_30465
MPWHGLVNDITDYLYYWNLDIDITPYERPAAAPLPLMGPWVPGQACFDNLFARLNAISMVLSSSTPAPAA

SEQ ID NO: 72245 - protein, 66 aa, Zea mays
  Coding DNA Sequence Number=SeqID_30466
MAPGGRAQREGVHERTRKQATSEGWAPATDMGGSVVLDHNCLERQVKNVHPIGTTPHGTESQRGTR

SEQ ID NO: 72246 - protein, 712 aa, Zea mays
  Coding DNA Sequence Number=SeqID_30467
  Gene Ontology: Mol. function=protein kinase activity; Cellular component=integral to membrane; Biological process=protein amino acid phosphorylation
  Homolog annotation: Hit_ID=Q69K60; Match level="QueryCoverage=95%, HitCoverage=96%, E-value=0.0, Identity=67%"; Hit description =Putative receptor-like protein kinase 3
  Pfam annotation: Domain name=APH; Domain location=372-563; Score= -5.9; E_value=0.015; Accession=PF01636.13; Description=Phosphotransfer ase enzyme family
  Pfam annotation: Domain name=LRRNT_2; Domain location=31-79; Score =30.1; E_value=7.5e-06; Accession=PF08263.3; Description=Leucine rich repeat N-terminal domain
  Pfam annotation: Domain name=LRR_1; Domain location=107-128; Score =8.7; E_value=6.8; Accession=PF00560.23; Description=Leucine Rich Repeat
  Pfam annotation: Domain name=LRR_1; Domain location=130-153; Score =17.2; E_value=0.06; Accession=PF00560.23; Description=Leucine Rich Repeat
  Pfam annotation: Domain name=LRR_1; Domain location=155-177; Score =13.7; E_value=0.66; Accession=PF00560.23; Description=Leucine Rich Repeat
  Pfam annotation: Domain name=LRR_1; Domain location=179-200; Score =7.4; E_value=12; Accession=PF00560.23; Description=Leucine Rich Repeat
  Pfam annotation: Domain name=LRR_1; Domain location=201-223; Score =12.1; E_value=1.5; Accession=PF00560.23; Description=Leucine Rich Repeat
  Pfam annotation: Domain name=Pkinase; Domain location=374-641; Score =21.0; E_value=8.2e-10; Accession=PF00069.15; Description=Protein kinase domain
  Pfam annotation: Domain name=Pkinase_Tyr; Domain location=374-641; Score=-17.4; E_value=2.1e-11; Accession=PF07714.7; Description =Protein tyrosine kinase
  Pfam module annotation: Pfam domain module=APH::LRRNT_2::LRR_1::LRR _1::LRR_1::LRR_1::LRR_1::Pkinase::Pkinase_Tyr; Domain location=372
MAPSHHRLSLFLAVAATIAAALLASVAAENGMNDVEALMQLKKSFTNSSSLSSWLITDKDGNRSPCAPDSHHWHGVVCSHGVVTGLRLNGLKLGGTIEVNSLASFPRLRSISFASNNFSGPLPAFHQIKALKSMYLSNNQFTGSIPDDFFVNLSHLKKLWLNDNQLSGSIPASISQATSLLELRLDRNAFTGELPSVPPPALKSLNVSDNDLEGVVPEAFRKFDASRFAGNEYLCFVPTRVKPCKREQPVTSSSRRAIMVLATLLLSAFVMVIALHLCSSQPSSSRRARKLDMEGLEEKSPEYVAVKKASSTPQKSSSWLGRRAGSSLGGLGHRRAASAAKVDDLSSRSAGDLVMVNESKGVFGLTDLMKAAAEVIGSGGLGSAYKAVMANGVAVVVKRSRDMNRATKDAFESEMKRLGAMRHANLLPPLAYHYRKDEKLLVYEYIPKGSLLYVLHGDRGMDYAALDWPTRLKVAVGVARGTAFLHTALAGHEAPHGNLKSANVLLAPDFEPLLVDFGFSSLISHMQSPNSLFAYRAPECAAGHPVSAMADVYCLGVVLLELLTGKFPAQYLQNAKGGTDLVVWATSAMADGYERDLFDPAIMAAWKFALPDMTRLMQVAVDCVETDLEKRPEMKEALVRVEEVVATALATVRERQQDGSGSEGTMSAQSADSASRSSHASYVREGSIQRMASVGERSLRRGSNDPSYGYGI

SEQ ID NO: 72247 - protein, 1326 aa, Zea mays
  Coding DNA Sequence Number=SeqID_30468
  Gene Ontology: Mol. function=binding; Cellular component=plastid chromosome; Biological process=positive regulation of transcription, DNA-dependent
  Homolog annotation: Hit_ID=Q69K58; Match level="QueryCoverage=73%, HitCoverage=91%, E-value=0.0, Identity=49%"; Hit description =Putative PPR protein
  Pfam annotation: Domain name=PPR; Domain location=1019-1053; Score =16.3; E_value=0.087; Accession=PF01535.11; Description=PPR repeat
  Pfam annotation: Domain name=PPR; Domain location=1054-1088; Score =16.3; E_value=0.086; Accession=PF01535.11; Description=PPR repeat
  Pfam annotation: Domain name=PPR; Domain location=318-352; Score =36.3; E_value=1.1e-07; Accession=PF01535.11; Description=PPR repeat
  Pfam annotation: Domain name=PPR; Domain location=390-424; Score =44.2; E_value=4.6e-10; Accession=PF01535.11; Description=PPR repeat
  Pfam annotation: Domain name=PPR; Domain location=425-459; Score =46.2; E_value=1.1e-10; Accession=PF01535.11; Description=PPR repeat
  Pfam annotation: Domain name=PPR; Domain location=460-494; Score =29.2; E_value=1.5e-05; Accession=PF01535.11; Description=PPR repeat
  Pfam annotation: Domain name=PPR; Domain location=495-529; Score =51.6; E_value=2.6e-12; Accession=PF01535.11; Description=PPR repeat
  Pfam annotation: Domain name=PPR; Domain location=530-564; Score =36.8; E_value=7.5e-08; Accession=PF01535.11; Description=PPR repeat
  Pfam annotation: Domain name=PPR; Domain location=565-599; Score =31.7; E_value=2.6e-06; Accession=PF01535.11; Description=PPR repeat
  Pfam annotation: Domain name=PPR; Domain location=600-634; Score =30.2; E_value=7.3e-06; Accession=PF01535.11; Description=PPR repeat
  Pfam annotation: Domain name=PPR; Domain location=635-668; Score=7.6; E_value=0.93; Accession=PF01535.11; Description=PPR repeat
  Pfam annotation: Domain name=PPR; Domain location=704-738; Score =13.2; E_value=0.21; Accession=PF01535.11; Description=PPR repeat
  Pfam annotation: Domain name=PPR; Domain location=739-773; Score =23.3; E_value=0.00089; Accession=PF01535.11; Description=PPR repeat
  Pfam annotation: Domain name=PPR; Domain location=809-843; Score =36.6; E_value=8.9e-08; Accession=PF01535.11; Description=PPR repeat
  Pfam annotation: Domain name=PPR; Domain location=844-878; Score=9.3; E_value=0.6; Accession=PF01535.11; Description=PPR repeat
  Pfam annotation: Domain name=PPR; Domain location=879-913; Score =25.5; E_value=0.00019; Accession=PF01535.11; Description=PPR repeat
  Pfam annotation: Domain name=PPR; Domain location=914-948; Score =29.7; E_value=1e-05; Accession=PF01535.11; Description=PPR repeat
  Pfam annotation: Domain name=PPR; Domain location=949-983; Score =20.3; E_value=0.0068; Accession=PF01535.11; Description=PPR repeat
  Pfam annotation: Domain name=PPR; Domain location=984-1018; Score =33.7; E_value=6.5e-07; Accession=PF01535.11; Description=PPR repeat
  Pfam annotation: Domain name=TPR_4; Domain location=317-342; Score =10.2; E_value=2.3; Accession=PF07721.5; Description=Tetratricopeptide repeat
  Pfam annotation: Domain name=TPR_4; Domain location=424-449; Score =11.8; E_value=1.5; Accession=PF07721.5; Description=Tetratricopeptide repeat
  Pfam annotation: Domain name=TPR_4; Domain location=808-833; Score =3.3; E_value=15; Accession=PF07721.5; Description=Tetratricopeptide repeat
  Pfam module annotation: Pfam domain module=PPR::PPR::PPR::PPR::PPR::PP R::PPR::PPR::PPR::PPR::PPR::PPR::PPR::PPR::PPR::PPR::PPR::PPR::PP ::TP R_4::TPR_4::TPR_4; Domain
  Pfam module annotation: Domain location=425-459::460-494::495 -529::530-564::565-599::600-634::635-668::704-738::739-773::809 -843::844-878::879-913::914-948::949-983::984-1018::317-342::424 -449::808-833
NPVSSQRGCDRLIDFHGLHVNEAIYILKGHHTRGSRTARLPIVVEQFLLDEGDPVSTGSGTELPSTLTPPPHSLHLRSPCAPSSLPSTHHPEDPKLMSSMTVTSSPLPFLSSSSSLTCHLRRAGTATATAASSASEDFDYPLADPSLRWPHLRFPYLPAPRFPATVAAAPPVPARPPQEVEDPVATSGSASSLVEPLDARAHRGRVKKLSKLALRRAQDWRARVAGLADAVLELPPGAPVDDVLDGARASPDEVAFVVRAVGESSWRRALDAFEWLARSSAPASRAVAVVLGVLGRARQDSIAEEVFLRFAGEGATVQVFNAMMGVYARSGRFDDARQLLDTMHDRGIDPDLVSFNTLINARSKSGCLAAGVALDLLFEVRQSGLRPDVITYNTLISACSQSSNLEDAVTVFEDMIASECRPDLWTYNAMVSVHGRCGKAEEAERLFRELVEKGFMPDAITYNSLLYAFAKEGNVDKVEHTCEQLVKAGFKKNEITYNTMIHMYGKMGRLDLAVGLYDEMRAMGCTPDAVTYTVMIDSLGKMNRIAEAGKVLEDMTDAGLKPTLIAFSALICAYAKGGRRADAENTFDCMIASGVKPDRLAYLVMLDVFARSGDTEKMLCLYRKMMNDNYRPDDDMYQVLLVALAKEDKCEEIEEVIQDMELLCRMNLGIISTMLIKARKQTSISAYEQYSQRLMLKYPGQNCNLYEYLITCLIEAEFFSEACQVFCDMQFIGIEASKSIYESIISTYCKLGFPETAHRLMDDALQSGIPLNILSCRVIIIEAYGKIKLWQQAEILVKGLRQASGIDRRIWNALIHAYAESGLYEKARAVFDNMIKTGPLPTVDSVNGMMRALIVDGRLDELYVVVEELQDMNFKISKSTVLLLLDAFAKAGDVFEVMKIYNGMKAAGYLPNMHLYRSMISLLCHHNRFRDVELMIAEMEGAGFKPDLAILNALLNMYTAAGNFDRTTQVYRSILEAGLEPDEDTYNTLIVMYCRSFRPEEGFTLLNEMGKRGLTPKLQSYKSLLAASAKAELREQADQIFEEMRSKSYQLNRSIYHMMMKIYRNAGNHSKAENLLAVMKRGWHRANNCHYAYSHDFLRHCWTTSLLTERTPSLLSEIANYLEELEALEDSAALNFVNAVEDLFVAQKDWGADFRKLSAGAALVGLTLWLDHMQDASLQGSPESPKSVVLVTGEGEYNMVSLRKTIRAYLLEMGSPFLPCRARSGRFVVKDYSLKMWLKDSPFCMDLELKDAPAHPKLNSMKLIEGYFMRAGFVSAFKDIHERLGEVWPKKFSRDEQALDIIRQCAPMQCALGCADAFMGSALVWQ

SEQ ID NO: 72248 - protein, 67 aa, Zea mays
  Coding DNA Sequence Number=SeqID_30469
MAAGGAAGPGDGDPPAVVGAGAGAGAAVATDGAVAGATWTRSRRHAVLAAHQSTSINGKDDVCGRSV

SEQ ID NO: 72249 - protein, 174 aa, Zea mays
  Coding DNA Sequence Number=SeqID_30470
MRMMHMRYKGGSEVMSKATAASRTGLSARPDPVGEVKQRLENVGDAHRHADRRVFEVGHRLASRTSCVLFRRRAHRRVSCSTGDERRARSREDDGEEEDCSLFLRRTEALVSKSTRKVWSKNVPLRVKLSMHVVDDALLEAYAVGQDAVIPPMNAIPTRCIQVQNVHFCAIYAG

SEQ ID NO: 72250 - protein, 55 aa, Zea mays
  Coding DNA Sequence Number=SeqID_30471
MAMLVVETMGQKEDEEQHVKFEETFPLRSKSFVSSFLRRDSLYMTRMLRVTDTSR

SEQ ID NO: 72251 - protein, 57 aa, Zea mays
  Coding DNA Sequence Number=SeqID_30472
MWLMMNLQRLDVQLITVFALDHWICFLIYPKVGKVLVLDSLDYDPLTYAKFISILEL

SEQ ID NO: 72252 - protein, 117 aa, Zea mays
  Coding DNA Sequence Number=SeqID_30473
  Gene Ontology: Mol. function=DNA binding; Biological process=protein modification process
  Homolog annotation: Hit_ID=Q10PJ6; Match level="QueryCoverage=76%, HitCoverage=18%, E-value=7e-13, Identity=58%"; Hit description=Helix- loop-helix DNA-binding domain containing protein, expressed
MEDERAPGESRLDLNFRGGELGRGQTKVLHFLPGVDLAKVECTCKEMRNLALDDSIWKKLVFKYENYGKGCRGRARVRRPYLEKLGRPIRDGRRGLIQPFGTMAGETILLAIHLGCH

SEQ ID NO: 72253 - protein, 59 aa, Zea mays
  Coding DNA Sequence Number=SeqID_30474
MKHHSLEDNEPWTKVDENIITKRGDKKKKKMKKVVYYETDSSSPSTSSSESSTASKRYE

SEQ ID NO: 72254 - protein, 195 aa, Zea mays
  Coding DNA Sequence Number=SeqID_30475
  Gene Ontology: Mol. function=phospholipase A2 activity; Cellular component=vacuole; Biological process=lipid catabolic process
  Homolog annotation: Hit_ID=Q2R2W3; Match level="QueryCoverage=57%, HitCoverage=72%, E-value=3e-50, Identity=78%"; Hit description =Phospholipase A2, putative, expressed
  Subcellular localization annotation: CTP_CleavageSite=44; ConfidenceScore=5.35e-01
MAPCILCDDGGSQPPYGSKRTSARTQQLRQLSLRQAPSLLRRPRHHTSWVPRSLRLPQRHGPLREGWPRGNEDERDDPSVHPQECSRACESQRCTAPLMRYGKYCGVSYTGCPGEAPCDALDACCMLHDACVQATDNDYLNMWCNQSLLDCVAAARPTAMADTFEGNRCNVTDVADEITAIVEAAVYARGILHKP

SEQ ID NO: 72255 - protein, 136 aa, Zea mays
  Coding DNA Sequence Number=SeqID_30476
  Homolog annotation: Hit_ID=Q6QP51; Match level="QueryCoverage=32%, HitCoverage=20%, E-value=2e-11, Identity=73%"; Hit description =Putative growth-regulating factor 1
MARGLGPTRHTSRLRAEEAKPSCAEKRATLRLRHNDRVKKGTGKGEYPEKDPSPRRNQAPSPLLIRGSKAGPSEGFDSRLRSHGPYTHYWSEVRRPAPRKGSTAASGYSGSAPITDQGFEGWPPKGSQPPQTPSEG

SEQ ID NO: 72256 - protein, 88 aa, Zea mays
  Coding DNA Sequence Number=SeqID_30477
MGGGREFGRDTRRSEVKKKHWPREFVANGVAVTPVSHGEFREGHGDTVKEWSHAAHGREAAVDGEPLTAGVFAHRPLRFGFRVFQGSI

SEQ ID NO: 72257 - protein, 680 aa, Zea mays
  Coding DNA Sequence Number=SeqID_30478
  Gene Ontology: Mol. function=protein transporter activity; Cellular component=intracellular; Biological process=intracellular protein transport
  Homolog annotation: Hit_ID=Q1RZK5; Match level="QueryCoverage=74%, HitCoverage=63%, E-value=8e-71, Identity=35%"; Hit description=Epsin, N-terminal; GAT; ENTH/VHS
  Pfam annotation: Domain name=GAT; Domain location=249-346; Score =72.9; E_value=1e-18; Accession=PF03127.5; Description=GAT domain
  Pfam annotation: Domain name=VHS; Domain location=9-149; Score=80.4; E_value=5.4e-21; Accession=PF00790.9; Description=VHS domain
  Pfam module annotation: Pfam domain module=GAT::VHS; Domain location =249-346::9-149
MVGAAPAARPSASSRVEKATSHLLMGPDWAVNLEICDILNADVWQTKDVVKAVKKRLQNKDPKVQFFALTLLETMMKNCGEYVQFEVAEQHVLQEMVKIIQKKSTFFNVLVDEPCYKAMGLWERVIEHHLRGITRIIINQFERDLQRHQCVVGFQGTITIEREAGKAEVDMVRDKILLLLDSWQEAFGGPGSKYPQYHWAYLEVKTTGVVFPKRPMDAPPIFTPPATHNSETYGSPRYSAGSLSDRMSSDVETLSLGDLNKIRNVTDLLNDMVYALNPSDRMAINDEIITDLVTQCRSNQQKLLQFVSSSGNEQLLKQGLETNDLLQSVLSKYDAVASGAPLAVEASVREAIEAPAVKSYAPPEHNDNVNEEEDEFAQLAQRKNKSVVSSSDDASSSTLGDLALVPIDQAVSESPSSVASNALVLLDPAPSTSTESKELDMIDLLSLTLCSPTPETSTDSSAQDQNGPQQPAVTHNQKGLQEPTVTNGQQYPSSVPQYPSNYQPHTANQAYAPQTSNYVAPWAQTGAYPPQPPAYASGYAYPAPPWVAPTHPVDSNPFLSVNYQDPRPAATSVAQTATYAPPPASYPPSISYAQFATPQSIQHSNSVASPSNGQIANQAQMNVNQQPKDSSAASSRPYYIPDNLFSDLIDAKSFGGGNKMGGPTTMGSSNGGQPMIGGKK

SEQ ID NO: 72258 - protein, 161 aa, Zea mays
  Coding DNA Sequence Number=SeqID_30479
  Homolog annotation: Hit_ID=Q1SQU6; Match level="QueryCoverage=69%, HitCoverage=9%, E-value=5e-39, Identity=77%"; Hit description=AARP2CN
  Pfam annotation: Domain name=DUF663; Domain location=1-161; Score= -83.8; E_value=8.6e-08; Accession=PF04950.3; Description=Protein of unknown function (DUF663)
MDVSVGSRARHLTDVDGDLWDLVRRDLQLKATFLYIDLNRCRQSNIDYTSSQVPFRITATGWVQEFNNTARIVKKIKLTGTPCKIFKKTALIKGMFTSDLEVARFEGASIRTVSGIRGQVKKAAKIEPRDMLKRKGENTEGIARCTFEDRILMSDIVFLRA

SEQ ID NO: 72259 - protein, 82 aa, Zea mays
  Coding DNA Sequence Number=SeqID_30480
MDSDPGVENQVLQQRNRNRNRPGNRYRRMDQWMAVGFCVNTCHAVTVPKVTSRLGFWIRRPPSSVGLIRIALRGRKVACLLG

SEQ ID NO: 72260 - protein, 112 aa, Zea mays
  Coding DNA Sequence Number=SeqID_30481
MPAYDRNKEVEDNHFFVFLDKGRKGSRVGLVKPIGNPKDKQLSSELTKKGAMAVDVVEEGPLLWQQQWGLLIYLHALQHSSAPRIVSMAFCSIREPFHYCSEGKRPRYANDE

SEQ ID NO: 72261 - protein, 373 aa, Zea mays
  Coding DNA Sequence Number=SeqID_30482
  Gene Ontology: Mol. function=protein serine/threonine kinase activity; Cellular component=cytosol; Biological process=protein amino acid phosphorylation
  Homolog annotation: Hit_ID=Q2QSJ1; Match level="QueryCoverage=97%, HitCoverage=98%, E-value=3e-58, Identity=39%"; Hit description =Protein kinase domain containing protein
  Pfam annotation: Domain name=Pkinase; Domain location=46-356; Score =143.3; E_value=6.5e-40; Accession=PF00069.15; Description=Protein kinase domain
  Pfam annotation: Domain name=Pkinase_Tyr; Domain location=46-354; Score=-18.1; E_value=2.3e-11; Accession=PF07714.7; Description =Protein tyrosine kinase
  Pfam module annotation: Pfam domain module=Pkinase::Pkinase_Tyr; Domain location=46-356::46-354
MAAASDLVNGGVAALQIEEPEESKNNAAAVVAFAPIPWLPAVAERYERREKLGEGMFGDVYKAWDRVHDRIVAVKRLSGRTDDRFVKTSIPDLAREVMSLAACRGHPSVVQLLATHVDGSRADGDCYLVTEHAGPMNLRQYMAVRRLNGQPFGEDEVRDVMRQLLAGAEHTHRAGVLHRDIVPENVIVGMDGDSATGRMVYTICGFGMSKPAGQTEKDDSGLLASPSPYRAPELFLGCKDYDGRVDTWSLGCIMAELVTGTGVPFFGGALDKEVFDKVLHVVGTRGIAKWQGLERVAPREKVACLRKTASQERGYLLKMFPPRLLSPAGFKVLEGLLQSNPDHRLSAADALRKPWFRRRFSLGACCFMPHAAA

SEQ ID NO: 72262 - protein, 128 aa, Zea mays
  Coding DNA Sequence Number=SeqID_30483
  Gene Ontology: Mol. function=protein serine/threonine kinase activity; Biological process=protein amino acid phosphorylation
  Homolog annotation: Hit_ID=Q2QSJ1; Match level="QueryCoverage=79%, HitCoverage=25%, E-value=4e-13, Identity=41%"; Hit description =Protein kinase domain containing protein
MAELVTGTGVPFFGGALDKEVFDKVLHVVGTRGIAKWQGLERVAPREKVACLRKTASQERGYLLKMFPPRLLSPAGFKVLEGLLQSNPDHRLSAADALRKPWFPAPISRWVPGCFMPHALRSRLVVQY

SEQ ID NO: 72263 - protein, 61 aa, Zea mays
  Coding DNA Sequence Number=SeqID_30484
MKIPEKDNEDYDSDEATQIIHHNSQATKMEFIERELRRFAINKGEDTQEMYNRLKALANQI

SEQ ID NO: 72264 - protein, 267 aa, Zea mays
  Coding DNA Sequence Number=SeqID_30485
  Gene Ontology: Mol. function=protein serine/threonine kinase activity; Cellular component=nucleus; Biological process=protein amino acid phosphorylation
  Homolog annotation: Hit_ID=Q2QSJ1; Match level="QueryCoverage=85%, HitCoverage=60%, E-value=7e-40, Identity=41%"; Hit description =Protein kinase domain containing protein
  Pfam annotation: Domain name=Pkinase; Domain location=5-235; Score =0.8; E_value=1.3e-08; Accession=PF00069.15; Description=Protein kinase domain
  Pfam annotation: Domain name=Pkinase_Tyr; Domain location=1-233; Score=-146.5; E_value=0.0017; Accession=PF07714.7; Description =Protein tyrosine kinase
  Pfam module annotation: Pfam domain module=Pkinase::Pkinase_Tyr; Domain location=5-235::1-233
RATATATRHGTRRAYELRQYMPVRRFNGQPFGEDEVRDVMRQLLAGAEHTHRAGVLHRDIVPENVIVGMDGDSATGRMVYTICGFGMSKPAGQTEKDDSGLLASPSPYRAPELFLGCKDYDGRVDTWSLGCIMAELVTGTGVPFFGGALDKEVFDKVLHVVGTRGIAKWQGLERVAPREKVACLRKMASQERGYLLKMFPPRLLSPAGFKVLEGLLQSNPDHRLSAADALRKPWFRRRFSLGACCFMPHAAAYRRPCYITDMLIMSV

SEQ ID NO: 72265 - protein, 503 aa, Zea mays
  Coding DNA Sequence Number=SeqID_30486
  Gene Ontology: Mol. function=protein serine/threonine kinase activity; Cellular component=membrane; Biological process=protein amino acid phosphorylation
  Homolog annotation: Hit_ID=Q2R1E0; Match level="QueryCoverage=93%, HitCoverage=97%, E-value=9e-71, Identity=38%"; Hit description =Jacalin-like lectin domain containing protein
  Pfam annotation: Domain name=Jacalin; Domain location=371-502; Score =65.4; E_value=1.9e-16; Accession=PF01419.7; Description=Jacalin-like lectin domain
  Pfam annotation: Domain name=Pkinase; Domain location=37-332; Score =130.1; E_value=6.3e-36; Accession=PF00069.15; Description=Protein kinase domain
  Pfam annotation: Domain name=Pkinase_Tyr; Domain location=37-332; Score=57.1; E_value=5.7e-16; Accession=PF07714.7; Description =Protein tyrosine kinase
  Pfam module annotation: Pfam domain module=Jacalin::Pkinase::Pkinase _Tyr; Domain location=371-502::37-332::37-332
MEMQSTAAGTLAQSQAAAAGTGNSFTYADLHAITDGFSDEIGRGGFGVVYRGKLPQPDGEEVAVKRLTTTTDNNNPKQPAGDDDDEQFEKELGAVRSIQHENIVEFVGYCNGYTPSSTVLPDGRPVYRKIRALCFKYMEKGSLRKHVADESLDWQSRYEIIKGVCEGLNHLHSKGIVHRDLKLDNILLDGAMKPKIADFGLSRFMGAQETTRITRNIVGTFGCMPPEFFCDGQYSKSFDVYSLGTVIKEILAGPAAADDGSIYGYYDPLKKARRLSLFVAIYMHKQASEYWEQRLVEDADVQRVKACIELVPLCWGLDRKKRPTIERVLDTLNYTDISVQKEQHYYCSRSSGPQPEKSRLEGGAGGELRDIDMEVTPPPHRLKAVWLKHGAVIDSLQFSYTDCDGREQGAGPWGSQDAWDKVLQLEPYEFLVGVSGTTGGYAGLPTSVIRSLTFVTNVRTYRTRGAPVGDPFALEAPAGSCIVGFHARAGHFLDALGVYHRPI

SEQ ID NO: 72266 - protein, 73 aa, Zea mays
  Coding DNA Sequence Number=SeqID_30487
MGDLRVGALRPELRVLTAAWALSSETQDGACAGVVAMWDPDFGTVPLAPGSRSSDVGRGHCRVAPACDRARVQ

SEQ ID NO: 72267 - protein, 152 aa, Zea mays
  Coding DNA Sequence Number=SeqID_30488
MGKGTKRKREPTPPSEDFGDSEYSEEEFSSESEGSPAPVSPPASSDDSDDSQGIAAEVWTYIRAVERSGLEGSDESEFSSDEEDSDGGEDDDDDDDDDDGGDGDGDGSNGGGGSGGKGSTGGGSSTGSTRGGALGSTRGGGGKGSKRIKLII

SEQ ID NO: 72268 - protein, 145 aa, Zea mays
  Coding DNA Sequence Number=SeqID_30489
  Gene Ontology: Mol. function=phosphoric ester hydrolase activity; Cellular component=cytosol; Biological process=carbohydrate metabolic process
  Homolog annotation: Hit_ID=O64421; Match level="QueryCoverage=100%, HitCoverage=40%, E-value=2e-42, Identity=58%"; Hit description =Fructose-1,6-bisphosphatase, cytosolic
  Pfam annotation: Domain name=FBPase; Domain location=13-145; Score= -193.6; E_value=0.096; Accession=PF00316.10; Description=Fructose-1-6- bisphosphatase
MDHAAEAQRTDLMTITRHVLNEQSRHPESRGDFTILLSHIVLGCKFVAAAVNKAGLAKLIGLAGETNCVLVSEENEEAIFVDPALRGKFVNPLLLHPDLVKVPQRRTVAFPDRVLVLSLSLFRYCVCFDPLDGSSNIDCGVSIGT

SEQ ID NO: 72269 - protein, 211 aa, Zea mays
  Coding DNA Sequence Number=SeqID_30490
  Gene Ontology: Mol. function=inorganic diphosphatase activity; Cellular component=cytoplasm; Biological process=phosphate metabolic process
  Homolog annotation: Hit_ID=Q75HX3; Match level="QueryCoverage=92%, HitCoverage=95%, E-value=1e-89, Identity=79%"; Hit description =Putative soluble inorganic pyrophosphatase
  Pfam annotation: Domain name=Pyrophosphatase; Domain location=49-203; Score=314.8; E_value=1.6e-91; Accession=PF00719.9; Description =Inorganic pyrophosphatase
MSQTRRTEAPTDSNAADVMEVEPKRRAPRLTSASCRRCRGGPEAPAVFNVVVEITKGSKVKYELDKKTGLIKVDRILYSSVVYPHNYGFVPRTLCEDNDPMDVLVLMQEPVLPGAFLRARAIGLMPMIDQGEKDDKIIAVCADDPEYRHYNDISELSPHRLQEIRRFFEDYKKNENKEVAVNDFLPAAAAREAIQYSMDLYGQYIMQTLRR

SEQ ID NO: 72270 - protein, 181 aa, Zea mays
  Coding DNA Sequence Number=SeqID_30491
TNASPGCIARQATEPAIADAGFALPFEHGLGLQNLMRPVARGLALKPLNPIAAAAKGTVPNRACYGLLRPLLLPRTSHSSPLPAPSCRRSVRGTGRRQCPAPMAKARDETEREPQAPPPAMMAKQGEEEKEAAPERKPAGERSMAYQIFAGLYVCAYVFCWRTGELIFLNAQDALDRLRRH

SEQ ID NO: 72271 - protein, 52 aa, Zea mays
  Coding DNA Sequence Number=SeqID_30492
MATALAQTRHAGLLTVSAWPVSPSDYLVKSAVPGQHYGQRLQPKHGTTLMSG

SEQ ID NO: 72272 - protein, 354 aa, Zea mays
  Coding DNA Sequence Number=SeqID_30493
  Gene Ontology: Mol. function=serine carboxypeptidase activity; Cellular component=peroxisome; Biological process=proteolysis
  Homolog annotation: Hit_ID=Q6ZH05; Match level="QueryCoverage=92%, HitCoverage=85%, E-value=4e-84, Identity=43%"; Hit description =Putative serine carboxypeptidase
  Pfam annotation: Domain name=Peptidase_S10; Domain location=42-352; Score=233.5; E_value=4.7e-67; Accession=PF00450.12; Description =Serine carboxypeptidase
MPNGGGKRWLLLLPLSRWVLLLGSLQLPAVGGSGHVVTRMRGFDGPLPFYLETGKGVQLFYYFVRSERDPYEDPLLLWLSGGPGCSGISGLAYEIGPLKFDARGQGEFPTLLYRPETWTKVSNIIFVDSPVGTGFSYAKSEEGLETGDTKQVKQLVIFLRKWLQDHPRFVMNPLYIAGDSYSGLIIPTLALEIDRSIELGEKIFFRSQGYIAGNPLTGGQFDTDSQIPYFHAMGLVSDELYKNARENCGGKYSAPLNAVCAEAVQAINNEALYILSYAWGNDDTVQESLGIRKGTIGAWKRYSHALPYNYDIQSVVDYHSRLATKGYRALIYRAATTMLLYPMLAHKHGLDTST

SEQ ID NO: 72273 - protein, 227 aa, Zea mays
  Coding DNA Sequence Number=SeqID_30494
  Gene Ontology: Mol. function=oxidoreductase activity, acting on single donors with incorporation of molecular oxygen, incorporation of two atoms of oxygen; Cellular component=chloroplast; Biological process=fatty acid biosynthetic
  Homolog annotation: Hit_ID=Q7XV13; Match level="QueryCoverage=91%, HitCoverage=23%, E-value=2e-95, Identity=80%"; Hit description =Putative lipoxygenase 5
  Pfam annotation: Domain name=Lipoxygenase; Domain location=1-211; Score=-284.5; E_value=0.00017; Accession=PF00305.9; Description =Lipoxygenase
MCGVPFSQKNAVEDPDEAATFSAAHRRLPADTELQSWYTEAVQTGHADKRGAPWWPRLTTPGDLASLLTTLLWLTSAQHAALNFGQYPLGGYIPNRPPLMRRLVPAEGDPEHAHLVADPHRFFLSALPGLTQATTFMTVIDTLSTHSADEQYLGERPDEAWTADPAALAAEREFADEVRRAEEEIGRRNTDAGRRNRCGAGVLPYELMAPTSGPGITCRGVPNSVTI

SEQ ID NO: 72274 - protein, 140 aa, Zea mays
  Coding DNA Sequence Number=SeqID_30495
MASGASKQEWRRWRARAEDVGRGRTSMNDVVEYAWSSPHRIGGPRVGAPLQERVDTRAIGAACPCEIVERGWRAACRCEITGGGRGRSMWAADATSAGMGRAPMQDCRARMALRCEIAGGGEGEGGGVVTPGGRSRYQHM

SEQ ID NO: 72275 - protein, 133 aa, Zea mays
  Coding DNA Sequence Number=SeqID_30496
  Homolog annotation: Hit_ID=Q6ZA58; Match level="QueryCoverage=64%, HitCoverage=6%, E-value=4e-15, Identity=49%"; Hit description=PHD finger transcription factor-like
MGRLVMVGYQQRGVLKLLPKNNGAVMESNDCKVDEDTGDDRISMKNTKVVDLQATSGHVLNKLEMKKPKGGPLNKHKQDLRNKIKHLLLDNGWKIDIRQRKNKDYEDSVYVSPNETDYWCSFPRTVSKYGSLI

SEQ ID NO: 72276 - protein, 671 aa, Zea mays
  Coding DNA Sequence Number=SeqID_30497
  Gene Ontology: Mol. function=RNA-directed DNA polymerase activity; Cellular component=intracellular; Biological process=RNA-dependent DNA replication
  Homolog annotation: Hit_ID=UPI00004C1733; Match level="QueryCoverage =87%, HitCoverage=43%, E-value=0.0, Identity=94%"; Hit description =UPI00004C1733 related cluster
  Pfam annotation: Domain name=RVT_1; Domain location=56-225; Score =147.0; E_value=5.1e-41; Accession=PF00078.17; Description=Reverse transcriptase (RNA-dependent
  Pfam annotation: Domain name=RnaseH; Domain location=455-582; Score= -16.0; E_value=0.0018; Accession=PF00075.14; Description=RNase H
  Pfam module annotation: Pfam domain module=RVT_1::RnaseH; Domain location=56-225::455-582
MPGIPRDVAEHSLDIRAGARPVRQPLRRFGEEKRRVIAEEIHKLMAAGFIKEVFHPEWLANPVLVRKKGGKWRMCVDYTGLNKACPKVPYPLPRIDQIVDSTAGCETLSFLDAYSGYHQIRMKESDQLATSFITPFGMYCYVTMPFGLRNAGATYQRCMNHVFGEHIGRTVEAYIDDIVVKTRKASDLLSDLEVTFRCLKAKGVKLHPEKCVFGVPRGMLLGFIVSERGIEANPEKIAAITSMGPIKDLKGVQRVMGCLAALSRFISRLGERGLPLYRLLRKAECFAWTPEAEEALGNLKALLTKAPVLVPPADGEALLVYVAASTQVVSIAIVVERQEEGHALPVQRPVYFVSEVLSETKIRYPQVQKLLYAVILTRRKLRHYFESHPVTVVSSFPLGEIIQCREASGRIAKWAVEIMGETISFAPRKAIKSQVLADFVAEWVDTQLPTAPIQPELWTMFFNGSLMKTGAGAGLLFISPLGKHLRYVLRLHFPASNNVAEYEALVNRLWIAIELGVRRLDARGDSQLVIDQVMKNSHCCDPKMEAYCDEVRRLEDKFFGLELNHIARRYNETADELAKIASGRTTVPRTSSPGICINPPSRSTTLSSPRHPRHGPRHPRHGPRHPRPPKARRCTSRKSRAGPRLIEIGRPRTCDISARESYPSTKPRLGG

SEQ ID NO: 72277 - protein, 62 aa, Zea mays
  Coding DNA Sequence Number=SeqID_30498
  Gene Ontology: Mol. function=nucleic acid binding; Biological process= DNA integration
  Homolog annotation: Hit_ID=O24587; Match level="QueryCoverage=95%, HitCoverage=5%, E-value=1e-21, Identity=85%"; Hit description=Pol
MSMMNELNYFLGFQVKQLKEGMFISQRKYTQDLLKRFGMNDAKPFKTLMGTDGHLDLVKGEY

SEQ ID NO: 72278 - protein, 101 aa, Zea mays
  Coding DNA Sequence Number=SeqID_30499
MPPVKPLSRQCSIPCAWPCGCTSVREIRPCPRDELGDLKLRGIPNWSAQQERKYPSPWSARLHRLTYKPMANCEINLQSSVVIESLPAGPEFYWLAPEPSE

SEQ ID NO: 72279 - protein, 135 aa, Zea mays
  Coding DNA Sequence Number=SeqID_30500
  Subcellular localization annotation: CTP_CleavageSite=38; ConfidenceScore=5.16e-01
MGRRPWTSRLGKPTGAASIARRCTSAIVDSSAAAGSVVCALTVARILEYGVRPRGSGSAGRWWRSIAAGYRGRRESELRHGQGPGRIVSWIGVSHEIHGGRAFVKTESDEQATVESEVQQVEIAEQELIEGKLCP

SEQ ID NO: 72280 - protein, 45 aa, Zea mays
  Coding DNA Sequence Number=SeqID_30501
MAQAEAVFSIDDTKDPSAEATLMGERKVPYRGIALIVILFEMDNV

SEQ ID NO: 72281 - protein, 132 aa, Zea mays
  Coding DNA Sequence Number=SeqID_30502
MERHQRPAEPLPLGLTPYSRIRAKRTIGVMGKGVHTNGQGVDDAAPRQPRNQRWRWYTGEQLMRHQSAFPTAKSTDASPWGSIGAPTSRRGSTDAVMVGLDPRVAGAAGRLVFVAGEVYDQVERWPVIIALG

SEQ ID NO: 72282 - protein, 123 aa, Zea mays
  Coding DNA Sequence Number=SeqID_30503
MAATLHAPALRRERPHGAKRALPHHRTGPMLTYRALPHRLCCSRAGATVAMGDSHVAKALLLHTGCYTLLCKIPCKGPHKSNMKLGGYIYQNCPFYNVMKMLNGSYHCVPLLEMVKTYIKRSI

SEQ ID NO: 72283 - protein, 85 aa, Zea mays
  Coding DNA Sequence Number=SeqID_30504
  Homolog annotation: Hit_ID=Q676Z8; Match level="QueryCoverage=52%, HitCoverage=25%, E-value=2e-09, Identity=66%"; Hit description =Multisubunit regulator protein COP9
MAEFIKNKIETFNDLMIFFLVFSIRFTSWQVECVSSALEDAVQIGWSLGAATKMLTVKKPKAQINQKLDASKLQRLTECVFHLEH

SEQ ID NO: 72284 - protein, 131 aa, Zea mays
  Coding DNA Sequence Number=SeqID_30505
  Gene Ontology: Mol. function=protein phosphatase type 2A regulator activity; Cellular component=protein phosphatase type 2A complex; Biological process=signal transduction
  Homolog annotation: Hit_ID=Q8L6I5; Match level="QueryCoverage=82%, HitCoverage=21%, E-value=3e-35, Identity=63%"; Hit description =Hypothetical protein B'teta
  Pfam annotation: Domain name=B56; Domain location=1-110; Score= -217.8; E_value=0.00011; Accession=PF01603.10; Description=Protein phosphatase 2A regulatory B subunit (B56 family)
MYQKVVFMGPNWIVAERALFLWNNDHIETLIKQNYKVLLPIIYPALERNSRDHWNQAVRSLTLNVRKIFSDHDSTFFGECVQRFSDEELKQAESDSKRDAMWKRLEEMGASKPGGNHPLGAPNGKPSHAAG

SEQ ID NO: 72285 - protein, 136 aa, Zea mays
  Coding DNA Sequence Number=SeqID_30506
  Subcellular localization annotation: CTP_CleavageSite=41; ConfidenceScore=5.39e-01
MYHVPIPRSHQSRNLVTKTVSSNSPISSPKTSVCTVDCTVRRMEFEYGYRDGFLKDCDRPSAVVKVVSLNHQVTNSRQPLHICGEKACLCLSLPQTPLKLEPPVQGLPCLIHTPQSTSRNFINEGTRVVFNTGTAC

SEQ ID NO: 72286 - protein, 111 aa, Zea mays
  Coding DNA Sequence Number=SeqID_30507
  Subcellular localization annotation: CTP_CleavageSite=53; ConfidenceScore=5.25e-01
MKLWKETSRSSKTTTSSRCGNALGFWPTQRQVRTCGHCKPKLAPTEPTHRSILQVPGSDQTAAPHRSPASFDSVCLDDDRSIQFDLEDLNPNYLLLKYALPQLDSSEMLYT

SEQ ID NO: 72287 - protein, 291 aa, Zea mays
  Coding DNA Sequence Number=SeqID_30508
  Gene Ontology: Mol. function=sequence-specific DNA binding; Cellular component=nucleus; Biological process=regulation of transcription, DNA-dependent
  Homolog annotation: Hit_ID=Q8W4H1; Match level="QueryCoverage=78%, HitCoverage=46%, E-value=2e-26, Identity=34%"; Hit description=GATA transcription factor 28
  Pfam annotation: Domain name=GATA; Domain location=17-48; Score=33.3; E_value=8.3e-07; Accession=PF00320.17; Description=GATA zinc finger
  Subcellular localization annotation: CTP_CleavageSite=34; ConfidenceScore=5.01e-01
MASSPTTFLMDVSWQNAGTGTPLWRNGPPDKPVLCNACGSRWRTKGSLANYTPMHRNDNIDDDEPRVSKLKPPTSKLKSQKKKTNHIIMENGPFSGQNFRKMGDVDPSYRSSSGSAVSYSESCAPYGAADASEMTGSAQSHAWESLVPSRKRSCVTRPKPSPVEKLAKELNYIMHEEKLYYLSESSEEDLLYHSETPIGSFEIGSGSVLLRHPNSKSLEEESKTSSIPADNKSYITSESYSDSASFVVHSGNKAAINLNLPTARPKKSPLHMEDNARRDKLHYEISMSWRV

SEQ ID NO: 72288 - protein, 65 aa, Zea mays
  Coding DNA Sequence Number=SeqID_30509
MSNNIVSEAKRSIDSTIREDANMESKRIVKDIEYYFKGLNLEYVAEESLKPTTFLILAAPSDGQA

SEQ ID NO: 72289 - protein, 245 aa, Zea mays
  Coding DNA Sequence Number=SeqID_30510
  Gene Ontology: Mol. function=inositol or phosphatidylinositol phosphatase activity
  Homolog annotation: Hit_ID=Q6L5I9; Match level="QueryCoverage=29%, HitCoverage=11%, E-value=2e-17, Identity=58%"; Hit description ='putative inositol-1,4,5-trisphosphate phosphatase'
MKGEAEASGTSTPECTFATNCPAATAAYDADDDGVLEEEEEEAAHLTVTASPQPPLKLHTTRTPLRRGTCWGGECDEAQRSQAEDNRPVAMWEHITRETLNKISADKPKYKCHSDPPSPSRFKPCDDAFVMEDELIKLLSLGMIWPQPPLDMLAQCLPDNTKLFASGKVLRSYLSFQSANGDSGPFAEDNSVPNFKINYAAAKRKRPYFVRIISKHMGWSVPINNMGTKKPLTAHSKSTSINYNL

SEQ ID NO: 72290 - protein, 223 aa, Zea mays
  Coding DNA Sequence Number=SeqID_30511
MRSPLRVLKSGALALQFESSSLPKSGYATEDSTCTGGAPNLFMLPLEKLPLLVPSQYAVSDQDLLLEIPLNARHPEAELLCQPSQLMSSITSSSTSMGGVAEGEGVSLQHTLLQTWPNPLCSRGNLRARPYNMGRLAHGPLLALRETKPSNPRGLGHPVPEVCDGLRLGSSERRGALGPSHGRRQRPGWQSLLTEPSVCGTLMWKSSSEGNVFVFAPTDPNPN

SEQ ID NO: 72291 - protein, 372 aa, Zea mays
  Coding DNA Sequence Number=SeqID_30512
  Gene Ontology: Mol. function=nucleic acid binding
  Homolog annotation: Hit_ID=Q8LJR0; Match level="QueryCoverage=82%, HitCoverage=64%, E-value=1e-148, Identity=84%"; Hit description =Water-stress protein
MPAAKRKDFGFVTIDTHDNAVACAEGISNSEIGEGDHKAKVRARLSRPLQRPPRMKHGLRGNFRVGHGAPRGGRLQYARAPPPRRPPPRLVRPAGSRLPPIRSHPLKRPIYIRDRRPAMPMLDRARRLPPSGRSYDRRPPAPVYLKKSPRREYGRRDELPPPRSRAMIDYSPRVPVDRRPSLRDDYLPRGSGYSDLGPHSAPHLSDRRAYADDSYGGKFDRPLPVYREGRGHDYDTVSGSKRPYADMDDAPRYQEIGVRQSKARLDYDIGGSSARYGDTYNERPGRPHAGYSSSRSIPGHDSAYGSSRNGMSYGGSASSADAGGMYPPSYSGSYGSRGSDVGGSSYSSLYSGRNLGSSSGGYYGGSGSGSYY

SEQ ID NO: 72292 - protein, 97 aa, Zea mays
  Coding DNA Sequence Number=SeqID_30513
  Gene Ontology: Mol. function=protein binding; Cellular component =mitochondrion; Biological process=ubiquitin cycle
  Homolog annotation: Hit_ID=Q1SJZ0; Match level="QueryCoverage=68%, HitCoverage=20%, E-value=8e-11, Identity=44%"; Hit description =Cyclin-like F-box
MVPVEKTLKPWPPITNRPINCPLCNGPADISVDIRPDINSFDHFLSMRYIATDRPWLKLYGIRVQPVPPFSSLSYKPDPALIHHCLPDELMLEVMVI

SEQ ID NO: 72293 - protein, 92 aa, Zea mays
  Coding DNA Sequence Number=SeqID_30514
MRRVGEVVDSGDVAVEGRRSWRSLRAATSAPLRASCGGTAKEKQHGARVLAELCIGGLGTNQGRRWPWRPSVKSWPWWWSATMAVISGGEGH

SEQ ID NO: 72294 - protein, 139 aa, Zea mays
  Coding DNA Sequence Number=SeqID_30515
  Subcellular localization annotation: CTP_CleavageSite=65; ConfidenceScore=5.43e-01
MQSSASTRAPCCFSLAVPPQLALKGALVAARKERHDLRPSTATSPLSTTSPTRLIVVLTLARALCGSARGSEGDQERRAPKSLAAFSSKDVVDIARSGELSKAVTGAELSKGLCVPLCGEDAAHVVSHPVLEGKPNANH

SEQ ID NO: 72295 - protein, 100 aa, Zea mays
  Coding DNA Sequence Number=SeqID_30516
  Homolog annotation: Hit_ID=Q2PXN5; Match level="QueryCoverage=62%, HitCoverage=98%, E-value=3e-18, Identity=57%"; Hit description=RW1 -like protein
MVVAKEFCERQGDYYENLILRLMEDPDKRDQVRREHAYKMKERCERTKAAWSLPLRPYSFWTFDRFNSQLSWDLQISQAAGRRDPYDDLITRHSGSPPSS

SEQ ID NO: 72296 - protein, 370 aa, Zea mays
  Coding DNA Sequence Number=SeqID_30517
  Gene Ontology: Mol. function=cytochrome-c oxidase activity; Cellular component=membrane; Biological process=electron transport
  Homolog annotation: Hit_ID=Q2QPU1; Match level="QueryCoverage=91%, HitCoverage=90%, E-value=3e-92, Identity=49%"; Hit description =Nodulin, putative, expressed
  Pfam annotation: Domain name=DUF6; Domain location=16-149; Score =50.9; E_value=4.2e-12; Accession=PF00892.11; Description=Integral membrane protein DUF6
MDDWRKPYIVAIIVRVIITGMFVINKAAMDHGFNSFVFVFYRQVAASVLMVPIAVLLERRNARSMSSVLLFKIFVCALIGITVSSNLYNVSLKLTSATVVAASTNAIPVITFCLALLLRMEEVKLRSASGMAKLTGVALCLAGVLVIAFYAGELLSAVNHHHAFGAPAPTHAASSTAAAKTMTGAAWIKGTFITVLATLAWSLWLVLQAAVLKEFPNRMLVMATQCLFSVVQSFFAAVVAERDLSMWKLRLDVALLAVLYSGFVVAGVNYYLQAWCMEMRGPVFLAAWTPLSFALTVFCSSFFLGEMVHLGSLLWGKSREAKTVQRNIEASTADGDAQDEVHCWELEGEKENEGREERENGDLRTCVQQD

SEQ ID NO: 72297 - protein, 97 aa, Zea mays
  Coding DNA Sequence Number=SeqID_30518
MARLHLHCFASRFHCLLALLHGWRLAGQEPRTWKERPRRCSGLRARHGARRVTATGQEPRTRRERPRRHGPTAVLRPPAYGRETARGEWRLPATGKA

SEQ ID NO: 72298 - protein, 131 aa, Zea mays
  Coding DNA Sequence Number=SeqID_30519
  Gene Ontology: Mol. function=adenyl-nucleotide exchange factor activity; Cellular component=mitochondrion; Biological process =protein folding
  Homolog annotation: Hit_ID=Q7XQP9; Match level="QueryCoverage=93%, HitCoverage=42%, E-value=1e-46, Identity=75%"; Hit description=GrpE protein homolog
  Pfam annotation: Domain name=GrpE; Domain location=1-127; Score=4.8; E_value=1.8e-06; Accession=PF01025.9; Description=GrpE
EKFIRLNANLENFRKQAEKDGAKFTSNIRVDVVQSLLPLVDSFEKTKLENTPGTEKEQMVSTSYQGIYKQLVETLRYLGVGVVETVGNPFDPLVHEAISREASMQFKAGIVMHEVRKGFHLKEKDAKGLLL

SEQ ID NO: 72299 - protein, 52 aa, Zea mays
  Coding DNA Sequence Number=SeqID_30520
SERRPTLSQMDHVLGRRSLWLMGKETWTEELSRQPLSNTAIANVSPQSTVCR

SEQ ID NO: 72300 - protein, 97 aa, Zea mays
  Coding DNA Sequence Number=SeqID_30521
MADRFKAIDGIHGASMRDRETDALKFINTKDERTAAGSVSVPAGDFVAVGVAVVGGLVRSGRRDAGALLGEGRLGAALGRSASVVAASQLASWRLRS

SEQ ID NO: 72301 - protein, 107 aa, Zea mays
  Coding DNA Sequence Number=SeqID_30522
MVRMSKAHESMGEGSKMWDRLWGSGKYLKTKSGVGKEGNWPGLIWLDLHGHGNMVAFMQKEGEQGEKERELEEKEMRLSPSREGDHVVGRPRVFIEFMRHLEIEYLI

SEQ ID NO: 72302 - protein, 39 aa, Zea mays
  Coding DNA Sequence Number=SeqID_30523
MSVGLWKPIGSFALRHLCSFELRSVALTMVPLSVILVPI

SEQ ID NO: 72303 - protein, 481 aa, Zea mays
  Coding DNA Sequence Number=SeqID_30524
  Gene Ontology: Mol. function=transcription regulator activity; Cellular component=nucleus; Biological process=regulation of transcription
  Homolog annotation: Hit_ID=Q5Z610; Match level="QueryCoverage=95%, HitCoverage=87%, E-value=9e-68, Identity=39%"; Hit description=Basic helix-loop-helix protein-like
  Pfam annotation: Domain name=HLH; Domain location=292-341; Score =41.6; E_value=2.7e-09; Accession=PF00010.16; Description=Helix-loop -helix DNA-binding domain
MEHRHLFCVDAWISNGSVARATAVFDEYRRALCGIVSGLALHCNSISGSRHEDGGVHGLRQRRDRGRVVVEHLGASGGDPLQDSLLEELMQAAPTVPSSSSSSMPSLSIGSPEYSSLIRSMATSSAAAAAAATGTTEPSSQQRQLHRAVPLPGLAAPVYGPRGQAPFLDPDSEQAAMTQAILAVISSSAPPPLASIAVPPASSPWLVRHRAQRSSPRRWRGAFRAYNAALSPRARPRPGVPGQRMIKTSIALMVSLQMAMRHRELAEARQQHEDAVAATQPPTTTQQQHTSSQLHHMFSERRRRERLNESFQTLRALLPPGTKKDKATVLANTTEYMKKLIADVSELEERNRRLEAQLGLPGETQQTPSDDDPSERVAVDVTTGASTSSSTSCRPRQVSIRVTARAECDLSEVVVAMLAQIKEMGRFTVVTVDARQRSGAHAQVAIILQATGGNDDLDETSLKEAVAKAVEDAVAGPSSPP

SEQ ID NO: 72304 - protein, 210 aa, Zea mays
  Coding DNA Sequence Number=SeqID_30525
MEAPPAPPQGISAAGGADGADPDSNGDGGGSLSHNTMLSEDRGLYLDRWEATCLVRRPEDDLRGAEVCLEHYPISERDTVEVAMQDAAHRALLQYCTLFSGVAYGLNLKYYPCRSTSSTRSVIISPIGEDNPRLNSVANLVVVVNTELEHSLDELSRARAEITELRCAERRHQEYGSCALAGTQHPYRSPPRGYHAYGKPDCRTKLDLDQ

SEQ ID NO: 72305 - protein, 568 aa, Zea mays
  Coding DNA Sequence Number=SeqID_30526
  Gene Ontology: Mol. function=oxidoreductase activity; Cellular component=integral to membrane; Biological process=electron transport
  Homolog annotation: Hit_ID=Q9LGS7; Match level="QueryCoverage=82%, HitCoverage=100%, E-value=0.0, Identity=70%"; Hit description =Putative cytochrome P450
  Pfam annotation: Domain name=p450; Domain location=130-559; Score =73.5; E_value=6.8e-19; Accession=PF00067.12; Description=Cytochrome P450
MERVEEVEEAAEAMERVEEVEEGGDPAEAMERRRRPKRGSLSDRLRHEPSYKFLSFNSGPRSCIGKDVSLSNMKITAASTIHNFKVELLQESGAMEMVPWLLGFLGRYPELMVSLACFLLLFRRLNQRDGLPTNWPVVGALPAITVNAGRMHEWVTEFLRAAGLSYVMKGPWGSPVDVIMTADPANVAHVFTSNFGNYPKGQEFAALFDVLGDGIFNADGESWAFQRRKAHALLSDARFRAGVAASTARKLRDALVPLLDGIAASGAVVDLQDVFVRLTFDLTAMFVFGIDPGCLAPDFPYVPFAAAMDTVEEVLFYRHVAPVPWLMLQKYLRTGHSKKMWNARRVLDASIAEFISLRRERAAEAEAEADLLTSYLACHDEIGKSGAELERFLRDTTLNLMVAGRDTTSSALTWFFWLLTKHPDVEAKVLEELRAHPPLSGAGGHRTAAELKQLVYLHAALSESLRLYPPAVWGKDCSEFRPERWLTAAGRFRHEPSYKFVAFNVGPRTCLGRDLAYSQMKAVVAAVLPRFRVEVDAGAVVRPKLSIILHMKDGLKVRVHKREEDGLC

SEQ ID NO: 72306 - protein, 105 aa, Zea mays
  Coding DNA Sequence Number=SeqID_30527
MTVPVLETNATRSYFPPVPNSRNQRAQLELVAALPLPFSFWEKLEKIASEGRQDSRSSEASQVQRPRFPRFGYYLYTQIISATERAIIARTVKMRACKERSKCGC

SEQ ID NO: 72307 - protein, 175 aa, Zea mays
  Coding DNA Sequence Number=SeqID_30528
  Homolog annotation: Hit_ID=Q9LTR7; Match level="QueryCoverage=41%, HitCoverage=50%, E-value=1e-18, Identity=53%"; Hit description =Arabidopsis thaliana genomic DNA, chromosome 5, P1 clone:MHM17
MGSMCSMKSLTQVILSKEVLRRTGKNWMLVYLSCVNISMGCAGKYALLRDEENPRLAIFERRLPCCGCGIGWSTFLLGFLCPLIWYFAAILYCCKYYNKDPRERPGLAASAVANLGPGRVSAFGEVIPLDAGKTLSRTSSVEGRPTMGLWCQSGIHWALCPEAMPYKLRALCRRP

SEQ ID NO: 72308 - protein, 364 aa, Zea mays
  Coding DNA Sequence Number=SeqID_30529
  Gene Ontology: Mol. function=protein serine/threonine kinase activity; Cellular component=membrane; Biological process=protein amino acid phosphorylation
  Homolog annotation: Hit_ID=Q84SH0; Match level="QueryCoverage=99%, HitCoverage=49%, E-value=1e-127, Identity=67%"; Hit description =Serine/threonine kinase receptor-like protein
  Pfam annotation: Domain name=Pkinase; Domain location=9-255; Score =154.9; E_value=2.1e-43; Accession=PF00069.15; Description=Protein kinase domain
  Pfam annotation: Domain name=Pkinase_Tyr; Domain location=9-246; Score=118.0; E_value=2.8e-32; Accession=PF07714.7; Description =Protein tyrosine kinase
  Pfam module annotation: Pfam domain module=Pkinase::Pkinase_Tyr; Domain location=9-255::9-246
MLRAATDNFAESNRLGEGGFGTVYKGVLPDNQEIAVKRLSQSSGQGIQELKNELVLVAKLQHKNLVRLVGVCLQEYEKLLVYEYMPNKSIDTILFDSEKSKELDWGKRVKIIDGIARGLQYLHEDSQLKIIHRDLKASNVLLNSDYTPKISDFGLARLFGGDQSREVTNRVVGTYGYMSPEYAMRGHYSIKSDVFSFGVLILEILTGRSSSGSFNIEQSVDLLSLVRHYTIPKPTKVFASEMITKFAFDTGLGALDNGNNCGDHGSISERQSSCRTDAEKCPYRATVCSDNPVDRPKMSTVNIMLSSGTMPLQSPLKPAFFIPKSGYYSTVHSESYPIASRSVDNGKPGAISPNEVSITELEPR

SEQ ID NO: 72309 - protein, 187 aa, Zea mays
  Coding DNA Sequence Number=SeqID_30530
  Gene Ontology: Mol. function=carboxyl- and carbamoyltransferase activity; Cellular component=ornithine carbamoyltransferase complex; Biological process=amino acid metabolic process
  Homolog annotation: Hit_ID=Q8SA97; Match level="QueryCoverage=60%, HitCoverage=21%, E-value=4e-17, Identity=46%"; Hit description =Ornithine carbamoyltransferase
MAPPVDVAGLRPRLGDVEAPPKPRSSLSSVAEVESEPLGRARRRPSAEARAESEPWGRAKRSSSSSGAEPESESWVGRSEVRRLPGLSPSPSPGSGGAEFAVFRDLARVRALGRAERSGAVLLSGRSVEQRSDGGHFVSAGWGVRVRIKGLGRAGNMFVVGGGPRARQKSSGLYADGSYQLRIRSLE

SEQ ID NO: 72310 - protein, 154 aa, Zea mays
  Coding DNA Sequence Number=SeqID_30531
  Homolog annotation: Hit_ID=Q9LM33; Match level="QueryCoverage=25%, HitCoverage=10%, E-value=3e-12, Identity=91%"; Hit description =Mitogen-activated protein kinase 8
MPDMTDASFNSLLQQMYSIEISNQKIFWQMLIDYVATRWYRAPELCGSFFSKARDCVLCFYATQINKACPSLKSRGSGRREDQRHIRLEDKADTQDVKGRHHMGSSHGDLDDQTLGLFGSTFFLTSFYENPDSWRIWLWGESEHRGGLRAEEDE

SEQ ID NO: 72311 - protein, 77 aa, Zea mays
  Coding DNA Sequence Number=SeqID_30532
  Gene Ontology: Mol. function=RNA methyltransferase activity; Biological process=RNA processing
  Homolog annotation: Hit_ID=Q75KG9; Match level="QueryCoverage=80%, HitCoverage=40%, E-value=2e-11, Identity=47%"; Hit description =Putative OBP33PEP
  Pfam annotation: Domain name=SpoU_methylase; Domain location=6-77; Score=-41.9; E_value=0.0086; Accession=PF00588.9; Description=SpoU rRNA Methylase family
MAAAVESVVVVHNVAKRHNVGTLARSATAFGVAEVVVVGRRDDERGCDICGVEITDDAQPVTAHPFRRSTAFLFGNE

SEQ ID NO: 72312 - protein, 105 aa, Zea mays
  Coding DNA Sequence Number=SeqID_30533
MTSTHLYCSTTALAKLAGCAYWRIRRHRKAGQWGTDGGRRNNPVAESDSADGGQHAGEQASRGLTTKGSPRINIGGKNSNASHMCVRLKFTYIITRCTEINVTIF

SEQ ID NO: 72313 - protein, 80 aa, Zea mays
  Coding DNA Sequence Number=SeqID_30534
  Subcellular localization annotation: CTP_CleavageSite=44; ConfidenceScore=5.06e-01
MEEPDGSIKLHKKKGDKKKNKMVYYETNSSTPSTSDAESTSSKRQERKNSSLGVRLWVPPKNRSNKNLSLPHLKQRGTKP

SEQ ID NO: 72314 - protein, 161 aa, Zea mays
  Coding DNA Sequence Number=SeqID_30535
MGLNMEAGLLHAEFSLQPLSLNRDRASYLVNMAAFELCTVQSFGAAPDEDSAVCSYLLLLAMLAYREEDVHELRVRGLLQGGGGLTNEDALRFFTSLQGLRLGKRYLHVMQQIARYQENRPKRTKWNEFWYHNKKIVTTVFACLVSLAGITGTLVSIKNAL

SEQ ID NO: 72315 - protein, 49 aa, Zea mays
  Coding DNA Sequence Number=SeqID_30536
  Gene Ontology: Mol. function=transferase activity; Biological process= isoprenoid biosynthetic process
  Homolog annotation: Hit_ID=O04882; Match level="QueryCoverage=82%, HitCoverage=11%, E-value=3e-12, Identity=85%"; Hit description =Farnesyl pyrophosphate synthase
MAMISDLEVFQAYERESYNKLIADIEAQPSKAVQSVLKSFLHKIYKRDK

SEQ ID NO: 72316 - protein, 92 aa, Zea mays
  Coding DNA Sequence Number=SeqID_30537
  Gene Ontology: Mol. function=molecular_function; Cellular component =clathrin vesicle coat; Biological process=intracellular protein transport
  Homolog annotation: Hit_ID=Q54HS9; Match level="QueryCoverage=96%, HitCoverage=25%, E-value=7e-22, Identity=49%"; Hit description =Clathrin-adaptor medium chain apm1
MAGAVSALFLLDMKGRVLVWRDYRGDVSALQAERFFTKLLDKEHNNVFLLTAARQNCNAASILLFLHRVIDVFKHYFEELEEESLRDNFVVV

SEQ ID NO: 72317 - protein, 658 aa, Zea mays
  Coding DNA Sequence Number=SeqID_30538
  Gene Ontology: Mol. function=transporter activity; Cellular component= integral to membrane; Biological process=transport
  Homolog annotation: Hit_ID=A0EXC0; Match level="QueryCoverage=64%, HitCoverage=96%, E-value=1e-179, Identity=67%"; Hit description=High affinity nitrate transporter NRT2.5
  Pfam annotation: Domain name=MFS_1; Domain location=192-486; Score =7.7; E_value=0.00014; Accession=PF07690.6; Description=Major Facilitator Superfamily
  Subcellular localization annotation: CTP_CleavageSite=72; ConfidenceScore=5.25e-01
MDAAVWGGANVGPANRIPKIRRSGAAVVPQAKELASKVRGQNLSSSQPGPLVRPRQRHQPARKHKSRDARARAAPVKSAPLPCAPPRRPPTGSLHLMLQIFIGFHVAPSPSPTIDRAAPAAASQLALYKHHASGDMAEGEFKPAAMQVEAPAEAAAAPSKPRFRMPVDSDNKATEFWLFSFARPHMSAFHMSWFSFFCCFLSTFAAPPLLPLIRDTLGLTATDIGNAGIASVSGAVFARVAMGTACDLVGPRLASAAIILLTTPAVYYSAVIDSASSYLLVRFFTGFSLASFVSTQFWMSSMFSPPKVGLANGVAGGWGNLGGGATLSAVAVLAFDKDMPDGNYRKLHSSPWTNIVAQYFYDRFGVKLSTAGFIAASFGMANIVSRPGGGLLSDWLSSRFGMRGRLWGLWVVQTIGGVLCVVLGAVDYSFAASVAVMILFSMFVQAACGLTFGIVPFVSRRSLGLISGMTGGGGNVGAVLTQLIFFHGSKYKTETGIKYMGFMIIACTLPITLIYFPQWGGMFLGPRPGATAEDYYNREWTAHECDKGFNTASVRFAENSVREGGRSGSQSKHTTVPVESSPADVLGRDRELRLARPQASASALASGEGLRLARPQASASGGVTSSPDLGLGLRRSLRLARPRPRTDYATGDTSLPYP

SEQ ID NO: 72318 - protein, 80 aa, Zea mays
  Coding DNA Sequence Number=SeqID_30539
  Subcellular localization annotation: CTP_CleavageSite=55; ConfidenceScore=5.30e-01
MALQPQLAPALSYGALPPPPLLSMAALPASWWSAPSPTSLLQYNGVHNLSGTIISGTLKAPNSQLVTPISIKLQRPDVRD

SEQ ID NO: 72319 - protein, 180 aa, Zea mays
  Coding DNA Sequence Number=SeqID_30540
MRELGSSLSPPSVTVLTIAAHELRCRCAPYDGYNGDDDFELTPLLFRTRRSARTERPRIVAVQVAAITVAQPQPPQRPRRGAPSGVAAVAATPAPAPQRKKQQQQVRWHDMAFGTVRLPAATSMGEIRRRLRARQALQAGGAANEPSSSAAAWAPWRLIRSLSCRGVEAVSAAAAPVRLV

SEQ ID NO: 72320 - protein, 443 aa, Zea mays
  Coding DNA Sequence Number=SeqID_30541
  Subcellular localization annotation: CTP_CleavageSite=20; ConfidenceScore=5.17e-01
RLLSISSSSPLPRSPPSTTVCTAASSCPSLCCSVLPLDKGKAVYLEQQGGKKKRRLDRATRAAVATAAAADQAEQGGQLRISSDQIAFLVHRLSSRTYSSTARSTPSDPVTTPPPTSPAPATHENSTTPAAPTTSTTPASTAPAPISAPPIPPPRFRERDETEVRPLAVDPPVGAESEGHITYLDGLYSLLTFGGRYVEEWIRVFYATVWIDPDHQWMRFRFERDYVTLHAAQIRELFGFPESSTRLQIFNVVDFLICAIEDTMLDGLHARRQLPYAHYLCHIFAQLIQPLQFQAPLEASRLQFGFYRPAPEDTAPALVDPLAPNFRVEDKAIRQFEDQGATAETSSDDDEDPRIPLPPPVPPRSHDHEAGGSSATPSATPPMIDPTLAKILQSLTQQQAHMAVEQARQAAEQARRAAIQHQLSEQMPVTLDFSTQVVGPVNT

SEQ ID NO: 72321 - protein, 135 aa, Zea mays
  Coding DNA Sequence Number=SeqID_30542
MAEDLQEINHRRRFSAANGEISQTKACVGADRRSSGASGVPSRGTKVFDTNCHDPVAAAHCERREKGRMRGEEDIVRNGRDTAPQHHRRIEWNMVWSPRARIEYPIHGTAVDVRAPPPWFDWAMNIRYQFRCDRI

SEQ ID NO: 72322 - protein, 119 aa, Zea mays
  Coding DNA Sequence Number=SeqID_30543
MERDPPNQDEDDDQPAKWIAHAARLPRRRRVQIGTASSLQLGTWLSRRPPGDELFCWIESSCPSHVKTAAKAAPVFPGLDPARRTRSAVCVCVHGPPRAARVGGSWEEEETNSAAQRRA

SEQ ID NO: 72323 - protein, 601 aa, Zea mays
  Coding DNA Sequence Number=SeqID_30544
  Gene Ontology: Mol. function=RNA-directed DNA polymerase activity; Cellular component=intracellular; Biological process=RNA-dependent DNA replication
  Homolog annotation: Hit_ID=Q8S463; Match level="QueryCoverage=99%, HitCoverage=32%, E-value=0.0, Identity=88%"; Hit description =Putative prpol
  Pfam annotation: Domain name=RnaseH; Domain location=312-439; Score= -0.5; E_value=6.4e-05; Accession=PF00075.14; Description=RNase H
MPFGLRNAGATYQRCMNHVFGEHIGRTVEAYVDDIVVKTRKASDLLSDLEVTFRCLKAKGVKLNPEKCVFGVPRGMLLRFIVSERGIEANPEKIAAITSMGPIKDLKGIQRVMGCLAALSRFISRLGKRGLPLYRLLRKAECFTWTPEAEEALGNLKALLTNAPILVPPAAGEALLIYVAATTQVVSAVIVVERQEEGHALPVQRPVYFVSEVLSETKIRYPQVQKLLYAVILTRRKLRHYFESHPVTVVASFPLGEIIQCREASGRIAKWAVEIMGEAISFAPRKAIKSQVLVDFVAEWVDTQLPTALIQPELWTMFFDGSLMKTGAGAGLLFISPLGKHLHYVLRLHFPASNNVAEYEALVNRLRIAIELGVRCLDARGDSQLVIDQVMKNSHCRDPKMEAYCDEVRRLEDKFYGLELNHIARRYNETADELAKIASGRTTVPLDVFSRDLHQPSIKIDDTPEPEAPSARPEAPSVQPEAPMAPEGEALRVEEERSGVTPNQNWQTPYLQYLHRGELPLDRAEARRLARRAKSFVLLGDGKELYHRSPSGILQRCISVTEGQELLREIHSGACGHHAAPRALVGNAFRQGFYWPMAVAD

SEQ ID NO: 72324 - protein, 113 aa, Zea mays
  Coding DNA Sequence Number=SeqID_30545
MALLQRVGRAGTRTRQALTRLERVSEEAHSSRLQLCGNGQTRTFLSSSLAMTTDKVNWSLCRNQSKGDVDLKELPVLHVLWNESAGYAWIPKEQSAAAALQVHGQSRVRNDEA

SEQ ID NO: 72325 - protein, 98 aa, Zea mays
  Coding DNA Sequence Number=SeqID_30546
  Subcellular localization annotation: CTP_CleavageSite=58; ConfidenceScore=5.52e-01
MQAACNRAKWAHFSDFQRAQHGGPGPHVMQPARRMLRASDCTATRATTAPPRLRNQCRGSRRPSTRPGSASLARRDRERGIPRKGSFSVKEPGSEPPY

SEQ ID NO: 72326 - protein, 347 aa, Zea mays
  Coding DNA Sequence Number=SeqID_30547
  Gene Ontology: Mol. function=hydrolase activity, hydrolyzing O -glycosyl compounds; Cellular component=cellulose and pectin -containing cell wall; Biological process=polysaccharide catabolic process
  Homolog annotation: Hit_ID=Q69NF5; Match level="QueryCoverage=96%, HitCoverage=65%, E-value=1e-152, Identity=79%"; Hit description =Endoglucanase 23 precursor
  Pfam annotation: Domain name=Glyco_hydro_9; Domain location=2-335; Score=190.2; E_value=5e-54; Accession=PF00759.9; Description =Glycosyl hydrolase family 9
  Subcellular localization annotation: CTP_CleavageSite=61; ConfidenceScore=5.12e-01
MDPDRKVTRVKRGAPGVEHSGGRRRCQCGSVHVVSRRRPGVRRDAAHERKGRRSSSRTRTRARTATTRTSGQGAAPSTATSNGYQDELLWGAAWLRRASKDDTFLQYIQNNGKTLGAEDSSNEFGWDNKHAGLNVLVSKEFIEGAALPLQSYKEFADSFVCTLIPESSSSPHITYTPGGMIYKPGGSNMQHVTSISFLLLTYAKYLSKSSHTVDCGDVSVGPETLQLQAKRQVDYLLGDNPMKMSYMIGYGDRYPQRIHHRASSLPSIRDHPQPMACKEGTPYFNSSGANPNPLVGAVVGGPGEDDAYEDDRADFRKSEPTTYINAPLVGVLAYFVGNPNPGHNTRH

SEQ ID NO: 72327 - protein, 466 aa, Zea mays
  Coding DNA Sequence Number=SeqID_30548
  Gene Ontology: Mol. function=DNA binding; Biological process =regulation of transcription
  Homolog annotation: Hit_ID=Q84NK2; Match level="QueryCoverage=63%, HitCoverage=76%, E-value=4e-53, Identity=45%"; Hit description=Myb family transcription factor-like
  Pfam annotation: Domain name=Myb_DNA-binding; Domain location=233 -284; Score=37.6; E_value=4.2e-08; Accession=PF00249.21; Description =Myb-like DNA-binding domain
  Subcellular localization annotation: CTP_CleavageSite=67; ConfidenceScore=5.35e-01
MEARAASVPDLSLHISLPSSAASPSPAPGLGAGGVGRGAQPSGGDPWRRLNGSTASTELSLSPPPPRQEAAAGDVLPWRLRPPAANYSSSTAEATFLPVTVPRLSFDAAAEAAPARPINGVPVYSSPRTGAAHPFLGAGGEYRQCHHHKAAVGAIQSLPLLVVVALVPAVDDDGAPWRRGAAGVRPHGVVGVLADTLRGYGSGHHHRQHLGSLAAARYMPRLPASRRGMRAPRMRWTSSLHARFVHAVELLGGHERATPKSVLELMDVKDLTLAHVKSHLQVEFRPMRTVKSTDKPPAATSSGGGGPPVDGGGGSGDDDHPSDWRRAPSSSAGRDVSPQAFTGHRSASSDGAASHAGGDVECSSADDSDGGRPRSASPPREGATLAARLRTVRAAAEGIARRYTARDEGCRSTKISRKGLNVVSPDSDTRLTNLPIAKHEELEDYREKVDEEFQQQKAQWREVAEK

SEQ ID NO: 72328 - protein, 133 aa, Zea mays
  Coding DNA Sequence Number=SeqID_30549
  Subcellular localization annotation: CTP_CleavageSite=63; ConfidenceScore=5.06e-01
MAEPPDTPATKSWSHLAAPRAMETPAPPLRNRCSAAQLDLKQKAFSPSHSGPPIIHSRESFFYAGLAKNTSGWRSRLQSQWSVEKGRRSCATETVPGLGGCGRRLEMVDWWPALEEADGAGEDEQPEQSRGEL

SEQ ID NO: 72329 - protein, 134 aa, Zea mays
  Coding DNA Sequence Number=SeqID_30550
  Gene Ontology: Mol. function=pyruvate kinase activity; Cellular component=cellular_component; Biological process=glycolysis
  Homolog annotation: Hit_ID=Q43117; Match level="QueryCoverage=44%, HitCoverage=10%, E-value=2e-22, Identity=90%"; Hit description =Pyruvate kinase isozyme A, chloroplast precursor
MQLLFFQTTVNAPHRRSIQRTPWNGIEGNCAMWMRVKQKIVQLCRQLNKPVIVASQLLESMIEYPTPTRAEVADVSEAVRQRVDALMLSGESAMAEPAVGSDRGGRKEMALHARGRQRRRRNGKQTACVEAVRA

SEQ ID NO: 72330 - protein, 239 aa, Zea mays
  Coding DNA Sequence Number=SeqID_30551
MASTEKGTEEGGVGDGLHLIAMNHIGSVNFGGVAAQRLNGGLGWFDRASATASERRAEHGKRRGGKNRGRSLLQAAARLDGEKSEEPHGVAEGLTSMVILNLAPNGEERPGVRRGGSGDVHDGGRSGELGQGMAEAGARNGRARCSRGWSGRGLDSPASSGVGVGVAGSGGNSDGLEWEMMASSAGERERVGLSFYRGRGEGFMVPREGGGRRPSRPLMVSVNGRVIMGEEGRRRGGHF

SEQ ID NO: 72331 - protein, 77 aa, Zea mays
  Coding DNA Sequence Number=SeqID_30552
MASTEKGTEKRGVGDGLHLTSMNHRGSANFGGVAAQRLNGGLGCFDRASATASERRAEHGKRRGGYGWREEDDAQIT

SEQ ID NO: 72332 - protein, 96 aa, Zea mays
  Coding DNA Sequence Number=SeqID_30553
CQHKRFCVNLCKVVDKVQIKSKAKSAQSGCTGLSGGAPDCPVVHRTVSGEVIGLGKPSTAYGYNSPDCSVRHRTVRITFSRPPSRCSQLVSKPFSS

SEQ ID NO: 72333 - protein, 114 aa, Zea mays
  Coding DNA Sequence Number=SeqID_30554
MCATQRGGSELELLLAVHVRGRGKWRVGGRSRKRGSAFKGHHRGSRLLLIKRGGVDHWCRAAAPAGWLWPLAKLPRGWLLYALTGACMQRGAEEVCVREQVYARDPSYKNSRAF

SEQ ID NO: 72334 - protein, 338 aa, Zea mays
  Coding DNA Sequence Number=SeqID_30555
  Gene Ontology: Mol. function=pepsin A activity; Biological process =proteolysis
  Homolog annotation: Hit_ID=Q9LTW4; Match level="QueryCoverage=99%, HitCoverage=79%, E-value=1e-56, Identity=36%"; Hit description =Chloroplast nucleoid DNA binding protein-like
  Pfam annotation: Domain name=Asp; Domain location=13-334; Score= -197.4; E_value=0.06; Accession=PF00026.14; Description=Eukaryotic aspartyl protease
  Subcellular localization annotation: CTP_CleavageSite=59; ConfidenceScore=5.10e-01
MPLSSGAYTGTGQYFVRFRVGTPAQPFVLVADTGSDLTWVKCRGAAGPPASDPPAREFRASESRSWAPLACSSDTCTSYVPFSLANCSSPASPCAYDYRYKDGSAARGVVGTDAATIALSGSGSEDGSGGGGRRAKLQGVVLGCTATYDGQSFQSSDGVLSLGNSNISFASRAAARFGGRFSYCLVDHLAPRNASSYLTFGPGPEGGGAPRRGGRRWCSTAGLTVLATPAYRAVVAALGGRLAALPRVAMDPFEYCYNWTAGAPEIPKLEVSFAGSARLEPPAKSYVIDAAPGVKCIGVQEGAWPGVSVIGNILQQEHLWEFDLRDRWLRFKHTRCAL

SEQ ID NO: 72335 - protein, 117 aa, Zea mays
  Coding DNA Sequence Number=SeqID_30556
  Gene Ontology: Mol. function=hydrolase activity; Cellular component =cytosol; Biological process=regulation of progression through mitotic cell cycle
  Homolog annotation: Hit_ID=Q0WWV2; Match level="QueryCoverage=98%, HitCoverage=32%, E-value=3e-44, Identity=78%"; Hit description =Phosphoprotein phosphatase
MDLDLWISKVKEGQHLAEHELQSLCEYVKEILIEESNVQPVNSPVTVCGDIHGQFHDLMKLFATGGHVPETNYIFMVRPFPLSLFHGSRGCWKGDFVDRGFNSLEVFTILLLLKARV

SEQ ID NO: 72336 - protein, 68 aa, Zea mays
  Coding DNA Sequence Number=SeqID_30557
MAAEVSDEEDVAAGRYPLDESVGEQRMDRVAEDVRESVARRVSLSWRRKTNNDPEEGDDDGGRRLAWR

SEQ ID NO: 72337 - protein, 60 aa, Zea mays
  Coding DNA Sequence Number=SeqID_30558
DAEAGEFLQGGARGRAMGREGTRPSPRVGRTASPPASDRGRRNWFWRNQNGFVTPILPGG

SEQ ID NO: 72338 - protein, 74 aa, Zea mays
  Coding DNA Sequence Number=SeqID_30559
MDLFGPIAYKTIVGRKITNPRDFEGILETGSVGVSNPGVPGPTSKLSPHAPAQMGQRETKREGGKKPEGDRRER

SEQ ID NO: 72339 - protein, 84 aa, Zea mays
  Coding DNA Sequence Number=SeqID_30560
  Pfam annotation: Domain name=Ribosomal_L30_N; Domain location=13-61; Score=-7.4; E_value=0.02; Accession=PF08079.2; Description=Ribosomal L30 N-terminal domain
MSSEAVKVTMLESMFRRRKREEQWAVKKKKAMPEKKKSIERRKLIFSRAKRWVVGLVCGMPFSSLWPVESRFDWVGPWLYVDPR

SEQ ID NO: 72340 - protein, 285 aa, Zea mays
  Coding DNA Sequence Number=SeqID_30561
  Gene Ontology: Cellular component=integral to membrane
  Homolog annotation: Hit_ID=Q5W7C1; Match level="QueryCoverage=95%, HitCoverage=94%, E-value=8e-96, Identity=71%"; Hit description =Unknow protein
  Pfam annotation: Domain name=UPF0014; Domain location=25-274; Score =88.6; E_value=1.9e-23; Accession=PF03649.4; Description =Uncharacterised protein family (UPF0014)
  Subcellular localization annotation: CTP_CleavageSite=83; ConfidenceScore=5.21e-01
MARHAGTALLDLVAGQVDPGAPGFWRDFLVGMLKPAAATAVVAMAVGLSFSQRLGARGRDALRHRTRLPPALRHRLRPPVHLRPEERALDPPRLPLHGMYVTVAGYTAGQRARQVPRGKRIACVSILVGTAVTMLLLVLLDVFPFTPRYIIPVAGMMVGNAMTVTGVTMKKLREDVKIQRNLVETALALGATPRQATLQQVKRSLVIALSPVIDSAKTVGLIALPGAMTGLIMGGASPLEAIQLQIVVMNMLMGASTVSSILSTYLCWPAFFTKAFQLDDRVFAD

SEQ ID NO: 72341 - protein, 87 aa, Zea mays
  Coding DNA Sequence Number=SeqID_30562
MALAAHASLLQPKITASVPIGEKGSETHGAAAQGLVCVGMPAWLRSAQAIAGDEQAHPPEAGILHQFDAGELFCLVSYWFDESRCAG

SEQ ID NO: 72342 - protein, 152 aa, Zea mays
  Coding DNA Sequence Number=SeqID_30563
MGKGRRGRGLPRCAGSKRKRASSPPSEDFNDSKGLSTAVRAYWRAIERVGLGGSDESGISSDEVDLSDSSEEWSGGDGDGKGDGSSNDDDGGDGSSGHDEGGDDGSINDDGGKGDDSKGGDGDGSSDSGKGDSGNGGGSSSKTSVAMPLVKY

SEQ ID NO: 72343 - protein, 41 aa, Zea mays
  Coding DNA Sequence Number=SeqID_30564
MGKGYPTSGFINTSDRSRESGNRTPVQRENRDIGSGGPDTR

SEQ ID NO: 72344 - protein, 243 aa, Zea mays
  Coding DNA Sequence Number=SeqID_30565
MAPPVDVVGPCPRLGDVEAPPRSRSSLSSEAEVESEPLGRARRRPSAEARAESEPWGRAKRSSSSSGAEPESEPWGRAERSSSSSWAKPESEPWGRAERSSSSSGAEPESEPWVGRSGVRRLPGLSPSPSPGVGRSGVRRLPGLSPSPSPRVGRSGPHSAEWHSSRCGAGGAVLLSERSVERRSDCGHFGSVDWRACVRIKLCADGGYQLRFRSLEGTPNYGPRQVVFKTIMTLRVDGYEKQS

SEQ ID NO: 72345 - protein, 276 aa, Zea mays
  Coding DNA Sequence Number=SeqID_30566
  Gene Ontology: Mol. function=protein-tyrosine kinase activity; Cellular component=nucleus; Biological process=protein amino acid phosphorylation
  Homolog annotation: Hit_ID=Q5ZC55; Match level="QueryCoverage=90%, HitCoverage=34%, E-value=2e-14, Identity=27%"; Hit description =Putative receptor serine/threonine kinase PR5K
MAPLLLLLLLFPVQLQLLLLLAVADAVPGLCARATCAGHVIQYPFWLNSSAPDCGHRHGIGLVCEGNSTLTLPYMSHRYVVSSIDYKTRTVLVSDADIGDEYDAAGCPRVRVNLTIDTAWLRPAASDANITFLYDCKKSITLPSAVELSGCHWQQQQQQQDYCRRSYVLPDGGITGAEAHQYGCEDVVVAPVLDAHRREILGAPPANGSLRRVLQGGFELNYDTHSELCDRCGASGGWCGYRRDEAPAAGAGGGLTFACFCDGGPTTTGLCGAAFF

SEQ ID NO: 72346 - protein, 375 aa, Zea mays
  Coding DNA Sequence Number=SeqID_30567
  Gene Ontology: Mol. function=protein serine/threonine kinase activity; Cellular component=cell surface; Biological process =protein amino acid phosphorylation
  Homolog annotation: Hit_ID=Q5N7S6; Match level="QueryCoverage=93%, HitCoverage=38%, E-value=1e-156, Identity=77%"; Hit description =Receptor serine/threonine kinase PR5K-like
  Pfam annotation: Domain name=Pkinase; Domain location=88-359; Score =129.8; E_value=7.6e-36; Accession=PF00069.15; Description=Protein kinase domain
  Pfam annotation: Domain name=Pkinase_Tyr; Domain location=83-359; Score=93.3; E_value=7.3e-25; Accession=PF07714.7; Description =Protein tyrosine kinase
  Pfam module annotation: Pfam domain module=Pkinase::Pkinase_Tyr; Domain location=88-359::83-359
MGMWKFLPQGKNSPPTGSKRKEAAPIVGAVAVAFLCLVILTSFLACRYGLLPFKSKNKPGTRIESFLQKNESIHPKRYTYADVKRMTKSFAVKLGQGGFGAVYKGSLHDGRQVAVKMLKDTQGDGEEFMNEVASISRTSHVNVVTLLGFCLQGSKRALIYEYMPNGSLERYAFTGDMNSENLLTWERLFDIAIGTARGLEYLHRGCNTRIVHFDIKPHNILLDQDFCPKISDFGLAKLCLNKESAISIVGARGTIGYIAPEVYSKQFGTISSKSDVYSYGMMVLEMVGARDRNTSADSDHSSQYFPQWLYEHLDDYCVGASEINGETTELVRKMIVVGLWCIQVIPTDRPTMTRVVEMLEGSTSNLELPPRVLLS

SEQ ID NO: 72347 - protein, 55 aa, Zea mays
  Coding DNA Sequence Number=SeqID_30568
MGASHIPPVLVLLGLFLPRLLRSAVRITVHGARTMPPAPTPTSPYSLPRAGNIKN

SEQ ID NO: 72348 - protein, 417 aa, Zea mays
  Coding DNA Sequence Number=SeqID_30569
  Gene Ontology: Mol. function=protein binding; Cellular component =nucleus; Biological process=regulation of progression through cell cycle
  Homolog annotation: Hit_ID=Q40671; Match level="QueryCoverage=88%, HitCoverage=83%, E-value=1e-111, Identity=56%"; Hit description =G2/mitotic-specific cyclin-2
  Pfam annotation: Domain name=Cyclin_C; Domain location=283-404; Score= 165.4; E_value=1.4e-46; Accession=PF02984.9; Description=Cyclin, C -terminal domain
  Pfam annotation: Domain name=Cyclin_N; Domain location=134-281; Score= 209.3; E_value=9.1e-60; Accession=PF00134.13; Description=Cyclin, N -terminal domain
  Pfam module annotation: Pfam domain module=Cyclin_C::Cyclin_N; Domain location=283-404::134-281
MAARAADENRRPGVGRPRAMRPRKSRRDEKKTALPSSRPMTRKFVASLASKGQPECQPTGADPEPGVDQRKEPIGDGIIDIDVELDEPVDDSDCDVDMGDETENKDIMNQDESLMDIDSADSGNPLAATEYVEELYKFYRENEAKSCVNPDYMSSQQDINAKMRAILIDWLIEVHYKFELMDETLFLTVNVIDRFLEKEVVPRKKLQLVGITALLLACKYEEVSVPVVEDLVLISDRAYTKGQILEMASTQSCFLGCTLDHDDIHIHIEKLILNTLQFNMSVPTPYVFMKRFLKAADADKQLELVSFFMLELCLVEYQMLNYRPSHLAAAAVYTAQCAINRCQQWTKVCESHSRYTGDQLLECSRMMVDFHQKAGTGKLTGVHRKYSTYKFGCAAKILPAQFMLELGGTAPPPSGAI

SEQ ID NO: 72349 - protein, 473 aa, Zea mays
  Coding DNA Sequence Number=SeqID_30570
  Gene Ontology: Cellular component=plastid; Biological process =peroxisome organization and biogenesis
  Homolog annotation: Hit_ID=Q2QQS3; Match level="QueryCoverage=88%, HitCoverage=89%, E-value=1e-127, Identity=49%"; Hit description =LILLIM08, putative, expressed
  Pfam annotation: Domain name=Aa_trans; Domain location=87-459; Score =72.8; E_value=1.1e-18; Accession=PF01490.8; Description =Transmembrane amino acid transporter protein
  Subcellular localization annotation: CTP_CleavageSite=47; ConfidenceScore=5.15e-01
MSSSREVMVLSDSEVQSAPPTPRPPQPVSAPPSQIHIHSPSPARSPLASPVRKAVAGVKGYLEEEVGGHVTRLADPRDAWLPVTESRSGNAYYAAFHSLSSGIGFQALVLPTAFASLGWTWAIICLTLAFGWQLYTLWLLVRLHEPVAGATRYSRYMHLATTVFGDRWANILALLPVTYLSAGICTALIIVGGGSMKMLFGIACGGSCLARPLTAVEWYLVFVCAAVVLSQLPNLNSIAGVSLVAAAAAVAYCTMIWAVSVARGRVAGVSYDPVHKAPDDDVDAALGVLNGLGIIAFAFRGHNVVLEIQIPPNGILSALYKFHSRDASRLVLGVTTLLVIINCLTTYQIYAMPVYDNMEAGYVHKKNRPCPWWMRSGFRAFFGAVNLLVAVALPFLSELAGLFGGISLPVTLAYPCFMWVAIKKPRKGTATWNVNWALGILGMSISLVLIVGNLWGLVEKGMRVKFFKPADFQ

SEQ ID NO: 72350 - protein, 104 aa, Zea mays
  Coding DNA Sequence Number=SeqID_30571
  Subcellular localization annotation: CTP_CleavageSite=51; ConfidenceScore=5.12e-01
MEKKQFKTSNLLVFNAVKPPGQIGLKKPLFSTVGINFDQHKQGTLHESGSSLNAVSGRQALATSQNSTAVEAKLSPQFEKMTITDQLSTAGARPALEKADDVAH

SEQ ID NO: 72351 - protein, 140 aa, Zea mays
  Coding DNA Sequence Number=SeqID_30572
  Gene Ontology: Mol. function=hedgehog receptor activity; Cellular component=integral to membrane; Biological process=cholesterol transport
  Homolog annotation: Hit_ID=UPI000060FC23; Match level="QueryCoverage =73%, HitCoverage=8%, E-value=1e-30, Identity=62%"; Hit description =Niemann-Pick C1 protein precursor.
MAILGIQLNAISVVNLVMSIGIAVEFCVHITHAFMIGTGDKETRARQALSTMGASVFSGITLTKLVGVIVLRFAKSEVFVVYYFQMYLALVIIGFLHGLIFLPNPVKELHRNLSGPFEFMWPSYKMGEAKRTKSATFSFK

SEQ ID NO: 72352 - protein, 137 aa, Zea mays
  Coding DNA Sequence Number=SeqID_30573
  Gene Ontology: Mol. function=hydrolase activity, acting on ester bonds; Biological process=lipid metabolic process
  Homolog annotation: Hit_ID=Q6ESR6; Match level="QueryCoverage=67%, HitCoverage=25%, E-value=1e-24, Identity=63%"; Hit description =Putative anter-specific proline-rich protein APG
MAIHGGASWLAAVSLSLLALALQGAAAETLVPAMFVFGDSTVDVGNNNFLERCNVSCKANYPHFGVDYIDQAPTGRFSNGYNLADQLAQLLGFAESPPPLLSLSNATSLISRMSTGISFAHGLQNRFRCKNRPPPKN

SEQ ID NO: 72353 - protein, 157 aa, Zea mays
  Coding DNA Sequence Number=SeqID_30574
  Gene Ontology: Mol. function=hydrolase activity, acting on ester bonds; Biological process=lipid metabolic process
  Homolog annotation: Hit_ID=Q6ESR6; Match level="QueryCoverage=89%, HitCoverage=44%, E-value=3e-15, Identity=32%"; Hit description =Putative anter-specific proline-rich protein APG
MAEQVRNFTNLARLWASGNDNRSSAADLLSQSLFFISTGSNDLFEYADIGPQNNDTELLQGLVASYAAYLKLAIAHDPSNPKGIDKYGCFAALNNLSGQLYPMFDAMLQGLSQELPGMNYSLVNSIKMAEWVFESPATPTYSNNRHQAQLLRSRSRN

SEQ ID NO: 72354 - protein, 63 aa, Zea mays
  Coding DNA Sequence Number=SeqID_30575
MEVDGDAGARPKRRLRGEGVEEGGGGYAWKEGRAGGRSQDDASHCGMESGRTRDASLTFIADC

SEQ ID NO: 72355 - protein, 129 aa, Zea mays
  Coding DNA Sequence Number=SeqID_30576
MDCIPPNLPIELFSLERNPLSPEKEFGRAGQPLSIRRDLDFAEWWRKTSSRIPKSKRKGFNSMMKIFPYSVFYIFFEQYLSVWKTAIMNICVCLETSEFLTQLWRTWRERSQSGYEQLHNVLAEAVPSS

SEQ ID NO: 72356 - protein, 296 aa, Zea mays
  Coding DNA Sequence Number=SeqID_30577
  Gene Ontology: Mol. function=structural constituent of ribosome; Cellular component=intracellular; Biological process=translation
  Homolog annotation: Hit_ID=Q8SB40; Match level="QueryCoverage=99%, HitCoverage=41%, E-value=3e-46, Identity=36%"; Hit description =Putative ribosomal protein
MDSSNPIVDEAKDLELPRPIGQKAAKKVAYDATDKVAKKGAKKAAYDATDKVLEMQQKISNDKIEASKLSLQAAKDEKEARLLEKESKMLETYACLLKQDMSAMHDEIRAEHIAALKNALPKMSGANRPQESANYSQGDDEELEFNDANDVYTVEDLLTEEEFLDGFLDGIGQDIISNLQEQSPQRRCYRRRFVPRPRQVANADLVACYFSANPIYTDEMFRRRFRMGRPLFLKIVAALSEWSPYFTDRLDSSTALECLGNFAKGVIDVFGEEYLRGPRTDEVEHLLQVAEARGFP

SEQ ID NO: 72357 - protein, 212 aa, Zea mays
  Coding DNA Sequence Number=SeqID_30578
MACPPTWPRLAGAAGRSRCGLRRSEPPGFEGGRVARRRLCASAEASQSQSAWEQPPGRTSAPGARRLVMAEGLTVPSAGSCAANRQGSRPRLAWLSRACTGLPPHASGTVAPAPVPLHPRRGPSRPLPGRRRLRPSREAGGSAARLRANRARTRAGRAYVQRGRPHPGACGAERPHSCRGCAPCSTFRLLLSRQETKAVLDFPHSGVTARKQ

SEQ ID NO: 72358 - protein, 518 aa, Zea mays
  Coding DNA Sequence Number=SeqID_30579
  Homolog annotation: Hit_ID=Q1SW35; Match level="QueryCoverage=91%, HitCoverage=98%, E-value=1e-124, Identity=46%"; Hit description=IMP dehydrogenase/GMP reductase
MNGAEEEEPPHVSSMPKTQDGVTKPSLGKEPIPGSELWTDGLICAFELVKSHRKPVQHKSWLATEQIQEKGPTMCTRKHSRRNGHQITEPKVDESIVLENPQQTDFSNDPSVLKDRPLYAGEILDHKWVPIGWNRIAELVLRVQSDSSWENELMEMSDSEDDYTVADLAAPYWQRPVGPTWWCHVTAGHPSIDAWLNSAHWMHPAIRIALRDESKLISDRMKYLLYEVPVRVAGGLLFELLGQSIGDPNHEEEDIPIELLLAGGSQTPRSVHEVIAHLVSRLSRWDDRVKWSLHAREEILIELLRHLRGNATRAILESIRKCTRDMLEEQEAVRGRLFTIQDVMQSTVRAWLQDRSLRVTHNLAIFGGGGMVLSIITGLFGINVDGIPGAQNTPYAFGLFAGLLFFVGIVLIGMGMLYLGLQNPVNSEKVKVRKLELQHLVSMFQHEAEQHGKVREGVSRHGASPSSSTASDEGRRSNGVSVVAFKPVCPRARVPLPVTIKRYSSVSESPRHREVPVL

SEQ ID NO: 72359 - protein, 94 aa, Zea mays
  Coding DNA Sequence Number=SeqID_30580
MYPVKQLQCTDTFLGISLSPDPDGVRAKRPPDKHSGLTEVVLSGSVTLLRSAAGCAGRCRLSWKKTPLSRLALDPEQCYGAKVTHLGAIVYDAE

SEQ ID NO: 72360 - protein, 236 aa, Zea mays
  Coding DNA Sequence Number=SeqID_30581
MDGFRFGESDGDALPVPDLGQRARAGRPAAWLVAAATRDVEARLPWAVPKVSIRLARWSTHAEEGVGALELLDGVHGFDSHISSGPQFLSRGAWYRLWGRGWRLGEYVAHEFRLFASRDLKHKIVLHCLTPIYLLKAWSHLLRMSSQPSSHEPVLYGQFLCICGCRQINLDCIGLRTDSRSDEVFEEPLRAPPQCSKQQDHTVVELEHGMMSVMCHMTENPTKEERGFDSRISSGS

SEQ ID NO: 72361 - protein, 134 aa, Zea mays
  Coding DNA Sequence Number=SeqID_30582
  Gene Ontology: Mol. function=oxidoreductase activity; Biological process=electron transport
  Homolog annotation: Hit_ID=Q75HI6; Match level="QueryCoverage=41%, HitCoverage=10%, E-value=2e-19, Identity=67%"; Hit description =Putative iron-sulfur cluster-binding protein
  Pfam annotation: Domain name=Rieske; Domain location=8-119; Score =13.3; E_value=0.00012; Accession=PF00355.16; Description=Rieske [2Fe- 2S] domain
  Subcellular localization annotation: CTP_CleavageSite=23; ConfidenceScore=5.28e-01
MAGLGAPSLQPLPLAAVTAPLSSARLRVGVARLSMCIFADTCPHRLAPLSKGHIDNRGRLSCVYHGWCFDSVGACNFIPKAPTLGPLMHTSSGHMCGVVPMRGAEQHPQHVDSDAVVEGSHFCCPTARTLMRPA

SEQ ID NO: 72362 - protein, 129 aa, Zea mays
  Coding DNA Sequence Number=SeqID_30583
MEQADRGPSRGSSGACRGAWPGATAGAAMEAERAQQLEAELGKSRSQGRKSAGAPAVELHGELGTRSTTQRNWGRELGEGQPRELREKEAPWRSCSQERPARWRRPEGRRHGWDKYQRNCVREEDQNDG

SEQ ID NO: 72363 - protein, 82 aa, Zea mays
  Coding DNA Sequence Number=SeqID_30584
  Homolog annotation: Hit_ID=Q6ZJE6; Match level="QueryCoverage=37%, HitCoverage=9%, E-value=5e-07, Identity=80%"; Hit description =Putative rRNA methylase
MVDSFNVSVAAGILMHHAVCDRVSRLSYGPDQQNNHVFSRQSGLTGYFFLEFTADPYQIAGKTRIQAQSLSRAVNDYAYGFQ

SEQ ID NO: 72364 - protein, 174 aa, Zea mays
  Coding DNA Sequence Number=SeqID_30585
MAAPRALAMPLDVSTSLLFSRPDTGPQIAMPIINPTTGRIPAPRLRLLARDDDETGRVFKSRSSVAKSSAPYAMVSSSDVAATSKACMDADIAVARRHRSWRQARDLPTRWDPPAHFLPCRAVFLAAPPRRNAAPHRRRASHRSSKPRTAAELRCRGPRRALQSDLLPAIEPYA

SEQ ID NO: 72365 - protein, 1164 aa, Zea mays
  Coding DNA Sequence Number=SeqID_30586
  Gene Ontology: Mol. function=protein serine/threonine kinase activity; Cellular component=integral to membrane; Biological process=protein amino acid phosphorylation
  Homolog annotation: Hit_ID=Q9CA77; Match level="QueryCoverage=91%, HitCoverage=97%, E-value=0.0, Identity=50%"; Hit description =Putative receptor protein kinase; 10992-14231
  Pfam annotation: Domain name=LRRNT_2; Domain location=31-75; Score =26.2; E_value=0.00012; Accession=PF08263.3; Description=Leucine rich repeat N-terminal domain
  Pfam annotation: Domain name=LRR_1; Domain location=103-123; Score =3.9; E_value=54; Accession=PF00560.23; Description=Leucine Rich Repeat
  Pfam annotation: Domain name=LRR_1; Domain location=125-145; Score =8.2; E_value=8.4; Accession=PF00560.23; Description=Leucine Rich Repeat
  Pfam annotation: Domain name=LRR_1; Domain location=147-169; Score =14.3; E_value=0.43; Accession=PF00560.23; Description=Leucine Rich Repeat
  Pfam annotation: Domain name=LRR_1; Domain location=172-194; Score =0.4; E_value=2.4e+02; Accession=PF00560.23; Description=Leucine Rich Repeat
  Pfam annotation: Domain name=LRR_1; Domain location=196-218; Score =10.7; E_value=2.8; Accession=PF00560.23; Description=Leucine Rich Repeat
  Pfam annotation: Domain name=LRR_1; Domain location=242-264; Score =15.7; E_value=0.17; Accession=PF00560.23; Description=Leucine Rich Repeat
  Pfam annotation: Domain name=LRR_1; Domain location=266-288; Score =12.8; E_value=1.1; Accession=PF00560.23; Description=Leucine Rich Repeat
  Pfam annotation: Domain name=LRR_1; Domain location=290-312; Score =5.9; E_value=23; Accession=PF00560.23; Description=Leucine Rich Repeat
  Pfam annotation: Domain name=LRR_1; Domain location=314-336; Score =10.4; E_value=3.2; Accession=PF00560.23; Description=Leucine Rich Repeat
  Pfam annotation: Domain name=LRR_1; Domain location=338-361; Score =7.4; E_value=12; Accession=PF00560.23; Description=Leucine Rich Repeat
  Pfam annotation: Domain name=LRR_1; Domain location=363-385; Score =9.7; E_value=4.3; Accession=PF00560.23; Description=Leucine Rich Repeat
  Pfam annotation: Domain name=LRR_1; Domain location=387-409; Score =10.7; E_value=2.8; Accession=PF00560.23; Description=Leucine Rich Repeat
  Pfam annotation: Domain name=LRR_1; Domain location=411-433; Score =16.1; E_value=0.13; Accession=PF00560.23; Description=Leucine Rich Repeat
  Pfam annotation: Domain name=LRR_1; Domain location=435-457; Score =12.4; E_value=1.4; Accession=PF00560.23; Description=Leucine Rich Repeat
  Pfam annotation: Domain name=LRR_1; Domain location=459-481; Score =13.2; E_value=0.96; Accession=PF00560.23; Description=Leucine Rich Repeat
  Pfam annotation: Domain name=LRR_1; Domain location=584-606; Score =14.6; E_value=0.37; Accession=PF00560.23; Description=Leucine Rich Repeat
  Pfam annotation: Domain name=LRR_1; Domain location=607-629; Score =9.4; E_value=5; Accession=PF00560.23; Description=Leucine Rich Repeat
  Pfam annotation: Domain name=LRR_1; Domain location=631-653; Score =12.5; E_value=1.3; Accession=PF00560.23; Description=Leucine Rich Repeat
  Pfam annotation: Domain name=LRR_1; Domain location=655-677; Score =4.7; E_value=38; Accession=PF00560.23; Description=Leucine Rich Repeat
  Pfam annotation: Domain name=LRR_1; Domain location=79-101; Score =8.3; E_value=7.9; Accession=PF00560.23; Description=Leucine Rich Repeat
  Pfam annotation: Domain name=Pkinase; Domain location=819-1087; Score= 122.6; E_value=1.1e-33; Accession=PF00069.15; Description=Protein kinase domain
  Pfam annotation: Domain name=Pkinase_Tyr; Domain location=819-1087; Score=69.3; E_value=1.2e-17; Accession=PF07714.7; Description =Protein tyrosine kinase
  Pfam module annotation: Pfam domain module=LRRNT_2::LRR_1::LRR_1::LRR_ 1::LRR_1::LRR_1::LRR_1::LRR_1::LRR_1::LRR_1::LRR_1::LRR_1::LRR_1: LRR_
  Pfam module annotation: Pfam domain module=Domain location=31-75::103- 123::125-145::147-169::172-194::196-218::242-264::266-288::290 -312::314-336::338-361::363-385::387-409::411-433::435-457::459
  Pfam module annotation: =631-653::655-677::79-101::819-1087::819-1087
MSPLLLGFLGLLLVAGELVVVPTGAQNSDGGDDDKEVLVELKHFLQDNNKVNRGAYDAWQESDASPCEWHGVQCDTADRVTALDLSGSSISGPAFGNFSRLPALARLDLSDNTICAAGDIGQCLGLVHLNLSHNLINGSLDLSGLTRLQTLDVSGNRLSGGVAANFTAMCADLAVFNASTNGLTGNITGMFDGCARLQYVDLSSNNFTGELWPGVTRFTQFSAAENNLTGSVPPTTFPDGCKLESLDLSANYLTGSFPDSIAKCANLTYLSLWGNVFNGFIPAGIGKLPVLETLVLGKNSFDRRIPSALTNCTKLQFLDISSNMFGGDVQDTFGRLASLRYLVLHHNNYTGGIVTSGVLQLPLLARLDLSFNEFSGELPPEVADMKSLKYLMLAYNQFSSGIPPAYGRLTELQALDLSYNELSGRIPATIGNLTSLLWLMLAGNQLSGEIPSEIGKCASLLWLNLADNNLTGNIPPEMANIGRNPGPTFAKNRNGSSVLAGSGDCQAMRRWIPASYPPFSFVYSIMTRENCRSIWDRILKGYGIVPVCTNPSSPVRSYTISGYVQLSRNQLSGDIPPEIGAMVNLSLLHLDGNRLTGMLPAEISRLPLVVLNVSRNNISGAIPSEIGRILCLEMMDLSYNNFSGELPGTLSQLTDLTKFNVSYNPLLTGSVPTTAQFGTFDERSFLGDPLISFGTGTGKQPPPEAAGPRRSGMSPRSIAVWFLFSLLAAFVTGALVFFMANLRARFPVEQDPDPESFSFENPKCSSRKCSLQMSTPSGSSSSATGCSSSSSSSTEGVKVFQLGSTAFTYRDVVAATGNFSEHLVIGRGGSGVVYRGVLPDGRTVAVKKLARPRDDGDGDGDCEREFRAEMEVLADRMGSSWPHPNLVTLYGWCLSGSGKVLVYEHLDGGSLESLVGDTAAFGWGRRLEAAVGVARALVFLHHECRPAVVHRDVKASNVLLDRDGRARVTDFGLARVVRPGDTHVSTVVAGTVGYVAPEYGQTWRATTKGDVYSYGVLLMELATGRRAVDGAEDECLVEWARRMAREGWSSAGAVVGTVSWELLMLGMRCTADAPQERPDMPDVLAALLDVGEHGGTRLEFTCKVAASLSSYLGSIRPPSLPVLKLQLSEPEPQHAFHARTHAGLRFYERRGVPYKRLMRPVKDH

SEQ ID NO: 72366 - protein, 304 aa, Zea mays
  Coding DNA Sequence Number=SeqID_30587
MTQYWIPTGIFQRGIHGRLGPQAGARRVDLGPGVKKRLGRMWVPKVNLNTCNFTPLAPSPDCCGAPPSPVAQREEATDVALGPQVTLIPLEDLPTVVATENLVDLEEGDGRISPCSPVEESESRLAPLNPVVRAHSAGCDLPSIAANTGLRVYARRRLECKKADMLQDHYDNVPHEDPSTVSPTLMAFEVNVLSPPHPNSENLVLNASVNEVEQPGDVVELPSFDHLSMTPPPLQGCSPTPCLVYSRMRLKKKLLSDDNEEGVNVASNESDEGMGHGSQVLPVCSRVVVPPVPHLASPTSLTAE

SEQ ID NO: 72367 - protein, 185 aa, Zea mays
  Coding DNA Sequence Number=SeqID_30588
  Subcellular localization annotation: CTP_CleavageSite=53; ConfidenceScore=5.33e-01
RDSFPVPRTTMTADAALLAIIVAFLLPLRLVSLGLSLASGRHGTSSRRVRRSCAALAVAAALLAVIFALPRDHVRECAAPIASVSSAGDDDGGFREELRLEVEQLKQQLARLESLWDSKSKAVDDKLDSLEEDNGRVMRAMALDVQSLINERENIKENNSVVSIKKDYAASFWMIRAAVNLPLRL

SEQ ID NO: 72368 - protein, 87 aa, Zea mays; identical to SEQ ID NO: 50849
  Coding DNA Sequence Number=SeqID_30589

SEQ ID NO: 72369 - protein, 363 aa, Zea mays
  Coding DNA Sequence Number=SeqID_30590
  Gene Ontology: Mol. function=hydrolase activity; Cellular component =chloroplast; Biological process=biological_process
  Homolog annotation: Hit_ID=Q8S2H5; Match level="QueryCoverage=91%, HitCoverage=52%, E-value=1e-162, Identity=81%"; Hit description =Putative diphosphonucleotide phosphatase 1
  Pfam annotation: Domain name=Metallophos; Domain location=43-256; Score=76.5; E_value=8.6e-20; Accession=PF00149.18; Description =Calcineurin-like phosphoesterase
MKGSSCNIFLYDATGMLCQRGDSVGWSDTVKFRTAPAAGSDELSFVIYGDMGKAPLGPSVEHYIQPGSVSVAKAVAKEIQTGNVDSIFHIGDISYATGFLVEWDFFLHLITPLASQVPYMTAIGNHERDYVNSASVYVTPDSGGECGVAYESYFPMPAVSKDKPWYSIEQGTVHFIVMSTEHEWSEKSEQYNWMDEDLSSVDRSRTPWVIFIGHRPMYSSYGVILPNVDSNFVASVEPLLLNYQVDLVFFGHVHNYERTCAVYQGNCKGMPTSDKSGIDVYDNNNYTAPVHVIVGVGGFSLDNFPNKGEAWSLSRISEFGYGKVHATRTDMLVQFVNSSSMEIRDQFRIVKGAPANKSLSLII

SEQ ID NO: 72370 - protein, 129 aa, Zea mays
  Coding DNA Sequence Number=SeqID_30591
MAYRALPSPTTQKSRLKSGSFYVSHQTYLDARPTHVHDAIHFEEEVNGAGPDNHVRAGVAPEAEADEEQDGDTNTAVVKAGEIVASCGWAALAGVSSSSPSSWARTVSPCDDACIPDSCLLADGVEKRQ

SEQ ID NO: 72371 - protein, 97 aa, Zea mays
  Coding DNA Sequence Number=SeqID_30592
MAPKKDDKLTEHRRSTRDEQSRRRPRLGPGTDGRGRGGRGAEAEVAAAELAARIWAVDPARRPGMAAAEQLKELGEKLQAVAPAPADELAKLLEVSP

SEQ ID NO: 72372 - protein, 1079 aa, Zea mays
  Coding DNA Sequence Number=SeqID_30593
  Gene Ontology: Mol. function=protein binding; Cellular component =membrane; Biological process=defense response
  Homolog annotation: Hit_ID=Q6AVJ3; Match level="QueryCoverage=95%, HitCoverage=97%, E-value=0.0, Identity=40%"; Hit description =Putative nucleotide-binding leucine-rich-repeat protein
  Pfam annotation: Domain name=HSBP1; Domain location=5-58; Score=7.9; E_value=0.034; Accession=PF06825.3; Description=Heat shock factor binding protein 1
  Pfam annotation: Domain name=LRR_1; Domain location=581-602; Score =7.4; E_value=12; Accession=PF00560.23; Description=Leucine Rich Repeat
  Pfam annotation: Domain name=LRR_1; Domain location=627-649; Score =8.9; E_value=6.1; Accession=PF00560.23; Description=Leucine Rich Repeat
  Pfam annotation: Domain name=LRR_1; Domain location=651-672; Score =8.5; E_value=7.4; Accession=PF00560.23; Description=Leucine Rich Repeat
  Pfam annotation: Domain name=LRR_1; Domain location=728-754; Score =0.4; E_value=2.4e+02; Accession=PF00560.23; Description=Leucine Rich Repeat
  Pfam annotation: Domain name=LRR_1; Domain location=802-824; Score =1.5; E_value=1.5e+02; Accession=PF00560.23; Description=Leucine Rich Repeat
  Pfam annotation: Domain name=LRR_1; Domain location=888-909; Score =2.4; E_value=1e+02; Accession=PF00560.23; Description=Leucine Rich Repeat
  Pfam annotation: Domain name=LRR_1; Domain location=912-933; Score =1.8; E_value=1.3e+02; Accession=PF00560.23; Description=Leucine Rich Repeat
  Pfam annotation: Domain name=LRR_1; Domain location=952-973; Score =7.6; E_value=11; Accession=PF00560.23; Description=Leucine Rich Repeat
  Pfam annotation: Domain name=NACHT; Domain location=203-356; Score= -35.3; E_value=0.033; Accession=PF05729.3; Description=NACHT domain
  Pfam annotation: Domain name=NB-ARC; Domain location=156-471; Score =190.2; E_value=4.9e-54; Accession=PF00931.13; Description=NB-ARC domain
  Pfam module annotation: Pfam domain module=HSBP1::LRR_1::LRR_1::LRR _1::LRR_1::LRR_1::LRR_1::LRR_1::LRR_1::NACHT::NB-ARC; Domain location=
MAVVLDALASYIQNMLTQMAKEEVDMLLGVSVEIDNLGAKLGDLKNFLADADRRNVTDRSVRAWVRELRDAMYDATDILDLCQLKALERGSSSSLATGCLNPLLFCMRNPVFAHDIGSRIKKLNKRLDAIKKNSATFSFINLGSYEDRGGKAETPSRLANRETSAQLDRSSVVGEQIEVDTRKLVEMLTEDPGTTTATHDQGTVLAIVGIGGIGKTTLAQKVFNDDTISRVFTKKIWLSVNKDFSVAEILKRAIIEAGGDHHAAGNAKATLQRTLQNALDGHKTILVMDDVWDDKAWGDVLKTPFVNAVGGGSRVLVTTRHDLVARAMKAREPYHHVDKLDPKDAWSLLKKQVIRNGDNEPLIDMLEDIGMKIIEKCDCLPLAIKVMGGLLCKKMARRGDWERVLNDAIWSVSGMPEELNYAIYLSYEDLHPSLKQCFLHYSLIPNESTVFFVDDIVSMWISEGFVEGNSDELEELAMEYYNELILRSLIEPDLLYVDQWVCNMHDVVRSFAQYVARDEALVARKGQIDVGELNSKRIIRLSLESEELEWSTLQPQKSLRTLLVAGHIGITVGNSLGAFPSLRTLHIDSTNFDVVAESLCQLKHLRYFSVTDPNMSKLPVNIGNMKFLQYISLDSCKNLAKLPRSIGKLQQLRYLSLMGTNIHFIPRGFSVSTSLRKLFGFPAHMDGNWCSLQVLEPLSRLMGLSIYGLEGVSSSSFAAKARLGEKVHLSYLELSCTSRLKDDTQLVKEDDEGFSEEEQQRIVEVFDELRPPPCLDALEIEGFFGRCFPRWMGPMAAVPLENLRILAMDDLPCCTELPNGLCRLPCLELLQICRATAIERVGLEFLQPHHHHTHQLTDVFPRLHDLTLTEMVEWEEWEWEENVRAMPLLEEFLLESCKLRCIPVGLSSHARSLKRLYVHDVQHLSTLENFAAVVELEAYDNPDLTRIAHFPRLWKLDISGCQKLKALEGLPALERLEMTDYNMVTLPAYLKDVNPKHLQIDCTLPLLSSIAAGKSSHEWDKFNHIRQVKRMVTKMLQGRATQPGGPGGATGGGRWARLGGPGGCVAPYARIVRGSRWPA

SEQ ID NO: 72373 - protein, 194 aa, Zea mays
  Coding DNA Sequence Number=SeqID_30594
  Gene Ontology: Mol. function=molecular_function; Cellular component =integral to membrane; Biological process=biological_process
  Homolog annotation: Hit_ID=Q2QNF9; Match level="QueryCoverage=93%, HitCoverage=40%, E-value=2e-69, Identity=71%"; Hit description=UNC93, putative, expressed
  Pfam annotation: Domain name=DUF895; Domain location=29-192; Score =12.8; E_value=8.9e-09; Accession=PF05978.7; Description=Eukaryotic protein of unknown function (DUF895)
MNAHRDEEAVSPLIAAPGGRSHAADAHVLSAAFLFVFSAYSAAQNLQTSVNTEDDLGTVSMGTVYTSFTLFSVASSPVVTRIGPKRALVVGTSGYVLFILANLVPSWYTMVPASLYLGFTASIIWVGQAPILQFQGTYLTSAALSHARENNLPEGPTLGSFNGEFWGMFASTQVIGNLISLALLRNGKMWKYRM

SEQ ID NO: 72374 - protein, 279 aa, Zea mays
  Coding DNA Sequence Number=SeqID_30595
  Homolog annotation: Hit_ID=Q9C9Z0; Match level="QueryCoverage=26%, HitCoverage=11%, E-value=4e-08, Identity=65%"; Hit description =Putative non-phototropic hypocotyl; 42053-44089
  Subcellular localization annotation: CTP_CleavageSite=69; ConfidenceScore=5.65e-01
MQLRLKSSFSSGGSGCVGLGGVDGSFSQRFVCSSSGVPSSCVSPQRDNYASLRRENQEMKLEISRMRVRLTEVEREQGLMKQQGRMRGGTAAAGGAAASTTVPSSRRCRGASTAPPCSAGPPCHALEARLRLPLQSLPRMPHNPNRRNQRPVCGWLPQKHHQRSSFHPPIRGWLPQNHIRSNHALGHALPRIRDLQSRTPSAPAITNLETPGGGDSAATNRGREIHTNIKRMAAPIIIRSSSSHPPKRPVTVFASFFSSGSSCVRSFPFICLRAFTFIW

SEQ ID NO: 72375 - protein, 44 aa, Zea mays
  Coding DNA Sequence Number=SeqID_30596
MTRTEFGRAVEGDRLDMRAPDDSENPGPQIIDTDGPTSYRQWIT

SEQ ID NO: 72376 - protein, 118 aa, Zea mays
  Coding DNA Sequence Number=SeqID_30597
  Homolog annotation: Hit_ID=Q2QNF9; Match level="QueryCoverage=52%, HitCoverage=13%, E-value=4e-15, Identity=70%"; Hit description=UNC93, putative, expressed
  Subcellular localization annotation: CTP_CleavageSite=73; ConfidenceScore=5.06e-01
MVPLCHKSHSTDAAFPVKLGYNDGAAQATGNTDQVTLAPVWTSGNGFALQALTGDDFSTTRVRNRNEPKEMTRAAAIRRSMACSVMLGLRKKMTAMAPDCHTFSCAKAASCIGHGVKF

SEQ ID NO: 72377 - protein, 358 aa, Zea mays
  Coding DNA Sequence Number=SeqID_30598
  Gene Ontology: Mol. function=DNA binding; Cellular component=nucleus; Biological process=regulation of transcription
  Homolog annotation: Hit_ID=Q8S7I7; Match level="QueryCoverage=88%, HitCoverage=89%, E-value=4e-82, Identity=53%"; Hit description =Putative NAM (No apical meristem) protein
  Pfam annotation: Domain name=NAM; Domain location=38-170; Score =255.8; E_value=8.7e-74; Accession=PF02365.6; Description=No apical meristem (NAM) protein
MAPRKEIMAGDHGGGEGEEVVVLVGDYDYELEEEDEDMLPGFRFHPTDEELVTFYLRRKVAGKRLTIEIIKDFDIYKHDPWDLPKSSSISGEKEWYFFCLRGRKYRNSIRPNRVTGSGFWKATGIDRPIHSAASGRAGDPIGLKKSLVFYRGSAGKGTKTEWMMHEFRLPPRADTAHASPSEQEAEVWTICRIFRRNFTYKKQGVHCSSKVSSAAAVVAQPGESSSVTAGSMESDTGDEYTNGLLPQTPLLQDPVNMIDGYSYSYGYDHHHHQQQQLQHGQWNSHALHAAATAPLPSPTTMAAFHHGVLSSPPAAASGPLDDMYYKDGSSWDDIGRMVMELTDPSPSVFSFYDTRSYA

SEQ ID NO: 72378 - protein, 86 aa, Zea mays
  Coding DNA Sequence Number=SeqID_30599
MSLTYLSVASWQPENVTEKAGPADARIRATWHIGCPVWCAIWCTHTCPMHSSSAQSLVQLWFRELGIIRFVFGGDASVDSLRMMNY

SEQ ID NO: 72379 - protein, 81 aa, Zea mays
  Coding DNA Sequence Number=SeqID_30600
MASDWDSDYEIHMIDHPRERRAGAATQAEKGKVMADTGTSSSVGVMVLDQHAKPVKLNGPIDVTWSHILCLMGLALSAFIV

SEQ ID NO: 72380 - protein, 97 aa, Zea mays
  Coding DNA Sequence Number=SeqID_30601
  Gene Ontology: Mol. function=peptide deformylase activity; Biological process=translation
  Homolog annotation: Hit_ID=Q10FJ2; Match level="QueryCoverage=45%, HitCoverage=11%, E-value=5e-08, Identity=66%"; Hit description =Pleckstriny domain-containing protein, putative, expressed
MVMQNEVEAAVKISLLAALGSTTNKLAKGQLDDLTVTTLRKSEEKAKFLVGERDRLLTERDSALQEAQMWRSELGKARGNAAILEAAVVRAEEKARV

SEQ ID NO: 72381 - protein, 259 aa, Zea mays
  Coding DNA Sequence Number=SeqID_30602
MEAILMADDEDWVYVLSPEERVEAVAVAVEETVDEEVEAVAVAIEETVDEDVEDVAVAVEETVDEDMEDVAVEETVEEDAEAVAVADAVTVTVTAAIAGEDNPQDAAAAEEQEESDEEEEEAKVGAQPAAEELLPNIDEQGEDEEPAAALDDVLPYLLYHYFGYRGAYGPATRSGYGYYYYGGEATGSGYGYSETYRYLPGYETMVVYQAPPHAFSASFLYPYGYPGPAYVPSVRRRRAVLARRGSYAAGARILALVMI

SEQ ID NO: 72382 - protein, 1524 aa, Zea mays
  Coding DNA Sequence Number=SeqID_30603
  Pfam annotation: Domain name=GYF; Domain location=482-537; Score =51.7; E_value=2.4e-12; Accession=PF02213.6; Description=GYF domain
MAATPDRANADLRHGLSVDTPLPPQIARGLVNAYSFDLCTEEKQGLDTEIPLSPQWLMKVGENKDPVSHGIRSDVSKTSGAGEDQGYNTKKKDVFRASVLDGETGRRDRWRDDEREPNSTHRWSRWRETDKEHGDARKAERWSDDTSKHSVDGRRVPQERWGDSNNKDGSYDQRRENKWTARWGSNDKESENWRDRWGDSGKEGDAYREKGLSHHGKDANSYEKDDNISRSWKPSYSAGRGRGDLPNYTSQTLPKSPAPSGYGRGKLDNDFAKFPNSRGKFTSGTSAISSGSSRPFHLGLLSDRPGGISDRSAFRYSRLKLLDIYRNCDVTDFKLSVDCLEELSVFMQEDVLEPLALSAPVAEEATILKAIDKGDIVNSGVHQASKDGSVGKAGREDQPGGVEVSGLAGNTDLAARGEPMHPATSTYVVPQRSQFIGEHKLGPSEFGHQIPNFLNQESKTVGMLGFDNFASPVHSHPNPENLSLYYKDPQGQIQGPFSGADIIGWFETGYFGIDLLVRPVNAPHDVPFLMLGDVMPHLRAKVRPPPGFATSKPSDMLAPETLPTGKFVSSSMQAGSTGIGIFDSGPIRKDNAVEAQNRFLESLMSNSARNPSAGTISITGGMNELVSTSFGNISVRGGESGVNLNYLLAQKGLLERQNSLQNPVSYWTGDAPASKVHPMADTSRQSLQSQNVDLLAMLQPKEKPQVPTGNSGLPLCSNYPEASIVNPNLHSGDLAQGALNMRQDMQNSQNIGIGVQQHNLMPQNRPALAQLPSEKLAEMSQDPQLLNMIRQDLQNSQNIGIGFQQHNLMPQNRPALAQLPPEKLAEISQDPQMLNMLQQQYLLSQLQLQSQTPFTPQPPLSMLDKMLLLKQQQQQQQLQQQQQQLQQQLEQQQKLLLQQQLLSQMVPHAHPNQHTDDSYALKYTSVPSDDSTSLGFRRMQEAIEVDQKFSVHGMQVGQQPSQSIMNFRNMDGIALLQNPVTALPVPHETAVGALPKEDHSRPGMSEDFANVDLQLKSTMVHSKLVEVADRNEGFKSHEVDTAAEKNKMSEKELNSGSTIIMGSASDEAKNLHEPPLDPKSENLSSDISGQVQESNLSAEDTPPGITAAVATEKRKGSKRKNRAAADAGKGTSKAVVAQQQRQETEVDNSDIGGNKHDLTDDTEELFWGSPIRVQNEILPSKSFPEEHDADKAESQFSSLSSDPHSMASQRAWKQPTQGLRPKSLLEIQAEEQLRAQKGLTTETAKPAASVPSISWSGMSISSEQHYGGSNISLGSMESAVERNKRSQLHDLLAEEVLARSSIADNENNANDAFFSPLSPAAVQADAPALDDNDFIEAKDKKNKKRSAKTKASTVKAPSPVVSFDPPAISMPSEKGKSAKQAQQELEILPAPPSGPSFGDFVLWKSDQTSSVPAPAWSNDSAKVQKPLSLRDIQREQERRTASIQQQAPSPTPAKVAPNQRSHVNASSWQASGPPPSQAVAPVQMSSNAPSHSRSSAEDDLFWGPSEHSKQDTKQYVLQQLLHLN

SEQ ID NO: 72383 - protein, 260 aa, Zea mays
  Coding DNA Sequence Number=SeqID_30604
  Gene Ontology: Mol. function=transferase activity; Cellular component= cytoplasm; Biological process=phosphatidylethanolamine biosynthetic process
  Homolog annotation: Hit_ID=Q69QD7; Match level="QueryCoverage=88%, HitCoverage=60%, E-value=1e-104, Identity=79%"; Hit description =Putative ethanolamine kinase 1
  Pfam annotation: Domain name=APH; Domain location=31-252; Score=61.2; E_value=3.4e-15; Accession=PF01636.13; Description=Phosphotransferase enzyme family
  Pfam annotation: Domain name=Choline_kinase; Domain location=43-244; Score=260.4; E_value=3.8e-75; Accession=PF01633.10; Description =Cholineethanolamine kinase
  Pfam module annotation: Pfam domain module=APH::Choline_kinase; Domain location=31-252::43-244
MIRMNNDPLIHVCSDNFFQFVVHDMYLLLPTVLKVSVKGNNGNDSSVTVRLYGPNTDLVIDRKRELQAIPYLSAAGFGARLLGMFENGVVQSFIYARTLSPADMKEPKIAAEIAKELRKFHQVDIPGSKEPQLWNDIFKFLKKAAALKFEDNEQQKRYVKISFTEIQDEVKELKDLLDILHAPVVYAHNDLLSGNLMLNDLEGKLYFIDFEYGSYSYRGYDIANHFNEYAGFDCDFNLYPDKDAQYHFFRNYLHPDRPSE

SEQ ID NO: 72384 - protein, 112 aa, Zea mays
  Coding DNA Sequence Number=SeqID_30605
MWSGDEMHAFIIIAFISSLSYLLEHACNHGISEGGLVALAREDGWRFSSSSEHKNKNRYILALKGQMQLQAGAVDVSSSEYIILHRNNNLATAALYHSYTLAFSDLYSMEWD

SEQ ID NO: 72385 - protein, 126 aa, Zea mays
  Coding DNA Sequence Number=SeqID_30606
MRFPLDNEALASPQSRARRRWGSPERPAAMFSAAAAAAADSHRDPVQGPQEVAELREERRPERRRRRRRPAFPGTQPAREWEARHVVRRARASPLTALPCASLLAGAKQSSETGPKLASCEVGVEY

SEQ ID NO: 72386 - protein, 63 aa, Zea mays
  Coding DNA Sequence Number=SeqID_30607
MQDEKLGGSWEDGGPQFLSQWPESWRAAWLRVGPTYHRRVKPGDYDYDFSILYGVFGLWGSEA

SEQ ID NO: 72387 - protein, 53 aa, Zea mays
  Coding DNA Sequence Number=SeqID_30608
MAYFKFPCAVGIGPIMSIPHLYKGQLTTYDVFALDGEITIAVAPAPKDPHETS

SEQ ID NO: 72388 - protein, 172 aa, Zea mays
  Coding DNA Sequence Number=SeqID_30609
  Gene Ontology: Mol. function=anthranilate synthase activity; Cellular component=cyanelle; Biological process=glutamine metabolic process
  Homolog annotation: Hit_ID=Q42565; Match level="QueryCoverage=97%, HitCoverage=52%, E-value=4e-56, Identity=63%"; Hit description =Anthranilate synthase beta subunit
  Pfam annotation: Domain name=GATase; Domain location=1-163; Score =58.9; E_value=1.7e-14; Accession=PF00117.18; Description=Glutamine amidotransferase class-I
  Pfam annotation: Domain name=Peptidase_C26; Domain location=2-146; Score=-112.3; E_value=0.071; Accession=PF07722.3; Description =Peptidase C26
  Pfam module annotation: Pfam domain module=GATase::Peptidase_C26; Domain location=1-163::2-146
EPQDSGISLQTILELGPTIPIFGVCMGLQCIGEAFGGKIIRAPSRVMHGKSSPVYYDEELGNALFNGLSNLWYVLLSKAFRVDAALAPFASMDNPFTAVRYHSLVIEQETFPHDALEATAWTEDGLIMAARHKKYKHIQGVQFHPESIITLEGKKIVLNFVRFIEELEKQRS

SEQ ID NO: 72389 - protein, 279 aa, Zea mays
  Coding DNA Sequence Number=SeqID_30610
  Gene Ontology: Mol. function=protein binding; Cellular component =spliceosome; Biological process=mRNA processing
  Homolog annotation: Hit_ID=UPI0000DA43ED; Match level="QueryCoverage =78%, HitCoverage=98%, E-value=5e-21, Identity=30%"; Hit description =PREDICTED: similar to keratinocytes proline-rich protein
MGRCETEREEGKRSRRETGVRGETRGLRGNDGASYDVVGPSPGLGEVEAPPRSRSSLSSKAEVESEPLGRARRRPSAEARAESEPWGQPKQSSSSSRAEPEFEPWGRAKRSSSSSGAEPESEPWGRAKRSSSSSEAEPESEPWGRAKQSSSSSEAEPESEPWGRVKRSSSSSGAEPESEPWGRAKRSSSSSGVEPESEPWSRAKRSSSSSGAEPESEPWGRAKRSSSSSGAEPESEPWGRAMRSFLWRLKPDLAAVSLTLSSGTAVGAAQAALSSCQAG

SEQ ID NO: 72390 - protein, 55 aa, Zea mays
  Coding DNA Sequence Number=SeqID_30611
MILSTGCPLKVPEGAGTVKVREGKICRALEPLCLRVVAAIIGAAGDAIVHAMFVE

SEQ ID NO: 72391 - protein, 78 aa, Zea mays
  Coding DNA Sequence Number=SeqID_30612
MHQLRRRVLKPREPLPKLEGCQRPTVDTVVPQFAPACVDRALSSTVRGVKPTVKLTFDRRFSQTLALLDSPPKTFGNS

SEQ ID NO: 72392 - protein, 554 aa, Zea mays
  Coding DNA Sequence Number=SeqID_30613
  Gene Ontology: Mol. function=RNA-directed DNA polymerase activity; Cellular component=mitochondrion; Biological process=RNA-dependent DNA replication
  Homolog annotation: Hit_ID=UPI00004C1731; Match level="QueryCoverage =92%, HitCoverage=45%, E-value=1e-144, Identity=68%"; Hit description= UPI00004C1731 related cluster
  Pfam annotation: Domain name=RnaseH; Domain location=144-260; Score= -33.9; E_value=0.082; Accession=PF00075.14; Description=RNase H
  Pfam annotation: Domain name=rve; Domain location=303-425; Score =21.3; E_value=9.8e-05; Accession=PF00665.16; Description=Integrase core domain
  Pfam module annotation: Pfam domain module=RnaseH::rve; Domain location=144-260::303-425
MGPIKDLKGVQRVMGCLAALSRFISRLGERGLPLYHLLRKAECFTWTSEAEEALENLKALLTNAPILVPPAAGEALLIYVAATTQVVSAAIVVERREEGHALPVQRPVYFISEVLSETKIRYPQIQKLLYAVILTRRKLQHYFESHPGRAWACFFISPLGKHLRYVLRLHFPVSNNVAEYEALVNGLRITIELGVRRLDARGDSQLVIDQVMKNSHCHDPKMEAYCDEVRCLEDKFYGLELNHVARRYNETANELINIASGRTTVPPDVFSRDLHQPSVKTDDTPEPEKASALPEAPSAQPEAPSAPEGEALRVEKAPGGYTHLLVAIDKFSKWIEVRPLNSIRKFLDFCEDHHIRVDWAAVAHPMTNGQVERANGMILQGLKPRIYNDLNKFGRRWMKELPSVVWSLRTTPSRATGFTPFFLVYGAEAILPTDLEYGSPRARAYDDQSNQTNREDSLDQLEEARDTALLHSARYQQSLRRYHARGVRSRDLQAGDLVLRLRQDARGRHKLMPPWEGPFVIAKVLKPGTYKLANSQGEVYSNAWNIRQLRRFYP

SEQ ID NO: 72393 - protein, 84 aa, Zea mays
  Coding DNA Sequence Number=SeqID_30614
  Subcellular localization annotation: CTP_CleavageSite=58; ConfidenceScore=5.55e-01
MALIALVLTKAHHYGPNHTWASPGAFVRAMRRRSRRAKGGVFAFAPTMIKARSRGYKRAREGGEAPKSLIMVEVELRVTDWSPN

SEQ ID NO: 72394 - protein, 66 aa, Zea mays
  Coding DNA Sequence Number=SeqID_30615
MADSDRDLIFDALCMDSDSDLSPFKNSEEEPPSDEENEYHPASAAPSGIPAKWGTTHVRSRRDRRS

SEQ ID NO: 72395 - protein, 88 aa, Zea mays
  Coding DNA Sequence Number=SeqID_30616
MNLKEIISFHKIYAKLFLNLCMQEYTKYTYAHQQYKMMKIKPIEGLRTESISIEVLKAHEPKQNGPKATKNGSAQPKRRVARVPVGCC

SEQ ID NO: 72396 - protein, 61 aa, Zea mays
  Coding DNA Sequence Number=SeqID_30617
MAPVPCTASPSPRLLARRAFLWVRARAAAPLNNSLNADLLCPRNSPLGDGGAKLALEHGKA

SEQ ID NO: 72397 - protein, 118 aa, Zea mays
  Coding DNA Sequence Number=SeqID_30618
MATRGGVTHDRGEELAGDEGSGFLRVLGRSDGLGSLATCKWVPLNLSFLLFIFASKPGATFSSRWKKPQPPNAIGMRHCRSTSAQVEKRREMMLRLTELQKKIDEAAEKMRNIAQDTE

SEQ ID NO: 72398 - protein, 227 aa, Zea mays
  Coding DNA Sequence Number=SeqID_30619
  Gene Ontology: Mol. function=RNA-directed DNA polymerase activity; Cellular component=chromatin; Biological process=RNA-dependent DNA replication
  Homolog annotation: Hit_ID=UPI00004C1733; Match level="QueryCoverage =99%, HitCoverage=19%, E-value=9e-86, Identity=66%"; Hit description =UPI00004C1733 related cluster
MAEYEALVNGLRIAIELGVRRLDARGDSQLVIDQVMKNSHCRDPKMEAYCDEVWRLEDKFYGLELNHVARRYNETADELAKIASGRTTVPPNVFSRDLHQPSVKTDDTPEPEEASVQPEEASVQLEEASAQPEAPSAAEGEALRVEEERNGKAPGGFMHLLVAIDKFSKWIEVRPLNSIRSEQAVAFFTNIIHRFGVPNSIITDNGTQFTDRKFLDFCEDHHIRVDP

SEQ ID NO: 72399 - protein, 474 aa, Zea mays
  Coding DNA Sequence Number=SeqID_30620
  Gene Ontology: Mol. function=cellulose synthase (UDP-forming) activity; Cellular component=membrane; Biological process=cellulose biosynthetic process
  Homolog annotation: Hit_ID=Q944D9; Match level="QueryCoverage=96%, HitCoverage=55%, E-value=1e-179, Identity=66%"; Hit description =Cellulose synthase-like protein OsCslF4
  Pfam annotation: Domain name=Cellulose_synt; Domain location=73-474; Score=35.2; E_value=1.2e-07; Accession=PF03552.5; Description =Cellulose synthase
MAAAVTRRVGLHVEATNGGADDESRRNSSAADHSPVAKRINDAAANAKRNDVWVAAQEGEMPAAAGNSSQPPLLFRTMKVKGSILHPYRFVILLRLVAIVAFFIWRIRNRNRDGVWLWAMSMVGDVWFGFSWVLNQLPKLNPIKRVPDLAAIRDQYEQPSASGGESNNKLPGIDVFVTTVDPVDEPILYTVNSVLSILATDYPVEKYACYLSDDGGTLVHYEAMLEVASFARLWAPFCRKHSVEPRAPESYFGVKRRQPYTGSVQGEFTSDHRRMRREYEEFKVRIDSLFSTVCQRSQAYNRKHAKDDEAGMVMKATWMADASIDNPFDFSNTDTRLPMLVYMSREKRTGYNHQKKAGAMNAMLRVSALLSNAPFLINFDCDHYVNNSQAFRASMCFMLDPRDGRNTAFVQFPQRFDGVDPTDRYANHNRVFFDGTMLTLTGCKGLPTSAPEPWSAVPRCTDGTTAVENDWQRQ

SEQ ID NO: 72400 - protein, 96 aa, Zea mays
  Coding DNA Sequence Number=SeqID_30621
MATAHGGTGPAKVLRRAIGALPEDIPARKVHEDVRVTQESIPNRKPRPERRPGRESPAADDRLSFSALFSRSREGGWLRGAFGFVVRGLEPWRGEA

SEQ ID NO: 72401 - protein, 696 aa, Zea mays
  Coding DNA Sequence Number=SeqID_30622
  Gene Ontology: Mol. function=cellulose synthase (UDP-forming) activity; Cellular component=membrane; Biological process=cellulose biosynthetic process
  Homolog annotation: Hit_ID=Q84S18; Match level="QueryCoverage=99%, HitCoverage=78%, E-value=0.0, Identity=76%"; Hit description =Putative cellulose synthase-like protein OsCslF1
  Pfam annotation: Domain name=Cellulose_synt; Domain location=1-681; Score=693.0; E_value=2.1e-205; Accession=PF03552.5; Description =Cellulose synthase
MNSILSILAVDYPIDRTATYLSDDGGSIIHYEGLLETANFATLWVPFCRKHSIEPRAPESYFAVKSRPYTGNVPDEFADDHRRMSKEYDEFKVRLDALFTKIPERSDAHNAEAKEGVKATWMADGTQWPGTWFDPAENHKKGQHAGIVKVMLNHPGDEPRFGGPASAETPLDFSAVDVRLPMLVYISREKSPSHDHQKKAGAMNVQLRISALLTNAPFIINFDGDHYVNNSQAFRAAMCFMLDRRDGENTAFVQFPQRFDDVDPTDRYCNHNRVFFDATLLGLNGIQGPSYVGTGCMFRRIAVYGIDPPRWRTDAFKLVDNPSKFGSSMLFINSIPSAANQEWSMASPPAHEESVMEELNNVMKCAYEEGTEFGKEIGWVYNIATEDVVTGFRVHRTGWRSMYCRMEPDAFRGTAPINLTERLCQILRWSGGSLEMFFSHCPLLAGRRLNLMQRIAYTNMTAYPISSVFLVFYLLFPVIWIFRGEFYIQKPFPTYVLYLVVIIAMTELIGMVEIKWAGLTLLDWIRNEQFYIIGATAVYPLATLHIVLKLVLRGNGVSFKLTAKQATSAVNEKYAEMYVVQWTPLLIPTIAVIAVNVGAIGAAIGKAVVGGWSLLQMADASLGLVFNAWILLLIYPFALGVMGRWSKRPYILFVLFMIGFAVVAAVVVAIHAARTGSVRFHSGHSGGASFPTSWGF

SEQ ID NO: 72402 - protein, 829 aa, Zea mays
  Coding DNA Sequence Number=SeqID_30623
  Gene Ontology: Mol. function=protein serine/threonine kinase activity; Cellular component=membrane; Biological process=protein amino acid phosphorylation
  Homolog annotation: Hit_ID=Q7EZ33; Match level="QueryCoverage=96%, HitCoverage=96%, E-value=0.0, Identity=62%"; Hit description =Putative S-receptor kinase KIK1
  Pfam annotation: Domain name=B_lectin; Domain location=48-172; Score =85.6; E_value=1.5e-22; Accession=PF01453.15; Description=D-mannose binding lectin
  Pfam annotation: Domain name=PAN_2; Domain location=328-370; Score =11.4; E_value=8.8e-05; Accession=PF08276.2; Description=PAN-like domain
  Pfam annotation: Domain name=Pkinase; Domain location=508-760; Score =152.7; E_value=9.4e-43; Accession=PF00069.15; Description=Protein kinase domain
  Pfam annotation: Domain name=Pkinase_Tyr; Domain location=508-779; Score=142.6; E_value=1e-39; Accession=PF07714.7; Description=Protein tyrosine kinase
  Pfam annotation: Domain name=S_locus_glycop; Domain location=186-319; Score=93.9; E_value=4.7e-25; Accession=PF00954.11; Description=S -locus glycoprotein family
  Pfam module annotation: Pfam domain module=B_lectin::PAN _2::Pkinase::Pkinase_Tyr::S_locus_glycop; Domain location=48-172::328- 370::508-760::508-779::186-319
MAHAAAAALALLVFFCAQARDAAVHVVDAAATLSQGQSLGATDKLSTEQTVPWVAHRDVPVSAGSAYSATVTAAGELHVLEGDRVVWRNDNSATTTSQKTAGGEQAANVTLTVLDTGNLQLVAGDGGPVIWQSFDHPADTFLPGMSITLDRRGGGAVRRTLFTSWRSPADPGTGDFTLGQDPLGSAQLYIWQTTGGQNTTYWRSGQWANTNFVGVPWRSLYVYGFKLNGDPNNGSGVMSYVFNTYNSSEYRFMLHSNGTETCYMLLATGDWETVWSQPTIPCQAYNMCGANAQCAAAADGGQAVCTCLTGFEPRNVSEYSNGNWTQGCVRSSPLPCGGEPNSCLGNCSCGAYSYSTGTGCLTWGQDLLDIYRFPDGEGYDLQIKMRHAISTDLLPVFVRRRVKTNRAKTGSKRRRWTTVVVAVVVAVAVLAGCGLLLWKCRRRIKEKLGIVVGSEETKATQPSLLPLREARQDFSGPKQTDQEEAEGGKKFELPIFSLETVAAATGDFSADNKLGEGGFGHVYKGRLPGAEEVAVKRLSRGSVQGMEEFKNEVILIAKLQHRNLVKLLGCCIQGEEKILVYEYMPNKSLDGFLFDPARRGLLDWKTRFHIIEGIARGLLYLHRDSRLRVVHRDLKASNILLDHDMIPKISDFGMARIFGGDQNQVNTNRVVGTLGYMSPEYAMEGLFSVRSDVYSFGILILEIVSGQKNSSFHHMEGSLNIVGYAWQLWNADRGERLIDPAILPACSVREALRCVHMALLCVQDHACDRPDIPYVVMALGSDSSVLPMPKPPTFTLQCTSSSDRDGIFPDKVDESYSACDLTVTMLHGR

SEQ ID NO: 72403 - protein, 444 aa, Zea mays
  Coding DNA Sequence Number=SeqID_30624
  Gene Ontology: Mol. function=sugar binding; Cellular component =membrane; Biological process=protein amino acid phosphorylation
  Homolog annotation: Hit_ID=Q7Y1P1; Match level="QueryCoverage=93%, HitCoverage=47%, E-value=1e-113, Identity=49%"; Hit description =Putative receptor-like kinase
  Pfam annotation: Domain name=B_lectin; Domain location=74-186; Score =142.1; E_value=1.5e-39; Accession=PF01453.15; Description=D-mannose binding lectin
  Pfam annotation: Domain name=PAN_2; Domain location=350-415; Score =117.5; E_value=3.7e-32; Accession=PF08276.2; Description=PAN-like domain
  Pfam annotation: Domain name=S_locus_glycop; Domain location=200-333; Score=149.3; E_value=1e-41; Accession=PF00954.11; Description=S-locus glycoprotein family
  Pfam module annotation: Pfam domain module=B_lectin::PAN_2::S_locus _glycop; Domain location=74-186::350-415::200-333
  Subcellular localization annotation: CTP_CleavageSite=80; ConfidenceScore=5.52e-01
MAAAGARLPLALLLPLFVTFFASPASATDTITANSSLSDGQTLVSAGGVFQLGFFTPASSTARFLGIWYMGLAPQTVVWVANREAPITGTTASLAINATGSLVLADPSGRVFWSSPQSNMSSTGSPVGAQLLDSGNFVLQGGGGAVLWQSFDYPSDTLLPGMKLGWDLTTGLDRHLTTWRSTGDPSPGDYTFGFDLRGVPEGFIRRDGTVPVYRNGPWNGLQFSGEPEMEPNNSNFQFEFVDNASDVYYTFLVDGGGGSGNGGVVSRFVLNQSSVQRYVWPPGGQGWSLYWSLPRDQCDNYAHCGAFGACDTSGGSAACACVHGFTPASPRDWELRDSSAGCRRLTRLNCTGDGFLPLRGVKLPDTTNATEDATITVDQCRQRCLANCSCLAYAASSIKGGDSGCIIWSSPLIDIRHFPSGGQDLFVRLAASDLRTISQLISSH

SEQ ID NO: 72404 - protein, 419 aa, Zea mays
  Coding DNA Sequence Number=SeqID_30625
  Gene Ontology: Mol. function=protein serine/threonine kinase activity; Cellular component=membrane; Biological process=protein amino acid phosphorylation
  Homolog annotation: Hit_ID=Q40096; Match level="QueryCoverage=82%, HitCoverage=41%, E-value=1e-121, Identity=63%"; Hit description =Receptor protein kinase
  Pfam annotation: Domain name=Pkinase; Domain location=101-352; Score =141.9; E_value=1.7e-39; Accession=PF00069.15; Description=Protein kinase domain
  Pfam annotation: Domain name=Pkinase_Tyr; Domain location=101-374; Score=138.2; E_value=2.3e-38; Accession=PF07714.7; Description =Protein tyrosine kinase
  Pfam module annotation: Pfam domain module=Pkinase::Pkinase_Tyr; Domain location=101-352::101-374
  Subcellular localization annotation: CTP_CleavageSite=51; ConfidenceScore=5.49e-01
MTWTASDGDGSRKKNVVVAVVVSLSAVLLVGVGGFFLWKKLFRNKAGRFQSAQRFSSFDSSVPLTPVQLQDRSKEDEAGQSSDLNVTLFDMDAIALSTDNFAAWNKLGEGGFGAVYKGQLEGGQAVAVKRLSKYSTQGLGEFKNEVMLIAKLQHVNLVRLLGCCVHGEERMLVYEYMENKSLDNFIFGNKNRSAQLHWSKRFDIILGIARGLLYLHQDSRYKVIHRDLKAGNILLDKDMNPKISDFGVARIFGDDTDSHTRKVVGTYGYMSPEYAMDGVFSVKSDVFSFGVLVLEIVSGRKNRGMYSSGEQTSLLSQAWRLWREGNALALLDEAVVRAGTHRSSEVLRCVQVALLCVQERPDDRPHMAAVFLALGNPSAVLPQPRHPGYCTDRGSASTDGEWSSTCTVNDVTVTIVEGR

SEQ ID NO: 72405 - protein, 77 aa, Zea mays
  Coding DNA Sequence Number=SeqID_30626
MTLKTLGQPRSPQIVLTTWMAFTSLEAIDSLIGLESLKNVLYDSVFAPISHLEHAKISCVFNKQQSCQTGPMKSSKV

SEQ ID NO: 72406 - protein, 140 aa, Zea mays
  Coding DNA Sequence Number=SeqID_30627
MGKSKKGRSSSHHSGDKQKREPTPPSEDFGDSEYSEEEFSSESEGSPIYTSPPASFDDSDDSQGIAAEVWTYIRAVKRSGLEGSDESEVSLDEENSSDSSEEGSSGDGDGESDGDDGGDDKGDGKGGSGSGKASGKAPLA

SEQ ID NO: 72407 - protein, 590 aa, Zea mays
  Coding DNA Sequence Number=SeqID_30628
  Gene Ontology: Mol. function=protein serine/threonine kinase activity; Cellular component=cytoplasm; Biological process=protein amino acid phosphorylation
  Homolog annotation: Hit_ID=Q6YW24; Match level="QueryCoverage=99%, HitCoverage=99%, E-value=0.0, Identity=78%"; Hit description=SERK1 protein-like
  Pfam annotation: Domain name=Pkinase; Domain location=288-555; Score =114.8; E_value=2.4e-31; Accession=PF00069.15; Description=Protein kinase domain
  Pfam annotation: Domain name=Pkinase_Tyr; Domain location=288-555; Score=88.8; E_value=1.7e-23; Accession=PF07714.7; Description =Protein tyrosine kinase
  Pfam annotation: Domain name=Usp; Domain location=19-144; Score=35.3; E_value=2.2e-07; Accession=PF00582.16; Description=Universal stress protein family
  Pfam module annotation: Pfam domain module=Pkinase::Pkinase_Tyr::Usp; Domain location=288-555::288-555::19-144
MDTIEECGDGGRHLLLGLGTRILVGVPDNSRGCSELLSWAIGAVAKPSDSVVAVHVLGGRGRKRRLQKANAFVIYMLGEFVKACEAKQINLEAKVICSSNIGRALTQEAALTDGNILIVGRSHFEIANYCFMHAPKNCSVIAVGRQGVAQSSTRLRPRSFDVADSTISSSSTWSRRFPPLQKLLRTNSTRKLAQSDDKSSPRAVLDGPEGEGGENQECYSTSSHEVSRRGHNGLWRRLSDMKLWLPFLRNIGDDSTRGSDVGSAFAEDHKPAWRCFSFQEISVATNDFHPDNMAGRGGYAEVYKGTLADGHLVAVKRLAKGTPSEQKEKEFLAELGIQGHVCHPNTSYLLGCCVENGLYLIFEFCTNGTLASALHGKGGRTLEWPLRYKIAVGVARGLQYLHMFCRHRIIHRDIKASNVLLGHDFEPQISDFGLAKWLPKQWTHHSVVPIEGTFGYLAPEYFMHGIVDEKTDIFAFGVLLLEIVTGRRPIDCSKQSLLQWAKPLLEAGQVTELADPSLGDDYDKDQLNRMVAVASRCIMRPAMWRPSMAEVLHFLSTTDECLNEPEKWNIPDDEVDDMDDCTLFSESFSM

SEQ ID NO: 72408 - protein, 101 aa, Zea mays
  Coding DNA Sequence Number=SeqID_30629
MGRAIGNSGSRPTQERDGLAPKLVTVLTCRGNSAPHSNPTQEEILLRNATGSCKETTSRAPANSMTGHGPAQVWAQKSPEGRRPINHGLPNLVNSVLHLAY

SEQ ID NO: 72409 - protein, 124 aa, Zea mays
  Coding DNA Sequence Number=SeqID_30630
MSPEEVLGKFVSGCMMVREARSHRFRKSRRIRAVHPMGVPNGVPVASYDDSDDSMGQSTAKRAYIRSIERAGLGGGSDDSDEGSSDGDGEGSGDGACCEGNRRGSDGSSRGGGYGDASGRVPPA

SEQ ID NO: 72410 - protein, 258 aa, Zea mays
  Coding DNA Sequence Number=SeqID_30631
  Gene Ontology: Mol. function=kinase activity; Cellular component =ornithine carbamoyltransferase complex; Biological process=amino acid metabolic process
  Homolog annotation: Hit_ID=Q6QP54; Match level="QueryCoverage=56%, HitCoverage=40%, E-value=6e-13, Identity=49%"; Hit description =Putative kinase
MGRREAEREGGRKVAGDGRERGGNPAAFVFVPRPGRLGGRVMMVPPVDVAGLRPRLGDVEAPPRSRSSLSSVAEVESEPPSRVRRRPSAEARAESEPWGQAERCSSSSGVEPKSEPWVGRSGPESEPWVGRSGVRRLPGLSPSLSPGSGGVEFAVFRGLARVRALGRAERSSPSSGAEPVSEPWVGRSGVRHLPGLSPSPSPGSGEAELPTMPSAGPDCLSVSLCQVAPQSEWRRRRCPSVRPLHADGGYQLRIRSLE

SEQ ID NO: 72411 - protein, 136 aa, Zea mays
  Coding DNA Sequence Number=SeqID_30632
  Gene Ontology: Mol. function=methyltransferase activity
  Homolog annotation: Hit_ID=Q6EP94; Match level="QueryCoverage=54%, HitCoverage=11%, E-value=8e-13, Identity=48%"; Hit description =Dehydration-responsive family protein-like
MGLLSSLPPHRRGAFSGGGWQWSFLDVVWGVFLIAVVVFLALVFTPRRGDPILTTPSVARAGGTVPPCAASEVDLLPCEDPRRSSRLSREMNYYRERHCPTRGEALACLVPPPRGYRIPVPWPESLHKVHVVGIGL

SEQ ID NO: 72412 - protein, 388 aa, Zea mays
  Coding DNA Sequence Number=SeqID_30633
  Gene Ontology: Mol. function=serine-type endopeptidase activity; Cellular component=integral to membrane
  Homolog annotation: Hit_ID=Q9LYP1; Match level="QueryCoverage=89%, HitCoverage=90%, E-value=1e-65, Identity=38%"; Hit description =Membrane protein
  Pfam annotation: Domain name=Rhomboid; Domain location=174-318; Score= 186.6; E_value=6.1e-53; Accession=PF01694.12; Description=Rhomboid family
MSNAADVEAGAQARAAPATTGIKPPPGRYNNMTSNGPYTPPSPFYYDPAAAHGRHHWSWLVPLVVIANVLMFVLVMFYNNCPRSGGDCVGPRLPPPLLLPAAQGEPPPRPHGRHVRIATSRRANSSPSLPSSTIRWTRDASLGLISSRLISNLPRRRPAARRLQRYGALDWYKVVHGNQAWRLESCTWLHAGLIHLLANMISLIFIGVRLEQQFGFWKVGLVYLVSGFGGSVLSVFFIRKGVSVGASGALFGLLGAMLSELITNWSIYTNRFAAMLNLIIIAAINLALGILPHVDNFAHIGGFATGFLLGFVLLIQPQFGWLEQPFGAKTKSKYKAYQIILLLAALVLLAAGFAVGLVMVFRGENGNDHCSWCHYLTCVPTSSWKCDN

SEQ ID NO: 72413 - protein, 379 aa, Zea mays
  Coding DNA Sequence Number=SeqID_30634
  Gene Ontology: Mol. function=methyltransferase activity; Cellular component=cellulose and pectin-containing cell wall; Biological process=metabolic process
  Homolog annotation: Hit_ID=Q94II3; Match level="QueryCoverage=95%, HitCoverage=63%, E-value=8e-98, Identity=46%"; Hit description=ERD3 protein
  Pfam annotation: Domain name=DUF248; Domain location=1-378; Score =559.6; E_value=3.2e-165; Accession=PF03141.7; Description=Putative methyltransferase
  Pfam annotation: Domain name=Methyltransf_11; Domain location=58-153; Score=39.3; E_value=1.4e-08; Accession=PF08241.2; Description =Methyltransferase domain
  Pfam module annotation: Pfam domain module=DUF248::Methyltransf_11; Domain location=1-378::58-153
MPYGKIAERKGHQGWMKHEGSYFIFPGGGTMFPDGAEQYIEKLSQYVPMKTGVIRTGLDMGCGVASFGGFLLKENIMTLSFAPRDSHKSQIQFALERGVPAFLLMLGTRRLPFPAQSFDFVHCSRCLIPFTAYNGSYFIEADRLLRHGGYLIISGPPVRWKNQEKEWDELQAMAGALCYKLITVDGNTAIWKKPAEASCLPNQNGFGLDLCSTDYDPDEAWYFKLNKCVSKISVAEETAIGSILKWPDRLSKPSARASVINNGANLFEVDSQKWVRRVSYYKKSLGVKLGSTNIRNVMDMNAFFGGFAAAIISDPVWVMNVVPGQKPLTLGVIYDRGLIGVYHDWCEPFSTYPRTYDLIHADAIDSLISGPISGTSRNP

SEQ ID NO: 72414 - protein, 111 aa, Zea mays
  Coding DNA Sequence Number=SeqID_30635
MAPLARPDCLSDSLCRVAPQSEWRRRRCPSVRPLYADGGYQLRIRRLEGTPNYGPRQQSNQLWITRDELELHLIMAFGIPRSTHCLDLENKIGIALGSKTTWALHWELSDE

SEQ ID NO: 72415 - protein, 1120 aa, Zea mays
  Coding DNA Sequence Number=SeqID_30636
  Gene Ontology: Mol. function=protein serine/threonine kinase activity; Cellular component=integral to membrane; Biological process=protein amino acid phosphorylation
  Homolog annotation: Hit_ID=Q9LHP4; Match level="QueryCoverage=92%, HitCoverage=92%, E-value=0.0, Identity=51%"; Hit description =Receptor protein kinase-like protein
  Pfam annotation: Domain name=LRRNT_2; Domain location=29-66; Score =15.1; E_value=0.023; Accession=PF08263.3; Description=Leucine rich repeat N-terminal domain
  Pfam annotation: Domain name=LRR_1; Domain location=123-145; Score =18.4; E_value=0.027; Accession=PF00560.23; Description=Leucine Rich Repeat
  Pfam annotation: Domain name=LRR_1; Domain location=147-169; Score =12.4; E_value=1.4; Accession=PF00560.23; Description=Leucine Rich Repeat
  Pfam annotation: Domain name=LRR_1; Domain location=172-194; Score =14.2; E_value=0.48; Accession=PF00560.23; Description=Leucine Rich Repeat
  Pfam annotation: Domain name=LRR_1; Domain location=196-219; Score =6.8; E_value=15; Accession=PF00560.23; Description=Leucine Rich Repeat
  Pfam annotation: Domain name=LRR_1; Domain location=221-243; Score =10.4; E_value=3.2; Accession=PF00560.23; Description=Leucine Rich Repeat
  Pfam annotation: Domain name=LRR_1; Domain location=245-267; Score =9.5; E_value=4.7; Accession=PF00560.23; Description=Leucine Rich Repeat
  Pfam annotation: Domain name=LRR_1; Domain location=269-291; Score =16.2; E_value=0.12; Accession=PF00560.23; Description=Leucine Rich Repeat
  Pfam annotation: Domain name=LRR_1; Domain location=293-315; Score =13.5; E_value=0.79; Accession=PF00560.23; Description=Leucine Rich Repeat
  Pfam annotation: Domain name=LRR_1; Domain location=317-339; Score =16.7; E_value=0.081; Accession=PF00560.23; Description=Leucine Rich Repeat
  Pfam annotation: Domain name=LRR_1; Domain location=341-363; Score =13.5; E_value=0.77; Accession=PF00560.23; Description=Leucine Rich Repeat
  Pfam annotation: Domain name=LRR_1; Domain location=386-408; Score =20.4; E_value=0.0063; Accession=PF00560.23; Description=Leucine Rich Repeat
  Pfam annotation: Domain name=LRR_1; Domain location=410-432; Score =5.2; E_value=30; Accession=PF00560.23; Description=Leucine Rich Repeat
  Pfam annotation: Domain name=LRR_1; Domain location=434-456; Score =12.9; E_value=1.1; Accession=PF00560.23; Description=Leucine Rich Repeat
  Pfam annotation: Domain name=LRR_1; Domain location=458-480; Score =11.3; E_value=2.2; Accession=PF00560.23; Description=Leucine Rich Repeat
  Pfam annotation: Domain name=LRR_1; Domain location=482-504; Score =17.2; E_value=0.06; Accession=PF00560.23; Description=Leucine Rich Repeat
  Pfam annotation: Domain name=LRR_1; Domain location=506-528; Score =15.4; E_value=0.2; Accession=PF00560.23; Description=Leucine Rich Repeat
  Pfam annotation: Domain name=LRR_1; Domain location=530-552; Score =14.7; E_value=0.34; Accession=PF00560.23; Description=Leucine Rich Repeat
  Pfam annotation: Domain name=LRR_1; Domain location=554-576; Score =17.2; E_value=0.06; Accession=PF00560.23; Description=Leucine Rich Repeat
  Pfam annotation: Domain name=LRR_1; Domain location=603-624; Score =13.8; E_value=0.63; Accession=PF00560.23; Description=Leucine Rich Repeat
  Pfam annotation: Domain name=LRR_1; Domain location=626-649; Score =12.6; E_value=1.3; Accession=PF00560.23; Description=Leucine Rich Repeat
  Pfam annotation: Domain name=LRR_1; Domain location=99-121; Score =3.7; E_value=58; Accession=PF00560.23; Description=Leucine Rich Repeat
  Pfam annotation: Domain name=Pkinase; Domain location=762-1044; Score= 113.7; E_value=5.3e-31; Accession=PF00069.15; Description=Protein kinase domain
  Pfam annotation: Domain name=Pkinase_Tyr; Domain location=762-1044; Score=80.5; E_value=5.4e-21; Accession=PF07714.7; Description =Protein tyrosine kinase
  Pfam module annotation: Pfam domain module=LRRNT_2::LRR_1::LRR_1::LRR_ 1::LRR_1::LRR_1::LRR_1::LRR_1::LRR_1::LRR_1::LRR_1::LRR_1::LRR_1: LRR_ 1::LRR_1::LRR_1::LRR_1::LRR_1::LRR_1::LRR_1::LRR_1::LRR
  Pfam module annotation: Pfam domain module=Pkinase_Tyr; Domain location=29-66::123-145::147-169::172-194::196-219::221-243::245 -267::269-291::293-315::317-339::341-363::386-408::410-432::434 -456::458-480::482-504::...
  Pfam module annotation: Domain location=506-528::530-552::554 -576::603-624::626-649::99-121::762-1044::762-1044
  Subcellular localization annotation: CTP_CleavageSite=23; ConfidenceScore=5.11e-01
MRRRHLPLPLPLLPLVLLHLLFAASSGSPSSEVAFLTAWLNTTAARPPDWSPAALSPCNWSHVSCAGGTGETGAVTSVSFQSVHLAVPLPAGLCAALPGLVSFVVSDANLTGGVPDDLWRCRRLTVLDISGNALTGSIPSSLGNATALENLALNSNQLSGPIPPELAALAPTLRNLLLFDNRLSGELPPSLGDLLLLESLRAGGNHDLAGLIPESFSRLSSLVVLGLADTKISGPLPASLGQLQSLQTLSIYTTALSGAIPPELGNCSNLTSIYLYENSLSGPLPPSLGALPRLQKLLLWQNALTGPIPESFGNLTSLVSLDLSINSISGTIPASLGRLPALQDLMLSDNNITGTIPPLLANATSLVQLQNQLEGAIPATLASLANLQALDLSHNHLTGIIPPGLFLLRNLTKLLLLSNDLSGPLPLEIGKAASLVRLRLGGNRIAGSIPASVSGMKSINFLDLGSNRLAGPVPAELGNCSQLQMLDLSNNSLTGPLPVSLAAVHGLQELDVSHNRLNGAVPDALGRLETLSRLVLSGNSLSGPIPPALGQCRNLELLDLSDNVLTGNIPDELCGIDGLDIALNLSRNALTGPIPAKISELSKLSVLDLSYNALNGNLAPLAGLDNLVTLNVSNNNFSGYLPDTKLFRQLSTSCLAGNSGLCTKGGDVCFVSIDANGNPVTSTAEEAQRVHRLKIAIALLVTATVAMVLGMMGILRARRMGFGGKSGGRSSDSESGGELSWPWQFTPFQKLSFSVDQVVRSLVDANIIGKGCSGVVYRVSIDTGEVIAVKKLWPSTQTAATSKDDGTSGRVRDSFSAEVRTLGSIRHKNIVRFLGCCWNKSTRLLMYDYMANGSLGAVLHERRGAGAQLEWDVRYRIVLGAAQGIAYLHHDCVPPIVHRDIKANNILIGLDFEAYIADFGLAKLVEDGDFGRSSNTVAGSYGYIAPEYGYMMKITEKSDVYSYGVVVLEVLTGKQPIDPTIPDGLHVVDWVRRCRDRAGVLDPALRRRSSSEVEEMLQVMGVALLCVSAAPDDRPTMKDVAAMLKEIRLEREDVANVDVLLKGGSSPPHHVHANAAAIADKATSSTSSTPPCPQGPSNSCSSSSFSAIYSLSNKAKSPFG

SEQ ID NO: 72416 - protein, 228 aa, Zea mays
  Coding DNA Sequence Number=SeqID_30637
  Gene Ontology: Mol. function=hydrolase activity; Cellular component =integral to membrane
  Homolog annotation: Hit_ID=Q6ERC2; Match level="QueryCoverage=99%, HitCoverage=54%, E-value=5e-75, Identity=64%"; Hit description =Cytidine/deoxycytidylate deaminase-like protein
  Pfam annotation: Domain name=dCMP_cyt_deam_1; Domain location=1-201; Score=-11.7; E_value=0.0071; Accession=PF00383.13; Description =Cytidine and deoxycytidylate deaminas
MQIVAKATDQTHKHDTPEGNTVSEANADVTCSLNESMGNGSNLSLPGSFLPKCDSLNMEISCINPWGWMKKKTCERKPLPCDGCFAWHPLRHAPMVAIENAAERDRTMFPSLASITKTDSNGNLEKYCDNEQAKRLKTDTKVKFKHQDNEPSASESFCGDLSETSRPYLCTGFDIYLVWEPCTMCAMALVHHRFKRVFYAFPNPVTGALGGVYMLHGGEKSKSSLHCI

SEQ ID NO: 72417 - protein, 107 aa, Zea mays
  Coding DNA Sequence Number=SeqID_30638
MAHRVRYRGGDLVAGKLLTGGGPLPQVRGGVWAMWWLRAEASVPVEFLTGFMLAVDLLRPETTMPLGVGQAPSTASTADHYVNGNMENHPGKQCYHKRLMGHPWLIN

SEQ ID NO: 72418 - protein, 78 aa, Zea mays
  Coding DNA Sequence Number=SeqID_30639
MWPAGSGLECLPSSGAGSPDYAPLRHTSIWRATDDPGSTPAPASGYPHCDSLVPACWRLGPRLPRRCLQHHGVGPTLT

SEQ ID NO: 72419 - protein, 163 aa, Zea mays
  Coding DNA Sequence Number=SeqID_30640
  Homolog annotation: Hit_ID=Q3LRV2; Match level="QueryCoverage=32%, HitCoverage=22%, E-value=1e-16, Identity=77%"; Hit description=Gag
MSGEHAKNEKVTSGGKPESSGSKLEDKVPSRGMKPSGDKHKHKQHEEESTGTTKLHKKKDNKKKKKKIKKLVYYDTYSSMSSTSYIESTSFKRQECKKSKMGHHLTSLHEIIWDIVEFGAQGPQVGNEDYDSDEAAQIQHFNSQATTILLVSLFSHLVLEVAR

SEQ ID NO: 72420 - protein, 83 aa, Zea mays
  Coding DNA Sequence Number=SeqID_30641
MVGAITGVLQLPLAQPSERDPRVRVGEELNTLCHRRLLPNTVVRVCGLCPEASLGRRGGARLSTWARATIGGQQFLVGVGAPP

SEQ ID NO: 72421 - protein, 73 aa, Zea mays
  Coding DNA Sequence Number=SeqID_30642
MEHYKELTIETLKLELALELILPLLEVAAVRHPDGPEWSEIWRASARTATAELLPVEPARRPNELAIDSTAKE

SEQ ID NO: 72422 - protein, 336 aa, Zea mays
  Coding DNA Sequence Number=SeqID_30643
  Gene Ontology: Mol. function=RNA-directed DNA polymerase activity; Cellular component=mitochondrion; Biological process=RNA-dependent DNA replication
  Homolog annotation: Hit_ID=Q8S463; Match level="QueryCoverage=98%, HitCoverage=17%, E-value=1e-153, Identity=81%"; Hit description =Putative prpol
MYTYIGVRRLDARGDSQLVIDQVMKNSHCRDPKMEAYCDEVRRLEDKFYGLELNHIARQYNETADELSKIASGRTTVPPDVFSRDLHQPSVKTDDTPEPEKVSALPEAPSAQPEAPSAPEGEALRVEEERNGVSPNRDWQTPYLQYLHRGELPLDRAEARRLARRAKSFVLLGDGKELYHRSPSGILQRCISIAEGQELLQEIHSGACGHHAVPRALVGNAFRQGFYWPTAVADATRIVRTCQGCQFYAKQTHLSAQALQTIPNTWLFAVWGLDLVGPLQKAPGGYTHLLVAIDKFSKWIEVRPLNNIRSEQAVAFFTNIIHCFGVPNSIITDNGT

SEQ ID NO: 72423 - protein, 162 aa, Zea mays
  Coding DNA Sequence Number=SeqID_30644
  Gene Ontology: Mol. function=nucleic acid binding; Cellular component= nucleus
  Homolog annotation: Hit_ID=Q5ZDJ7; Match level="QueryCoverage=89%, HitCoverage=77%, E-value=4e-31, Identity=41%"; Hit description=Zinc finger protein 3-like
  Pfam annotation: Domain name=zf-CCCH; Domain location=28-54; Score =44.8; E_value=2.9e-10; Accession=PF00642.15; Description=Zinc finger C-x8-C-x5-C-x3-H type (and similar)
  Pfam annotation: Domain name=zf-CCCH; Domain location=95-121; Score =41.5; E_value=2.8e-09; Accession=PF00642.15; Description=Zinc finger C-x8-C-x5-C-x3-H type (and similar)
  Pfam module annotation: Pfam domain module=zf-CCCH::zf-CCCH; Domain location=28-54::95-121
ALVTVNFSFHSHLYLEIVSINVLQNSAKGEVDCSFYMKTGSCKYGSICRFNHPDRPGPAADIAFMVPLVQATLPSSAPIVPAVVEPLPMIYPQRPGETVCDFYMKTGSCKYSQKCKFHHPISRFAPHSKENGDPQQPATLASLPRRETHPRCNGSGPITQVY

SEQ ID NO: 72424 - protein, 227 aa, Zea mays
  Coding DNA Sequence Number=SeqID_30645
  Homolog annotation: Hit_ID=Q5ZDJ7; Match level="QueryCoverage=16%, HitCoverage=8%, E-value=2e-07, Identity=57%"; Hit description=Zinc finger protein 3-like
  Pfam annotation: Domain name=zf-CCCH; Domain location=173-199; Score =37.5; E_value=4.7e-08; Accession=PF00642.15; Description=Zinc finger C-x8-C-x5-C-x3-H type (and similar)
  Subcellular localization annotation: CTP_CleavageSite=65; ConfidenceScore=5.60e-01
MASQALPSPTIADLSSTVRHLSLLASSFKFLLSLASSPPVWLNPALATAWLTPAHPFITFVGSVAAAAFRPDPRRYDLLGSILTGFLDVRTIEEAEMSVCWCFFCCVALPIVDARTSTSATSTSANSTSRGYRLLGIHTSLFSSRNIRSLTTLQLWGYFNPSAPTFGLYFSLIDAEACAFYMRSGMCRFGAHCKFDHPPREEAISELQAAGKEGIEGPSLVQRDHDV

SEQ ID NO: 72425 - protein, 241 aa, Zea mays
  Coding DNA Sequence Number=SeqID_30646
  Subcellular localization annotation: CTP_CleavageSite=14; ConfidenceScore=5.10e-01
MESAAASAIADAASAAALATVGASTTSVALNVPLAAAGELVVGLGHQHRRQTRRGPRHQPGHQLLDFHSSGGLRLTPDRPCRPPSGFTLAAPTLMAPDGDPTLLVAIATVQTVVAASQECERAASLTPTTQMAITQRPILGHPPVAQVAPLVTPKAPLASRLDADHIAALHAQAVGLHNIWSLMSIVLDPASSHSVVGGGESSRFGDTLSPTTFSMISLPRRLHPIPPVLSGDLSVGEYYR

SEQ ID NO: 72426 - protein, 77 aa, Zea mays
  Coding DNA Sequence Number=SeqID_30647
MGSSCADGRRGAVEEGHLLAFGPEEVPTDRRWKKGAGGLLLAYKFLLLRNSSLQRTERIGVPTNGTIERLTSPESLI

SEQ ID NO: 72427 - protein, 57 aa, Zea mays
  Coding DNA Sequence Number=SeqID_30648
  Homolog annotation: Hit_ID=UPI00006A2901; Match level="QueryCoverage =84%, HitCoverage=61%, E-value=8e-13, Identity=46%"; Hit description =UPI00006A2901 related cluster
MIGRADIEGSKSNVAMNAWLPQASYPCDVPPQPNSPPDNVFRPDRPGEAGPWSQKEG

SEQ ID NO: 72428 - protein, 57 aa, Zea mays
  Coding DNA Sequence Number=SeqID_30649
MSIICCPRRGMMQLHILRDMKAEVITGSVAMCIHGRSVESDMWMWIAPDFCFGKEGM

SEQ ID NO: 72429 - protein, 98 aa, Zea mays
  Coding DNA Sequence Number=SeqID_30650
  Homolog annotation: Hit_ID=Q9ZRZ5; Match level="QueryCoverage=38%, HitCoverage=17%, E-value=2e-08, Identity=71%"; Hit description=HB1 homeodomain protein
MAEQYKMHVMNEIQWDYFSVELLDIQHVHIKLVSTDTCFIDLNLAKRLSWKLRGYVKVMIDKQMEVLRKQISIYATICEQLVEMHRILTEHEDTIAEN

SEQ ID NO: 72430 - protein, 127 aa, Zea mays
  Coding DNA Sequence Number=SeqID_30651
  Gene Ontology: Mol. function=protein serine/threonine kinase activity; Biological process=protein amino acid phosphorylation
  Homolog annotation: Hit_ID=Q2QSJ1; Match level="QueryCoverage=87%, HitCoverage=28%, E-value=3e-13, Identity=39%"; Hit description =Protein kinase domain containing protein
MAELVTGTGVPFFGGALDKEVFDKVLHVVGTRGIAKWQGLERVAPREKVACLRKTASQERGYLLKMFPPRLLSPAGFKVLEGLLQSNPDHRLSAADALRKPWFRRRFSLGACCFMPHALRSRLVVQY

SEQ ID NO: 72431 - protein, 460 aa, Zea mays
  Coding DNA Sequence Number=SeqID_30652
  Gene Ontology: Mol. function=protein serine/threonine kinase activity; Cellular component=cytosol; Biological process=protein amino acid phosphorylation
  Homolog annotation: Hit_ID=Q2QSJ1; Match level="QueryCoverage=79%, HitCoverage=98%, E-value=4e-58, Identity=39%"; Hit description =Protein kinase domain containing protein
  Pfam annotation: Domain name=Pkinase; Domain location=118-428; Score =143.3; E_value=6.5e-40; Accession=PF00069.15; Description=Protein kinase domain
  Pfam annotation: Domain name=Pkinase_Tyr; Domain location=118-426; Score=-18.1; E_value=2.3e-11; Accession=PF07714.7; Description =Protein tyrosine kinase
  Pfam module annotation: Pfam domain module=Pkinase::Pkinase_Tyr; Domain location=118-428::118-426
  Subcellular localization annotation: CTP_CleavageSite=70; ConfidenceScore=5.23e-01
ISGSRSTDTSCPYIIPAPQPASPATAIASSAPQPPAAARVHPVEPRLPSSPQLAAAKRRLHPVGSFEPRSGSMAAASDLVNGGVAALQIEEPEESKNNAAAVVAFAPIPWLPAVAERYERREKLGEGMFGDVYKAWDRVHDRIVAVKRLSGRTDDRFVKTSIPDLAREVMSLAACRGHPSVVQLLATHVDGSRADGDCYLVTEHAGPMNLRQYMAVRRLNGQPFGEDEVRDVMRQLLAGAEHTHRAGVLHRDIVPENVIVGMDGDSATGRMVYTICGFGMSKPAGQTEKDDSGLLASPSPYRAPELFLGCKDYDGRVDTWSLGCIMAELVTGTGVPFFGGALDKEVFDKVLHVVGTRGIAKWQGLERVAPREKVACLRKTASQERGYLLKMFPPRLLSPAGFKVLEGLLQSNPDHRLSAADALRKPWFRRRFSLGACCFMPHAAAYRRPCYITDMLIMSV

SEQ ID NO: 72432 - protein, 373 aa, Zea mays
  Coding DNA Sequence Number=SeqID_30653
  Gene Ontology: Mol. function=protein serine/threonine kinase activity; Cellular component=cytosol; Biological process=protein amino acid phosphorylation
  Homolog annotation: Hit_ID=Q2QSJ1; Match level="QueryCoverage=85%, HitCoverage=84%, E-value=4e-57, Identity=41%"; Hit description =Protein kinase domain containing protein
  Pfam annotation: Domain name=Pkinase; Domain location=46-356; Score =142.0; E_value=1.7e-39; Accession=PF00069.15; Description=Protein kinase domain
  Pfam annotation: Domain name=Pkinase_Tyr; Domain location=46-354; Score=-19.7; E_value=2.9e-11; Accession=PF07714.7; Description =Protein tyrosine kinase
  Pfam module annotation: Pfam domain module=Pkinase::Pkinase_Tyr; Domain location=46-356::46-354
MAAASDLVNGGVAALQIEEPEESKNNAAAVVALAPVPWLPAVAERYERRENLGEGMFGDVYKAWDRVHDRIVAVKRLSGRTDDRFVKTSIPDLAREVMSLAACRGHPSVVQLLATHVDGSRADGDCYLVMEHAGPMNLRQYMAVRRLNGQPFGEDEVRDVMRQLLAGAEHTHKAGVLHRDIVPENVIVCMDGDSATGRMVYTICGFGMSKPAGQTEKDDSGLLASPSPYRAPELFLGCKDYDGRVDTWSLGCIMAELVTGTGVPFFGGALDKEVFDKMMHVVGTRGIAKWQGLERVAPREKVAGLRKTASQERGYLLKMFPPRMLSPAGFKVMEGLLQSNPDHRLSAADALRKPWFRRRFSLGACCFMPHAAA

SEQ ID NO: 72433 - protein, 66 aa, Zea mays
  Coding DNA Sequence Number=SeqID_30654
MATLALPGAAAPACVSACAARGRLVVAQLRQGGPDDDLVDRSSTTSRVDISEPYPGADRQTQPAHI

SEQ ID NO: 72434 - protein, 207 aa, Zea mays
  Coding DNA Sequence Number=SeqID_30655
  Gene Ontology: Mol. function=protein serine/threonine kinase activity; Cellular component=cytoplasm; Biological process=protein amino acid phosphorylation
  Homolog annotation: Hit_ID=Q2QSJ1; Match level="QueryCoverage=86%, HitCoverage=49%, E-value=4e-20, Identity=37%"; Hit description =Protein kinase domain containing protein
  Pfam annotation: Domain name=Pkinase; Domain location=46-205; Score= -85.5; E_value=0.0018; Accession=PF00069.15; Description=Protein kinase domain
  Pfam annotation: Domain name=Pkinase_Tyr; Domain location=46-205; Score=-150.3; E_value=0.003; Accession=PF07714.7; Description =Protein tyrosine kinase
  Pfam module annotation: Pfam domain module=Pkinase::Pkinase_Tyr; Domain location=46-205::46-205
MAAASDLVNGGVAALQIEEPEESKNNAAAVVAFAPIPWLPAVAERYERREKLGEGMFGDVYKAWDRVHDRIVAVKRLSGRTDDRFVKTSIPNLAREVMSLAACRGHPSVVQLLATHVDGSRADGDCYLVTEHAGPMNLRQYMAVRRLNGQPFGEDEVRDVMRQLLAGAEHTHRAGVLHRTSSRRTWIVGMDGDSVDPGRMCTRYAAS

SEQ ID NO: 72435 - protein, 43 aa, Zea mays
  Coding DNA Sequence Number=SeqID_30656
MTLGAGGSWAAVARGWGLEQTEDGLTASRPGTAASPLNVGEQI

SEQ ID NO: 72436 - protein, 54 aa, Zea mays
  Coding DNA Sequence Number=SeqID_30657
MGLGMDMLKKYIRGKAIGELYWNLEDRGFTFLTKPYEGRFHGNLLDKVMERPVK

SEQ ID NO: 72437 - protein, 45 aa, Zea mays
  Coding DNA Sequence Number=SeqID_30658
MATSPTELRRAPQYSDIDIYVPSTIWNGIRIIGNRSFVLSDLFLQ

SEQ ID NO: 72438 - protein, 132 aa, Zea mays
  Coding DNA Sequence Number=SeqID_30659
MTTGEVDDEPIELKLYDTDRHTGRRAEGAEALAPASSCRGDRSPSAEQGGIRGAQGRGELEEQGGRGPSLAMGEQEVHRGGGWAQGEPMEMGAELHRCMASRRNEEEDAGRERCDERRGSTAGYLKTPGAAP

SEQ ID NO: 72439 - protein, 410 aa, Zea mays
  Coding DNA Sequence Number=SeqID_30660
MGNSLRCCLACVLPCGALDLVRIVHLSGRVDEYGRAVSAGEVLAAHPNHVLSRPCSSPQGVVRRILIVSPDSELERGEIYFLIPAASVPDAKKGGGGASTPGRHVRSNWGLGAESPEEAAAAPAAKKKNQQQHKRAAAQQHRRRMSTGSHAAPWQPHLRLHRGGPLSALPLPVRRAPVWTRPTSLGLYCTKHSDCFLCQRRFSLAFDLFLFRPLARPARSALGASPSLPHAPTRPAALAPAATAPREHEHRVPGCSPSCPTCQRSGPANCSLHVLALLLPDRSRPRIIWTLRRLRMLDLSSNCLQGGIPAVLACVALRDLAYNNAVDVVMCCACAGREHRRARGHVAVGAVVRTAAPDQAADDEYEYEVEATTVIDARLSAVRVHAAGERSLAVWHPAVDDGGSCEHHAG

SEQ ID NO: 72440 - protein, 79 aa, Zea mays
  Coding DNA Sequence Number=SeqID_30661
MGLGNQSHRDDSGSYPLRVGPDRQCTFNLFSEMAATDPASVGEGYRSWLPLPVVDSLSIKRSRRPASRIPGVEAIQSAT

SEQ ID NO: 72441 - protein, 833 aa, Zea mays
  Coding DNA Sequence Number=SeqID_30662
  Gene Ontology: Mol. function=protein serine/threonine kinase activity; Cellular component=cytoplasm; Biological process=protein amino acid phosphorylation
  Homolog annotation: Hit_ID=Q2QQX0; Match level="QueryCoverage=93%, HitCoverage=100%, E-value=0.0, Identity=55%"; Hit description =Protein kinase, putative, expressed
  Pfam annotation: Domain name=Pkinase; Domain location=452-781; Score =232.6; E_value=8.8e-67; Accession=PF00069.15; Description=Protein kinase domain
  Pfam annotation: Domain name=Pkinase_Tyr; Domain location=452-781; Score=-28.2; E_value=9.6e-11; Accession=PF07714.7; Description =Protein tyrosine kinase
  Pfam module annotation: Pfam domain module=Pkinase::Pkinase_Tyr; Domain location=452-781::452-781
LRDAGGSRPRTAASLLAQVHATDCRCWCLEMRQPFYGRPPVQMKVQLVEQEGSKGMGSSGCAEIVELADDPKAARPAAHLRVRVKPVGQEDGARSCSLEDDLDQLIRSVNVRTSARASGQRSTDRWLIGLGKSPVSGSEIVESVSLKQALRKMCISQASEMAAMKRLSKPTGASTPSDSGATKKLYGSVAVQANGEQDDKSKVGNVYMLPEKLAGSSIGKANEISKGQSKSSAKKNLRSASPTAVKVRKTRIQDVISNKSSEAVEDVSVGATLPRQRKGKSVKTSSPRAVPVGGSRLVRPMFRNKTSTKKKVKPEPAIVPASHKHCETKGPKSHASKQKESLQDEPRTPAPANKKAAVSSTVDGSDFGTKGCGTGVIHGPKVGELSRSKEKGECSQSSKSSIGDYSTSTSISEDSYGSFSANGSRPHMSKDVRWGAIRCMAIQQGSLGLKNFKLLKQLGCGDIGTVYLAELVGSDCMFALKVMDIEYLISRKKMLRAQTEREILQMLDHPFLPTLYSHFTTDNLSCLVMEFCPGGDLHVLRQKQPTKTFSEAAARFYVAEVLLALEYLHMLGVIYRDLKPENILVREDGHIMLSDFDLSLRCSVSPMLVRISSVGRDEPSRPSGPCAQSCIDPLCIQPSWSNSSCFTPRLVSSRRPRAELLKKPSLPQLVVEPTEARSNSFVGTHEYLAPEIIRGDGHGSSVDWWTLGIFLYELLYGKTPFKGPGNEETLSNVISQGLKFPDNPAVSFHARDLIRGLLVKEPEYRLGSSRGATEIKRHPFFEGLNWALIRWTAPPETLKNIDTAPTPVTTRKKKEGKCLEFRLNGDDIEFELF

SEQ ID NO: 72442 - protein, 71 aa, Zea mays
  Coding DNA Sequence Number=SeqID_30663
MATNGRRESLSSWASDTSGILEQIYVSKLALRKRQKKMAPYVHGPSQSLSHPGPTVDLINGHRIFVTARQK

SEQ ID NO: 72443 - protein, 197 aa, Zea mays
  Coding DNA Sequence Number=SeqID_30664
  Subcellular localization annotation: CTP_CleavageSite=47; ConfidenceScore=5.44e-01
MTGVRRSQGLRARFPRGAPSLQSRKCPHRATGQGRAGPPRPSRRLPRAPVAQSHLRRRRCSDEQIDDYALARQGRSCGGRGGGGVRREQRRTRGACDSVVGLNFQQGTATRPKGKAGSSRLVVVTAPQREKEKSAAAFAPLEASTPLPQSRRRFGLKLPQILARRTQILQVGAARAAAAADDDRTRAAPAPRCRRRP

SEQ ID NO: 72444 - protein, 142 aa, Zea mays
  Coding DNA Sequence Number=SeqID_30665
MQQLLLKEQQAAERCVTSLLQTVCGESTIIVGCPVFSSIISLVAAAAAAKIEVVRGNGDRTRPSAAAAADGGVAWRSSTAQGWGEAPSKVQRDGSGKAESVGTGTTLCIELDAWIRHSRIEQVYCSPSNVEVGRVPSITLTG

SEQ ID NO: 72445 - protein, 137 aa, Zea mays
  Coding DNA Sequence Number=SeqID_30666
MGKSNKRKRKPTPPSEDFGNSEYSEEEFSSESEGSPAPVSPPASSDDSDDSQGLAAEVWTYIRAVERSGLEGSDESEYSSDKEDSSEEDDGGDGKDDDDDDDDDDGGDDGDGGGRGGNCGSKGGNGGSSRGSNKASG

SEQ ID NO: 72446 - protein, 161 aa, Zea mays
  Coding DNA Sequence Number=SeqID_30667
  Gene Ontology: Mol. function=hydrolase activity
  Homolog annotation: Hit_ID=Q8CME1; Match level="QueryCoverage=50%, HitCoverage=56%, E-value=2e-38, Identity=92%"; Hit description=Cell wall-associated hydrolase
MKLKITTYARVRGGSAQLGERDRAALSSGSGTAALDARAQGRWRSASGSGTAWSALSSGSTVDQPSGATVSAWSGVRANTLNGEQPYPWDLLQLQDVMSRHRGAKHRRRYELLGGISLLSPEYLLSVERWPFHSEPPDHYDLLSHLLAPSRSQSSWLMPLH

SEQ ID NO: 72447 - protein, 80 aa, Zea mays
  Coding DNA Sequence Number=SeqID_30668
MGWFLVILVLTSHGAAPSRAGQHQATHGWLKKAVHGWPERRSQGHTNVRRPETSEQTAGGLELVVGAWTEGEGDIESVDE

SEQ ID NO: 72448 - protein, 54 aa, Zea mays
  Coding DNA Sequence Number=SeqID_30669
MEEMVAIPVRDGEQPESPTAPPIKAPQQQFLQMINNFSVNSRLSSKKKMDFRKK

SEQ ID NO: 72449 - protein, 33 aa, Zea mays
  Coding DNA Sequence Number=SeqID_30670
MDRNDIPRSWNADELRRYLRTQIMNMKYDQDEA

SEQ ID NO: 72450 - protein, 123 aa, Zea mays
  Coding DNA Sequence Number=SeqID_30671
MKSTELGRVQATGAPRSPELARTDKKGPVNSLVGFRPKDRDQGERTTEGNLRADQGNSGEESRPRGGRIRCAKARTSSVEGRGVLRTNTRAQCDAESANHREGRDEPARMNFSKAKLATTRCE

SEQ ID NO: 72451 - protein, 64 aa, Zea mays
  Coding DNA Sequence Number=SeqID_30672
MADKGKGKGIIIGDPHISNISQKEIARKAPDEQAKKFGGAEGQLLSKNASKKTVLRDRSTEKPR

SEQ ID NO: 72452 - protein, 142 aa, Zea mays
  Coding DNA Sequence Number=SeqID_30673
MAREVHGPEYDMRTDDIDGEVLMRAQLEEVWRQCVELEARMRTEWEAERVTRLAEQQRMTEILQYMHVATGVPLPATLFAPPTPAPPPQFSTPMSMEGTRDVQNVGGHAEASRPSEGVRIIHGSCGLLGSQGLQAHHDVSCS

SEQ ID NO: 72453 - protein, 270 aa, Zea mays
  Coding DNA Sequence Number=SeqID_30674
  Gene Ontology: Mol. function=binding; Cellular component=ubiquitin ligase complex; Biological process=intracellular signaling cascade
  Homolog annotation: Hit_ID=Q6ZIQ0; Match level="QueryCoverage=84%, HitCoverage=66%, E-value=7e-73, Identity=67%"; Hit description=Arm repeat-containing protein-like protein
  Pfam annotation: Domain name=Arm; Domain location=41-81; Score=25.3; E_value=0.00021; Accession=PF00514.13; Description=Armadillobeta -catenin-like repeat
  Pfam annotation: Domain name=Arm; Domain location=82-123; Score=39.4; E_value=1.2e-08; Accession=PF00514.13; Description=Armadillobeta -catenin-like repeat
  Pfam module annotation: Pfam domain module=Arm::Arm; Domain location =41-81::82-123
MRCRGVEDAISSLVAELECPLQSLDSLRRTSMELWLLAKHNPDNRVRIAAAGDVRSLVWLLSHADPLLQEHGVTALLNLSICDENKATIVEAGAIRPLVHALKSAASPAARENAACALLRLSQLDGASAAALAPSRCWSPCSRPGSARQEGRRHGAIRALQRGVETGAVRPLLDLMADPESGMVDKTAYVLHSLVPSGEGHAAAIEEGDIPVLVEMVEVGTSREKEIATLSLLQIEIDRDGADGDHRAEGGGCRRDSAQIAGGGGSGGGQ

SEQ ID NO: 72454 - protein, 121 aa, Zea mays
  Coding DNA Sequence Number=SeqID_30675
MALYVPLISELSVPHGLILYIRLSVQEPGLPEHGVADVAEVAALERAPGRPSSTDEDRVWRRTATTCGGTTSSPSSSSSSALLPPARHPPAGHAAGTRTGADCLGAIALPGTGTGTPPPQP

SEQ ID NO: 72455 - protein, 95 aa, Zea mays
  Coding DNA Sequence Number=SeqID_30676
MTKALLAPSFGHHRSNLQLAQLPPNCGGARYDRFTTGITFFAECLRHSAKAILRQRILSKHFIDKGFFAEYFFRTLSKDFVECRKALDKEKHSAN

SEQ ID NO: 72456 - protein, 74 aa, Zea mays
  Coding DNA Sequence Number=SeqID_30677
MAHQTLSGDSSDSPVNYSGAAPGKPEGEEFELRHPGAPDTVRWHTGQSDHACTNCFVFANSFGNSFQSVLQNSQ

SEQ ID NO: 72457 - protein, 339 aa, Zea mays
  Coding DNA Sequence Number=SeqID_30678
  Gene Ontology: Mol. function=ATP binding
  Homolog annotation: Hit_ID=Q6ZJE4; Match level="QueryCoverage=84%, HitCoverage=66%, E-value=5e-79, Identity=55%"; Hit description=DNA -dependent ATPase A-like protein
MEITEEQRRRAEANRLAALEKRKRYAEAAAATAFPTSGASTFPAYDTAAAAEWRLAKCPRIAPPARQLPFVPLPPRPSPPPLPPTPPQPPVGFQVVLEVCGPDEFWVAVVPVEGRAYPGEAECLGAVQDCLAAASVVQYSATQSLSQSTHLRPVFKLVDYGVVLKCLKKLPGASVQEIPSSTKRIIQNIPRYHVQKWASDEEVHELLKKLPQQIKDALLPFQLEGVMFGLRRRGRCLIADEMGLGKTLQIYDLLNDVNRPPYLFFVIHFRFDDLVLDYMNWPTNLPILRERAIAIACCFKDEGSILIVCPAVLRYSWAEELERWDPSFMPKDIHIGTFE

SEQ ID NO: 72458 - protein, 450 aa, Zea mays
  Coding DNA Sequence Number=SeqID_30679
  Gene Ontology: Mol. function=endonuclease activity
  Homolog annotation: Hit_ID=Q6ZJE3; Match level="QueryCoverage=53%, HitCoverage=21%, E-value=3e-63, Identity=59%"; Hit description =Putative DNA helicase
  Pfam annotation: Domain name=Helicase_C; Domain location=381-450; Score=31.1; E_value=4e-06; Accession=PF00271.21; Description =Helicase conserved C-terminal domain
TEGVEGPEAIVSGDHALGMKILHRKAKRVKFDRTIVIRRSSSWSPWHSRGGRNHRALLQSPERMLNRPDRLGKVTRQRGVLGRSSEERLLWCALVCRRTSATLLSSRAGPHRDLPGPWIVQRRPRRLSLASSAVVGATPSTTTSRGAPAIGVASGSAGTTSGRRDTSRGRGDGGSSGTGDESGGRRQRWHIFTKGLPTFVFSEFRSSLNDFSKGTRLTELNVLLSQTVMIRRLKEHLLNELPPKRRQIIRLKLKAPDIRAATSSCGKRVNPNSCNGTLTIELPSKSNDDENTKEEEEDDCKKSPRSLTPQEIGIAKLSGFSEWFSNHFIMNGFDANHNLDPQSSCQKTIIFAHHLKVLDGIQKKHQPGAVVRAISLNHQVFISENEIRFVRIDGSTLQRERKEAVDSFRLDPEVKVAIIGITAGGVGLDFSSAQNVIFVELPKSASELLQ

SEQ ID NO: 72459 - protein, 375 aa, Zea mays
  Coding DNA Sequence Number=SeqID_30680
  Gene Ontology: Mol. function=endonuclease activity
  Homolog annotation: Hit_ID=Q6ZJE3; Match level="QueryCoverage=52%, HitCoverage=23%, E-value=2e-75, Identity=60%"; Hit description =Putative DNA helicase
MDSGCRPAADNQDHRDSACNGSHLRRSSDGSDGADLQSYPAQKWRGRRSGSGGQRRNGDGAEQGAGGRHKSEADSADLVTAQSRNPARSDRDPLLAGTGRGRRTPGGHRKRAAQTEIRPWRRTLQARGKAARRRDGATARGLTGELAAMAAQRRHQKFGSGSGLDGILKGGSKRRAASLNDVSNPLPENAEWRQVVLRNGTCKERQYTQGWTIDDEPLCKLCQGLCNGRLAKSPEYFEDLFCSLACFQEYRLRTSGRALRQALFQIERGKCSQCKLDCCKLVKHIKLLPLGKREEYIRKVAPNIASRKKLLDKLVREPIDGNAWHADHIIPVYKGGGTPSEATEELDDESLLIAVPGSAYSLGFPGNGSDEKAAE

SEQ ID NO: 72460 - protein, 758 aa, Zea mays
  Coding DNA Sequence Number=SeqID_30681
  Gene Ontology: Mol. function=protein binding; Cellular component =nucleus
  Homolog annotation: Hit_ID=Q9H6U6-2; Match level="QueryCoverage=55%, HitCoverage=43%, E-value=1e-35, Identity=26%"; Hit description =Isoform 1 of Q9H6U6
  Pfam annotation: Domain name=WD40; Domain location=363-402; Score =16.6; E_value=0.09; Accession=PF00400.22; Description=WD domain, G -beta repeat
  Subcellular localization annotation: CTP_CleavageSite=33; ConfidenceScore=5.51e-01
MKRGKGARNGLLPSSLRIISSCLKTVTSNAGSVASTVRSAGASVAASISSPSEDEKDQVLWAGFDKLELQPSSFKHVLLVGYSNGFQVLDVEDAANVCELVSKRDGPVTFLQMQPTPVSSEGIEGFRASHPMLLVVAGDETNGLGAVQGGRLSALIRDTNSEPQAGSCISTPTVVRFYSLKSHTYVHVLRFRSAVYLVRCSPRIVAVALAAQIYCFDAVTLENKLSVLSYPLQGAPGVNIGYGPMAVGPRWLAYATNTPLLSNTGRLSPQNLTPSPGVSPSTSPSSGSLVARYAMESSKQLASGIIDMGYKTFSKYRQELLPDGSNSPLSSSPGRRSGKIPSSVHPLEADNAGMVVIKDFTSKAVVSQFRAHTSPISALCFDPSGTLLVTTSVHGHNINVFRIMPTCVANGTGATRYDWTASHVHLYKLYRGMTSAVIQDISFSHFSQWISIVSSRGTCHIFTLSPFGGDASLQPQNSHSDGPPLAPCQSRPWWSKPSFLMDQQLHQVPSTVTNSVVSRIKNNNSGWLNTVSNVAASASGKLSVPSGAVTAVFHNSIYQGSLPVPSKANALEHLLVYSPSGHVIQHELLPSSGSESSGSSPRVGSGHNSQLQDDEMHVTAEPIQWWDVCRRTNWPERDENIANIVLYNQRSSMMAMDVSDCEDSEHSDSTASNDGISGKEIMRVRERLRVTINHVLQICFYVMDHPAAESVESVSSGGEIEIEKLPLHEVEIRRRELLPVFKQFLYSERHSSDRRIVL

SEQ ID NO: 72461 - protein, 68 aa, Zea mays
  Coding DNA Sequence Number=SeqID_30682
MKKHSTVNAAEAAGGDGERGVELLDALAELLGLGVALGELRAQRAASASKRPRRCESAMEVILRATSS

SEQ ID NO: 72462 - protein, 166 aa, Zea mays
  Coding DNA Sequence Number=SeqID_30683
  Homolog annotation: Hit_ID=Q75GP1; Match level="QueryCoverage=57%, HitCoverage=27%, E-value=5e-25, Identity=57%"; Hit description =Expressed protein
MDAQETLLRDNSALSNTVRKLNRDVAKLEVFKKTLVQSLQEDDSSDNTAPRASVAATSNFSAPSDEDSAFPTSKSSQISETASSVSEENSQVEPDGRTRVDGKEFFRHVRNRLSYEQFGAFLANVKELNAHRQTREDTLRKADEIFGPENKDLYTVFESLITRNIR

SEQ ID NO: 72463 - protein, 892 aa, Zea mays
  Coding DNA Sequence Number=SeqID_30684
  Homolog annotation: Hit_ID=Q48IW3; Match level="QueryCoverage=25%, HitCoverage=65%, E-value=8e-08, Identity=27%"; Hit description =Inosine-uridine preferring nucleoside hydrolase
  Pfam annotation: Domain name=IU_nuc_hydro; Domain location=39-389; Score=-21.1; E_value=1.7e-09; Accession=PF01156.9; Description =Inosine-uridine preferring nucleoside hydrolase
  Subcellular localization annotation: CTP_CleavageSite=30; ConfidenceScore=5.26e-01
MATAARKGSSSRSAAAAAATVAVLFLTVVSAAGGAAATPRRLLVDTDMDTDDLLGLLYLLKQNRSEIDVKAITISANAWSDAGHAVNHLYDMLYMMGRDDIPVGVGGDGGISYAGDVQRDVGGYLPLIDQGMSTDGGCRYRQAIPLSGRLDVDTNSGVRKGFLPRGSRAYRPLRQPTAQRVMADALSAGPTSVLLLGTHTNLALLLMSRPRLRRNVERVYVSGGAVRAAGNLFTAAAANPVAEFNVFGDPFAAYLVLHSGVPITMIPLDATNTIPVTEAFYSEFQRRQRTYEAQYCLLSLDGALARQRRRSDSHDNTASLVPLLLPCLLLHIALQDGFYLWDPFAVGVAISSMRHGDGETSNEFAELEYMNVTVVTSNKPYGARDDGSNPFFDGRTTPKFGLREGGVHSGHVETGIRDPFCLVPGSNRGRCQDGYTKEVAGPEAVQMLVATRARPNTNKSSPLDKKFMETFLEVLNLPQNTGRFNISTQFPYYREVLYKPDSIMNVTRRGGKPKPVVFDMDMSPGDFVSLICLLKEPRHEIDLKAVLVNGNGWANSASIDIVYDVLHMMGRDDIPVGLGNATALGSPTLGCNNSYAIPQGSGGFVDSDTLYGLARSLPRSPRRFISDDLDHPERRHPSAFDVWRSVRKQLGPGQKITALTSGPLTNLASIISLSDMDAGSVIERVYVVGGVVRDGGDDRGNVFTVPSNRYAEFNMFLDPLAAKTVLESGLNITLIPLNVQRKVSSFEGVLGALKQHTQHTPESKLVRRLLLLLQQLQREQRKFYHHMDIFLGEVLGAVYMVQGSNLEPSVEVKSICIVANTTESINGLILVKKSAKPVDVLYSLNTGAYYDHLANSLVNHKQSAPIGSFGEQKAIWSRPQKHLGTDIAKDRK

SEQ ID NO: 72464 - protein, 92 aa, Zea mays
  Coding DNA Sequence Number=SeqID_30685
  Subcellular localization annotation: CTP_CleavageSite=32; ConfidenceScore=5.65e-01
MCIANRAPFAYATAHRPQPNSRGRSRGRPAPRRANAFAFPDDQTRTGAFPRLHSAHRLRRGRILPSPKSNPWRGAAERARLAITKRLPATLA

SEQ ID NO: 72465 - protein, 257 aa, Zea mays
  Coding DNA Sequence Number=SeqID_30686
MSRCVVKTMNVANGRSNANGGFQNVLSVINDVQYGSVKDNGEYETKSVAPLSGFYTDTRETVNTNGLATQTFSGPGSAVNLQQVGKRNSIESPNAAILAGKAENDSNGYISTPPETNASIRSLSSYCLLDGSVNGMPSPANSASCKPETTNNSVLSNVASTDVTNGCLTTVDSGQQEASDSHSSVEFTQYFQEGYCKISELDDCRELTEAVTDADSSSSHCEREKPEEDGDNDDLLGGVFAFSEEGSTLLPIYSYKL

SEQ ID NO: 72466 - protein, 129 aa, Zea mays
  Coding DNA Sequence Number=SeqID_30687
  Gene Ontology: Mol. function=oxidoreductase activity; Cellular component=integral to membrane; Biological process=electron transport
  Homolog annotation: Hit_ID=Q69LJ7; Match level="QueryCoverage=89%, HitCoverage=11%, E-value=3e-61, Identity=95%"; Hit description =Putative respiratory burst oxidase protein E
  Pfam annotation: Domain name=FAD_binding_8; Domain location=36-129; Score=108.7; E_value=1.7e-29; Accession=PF08022.2; Description=FAD -binding domain
MPSATNGALYRTWMYISVPLLLYVGERMLRALRSNAYTVKILKVCLLPGNVLTITMSKPYGFRYRSGQYIFLQCPIISPFEWHPFSITSAPGDDYLSVHIRTNGDWTQELKRIFVENYFSPHLNCLSFV

SEQ ID NO: 72467 - protein, 163 aa, Zea mays
  Coding DNA Sequence Number=SeqID_30688
  Subcellular localization annotation: CTP_CleavageSite=69; ConfidenceScore=5.58e-01
MQAAYNRAKWAHFSDFQRAQHGGPGPRVMQPARRMLRASNCTATRATATPPRLRNQYRDSRPPYARPSSASLARRKNRIGNEMALFSQVCSVWEHQTVRWCTGQCPVRQAGSSKVATLGNSPATYDYNSPDCPVCTGLSGEPTVGRANGRPRDLCGTRGRANG

SEQ ID NO: 72468 - protein, 74 aa, Zea mays
  Coding DNA Sequence Number=SeqID_30689
  Gene Ontology: Mol. function=protein phosphatase type 2C activity
MALGWAARRSAPQVDDELDGVMAPSPDEVPKTIQESPVLAMTMRSLYWTIDSAVQSLWTASKRRLRRSLAHAAT

SEQ ID NO: 72469 - protein, 80 aa, Zea mays
  Coding DNA Sequence Number=SeqID_30690
MPLEIVSSAPAVREGRKCRWDVGYNPVQGVMVVSVPAGVKPARSMLGCFQPGDMLGAAAPPPVEIVKGSDASRVGSGPSG

SEQ ID NO: 72470 - protein, 356 aa, Zea mays
  Coding DNA Sequence Number=SeqID_30691
  Gene Ontology: Mol. function=oxidoreductase activity; Cellular component=integral to membrane; Biological process=electron transport
  Homolog annotation: Hit_ID=Q69LJ7; Match level="QueryCoverage=97%, HitCoverage=35%, E-value=1e-133, Identity=70%"; Hit description =Putative respiratory burst oxidase protein E
  Pfam annotation: Domain name=Ferric_reduct; Domain location=174-340; Score=136.7; E_value=6.2e-38; Accession=PF01794.9; Description =Ferric reductase like transmembrane component
MFGLVSLLPPQLIVLSASANKLAKLKEQAEEYASLIMEELDPEKLGYIELWQLEALLLQRDTYMNYSRPLSTASGAQWSQNLGVGGALTITGGGGDGGCGVDGDHPGPPRERRRSWGVRKAAARVRVAAEENWRRAWVLALWFAAMAALFVWKFVQYRRMAAFQVMGYCLPTAKGAAETLKLNMALVLLPVCRNTLTWLRSSWARFFVPFDDNITFHKMIATAIVVGITLHAGNHLACDFPRVIAASPEEYALVAGAFGADKPTYAGLLSGTEGVTGVAMVVLMTVSFTLATHPFRKGEPKGAGAAAGTSRLPAPLNRLTGFNAFWYSHHLLGIVYALLLAHGYFLFLVRRWYEKT

SEQ ID NO: 72471 - protein, 212 aa, Zea mays
  Coding DNA Sequence Number=SeqID_30692
MESGHQSLRGYLDKAEASTSTGVDRAHALLVDAYRQLGTTPFDASGVEVGPRFLGWLQEELDLLPSIMMGLMSFASLITCEGAANALSHEGMQALRSSLTRPMRTSTVESSRSKTRMWGPHGRDTVREWSDRAMEQMANDEEVDDFSGLESLGTRAEDARMGVGEQLVPPTGSSEDPAAAAMPAGEDTPMAPTQAAEDPAAPAAPSQVAGSC

SEQ ID NO: 72472 - protein, 144 aa, Zea mays
  Coding DNA Sequence Number=SeqID_30693
MATQARRGAGEWFVGVTMTTSSLPPTTSMETFPLGFESFLGPGVHGRWAVPWLGEGAGVVFMVDGVPWLGEGAWGRGGALVTGDGGEHRADCQVLDVRDECRQLICMMDNLVIWIIVSIASEDAIDRSTGYLQNLQRCPRQRSD

SEQ ID NO: 72473 - protein, 448 aa, Zea mays
  Coding DNA Sequence Number=SeqID_30694
  Gene Ontology: Mol. function=sugar porter activity; Cellular component=integral to membrane; Biological process=transport
  Homolog annotation: Hit_ID=Q53WP9; Match level="QueryCoverage=100%, HitCoverage=87%, E-value=0.0, Identity=73%"; Hit description =Putative anion/sugar transporter
  Pfam annotation: Domain name=MFS_1; Domain location=109-446; Score =132.9; E_value=8.7e-37; Accession=PF07690.6; Description=Major Facilitator Superfamily
  Pfam annotation: Domain name=Sugar_tr; Domain location=105-447; Score= -145.6; E_value=0.026; Accession=PF00083.14; Description=Sugar (and other) transporter
  Pfam module annotation: Pfam domain module=MFS_1::Sugar_tr; Domain location=109-446::105-447
  Subcellular localization annotation: CTP_CleavageSite=87; ConfidenceScore=5.55e-01
MASVRSCASVKSAVRSPVSYRSTRAVAAGSGRLRVRSSSLQALAGCASGGGGFGLLGSDDGPRVRRGGREVLATCSASFDGVRPAVVAGAAAQPGSAAFPERAKVVALVATIMLLCNADRVVMSVAVVPLAAQHGWSSSFVGIVQSSFLWGYVFSSMVGGALADRYGGKKVMAGAAALWSLATILTPWAASRSTIMLLAVRALFGLAEGVAFPTMSTFLPKWFPTHERATAVGISMGGFHLGNVISFLATPIIMSHIGLSGTFAFFASLGYLWISVWMMNVESDPLDSHTISKSELQLILAGRAGSKVQGSNKFPSLRELFSRTEFLAVTLANVVNNWGYFVLLSWMPVYFKTVYNVNLKQAAWFSAIPWAVMAMSGYVAGASADFLIKSGFPIGLVRKIMQSIGFMGPCVALLCLRFAQTPSVAAVLMTIALSLSSFSQAGYFCNIQ

SEQ ID NO: 72474 - protein, 238 aa, Zea mays
  Coding DNA Sequence Number=SeqID_30695
MGCLWDPPSCRQRVERRRECAAAVCVRESRNTPSIGARGWPWNIAVDRGRCEDHLRADFGLFARAISHRKSNTAAGPPFAVAGTFYNRIVGKKFSSVLASSSSSCSTDQFRFRGTSSVDDRMPARASAVLVGGAAALSTWEKRVWGKRRGAFIRRSTAEINWRIAFCRIELGPSDRDRMAVIALGFIKPGASDLDPSGSRSVPVRRDPGLISSVQVRSCSQKQLVPLRPTLLHKSPCF

SEQ ID NO: 72475 - protein, 194 aa, Zea mays
  Coding DNA Sequence Number=SeqID_30696
  Gene Ontology: Mol. function=DNA binding
MARTPLGDDLRERRTPRQPMGHPPGTRRPLGSTVLPRQSLYRGYSPRCCAGALASSLVRRGHLHPPRLRLSSARRSLDFSRDTGASFAMRRRLSSALKSSVSAALIEGERTDADASCWHQDDHGLDLVEPECTIPSSRSTSSRHCLMTPAEAMEIGGVAQQLPGCRQRSRSCPGESPGCLRSCMLPRNMHDSSV

SEQ ID NO: 72476 - protein, 197 aa, Zea mays
  Coding DNA Sequence Number=SeqID_30697
  Subcellular localization annotation: CTP_CleavageSite=48; ConfidenceScore=5.49e-01
MTALAAKSSQGPPYTDHSPTALAPFRYQLASQVTRDLMLVVAIQTNMTARLGSSGPAPISKLWPDPGGGAGHRSGAAHQRNPTRPRPMPHFDSEEQYAGEDATNSMERFLTCRKVAEDLAHVRAEHTRGGGAAPVSNSGSPEHGFAQARPRSNNAHHGEAPWPRSKARTASQARSRGGAGSSYVGSIAAAQQSTIRG

SEQ ID NO: 72477 - protein, 89 aa, Zea mays
  Coding DNA Sequence Number=SeqID_30698
MASALRWSPLLASHWRAAGAEMYLVREAKLHVRTPWTVALDTRVLAAEWWSVQAYGTGPGYAATRLRTTPGDECPFFGAGPQVVGPIEL

SEQ ID NO: 72478 - protein, 366 aa, Zea mays
  Coding DNA Sequence Number=SeqID_30699
  Homolog annotation: Hit_ID=Q5JLN0; Match level="QueryCoverage=40%, HitCoverage=34%, E-value=3e-55, Identity=68%"; Hit description =Lysine ketoglutarate reductase trans-splicing related 1-like
  Pfam annotation: Domain name=DUF707; Domain location=87-366; Score =52.6; E_value=1.3e-12; Accession=PF05212.3; Description=Protein of unknown function (DUF707)
  Pfam annotation: Domain name=Extensin_2; Domain location=34-314; Score=-139.7; E_value=0.077; Accession=PF04554.4; Description =Extensin-like region
  Pfam module annotation: Pfam domain module=DUF707::Extensin_2; Domain location=87-366::34-314
MSCVFDYYCIKDCGIISAPEVTQRRTNNNDQFIILATVGAYSGVCLMTDDVRGNFFRKLPDPAQAHTDLAPIAPRNPLVWKPSPPTSHLLPRNPLLALNAVPPAIPPPPTLCLPSIPPPPAPTSRTAPALPSATPSISPSTSPTLPPTMGSAISDRHIRDLAHPASHDGEPHSRPPACQAWISRNSQRAAANGAQPPLIPSPRSPPLPHPSRRRPALIHHRLTARAARSGGVHRRYYKTSGHGRCYGNSTGPPCAGWVEMMVPVFSRAAWRCAWHMIQNDLIYAWGMDYKLDYCMQGDQSRNVGVVDSPYVLHRGIPTLGDGGKATMTAAMSALGTADQLAARKRSYTELLLFNRRWKKAVVENWC

SEQ ID NO: 72479 - protein, 82 aa, Zea mays
  Coding DNA Sequence Number=SeqID_30700
MAPALRWPLLLASHPGGFRKDGCTLNVSRLDSSVLERVGNNPQEDLVWEAKLCVRTPWAAVLDTRTPVAEWWSVQAYSTGPG

SEQ ID NO: 72480 - protein, 81 aa, Zea mays
  Coding DNA Sequence Number=SeqID_30701
MNPAGGHSDDYGARQEGFSHHLRKTSASPELDSDLDICIKGHPNLIKYRSADVSRKRLFSIAKPYYNHYGMGNPSPGGSDM

SEQ ID NO: 72481 - protein, 93 aa, Zea mays
  Coding DNA Sequence Number=SeqID_30702
MAHRDSLTTVGAWSRCSAWLTGRSGATPDSPVNYSGVAPRIPEGGKFGVDLPGAPDTVRWCTGHCPGEVGLAEYLCVHPLFFTEDLDFMSEEF

SEQ ID NO: 72482 - protein, 439 aa, Zea mays
  Coding DNA Sequence Number=SeqID_30703
  Gene Ontology: Mol. function=glucose-6-phosphate 1-dehydrogenase activity; Cellular component=chloroplast; Biological process=glucose metabolic process
  Homolog annotation: Hit_ID=Q7XAV7; Match level="QueryCoverage=88%, HitCoverage=66%, E-value=0.0, Identity=92%"; Hit description =Putative plastidic glucose-6-phosphate dehydrogenase
  Pfam annotation: Domain name=G6PD_C; Domain location=135-432; Score =531.9; E_value=6.9e-157; Accession=PF02781.6; Description=Glucose-6 -phosphate dehydrogenase, C-terminal domain
  Pfam annotation: Domain name=G6PD_N; Domain location=4-132; Score =59.9; E_value=3e-18; Accession=PF00479.12; Description=Glucose-6 -phosphate dehydrogenase, NAD bindi
  Pfam module annotation: Pfam domain module=G6PD_C::G6PD_N; Domain location=135-432::4-132
IDIRQGPLGDLLRSAYRPLKDLSPIFAGVGADLMPPIMDSLQQEAQKMDPHGSRVSNRLFYLSIPPNIFLDVVKCASKSASSVNGWTRVIVEKPFGRDSESSAALTSGLKQYLVEDQIFRIDHYLGKELVENLSVLRFSNLVFEPLWSRQYIRNVQLIFSEDFGTEGRGGYFDGYGIIRDIMQNHLIQILALFAMETPISLEAEDIRNEKVKVLRSMKPLQLEDVVVGQYKSHTKGGTTYPGYTDDKTVPKDSVTPTFAAAALFINNARWDGVPFLMKAGKALHTKRAEIRVQFRHVPGNLYKGSFGTDLDRATNELVIRVQPDEAIYLKINNKIPGLGMRLDRSNLNLHYAARYSKEIPDAYERLLLDAIEGERRLFIRSDELDAAWSLFTPLLKELEEKRIAPELYPYGSRGPVGAHYLAAKYNVRWGDLSAEHYKA

SEQ ID NO: 72483 - protein, 157 aa, Zea mays
  Coding DNA Sequence Number=SeqID_30704
  Gene Ontology: Mol. function=glucose-6-phosphate 1-dehydrogenase activity; Biological process=glucose metabolic process
  Homolog annotation: Hit_ID=Q7XAV7; Match level="QueryCoverage=88%, HitCoverage=22%, E-value=2e-31, Identity=57%"; Hit description =Putative plastidic glucose-6-phosphate dehydrogenase
  Subcellular localization annotation: CTP_CleavageSite=57; ConfidenceScore=5.30e-01
MALSCMRCPAGAGAASARRAAAQPLAAEAAVSFARCRGFGRSATAATAAWFWRNHAVASQGVKAPMDADVKNAVIPPTSPKVESGSPSEITLDEFEDLSALCKNDDSTVSITVVGASGDLAKKKIFPALFALYYEDCLPKACVYISPFDYDVCIYFP

SEQ ID NO: 72484 - protein, 540 aa, Zea mays
  Coding DNA Sequence Number=SeqID_30705
  Homolog annotation: Hit_ID=Q208N4; Match level="QueryCoverage=25%, HitCoverage=58%, E-value=2e-20, Identity=85%"; Hit description =Putative calcium/calmodulin dependent protein kinase
  Subcellular localization annotation: CTP_CleavageSite=54; ConfidenceScore=5.55e-01
MTACRVPTRCTFFGLDVHAFWTHGRASRSRVTSTLLATPSPREALHKRPRSLVRALRWVSRYSGAPVLPRLLLGWEQWPFSPSRRDTLLTIGIKAVDLWTISLRYPPSVEPCDHDGCDRFQSGRGDGGAVAGDGGAGAGVGDSSRLLQQICDLLDAQDSHWGVLERTVSSNATSIDPDEVLDNHCVGEPIATFASAADATFSSTAGVECGTIHSYAATNTEITDNWGSDFNEGEDLFEPNRLRQHAMLDAVTADVLEDSSLSDTKTMIGNRGPNFPNLVIADLFTASIKGTPPKCLVKCLNVFSSSDGHHARDDGPVFDTLGNDDMDDRHHLLGRRKQTAVAGDVDVRPGPAERAAGVALEPGVEAADAEDVEEPGVEAADAEDVEEPHPNVTALHDVYEDACGVHPVLELCSCGELFDRIKHLASDLHVPSIPPIPTAALSVPKAAELELYGITDDLREFVKSMTISTVGRHDLSSKELDNLRIHFARICTNGENATLAKFEQVLKAMKLEALSPLAPRVFDLFDNATSMSGSRATHAR

SEQ ID NO: 72485 - protein, 58 aa, Zea mays
  Coding DNA Sequence Number=SeqID_30706
  Subcellular localization annotation: CTP_CleavageSite=47; ConfidenceScore=5.34e-01
MLPQPSPRVRGSQPPMLGFLPSAGAGIRFVLTSTFGPARWWMARAVNSEYRTAAKVIT

SEQ ID NO: 72486 - protein, 212 aa, Zea mays
  Coding DNA Sequence Number=SeqID_30707
  Gene Ontology: Mol. function=protein disulfide oxidoreductase activity; Cellular component=outer membrane-bounded periplasmic space
  Homolog annotation: Hit_ID=Q279V3; Match level="QueryCoverage=68%, HitCoverage=45%, E-value=2e-08, Identity=28%"; Hit description=DSBA oxidoreductase
  Pfam annotation: Domain name=DSBA; Domain location=51-203; Score =23.7; E_value=1.4e-06; Accession=PF01323.10; Description=DSBA-like thioredoxin domain
MEASSRRRVSLVPLLLVIIGCCACRAQIPIPARTDGFVYGGKPPAWGETVVVEAFLDPVCPDSRDAWPALKKVVEHYSSRVSIVVHLFPLPYHSYAFIACRSIHAVNKLNPSFVYRLLEKFFKDQSYSGTVDEITKNLVVPIIGETNLAAFRAGFNDSHSDQATRISFKNGCARGVTGTPYFFVNGIPINDSGSPLEYKDWISILGPLVGKM

SEQ ID NO: 72487 - protein, 68 aa, Zea mays
  Coding DNA Sequence Number=SeqID_30708
MTSVVLKPPTEARRSQQDPNSIDSFASTGLRHFSDGHVIAYIGLKHFSDSHVAMYTGLRHFSARHISA

SEQ ID NO: 72488 - protein, 32 aa, Zea mays
  Coding DNA Sequence Number=SeqID_30709
VVELDPLVAELAKKYFGFSMDEQLKVGSHTLL

SEQ ID NO: 72489 - protein, 87 aa, Zea mays
  Coding DNA Sequence Number=SeqID_30710
MGIIVSAKGATRARTADRFSASAEGAGWTRTADRISTSLKWLVVSPEGVARGPGAMTQVQTWWVGSQTSGQTVRVRLGLKIGSLDSE

SEQ ID NO: 72490 - protein, 188 aa, Zea mays
  Coding DNA Sequence Number=SeqID_30711
MEAKKHNHHSGRRKGKCEYTSDKHKSKGRFDKDGIKQKYLIATLTMTLMTFLLPTTTKSSRGWLRTSSMDSASLPTPQESYAPCHLDKLLRLASHERKEYKCKYETTLRELESARASVVVFNETECDECTLHMLNITTLQTKYATLLDDYDELQSRSILLGACKTCVGFQTELVEKNARIALLRSLAQ

SEQ ID NO: 72491 - protein, 105 aa, Zea mays
  Coding DNA Sequence Number=SeqID_30712
MTLVIKRFKQVFKGQKNNDNKPSRKRACIKYELTLCVMEVLMIRNLGEDHQGLGKSQDIKEEKLGRSQQKKAKSDSTSSPPRSSGPVSLKWAPRMHLPPIRLDFI

SEQ ID NO: 72492 - protein, 195 aa, Zea mays
  Coding DNA Sequence Number=SeqID_30713
  Gene Ontology: Mol. function=methyltransferase activity; Biological process=metabolic process
  Homolog annotation: Hit_ID=Q1SDY7; Match level="QueryCoverage=25%, HitCoverage=6%, E-value=2e-07, Identity=55%"; Hit description =Putative spermine/spermidine synthase
MAVTSEITGPMVVEDVVYENADGDQGSMSEKMFRRLIFGRSSGLVQSEALLIRDPPSDEMQPQLFQRQFVYLLGHDRCVIIYMGSSQNCKHHLIYSDNRKNNNNKYLEYKSPSDLLNVGTATGSKNSLRIDHKFLGSSYHSSIISGLSLVASSLSAAASSGEKVSITVVGLGAGCFPNVSPWMSAFRRYWTNLRT

SEQ ID NO: 72493 - protein, 165 aa, Zea mays
  Coding DNA Sequence Number=SeqID_30714
  Gene Ontology: Mol. function=methyltransferase activity; Biological process=metabolic process
  Homolog annotation: Hit_ID=Q1SDY7; Match level="QueryCoverage=68%, HitCoverage=14%, E-value=2e-30, Identity=57%"; Hit description =Putative spermine/spermidine synthase
MATTTPPTAILGTLVDFTSRENWDKFFALRGTGDSFEWYAEWPNLRAPLLDLLGDRGAAAGAAQEILVPACGSSVLSEKLYDAGFCRVTNVDFSRVVVADMLRRHARARPEMRWRVMDMTDMQACGVMEMMLITGYSVNVVSEFIVYHLACQQLIHELNVSGRFE

SEQ ID NO: 72494 - protein, 152 aa, Zea mays
  Coding DNA Sequence Number=SeqID_30715
  Homolog annotation: Hit_ID=Q75M65; Match level="QueryCoverage=21%, HitCoverage=8%, E-value=1e-10, Identity=93%"; Hit description =Putative pseudouridine synthase
MWNRIHMKKRLQVMEIFLLSSESSEIFKALERAKLMVGNRKESCYSRCGRTDKGVSATGQSWSEKLSLQGPEITTSQLKNWEEVGPDAARKFLGHTLWLIVVQKRTNPSSKKGSLGYPLQVASWGAYLLNRNIITMSFASRDPHEAQRLTVK

SEQ ID NO: 72495 - protein, 96 aa, Zea mays
  Coding DNA Sequence Number=SeqID_30716
  Homolog annotation: Hit_ID=Q5N9J9; Match level="QueryCoverage=47%, HitCoverage=15%, E-value=2e-07, Identity=63%"; Hit description =Probable phytol kinase 2, chloroplast precursor
MKVLDAGAGAGRGAQDGGAVAQAGRVDPLRDQILALRGEDVFKVTNDREYAHILAALPSGVNVIRMLLLRLGLMKNEDMVKPMNRSGDYRSWHSGN

SEQ ID NO: 72496 - protein, 99 aa, Zea mays
  Coding DNA Sequence Number=SeqID_30717
MPSRSSITTWSNPMTSIGGPRTYTGGTIKLNSWIPDEQPPIIPASVRVGEDELPPSWDPIPSPLAMDVTLRDHLRKIRDEDDDDIVGGLRLPKVLKNMI

SEQ ID NO: 72497 - protein, 185 aa, Zea mays
  Coding DNA Sequence Number=SeqID_30718
  Gene Ontology: Mol. function=methyltransferase activity; Biological process=metabolic process
  Homolog annotation: Hit_ID=Q1SDY7; Match level="QueryCoverage=73%, HitCoverage=20%, E-value=3e-11, Identity=30%"; Hit description =Putative spermine/spermidine synthase
MSLPGGRRLVLGLAAAVGLGTGNQPNSGQTVGYKVHLGDGIKFIEDSVAANQSVNGSTRNAFKILILDVDSSDLSSGLSCPPENFVEDPFLLIAKEFLLEGGLFVINLVSRSTSVRETVVSRLKAVFEHLYSLQLEEDINEVLFASPSGRYLEINDISAGASKLQDLLKIPVDVESDIQKLQKLQ

SEQ ID NO: 72498 - protein, 127 aa, Zea mays
  Coding DNA Sequence Number=SeqID_30719
MARGSVRGEGSGGDELHRRKDGAQAVLAWGCRRGLAKSVDTHLMKMLPTLVLTDQERLEVANQTGAREKGIDRKGKIEKTKGHNTSTLIPKKQISHSRRTNVMSTQQQTSCCYTLMLTRWWSSLKRE

SEQ ID NO: 72499 - protein, 97 aa, Zea mays
  Coding DNA Sequence Number=SeqID_30720
  Subcellular localization annotation: CTP_CleavageSite=37; ConfidenceScore=5.84e-01
MSLVVSSPAPSAWVSGTQAASPSGRSVATSSVAHVPSARSVPGARSNTSNVLPSATFSEQLPWPSPAPPACPHAQLYVMVVHLVSPGDPHPADRDFP

SEQ ID NO: 72500 - protein, 143 aa, Zea mays
  Coding DNA Sequence Number=SeqID_30721
MARSLGFRAAARGSRSHGDLVKHKNRDQNEKTPCTFTSSRRRRVKIVRDILYGEGNSERHDDGARPTGKGGEEPWENTGRDVRVQQRVGAPKAATKLFIKMAKGAAGTSPPFPRNPFLIPALFSLMGTKIIHILVLAGLRGEQ

SEQ ID NO: 72501 - protein, 233 aa, Zea mays
  Coding DNA Sequence Number=SeqID_30722
  Gene Ontology: Mol. function=ATPase activity, coupled to transmembrane movement of ions, phosphorylative mechanism; Cellular component=membrane; Biological process=metal ion transport
  Homolog annotation: Hit_ID=Q7XI43; Match level="QueryCoverage=55%, HitCoverage=82%, E-value=2e-30, Identity=57%"; Hit description=Metal- transporting P-type ATPase-like protein
  Pfam annotation: Domain name=HMA; Domain location=159-231; Score =54.6; E_value=3.2e-13; Accession=PF00403.16; Description=Heavy-metal- associated domain
MKSHRKGDKKKKKMKKVVYHESDSSSPYTFGTESATSKRQERKEYTLLPFQKGQKRKSSTKTRVPTPEQGKTEILGISHGVYRAYEREIPLLTSGSRSKPLPFASFTRAACRLASAPFSGSGSVVLLSRRSRDYAGVGSLVSAAADPGDTADAGSESILLSVQGMMCDGCAASVKRILESQPEVTSATVDFKEASAVVWTTDEAKGTQGWQKQYGEKLAKHLGTCGFESRLQG

SEQ ID NO: 72502 - protein, 90 aa, Zea mays
  Coding DNA Sequence Number=SeqID_30723
MRFKYLNKLLHIRNTMFLAWLLGWEPLKKSQKKIEKFGSKGQVWDPPDCQVKLMTEDTAQRHRACSAAMNGALLQLQNTVAAAIPRDKIL

SEQ ID NO: 72503 - protein, 388 aa, Zea mays
  Coding DNA Sequence Number=SeqID_30724
  Homolog annotation: Hit_ID=Q6AVF2; Match level="QueryCoverage=99%, HitCoverage=100%, E-value=4e-84, Identity=51%"; Hit description =Expressed protein
MERPAPVRKSHTSTADLLVWPEGAPQELPAGSTPPSNRRPHQPSEALRKVVFGGQVTEAEAESLNKSPSWNCHLTNYVGVLQTDRSHQNAPRKFHWLFRFQSTTRVEGDDKLFFSPFRKPCSAPKWKEMTGSGIFAAGGEGEEDESANVSATSVRTAPKNYQHTHCSIKFLFHNQLDVWLQERKHFLDAGLRSWNTTVTRTNPAAFSQTQAISTISHISFAEEESISPKKPTSISEVAKQRELSGTLLSEDDSKMKRQISDLKSKELSGHDIFAPPEDPRPRNSENGSTSQTPGKNAHVSNFKFGEADEDSAVKTAKKIPTKKFTDLAGNIFKGDDEAPGTAEKHHLSTAKLKEMTGSDIFADGEAPSRDYLGGIRKPPGGESSIALV

SEQ ID NO: 72504 - protein, 75 aa, Zea mays
  Coding DNA Sequence Number=SeqID_30725
  Homolog annotation: Hit_ID=Q94C60; Match level="QueryCoverage=39%, HitCoverage=25%, E-value=7e-07, Identity=80%"; Hit description =Transcription elongation factor SPT4 homolog 2
  Pfam annotation: Domain name=Spt4; Domain location=23-66; Score= -19.6; E_value=0.00022; Accession=PF06093.4; Description =Transcription initiation protein Spt4
MEKSDLRLGLNTHAPVDVLIGLLFQAERLNVVNCTTPNFTRIISLMDPSRSWAARWLRIGDPCSRVSCSLFASSI

SEQ ID NO: 72505 - protein, 228 aa, Zea mays
  Coding DNA Sequence Number=SeqID_30726
  Pfam annotation: Domain name=VQ; Domain location=68-98; Score=52.8; E_ value=1.1e-12; Accession=PF05678.4; Description=VQ motif
  Subcellular localization annotation: CTP_CleavageSite=65; ConfidenceScore=5.44e-01
MAYTGSDSSPPSPGAPASAFLDDHALFLDQSSSSFFPGTTSHEPLAPAASASSSAARKPPRKRPRASRRPPTTVVTTDTSNFRAMVQEFTGIPAPPPPSFAPHLGPAGMLFGGPHDPTLAGTARPPLGLELLMRPSPLKLHAAPHASPPAAAGSFAHSLFASSNADPAGPSSEPYSGFAPSFSGAVPRYDGSGGGGRLDAAEDERVLRHHDHGLFSSFLHAGDTFHSH

SEQ ID NO: 72506 - protein, 142 aa, Zea mays
  Coding DNA Sequence Number=SeqID_30727
  Subcellular localization annotation: CTP_CleavageSite=39; ConfidenceScore=5.59e-01
MMVPASVAATLFVVLFLFPLPSCLRLRLRATPFSTQGVRAGASSPYSSDTSLDTDPRSGYCTSMRTFHNTPTPSFSLSSDVLFVFPVFALFFLPNLLPLPTFTAASRLTFVDAGTPKLLTLPDNLMVFILVLPPPSPLRLRP

SEQ ID NO: 72507 - protein, 204 aa, Zea mays
  Coding DNA Sequence Number=SeqID_30728
  Homolog annotation: Hit_ID=Q69LJ9; Match level="QueryCoverage=78%, HitCoverage=90%, E-value=3e-57, Identity=68%"; Hit description=Auxin- induced protein-like
  Pfam annotation: Domain name=Auxin_inducible; Domain location=61-154; Score=112.9; E_value=9.5e-31; Accession=PF02519.5; Description=Auxin responsive protein
MGDDDGAKAASGVKQIVRLRELLHRWHFTALGAKQQQQREEEGRGHAGVPEGAVAPAIPPFVLRRLRRTETADSVSDDESCHSPEPPPDVPRGYCPVYVGPEQRRFVIPTSYLAHPVFRLLLEKAEEEFGFRHQGALAIPCETEAFKYILQCVERHDQGLSGGGGGDEAGEPPDDDRAGARTSGASCVNPRLGVVVWCCVARYL

SEQ ID NO: 72508 - protein, 95 aa, Zea mays
  Coding DNA Sequence Number=SeqID_30729
MEKGKLLAGVAESSEYRRARVDETPGNIILARGVVAVDLGSGGSGLVPADLNPNRRSIIERIQVGLRCLKISTVNDRATEKREYPFDQADLQNSP

SEQ ID NO: 72509 - protein, 79 aa, Zea mays
  Coding DNA Sequence Number=SeqID_30730
MPELHRVASCLSSAASAPVTISASSDDEQPVVRECVVEDLPEQQPSEGDSGHFPKYLSCLGGDAGNMEDFEEFQDYDEF

SEQ ID NO: 72510 - protein, 111 aa, Zea mays
  Coding DNA Sequence Number=SeqID_30731
MQDVARHALSQYYSLFSGVADGLDLKYYPRCLTDSTGGVIVSPVGEGNPRLNSMVNLVVMLNTELDHALDELGKMSEHRHRGGRRAQQEQQAPQEEADQEQLPPPPPMTIE

SEQ ID NO: 72511 - protein, 626 aa, Zea mays
  Coding DNA Sequence Number=SeqID_30732
  Gene Ontology: Mol. function=RNA-directed DNA polymerase activity; Cellular component=intracellular; Biological process=RNA-dependent DNA replication
  Homolog annotation: Hit_ID=UPI00004C1731; Match level="QueryCoverage =99%, HitCoverage=46%, E-value=0.0, Identity=81%"; Hit description =UPI00004C1731 related cluster
  Pfam annotation: Domain name=RnaseH; Domain location=334-461; Score =0.9; E_value=4.8e-05; Accession=PF00075.14; Description=RNase H
  Pfam annotation: Domain name=rve; Domain location=474-626; Score =66.9; E_value=6.3e-17; Accession=PF00665.16; Description=Integrase core domain
  Pfam module annotation: Pfam domain module=RnaseH::rve; Domain location=334-461::474-626
MKESDQLATSFITPFGMYCYVTMPFGLRNTGATYQRCMNHVFGEHIGRTVEAYVDDIVVKTRKASDLLSDLEVTFRCLKAKGVKLNPEKCVFGVPRGMLLGFIVSERGIEANPKKIASITSMGPIKDLKGVQRVMGCLAALSRFISRLGERGLPLYRLLRKAECFTWTPEAEEALGNLKALLTNAPILVPPAAGEALLIYIAATTQVVSAAIVVERREEGHTLPVQRPVYFISEVLFETKILYPQVQKLLYAVILTRRKLRHYFESHPVTVVSSFPLGEIIQCREASGRIAKWAVEIMGETISFAPRKAIKSQVLADFVAEWVDTQLPTVPIQPELWTMFFDGSLMKTGAGAGLLFISPLGKHLHYVLRLHFPASNNVAEYEALVNGLWIAIELGVRRLDARGDSQLVIDQVMKNSHCRDPKMEAYCDEVRHLEDKFYGLELNHIARRYNETADELAKIASGRTTVPPDVFSRDLHQPSVKIDNTPEPVAPSAQPEKAPGGYTHLLVAIDKFSKWIEVRPLNSIRSEQAVAFFTNIIHRFGVPNSIITDNGTQFTGRKFLDFCEDHHIRVDWAAVAHPMTNGQVERANDIILQGLKPRIYNDLNKFGKRWMKELPSVVWSLRTTPS

SEQ ID NO: 72512 - protein, 84 aa, Zea mays
  Coding DNA Sequence Number=SeqID_30733
MPEIPVASVEAWRSRGGEDHPGELQADFARAIAGQRGFVVRFTAWVAHQNGIPISTASTAFMVEGGFCATGPKRQRPVQMFSNM

SEQ ID NO: 72513 - protein, 162 aa, Zea mays
  Coding DNA Sequence Number=SeqID_30734
MSEPCVLVCHRDRLATASASLTPRPTKDPLRHRLTASQAQPHHSLAEGSGAHHLLVQMRKTTAKIRQRPSSCARLLGNHRIFSVLLLPVNDPSMTTCIPYDLTRRKKWRSSLIKVDGTELARGYAPTAMAYRLWLTSIVKVKLLIRKDGMLIFLPALIIVFL

SEQ ID NO: 72514 - protein, 213 aa, Zea mays
  Coding DNA Sequence Number=SeqID_30735
  Subcellular localization annotation: CTP_CleavageSite=77; ConfidenceScore=5.20e-01
TAVQYSLKAEAVKPNNRIQICARSPRTSSGRSLPPPPPPYHLPYVPRTRNRKAGPRGGVHVRRGPPSARSPTATLPRGAASPSPITSTAARAPPWSVGGTADGGPHTARSRRLPGASVSRLRDRERPSAHGAWRGVASGAHPPTQTQTQPGAGLGARSRTDKRPATLVTERDSDDDMRVEGSRNERATEVTNHEDHRFVQDLGGLSVMQCNHA

SEQ ID NO: 72515 - protein, 144 aa, Zea mays
  Coding DNA Sequence Number=SeqID_30736
  Homolog annotation: Hit_ID=Q69P50; Match level="QueryCoverage=95%, HitCoverage=20%, E-value=2e-39, Identity=68%"; Hit description =Streptococcal hemagglutinin-like protein
MIAYLEQWPTLERENSISLLGATEALKASTLRLPVTLGAKANTIALKNAVSSAVDVMQVLGSSVCCIHSKFEKVCTLRFVLINIRISYQITDSTSLVSELSVIAGQEKIMLDECRELLATAAKLQVQESSLRTHLVQQRQRLQD

SEQ ID NO: 72516 - protein, 119 aa, Zea mays
  Coding DNA Sequence Number=SeqID_30737
MQAACNCTTGMHPFDFNAPSMEAQAHTSCSRPLLGQQESPLPRRKDEGRRHLWQAKRATLHLRHDDRVKKGTGKGDTPKGILLREGSGARAPLLIRGSKAGPSEGFDSRLRPLGLRAHY

SEQ ID NO: 72517 - protein, 982 aa, Zea mays
  Coding DNA Sequence Number=SeqID_30738
  Gene Ontology: Mol. function=protein kinase activity; Cellular component=integral to membrane; Biological process=protein amino acid phosphorylation
  Homolog annotation: Hit_ID=Q1T089; Match level="QueryCoverage=91%, HitCoverage=79%, E-value=1e-164, Identity=37%"; Hit description =Protein kinase
  Pfam annotation: Domain name=LRRNT_2; Domain location=37-78; Score =44.4; E_value=3.9e-10; Accession=PF08263.3; Description=Leucine rich repeat N-terminal domain
  Pfam annotation: Domain name=LRR_1; Domain location=107-129; Score =18.7; E_value=0.022; Accession=PF00560.23; Description=Leucine Rich Repeat
  Pfam annotation: Domain name=LRR_1; Domain location=131-153; Score =15.3; E_value=0.21; Accession=PF00560.23; Description=Leucine Rich Repeat
  Pfam annotation: Domain name=LRR_1; Domain location=158-180; Score =11.7; E_value=1.9; Accession=PF00560.23; Description=Leucine Rich Repeat
  Pfam annotation: Domain name=LRR_1; Domain location=184-206; Score =17.9; E_value=0.036; Accession=PF00560.23; Description=Leucine Rich Repeat
  Pfam annotation: Domain name=LRR_1; Domain location=208-230; Score =14.0; E_value=0.54; Accession=PF00560.23; Description=Leucine Rich Repeat
  Pfam annotation: Domain name=LRR_1; Domain location=232-254; Score =15.3; E_value=0.23; Accession=PF00560.23; Description=Leucine Rich Repeat
  Pfam annotation: Domain name=LRR_1; Domain location=256-278; Score =5.7; E_value=25; Accession=PF00560.23; Description=Leucine Rich Repeat
  Pfam annotation: Domain name=LRR_1; Domain location=280-303; Score =4.7; E_value=37; Accession=PF00560.23; Description=Leucine Rich Repeat
  Pfam annotation: Domain name=LRR_1; Domain location=305-327; Score =10.2; E_value=3.6; Accession=PF00560.23; Description=Leucine Rich Repeat
  Pfam annotation: Domain name=LRR_1; Domain location=330-352; Score =6.2; E_value=20; Accession=PF00560.23; Description=Leucine Rich Repeat
  Pfam annotation: Domain name=LRR_1; Domain location=354-377; Score =5.7; E_value=24; Accession=PF00560.23; Description=Leucine Rich Repeat
  Pfam annotation: Domain name=LRR_1; Domain location=379-406; Score =8.4; E_value=7.6; Accession=PF00560.23; Description=Leucine Rich Repeat
  Pfam annotation: Domain name=LRR_1; Domain location=437-459; Score =2.6; E_value=95; Accession=PF00560.23; Description=Leucine Rich Repeat
  Pfam annotation: Domain name=LRR_1; Domain location=461-483; Score =9.4; E_value=5; Accession=PF00560.23; Description=Leucine Rich Repeat
  Pfam annotation: Domain name=LRR_1; Domain location=485-507; Score =10.9; E_value=2.6; Accession=PF00560.23; Description=Leucine Rich Repeat
  Pfam annotation: Domain name=LRR_1; Domain location=509-531; Score =10.6; E_value=2.9; Accession=PF00560.23; Description=Leucine Rich Repeat
  Pfam annotation: Domain name=LRR_1; Domain location=533-555; Score =13.4; E_value=0.8; Accession=PF00560.23; Description=Leucine Rich Repeat
  Pfam annotation: Domain name=LRR_1; Domain location=557-579; Score =10.2; E_value=3.5; Accession=PF00560.23; Description=Leucine Rich Repeat
  Pfam annotation: Domain name=LRR_1; Domain location=580-602; Score =10.0; E_value=3.9; Accession=PF00560.23; Description=Leucine Rich Repeat
  Pfam annotation: Domain name=LRR_1; Domain location=604-626; Score =8.7; E_value=6.6; Accession=PF00560.23; Description=Leucine Rich Repeat
  Pfam annotation: Domain name=LRR_1; Domain location=628-650; Score =19.1; E_value=0.016; Accession=PF00560.23; Description=Leucine Rich Repeat
  Pfam annotation: Domain name=LRR_1; Domain location=652-674; Score =19.4; E_value=0.013; Accession=PF00560.23; Description=Leucine Rich Repeat
  Pfam annotation: Domain name=LRR_1; Domain location=676-697; Score =7.3; E_value=12; Accession=PF00560.23; Description=Leucine Rich Repeat
  Pfam annotation: Domain name=LRR_1; Domain location=83-105; Score =0.1; E_value=2.7e+02; Accession=PF00560.23; Description=Leucine Rich Repeat
  Pfam annotation: Domain name=Pkinase; Domain location=801-982; Score =2.6; E_value=1e-08; Accession=PF00069.15; Description=Protein kinase domain
  Pfam annotation: Domain name=Pkinase_Tyr; Domain location=801-982; Score=-4.4; E_value=3.3e-12; Accession=PF07714.7; Description =Protein tyrosine kinase
  Pfam module annotation: Pfam domain module=LRRNT_2::LRR_1::LRR_1::LRR_ 1::LRR_1::LRR_1::LRR_1::LRR_1::LRR_1::LRR_1::LRR_1::LRR_1::LRR_1: LRR_
  Pfam module annotation: Pfam domain module=Pkinase::Pkinase_Tyr; Domain location=37-78::107-129::131-153::158-180::184-206::208 -230::232-254::256-278::280-303::305-327::330-352::354-377::379 -406::437-459::461-483::...
  Pfam module annotation: Domain location=485-507::509-531::533 -555::557-579::580-602::604-626::628-650::652-674::676-697::83 -105::801-982::801-982
MRARTAILLLMLILVVLFLAASTSAGDVPGRQKRQALLQEKATLLALKQGLRLPSAAALADWNESNAHVCGFTGVTCDWRQGHVVGLSLANVGIAGAIPPVIGELSHLRILDLSNNKISGQVPASVANLTRLESLFLNNNDISDTIPSIFSSLLPLRMLRNVDVSYNLISGDIPLALGSLIGEQLQSLNVSDNNISGAIPLSIGNLTRLEYLYMQNNNVSGGIPLAICNLTSLLELEMSGNQLTGQIPAELSNIRDLGAIHLRGNQLHGGIPPSLSELTAMFYLGLEQNDLSGTIPPAILLNCTQLALLDVGDNNLSGEIPRAISSARCLFVVINLYSNNLNGTLPRWLANCTQLMTLDVENNLLDDELPTSIISGNQELTYLHLSNNRFLSHDNNSNLEPFFVALSNCTLLQEVEAGAVGMRGQLPWRLGSLLPMNTGHLNLELNAIEGPIPASIGDIINMMWLNLSSNLLNGTIPTSLCRLKRLERLVLSNNALTGEIPACIGDATGLGEIDLSGNVLSGAIPSSIRSLSELQTLTLQRNELSGAIPSSLGRCTALLVIDLSCNSLTGVIPEEITGIAMKTLNLSRNQLGGKLPAGLGSMQQVEKIDLSWNNFNGEILPRLGECIALTVLDLSHNSLAGDLPPELGGLKNLESLNVSNNHLSGEIPTSLTDCYMLKYLNLSYNDFSGVVPTTGPFVNFSCLSYLGNRRLSGPVLRRCRERHRSWYQSRKFLVVLCVCSAVLAFALTILCAVSVRKIRERVASMREDMFRGRRGGGSSPVMKYKFPRITYRELVEATDEFSEDRLVGTGSYGRVYRGALRDGTMVAVKVLQLQTGNSTKSFNRECQVLKRIRHRNLMRIVTACSLPDFKALVLPFMANGSLERCLYAGPPAELSLVQRVNICSDIAEGMAYLHHHSPVKVIHCDLKPSNVLINDDMTALVSDFGISRLVMSIGGVANAADVGASTANMLCGSIGYIPPGTH

SEQ ID NO: 72518 - protein, 159 aa, Zea mays
  Coding DNA Sequence Number=SeqID_30739
MHKERTNSSAHTEKFKSSVLKSETGVILPGRPRKEEGAKERGRIGNNTAVLVHPLDDAKVQEEDEAHTFFPWSYCIPASRISHSTVAAKRHHVLSTSAASHHLNTPAYVVCRIRGHKQEDPISAKDKASVMYVKGQGGVGADSLHDDLRLGGRTRFHFP

SEQ ID NO: 72519 - protein, 38 aa, Zea mays
  Coding DNA Sequence Number=SeqID_30740
MGKTHPTSGSHTHVAMRKKEGLARWGLGQRPVQMFANM

SEQ ID NO: 72520 - protein, 76 aa, Zea mays
  Coding DNA Sequence Number=SeqID_30741
MDREGKSSELALVAYYDAAEKARVERITEEIMASLFDCEHKGRWSMAKVKVMQVHADGPGAVKDERWDLTEGPKSG

SEQ ID NO: 72521 - protein, 130 aa, Zea mays
  Coding DNA Sequence Number=SeqID_30742
  Subcellular localization annotation: CTP_CleavageSite=72; ConfidenceScore=5.16e-01
MALWHDGMGASSPTATLHHAVWRSAWVRVRRSAQSGGWFLLLDARHGSSIELAGGRVCCLSSSSVERRQLASSALRKGEGRGRRREGLTSMDVGVNGETDVDDIGRAHGRGWESAEAPVWQDKGVRVVGM

SEQ ID NO: 72522 - protein, 304 aa, Zea mays
  Coding DNA Sequence Number=SeqID_30743
  Gene Ontology: Mol. function=hydrolase activity, acting on glycosyl bonds; Cellular component=intracellular; Biological process=base -excision repair
  Homolog annotation: Hit_ID=Q9FRL4; Match level="QueryCoverage=69%, HitCoverage=50%, E-value=2e-51, Identity=58%"; Hit description=3 -methyladenine DNA glycosylase, putative; 31680-30045
  Pfam annotation: Domain name=HhH-GPD; Domain location=125-267; Score =46.6; E_value=8.4e-11; Accession=PF00730.15; Description=HhH-GPD superfamily base excision DNA repair protein
  Subcellular localization annotation: CTP_CleavageSite=83; ConfidenceScore=5.81e-01
MGEQSLSQPKPQPLSPFPSPPASAALPPPASASASASASAASTSRTTSAAASRPKKKVTNPSPDRNPAKKPRLTFSIPGRPLSAVGEVGVAIRYLRAADPALAAVIDAHEPPVFQCPHRPFHSLVRSILYQQLAFKAAASVYSRFLALLGGESCVAPDAVLALTPHQLRQIGVSPRKASYLHDLARKYASGILSDAAIVNMDDRSLAAMLTMVKGIGSWSVHMFMIFSLARPDVLPSADLGVRKGRADALRPRGRASSVADGQAVRAVAPLSLSGGLSMLQQQEQQQQQTVIQMIDPLQMLPGM

SEQ ID NO: 72523 - protein, 253 aa, Zea mays
  Coding DNA Sequence Number=SeqID_30744
  Gene Ontology: Mol. function=sequence-specific DNA binding; Cellular component=nucleus; Biological process=regulation of transcription, DNA-dependent
  Homolog annotation: Hit_ID=Q8LR32; Match level="QueryCoverage=43%, HitCoverage=38%, E-value=6e-14, Identity=42%"; Hit description=GATA -type zinc finger transcription factor-like
  Pfam annotation: Domain name=GATA; Domain location=131-166; Score =70.4; E_value=5.7e-18; Accession=PF00320.17; Description=GATA zinc finger
MPSTTFSLFSPLPCSTKAHQYAPADWFDDDDSNSAVIATPPSPSSSSTGSVDCTLSLGTPSSRLAAPKQRPLPASSCGTMPWDVAAAADQSCCCCRRRQGSSSSSRPSVVVNKSAVMPCAGQDPLLVDRRCANCGTSSTPLWRNGPCGPKSLCNACGIRFKKKERRAAATAAMDQGGCAYVAERAQYGAAAGRAYYGSCEGPAFPCDGGDVADAEAAPQNFLAWRLDVVAPAQAQAAAFAAVWPEQTTLFQYN

SEQ ID NO: 72524 - protein, 72 aa, Zea mays
  Coding DNA Sequence Number=SeqID_30745
MAMALVLLLGGGVAVAEHGPQCWVLKRGGGAEEERRSGTELRCEDVDGSGAEAATIRRENQWSRGGSSIQAG

SEQ ID NO: 72525 - protein, 113 aa, Zea mays
  Coding DNA Sequence Number=SeqID_30746
MAMAMGMNPVTVDAVELSRLHRKLPLRPTVDEVEASTVILTSANAKEACLAKITREEKAARALAQGVLVELFDVLIMRSRTDAELNLCVIHIDVAESKMPAPSSLAVRSYVWK

SEQ ID NO: 72526 - protein, 128 aa, Zea mays
  Coding DNA Sequence Number=SeqID_30747
  Gene Ontology: Cellular component=peroxisome
  Homolog annotation: Hit_ID=Q657X8; Match level="QueryCoverage=41%, HitCoverage=11%, E-value=1e-08, Identity=58%"; Hit description=PEX14- like
  Pfam annotation: Domain name=Pex14_N; Domain location=53-124; Score= -3.2; E_value=9.9e-05; Accession=PF04695.4; Description=Peroxisomal membrane anchor protein (Pex14p) conserved region
MAELSTSSDGLVDEEARQQEPGQGSAEGSHGLQDTKEQDIKKGKAALVSTELLREDLVQSAVSFLKHPKVVASSDGQRRSFLVNKGLTMDEIDEAFRRLQGCLIIHAGLLRSAQTTNNSIWPGMTARN

SEQ ID NO: 72527 - protein, 193 aa, Zea mays
  Coding DNA Sequence Number=SeqID_30748
MAEVKRRPLRLPKVSPALPQSAKGSQIANEKDQEKGSTKRAGDNRRHPSGAPDCLVCHRTVSGAPPDNVQCTRGLQAKLITFGKTQRRSTIIHRTVSGAPRRSDSELASFGNPLRYNSPDMSGVHRTVRCDSGATAMSAPTVTYYSIKCAPACAEEQSTLGWHTGQSTVLVRCTTGQPGDPTSQSSNGRTLTA

SEQ ID NO: 72528 - protein, 472 aa, Zea mays
  Coding DNA Sequence Number=SeqID_30749
MPAVLNENEDGAAAADLERQQCWCSCSCSCLPLCLWPGASGSRGPRKPGGTGAKRRRWRRRLKLSWLVWPWSPKSGKGDAGGGGDDSSKEGMKKRRRKDGRRRLKLSWLAWPWSRRSDKGDAGGDGDDSSKEGKKRRRKGGRRRLLLLLTTTTSLQLKKALASVVSGESALLPAPAKAALPLGRAWPAGAQRQRAAGSAAAWALSCGLLRCCLLACWLLQPGRLPARLLPARLLAASAWPPPCSPTACWLLLCLAAWCSLVLQPPAQVSSFGDAKKQSNRRPRRPTAEDAARGSRQPQPSATAATASTGSTTAVPAGSRPETTSQPSPKPTEGSAASGRTWRAPSRRQRHSLHQPDCSCSSSGLWTAATTLGVIVLLGRVIAVVFLCSCLYGARFVRAWAAGDAGASAKAQLSGEGGVVGVGSSSRCFSDPVAVAGDEVAAEMCTTEERKKKVVMAGLLDRAGKAPSSRFRR

SEQ ID NO: 72529 - protein, 540 aa, Zea mays
  Coding DNA Sequence Number=SeqID_30750
  Gene Ontology: Mol. function=oxidoreductase activity; Cellular component=integral to membrane; Biological process=electron transport
  Homolog annotation: Hit_ID=Q8W372; Match level="QueryCoverage=94%, HitCoverage=93%, E-value=0.0, Identity=80%"; Hit description =Putative cytochrome P450 protein
  Pfam annotation: Domain name=p450; Domain location=53-532; Score =154.5; E_value=2.8e-43; Accession=PF00067.12; Description=Cytochrome P450
MDTAVSQNATVAAAAGAGSGGGLAGLLPEVQTLEVLVAVSIFVAIHSLRQRRTQGLPTWPVVGMLPSLLLGIRGDMYEWITGVLKARGGTFTFRGPWFTNLQCVVTADPRNLEHLLKTRFGSFPKGPYFRDTVRDLLGDGIFGADDEAWRRQRRAASLEFHSAEFRALTASSLVELVHGRLLPVLAGAEAAGAAVDLQDVLLRLTFDNVCMIAFGVDPGCLRPGLPEIPFARAFEDATEATTLRFVTPTAAWRAMRALGVGHERVLRRSLAAVDEFAYDVIRRRREELGGDDAGAGRRSSDLLTVFTRMRDEDGRPYTDKFLRDICVNFILAGRDTSSVALAWFFWLLRRNPGAEARILEEIEGILAARKEAGEVVVEEEVVFRPEEVKRMEYLHAALSEALRLYPSVPVDHKEVVEDEVFPDGTVLKKGTKVVYAMYSMGRMESIWGDDCREYRPERWLRDGRFMSESAYKFTAFNGGPRLCLGKDFAYYQMKFAAASILRRYRVDVVEGHPVAPKMALTMYMKYGLKVTLTKRDKTKL

SEQ ID NO: 72530 - protein, 256 aa, Zea mays
  Coding DNA Sequence Number=SeqID_30751
  Gene Ontology: Mol. function=catalytic activity; Biological process =chromosome segregation
  Homolog annotation: Hit_ID=Q337J5; Match level="QueryCoverage=93%, HitCoverage=92%, E-value=1e-83, Identity=67%"; Hit description=HD domain containing protein, expressed
  Pfam annotation: Domain name=HD; Domain location=24-166; Score=24.0; E_value=6.5e-05; Accession=PF01966.12; Description=HD domain
MAAAVRRAEELVEREMGGRDASHDAAHALRVRDLALSLAAEEGLSAPDRLLTVELAALLHDVGNFLRLHIILYRFHLLYLSNPFEYHYFLCRRLQVYQWMLGRNNVEDISVVEMFLQEVGLDEGQKDEIVAIIKGMGFKNEVSNKSIVEPTLEFAIVQDADRLDAIGAIGIARCFTYGGSKNSALHDPRILPRDSLSKEKYMSKEEKQTSINHFHEKLFKLKDMMKTEAGKRRAEKRHRFMEEFVAEFYEEWSGRA

SEQ ID NO: 72531 - protein, 357 aa, Zea mays
  Coding DNA Sequence Number=SeqID_30752
  Gene Ontology: Mol. function=RNA-directed DNA polymerase activity; Cellular component=mitochondrion; Biological process=RNA-dependent DNA replication
  Homolog annotation: Hit_ID=Q8S463; Match level="QueryCoverage=99%, HitCoverage=20%, E-value=0.0, Identity=89%"; Hit description =Putative prpol
  Pfam annotation: Domain name=RnaseH; Domain location=219-346; Score =9.2; E_value=8e-06; Accession=PF00075.14; Description=RNase H
MLLGFIVSKRGIEANPEKIAAITNMGPIKDLKGVQRVMGCLAALSRFISRLGERGLPLYRLLRKTERFTWTPEAEQALGNLKALLTSAPILVVSAAIVVERREEGHALPVQRPVYFISEVLSETKICYPQIQKLLYAVILTRRKLRHYFESHPVTVVSSFPLGEIIQCREASGRIAKWAVEIMGETISFAPRKAIKSQVLADFVAEWVDTQLPTAPIQLELWTMFFDGSLMKTGAGAGLLFISPLGKHLRYVLRFHFPASNNVAEYEALVNGLRIAIELGVRRLDARVDSQLVIDQVMKNSHCRDPKMEAYCDEVWRLEDKFYGLELNHVARRYNETADELAKIASGRTTVPSDVFS

SEQ ID NO: 72532 - protein, 161 aa, Zea mays
  Coding DNA Sequence Number=SeqID_30753
  Subcellular localization annotation: CTP_CleavageSite=61; ConfidenceScore=5.48e-01
MDSRGGGRNKQRNLDRTESPPPRRRSQSGNNSPSEASQSQIQAAGGSNSTGSRSRGAERPRSVPVQTTQTPTEPSKTGSGGVGAFEFGPVVGLSVVVAVSMAGLLGGWLWAVACVCAWLAALSRLRRRREAAAVDEDSADHEKPAVLRGMLERGRRKAAAT

SEQ ID NO: 72533 - protein, 47 aa, Zea mays
  Coding DNA Sequence Number=SeqID_30754
MAKFIQVGARGPFEGFTIQDGSMTIEVLKTPLSLHIIITLALGREKV

SEQ ID NO: 72534 - protein, 63 aa, Zea mays
  Coding DNA Sequence Number=SeqID_30755
  Subcellular localization annotation: CTP_CleavageSite=34; ConfidenceScore=5.52e-01
MAFASSLLPVPPYRVCATPASEVAAFSPAKKSVSLAAARQRRGSRHGVQMSTDFIASCRIMLL

SEQ ID NO: 72535 - protein, 204 aa, Zea mays
  Coding DNA Sequence Number=SeqID_30756
MGATSFSFTTAAAILHLALLLAAARRHGATDYTVGDSAGWAIGPNYLIWSQKYNFTAGDTLGCASTIDISFLLQLTDGPQSPEAFSYARLLTDGLQRPGNLSPTIAPKPLWGEYLPSGADEGRLVRVHGGGYDLRLLDILARVCETVELGTHRGMAMTLAIVLLHFGGNFHDAINPLEGSSMADLDLLLGDFDAAANVVLGVVL

SEQ ID NO: 72536 - protein, 115 aa, Zea mays
  Coding DNA Sequence Number=SeqID_30757
MGRVTPASSAPPPVGREAPASLTPPMDWEAPASPTPPPTDQEVQAPPFARGEPSVFNPIPFQASFDINTCTSMYADLHFPSRYLDSEEEDGLGPGLDFSGSVILRPLCELHAKFG

SEQ ID NO: 72537 - protein, 179 aa, Zea mays
  Coding DNA Sequence Number=SeqID_30758
  Gene Ontology: Mol. function=binding; Cellular component=plastid chromosome; Biological process=positive regulation of transcription, DNA-dependent
MSMGGALVAVSVWLNKLYDRLVEDEDLPQLASVVVLRGEMEKSTVTRGLPIAKVVYSFLNDTLSASFHFPKWNKGRIICLKSQLKRLQSAVDSSNGSLAAGFVDMTNSRLPAPGSKIYTSEDQLDNGSRHLPDEPLAEEKESELLALILARCRENELMDVVDCVWHPCASSSSAQLCKT

SEQ ID NO: 72538 - protein, 133 aa, Zea mays
  Coding DNA Sequence Number=SeqID_30759
MSVGCASLAGGREIGPGLGLGDLFTEAELAVADHLVQLSGSGEGDETASGPESPRSVNTCAGVAAWEERAEVAGLGLGTMELDRRARKRCRLLSDVYAATRPVIGADAGNARKRKRGRRSATRRSVLLGSLAF

SEQ ID NO: 72539 - protein, 213 aa, Zea mays
  Coding DNA Sequence Number=SeqID_30760
  Subcellular localization annotation: CTP_CleavageSite=34; ConfidenceScore=5.31e-01
MSSPPSSPSPPDAPPSRQARPPLEAPLHPYVRRPARHRWTRVRCLGSYELNNRNPDIGIILVSCLPGEFFLGCHRGGLVRSKESSRRSRSATLGHGSSQLVSKPLESALGRGGATAPPAKPSVQTRFLLEAMDERDRLVQENWDRMFESMEAMTGRLKEVERVQQQLLMQSELAAVVAEQAATERNDLHRKLEETGHTVPIKAGTDGKRNESS

SEQ ID NO: 72540 - protein, 249 aa, Zea mays
  Coding DNA Sequence Number=SeqID_30761
  Gene Ontology: Mol. function=binding; Cellular component=plastid chromosome; Biological process=positive regulation of transcription, DNA-dependent
  Homolog annotation: Hit_ID=P0C043; Match level="QueryCoverage=90%, HitCoverage=41%, E-value=3e-16, Identity=27%"; Hit description =Hypothetical PPR-repeat protein At4g17915
  Pfam annotation: Domain name=PPR; Domain location=129-163; Score =18.6; E_value=0.023; Accession=PF01535.11; Description=PPR repeat
  Pfam annotation: Domain name=PPR; Domain location=165-199; Score =31.5; E_value=3e-06; Accession=PF01535.11; Description=PPR repeat
  Pfam annotation: Domain name=PPR; Domain location=200-234; Score=7.0; E_value=1.1; Accession=PF01535.11; Description=PPR repeat
  Pfam annotation: Domain name=PPR; Domain location=23-57; Score=35.2; E_value=2.3e-07; Accession=PF01535.11; Description=PPR repeat
  Pfam module annotation: Pfam domain module=PPR::PPR::PPR::PPR; Domain location=129-163::165-199::200-234::23-57
GPALLDKCLEVFHDLPAESRTALSYTSLIAAYARNALHEEARALLDQMKATGVAPTAATYNTVLAACARATDPPVPFDMLLGLFAEMRHDASPSVRPDLTTYNTLLAAAAEAYVAFNMMTEIGSLPTLETYNALAFAYARGGLFQEAEAIFSRMSNNAGIQKSKDSFDALIEAYCQGSRLDDAVKAYMEMRKSRFNPDERSLEGVLNAYCIAGVIDESKEQFEELQSSVTMPSVIAYCMMLSLYARNDR

SEQ ID NO: 72541 - protein, 302 aa, Zea mays
  Coding DNA Sequence Number=SeqID_30762
  Gene Ontology: Mol. function=oxidoreductase activity; Biological process=electron transport
  Homolog annotation: Hit_ID=Q5JN40; Match level="QueryCoverage=65%, HitCoverage=50%, E-value=3e-67, Identity=71%"; Hit description =Putative glucose inhibited division protein A
IVRFKDKESHQIFLEPEGRNVPELYLQPFQNTGYCFDQINADSRLTPLGREIGLIDDRRWELYQSKQARIKQEKERLRSTKVPGGEFAAEVTAVSNQPVKDSSTLEAILKKPHIVNQEHRKLPEDLDYHSMTNLSLEAREKLSKVRPQTIGQASRIGGVSPADMTVLLIWMESNRRMATHRRQREQLGSVAVESDGSLRVCGTTMQGGAKLNPYYLVFEKSRINLSGTIIRGTLKTPNSQLGSDSGSAPEDDELRSARPRARTRAKPRKTANSAPPDPGLGLGLSPGRRRTPLRPTQGSDSG

SEQ ID NO: 72542 - protein, 375 aa, Zea mays
  Coding DNA Sequence Number=SeqID_30763
  Gene Ontology: Mol. function=catalytic activity; Cellular component =intracellular; Biological process=metabolic process
  Homolog annotation: Hit_ID=Q8S2C5; Match level="QueryCoverage=99%, HitCoverage=74%, E-value=1e-163, Identity=54%"; Hit description=PPR repeat protein-like
  Pfam annotation: Domain name=PPR; Domain location=100-134; Score =43.5; E_value=7.3e-10; Accession=PF01535.11; Description=PPR repeat
  Pfam annotation: Domain name=PPR; Domain location=201-235; Score =32.5; E_value=1.5e-06; Accession=PF01535.11; Description=PPR repeat
  Pfam annotation: Domain name=PPR; Domain location=237-271; Score=6.4; E_value=1.3; Accession=PF01535.11; Description=PPR repeat
  Pfam annotation: Domain name=PPR; Domain location=34-68; Score=4.1; E_ value=2.4; Accession=PF01535.11; Description=PPR repeat
  Pfam module annotation: Pfam domain module=PPR::PPR::PPR::PPR; Domain location=100-134::201-235::237-271::34-68
MIAGFCREEAADVAREALGLYSELQSRGMQPSEFSFSSILRACNLAGEFGFGKQIHGQVLKHSFQGDVYIGSALIDLYSGSGCMEDGYRCFRSLPKQDVVIWTSVISGCVQNELFEEALRLFQESVRCGLRPDVFAMSSVMNACASLAVARTGEQIQCLAVKSGFNRFTAMGNSFIHMCARSGDVDAATRRFQEMESRDVVSWSAVISSHAHHGCARDALCVFNEMLDAKVAPPNEITFLSILTACSHGGLVDEGLRYYGIMNDEYGLSPTIKHCTCVVDLLGRAGRLADAEAFIRDSAFHDDAVVWRSLLASCRIHGDMERGQLVADKIMDLEPTSSASYVILYNMYLDAGELSSASKDSRSDERARREERAWS

SEQ ID NO: 72543 - protein, 138 aa, Zea mays
  Coding DNA Sequence Number=SeqID_30764
MGSIKEYYHHTEEETKDYEPRSKVFHPRITKHCDLRGKGVEKEFLAITQRGFYRECFALSGIGTGELVGGGVISELHVMVVLGVKNGGGWSMCHAEVGVMEGKGNGVADGDGGGGCAAKGEWAVVVRMEAGHACGGHG

SEQ ID NO: 72544 - protein, 99 aa, Zea mays
  Coding DNA Sequence Number=SeqID_30765
MKFFGFTVLITMLSTNKLDERAFLFGSEARTDDRRIALVGETKDLPIDELLLPFALLGPMAPKDEVDLPINAWEGRRLRVADEVLCPFIGGDIDVRLSK

SEQ ID NO: 72545 - protein, 265 aa, Zea mays
  Coding DNA Sequence Number=SeqID_30766
  Gene Ontology: Mol. function=sugar binding; Cellular component =cellular_component; Biological process=protein amino acid phosphorylation
  Homolog annotation: Hit_ID=Q564C9; Match level="QueryCoverage=90%, HitCoverage=95%, E-value=6e-42, Identity=35%"; Hit description =Jasmonate-induced protein
  Pfam annotation: Domain name=Dirigent; Domain location=1-152; Score= -49.2; E_value=0.044; Accession=PF03018.5; Description=Dirigent-like protein
  Pfam annotation: Domain name=Jacalin; Domain location=131-264; Score =88.6; E_value=1.9e-23; Accession=PF01419.7; Description=Jacalin-like lectin domain
  Pfam module annotation: Pfam domain module=Dirigent::Jacalin; Domain location=1-152::131-264
  Subcellular localization annotation: CTP_CleavageSite=31; ConfidenceScore=5.46e-01
MATPPNPPPPSTPIAAAAPLLPAEFTRFTFRALYVRRTGPSSREMIQPGRPYDELGRRLTSDYPVYDGRGSDAALVARMQGITVLVGNAHQLFTIVFETGRFKGSTLLTNGMDDDDGSAVTKIGLWGGPGGSAQDITTTEAPRRLNSVTIRAGIAVDSIEFTYTGKDRQRRTAGRWGGLGGNVRTIDLGDNEHIREVSGTYGTFEGATTLTSLRFITSTRAWGPWGTENGTRFCITAPIGSSVVGFYGRAGTRLVDAIGVYLRQL

SEQ ID NO: 72546 - protein, 50 aa, Zea mays
  Coding DNA Sequence Number=SeqID_30767
MESGGVASGMGQQRKRGSEQTGLGGVGNVGRLRLPKGSSNKSPRYEEARK

SEQ ID NO: 72547 - protein, 113 aa, Zea mays
  Coding DNA Sequence Number=SeqID_30768
  Gene Ontology: Mol. function=kinase activity; Cellular component =ornithine carbamoyltransferase complex; Biological process=amino acid metabolic process
  Homolog annotation: Hit_ID=Q6QP54; Match level="QueryCoverage=72%, HitCoverage=37%, E-value=3e-16, Identity=63%"; Hit description =Putative kinase
  Subcellular localization annotation: CTP_CleavageSite=66; ConfidenceScore=5.41e-01
MAPPVDVAGLRPRLGDVEAPPKPRSSPSPWVGRGGGRRLGPGQSPSPGVGRSGVRRLLGLSPSPSPGSGKAEFAVFWGRAQLCADGGYQLKIRSLEGTPKYGPRRSPRSLEGD

SEQ ID NO: 72548 - protein, 158 aa, Zea mays
  Coding DNA Sequence Number=SeqID_30769
  Homolog annotation: Hit_ID=Q6QP51; Match level="QueryCoverage=39%, HitCoverage=30%, E-value=7e-13, Identity=68%"; Hit description =Putative growth-regulating factor 1
  Subcellular localization annotation: CTP_CleavageSite=39; ConfidenceScore=5.10e-01
MAVAGRQEQRPRRQPSSRPIRGQRENPLSRREDNAPMLRSSNGSRTRNGRPANHSPRRINSAGPGKGDTLKRILPREGTRLRASLLIRGSKAGPSEGFDSRLRSRGPYTHYWSEVRRPAPRKGSTTASGYSSSVPTTDQGFEGWPSKGSQPPQTLSEG

SEQ ID NO: 72549 - protein, 113 aa, Zea mays
  Coding DNA Sequence Number=SeqID_30770
MESVGPAGSDKADYGSVGASIAVHAIQSENIRCFQARAKRAASCITTGANLASNGRGYWIGLCSKASHLQPPDESGEWKLNDKRRPRNNPPPSSIFGGTIIVIERPLSFAESY

SEQ ID NO: 72550 - protein, 299 aa, Zea mays
  Coding DNA Sequence Number=SeqID_30771
  Gene Ontology: Mol. function=endonuclease activity
  Homolog annotation: Hit_ID=Q9ZU86; Match level="QueryCoverage=54%, HitCoverage=36%, E-value=7e-69, Identity=75%"; Hit description =Expressed protein
MACLIRLLPGGGAIGQKEKKKERKGLVELLHCRNNSRNVLRVTIEVPDAGEVNFHCTHLDHLDEGWRMKQVDAIMRSGGDGPHILAGGLNALDGTDYSADRWADIVKYYEEIGKPTPKVEVMQYLKAKQYVDAKDFAGECEAVVVVAKGQDVQGTCKYGTRVDYIMASPNCPYKFVPGSYTVVSSKGTSDHHVVRVDVAVPHAREPDDAEATANGQRSRVARSDFGWTFSVVQGIAHCITLTPGCGCPKANSTMIYVDATTNPEILQRQNKEHGPSDRRVYTTYVARYHAGGAGHCRCK

SEQ ID NO: 72551 - protein, 219 aa, Zea mays
  Coding DNA Sequence Number=SeqID_30772
  Homolog annotation: Hit_ID=Q8RUN1; Match level="QueryCoverage=33%, HitCoverage=6%, E-value=1e-21, Identity=77%"; Hit description =Calcium-transporting ATPase 3, plasma membrane-type (EC 3.6.3.8) (Ca(2+)-ATPase isoform 3)
MGGAKWKEEEMVKTLRPSVWLTEDFPLSVDKFLPLLDILASHVCAVRWLRVLLTTKFPQGTFPVKLFPCLSIIPTSLVLPPSPGTVPMEERRNKIEDYEKYLIQLSKLTKVMARSLPLDKHTLVKNLRGMFREVVAVTGDGTNDAPALHEADIGLAMGIAGTERKNNRENTTGRLELYFHSHVNVKVIHGSTSFEHLTIACHVHLLFLHHYFEPNFKIP

SEQ ID NO: 72552 - protein, 138 aa, Zea mays
  Coding DNA Sequence Number=SeqID_30773
MSGGREAIDHGEEAPIVVEDVLWGGKRQHGGWQVRPLWMGAQHTGKWGWLEVGVVMGREASRHVKEATVDVENIRTQRRLVVVSSVGGELQRLGLVGGCMTVRRGSGHDEAAHERDGVTTLMRATDVEMAINIDKMRV

SEQ ID NO: 72553 - protein, 69 aa, Zea mays
  Coding DNA Sequence Number=SeqID_30774
MEVSPPSNSRSPLHRFASALVVNRSLESFEVGRGPAHADELAVWDCSGAAALSAQWGRQGMVLDFEIYG

SEQ ID NO: 72554 - protein, 145 aa, Zea mays
  Coding DNA Sequence Number=SeqID_30775
  Subcellular localization annotation: CTP_CleavageSite=38; ConfidenceScore=5.30e-01
MPSPPSVDPSHRHCVPKHHRCSPPLLPPPRPPIKGPPRASPTPHTGLGLPKSLPKLNRAVSPRPSSAPVSSYVPSLVAYGQIALALKLRQSATSLPRTSSSPIAPGSTTGDLTAAGARHLVEDRPSRTLSEQIDPATMTPYPYPC

SEQ ID NO: 72555 - protein, 107 aa, Zea mays
  Coding DNA Sequence Number=SeqID_30776
  Homolog annotation: Hit_ID=Q5VPH5; Match level="QueryCoverage=70%, HitCoverage=67%, E-value=2e-15, Identity=63%"; Hit description =Putative auxin-induced protein TGSAUR22
  Pfam annotation: Domain name=Auxin_inducible; Domain location=1-104; Score=74.8; E_value=2.8e-19; Accession=PF02519.5; Description=Auxin responsive protein
MAPPDPEDISREEKRTKASKLQEQGEGEEEEAMRLPSDVSHGHFAVYVGEWWRRFVVHIALLDRPEFRSLLRRAEEEFGFTGAGGALVLPYEEVAFRSLTSALACAR

SEQ ID NO: 72556 - protein, 514 aa, Zea mays
  Coding DNA Sequence Number=SeqID_30777
  Gene Ontology: Mol. function=transferase activity; Cellular component= membrane; Biological process=metabolic process
  Homolog annotation: Hit_ID=Q657X7; Match level="QueryCoverage=87%, HitCoverage=86%, E-value=0.0, Identity=76%"; Hit description=Pectin -glucuronyltransferase-like
  Pfam annotation: Domain name=Exostosin; Domain location=185-479; Score=314.3; E_value=2.2e-91; Accession=PF03016.6; Description =Exostosin family
  Subcellular localization annotation: CTP_CleavageSite=36; ConfidenceScore=5.28e-01
MALLSLRTPPWGYPQGDSGGRSRGRKLRGPRRLDVVAIRSAAFFLRRDRQPFETLKSRLQIGVNPGTIVINLSARIAPAAAPSMFLAPSSSPAEIFYDGSMEEPEHPDIKLLMTLQRNPPKESSPFLKEEAPLWSTAADEELIYAKKEITNAPLTSDDPDLYAPLFRNVSIFKRSYELMERLLKVFIYHDGAKPIFHSPELKGIYASEGWFMKLMETNQNFVVRDPNTAHLFYLPYSSRQLEHNLYVPGSNTIEPLSIFVKNYIDLISAKYPYWNRTKGADHFFVACHDWGPYTTKLHDELRKNTIKALCNADLSEGFFIRGKDVSLPETFLRSPRRPLRDIGGRPAAQRTILAFFAGQMHGRVRPVLLKYWGNKDDDMRIYSRLPHRITRKRNYVQHMKSSKYCICPMGYEVNSPRIVEAIYYECVPVIIADHFVLPFDAALNWSTFSVVVPESDVPKLKQILLAIPESRYITLQANVKRVQKHFMWHPNPVKYDIFHMILHSVWFSRVNQIR

SEQ ID NO: 72557 - protein, 659 aa, Zea mays
  Coding DNA Sequence Number=SeqID_30778
  Gene Ontology: Mol. function=protein serine/threonine kinase activity; Cellular component=membrane; Biological process=protein amino acid phosphorylation
  Homolog annotation: Hit_ID=Q69W20; Match level="QueryCoverage=79%, HitCoverage=94%, E-value=0.0, Identity=61%"; Hit description =Receptor-like protein kinase-like
  Pfam annotation: Domain name=DUF26; Domain location=208-262; Score =57.8; E_value=3.5e-14; Accession=PF01657.8; Description=Domain of unknown function DUF26
  Pfam annotation: Domain name=DUF26; Domain location=83-138; Score =53.5; E_value=7.2e-13; Accession=PF01657.8; Description=Domain of unknown function DUF26
  Pfam annotation: Domain name=Pkinase; Domain location=340-601; Score =53.3; E_value=8.2e-13; Accession=PF00069.15; Description=Protein kinase domain
  Pfam annotation: Domain name=Pkinase_Tyr; Domain location=353-601; Score=-10.1; E_value=7.6e-12; Accession=PF07714.7; Description =Protein tyrosine kinase
  Pfam module annotation: Pfam domain module=DUF26::DUF26::Pkinase::Pkin ase_Tyr; Domain location=208-262::83-138::340-601::353-601
MAVLLLPPCLVFLLLQLFSAPSDGATAEYAEYTCNGTTGNFTSGSAFAANLDRLVAELPGNASASPLLFASASAPGSADADTAYGLALCRGDVTDARACSACLADAFSRLRRLCGGDRDATFYADLCTARYSGADFMARPDDNSPVVNGMDANASTYPGWDAANATSRSFFLSLVGTLFGEMSMYGAYNSSRRLATAVMFINAGLPTVYGLAQCTPDLAPAQCWHCFQGLGDLNRQWYDGREGGRVSGVRCSFRYEGYQFYQGTPDVRIGLQGGPSSSPDDDGTSASNHKKVLIIALVVPIALVCGVLVAGLLLTRAQRKRAAGNLRARNDPGKTRLPTQMHSRNSSKTEEALKLWRIEERSSEFTLYDFAELAAATADFSDDNLLGKGGFGPEEEKMLVYEYMPNRSLDCFIFDQQRGPLLDWEKRRRIIEGIAQGLLYLHRHSRVRIIHRDMKASNILLDKDINPKISDFGMARIFGSNMTEANTNRVVGTYGYMAPEYASEGIFSVKSDVYSFGVLLLEIVSGKRNSGHHQHQYGDFINLLGYAWQLWREGRAFELIDPTLGECTEVADIVRCVKVALLCVQDSATDRPTMTDVTAMLASRDGGAAASLPDPRRPPHFSLRVSSSDDGSSEVRTRSHGTASFSTNDLTITTVQDGR

SEQ ID NO: 72558 - protein, 382 aa, Zea mays
  Coding DNA Sequence Number=SeqID_30779
  Homolog annotation: Hit_ID=Q75K90; Match level="QueryCoverage=26%, HitCoverage=35%, E-value=9e-15, Identity=47%"; Hit description =Putative chloroplast phosphoglycerate kinase
  Subcellular localization annotation: CTP_CleavageSite=47; ConfidenceScore=5.19e-01
MASKAVAALLTLAAILIGFLSPVTPAKTAHGFRATLAHVHQHPGSYSAAARRDGRRLALLSSPGAEGDGAATTTSSIATSPRHGLLEALVENGARAYHMSLYNDTRHPICLTIALEEQSRLLRVICHRFSAQDARWASLESTTTEHLHEASPATRVGTLESWSSPKEVITDDWGGLFGRGIDSDKQLCDSLHSTSIRSLEEAFAREDPIPSRAHLGIQLSATTERLDVVEPAVATRVGALESWRLRVEARALVHLYGFFDGANATKLPTTCSTSGLTTELSMAHYGSHLPNDKGGSVASWQPVRSLALAVHVESQCQHACSARGMLAMASMGKMSVGDLTEADLKGKRVFVCAKLHEPPDENQNSTNDILPERELGLHLFSK

SEQ ID NO: 72559 - protein, 55 aa, Zea mays
  Coding DNA Sequence Number=SeqID_30780
  Homolog annotation: Hit_ID=Q2R1Y1; Match level="QueryCoverage=75%, HitCoverage=9%, E-value=2e-07, Identity=61%"; Hit description =RabGAP/TBC domain-containing protein, putative, expressed
MQQKDHNTRVKIKARTTLSVREWHVAITRDGHLDIASVLSHIQRGVLNPFKPRET

SEQ ID NO: 72560 - protein, 786 aa, Zea mays
  Coding DNA Sequence Number=SeqID_30781
  Gene Ontology: Mol. function=protein serine/threonine kinase activity; Cellular component=membrane; Biological process=protein amino acid phosphorylation
  Homolog annotation: Hit_ID=Q7XIS7; Match level="QueryCoverage=91%, HitCoverage=95%, E-value=0.0, Identity=70%"; Hit description =Putative receptor-like protein kinase 4
  Pfam annotation: Domain name=DUF26; Domain location=120-174; Score =43.8; E_value=6e-10; Accession=PF01657.8; Description=Domain of unknown function DUF26
  Pfam annotation: Domain name=DUF26; Domain location=237-291; Score =47.8; E_value=3.7e-11; Accession=PF01657.8; Description=Domain of unknown function DUF26
  Pfam annotation: Domain name=Pkinase; Domain location=465-737; Score =146.6; E_value=6.7e-41; Accession=PF00069.15; Description=Protein kinase domain
  Pfam annotation: Domain name=Pkinase_Tyr; Domain location=465-737; Score=133.0; E_value=8e-37; Accession=PF07714.7; Description=Protein tyrosine kinase
  Pfam module annotation: Pfam domain module=DUF26::DUF26::Pkinase::Pkin ase_Tyr; Domain location=120-174::237-291::465-737::465-737
MYATGENEMMPPLHRHEYMDPPGTSWATNTMLVLLPLLLLAVASSPAPTTAGDGGGAVPVGNIFSFFCSPTNSSVLRTYQPNSTFAGNLQKLVSELPSNASAASGFAAGRFGAGAGPGAAYGTALCRGDFLGGQCADCLAEGFSQAASRCPGSVDATMYYDQCQLRFSDQDFLLAAASANNMPESTAWNMNRVSAGNVAAFDALVKGLVAAASDAASDRSSRYATGQAGFPPESINVYALVQCAQDLTARRCRECLAGLMGQMGNFFAGRVGGRILGVRCVIRYEKDVFFAQTPDMLTVAPLLGSTSTKGGRALARVATSTSYVRVRSFARAARNVTPPVDMRPFVFKKIGWTSVRALAHCTYQDGSDHLAVTKSAPDAEMVKLLTTLWVVAVAVPVSVLLACFLACVLWIRKRRRRVTNVSGTVSVPTMSMEMEQVLKLWRVEESDSEFSLFDFDQIADATDNFSDDHKLGQGGFGPVYKGELPGGLEVAIKRLSSVSVQGLMEFKTEIQLIAKLQHTNLVRLLGCCVQADEKMLVYEYMHNKSLDFFIFDGGDRGRALTWGRRFRVVDGVAQGLLYLHKHSRLRVVHRDLKASNILLDRDMNPKISDFGMARIFCSNVTEANTTRVVGTHGYIAPEYASEGLFSVKSDVFSFGVLLLEIVSGKRTAGFYQYGKFFNLTGYAYQLWQDGKWHELVDPALGDDLPVGEVMKCVQVALLCVQDSADDRPSMSEVVAMLGSEGVTMPEPRQPAYYNVRISSLAVSSDSFAESSCRMISNITLTDHEEG

SEQ ID NO: 72561 - protein, 327 aa, Zea mays
  Coding DNA Sequence Number=SeqID_30782
  Gene Ontology: Mol. function=structural molecule activity; Cellular component=protein complex; Biological process=microtubule-based movement
  Homolog annotation: Hit_ID=P33628; Match level="QueryCoverage=22%, HitCoverage=71%, E-value=6e-17, Identity=56%"; Hit description =Tubulin alpha chain
  Pfam annotation: Domain name=PPR; Domain location=259-293; Score =33.9; E_value=5.8e-07; Accession=PF01535.11; Description=PPR repeat
  Pfam annotation: Domain name=PPR; Domain location=294-327; Score=8.5; E_value=0.73; Accession=PF01535.11; Description=PPR repeat
  Pfam annotation: Domain name=Tubulin; Domain location=162-304; Score=- 87.3; E_value=0.1; Accession=PF00091.15; Description=TubulinFtsZ family, GTPase domain
  Pfam module annotation: Pfam domain module=PPR::PPR::Tubulin; Domain location=259-293::294-327::162-304
MRATICPWSDCGDVSIRHALSDLGTMAMNRRAHDVVPVPTAEGSGGLDEEAKRQQPRVMLVCRAITGRVKRPKEEEQAAVVADIEGKEEYDSVTRLTRVNCRSDFIIWRSLFDACCRLCKLFNCQELKLIDSQSTLTLIDAQVVFEEMQQSATSVGVPQDAFNTFCTKTGSSKQMARAIFVDPEHGLYPQLFHPEQLISGKEDTTNNFSRGYYTIGKGMVLVANNFGDDLPARRRKGQVQKSDRLFKVAEKNGIGTGVVMYNALINSRCTDGNMERAYEIMVEMEKKRIAPDNVRYNTLMREFCLLGQLDEAHTLIDEMTEGYCCQP

SEQ ID NO: 72562 - protein, 113 aa, Zea mays
  Coding DNA Sequence Number=SeqID_30783
  Homolog annotation: Hit_ID=Q7XIJ3; Match level="QueryCoverage=57%, HitCoverage=13%, E-value=2e-08, Identity=50%"; Hit description =Putative phototropic response protein family
  Subcellular localization annotation: CTP_CleavageSite=66; ConfidenceScore=5.30e-01
RLSLPTSCNTVVDVVKRCQRLFLLADSTGAFDATVAVRVTQMVMSSPTENATPTGSSQESTACWFSCNNKSSKQLQHGGPLLDGSSLGGPSFRAGLQLRRLSGCYECHMVVVP

SEQ ID NO: 72563 - protein, 132 aa, Zea mays
  Coding DNA Sequence Number=SeqID_30784
  Homolog annotation: Hit_ID=Q2QMK7; Match level="QueryCoverage=91%, HitCoverage=72%, E-value=6e-19, Identity=42%"; Hit description =Expressed protein
MRRNCMLLLVAAADAKSPLFCPKPRRPATPLRCHQSGGFSDAGTELLDLLLLKGDESGLSSASPQPPLFYGSPPRRASNPVVHDSRFGADCPPVPVPGLSVHRPSPRPSSAAPSMSPRGCARARFAFQPANS

SEQ ID NO: 72564 - protein, 330 aa, Zea mays
  Coding DNA Sequence Number=SeqID_30785
  Gene Ontology: Mol. function=protein serine/threonine kinase activity; Cellular component=membrane; Biological process=protein amino acid phosphorylation
  Homolog annotation: Hit_ID=Q7XIS8; Match level="QueryCoverage=73%, HitCoverage=36%, E-value=1e-100, Identity=77%"; Hit description =Putative receptor-like protein kinase 4
  Pfam annotation: Domain name=Pkinase; Domain location=3-203; Score= -22.2; E_value=3.1e-07; Accession=PF00069.15; Description=Protein kinase domain
  Pfam annotation: Domain name=Pkinase_Tyr; Domain location=1-203; Score=-69.9; E_value=3.5e-08; Accession=PF07714.7; Description =Protein tyrosine kinase
  Pfam module annotation: Pfam domain module=Pkinase::Pkinase_Tyr; Domain location=3-203::1-203
MEKKILYYFIFGKDHLFYMYNVKGADLNWSKRLHIINGIAQGLLYLHNYSRLCVVHRDLKASNILLDSEMNPKISDFGMARIFCSNAKESNTTRIVGTHGYIPPEYAFHGVCSIKSDVFSYGVLTLEILSSKRTVQFYEYNQKLYNLISYAWQLWTDGKSDELIYSPPGNVREEIERHIQVALLCVQENAEHRPDMERVVTMLNSKDVDLPKPMQPAYFHVNPSEEEVSSRSINMTMSITLESKKRKEGIRKAEPRFNWRNVCASTCAKLYPENVAVVVRGRTRRRHGASLAGGARVLSVTVRHHYPVPFHFDPVVATRQSRSGMPGPWA

SEQ ID NO: 72565 - protein, 98 aa, Zea mays
  Coding DNA Sequence Number=SeqID_30786
  Homolog annotation: Hit_ID=Q9S7C5; Match level="QueryCoverage=34%, HitCoverage=5%, E-value=4e-09, Identity=88%"; Hit description =Protein phosphatase 2A A subunit
MGRPIVDPPHLSPKTQIQPLIPKPQIQPRMSSENELDVSEIVAIRDIIPPAVEGCAALGKLLEPQDCVAHILLVIVNFSQSSSFFLFRPKDFLQKVEF

SEQ ID NO: 72566 - protein, 142 aa, Zea mays
  Coding DNA Sequence Number=SeqID_30787
MALIAASATFHDGGADIAYGSAWILGHLLLSEMRTVGGEGPRRQWHAQTTNHDGGAQILANLPLLETGGADEGVDGRFEEEGGADRRGEEGPRHRWHAQETFHDGGADIAYESAWILGHLPLSETGVDGADPREPSPIGDGR

SEQ ID NO: 72567 - protein, 115 aa, Zea mays
  Coding DNA Sequence Number=SeqID_30788
MKDTVAGSMGGARQENTRERRSNGCNKTPLTLGRRTDDAGSESVVGREVATYCGSCAQVRMARCTGLGWGSCAASRLAGRGVFGWARAGPACRISRRTERLQHWGGSAGDPRSGA

SEQ ID NO: 72568 - protein, 97 aa, Zea mays
  Coding DNA Sequence Number=SeqID_30789
MAGKGFTAGSEVYYAFISAYEKSENYEMREMQLPFYLRGDGRFVLVTTKKRESYWGAVGAMELPHLPQYDSFMGMRDGIGELLDALSDLIFGLDIAQ

SEQ ID NO: 72569 - protein, 110 aa, Zea mays
  Coding DNA Sequence Number=SeqID_30790
MGNTGTDGSRSCMQTGRHGRSWRGCCLQTGREFVRAMEETAPYCSHSPGEEAERAAVFQGAKRHGVILASAHGEESPCAREAREVLAAARQEEEGERGEEEKAAVGGRKI

SEQ ID NO: 72570 - protein, 122 aa, Zea mays
  Coding DNA Sequence Number=SeqID_30791
MVPRQPATETPHLMMTNGYSMRWREAIKALSPQINGHRNRKGLRMGGAPSTSTTAKNLHPAIAILPARRREDRACRRYQNVLVRSLQFERPLGYVRGVTTVFTPALRLGRQAGMEAGESPGA

SEQ ID NO: 72571 - protein, 133 aa, Zea mays
  Coding DNA Sequence Number=SeqID_30792
MTRIHRLRPLFLFVLLASLQCGNAAKTLAGLSAATVASTLESPLDQSSLLFHSLHGLSLDPIAGAATAAAGYGGGAEGFCSAEPSSKCSGDQPLYWKVTHPTLAPAHLQDEMSWLKYANVYMRTQGFLGAQII

SEQ ID NO: 72572 - protein, 112 aa, Zea mays
  Coding DNA Sequence Number=SeqID_30793
  Homolog annotation: Hit_ID=Q7F1K9; Match level="QueryCoverage=99%, HitCoverage=44%, E-value=6e-49, Identity=89%"; Hit description =Putative glyoxylate induced protein
MVDSYGYLPANTKHSMISDEPTTLVIFERRYNAIEDSHPDLIVGSTDKQPLLETPGEVFQLRKLLPTSLSYDFNIHIMDFQPGEYLNVKVSRASWGYHLDGTVCSSVVCCPW

SEQ ID NO: 72573 - protein, 160 aa, Zea mays
  Coding DNA Sequence Number=SeqID_30794
  Gene Ontology: Biological process=regulation of GTPase activity
  Homolog annotation: Hit_ID=Q6ZII7; Match level="QueryCoverage=59%, HitCoverage=57%, E-value=4e-33, Identity=70%"; Hit description=Zinc finger and C2 domain protein-like
MGRINAATLSILWCLDRQELFDHDTFTKDDSMGNAEFSILNFVEIAKQDLSDVPDGTVMKTIHTEKGSCLATDSHITCKDGKVSQDILLRLRDTETGDLVLRLTWVNIPGVARSDKVCKKAHATGSNASAAQPGAPAPGKMQFCRASDHSTKLTISILEQ

SEQ ID NO: 72574 - protein, 71 aa, Zea mays
  Coding DNA Sequence Number=SeqID_30795
MECLLGLLKVRVVRGVHLAICDPLTHSSDPYVVLRHGQQVSHKSITVNFDRLYRESQTHVDGGMTCCYNPS

SEQ ID NO: 72575 - protein, 236 aa, Zea mays
  Coding DNA Sequence Number=SeqID_30796
CAYNSAKSKNKFHFWGSHWRHGDALLFSLACAQDSVSRLCMLFVMRPESLPKSYQEFILKTGPVAEPVYKVVKECCRGGPVDLTALSAHLSNKRNPDLINLTTNPSIIPCSVIHPDRASCLAQNVNVVSSTFKKTFPLYFSLTFVPFVVLRLQKAAICLHRKVANKDHKLVYWFAGLMSGLSILLEKKARRAELALYVLPRAGDSLWYILINRHLLPNIKNAEVFPTHFAICFLVI

SEQ ID NO: 72576 - protein, 89 aa, Zea mays
  Coding DNA Sequence Number=SeqID_30797
MADGERVVAKVRFGEETEIGGLYANVRETVNSGSGFFTENEEEIVEEEVAPPTEIPHVWDNIYFDVCGTDPESPTTQGKPRCIYPSLLF

SEQ ID NO: 72577 - protein, 207 aa, Zea mays
  Coding DNA Sequence Number=SeqID_30798
  Gene Ontology: Mol. function=nucleic acid binding; Cellular component= anchored to membrane; Biological process=proteolysis
  Homolog annotation: Hit_ID=Q7XJ13; Match level="QueryCoverage=88%, HitCoverage=42%, E-value=2e-61, Identity=80%"; Hit description =Chloroplast nucleoid DNA-binding protein-like protein
MAPWVWVALQAAAVAASAAEALSLDVHHRYSATVREWAGHRAPPAGTAEYYAALAGHDLRRRSLAGGGEVAFADGNDTYRLNELGFLHYAVVALGTPNVTFLVALDTGSDLFWVPCDCINCAPLVSPNYRDLKFDTYSPQKSSTSRKVPCSSNLCDEQSACRPYYNISITGATVGSKSIHTKFNAIVDSGTSFTALSDPMYTQITSS

SEQ ID NO: 72578 - protein, 230 aa, Zea mays
  Coding DNA Sequence Number=SeqID_30799
  Subcellular localization annotation: CTP_CleavageSite=94; ConfidenceScore=5.82e-01
MEKKQKQKKHARSRSFTGGGLASFLKSTVAFFSFTFPSASVGTRSSFNHRNGFSGPIVSIVPPEARGGGGRNRSGYMTPEPSSPKVSCIGQIKRSNSRRQRKVNPCGKNGGGACPLPPAPAEGKPRGSLVKRLSFFRRGRSRPRSRADGLVGNGKECDGGATAAAAAPAPAGLGQMRRFTSGRAAFQDLDWRQEWRRAGRVSDEEDEGFVAHSAPLPHGSSSHPTSDSLG

SEQ ID NO: 72579 - protein, 170 aa, Zea mays
  Coding DNA Sequence Number=SeqID_30800
  Gene Ontology: Mol. function=catalytic activity; Biological process =polyamine biosynthetic process
  Homolog annotation: Hit_ID=Q7XJ04; Match level="QueryCoverage=51%, HitCoverage=20%, E-value=5e-09, Identity=50%"; Hit description =Putative ornithine decarboxylase
SSVDHGGGVDSVVVFPPIHRPAARAIKRKANHGHPCQADQDLFVRRIRFISSSLLALHVVTGEFIHFAKSSRQQQTKTNRDMGGGSRMQTVLLAPGVKDKKLLSYTRRNALKEKDAVTDLIRSIIATSSPVQRTAFHVFLIDTSSSSTLPGVAVLSDCVPTMPSIATRSR

SEQ ID NO: 72580 - protein, 544 aa, Zea mays
  Coding DNA Sequence Number=SeqID_30801
  Homolog annotation: Hit_ID=Q7X997; Match level="QueryCoverage=94%, HitCoverage=88%, E-value=2e-96, Identity=54%"; Hit description=Bzip -like transcription factor-like protein
  Pfam annotation: Domain name=DUF630; Domain location=29-95; Score =61.6; E_value=2.6e-15; Accession=PF04783.3; Description=Protein of unknown function (DUF630)
  Pfam annotation: Domain name=DUF632; Domain location=269-482; Score =44.8; E_value=1.2e-12; Accession=PF04782.3; Description=Protein of unknown function (DUF632)
  Pfam module annotation: Pfam domain module=DUF630::DUF632; Domain location=29-95::269-482
RFVRCFDFDYPSSLPPTHTKPCAKPWLSMGNCAAYRLAAGGSGDGGDPVAVCRDRKRLIKAAADRRFALAGAHAAYAAALRSVADALDVFVARHTAPAPILITLPTPSSSPSASPKPTQVQVQGLPSLATPPPPPPQEGEEEEEAPASPPAEEDGDGGVQTPEMECPYYYAPPAVTPPPPPLPAASPVGGWDFFNPFYGTEEVAAAISDEEMRAVREREGIPELEEAEEEEGAKAAAAAETKPPKAQPSLGLGVLTPQEEARDACEMAGNNGGLEVAVAPQGRELLAALKEVEELFAAAAEAGKEVSAMLEAATRVPDLKAESISDRIQKLRDEELQPQLVELLQGFTKSWKIMVDSHETQRQIMFEVNSFTCPAYGKFCNDAQRHATLKLEVELRNWRSCFTSYFNAQKAYIEALEGWVSKFVLTDTIRYSRGISSIAPDRAGAPTLVVMCHDWYTTMSKFPSKRVSFTMRNFLRSVRVLWLKQGEEQLHKMKVDSLANDLDNKLTAYKRAENRIICTKLLEHSPETDAKAAHGAPVGEERGA

SEQ ID NO: 72581 - protein, 376 aa, Zea mays
  Coding DNA Sequence Number=SeqID_30802
  Gene Ontology: Mol. function=binding; Cellular component=plastid chromosome; Biological process=positive regulation of transcription, DNA-dependent
  Homolog annotation: Hit_ID=P0C043; Match level="QueryCoverage=60%, HitCoverage=41%, E-value=3e-16, Identity=27%"; Hit description =Hypothetical PPR-repeat protein At4g17915
  Pfam annotation: Domain name=PPR; Domain location=128-162; Score =18.6; E_value=0.023; Accession=PF01535.11; Description=PPR repeat
  Pfam annotation: Domain name=PPR; Domain location=164-198; Score =31.5; E_value=3e-06; Accession=PF01535.11; Description=PPR repeat
  Pfam annotation: Domain name=PPR; Domain location=199-233; Score=7.0; E_value=1.1; Accession=PF01535.11; Description=PPR repeat
  Pfam annotation: Domain name=PPR; Domain location=22-56; Score=35.2; E_value=2.3e-07; Accession=PF01535.11; Description=PPR repeat
  Pfam module annotation: Pfam domain module=PPR::PPR::PPR::PPR; Domain location=128-162::164-198::199-233::22-56
MLRQSGLRGVPRTSPAESRTALSYTSLIAAYARNALHEEARALLDQMKATGVAPTAATYNTVLAACARATDPPVPFDMLLGLFAEMRHDASPSVRPDLTTYNTLLAAAAEAYVAFNMMTEIGSLPTLETYNALAFAYARGGLFQEAEAIFSRMSNNAGIQKSKDSFDALIEAYCQGSRLDDAVKAYMEMRKSRFNPDERSLEGVLNAYCIAGVIDESKEQFEELQSSVTMPSVIAYCMMLSLYARNDRSREEQRPSLQPRPRAPLLIRSRAQAPCQSRPATCAKPRHSRRRAPNAAQPGAAAPTGLGPVQQPRPSRPSPSSRPYAPPFVAAAPGAALFSATRLFCGETVVRLAHRTHAQARLDVSPFGFIFVVFVH

SEQ ID NO: 72582 - protein, 344 aa, Zea mays
  Coding DNA Sequence Number=SeqID_30803
  Gene Ontology: Mol. function=catalytic activity; Cellular component =cellular_component; Biological process=polyamine biosynthetic process
  Homolog annotation: Hit_ID=Q7XJ04; Match level="QueryCoverage=99%, HitCoverage=84%, E-value=1e-140, Identity=72%"; Hit description =Putative ornithine decarboxylase
  Pfam annotation: Domain name=Orn_Arg_deC_N; Domain location=1-227; Score=240.4; E_value=3.9e-69; Accession=PF02784.7; Description =Pyridoxal-dependent decarboxylase, pyridoxal binding domain
  Pfam annotation: Domain name=Orn_DAP_Arg_deC; Domain location=230 -339; Score=120.3; E_value=5.6e-33; Accession=PF00278.12; Description= Pyridoxal-dependent decarboxylase, C-terminal sheet domain
  Pfam module annotation: Pfam domain module=Orn_Arg_deC_N::Orn_DAP_Arg_ deC; Domain location=1-227::230-339
AWRRGLPDVRPYYAVKCNPEPALLGALAELGAGFDCASRAEIEAVLALGVPPSSIIYANPCKSEPHLEYAAAAGVNLTTYDTEEEVAKVKRCHPRCELLLRLKGPDGSETTCDLGTKYGARADEVVPLLRAVQRAGVTVAGVSFHVGSPVARVGVYRAAIEAARAAFDEAAALGMPPMRVLDIGGGFTAGASFDDAAAVINDALARSFGDLPCVEVIGEPGRYFCETAFTLAARVIGKRTRGEVREYWIDDGLYGSLNNILMDHKVPRPRPLATPRPGDRTHTSTVFGPTCDSQDEVVTGYQLPEMSVGDWLVFDNMGAYSTGSGSKFNGFDTSEIKIYVAYSS

SEQ ID NO: 72583 - protein, 266 aa, Zea mays
  Coding DNA Sequence Number=SeqID_30804
  Gene Ontology: Mol. function=transcription regulator activity; Cellular component=transcription factor complex; Biological process =regulation of transcription, DNA-dependent
  Homolog annotation: Hit_ID=Q8W0W3; Match level="QueryCoverage=73%, HitCoverage=59%, E-value=4e-95, Identity=91%"; Hit description =Transcription initiation factor IIB
  Pfam annotation: Domain name=TFIIB; Domain location=158-235; Score =29.0; E_value=1.3e-05; Accession=PF00382.10; Description =Transcription factor TFIIB repeat
  Pfam annotation: Domain name=TFIIB; Domain location=60-128; Score =55.9; E_value=1.3e-13; Accession=PF00382.10; Description =Transcription factor TFIIB repeat
  Pfam module annotation: Pfam domain module=TFIIB::TFIIB; Domain location=158-235::60-128
MSETVRTKKGGENKEAPNHTSRSCLPHPDLVSSTADADLGTTGSSSAFHIPRFQTYPNGVFGLWSHHMLHEDRANEIYKKVEDLKSIRGRNQDAILAACLYIACRQEDRPRTVKEICSVANGATKKEIGRAKEFIVKQLEVEMGQSMEMGTIHAGNFLRRFCSTLGMNNQAVRAAQDAVKHSEELDIRRSPISIAAAVIYMITQLSEDKKPLKGIDSGESVADISLATGVAEGTIRNSYKDLYPYASRLIPNTYAKEEDLKNLCTP

SEQ ID NO: 72584 - protein, 198 aa, Zea mays
  Coding DNA Sequence Number=SeqID_30805
MSGDHAKKEMETGEKPTTSHGSTSSEESCTKRKEKKKSSSNKGKEKKSSSHHKEKKERSSSHKPHRSGDKHKRMRKVVYYETDTSSTSTSGSDAPSVTSKRQERKLKGKCALGPFLSILVIERQHKCLNVNLCPWMDKVQIKRKVSGVHRTVRCAPDCPVRQTIEGKDGLLNLLSTAPSCLGAIKGTPRRMEEHTKQP

SEQ ID NO: 72585 - protein, 144 aa, Zea mays
  Coding DNA Sequence Number=SeqID_30806
MSSEEARASFSELVVGSPTRTEGETYSSGDMSSEEGAHVTCFTEDLHDVTLHFQIVRFSKQIYVWVGCNTAKFGHLYAAATTRPKGCTLHVPVLKTGLNIVLACNIPKDSPILEAAAERKLVEKLKGLGYIKTPAVGANTSSAQ

SEQ ID NO: 72586 - protein, 594 aa, Zea mays
  Coding DNA Sequence Number=SeqID_30807
  Gene Ontology: Mol. function=catalytic activity; Cellular component =intracellular; Biological process=metabolic process
  Homolog annotation: Hit_ID=Q9LTF4; Match level="QueryCoverage=95%, HitCoverage=94%, E-value=1e-160, Identity=51%"; Hit description =Selenium-binding protein-like
  Pfam annotation: Domain name=PPR; Domain location=189-223; Score =24.9; E_value=0.00029; Accession=PF01535.11; Description=PPR repeat
  Pfam annotation: Domain name=PPR; Domain location=290-324; Score =21.1; E_value=0.0041; Accession=PF01535.11; Description=PPR repeat
  Pfam annotation: Domain name=PPR; Domain location=325-359; Score =24.8; E_value=0.00031; Accession=PF01535.11; Description=PPR repeat
  Pfam annotation: Domain name=PPR; Domain location=360-393; Score=8.9; E_value=0.66; Accession=PF01535.11; Description=PPR repeat
  Pfam annotation: Domain name=PPR; Domain location=84-118; Score=28.9; E_value=1.7e-05; Accession=PF01535.11; Description=PPR repeat
  Pfam module annotation: Pfam domain module=PPR::PPR::PPR::PPR::PPR; Domain location=189-223::290-324::325-359::360-393::84-118
MPAPLILPTVARELAELLVALSAARALPKGQQLHGHLLKAGHVPATASSHALLAHHLLTFYARCALPDLSLRAFLDLPAPPLPAAWSSLISSFAQNGLAAAAFDTFRRMLAAGVPATDRSIPLAAKAVAAAETLSRPPFSPHALHGLAAKTPFAGDVFVGSAIVDMYAKCGHLADARRLFDDMPERNVVSWSALICGYADAGMHPAAMGIFRLALEEAVPVNDYTVSSIIRVCAAATLFELGAQVHARATKTALDASPFVSSSLVSVYSKCGLVECAYRVFNEAPEKNLGIWNAVLIASAQHGHTAAAFERFMEMQKAGFQPNHITFLCLLTACSYAGLVDEGKRYFSIMKDYGIEPQAEHYASMVDLLGRVGLIKEALDLIESMPMEPPESVWGALLMSCRIFKDADTAAIAAKRLFETGSRSSGAHMLLSSTYAAAGRHIDAALARKAMRDAGVRKETGLSWLEAAGEVHTFASNCRRHQRSEEIYKVLENVGEKMEAAGYVADTSAVVKDVDGDEKRATVRYHSERLAIGLGLLIVPHGVPIRVMKNLRVCDDCHNAIKYLTKCTGRVVVLRDNRRFHRFEGGVCSCGDFW

SEQ ID NO: 72587 - protein, 358 aa, Zea mays
  Coding DNA Sequence Number=SeqID_30808
  Gene Ontology: Mol. function=triacylglycerol lipase activity; Cellular component=chromatin; Biological process=lipid metabolic process
  Homolog annotation: Hit_ID=Q8RZ40; Match level="QueryCoverage=96%, HitCoverage=74%, E-value=1e-101, Identity=58%"; Hit description =Lipase-like
  Pfam annotation: Domain name=Lipase_3; Domain location=161-355; Score= 151.3; E_value=2.5e-42; Accession=PF01764.16; Description=Lipase (class 3)
MHRSFLLVCALVATALSTDTTVAAAQSQSQSQSQRSWAELSGRDNWDGLLDPLDGDLRRAVIRYGELAQATSDAFIGDPASPYAGASRYAPGAFLRRAQAPDPDAYNVTRFLYATSSARVPGQFITRPAPPGAWSAESNWMGYVAVATDAGVARLGRRDIVVAWRGTKRAVEWANDLDITLVPAAGVVGPGPGWSQPAVHRGFLSVYASRNSTSRFNKQSAREQEHAFSSCIESCRNGNILGVGVHKNLPRSNKTVLAEIRRLLDAYKGENCSITLTGHSLGAALSTLTAIDIVANGLNVRGPNNDTVPVAAIVFGSPRVGDDQFKKAFDSTPGARLLRVRNAPDVVPPSAQRLLQMS

SEQ ID NO: 72588 - protein, 423 aa, Zea mays
  Coding DNA Sequence Number=SeqID_30809
  Gene Ontology: Mol. function=catalytic activity; Cellular component =intracellular; Biological process=metabolic process
  Homolog annotation: Hit_ID=Q6K1V9; Match level="QueryCoverage=91%, HitCoverage=42%, E-value=1e-172, Identity=73%"; Hit description =Ribosomal protein-like
  Pfam annotation: Domain name=Plant_tran; Domain location=256-366; Score=256.0; E_value=8e-74; Accession=PF04827.5; Description=Plant transposon protein
MNIRQSLLQLNESSSDDDDEISFAEYHIFHQPSHSKRKHDGSIPGHLVKFRDRQAGHARMYQDYLAENSTFSLTDFRRRYRMSRDLFKRIMAAVEDHDDYFKFKFNAASTPGLSCFQKVTAVFRMITYGVAADATDEYVRIGESTVIESLKKFVKAIIKVFGDEYLRAPNEMDTSRLLAIGQERGFPGMLGSIDCMHWRWKNCPSSWHGMYSCHLHEPTIILEVVASQNLWIWHAFFGLPGSHNDINVLHRSPLFSKLAEGQAPQVYYNINGHDYTMGYYLADGIYPSWATFVKTIPEPQGNKRKYFAKAQEAVRKDVERAFGVLQSRFAIVRGPAHFWDQETLGDIMKACVIMHNMIVEDEGEVDPDERFQDGGDNVQPSHDQHPDLDEFIETHRKIRDKETHHQLQQDLVEHLWQHHSDQY

SEQ ID NO: 72589 - protein, 89 aa, Zea mays
  Coding DNA Sequence Number=SeqID_30810
MSPEDATEATGSEETGRPALTNKKWSKRIKWHERTCVATAQEVQWHDDEAVTRRSREHEADGQKKDGARQWRGRLSHPGFGGTKTRTQT

SEQ ID NO: 72590 - protein, 56 aa, Zea mays
  Coding DNA Sequence Number=SeqID_30811
ALPNQQVVDYPSFKLVIVGDGGTGDFLCPSFMPRLFGTQKLENTGTECSNILNPMD

SEQ ID NO: 72591 - protein, 370 aa, Zea mays
  Coding DNA Sequence Number=SeqID_30812
  Gene Ontology: Mol. function=hydrolase activity, acting on ester bonds; Cellular component=cellulose and pectin-containing cell wall; Biological process=lipid metabolic process
  Homolog annotation: Hit_ID=Q8RZ49; Match level="QueryCoverage=94%, HitCoverage=90%, E-value=1e-139, Identity=67%"; Hit description =Lipase-like
  Pfam annotation: Domain name=Lipase_GDSL; Domain location=29-356; Score=159.1; E_value=1.1e-44; Accession=PF00657.12; Description=GDSL- like LipaseAcylhydrolase
MRRGAVLLVSLVLLLINSPVGLCGCFKRIFSFGDSIIDTGNFASTVGSAPIKELPYGMTYFNRSTGRVCDGRVIIDFLRWSNEYVPQALGLPLVPPSIPEEETSPFPTGANFAVFAATALSPDYYRTNYNFTMPSPSHLDLQLQSFKKVLARIAPGDATKSLLGESLVVMGEIGGNDYNFWFFALDSRDTPSQYMPAVVGRIGAAVQEVVNLGARTVLVPGNFPIGCVPQYLSMFQSSSSNASSDYDQYGCLVWFNDFSQKHNQLLRQEVGRLRSQNPGVQIIFADYFGAAMQFVQNPKNYGIDDPLVACCGGDGRYHTGKGCDKSATLWGNPATFASWDGIHMTEKAYSIIADGVLNGPFADTPLLKTC

SEQ ID NO: 72592 - protein, 127 aa, Zea mays
  Coding DNA Sequence Number=SeqID_30813
  Homolog annotation: Hit_ID=Q2QZ53; Match level="QueryCoverage=50%, HitCoverage=16%, E-value=8e-08, Identity=43%"; Hit description =Expressed protein
  Subcellular localization annotation: CTP_CleavageSite=17; ConfidenceScore=5.10e-01
MKDRSAISSRLYLTPTICKTVSLFTFLKKTRTSLTTWNGYICHVSYDVISVIMQRTTMRFIDIVIGWPGSMTFSRLIKCSGFFKLFEAREHLNGSAKVSAEGAEIREFGINSKTIQTFDQKNFQQKT

SEQ ID NO: 72593 - protein, 182 aa, Zea mays
  Coding DNA Sequence Number=SeqID_30814
MTVSPRTIWTMVEVTSARPKGQMSPLSWRWSVEKEVWDGEGEGKTTGSVGKGEGGQIHIITRRGRRRRGWAATRRGGASQRTRLWPACRQAKPACLLPMGLCTWMGCADGKGLQGAGRGWWGRSRRIRLPSMERGSGVMMKGRYEGSTESEAGEGMSRAGARCIGVDNEPARLGSPEFELAR

SEQ ID NO: 72594 - protein, 1040 aa, Zea mays
  Coding DNA Sequence Number=SeqID_30815
  Gene Ontology: Mol. function=ATPase activity, coupled to transmembrane movement of substances; Cellular component=integral to membrane; Biological process=transport
  Homolog annotation: Hit_ID=Q6Y3H9; Match level="QueryCoverage=99%, HitCoverage=100%, E-value=0.0, Identity=82%"; Hit description =Multidrug resistance associated protein 2
  Pfam annotation: Domain name=ABC_membrane; Domain location=103-372; Score=90.3; E_value=5.8e-24; Accession=PF00664.13; Description=ABC transporter transmembrane region
  Pfam annotation: Domain name=ABC_tran; Domain location=404-538; Score= 41.5; E_value=3.6e-11; Accession=PF00005.17; Description=ABC transporter
  Pfam annotation: Domain name=ABC_tran; Domain location=818-1001; Score=143.9; E_value=4.2e-40; Accession=PF00005.17; Description=ABC transporter
  Pfam module annotation: Pfam domain module=ABC_membrane::ABC _tran::ABC_tran; Domain location=103-372::404-538::818-1001
MEEPLLDHESSSLSEATGRRSLFSDAGLFSNITFSWMGPLLDLGKRKTLDLHDVPFLDDSDSVHGITPKFKSKIASISATGQYTDVTTVKLVKSLVLTTWKLIIITAVYALIRTVTSYVGPYLIEHFVDYLNQSTRSTKRGYLLVLAFVAAQLMEGLSSRHLLFRSQQLGLRVHSALIAIIYQKGLALSSQSKQGSSSGELINVVNIDAERVGDFNWSLHELWLLPVQISLAMIILYSTLGLASFAALAACVLTMLANIPLGRIEQNYQEKTMNAKDARMSAMSEILQNMHILKLHGWELVFLSKIKEIRKVEMNWVKKYVYTSSMLISVFFCAPAFVAMITFGTCIIIGIPLETGKVLSALATFRQLQGPIHSLPDAISSIIQTKVSLDRICSFLCLEELASDAVTKLPSGSTDISIKVRNGSFSWQKFSQVPTLQDLDLCVQQGTRVAICGTVGSGERGINLSGGQKQRIQIARALYQDADIFLFDDPFSAVDARTGLHLFKECLLEFLASKTVIYVTHHVEFLPSADLILVMRDGKITQSGDYTEILKSGEDLLELVASHKDALSTLDMLERPIENFESTYHPGGNESNLFIAGDKKDQNEEGDIQNGQLVQEEEREKGRVGFIVYWKYIMMAYNGALVPLILLAQIIFQVLQIGCNFWMAWAAPISENVNPPISSLQMVNVYFALAIVSSLCIFIRSHLLVMTGCKTANILFENMHNCIFRAPMSFFDSTPSGRILNRASTDQSTVDTRIFDLMGYLLFPAIEILGTVILMSHVAWQVFIVFVPIITASLWYQVRYAPQLPFVLKGLTCTLLGGKKTGIVGRTGGGKSTLIQALFRIVDPCIGQVFIDGTDICTIGLHDLRTRLSIIPQDPVMFEGTLRTNIDPLGEYSDEKIWEALDSCHLGDEVRKNELKLDSTVTEKGKNWSTGQRQLVCLGRVILKRRKILVLDEATSSVDPITDSLIQKTLKQQFLKCTMITIAHRITSVLDSDKVLLLDNGEIAEHDAPAKLLEDSSSLFSKLVSEYTMGSDKWRMQESS

SEQ ID NO: 72595 - protein, 63 aa, Zea mays
  Coding DNA Sequence Number=SeqID_30816
MQIMQQEIHFLKNKESILKSANKILQQKECILKAANEVLQQKENEHNEFINNRLVFSGFISIG

SEQ ID NO: 72596 - protein, 103 aa, Zea mays
  Coding DNA Sequence Number=SeqID_30817
MNGGVDSSEPSSPARSTARIYVQTSAAIPWESSESSDDAGGETRAGDPSDSEENSSSEYSESFYSSDGGVGSRLRLLFLPMVEDLGEKKGKRLKEQRRDVKKP

SEQ ID NO: 72597 - protein, 66 aa, Zea mays
  Coding DNA Sequence Number=SeqID_30818
MARWPISVLAWRRRNIASWSGYELGTSELLEDALAGALEDFGDDFGSAAEAMVDILRPTDVVKGSP

SEQ ID NO: 72598 - protein, 184 aa, Zea mays
  Coding DNA Sequence Number=SeqID_30819
  Pfam annotation: Domain name=zf-CCHC; Domain location=38-55; Score =16.5; E_value=0.0019; Accession=PF00098.13; Description=Zinc knuckle
MARLGKALYDKKGKAKQTQPPEDNTTTGVNKPVEGETMVCRLCHKEGHKSYQCKVKTEDKQKLKQKPTSKISNTYINQVDKKAATRYLIKKKKNGKVIAIKANKQANKGKAAKRIWVPKEIISTMKSTKKVWIPRGKSAKCDLHDNGKGMRQHADGPITRSHAPAAEVHGRTELGNGPYSQSQI

SEQ ID NO: 72599 - protein, 238 aa, Zea mays
  Coding DNA Sequence Number=SeqID_30820
MARGAVIDDLYGVGAVIGGVHGDSTGVNRRRRGRHNGEANTGDEARGRYRRSRSRSSTDGKVGPSRQRWKPGWARQPTPSVGDGMDGVGVALGNGNRDGRIVYQVPIVWHFITIHMHMHEKHGYSSGAASTDHLMRMSCKIKRGEFLCKVAVTCMHMQCKSSLLLITTLLPDAVLATSSFLLLLYPTPLMHNFDRCAACCSCANAGRQDGTLRRTFPTILISMLQVFSWHGGGIVRKL

SEQ ID NO: 72600 - protein, 51 aa, Zea mays
  Coding DNA Sequence Number=SeqID_30821
MAHGGSVVTSDVPTRNSFLAARRFGHMRPWSHAEDTREQPDPSMESQMFEI

SEQ ID NO: 72601 - protein, 53 aa, Zea mays
  Coding DNA Sequence Number=SeqID_30822
MAIWRRSLARRSHNSVTTREIRCETLESGTRGVATRVREGTLAGALFNFQIEF

SEQ ID NO: 72602 - protein, 95 aa, Zea mays
  Coding DNA Sequence Number=SeqID_30823
MADLLDLKIWRVRQTGLTKAYGAGQEIARRARVARREESARAHLVGASIGETRDRSPEILRCRGGAPCHGQGNNRIRGQYGFPPRAHFVSRQLRK

SEQ ID NO: 72603 - protein, 253 aa, Zea mays
  Coding DNA Sequence Number=SeqID_30824
  Homolog annotation: Hit_ID=Q7F233; Match level="QueryCoverage=21%, HitCoverage=9%, E-value=7e-13, Identity=63%"; Hit description =Putative PRLI-interacting factor G
MATRHGRDVNLGRGDSNHHPMAATDFDPTSISTRLHCANVGCDGEIDVELKHAREAMAKKGQALHEERDMVKKVALATLDILSVGASRSGLSSSRATTAASHGLSQATVASSSPHSAILAPSPSNCRQRQRGRPRALRSPNRPPREPFGPLLHFVPLNLGWIKKLDQVCYCTRWIKNNNFWVCSSIMFDREVESCLKYIKAVPWNESEEEKLKHVFARCTFDESICKSVGSNIAHHMATHAAADGNFGYFLIS

SEQ ID NO: 72604 - protein, 89 aa, Zea mays
  Coding DNA Sequence Number=SeqID_30825
  Gene Ontology: Mol. function=DNA binding; Cellular component =mitochondrion; Biological process=DNA integration
  Homolog annotation: Hit_ID=Q8W0Y2; Match level="QueryCoverage=97%, HitCoverage=4%, E-value=3e-37, Identity=84%"; Hit description =Putative gag-pol
MEHLGPSSETLSDKKAPGGFKHLLIAIDKFSKWIEVRPLTSIGSEQAVAFFTNIIHRFGVPNSIIIDHGTQFTGKKFLDFCEGHHIRVD

SEQ ID NO: 72605 - protein, 101 aa, Zea mays
  Coding DNA Sequence Number=SeqID_30826
MADGKGGKGKHVQGEGKRKHPTTPPSEDFGDSKFSEENFSSKGNDSPPPAPPSLLSDYSDGLMELSTAERAYIRSIEGAWHNTIRDKVGCISYIRQRRQHI

SEQ ID NO: 72606 - protein, 152 aa, Zea mays
  Coding DNA Sequence Number=SeqID_30827
  Homolog annotation: Hit_ID=Q01H50; Match level="QueryCoverage=89%, HitCoverage=9%, E-value=9e-12, Identity=36%"; Hit description=[I] KOG0140 Medium-chain acyl-CoA dehydrogenase
MSLIASDFSYLPDVSIPGDRAPLVSSKKDGKTSDHRNYFDAQGDADIFFPTDFRLLEQIDHNCAGFSKEQKNPGAFKPVKKRRTIIRIGLKLTDVSAIVQIQLDTAAFMEEFGMPLKTRTKDGYNPLLDDFKNTKFYLSVPTHNVPTHSRRN

SEQ ID NO: 72607 - protein, 733 aa, Zea mays
  Coding DNA Sequence Number=SeqID_30828
  Homolog annotation: Hit_ID=Q8S0A4; Match level="QueryCoverage=94%, HitCoverage=86%, E-value=0.0, Identity=65%"; Hit description=Heavy meromyosin-like
MTGVPFNRFAQLEQFRKKKAAKKANAAGAEQAKVPAPDVEPNQASTSSVPWAVYENGPESASSGAEFLSNAPVNVYTSVGVSSVRPQQDAVTDGGSKFYGNLSFSDLVNGHHENWRGDEARKRDEHSPDKDVQSTSKLSAFGNSSLTLPSTDNMPSWGRISLSSQVHDTKQSSSYSSSTLFGKSENAYSQDYSTKSDTSSQLRDTSKDSSQVEQSLYASTRDYGNAFNSSRTIVTVEHDTNVGITRTSADSAPGVNFERQDPFLSSGYPTTYTRSRPSFLDSIGVQRVPPTTQASYREPAKANQLSHNSNYQSSFVKQSNQQPTSSNAADISFASESQEYSHEKGSYGSSNHPDFSLPKEERSIQHGKQTFQNFATHGKDDDFATLEQLIEDLTKEKFSLQRSLQKSQELAETLATDNSALTDKFNQQAHVISQLTSDMERLQEEIQAQLLSNIQGVLGLVSHTCDVSLALESVRTEYANAQLECSAADERAKVLAAEVILLEDKALRLRSSELKLEKEVEGLHSEISAYRRKVSSLEKERQHLQSTVEALQEEKKLLYSKLRNIPVNERATTVEKPSVDKKDASTVTEDLDTGEISSSETLTSTVDILEDAGTSVLRSNIVSDFPSSEQVSSSIPDDQLRMIDNINSLMSELAVEREELLRALRIESSNCSKLKELNKDLTQKLEVQTQRLELLTSQRMANENALAKPIDTRPINEATMYADEGDESMVPVF

SEQ ID NO: 72608 - protein, 115 aa, Zea mays
  Coding DNA Sequence Number=SeqID_30829
  Gene Ontology: Mol. function=heat shock protein binding
  Homolog annotation: Hit_ID=Q5JN36; Match level="QueryCoverage=97%, HitCoverage=88%, E-value=1e-42, Identity=80%"; Hit description =Magmas-like protein
  Pfam annotation: Domain name=Pam16; Domain location=1-113; Score =23.7; E_value=1e-06; Accession=PF03656.4; Description=Pam16
MGGTVVGRAMLQAYRQAIVKAGARTWDLLVTDDANKTGAAQEAINGIRRASKAMTEQEARQILGISENSTWEEIVQKYDTMFERNNKNGSFYLQSKVHRAKECLEPLYQKPDVLN

SEQ ID NO: 72609 - protein, 151 aa, Zea mays
  Coding DNA Sequence Number=SeqID_30830
  Subcellular localization annotation: CTP_CleavageSite=29; ConfidenceScore=5.16e-01
MAPRKPCDDGDSQLPYGSRGTSARTRPLRQLSLRQAPLLLRQPRHHTSRVPRSLRLPHRHGLLREGWPRGDEDGTGALLGPLASLTRVDACNPPTASAPDLGAGRTRRPRDFHLSHARLRPPRFPPFALAHALDPSGLGHAAHSLVGLGTP

SEQ ID NO: 72610 - protein, 231 aa, Zea mays
  Coding DNA Sequence Number=SeqID_30831
  Homolog annotation: Hit_ID=Q69X40; Match level="QueryCoverage=18%, HitCoverage=2%, E-value=2e-13, Identity=86%"; Hit description =Putative RNA polymerase A(I) large subunit
MTAASAPPIYFCAAPAFCPCRPHAKPDSKDVDEARVTMAPTTPICLRVAPTPRPCRVRVGRGRGGQRQQGGRDGLDTFMLFYTVFSVIDPKCDARDSHVPMSTNQRQDPIQEGQSIGVIANDVDKNGKPHKSRCPPSCGGKTQSCYWGAMFSLEERVPSRSREAWLTYHTLANIILLPREPLHGLNTFHLAGRGDMNVTLGIPRLKEILMTASDNIRTPVMKCPLLEHISE

SEQ ID NO: 72611 - protein, 55 aa, Zea mays
  Coding DNA Sequence Number=SeqID_30832
  Homolog annotation: Hit_ID=Q6AUI3; Match level="QueryCoverage=63%, HitCoverage=4%, E-value=2e-14, Identity=100%"; Hit description =Putative nucleotide excision repair protein XP-D
YSRHDKRSKLPGWILSHLHDAHLNLSTDMALHIAREERYSIRFVAFTTYNLHGPL

SEQ ID NO: 72612 - protein, 622 aa, Zea mays
  Coding DNA Sequence Number=SeqID_30833
  Gene Ontology: Mol. function=sucrose-phosphatase activity; Cellular component=cytoplasm; Biological process=metabolic process
  Homolog annotation: Hit_ID=Q84ZX8; Match level="QueryCoverage=70%, HitCoverage=100%, E-value=0.0, Identity=96%"; Hit description =Sucrose-phosphatase
  Pfam annotation: Domain name=Hydrolase_3; Domain location=197-442; Score=-44.1; E_value=0.00013; Accession=PF08282.2; Description =haloacid dehalogenase-like hydrolase
  Pfam annotation: Domain name=S6PP; Domain location=193-447; Score =528.5; E_value=7.3e-156; Accession=PF05116.4; Description=Sucrose-6F- phosphate phosphohydrolase
  Pfam annotation: Domain name=S6PP_C; Domain location=448-592; Score =189.2; E_value=1e-53; Accession=PF08472.1; Description=Sucrose-6 -phosphate phosphohydrolase
  Pfam module annotation: Pfam domain module=Hydrolase_3::S6PP::S6PP_C; Domain location=197-442::193-447::448-592
MAAPTQRLSALPEQRSMPGYALTGATSEAGRARRIRTAPVPWSGQRPHAKKRQARDVPWPRSGWVVLAHQGCQGSLLRALVGDERFVVAEWSLTVAATDVHHGGSSPDSTPPTMGCRLRRAHAGPEPAAFVRSMEISHRRLQSDCHDRNRSVESKGADNVLKENSVYIQVKGCVLKGQSELSLAEMDRLDGSARLLLVSDLDQTMIDHDDRENLSLLRFEALWEAEFAQDSLLVFSTGRTPVSYKGLRRDKPLVTPDVTIMSVGTVIAYGEEMVRDVGWEERLDSDWDRAVVVEETARLPQLTRMQPERNQGPHKVSFFVDKQGAQEVMDYLPKKLERRGVDVKIVYSSGNALDVLPRGAGKGQALVYLLKKLDSNGKPPKNTLVCGDSGNDAELFGVPSVHGVMVCNAQEELVQWYQENARDNPRIIQATERCAAGIMQAIGHLGLGPNVSARDLVGFPAYYPNNNKKGAAATAKPADVVVRFYVLYEKWRRGELPSSNYFSSSSAMRYLKSITHPNGTIIHPCGSERSLHASVDALLSSCYGDKKNFRVWVDRLVTSPIGTSSWLARFDSWEMEGGVRYCCRTTILLNIKPESPEGLELTHIHKTWVQGHSAGPGSALVF

SEQ ID NO: 72613 - protein, 321 aa, Zea mays
  Coding DNA Sequence Number=SeqID_30834
  Gene Ontology: Cellular component=nucleus
  Homolog annotation: Hit_ID=Q6AUH9; Match level="QueryCoverage=97%, HitCoverage=56%, E-value=1e-131, Identity=76%"; Hit description =Unknow protein
  Pfam annotation: Domain name=CRS1_YhbY; Domain location=80-164; Score= 110.3; E_value=5.6e-30; Accession=PF01985.11; Description=CRS1  YhbY domain
MSTKGRTMRTKVEKRMARETGRTQRELRRAVKLRKKLMTEDEKFIYNLRRAKKKVALLLQKLKKYELPDLQAPRHDPELLTAEQLQAYKKIGFRNRNYVPVGVRGVFGGVVQNMHMHWKFHETVQVCCDNFPKEKIKEMAAMLTRLSGGIVINIHNTKTIIMFRGRNYRQPKNLIPFNTLTKRKALFKARFEQALESQKLNIKKIETQLRRKGINPEDPVAMASIQRVASTFFRAIDEQQGTPYIFRGDAQASAGTPEIKEPRDEPSEDSDQEELDRFISEIETAAEKQWEEEEAAEKEESSRMRCWEREDVGDRRECVKL

SEQ ID NO: 72614 - protein, 195 aa, Zea mays
  Coding DNA Sequence Number=SeqID_30835
MSLETIERMLGSFGEATSIARVSMTRDFVPFGHVELEQLRARAAHLEVDRLQGEASSLRTEHDVARGDANRLREERSQLQGVLRETRALVEEAKSTLTLMRNGVVMDQPILFPKPNKKVRSEKKMDHFIPQIKHTLREANARLEGANSELLKERNAVEDGFASGQSDEDLDNIEEQVRPCLVDHGLGQPDVPHES

SEQ ID NO: 72615 - protein, 94 aa, Zea mays
  Coding DNA Sequence Number=SeqID_30836
MARQKPIYEYSGVLDPDRHSTDPLALSKIEARVRVVIALSSGFFMEEDSPLPLSKDVSSSLLEVSASHIQNNKPSRADNTCSAGDLDSAHDHTT

SEQ ID NO: 72616 - protein, 615 aa, Zea mays
  Coding DNA Sequence Number=SeqID_30837
  Gene Ontology: Mol. function=hydrolase activity, acting on acid anhydrides, in phosphorus-containing anhydrides; Cellular component =nucleus; Biological process=nucleobase, nucleoside, nucleotide and nucleic acid metabolic process
  Homolog annotation: Hit_ID=Q6AUI3; Match level="QueryCoverage=99%, HitCoverage=85%, E-value=0.0, Identity=82%"; Hit description =Putative nucleotide excision repair protein XP-D
  Pfam annotation: Domain name=DEAD; Domain location=18-269; Score= -42.7; E_value=0.023; Accession=PF00270.19; Description=DEADDEAH box helicase
  Pfam annotation: Domain name=DEAD_2; Domain location=72-259; Score =233.8; E_value=3.9e-67; Accession=PF06733.6; Description=DEAD_2
  Pfam annotation: Domain name=DUF1227; Domain location=260-398; Score =190.6; E_value=3.7e-54; Accession=PF06777.2; Description=Protein of unknown function (DUF1227)
  Pfam module annotation: Pfam domain module=DEAD::DEAD_2::DUF1227; Domain location=18-269::72-259::260-398
MRFDLDGLPVHFPYAAIYPEQHAYMGELKRALDARGHALLEMPTGTGKTAALISLITSYSLANPARPLRLIYCTRTVHEMEKTLAELRLLFAHLPPAASRSLLALGLSSRKNLCIHPQASAAAARDSVDTACRRLTASWVREKASSDPDSTPLCEFYETFDRAAAAGDLASFMPPGVYTLADLRALGRERRVCPYFLARQMVKYANVVVYSYQYLLDPKVASIVSREMQKECVVVFDEAHNIDNVCIEALSVSIRKQTLEGAERNLRRISQEIDSSQYYASCDEVSDAWLANPSLPDDILKEAVPGNIRRAEHFLAVLRRLVRFLDGRLETENVENEMPVSFVASIHSQAGIDQKMLRFCYDRLHSLMMTLEITDTDEFMHIQTICDFATLIGNLYTGLFYYNRALSCHDASLAIRPVFDRFETVVITSGTLSPIDLYPRLLNFNPVISRSFTMSLTRDCICPMVLTRGSDQLPVSTKFDMRSDPGVVRNYGRLLLEMASAVPDGIVCFFVSYSYMDGIVNSWHEMGILQDIMQHKLVFIETPDVVETTLALDNYRKACDCGRGAIFFSVARGKVAEGIDFDRHYGRLVIMFGVPFQYTLSRIFSRLEYLRETFR

SEQ ID NO: 72617 - protein, 54 aa, Zea mays
  Coding DNA Sequence Number=SeqID_30838
MAKARKTSETSDSGENNGAGVRRIWGGGVCFHTLRPRMGWHGGGGMRGERKEVG

SEQ ID NO: 72618 - protein, 164 aa, Zea mays
  Coding DNA Sequence Number=SeqID_30839
MSYLEIFVGTLTFVGICALRIACPKARGPGLDGLGLHWCLRSGGYSTSSCSRHRLLRRYRPGGYRPYFRYPDPGYPTAALEPSKCYVNGDTNTCRSLVYIPAQERSSRSRHNTPTAIGPAGSTQEQAKAQGKMRLTGMAIPHCVTASWVPDRILPVSDLEYPGA

SEQ ID NO: 72619 - protein, 254 aa, Zea mays
  Coding DNA Sequence Number=SeqID_30840
  Gene Ontology: Mol. function=hydrogen ion transporting ATP synthase activity, rotational mechanism; Cellular component=proton -transporting two-sector ATPase complex; Biological process=ATP synthesis coupled proton transport
  Homolog annotation: Hit_ID=Q9XGM1; Match level="QueryCoverage=99%, HitCoverage=100%, E-value=2e-39, Identity=39%"; Hit description =Vacuolar ATP synthase subunit D
  Pfam annotation: Domain name=ATP-synt_D; Domain location=15-205; Score=116.2; E_value=9.3e-32; Accession=PF01813.8; Description=ATP synthase subunit D
MAGQGQRLNVVPTVTTLGTVKARLAGAARGHALLKKKSDALTVQFRAILRRIVSAKDAVGDAMRTASLSLAEALYAAGAPLRHAAQQSVSGPARLRVRAHQDNIAGVRLPRFESCLGAADGSSSPASLAGLARRRAAGVGLPRGARARAPGAGGSWRRLQTSFLALDAAIKTTNRRVNALESVASWDEHEREEFFRLKKIQGYKQRELERQKEAASRYAEEKAAGEVALKRGVSVATAESMLENGDRDEEDIIF

SEQ ID NO: 72620 - protein, 293 aa, Zea mays
  Coding DNA Sequence Number=SeqID_30841
  Homolog annotation: Hit_ID=P49964; Match level="QueryCoverage=15%, HitCoverage=52%, E-value=2e-08, Identity=54%"; Hit description =Signal recognition particle 19 kDa protein
KAPERARRAPARECSSTPREGERVGALGESLGSLAARSNRPGRRRRLDLRRVGWCRRKKLGRRPGYTEQRLDARGPHKGRSAAALLLPTLWRSALTWPRRSASPEAGVRRGALRRVLAREKRAAVSGPAAALFWEDAAAAESVATHDGIFGTEYNIRIDRGAVIFRELHPDPPHLEEIPRVGFGQALAAAALGDRLLGVEFVRGRPSFPFTSDLLAPRVVLAPPPLKFSAAVDAACDTVSASAAACVVAGDLYATSSVGDIGQNTIRVDYASSYGCSIIEPSYGAYGCLLLFH

SEQ ID NO: 72621 - protein, 402 aa, Zea mays
  Coding DNA Sequence Number=SeqID_30842
  Gene Ontology: Mol. function=RNA-directed DNA polymerase activity; Cellular component=membrane; Biological process=RNA-dependent DNA replication
  Homolog annotation: Hit_ID=Q7F805; Match level="QueryCoverage=97%, HitCoverage=39%, E-value=2e-96, Identity=44%"; Hit description=Oryza sativa (japonica cultivar-group) genomic DNA, chromosome 1, PAC clone:P0433F09
MRNFSLAGRLTLVKTVITSQAIYMLSALNAPKEIRNLLDSKRRQFLWAGSDRLTGGKCKVNWKRVARPKALGGLGVSHLGAFARALRLRWLWQICTSPYNAWGNLETPCTNVDCLLFAASTEIKIGDGSKISFWDSAWAGGRRPKDLAPSLFSISRHKGKSLAGAVRDNAWITSLALLGSVITTHHLHEFFILWSEVQKIQLDPGAQDIITWKFTADHRYSVKSAYLAQFLGSVRTNLDLIIWKNWAPPKCKFFSWLAIQNHIWTADRLATRNWPHSPTCVLCQGVLESGLHLFVECWFTKQIWEEIAVWVAIEDLKPSNWELSHTLMHWWENLAMISGCSRKGLRSLLILVNWIIWRERNARTFDHRFSSSQQIITLIKCDAVAWIAAGAKQLATLLSSST

SEQ ID NO: 72622 - protein, 111 aa, Zea mays
  Coding DNA Sequence Number=SeqID_30843
  Gene Ontology: Mol. function=electron carrier activity; Cellular component=membrane; Biological process=electron transport
  Homolog annotation: Hit_ID=Q851Z0; Match level="QueryCoverage=87%, HitCoverage=79%, E-value=2e-42, Identity=82%"; Hit description =Putative basic blue copper protein
  Pfam annotation: Domain name=Copper-bind; Domain location=7-101; Score=-9.9; E_value=0.0095; Accession=PF00127.11; Description=Copper binding proteins, plastocyaninaz
  Pfam annotation: Domain name=Cu_bind_like; Domain location=18-96; Score=146.7; E_value=6.3e-41; Accession=PF02298.8; Description =Plastocyanin-like domain
  Pfam module annotation: Pfam domain module=Copper-bind::Cu_bind_like; Domain location=7-101::18-96
MPTSRESAVFTVGDRGGWSFSTSTWTNGKRFKAGDVLVFKYDSTAHNVVAVNAAGYKGCSAPRSAKVYTSGNDRVTLARGTNYFICSIPGHCQSGMKIAVPRATYIYLSTA

SEQ ID NO: 72623 - protein, 683 aa, Zea mays
  Coding DNA Sequence Number=SeqID_30844
  Gene Ontology: Mol. function=structural constituent of ribosome; Cellular component=intracellular; Biological process=translation
  Homolog annotation: Hit_ID=Q2QT41; Match level="QueryCoverage=97%, HitCoverage=93%, E-value=1e-101, Identity=34%"; Hit description =Expressed protein
  Pfam annotation: Domain name=DUF594; Domain location=615-675; Score =30.6; E_value=4.6e-07; Accession=PF04578.4; Description=Protein of unknown function, DUF594
MAFRPLEVWNRWAIQILLLLSLGMHVLLLPLAGIRRRRAPMLLRVPLWLAYHLADTVGIYAIGLLSLSSAVRDHRLMPFWAPFLLLHRGGPDSIGAYAFHDNQLWLRHLQVFVVKVLAVTYVLYIHLPRPPAARGDTFLVLAALLMWAVGVAKYGEKVAAIRGGNKSSIRSSLTKEPPAARHHHIHHWDHGLPSKDAAVDEEEAYLRQAHHMFHISKRAAVDSWLEKDPEHNTLEMLRALRKQDGRGMWAFAELQLSLLYDVLYTKAAVIHTWPGYLVRLASSLAVAASFLLFRFSDGGRRYEVDVVVTYVLLVGAFGMEMVSVLNALGSSWAYAFLCTTRWSWLRYAALCTGRWDRLRQLVKTIQGRSGSIRRWSGEMGQYSMLHFCSRHTRAHRPLAGRMAMALGFEDWWNRKHYSATTHISDDLRQGLFRYVQRLTETGLNSQGVIRKSWGQEALEREDKDLYERIKRDRNLGVEFQEGVIIWHIGTDIFLARSSLEAGDLLLVKSIRTLSNYMMFLLVNHPNMLPGLAQSMVYRRTCDNLADRCRDHQQGHRISRDLGTVLRQMFSLQDGPASVTGQPSHVYELASNVYEEKPKYSQSVPRLCYAHGVAVELLARVKEKGVEAVLRLVLDVWMDFVVYAANRCSRESHAKKLGSGGELTSVVWIMTDFLNQEAYARRKD

SEQ ID NO: 72624 - protein, 160 aa, Zea mays
  Coding DNA Sequence Number=SeqID_30845
MAGNKGKGKHDQGEGKRKRPPSPPLDDFGDLEFSEEHFSSKGDDSPLPAPLSPLFDYSGDSMGLSVAERAYIRSVEREEDSEGEDYEEDDSEEEDGGGDGSDYEGGDKGGSSGNEGSAGVSGAGGGDDNDYDDGDESGEGRGNDDSNGNDDSVGGRAPPA

SEQ ID NO: 72625 - protein, 182 aa, Zea mays
  Coding DNA Sequence Number=SeqID_30846
MRERMEASLSKSPESRQERRSRGVAEHSRDSERYRSIQGKGTNRGLSWVTGDEAKLTEATDMARARRRPQNKHGTTTDSDDVFAGARDVRSCVQTVGRDASDKRSPWTSESGRANGHSALTRGSHGIEREQGACANETGADRSAPPGRGRGGVRARERGLALIGGAHLSGRVSARVRLAGLS

SEQ ID NO: 72626 - protein, 122 aa, Zea mays
  Coding DNA Sequence Number=SeqID_30847
  Subcellular localization annotation: CTP_CleavageSite=93; ConfidenceScore=5.52e-01
MRSPPPLLSATPSPFLHGFLVRAHSPGAASGRATRPYWRPSLRGRPAGHIASVSASSSHPRLADQQLLGCSSMSRHDPVERLHPCSILVNVVRQSSVSPWDTSSHYYRRCAAGSTSLPSSPR

SEQ ID NO: 72627 - protein, 434 aa, Zea mays
  Coding DNA Sequence Number=SeqID_30848
  Gene Ontology: Mol. function=protein serine/threonine kinase activity; Cellular component=membrane; Biological process=protein amino acid phosphorylation
  Homolog annotation: Hit_ID=Q8LLI3; Match level="QueryCoverage=94%, HitCoverage=50%, E-value=1e-117, Identity=53%"; Hit description=S -locus receptor-like kinase RLK13
  Pfam annotation: Domain name=B_lectin; Domain location=69-181; Score =117.1; E_value=5.1e-32; Accession=PF01453.15; Description=D-mannose binding lectin
  Pfam annotation: Domain name=PAN_1; Domain location=344-423; Score =4.0; E_value=0.064; Accession=PF00024.16; Description=PAN domain
  Pfam annotation: Domain name=PAN_2; Domain location=335-404; Score =112.6; E_value=1.1e-30; Accession=PF08276.2; Description=PAN-like domain
  Pfam annotation: Domain name=S_locus_glycop; Domain location=194-323; Score=50.4; E_value=6.1e-12; Accession=PF00954.11; Description=S -locus glycoprotein family
  Pfam module annotation: Pfam domain module=B_lectin::PAN_1::PAN_2::S _locus_glycop; Domain location=69-181::344-423::335-404::194-323
MAMVYIRSAFILIFLSSPCQSNDQLTQTKPLLLEDTLISEGGDFALGFFSPTNSSKKLYIGIWYHRVTERTVVWVANRDNPITTPSAMLAITDNLELVLSDSQGHTLWMATGNTSGDAGGAASAVLLNSGNFVLRLPNGTEVWHSFDHPTDTILPTMRILLSFKTQPATRLIAWKGPDNPSTGDISSGMDSTNLQMFIWKGALPYYRFPVVNDMAVAGAMYQQSNGNAAIMYETRVNAGDALYYTYTVSSGSPYTRFSLDYTGKGRLLSWNSTTSSWTVIIEHPHSCDLYASCGPFSYCDQMGPLPTTCQCPDGFELLNSLNFSRGCRRKEELKCGVGNYFMAMSSMKLPDKFLHIKNRTFDQCADECTRNCSCMAYAYANLSSIGAVGDTSRCLVWSGDLIDMEKNSFSEVLYIRLGGSGTCIPNTSSFFRQR

SEQ ID NO: 72628 - protein, 352 aa, Zea mays
  Coding DNA Sequence Number=SeqID_30849
  Gene Ontology: Mol. function=protein serine/threonine kinase activity; Cellular component=membrane; Biological process=protein amino acid phosphorylation
  Homolog annotation: Hit_ID=Q8LJZ0; Match level="QueryCoverage=92%, HitCoverage=41%, E-value=1e-125, Identity=63%"; Hit description =Receptor-like kinase
  Pfam annotation: Domain name=Pkinase; Domain location=57-307; Score =145.8; E_value=1.2e-40; Accession=PF00069.15; Description=Protein kinase domain
  Pfam annotation: Domain name=Pkinase_Tyr; Domain location=57-307; Score=118.3; E_value=2.2e-32; Accession=PF07714.7; Description =Protein tyrosine kinase
  Pfam module annotation: Pfam domain module=Pkinase::Pkinase_Tyr; Domain location=57-307::57-307
MLGALVWTCKSRGKRQKKRVQKRRMLEYLSSTDDAGDKNINFPFISFENIVTATDNFSESNLLGKGGFGKVYKGMLEGTKEVAVKRLSTGSGQGKEEFKNEVVLIAKLQHKNLVKLLGCCIHEDEKLLVYEYLPNKSLDYFLFASARKSMLQWPTRFKIIQGVARGIMYLHHDSRLTVIHRDLKASNILLDKEMNPKISDFGMARIFSGDQLQANTNRVVGTYGYMSPEYAMKGAFSVKSDTYSFGVLILEIAWNMWKDGKPEDFLDSSVTESCSLDEVSRCIHIGLLCAQDNPSCRPLMSTVVSMLENKATPLPTPKQPKDFALRDYNPGNEGVHRELSVNDTSLTMVEGR

SEQ ID NO: 72629 - protein, 100 aa, Zea mays
  Coding DNA Sequence Number=SeqID_30850
MASSALRSNRSWAAYIPMEGRVRVGGARLRNEVGRRRRGRGLRPPQLAQGGLLGDSCTAGQLRTRSDCRDKLAVASSAASREYFFFFHSCLRIHHPRLAA

SEQ ID NO: 72630 - protein, 455 aa, Zea mays
  Coding DNA Sequence Number=SeqID_30851
  Homolog annotation: Hit_ID=Q2R211; Match level="QueryCoverage=87%, HitCoverage=83%, E-value=1e-120, Identity=53%"; Hit description=F -box domain containing protein, expressed
  Pfam annotation: Domain name=DUF295; Domain location=360-420; Score =31.4; E_value=3.1e-06; Accession=PF03478.8; Description=Protein of unknown function (DUF295)
  Pfam annotation: Domain name=F-box; Domain location=55-101; Score =22.2; E_value=0.0019; Accession=PF00646.23; Description=F-box domain
  Pfam module annotation: Pfam domain module=DUF295::F-box; Domain location=360-420::55-101
MTTFSKASRLCGAVTMQSKQLWSLLLSRILPKLLGFPGILLKKFRKEGVMELDAAALPELPQDVLMDIFGTLEVPDLIRAGSVCSSWHATYKCLLDLRQYKQPQTPCLFYTCESAGSNVGFLYSLKENRSYKLTLPEPPIRSRLLIGSSNGWLITADERSELHLMNPITGEQVALPSVITIEHVKPIFDASGTIHMYELSYETPPDLFDLGDLRDELYFKAFVFPDPSTTGSYIVVLIHEPYSRLSFARPGDDKWTWVGQGSQYKDCTYVDGLLYTVNYSGEIDAFDFTASPVKMTVIMKELKYPVCENMYIIQAPWGDLLHVWRTLGVPPNAPPWVPGKCLFETLKIQVHKVDLEAKQRVEINRLQCDSVLFLGHNDSLCLSAQVHPELKSNHAYFTDDFKEVTVLFKNCIRDMGVMDLENSVNKEIVSQIWSNWPCPTWITPNLMKLNQAFNR

SEQ ID NO: 72631 - protein, 110 aa, Zea mays
  Coding DNA Sequence Number=SeqID_30852
  Gene Ontology: Cellular component=plastid; Biological process =peroxisome organization and biogenesis
  Homolog annotation: Hit_ID=Q2QV42; Match level="QueryCoverage=99%, HitCoverage=26%, E-value=1e-36, Identity=66%"; Hit description =Lysine and histidine specific transporter, putative, expressed
MPVFDMLETFLVKKLRFKPGMPLRLIARSLYVVLTALVGIAVPFFGGLLGFFGGFAFAPTTYYIKKPKKFSLSWFINWFCIIVGVLLTVLAPIGGLRSIVVNASTYKFFS

SEQ ID NO: 72632 - protein, 351 aa, Zea mays
  Coding DNA Sequence Number=SeqID_30853
  Gene Ontology: Mol. function=protein serine/threonine kinase activity; Cellular component=membrane; Biological process=protein amino acid phosphorylation
  Homolog annotation: Hit_ID=Q8LLI3; Match level="QueryCoverage=71%, HitCoverage=41%, E-value=4e-89, Identity=54%"; Hit description=S -locus receptor-like kinase RLK13
  Pfam annotation: Domain name=Pkinase; Domain location=118-304; Score =33.2; E_value=1.5e-10; Accession=PF00069.15; Description=Protein kinase domain
  Pfam annotation: Domain name=Pkinase_Tyr; Domain location=118-306; Score=20.7; E_value=9.7e-14; Accession=PF07714.7; Description =Protein tyrosine kinase
  Pfam module annotation: Pfam domain module=Pkinase::Pkinase_Tyr; Domain location=118-304::118-306
MGELIDAEKLSNTFGENLYFRVPTSPELKDFTSSPCKALNAHVTKMSCSQKNHLSNVRCGQNEMFFKCFLFVDHIYAVSKKKSTVLKIVPVATANLGLKNLDLPSVSFEDIITATNNFSEHKLLGEGGFGKVYKGVLEGGKEVAIKRLSKGSVQGIQEFINEVILIAKLQHRNLVRLLGFCIHEDEKLLIYEYLPNRSLDAFLFDMCPKISDFGTARIFSGSEQQVNTTRVAGTYGYMSPEYAMEGSFSVKSDTYAFGVLLLEIAWSLWKDGNALELVDSSISLGLLCVQDPPNARPLMSSIVFMLENETAPLPTPEEPLYFTVRNYGTDRSNEYMQRSLNNMSITTLEAR

SEQ ID NO: 72633 - protein, 710 aa, Zea mays
  Coding DNA Sequence Number=SeqID_30854
  Gene Ontology: Mol. function=protein serine/threonine kinase activity; Cellular component=membrane; Biological process=protein amino acid phosphorylation
  Homolog annotation: Hit_ID=Q8LLI3; Match level="QueryCoverage=98%, HitCoverage=91%, E-value=0.0, Identity=52%"; Hit description=S-locus receptor-like kinase RLK13
  Pfam annotation: Domain name=B_lectin; Domain location=69-185; Score =103.5; E_value=6.4e-28; Accession=PF01453.15; Description=D-mannose binding lectin
  Pfam annotation: Domain name=PAN_1; Domain location=337-418; Score =2.2; E_value=0.095; Accession=PF00024.16; Description=PAN domain
  Pfam annotation: Domain name=PAN_2; Domain location=337-406; Score =109.5; E_value=9.6e-30; Accession=PF08276.2; Description=PAN-like domain
  Pfam annotation: Domain name=Pkinase; Domain location=507-702; Score =16.6; E_value=1.5e-09; Accession=PF00069.15; Description=Protein kinase domain
  Pfam annotation: Domain name=Pkinase_Tyr; Domain location=507-699; Score=-5.0; E_value=3.7e-12; Accession=PF07714.7; Description =Protein tyrosine kinase
  Pfam annotation: Domain name=S_locus_glycop; Domain location=199-326; Score=29.4; E_value=2.6e-07; Accession=PF00954.11; Description=S -locus glycoprotein family
  Pfam module annotation: Pfam domain module=B_lectin::PAN_1::PAN _2::Pkinase::Pkinase_Tyr::S_locus_glycop; Domain location=69-185::337- 418::337-406::507-702::507-699::199-326
MAYLYLPVFIFLLSMACSCQSDDRLTPAKPLLPGDMLISHGGVFALGFFSLTNSSSSSYVGIWYNNIPERTYVWIANRDNPITTDVPGTKLAFTNSSDLVLLDSTGHTIWMTRSSISAGGGGTAAVVLLDSGNLVIQSIDGTAIWESFDHLTDTVIPGVSLSLSSSDAAASARRLVAWKGPDDPSSGNFSMGGDSSSDLQIVTWNGTRPFWRRAAWGGEVTFGTFEDNTSFTMYETITGGTGDDYYIKLTVSDGAPIIRVSLDYTGLFTYRRWNLKTSSWTVFVQFPSSACDRYAFCGPFAYCDSTETVPSCKCLDGFEPIGLDFSQGCRRKEELKCGDGDTFLTLPTMKTPDKFLYIKNRSFDQCTAECSNNCSCTAYAYDNLQNVDSTIDTTRCLVWMGELIDAEKFGNTFGENLYLRVSSSPVNKMKNTVLKIVLPAMITFLLLTHMHMASMQVKRCSFLLGKHQTGNVQNNLLCLNPPNEFGNENLDFPSFSFEDIIIATNNFSDYKLLGEGGFGKVYKGVLEGGKEVAVKRLSKGSVQGIQEFRNEVVLIAKLQHRNLVRLLGFCIHEDEKLLIYEYLPNKSLDAFLFDMCPKISDFGMARIFGGSERQVNTTRVAGTYGYMSPEYAMQGSFSVKSDTYAFGVLLLEIVSSLKISSSLINFPNLIAYAWSLWKDGNAWELVDSSISVSCSLQELRTITLAIRACT

SEQ ID NO: 72634 - protein, 152 aa, Zea mays
  Coding DNA Sequence Number=SeqID_30855
MINPNGDKVDDANDKIPTPIVVKKKDESHGYLLNGMKNNKKTRRMFGYKIKPPKPQAEAPKLMNTQTRESNQAHLFNMKTINQPSSAGNQAKLTHREVKASGDCFYCKEEWYFNRQCLNKRLDRLEKKASKHNSIGDNQEEVVFTRSKYKII

SEQ ID NO: 72635 - protein, 76 aa, Zea mays
  Coding DNA Sequence Number=SeqID_30856
MGFKVVLGIARTTQIGGGVTVAKAQRNPCGVVVEQHNVDPRQIVLSPTLIKKSGANPSGFHQREDAFLLPPRSVGG

SEQ ID NO: 72636 - protein, 52 aa, Zea mays
  Coding DNA Sequence Number=SeqID_30857
MCKGLYITQQVRRVRKLVGLTEIHLGSWNVASFTGVSVGINKPKLRKQSGGN

SEQ ID NO: 72637 - protein, 208 aa, Zea mays
  Coding DNA Sequence Number=SeqID_30858
  Gene Ontology: Mol. function=protein phosphatase type 2C activity; Cellular component=intracellular; Biological process=translation
  Homolog annotation: Hit_ID=Q33AD5; Match level="QueryCoverage=41%, HitCoverage=12%, E-value=5e-13, Identity=47%"; Hit description =Expressed protein
MERLGAPVLCNFQLGDNRRPQPLVLDTPALDVWASGRWRSILLWFVTRVVWLAYQGAEIAATGALGSLSLSGSDGSAEEQQVIAFWALFLLLHLGGPDTMAAYALEDSALSVRKFLEMVFQVGGAFYAQYKYIYRARTWTPLATASAIMLPIGIVRYVEKWYALWKSKSMMEEEEGPGKKFSAKKFRENRKSRLSVEPGFLFIGRNFH

SEQ ID NO: 72638 - protein, 410 aa, Zea mays
  Coding DNA Sequence Number=SeqID_30859
  Gene Ontology: Mol. function=protein phosphatase type 2C activity; Cellular component=intracellular; Biological process=translation
  Homolog annotation: Hit_ID=Q2QT41; Match level="QueryCoverage=82%, HitCoverage=59%, E-value=1e-15, Identity=31%"; Hit description =Expressed protein
  Pfam annotation: Domain name=DUF594; Domain location=291-349; Score =39.7; E_value=9.8e-09; Accession=PF04578.4; Description=Protein of unknown function, DUF594
MGSACAKVVEMELSLMYEALYTKAIVLHTCPVAGYLNRLVSPLATAAAVLLFNQYIGSRSRRAIIIRRSFVDITYLLLVVAFAMDQMWLLRALGLPGHIRTLWGQQALEDAKTNLFGRGRKNGRKTSNKKPKLPSFGREFEEDVLMWHMATCILFSSSSGKESIVSIPGGSSADAADAHVTAIKVMSEYLMFFVAVRRHMLPGLVLHSLLEKIRQTLHEIWDGGKKKTTGGSSSSSSSSTAAKDTPPPQDRLAEMLLERLKAGRRWFDRNEGRLVVGNAAALANTLIETGISVQKRRQVPQLLEFIFNVWVDKLLYAAARCSVESHAKQLSRGGDLTTILWLIAQHAGLFRIGELKPKEEKEVEKKEEEEEMKSFWPRSKPAYPVHYFEDDEESDNAEEDDDMTRHVILY

SEQ ID NO: 72639 - protein, 154 aa, Zea mays
  Coding DNA Sequence Number=SeqID_30860
MGLTRKSAHLRCGALGPTGRHAALTCGALQSARRSHESELVLPIGRTPWMPGGATLVGSSLALSWALHEAGFRADLCASNADSSTELPWYHKAMRRGLSFFPFSPSNPNRRYRIGGFVGVRDVPRFVSARPVTSRSTPTFGWGRGTPLLCHLMG

SEQ ID NO: 72640 - protein, 94 aa, Zea mays
  Coding DNA Sequence Number=SeqID_30861
MEGLIPFIYRAVVRYRKEEGRVSLGDLFFDEPSSPTSYFRLPGGADSARYQQVTSSDLLTSQTTTSTASSGAAGVARRRSPMRRYSKRRGFSLE

SEQ ID NO: 72641 - protein, 71 aa, Zea mays
  Coding DNA Sequence Number=SeqID_30862
MAQRLGLLLDEPDGPRVHRGGGVRRRRLDLAPGRDPVTEERDPRVCLGFDRPTKTPEPKKGILPHTRMVLL

SEQ ID NO: 72642 - protein, 155 aa, Zea mays
  Coding DNA Sequence Number=SeqID_30863
  Gene Ontology: Mol. function=protein serine/threonine kinase activity; Biological process=protein amino acid phosphorylation
  Homolog annotation: Hit_ID=Q8LQH1; Match level="QueryCoverage=47%, HitCoverage=8%, E-value=1e-14, Identity=67%"; Hit description =Putative S-receptor kinase
MRARNGPYTGRSHIHSVRCTSYADRMVATTLTQMLRAQMLGALRIVSWEKAPLAQCSEVNFLQAQAPLPIAVKRLDGFQHGDKQFRAEVSTVGMINHVMNLVRLLGFCAKNTSRLLDYESDTGSLFPCWAAIQQVYSWILLEGTEQPSSRFNFIP

SEQ ID NO: 72643 - protein, 113 aa, Zea mays
  Coding DNA Sequence Number=SeqID_30864
MAHSAGDETAQGGLPCEVTANKNLTNLLKAMLTFNPYLLVSLTIHMNSHLCIAGNFSMYHHKMVNTRKGGRIDLPANPHNRRIVRQQQAKMNPLNPVVATQMQMLQQMSNTTT

SEQ ID NO: 72644 - protein, 48 aa, Zea mays
  Coding DNA Sequence Number=SeqID_30865
MEATSNTRLALGILVADSVVPVGEKVTSKLFQISRSADKWKAFENDIS

SEQ ID NO: 72645 - protein, 124 aa, Zea mays
  Coding DNA Sequence Number=SeqID_30866
MYRTTAGEDQLVADAGECVIAELVPTDAEATVLAMVFVWLWLLVPSWREAARSPAATTPPPPMAGIGSKALAVVAVLAAVVLSVASAAEAPAPSPVSAAAGASAPFAAALVASSAAFLFAAVRH

SEQ ID NO: 72646 - protein, 111 aa, Zea mays
  Coding DNA Sequence Number=SeqID_30867
MAVMMAHSGDGTARAGGGEGMARAQCAGRKAPNLSGKRVNGEAMQRAAAGGDRVDSRSRAGERELIGGARLSKGEGDREGEGALTSGVGLIVAWRERGRGEVGHAGLRTGR

SEQ ID NO: 72647 - protein, 64 aa, Zea mays
  Coding DNA Sequence Number=SeqID_30868
MDDRPVHAPLLNKSRDEWMTTGRPVHAPLLNKSRDEWMTTVPSKKPLQAGPGVLSDLHYKKIGF

SEQ ID NO: 72648 - protein, 79 aa, Zea mays
  Coding DNA Sequence Number=SeqID_30869
MGPGASSGARGHARCGAGIRNRLVIGEFLTVVRGPPWIRPRPWSGYLDVLTMAMATAATCPAPPPFLAGGGGSGTLPLI

SEQ ID NO: 72649 - protein, 55 aa, Zea mays
  Coding DNA Sequence Number=SeqID_30870
MAGAQGPNASERQRRGIHGRGTRQLQREVEADSAGPQEMLSTWITYHIYFHNILV

SEQ ID NO: 72650 - protein, 190 aa, Zea mays
  Coding DNA Sequence Number=SeqID_30871
MVRWLPPPVTADGELPFGHDAVTFSFLVACVAATVTLASSIGSQEAGGAEEAAVEEEVVRLSPELAMHGAIEPVALPSSTSRRRLSISVSKKLSLNIPDKLRLSRREHKDHHHHKVESEDTLWKKGIILGEKCRIPGEREAECADPDDDDIAAANFRRSSYSRPVSRSSSFAMHQPQHDAPGPALHASDT

SEQ ID NO: 72651 - protein, 142 aa, Zea mays
  Coding DNA Sequence Number=SeqID_30872
  Subcellular localization annotation: CTP_CleavageSite=30; ConfidenceScore=5.24e-01
MDDASVTVAATHATKKENVTASWPKGSSPSAVTGGGSHLTIVTGGIPAMGKEVIWLAARRRLFPRCGGNHPFSNWKPERAEEKCCSTDGGNVMPARVKTSSSPDRLDKYQTPTANWKTTNLVQLDNTGYEHLNRELDTKASY

SEQ ID NO: 72652 - protein, 105 aa, Zea mays
  Coding DNA Sequence Number=SeqID_30873
MAGSVQEEVGSGAPLARGEGLQFYMELLDRVLRPRVGVPLGRSTNEELSEPCVVLDTSVKIPISEIFRSPNSRPLLGIRVPFTAERLDFLCKSRLNQFRPQLNRP

SEQ ID NO: 72653 - protein, 102 aa, Zea mays
  Coding DNA Sequence Number=SeqID_30874
MEAIHSLSASETRYAMADLTQLFMTACQEGKRAESQGRILRVVLIYCRSSTKPQHQWPVKPKNFTLDIIYLHDKPNPDNCPQKPNLHRMKMPLQSPANSRVF

SEQ ID NO: 72654 - protein, 61 aa, Zea mays
  Coding DNA Sequence Number=SeqID_30875
MATARSTSSFLPYSLVARWGRSCSVYALEISILLSGIQDSLRAPKVHPMGVAHELRVDYRK

SEQ ID NO: 72655 - protein, 103 aa, Zea mays
  Coding DNA Sequence Number=SeqID_30876
MADGVANDDEVWRRQHDTVDNDGMWRIASSERGAELAAAALAGDEDDSFGSCIGTAASADAVQHSNDKQQHGVEASTDMSGRKGEEGSWESAWWHDENLQRAA

SEQ ID NO: 72656 - protein, 148 aa, Zea mays
  Coding DNA Sequence Number=SeqID_30877
  Gene Ontology: Mol. function=protein transporter activity; Cellular component=membrane; Biological process=intracellular protein transport
  Homolog annotation: Hit_ID=Q9LGF8; Match level="QueryCoverage=93%, HitCoverage=40%, E-value=4e-66, Identity=90%"; Hit description =Putative syntaxin of plants 31
AKRTSVFDDPTLEIQELTSVIKKDITALNTAVVDLQALCNSQNESGSLSKDTTNHSTTVVDNLKNRLMSATKEFKEVLTMRTENLKVHENRRQIFSSSAAKDESNPFIRQRPLVARDPSESSVPPAPWASDSASTPLFQRYGYTHNTP

SEQ ID NO: 72657 - protein, 70 aa, Zea mays
  Coding DNA Sequence Number=SeqID_30878
MNPKGKGMLINDKEKENLYINEPKDDKPTDSGSSHKKRDGKKKRCIKNIIYYDSDASSSSPRDDDDEDSS

SEQ ID NO: 72658 - protein, 222 aa, Zea mays
  Coding DNA Sequence Number=SeqID_30879
MGRDARKTTTLTLSQIVLNDVESDDEDLDDEDLDDGAEHEVEDAPAELAVKTVEALAAPPKDTERQLSKKELKKRELAELDAVLAELGLSGNSTSAAQDAEKEGANQAGDAEKKEDATVPSESRPPRRRKRRTRVQRREEKKHKKQPRGQRRLPVQDLMKKIPTAVDVKERLKKMASMKKKRSSKETDTGAKIAAAEATARSARLAAAKKKEKSHYNQQPVR

SEQ ID NO: 72659 - protein, 141 aa, Zea mays
  Coding DNA Sequence Number=SeqID_30880
  Homolog annotation: Hit_ID=Q5VRC9; Match level="QueryCoverage=54%, HitCoverage=24%, E-value=1e-11, Identity=48%"; Hit description =Putative BRI1-KD interacting protein 128
MVGGGRRGGAAAEEVKLNTGNVFAALESLKKKKKGDKGRAAGPSSRKKHGAGAAQQQQEPPQKDVFWAPAPLTTKSWADVEDDDDDDYFATTAPPRPVWAAAAAAEPAKEEEDVEDAVRAALQEMHLFPVANMAIKGCLTR

SEQ ID NO: 72660 - protein, 98 aa, Zea mays
  Coding DNA Sequence Number=SeqID_30881
  Subcellular localization annotation: CTP_CleavageSite=44; ConfidenceScore=5.78e-01
SRPPPARAFRAATARPAAATPRTPRRHRRVPRCCHPARPAPPARASTPRASSCVAPRAVPPACTYHSGEEVTQERLDELIRGYAALVNVVPSMKAFHW

SEQ ID NO: 72661 - protein, 144 aa, Zea mays
  Coding DNA Sequence Number=SeqID_30882
MEETVANVEGAQGQLLKYLNSISSNRSLASAIRECAQLLPAHATLTVPGGWYLLSLFSYANFRWILASWTMPPFALSPIFVSFVIFIALLARLKRLDANLMISWLVVILYNYPALQFHISTGSMRMPQASPLSETGSWRPTSGA

SEQ ID NO: 72662 - protein, 76 aa, Zea mays
  Coding DNA Sequence Number=SeqID_30883
MARRGGFGEGAPQCHDTVVRVIRVVELTQWTHKSVVLRVHTGLEINNSEFGVRKIILLAMSCSINADNFGIKLKTM

SEQ ID NO: 72663 - protein, 261 aa, Zea mays
  Coding DNA Sequence Number=SeqID_30884
  Gene Ontology: Mol. function=RNA-directed DNA polymerase activity; Cellular component=nucleus; Biological process=RNA-dependent DNA replication
  Homolog annotation: Hit_ID=Q9AWB3; Match level="QueryCoverage=38%, HitCoverage=11%, E-value=9e-48, Identity=91%"; Hit description =Nuclear cap-binding protein CBP80
MVSMNQSAFVKGRNIHDNFLLVQQVARLLHQRKEPHILKLDISKAFDSVSWSSLLEVLRHIGFGNRWCNIICLLLSMASRVLVNGEAGFPIDHRCGLRQGLLQHRISIYPDDVVLFLQLCATDLSLIKMCSKVVVPSSIIETFETLLSSAVTILDDETGNPSWQPRADFYVYCILASLPWAGPELFEQVPDEFERVLFGIQSYISIRRHFDDIAFSVFETDEGHSPNKKGVFGSHLGKHAWAWALGLDVAVWRSFPGEDSN

SEQ ID NO: 72664 - protein, 59 aa, Zea mays
  Coding DNA Sequence Number=SeqID_30885
MSGMASEARSTTHPMLRGPRRLEGRVERKMGMTQSVGGRRALITQITCAGVVPSQDDPR

SEQ ID NO: 72665 - protein, 105 aa, Zea mays
  Coding DNA Sequence Number=SeqID_30886
MATVEVTTVVTTVATGATTTAVGTAAPAVVWQNFIVVDRRVVLQLNTVGWPCLHLRQPSIMGVKAAIHGGGVERKMGMTRSVGGRREMITQITCTDVVPSQDDPR

SEQ ID NO: 72666 - protein, 275 aa, Zea mays
  Coding DNA Sequence Number=SeqID_30887
  Gene Ontology: Mol. function=RNA binding; Cellular component=nucleus; Biological process=mRNA transport
  Homolog annotation: Hit_ID=Q9AWB3; Match level="QueryCoverage=71%, HitCoverage=21%, E-value=3e-85, Identity=76%"; Hit description =Nuclear cap-binding protein CBP80
  Pfam annotation: Domain name=MIF4G_like; Domain location=35-124; Score=-76.6; E_value=0.003; Accession=PF09088.1; Description=MIF4G like
  Pfam annotation: Domain name=MIF4G_like_2; Domain location=140-275; Score=38.4; E_value=6.5e-11; Accession=PF09090.1; Description=MIF4G like
  Pfam module annotation: Pfam domain module=MIF4G_like::MIF4G_like_2; Domain location=35-124::140-275
MRDSILWKWTADGAYSTRLAYRIQFGGSYGPFRFGLIWKAHAENKCNVVFVVLDLGVRVSLFLSCVFEKKTSARSNFQFIWPWQEWSYVKDLPKWAPQRVFVQEVLEREVRLSYFEKIKQSIEDAAELEELLPPKAGPNFKFHSDESNESTDGLKLSKELIGLIRGKKSTYDIILWVEEQIIPKNGTEFALDVVSQTLLDMGSKSFTHLVTILERYNKIISKLCPNEEMQLLLMNGVSAYWKNSTQMTAIAIDRMMGYRLISNLAIVKWVFSRFA

SEQ ID NO: 72667 - protein, 66 aa, Zea mays
  Coding DNA Sequence Number=SeqID_30888
MADKGKGKGIVIDDPRMSIISQKEIAQKASGEKAKRFSTYAFGSSIFTKRQGHVLEAKKASRTVRP

SEQ ID NO: 72668 - protein, 124 aa, Zea mays
  Coding DNA Sequence Number=SeqID_30889
  Gene Ontology: Mol. function=RNA binding
  Homolog annotation: Hit_ID=Q9AWB3; Match level="QueryCoverage=90%, HitCoverage=12%, E-value=3e-55, Identity=90%"; Hit description =Nuclear cap-binding protein CBP80
MSAGWRTLLLRIGDRCAEYGGSADHKEHIETCYGVLSREYEHSRDAIFEFLLQCTEQLPHKIPFFGVLIGLINLENEDFSKAIVDTTQANLEDALHNENRDRIRILLRFLSGLCNFMNTCFLRW
